United States Patent Application Publication US 2007/0083945 A1 - sequence listing, part 24

SEQ ID NO: 162325 - DNA, 473 bp, Glycine max
  unsure (1)..(473): unsure at all n locations
agtgttagattacatntatctttacattatcttgtatttattattacatagaaacatatgattctgattgatatgtaattacctaataatcagtaattgattgatatgtaaccagtattgattctgatttctccattataaataaagatgagattcangacacacaacattacaataaaacactgttatagtccccaaaagtgtcaactttttaacaaattcacactaccattttgtcaactagcaaacaatttcatccctagaatgaccaataattngtataaatgaaaactttcataaccaaagcaacacaagatgccactttctgaatcaacttttatagtatcaactaaaatcataacagagcaggaaaaaatatcactgaaggcttataatttatataactccacatagaatatcacaaggaaattagatgccacctagcatatgcacacacgtctgaatacacacaa

SEQ ID NO: 162326 - DNA, 464 bp, Glycine max
  unsure (1)..(464): unsure at all n locations
gtcacctgcggcatgcaagcttattantcatcctatgggatatatgcttgctttttaagtgaaggtgatcaagcaatggcaagaacttctccattcaaagtcaaagatccattctatgttaacaatatgtcaactgatgaaaaagacaagtgcttttgttgggatgcgaatacaagtttcatgttaattaacaaggtcgtcgaaaaaacaaccaaagttgaagagtcatgacttcattagaagcacatgcgagctttacggctcacctatcggcttacatggcaaataataagaaacaaatggctaatgcggccgtcgaaaatgaagggaagactactacaaccatcgaaattagaaaaatagctaccacgattgtcgaaaatgaaggaatgactactgcaatcgttgaaataaaaaaaagcagctagtgcgactgtaaaaaanaaggaatggatactacgact

SEQ ID NO: 162327 - DNA, 485 bp, Glycine max
  unsure (1)..(485): unsure at all n locations
ntaacccaaagaaaaaactcttctcattaaaatatccaaaactgaaagttccctcatgtaaccattcaacctgaccttagtaaattgattntcctttttaatcatttgaatctgaaactcaaattaactcacagctggaagaaactaatacaccatccacaaatactagacttttagtattgaaagatagtggtttacgacatgaaaataataacaatgacaataattggatatctttttctccccttggattcctctgttcacctcactcctcaactctcttctttggccaaataaataaaatgcatttcaaacaatgaaaatgaagcaacatttatccaanaaagaaaaagaatgtggccaaataacaagaagaaaataatataaatccacaagttatttacaaaanattattgcaattacgagacaatatgcaaaagtgaaagttccctatagcaaggaaagcaagaaccatataactgttg

SEQ ID NO: 162328 - DNA, 451 bp, Glycine max
  unsure (1)..(451): unsure at all n locations
agcttaacagacctacaattctcacacctttattgttaccattctcaacaccgcacaacatttgtccatgttctggggctcaatcgactcatcacccttctacttgtcaaggccactatcccccgacatcagacaatctccctcgacattgggcaacctttttcactcgcaagccgactcaaagctcggggggcttatgtactgtccaagattcacaaaatacacatgtcatgatacgtggcactccaagacacacgtcaatcctccatgtcagccctgacacaaaagcatggacgtccagcccttagcagtcgagctcctcaacgaacatgatatctctaaccatttaattattcanacatattatcatctttntatctcttgacaggtattcaattatctacaaaggttgttatgatgttgttacgtcaccataacaactcttatcaat

SEQ ID NO: 162329 - DNA, 87 bp, Glycine max
  unsure (1)..(87): unsure at all n locations
tagaacaatanacttggccttctcttaattgactttggtgctggcgaccacgancaacaaagtactttcggcacctactatatgttg

SEQ ID NO: 162330 - DNA, 432 bp, Glycine max
  unsure (1)..(432): unsure at all n locations
tattcttaagacggctcattatcaaacacagcctgcattagttggctcacaataggccaatcatatctatggagcattttcttgagcaagtaacctggcctgaagctcaacttccattggtgagacccaacgaggctgctctgcctgagcccacacctgtgcaggtcaattcagagccagctgacccacaatctccagtggtgaatttaacttcttcacctgagctcgaagcagttccaacatctccttctctgattgtcatttctgacgcatcattaaatgaagcggctgcccctcctgattcaccagctgcagaaacagcttgatgtaagctccattagagcttgtaggcctangatcttcttcatcaatggattacttcgcttcttggaagataaatggcagccgaatataatacgaagagagagaaga

SEQ ID NO: 162331 - DNA, 444 bp, Glycine max
  unsure (1)..(444): unsure at all n locations
agcacgccggcatgactgcagtgttttatttacttctttaagctgctatatattaacataatatgacatacttgaatcaccctttgcatacggaatgacctaagacttgattgtgtttaatgtagaagaatgattcattatttagcaaaagaacatgcatttaaattttttagtgtgcaaatatcttttgaatcaatagttacacgttaagaacaacattaatttctaaaggaatagattggaggatatgatgacaaaaaaatcacatacttgaatttacagttaccaagcctgtggtaaataagatatatagtatctctcaaaaaatagatatatagcaatctagttaaaaataaccttntgtagcaagcaagaatccgcactcacagtattacatttaccttggtatccaaccttctttatagccaacatacataattcgac

SEQ ID NO: 162332 - DNA, 342 bp, Glycine max
  unsure (1)..(342): unsure at all n locations
actcactttggagtaatgtaacttgttcgagcgttttnttgaatttgaatgcttaaaagtgtgaataattacaaaatgtatttttctgtgctcaagaaatgttataactcatctacattcgtttaataataatccagaagagattttcttaatgattaaatccttgaaaatagtctggtacctgatccaccttaaaagaatggtttactaagttagacttttataaccaagccatcaaccttttactaactcgtcaactaacctcttactccaaaaccatgtggctccttattctccgataagttctaacacaatatgagggccccccttcttaagccaact

SEQ ID NO: 162333 - DNA, 418 bp, Glycine max
gcctctgatggtaaccaccactgcatgtcatgagtgagtctgtatcattatgatgaaccatcatgatcagcgctaatttgcacctttgaattgagaaagacattataataattgatgcgggggatatagctatcggtgttgctacctccattcatgcttgtggtggttaccatacacactcgagatatattacctggtggagttgcggtggcgatcttgaatggttcatgggttaccgggtcgattcctagggcagtgaggatacgctcgatgtggcttttccaatagttctagatctaagaatctgctcttccgggtaaacctctagccatttgagaccatctgggaaatcataattacataatgacatgcacaaaacaacatcaacgcactgcagaagttatctttcaaaccttaa

SEQ ID NO: 162334 - DNA, 454 bp, Glycine max
  unsure (1)..(454): unsure at all n locations
gcttttcgattcattctatgtaccctgtttggtccacattgtgtttcgcgcatttttattctcgttttgtttactttatataccccctgttgacgtgcttaagccattttacttaagtcgtttctcgctcaacttaaaagtaaaataaatttccaccgaacgtttgaattgtattatccattaacttcggttaaaataaattccgaccgttcggtcatgttgtaaccacgttggaaatcaaaaagaggtaaaaaataatataataatcaaaaagacatcttttagtaaaataaagcggaaaatcaatcggacgttttctctttgggatttctcattcttaatcgaattgattaataactaaagtgaaactaaggctaatatcaactcgcctagtcaagctcgtccacaanaatanggctttgaagttcgtcatttcaattttcactaagtaaaa

SEQ ID NO: 162335 - DNA, 429 bp, Glycine max
  unsure (1)..(429): unsure at all n locations
ntacaaaatgaanactctaaagcctatgcccaactatatagcttttaaaaccgttaaggtttacattatgcttgttgcgtaaatgccngggcgttcctccactcgccaatttcccagctggaaatcacgagagcatggtcgtaccaaatccaaagtactcggaatatcatcttcgcatatcgcgaacgcttgacctttgtctcccgaacccgcacttataaagcttctacttatgtggcagggcgggcttccttcaccttcttgtctccaacgcgaacttcgaccatcgttcttccttcccgcaatgcttcttttcatgtctgcctgagcgggcttatagcctaaaccatacttcccacgatttcttgagtatttatcatgctagctatgccaccgggtntattctaaaccattccggttcaaaccgtt

SEQ ID NO: 162336 - DNA, 375 bp, Glycine max
  unsure (1)..(375): unsure at all n locations
gggagagaagagaagaagaatgggttgcgggagagagtggacgcgattgagttgagtgagatctctgtcgagtgccgatgcganaatattgactatatatagtccccaactntttttaccatgttttctggctcgtgggaattattaaagcttggtttggtttggttttatcactgagacgaggcccaactntgttggcttaagaagtttctttcatttgcttgtgttatgatgggtttcaaataggaggtgggaccgtcttcaacaaataacacattgattaagatatatgatattcttgaattttgaatcttatcaagagatatgataatcaaacggtcttacaaatttgattggatgttagaatttattatg

SEQ ID NO: 162337 - DNA, 432 bp, Glycine max
agcttgtctcagcgtatatgctagactgttaccaacatgctagctatcatcgccaagtaccaagaagagttaggtctagccacggcccacgagcataggatcgccgacgagtatgcccaagtatacgcggaaaaagaggctagaggaagggtgatcgactctttacaccaagaggcaaccatgtggatagatcggattgctcttaccttgaacgggagtcaggaacttccccgattgttagccaaggccaaggcgatggcagacacctactccgcccccgaagaaattcatgggcttctccgctattgtcagcatatgatagacttaatggcccacataattagaaatcgctaggaaacttgtatggtctctcagaccttgactagataccacattttgaaataaaatgagttggtcccatgtgtctactcc

SEQ ID NO: 162338 - DNA, 443 bp, Glycine max
tcagaccaaattttgagacgatccaacggttttcttatactgcgcagcatttttaccgaggcagctccatgttgcttcctcaagaagcttcattaagaggcttcctcaagaagctttcccgtggcttctttgagaagctttctcaagaggcttctttgagaagctagatccttatttacccacacccttctattaactaaattaacctccttgaaaataattacggataaaaataacacaataaataatcgaacatcaaacataattactaataatatatagagatatatatatcagggtgttacaccttgattgcatcatgcatctcttcatggcatcgtaatgggcatatcagtcccgcatttatcatttatcatattcatgcattgcatttgcgtgagtcatcgcattatcatacatcttcatttaacatgctgttgtct

SEQ ID NO: 162339 - DNA, 454 bp, Glycine max
  unsure (1)..(454): unsure at all n locations
agcttgcatatgaaattatgatatagttataacattntctttgaggggaccacatataaaaattaaatgaaattatatttgtaaattaacacattaaatctaaacaataactaaaatgttataataatgtatcacataaaaaaaacaaaatcatgtaaactaaataaaagatataaaataataatgttgtagtggaagaaaagagacttactttttaaaattcattagagcaattctcatggacggatccaaatatctattaaagagaagactaatatttttttctttctttgtaattgcttcaatatctaactcttaataagtaataattgaaaaaagtatctactatttttacatataaacttgaaactatnttttttaaatgataataactgtaatagttataggtaataaaaatgacaaatacataattagttgtacacaattctattat

SEQ ID NO: 162340 - DNA, 422 bp, Glycine max
  unsure (1)..(422): unsure at all n locations
tgcttcctatcttctcaaggcttttcttcccccaaaattgaattggcagctgcggaagtctgatctatatggagagagtgcgcatcatgtccttctccatggagaagtcttctttccactcgattaagaacatagtcatgcgttggatcgtgtatggccctcttttcagcacctcttccttgtccttcatagctttgaaccgaaggatgaaatagccttcatcattgtaatacacctccggtagctgaataaaagttcagaacttaatcattaaatttttcactgcgttcatgctctactcaccgtctatcacatatattatcagagctgattccaatattttgagttctcctccacgtcttcattcttaatttctacctcataacctccatctacctctntcggggccacgttactgagct

SEQ ID NO: 162341 - DNA, 315 bp, Glycine max
agatccaccgtcttgaacggtccttctactattattggttaatatgaaccgttgtaaagtataaaatgaacacttagtgtaatcttcttgctttctcaaagaactacgtaagtctaagctcctcatcacaattgaggatacgtacgagcaaaagccccgatattgtcgaccccctgatactgccaacatcaagcaagcaaaatgaactaacttgaaaggcctgattatggacacttgattaaaggcttccgtcccttgtgacgaacgcgaggtgtgctaatagctttcccgagccgaaaaacaacttttgaacct

SEQ ID NO: 162342 - DNA, 274 bp, Glycine max
  unsure (1)..(274): unsure at all n locations
cgctgccattgaacttgaagaaccaagggactccattgatgaagaagatgcaaggcctacaagctccacatggagctgcatcatgcgggatcaagagcatcttccaccaagtgaagttgctttgctacctctatctttatgttcgatggatacactttaatgccttggtcttcgtcccatgctccgtgtataccctacgttgccttgaggtttggcgctgtatanagtgnagccgaaaccataacgcgattaaatcttcgatctacacttggtc

SEQ ID NO: 162343 - DNA, 413 bp, Glycine max
  unsure (1)..(413): unsure at all n locations
ctgttattgaacctcgctctcggctatttattcctttatttctgaagtttttgggatatcctgatcttgtaaggtaaatatttactgtattttgtctctttcatgaagcatgacattgaactatatgaacatcttaagcttgacttaaattaccatgtttgacaattttttttcatttgcaaaatgaaattgcagtgtgggattgtttgattctcatgcttgtaaagggaaagagtggaaggccatcttaaaagaatggttaaatttgttgaagctgatgaaaaatcccaagtcattntactgtggccagtttcttaaggatgttctgcagcataggttgatgtgcaattcaattatgtatcttatactgcaatgtttctttcacatggtcttctattntaaacatacatttt

SEQ ID NO: 162344 - DNA, 427 bp, Glycine max
  unsure (1)..(427): unsure at all n locations
atcatgaactaccctaaaccaagaaaacagggtagaggcagaaaactctgcccaaaaacacattccaataccacagctttccttactcaaataccccagtaacattctctttgttccgattcgttaaccgttggatcgaacttgaaaatttactggaggtccctagtatataagtctacattttgaccgtttgatctgctagaaaatgtccagaacccaatatgtactacccttttcacaaccagcaatacacaaacattttttgcacaagagccaaattctgctgcacaaaatttgacagctttttgctgcacaaattgggcagatttcgaaatccctcttgccctcatccaattttgctcanattggatcctacaagtccttaatcatgtataaatcatatctaaaccaaagacaagcttcagac

SEQ ID NO: 162345 - DNA, 482 bp, Glycine max
  unsure (1)..(482): unsure at all n locations
ttcatagaattggttgccactntcttattataagaccaaatatcgttcaagttcagaaaagcttttgaaacaccacttcgtttataacaagcacgtgccaatgctcacaccattctagaaggcattgcttctttatgagatcacactttagaatgtgtgcattgttcattttgcaaattcttctattccttgtaaacattagttggtttttgttataatttctcttgcttgtgttccaaacttaagaggcggatttattggtgcaaaacaaggctcttcatgaggataaggatcaattatctccgataggatgattttaagttctgtgcagtaaatgctatcttctggcatgatctatgcaacgcgatattgtagtgcagattctcatcatcactgtagnggattcttatgtttatgtatatgtatatggatgcacgtgtgcatattgtgacaccctctaccccacacatatatgtactaat

SEQ ID NO: 162346 - DNA, 424 bp, Glycine max
  unsure (1)..(424): unsure at all n locations
taacctcatcgtctgtcacagcctttatattttgtgagccatccaatccttgtgttcagactctcaaccacttatgatagccgccgatgatcccattactgcttcgcctaagctctctgtcctttcttcacgccgcatcccatgccttgcgaactccttggagtaccctcgcgttgtggtcactaaaacctcgtgcgatgaaaagcgtgatgctttcgtctgatggcactcctctcatgggacatccttcgcatgaagatagaatcctgattcttccttccttctagcgagggaaccatttaacagacgcctctccatgctagccaaaagttggtgcacaacaaacaattcttgcgccgctcttttacatccncgtcgaacgtgtcatacatggcaaaatgggactgcgggctttcttgcctga

SEQ ID NO: 162347 - DNA, 374 bp, Glycine max
  unsure (1)..(374): unsure at all n locations
actcagcttgcgcacgagtttccacatgctttgtgggggaacattttttatagagagagcangaaatgaagagcctatggttgatacatggacggagatgaaaaagatcatgaggaagcggtatgtgccggctagttactcaagggacttgaaattcaagctccaaaaactaacccaaggcaacaagggggttgaggagtatttcaaggaaatggatgtgctcatgattcaagcaaatattgaagaagatgaggaggtaactatggctcgatttcttaatggtttgactaatgatatccgtgatattgttgagctgcacgagtttgttgaaatggatgatttgcttcacaaagcattccaagtggagcaacaat

SEQ ID NO: 162348 - DNA, 449 bp, Glycine max
gtgctctgtcccggatcttaagtcacctgcggcatgcaagcttcaggataggactcagcactgccggtgcatacggagaaaggataaggcgacccgctctccattactcatagctccatgtcttatagaatcgaaacacgagaaagaaagccatataatgttactatttgcaaacgagaatgaaaagaataagaataatgcgtgggttggactttttgggcgaccacatgtatctttatcgagagattcgcagcagtgttggaaaggaaacaaataaaattgccgtaccatcattgagagaacgaatgcgcttctgatggccttataaaaagctagatcttatgggagaatgaaatccttttggtgtgctataatatggtcttataattatgcctgcatatcacatgtatagatatactgatatagggacatatatagatatctattca

SEQ ID NO: 162349 - DNA, 214 bp, Glycine max
atgagggccacaatgatgttgagaatctgcagtcttatgcacaattttgctgctggaatgtgcaggagaaatgtgtgcttgggctcaaaatgctgatgcatggatggtagtggaaacggatgtccgtattctgttttggacgatttctaaaaaatcccaacggacaacatgtggacgtatgtactggggacctcctatttaaatttctagtcga

SEQ ID NO: 162350 - DNA, 445 bp, Glycine max
agcttgtcttgtgcagaattaatgcatgctatacccagggtacagattttacagcacaccacagtgcctatttcaggaaaagagctctggaggcagcaagaggagcagcttttgtagatatacctaggttttgtaatctcattattgttagggtttcttctataatgttggttggggatttctaaagaacagctgatgtaattattttaatatctaattaattgtgtttcttgtgttcaatgcttctttcagtgcttaaattttgtatgctcttggtctaatcaaccatttgtgtgcctggttaggtgactttagcattgggaaatgtattgttgccatagaacttgaatgaagcaaaattgaaacttagtcttacaagagggatctgaggattaagttttggttttaaatatgttgttacaataatgcctattggtttaagtct

SEQ ID NO: 162351 - DNA, 461 bp, Glycine max
tataaagtccttagtgatccatatcgtgtgtgtgtgtgtgattgcattgaattagatgatgtgcaaagctggggattataacttcagtcgacttacatgaaatacatataactgagacacttgtgtgcttgaaagaaacactatccttgcgaggagtgaagcatacccgatctttctttgatacctatgcgacttgctaacctactttaatctctgagtgcattctttgcatgattccatcatgaaaaccatggcaagtgtgaacttgagggttggaagctgaaattgtttgaaaagtatgcaattatcttagttgttgtgattggttacatcatgaacattgccatggatattacatagtgtagtattagttcacttttgcttcacgacaaacaaagcgttaaatctgggggagtttcataattgatatgcttaagtaatgtgaatatttagatcacata

SEQ ID NO: 162352 - DNA, 452 bp, Glycine max
agcttgacctcaactagtagaatcctcctctactctcccctaagttttgcaacaacaaaacaccaccatccaatgcatgtttaagtataaaagggctaacataaagttttgagacggcaaagcaccatcacccctaagttttggcaacattatatcccatttggttgactcaattcaattactctaatggccacttgttgttttatcatatgttttagttattagagagaaacttgctgagctttatgaatctgagaaacaatggtcaaaagcatctcaaatgcttagtggtattgaccttgattcaggaatctgagaaacagatcattcctgttaacatcagtataccctaactccatgcatggttttggttgtgttcgtctcattgaagcaacatctaggaaaggggttgatactaatgctcatcatgctgagggttttacaaacacact

SEQ ID NO: 162353 - DNA, 478 bp, Glycine max
  unsure (1)..(478): unsure at all n locations
ctcagcttgtggtattagatcatttaatgcttgcattaaacgcatattctgcttcatgcaggaaaaccactatgattggctttcgtgttgatcactataacaaaaaatcagttccttttagtcaaagtagatctatcacagtaaaacacatcttttgatgttgtttggaaacttttagaacttaaacttcatttattcttcataggattcgacaaatcctgaaagaatgtcttgtgagacaatttctgccaaatgaacctcagacacaaagtactaaatgaagtcttaaatgtcatctttaatattgtatcagatcatgacttattcatacttctgtctgaaatatcaaatagaagatcatgaagcataatctgatatcacataagacaaaactttntaaccgtgtatntatttgtatctaataaaaataattaagggtcttgattcatcttanaatatcttttgacttaacaataac

SEQ ID NO: 162354 - DNA, 405 bp, Glycine max
ttcatataataatgaccacggcgatggctaagatgtcatgacagttattcttatgattatttaagctcgtatacatgcatacgggactcacagaagttaatgaaaatttccttttttcttaaatagattcggctaccctaatattaagctagtagctccttgttcacacactgccgccacccatcactggatgagagacacaagcaagcattctcctcgatgactgtttccccacaatgtccaggataataagacatattcagttgtcatatactttcgcgttggcatcagacttggtatattcaatctgatcattgatcttgtcggatccaaaacctgatataaattgctagtaaaaagggtccaagtctaaaacacaccttctacactcggacataatacata

SEQ ID NO: 162355 - DNA, 464 bp, Glycine max
  unsure (1)..(464): unsure at all n locations
tatcttcaacagatttgccaccatgcacgagcttgacattttttcttcaaattttcccacagttcaagcttatcttctcattctcgtccaacactagctattctcaatacaatcaattgtgtgaatcaaaagtcacaggaggttgttctgggtttcttagttatctctattgctttcatcaccattgtaaggagctctgctctatttcatcactgtttccagtctttgattatctctgctgtttatactaaaagaggaaatatgctgttattactgtttcatcaaggtatttgacacttcctatcctatcctattgtntgttcctatctttttaatatatntatgtaaaaagtaataatttttatcctacctagtgctatagagtgcttcaccaaacatagtagtatcttgtacaatattgaatattatacttactataatgtcacgcaaaatacctcttagta

SEQ ID NO: 162356 - DNA, 227 bp, Glycine max
gtcaccgctttatgagcgctgttcaccaactaagcttctaggccatcaacggatggtccttccttccggagcgacgcatgcgcctcaaggactacgagtattctgctttccaagaagaaattttgctccagcgagggacatcactggttactgccatggccaacttcgagccagaaataccccttcagttatatgccaatgcttggccaacacaggatggcgtccgt

SEQ ID NO: 162357 - DNA, 352 bp, Glycine max
  unsure (1)..(352): unsure at all n locations
tggctntanttagatgtgagatattcatgatctacgacttgtgggatccaatgagggaagaattgcatgatggcaatagtgatttctaaaatatgcactatcatgcagacttgtgctgctaaaatgtgctgcacaattgtgtgcttgtgcacaaaatgctaatacatggctggttgtggaaagggttgaacataatgagttctggactatttgtaacagatcccatccgtgaagatgtacacttatgtactacggacctccaatcaaattgtcgagtcgatactactgagaacaaatggaaacgataagaatgtgtctggtgtatttgagcaacgaaagctgtggtattggt

SEQ ID NO: 162358 - DNA, 368 bp, Glycine max
  unsure (1)..(368): unsure at all n locations
agctttgaaagtgcgtagcccaccatntttcatttataatactnggaacgtgtctactatcattgctatcgattcttcctcattgaggtgccacttgagctgccaagttctccacctttgggcgtattctttgaaagaatcgcgccccctttttagcacatatattgtagctgcatcctatacgaagccgttatactgcctaatgaaggcaaccattatgtcctcccagcaatggactcgggaaggttccaagttagtgtaccacgtaacaactaccccagtatgactttcttggaaggaatgtatcaacaattcctcatcttttgcgtatgcccccatcttccgacaatacatctttagatggttct

SEQ ID NO: 162359 - DNA, 390 bp, Glycine max
  unsure (1)..(390): unsure at all n locations
ttntgactgctgattctttggaacctgcctaactctttgttctttggcatcatcaaaataatcttggaaggcattgcttccacaacaacccataaaggatttaactctccataactgggaagcttcctttacaacaaagagaagagaaaaatgaaggattgaagaaatacaagcggtgaggatgtctnctccacctctaggacctcacaatcactcacaaactcatctcaagctctcatgacagcttcctcttcaagctcggttctctgcatgtcttcacacagcaaaatctctcaaactctctagaacttggacctttctctctctagaactatctagacatgtagaagcttcaagaaaaggccaaaactcctttctaaatccaatttc

SEQ ID NO: 162360 - DNA, 313 bp, Glycine max
agcttgaaagctaagacaccttttctcttctttattcccacaccagatagtgcacgagtctgctgcatacactcattgtcctctcccgttcaagcttgactctcaaagggcgatatatctgtgactgtgtgaataagattattaagggttcttacaaacggccatgcaatatacgaatatatgatgctgctgatacacctcctctcaagaaagccttgcccgactaacctgcgattgaaccacgtgtgttcattcgttctcactccactctatatgtctacattgaaatacaccaccatttcctcctccatct

SEQ ID NO: 162361 - DNA, 185 bp, Glycine max
cttcttgagcacatctggatgagatccctctgttgattatatttagaagcccaccgtcttagcaatacggcttacccatggcatctgaataaccattttgacactgaattgggtgagtcaatcctggatgggtatgagactctattggaacactatgaaccgcatgttgactatgtaaaagacga

SEQ ID NO: 162362 - DNA, 435 bp, Glycine max
tcataacatttatttactgctggtaatcgattacagatattgtgtaatcgattacacaatgtaaaatttgaattaaaatgtttattaactgctggtaatcgattaccaatattgtgaaatcgattacacagtgtaaaatttgaattcaaatttctaatagttgttgtaaaccattttggccactggattacatcctctgtaatcgattaccagagagtaaatctcttgaaaaatactttttaacttaaatttcttggccaaaccttttgctatttcaattaggaattcccttcctaaaatactagagatcttcttgatgtcttgtattcttggatcgttgtcttgaattaaacttgagaagcgcattttcatcaaatcatcacgatcatatggcatcatcaaaacatcaaagacaaagtctttgcttttacaatc

SEQ ID NO: 162363 - DNA, 413 bp, Glycine max
taagaaaactatagaggataatgccacggcgactgtctccaatacagctagggaagcggaaccggtgctacagcccgcaataaacttgggccgagatagaaacacaatggtgttcggtcagaggtatagtcctcaagcttacccttatggcttgcctccagacatcactccccgtaccgctctggaagatttgagccaagcccctaccttcgaggggcaactccctccttatgccgactatcccctacaagaagatgatgaaggagatgcccatctaggccctctacttcctctcaaagatccggccccccatgaattaccgcaaccaaacatagtccgccatgtcccatctccacccgcacccgtaaaagaatcagttccctttgcaaaagataagggaaatattgattcac

SEQ ID NO: 162364 - DNA, 403 bp, Glycine max
aagctttcgggcataccatggatcttcccgaccataaccataaaaagaaccgcgactgtgtgcgaagatggtgtgttggcaacatgcctagatgaataccctttgagaactggtctaccaccataagtatagctgggtgtccatggaaatcaggaaacccaattatgatatcgagggagagatccttccatggccgaaatggtactgggagaggacatagcaagccaaccaccctcttagtctcatatttggcatgctgacaatcaacacaagaggcaacgaatttctcaacatcatttcagattccagaccacatgaagctctcgtgaatacgtgctaacatttcttagatgctaaaatgccccacaatgggtgaagaatgatactccctaagcaatgtctg

SEQ ID NO: 162365 - DNA, 312 bp, Glycine max
  unsure (1)..(312): unsure at all n locations
ctttgcttttatcagttagcatggaccgttcagaagcatcaaatcaacacatcactttactgccttctacgagaactacgtaattgtgatttcctctttgatggaggatacgtaggagcaaaagccccgcttttgtccacctcgtgagatggttagaggtccaatgccttagctnttctcaccaagtaaaatggatcattgtaaggtgcaacgccttagatgaccaccttccaagtaaaaagaatcacttgattcggccatattgaaagagctacgtaggtctgatttccttatcacacttgaggaatacgt

SEQ ID NO: 162366 - DNA, 430 bp, Glycine max
  unsure (1)..(430): unsure at all n locations
tgtgaatgaagnnctctttctacattgcttntattttagttttcttgttaactcatatatcatattttggatgtttacttttttctccatacctttgtaacatgttttggcactaccattgatacatagaccacttttcccaggccagtctttgttaaggtatggttagttgttaggataaatgagttaaatatccttctttgctcattacatgcttttggcttaaacttatgcaaattgtaatctatgatcaatgcatgtatgtgacaaggaccanggaatgtaacttgaaactcgaaagtatgatattgaattttgtatgagtatttttctatgcatctaggatcccaaattattaacaactttacaacaaagtcgagaacgaaaagccccatatgttgatcctaatgtagtatctagctttgacaca

SEQ ID NO: 162367 - DNA, 421 bp, Glycine max
  unsure (1)..(421): unsure at all n locations
acaaacaatntgaaacaatcgactaaacctgagaaacacaatcaacttgattaccaggcctgcaggatggcagatcatgaatataatctcaaaagtcgagaacttaaatggcaactttttcttacataacacccaccaacaatagaataattaaattgttgctatttttctatatattgtaaaaaataaaagttaggaatttgaagtttttgaagaaaaaaattacaaaatctaacacatcaactctgtattttggttattaccaactaagctaaatgcaaactaattaactataatttcacagaatatattgaactcacgtccaattcaccaacaattaaccaattacatatgaaatagtgtgcaagtctcacgcctatgacatcctgtacgcacaatggggaagaactgaagacattat

SEQ ID NO: 162368 - DNA, 438 bp, Glycine max
  unsure (1)..(438): unsure at all n locations
tattccgaggacagtntattatcatgcgcaacctgcaagagtttgctcataacaggccaatcataactatggagcattttcttgagcaagtagcctggcctgaagcttaacttccattggtgagactcaatgaggctaccccgactaagcccagtcctacgcaagttgatccagagccagctgacccacaatctctagtggtgaatccactgtcttctcctgagcgtgaagtagttcccccatctccacctctgattatcatctctgatgcatcatcagatgaagcggctgcccctcttgattcaccagcaggagaaacaactgaccttcctacttccccagttggaggaatttctgatctttccgatntgtcatctggagaagcttgtgctctcactgattccccattttagacactgttgacattggtgattcatg

SEQ ID NO: 162369 - DNA, 392 bp, Glycine max
  unsure (1)..(392): unsure at all n locations
tcaagaanaagatggcctcagcaaattccttatttccagaagggaattctatcaatagacctccaatctttaatggagagggttaccactactggaaaacccgaatgcaaatttttatcgaggcaattgatctaaatatctgggaagccattgaaatagggccttatatacccaccacagtagaaagagtttcaatagatggtagttcatcaagtgaaagcataaccatagaaaaacctagagatagatggtctgaagaggatagaaaacgagtacaatacaacctaaaagccaaaaacataataacatctgccctacgaatggatgaatatttcagagtttcaaattgcaagagtgctaaggaaatgtgggacactcttcgattaacacat

SEQ ID NO: 162370 - DNA, 393 bp, Glycine max
  unsure (1)..(393): unsure at all n locations
acaaatgcggcagcaactttattccaagctactgtcactagttntctcgttgcaatatcactagaccaattaaaacaacaaatccacttgtccaaggatttaatcaaagaaactggccatgcataaacttgaaaactatatagtagagtgccttgaataactgattttactagttccactctacccattatagataaaagcgaaccttttcaggaggcacgcttcgattaatacgatcagctatcgagggtaggtgtatcttttttggcttaccananaacaaaggaacactgagatatatgaatagaatagtaccttgcccaaagcctannagagctcgaatggaattggacctactcaagagaagtgatgagccagtaagcgacattttcc

SEQ ID NO: 162371 - DNA, 481 bp, Glycine max
  unsure (1)..(481): unsure at all n locations
actatacatactaagcttcttatccaggctcatcttgggggagaagcttcttcttccatggcttattccctaggggatggcgtcgcctcttacctcttctcctttgtcttccgctgcatctccatggtggaaaatcaccattaaaggacctcattgaagctcaaagatccggcctccatagaagctccacaagcaagcttccatcaaaaaccccctattgtaactganaggtgataacttgtcatggaaggctaaagctttggttgggaatttctgttgatccttgatgtaaatattctttactatcaatttaatggtgttttgatgtgttcactgcttctatctgcacttaattcttgcatgcttttggtctgatcatccatttgggtgtaaagnttggattttagcattgggaaatgttttgaatccttccaactggatagagcanggctagataactgtattgtctggacacggagtg

SEQ ID NO: 162372 - DNA, 452 bp, Glycine max
  unsure (1)..(452): unsure at all n locations
tatacaatntgttgcagaattatcaaatgactccttctaccaaaaattctcaaaatcctcctccattgtttccctacttgccactaccaccatcaatgaattttatgcaaaataatcaaaccctttccactgaaaattctcaaaatcctcctccattttttccctacttgccactaccaccaatgaattttatgcaaaataatcaatccatttccaccaaaaattctcaaaattctcctctaaatttttctacttgccaccaccaccaccaccaatgaattttatgcaaaactatcaaatccccttccactgaaaattctcacaaagttctcaaacttttccttaaatgccacaaaacaattcttccatgtttcgtaagttcccaatagttctagtgatgcataacatcctttcaatgatgatgttgaaatgcagattttcataatttctac

SEQ ID NO: 162373 - DNA, 465 bp, Glycine max
  unsure (1)..(465): unsure at all n locations
ttacgtgacctataaaactaagctnttaatgaatgctntgagattagaccccacaaaccatgatgcatggtttaaccttggattggtttcaaaaatggaaggctcgttacaacaagcggcagattgctttcaagctgcatatgagctgaagctttcagctccagtgcaaaaatttgagtgaccgagaccttgggagtactgttaagtttttgtggttgagttcaaccaagagcattatacaaaaaaccatgagcagcaactgatggaaaagaaaacgtacccatggttaataattgttgagaaacctatatagtaggtatatctagctacttatttatagatgtacttcattatgttccaatggaatgtccttcacatttgacacggaaggacagaagtttggctttccaagtgggatagatttctttataacataatgtcagcagaatggactataagtttttg

SEQ ID NO: 162374 - DNA, 358 bp, Glycine max
  unsure (1)..(358): unsure at all n locations
ctggcctgtngctgttcaggtgctggtggttctgtggatgacattattagaccaaaccgaggagagccgagagaccatacgcatacggaggaaatatcattattctattctaatggagattgttctcaccagcgattcaatcgatggcctaagatagattaattagataactcgatattagcaaaagaagagattggaactaacttgttccttaaagatgagaatcatttatcgactaagctaatccattaaaactgacttactcctcaaatatatgacatgacactatgtactaaatcctattctaaaaactcgaaaataatatatgctgtggttaccaaagtatatcttcaacact

SEQ ID NO: 162375 - DNA, 389 bp, Glycine max
  unsure (1)..(389): unsure at all n locations
acttagaaactcagcttataaagtcttacagaccatattgtgtgtgtgtgttatatcacttgaaaagacgatgtgcccagccgnggattataaagtgacccaacgtagatgacatacacatagctgagacacttgtgtgctcgagagaaacactacccttgtgaggagtgaagcatagctgatctttcgttgatacatgtcgtacttgctaacctactctaatctctgagtgcattttatgcatgattccatcatgacaaccatggcaagagtcaacttaagggttggaagctgacattgtatgaaaagtatgcaaatatcctagctagtgtgattggttacattctgaacatggacgttgatgatacctaagcgtagtattaggtcac

SEQ ID NO: 162376 - DNA, 408 bp, Glycine max
  unsure (1)..(408): unsure at all n locations
ttatcctgctctgcttcanaactgcttaaacaaagcatccaatagctttaatggctctcggtcgcggcaactggcaaggcccttaaataaaaataaaaataaaagttgctttgttaggcttaggctcctaagccatcatgaattttttttagtatatattatgaaattaaataactttttaatagtccgtttaaaagttccattaagcacacttctagattagggcactcctattagcaactacgactagaagtctaacacaacaactctgagaatgtgcatgatgaatacagagaagactttttttgtttaactaaatgaatatagaacaaccgctttttcacatgcaataagatatgaaattttctaactaataccttaaaacaaatcttgttaaaaattaaaact

SEQ ID NO: 162377 - DNA, 478 bp, Glycine max
  unsure (1)..(478): unsure at all n locations
tgtaggattatggggtacccatcatatatgggactaggtggcaatcgggcgatggtgcaagtcgactctccacatccacaaatcacagataaatccaccatccccagttgcccaccttcaactgagctcacgtactcccacgtagcccttatcctcgttcttctcaacaccgggtccccatcaatccctccaagcttccaaaacatccaagcaattcaacatccaaacatcatgagctatccaaaccaagaaaacagggcagaggcagaaaactctgcccaaaacacattccaataccacagctttccttactcaaatacccagtaacattttcttccttccgattcgttaaccgttggatcgaatcgaanaagttactggaggtccctagtacataaatctacattntgaccgttgggatctgctagaaaatgtccagaacccaatatgtacaaccctttccacaaccagcaataca

SEQ ID NO: 162378 - DNA, 259 bp, Glycine max
gcatctcaacattgatggatagtggtcatcatatcatgcaagttagatcacaacagctttaccattttggattaaatcgggatgggattggagttttcacactttcaatattgccacagctgagctatggtgtgtaagtagtcacggcaatataatattgttatgcaacttatgctatgggatgggctattggactttgtgatcataataaccatgttgtctgaagcgggatgggggtcggtctttatctctcaacatt

SEQ ID NO: 162379 - DNA, 457 bp, Glycine max
  unsure (1)..(457): unsure at all n locations
ctcagctttcanattttacatgaattatcctgtctctcctataatgaattaagctgtttttgtgtaatgttggtaacatcacttgaattaccaaaatttcttaaagaatttaattgaactacattgacaatgtgatttcttctattattattcaagatttgaatgcgaccgaagagagtacaagatttggatccaataataaaatagaaaactatcaataacaatatttttaaattacaaattcatgtcaaatccaaagaaattccacatctgcggtgatatatatagtttaaattcatatatataatcaaatatgaatatttacccacttgngttgccgttgtgtagaacatgaaacatgaatcatagattgcatgcactctntattccactgtgatttgagtcacagnttatgattcatgtacaagtgtgagaaaggaaacgttgagtattacat

SEQ ID NO: 162380 - DNA, 466 bp, Glycine max
  unsure (1)..(466): unsure at all n locations
ttaatgtgttctccctcgtggaactactaactgtagtatttgttgctgcccaactatccggtagtgatgacaatggaatcaatgccttcacctcatcctcaaatttaatctgcaccattccaactgggcaagaatagtattaaattcattaatatgatcagttacagagataccttctcccatcttgaggttgaacaatcggcacatcaagtatactttgttggctgccgacgacttctcgtacatatctgataacgccttcattaagcctgtagtagtcttcttgtttatgatgttgaacgcgacattcttggctaatgtcaatctgatcacgccaagagcctgtcgatccagcaagttccattcttcttgcttcatgtcgtctggcttaacccctaataagggctgatacagcttattctaatatagataatcctctatgtgcatcttncaaaagctgaaatct

SEQ ID NO: 162381 - DNA, 468 bp, Glycine max
aactcagcttagccttcctggtaaggaccacctttcagctacaatagcggtttttattgcaaaatatagattacacagcggtggggatgtctcctccacctctaggaacctacaaattaccctaaaacctaagatcctcttgaaagctgggggttttggtgctcccttgcctctttcacataatgcacaattgttctcccagactaaagactctcctctaagcacacattctttttacgccaacttcaactttaaagggctttctgacctcgaaggctcacttatcgccattctcgctctaagtgcgagtaagtgacttttggcttaacgagccaggcacgctaagtgccagaagagacaaactactcgttaggcgagctgatggtgcactgagcgcgtgcatgcgttgcagattctcttcaagattccttgactcactaagcgagctgatgccttgcttagcggatg

SEQ ID NO: 162382 - DNA, 405 bp, Glycine max
  unsure (1)..(405): unsure at all n locations
ttgagccanaatcctgactcaccataaaccttgacccatggtgagaatgtcaatccttaccctcgaaagcaaaaaaagaaaagaaggaaaatttccaatcaaagagaaagcaaaaagaaaagaaaggaaattcccaatcaaagagtgtgagaaagcaaaaagaaaagaaagaaaattcccaaccaaagaatgggagaaagtaaaaaaagggaaggaaagaaagttcctgatcaaagaaactagaagaaatgtgcagaaaggtcttttcaccagacaatatctaaacaatacagaattgtcaccaaatgaacaaaaggaaggaaaggaaaccatgacctanagtggtcttctccctttgattaccaaccaaaatcctgtgcgttggtgacttgctcgcctcgcgtc

SEQ ID NO: 162383 - DNA, 461 bp, Glycine max
  unsure (1)..(461): unsure at all n locations
tctncaatctncaccgttcaacgagaaacttttatatgtctgcgtagtcgctggcggtgtacacgcctatgcgctgcgccacagcggagtattgctcgaatagcctggggtcatccccatcgtacataaggtgcgccggcatcgtgatcttcttctccatcatgtaccctatggccaccattgccccggtggggtccacttccagaagcttctccacgattcttgagtacgcgttctcgtgccgcttctcgtccgctgcgatggtcccgcataggcgcgccagcactggatccccgcccttcttcgcgagccgagccgtgtttccgtgcgccacaaatgttgctcgctcttggaatgacgtgtacacaaaccccaaatatgggttgttgtctgtcccagggtcctacccaatttaatcaaaaccaaatacaatattttcaattcattttaaaagaaaaaat

SEQ ID NO: 162384 - DNA, 406 bp, Glycine max
  unsure (1)..(406): unsure at all n locations
tccactaaaagctagcttagatgttgggctattatcaacataatgaccttaatcgccaagtctgtgttatttcaaatagcaagcaccaattaatataaattatacaaagagaagaaaaaaatagcactggaattaattgatagaaaaactcacagaacaccataatatgataaggtagccatatttaattgaaggcacaaaatggagaatagaaattgaaggtacccatatttaattgattcccagaatccagctttgagctgataagacttaaactttttagttgctgaaacgaacagagaaagcattaccacatataaactatgataagaaaaatgaacacaatggtagaagacaagacagtgagaggcaccaagaatggattggccaanactacgataagcac

SEQ ID NO: 162385 - DNA, 441 bp, Glycine max
  unsure (1)..(441): unsure at all n locations
ntatcgccaacaccgttagcagcttccatgcaaaacgtattcttctccgtaattacttttaaaagagacccctttacgtaaatagttnttaaaggtgacccctttacataaatttgcctcacatttctcaccatatgattcacacctctcaaaatcaaaatcaacgaaaactgaaatagtaattgcaataaaacaaaatcaaagtcatgaaactctaagaccaactccaaactaaaaaacctagcaaaagagagagcaagagagaaagcttcgaagcaaagctccgcgtttgcgtctgcgagagagaatgagcgagagtccaccaccgtgtttgccagagcgagtgaaatatcccacagaatgcctgctctctacggaaatccatgtgtggacggcgtggtggtagtcgccatcgcgatgcacgtctcccctgaacacaca

SEQ ID NO: 162386 - DNA, 412 bp, Glycine max
tgagagatttgacgacaaacattaaatatgtattataatatggatatgcaaagacttaaacgtgtactttctaaatatataaatcaaaacttaaaaataatacaaatgcaggaatcaaatgaatagttaaacgttcatgatatacatgttccattggacatcaaaaaataaattttcgaaattcagtccatttctccttgtaaaatttaccaaggtgagaccttagatttgaaaccgatgacatcttgtgtctggatggaaaaaaaaaatgcatatgtgctgcattatcttctttaatgcctagattcatttcctgcataaggttggtcctttgaacattgctctcattattgtttttgggttctattcagcaattgctactactggtcactttttgccttgtaccttctct

SEQ ID NO: 162387 - DNA, 366 bp, Glycine max
  unsure (1)..(366): unsure at all n locations
tcagagacctactcttggtgactttnttcaagagatggtcttcttggntgaacactgaacacaagggatccatgttccttggggtttattgcaagaaacgggatttgcttcttggttgatcactggacacaaaagaccaacgtcttttgggttcattgcaagaagtgggtacaacttcttggttggaaggtcttcttggttgaacactgaacacaagggaccaatgttccttggggtttattgcaacaagcgggatttgcttcttggtttatcactgaacacaaaagaccaacgtcttttgggttcattgcaagaagtgggtacaacttcttggttgaacactgaacacaagggaccaacgttcct

SEQ ID NO: 162388 - DNA, 493 bp, Glycine max
  unsure (1)..(493): unsure at all n locations
acggaccttaaaactcagctgaaattactcanataaacatagaggattgtataattaccaaaatatctcgaggaagggtttcaagtagagagctctcagagttgagagaaattctgccgttgcacattctcttcacttggggagaaacttccacatcattgaaaactacaatcctttttcttctcggtgttagagtataaatgtaaccgtcaagtccaatgacatgttttcaagtgtaaatttaccaagaaaaaacacacctttttatacctatgagatatatatctaaatatnttagaacataagattttgtattgtgatttatacagcaggaacattcaaatntattagtaggatcataattttatcaagatctatcacatcgaaaggtaggatgaaaatcatcgcagttaccaaagagaattctactcaagtttagtcttggagtagaatatgattgaaaagatgtattgttctcttagtgatcatatat

SEQ ID NO: 162389 - DNA, 474 bp, Glycine max
  unsure (1)..(474): unsure at all n locations
actaagctgctgacacattgacagctttgctgcacaattggcttattcttttccaacttgcccacatccaattttactcaaattggattcaacaagtcctaaatcatgtataaatcatatttaaaccaaaagcaaacttcataccaaggcaaatcaaaatataggtatccaaaacccaccaatttagtgaattctcaaggtttgaaaagtgaaaatgagaattgggtaattntggggtaaactctcatctcaatcaagtctataacattgatttaaacttgctcaaactggttgtaaggtgaaaactccaccgattcaaaatttgacctctcaacacccaatntaccctagaaatggctcttttctttcacatttgtcactcatttgctctgcccaagctttcctacaagtcctaatggacattctaaactagaatcaactcactttagactccaatntccactaaccccaaat

SEQ ID NO: 162390 - DNA, 440 bp, Glycine max
  unsure (1)..(440): unsure at all n locations
cattcccagtgaanattaagtcatcaacattttttctacaattaaaattcttttacctcctcctgttttgacaaagagagtgtgctcatgatcgcatcgttcaaatccctccttcacaaaataggcttcaattttgctataccaagcacgtggtgcttgctttaacccatataaagctttcttaagcttgtagaccttctcttcttcaccctttcgaacataacccggtggttgttccacatacacgtcctctgtcaattctccgtgaagaaatgncgctttgacatctagttgatacacatttcatcccttttgtgctgctagagctaaaaccatccggattgtgttccaccttgctatcggggcaaacacttcgttgtagtcaatcccttgttgctgagcataacctttaactactaatccggctttgagcgtatcaa

SEQ ID NO: 162391 - DNA, 466 bp, Glycine max
actaagctaagctccttaactgcacaaggctcttaaatttgagagtatcttgtgaaccttcacctaacgaagacactgacaaaaacttatcttctccttcttggacaaaggatggcaggctgggggcaagtaaattttcttcccatcaaaccttggatgcaactgtgctcttatacccatatcagctagatcttgacgggtattcaagccatccttcgtcttgccttgaatgttaaggagcgtcccaatcacactgtcacaaacatttttctccacatgcataacatcaatacaatgtctaacgtcaagatcacaccagtacggaagatcaaagaatatggacctcttcttccatatgcaactctgacttttatccttcttttgggtcttcccaaatacagtggtcaggtgttgaactcgctgatatacctactcaccagtcaacggtattcgcgcaatatcatgc

SEQ ID NO: 162392 - DNA, 447 bp, Glycine max
  unsure (1)..(447): unsure at all n locations
gaagggcacattctaccctagnnggaagtttttttttttctattacccatatcganagcgatactagtttcttgtgtgatgaggagaacgggaagcatattgtgatgacccctaaagtttgggaaaagttgaagtacctaaaatacactagaaggggggttgaatagtgtgatggacaaaatatttgtcttttgaaaactttgaaggcttttctcaaacaaatattaatggatgataagtttcgtccaaggggttcgaaatcacattgtatataaaaaccaatttacacaaacataaacacagtagtgtagagggtaactatagaaacaagctattttataaaagcaataaagaagacacagaggttngatactagatcacctcaactcttcaactacatncaattcatctttaaacttgagggtntcactaataatactttgatat

SEQ ID NO: 162393 - DNA, 340 bp, Glycine max
  unsure (1)..(340): unsure at all n locations
cttgcacttcttctgctttcccatcatcaacttccatttttctcatcatctggtccaccatcaagatccatgcctagatcttcaacaaaatcacagatcaaagaaatgcctttgtgtctggttccttcagtggaccttatgaaagttttagtgcccgctcagtctagtagttttttttttttcaaagcacatataggacattntttttacctataagttgaaccaagggtctngttttatctgttgaaacaaatttgtaaggaaatccatccttatccttctgcgtagcttcaatacaacacctctacttgaagcaatcgaattgcaaactaaaacaatc

SEQ ID NO: 162394 - DNA, 418 bp, Glycine max
  unsure (1)..(418): unsure at all n locations
tgtgctattccaagttcattaatcatacctttaagccatatttctttcttcactccttcagctagggccatgtactctgcttcagttgttgaaagagcaacaactgattgttgatttgctttccaactgattgttgtaccaaacaaagtaaacacatatcctgttaaagatttccttgtgtctacatttcctgcaaaatctgcatctacataacctgtgattgctgcctcatatgctgtcttcttgtaccttaatccaactttcgaagatccatttagataccttagtgtccacttcacaacttcccaatgtgcactgccaggatctcccatgaatctgcttataatacttacagcatgagctaagtcaggtctgctacaaaccattccatacanttatgcttcaacaccactggcat

SEQ ID NO: 162395 - DNA, 454 bp, Glycine max
  unsure (1)..(454): unsure at all n locations
actcaagctgaaaccttggatgacagcatctgaattcgcccttatatttttagattccaagattcccaccattcgaaccacccagagcttccccaatgtgtgaaacagatgactcagttttctggtaagccttcaataataatgtcaacatgctctcgaatagtaataggatcaccaatagcactaaaagaatcaacaaggttctgaatctcaatcaaaatactacaaccttcaagagtgagttggcgcagctccgtacgaagttgccttgccttcgcgtttgtgtgagcatgaaagtagttgtggatcttgtcccggagaagccacgaactagtgcagccgatgaactttcaaagcatgggagcagaaatggaggattgaagccacnggagcaacaactggtcttggtgctcctatgcgccatacgcaagagtgacaccaccagagtcacaat

SEQ ID NO: 162396 - DNA, 458 bp, Glycine max
  unsure (1)..(458): unsure at all n locations
tcttccacatgttcattcttacaaagttgttttataattcaattgtatgtaaacacattaggcaaaaggttgtaccttctcattttatcaagaaccctgaaagctgattgcacatcatctgcatcacaatatgagtgaataaatattgaataagtaaaagcgtctggctcgactctttttgacaacatatcatgaaaaatatttttagcttcatccacacgacctcctttgcaaagagcctgtaacaaattattatatgcaagcaaatccactggacatccttgttcaagcattgcttgaaacaggtcacaggctttctctgaatcaccaatctcaccccatccacttatcaaaatgctgtaagttntagcagttaacgagaaacgattcttagcttgatgaanaagttgttgagcctgcttgacattgcttcttttgcataaaatgaacaaaagctt

SEQ ID NO: 162397 - DNA, 441 bp, Glycine max
  unsure (1)..(441): unsure at all n locations
tgcttctacagaacaaggaattaaagtgagttgtctgttttaaaagatagaggaagcaaaagaacatcacctagacgaagatgctcttgacaccacatgatgtagctccatgtggagcttgtaggccttggatcttcttcatcaatgaagtcctttgcttcttgaagtttaatggcagtggaatgaagaaggaagaaagatgattggagacgccacttcaatgagaagatgagtggagagagagggagagaaggagcatgaaattttgtgcctcaaaagaggtctgaactctgaagtgtaattctcaaatgatcaaagttgataaaatgcacacacatggccctctatttatagcctaagtgtcacacagaattggaggggaaattgaattcacttgaatttgaaaatgaattatggagccaaatntattaattatgatta

SEQ ID NO: 162398 - DNA, 424 bp, Glycine max
  unsure (1)..(424): unsure at all n locations
ngaggggctngttntagtccataaagagcctntnttattttgttaactntgtgctcatttccaattttcacataaccagggggttgatcaataaatacctattcctccaaataaccatgtaagaatgctgactntacatctaattgaaatataggccatgccttttgtgttgctagtgcaactactaacctgattgtatcatgtcttgcaactggtgaaaacacttctgtgtaatcaaccccatactggtgcttgtaacccttggccaccaagcgtgccttatatttatccacttcaccattttctttctggtttgttntgaaaatccatttcactcctatggtattatgtncatttggaagatcacacaactcctaagtatcattctctcaatggaatcaaattcatcatccatcgcttttct

SEQ ID NO: 162399 - DNA, 337 bp, Glycine max
tttcgaggggtctcgatatattgacggtactccaatccagacatctcgagtaaaaaagttatttgtcgtttgtattggcttcagagcttcaacattcaatttcgagcgtctcgatatatgatgggactcaatcagacatccgagtaaaaaggtattgtcttttgaattggctcagagcttcaacattcaatttcgagggtctcgatatattacgggactcaatcagacatcccgagtaaaagttattgtcgcttgaattggcttagaggttcaacaatcaatttcgagcgtctcgatatactacgggactcaatcagacatccgagtaaaacgtttt

SEQ ID NO: 162400 - DNA, 455 bp, Glycine max
  unsure (1)..(455): unsure at all n locations
ctgcgattcanattactatagacaaattcagcaaagtgtactctgttcttgaaacaaattgagcactaaatcttaataatctacttgttgaaaatggtattattggcactttggcagatactcgtgtcagcctgagacagaaaaaagttctgttgccaaatcctgattgttctttctactaactctcaatcatttcatttaattaagcattcttgaaagatataataatctcaaagcacatctattcggtggttntataaacaaagcaaagcgtctctagtatacttgtgattattgatataagtactctntttgaacgtacatcaatattggattgaagctcagcattggcttcaggagcaggaaaangctttgcagcacgatcacgtgtatgatgcttctttggaccatcagcctgagctctgcctgcagctcttagtctgaccattcatata

SEQ ID NO: 162401 - DNA, 428 bp, Glycine max
ttgagagctaaggtataaagtcctttagtgtacatgagcatcatggtatattgaagactagtagcacatgaaagaaaaataacatttttaatgagtcagtccttttaataaagaattaattaaagcatgctaatctcgatcacatttttagagtttaattcttatatattgttagtaaaaaaaattacaccattaagcaataaataaattccaaaagatatgatatttttttgttattatattattggtataaagtatttattgattgtattaataattaatatttacaggagttactctaaacaacttgttagctagggatagatatgacggttaagttatttaatgtaaaaattgaccaatttattatatatgaaaatttatgattaattagatgatagtgggttatcaatggatgtaatatttta

SEQ ID NO: 162402 - DNA, 461 bp, Glycine max
ctaagcttgcagacgctggtgacaggctcaagagtaacagaaagtgttttgttttttcccaaacctacatcttcagttgcactagaacttatttttcgatatttcttaattccgttcatatttcttcaaatagcgctagtcaaaactcgattgcgaggaccaaaagggtaaacaacttaatagagactaaaataagatattttaaactataaaaaaataaaagaaaatgctgttacggttatataaaccaaaaagaataactacacccttaaaaataatattagagcaatacttttgcaacctaaacgaattgcagagatagggattttcttattacctttctatcacctcgaaggattatttcacataatgtttataaacaatctgcgttaaaaggcagccctcttacattgatgataataatatatacatgcttgcacttatcatatataatataatgc

SEQ ID NO: 162403 - DNA, 314 bp, Glycine max
aagcccttctagactggaaaagagcgcttgcattaataacgtaagtgaacaattgctatggcttaccactcacaatgatcatttaaacaagtagtaatattatatttacacacggttacatacatgtaaattattagttcgcctcatttatcgtttgcttaatgttttatgttcattaacatctcaattaccaagagaaattctggtgtagatataacattactgttcaacaaatatacagtggggaatatgagccagcttcaaaaccacaaaacgcatagaacattctatcatcaacccacactcaaaatatc

SEQ ID NO: 162404 - DNA, 242 bp, Glycine max
  unsure (1)..(242): unsure at all n locations
aaaagaaatgccccgaaaagggccaatataagttgcgaaataaaacccatgctaaagggcgaaagaaagatactgccattgagccccgagattgcacaagccatctatctatttatgggctaaatggtaattgtcctattcgctcaacattaaaccattntctttattatatggattagtgtattggacttcttcngcaactctatttctctcagtccataccacttaagaaaaaaaaaagc

SEQ ID NO: 162405 - DNA, 380 bp, Glycine max
ttattctcatgattacaattggaaacaactttcattcgaagtgattgctacattgcaacctctatcgtgacaaacttatgagtttcatgagttatatgtctaaatatacactaaaagtgtttattactcaccagtaatccttacaagaacattctccattttcaaaatggtggaatctattgcgatctctaaccacaatttttcgcctagtaatctttgctatgagcttgatcattgcgtggcaatcatcgcatatccttaaatttttcccaactctaagtgttgtgtaagcttcagttgagactagtccgtagcatattgcaagtctctcactatgcacagccaaagccaattccttttgttcatcatcaatatcatgt

SEQ ID NO: 162406 - DNA, 424 bp, Glycine max
  unsure (1)..(424): unsure at all n locations
accttaaaactaccttacaacaaaacctcaaaattgttataaattttattagataaggaggcttcaatgaggtataaatgtgaaggaaccattacttcttaaatcttgattgaatccataatatctagcacattccctttccaagttagccttcctgatatgatattccacgcactaattntctcatttgaggttgtaatactatgttttactaacaaggaaaaaatttctgtaaatcacttatagatgtagtttaatggtattgctgcatcatttttagagcatttctagatatttgtcaatacattgtttttttttnttttggcatgcttcttttgtattaatgcagcacatagaattgttgaaactgtttgacagatttaaagaaatttatttcttttggctggggtataccatgacgtct

SEQ ID NO: 162407 - DNA, 461 bp, Glycine max
  unsure (1)..(461): unsure at all n locations
cgccttgcaaatttcttcaagttttcgcatagattcatctttaattctgcactcactccgtgctttttcaagctaaagccaaagtgtaaaaggaagaaaacattaacttgtattctagaacatggtgaaatagaaaataatttttaatgtgttcaagtaggatcagcaacctaccattgctttcatcttttgaacttcacttgtatcaatttgcttcttaacaggacctaactcaacacccctcactctagttgcaaaattaagtgagctcagtgtctcacctacgtcctggtctgatggacttatttgtacaaacatcacaagtttggagtcacctcctgcaatgttntacgaacaataagcaacgaatgttaccaatatattcttgcataatcaggatcttacttctcaaaaacacaaacacaccaaaagctgaagtgactagacatacctagtgagtc

SEQ ID NO: 162408 - DNA, 343 bp, Glycine max
tttcggtggcaattagtatacaccccttttcgggctcgtggattacgtgggcccatttgtcaccaatggtgatcagtggagggtgatccacaacaatgtctatatcgttcaccgaagaaaaagaaacctcctcaacaggccttgtcaattgttctccagccaccagttttgctcggaaagatcgccaatcaccacttacggtagatacttcatcatcatcaaatggtgatggtgatgacatgtggcaccctgtgatctcatcacaaattttaagatttaaaggagttgatcctgagactatgaaatgagtttaatttatcaaaagcttgacataaacctacga

SEQ ID NO: 162409 - DNA, 435 bp, Glycine max
  unsure (1)..(435): unsure at all n locations
tctcgagcttatgatctgtatgaggatgtgaaacgcatttaagacactctgncacatgtgaaaggtgtgctgttggatgctgaggagaagaaggagcacaagcatgggttgcgcgaatggctcgggcagattcaaaatgtatgcttagatgctgaagatatcttgggtggatttgagtgccaaaaccttataaagcaagttgtcatagcattatgcagcacaaggatgaatgtaggccacttcttttcttcgttcaattctcttgttttgcgtcttaggattgctcatcaaataaataatgttagacgttgattgtattagatagcagctgatgggaacaagtttggtcttgagaagattgatgttgatcacagacttgtgcaaatgacagaaatgacttatttccatgttgatgctttaggggtgttggaagga

SEQ ID NO: 162410 - DNA, 427 bp, Glycine max
tcacatggagctacgtcattgacggtttctcaaatttcttgctacgttaataagcatacctctgtatgtctccatcttgatgtagccttccattgattcctcaaacttgcagactcccccatatttagtcctgcaactgctttccaaactgcaacatcaatgatcatctctacatcattaacagtagagtataaattgccttccatatcaacacgggcacatgtgtagaaaacctttaccaactcaaggtagaagatttttatcttctacaccaatcttaacaaaccatatgcttcaagaaggtagagaaatttaaatccctgttgagagaaccattccaagttcagaaactttggttattcttacattctccatggcataaatcatcttgaagtcagtcttcttgttttcattagtgaaccatgta

SEQ ID NO: 162411 - DNA, 468 bp, Glycine max
  unsure (1)..(468): unsure at all n locations
tctcagcttaaattgaataaaacgttaataactgctggtaatcgattaccatatatgtgtnatcgattacacagtgcaaattttgaattcaaattttaatagctggtgtaaatcaattttggccactggtaatcgattacatcctctggtaatcgattaccaaagagtaaatttcttgaaaaagcctttttaacttaaatttattggccaaagcttttgctacttcaattggaattctcttcctattaaatatactcttcctaagactctagaggctgtcttgatcattcatcttgaatatctttgatttctttgtcttgaataaagctttgagaaacatgtaaccctctggcatcatcaaaacattcatcttgatcctttgtctacgaataaaacataatgttttgagtgtacttgccctgagtcactagaagtgggtcgaatccaagtttgaaaaacccatatctt

SEQ ID NO: 162412 - DNA, 472 bp, Glycine max
  unsure (1)..(472): unsure at all n locations
taagacatctatatatgggttacaacaagcctcctgccagtggtaccttaagtttcacagggtaatttctttatttggttntgatgaatacccatggattaatgcatataccacaaggtcagtgagagtaaaatatgttttcttgttttatatgtagatgatattntacttgcagctaatgatcagtgtttactacatgaggtcaagcaatttctttctaagaattttcacataaaggatatgggtaatgtatctaacgtcattgacattaagattcatagagatagacctcaatgtattttaggtttatcacaggacacatatattaacaaaactttagagagattctggatgagagactattcaccaagtgtcgctttcattgtgaagggtgataggtttaatntgaaccaatgcccacagaatgactttgagaaggaacagatgaaaaacattccttatgcatcaattg

SEQ ID NO: 162413 - DNA, 374 bp, Glycine max
ctcttagagtcctctcacaatgttgaggttgagccatattttcagaatgttcacaatcaaaatgctcaaaatcaccaaccactgaatgcacagactcaccagtaacagaatgctcaagatgttcaaaaggcacaaaatgttcatggagagtaggatgcacactatgcctaactaatctatgaaatgttctatctatttcaggatcaaagggttgtaagtcagatggattgcctctagtcatacactacattcaccatgcacaactagttgccttctcatgcaagtaacagtgtaggtttgaactacagctaccctcaaatgatatccaaatgacttgaaattttgtgaggaacaccctaaaatcattaaaagac

SEQ ID NO: 162414 - DNA, 440 bp, Glycine max
  unsure (1)..(440): unsure at all n locations
ttggttcanatgttgcttgtgggaagacccactttgaattttgatgttgtgatcaccgctcttagagaaaatgagagaatgatgagaactgaaaatgttgatgatgaacacacatgcataatcgtggtggagtctgagtgaagaaggaatcatttaagaagacatgatgggcccagatgaaagattaaaattgcaatcacacccacaacgagatatgagtaacatacaatattactattgcggtgagaatggtcatgtgcaagtgaagtgcaaacaaatgaaggagaacttataaaaattaagagatatgaacaaagatggcgtcaactcccaagcttatgtagtaaaaaatgttgaagatgaagataatgttgtttttgtaacaaacgatgaagttgctaanacaaaatgggtgatggattctactggctcaaaacaca

SEQ ID NO: 162415 - DNA, 451 bp, Glycine max
  unsure (1)..(451): unsure at all n locations
nntgttggagcttcaatggagaatgaagaagaagaaaatggcaacgtgatggagagagagagctgtctgaanagtgtgggggctgagtgaagagagagaaaagcttttttttttttggttttaaataaaagggttttctctttttctattattttattataaactatgccacatgtctctatttgagtggagcaagagggcccactttctcttttgattgtgacccatactcagccacaaaaagtgagaaaaacctgacctttgaaacgctaaaatcctgcctcggtttacgtgccatttctctggttctagttcctcgcgtttctctgcgtccgtcggggccagttttcgaaagtaacccatatatatatcaaaacgctcagaataaaactccgagcgtggttcagagggtggtttcgttaaatttaagtcacaccccaacgatgatttt

SEQ ID NO: 162416 - DNA, 235 bp, Glycine max
taatggttaattgattatgtacctaacaacttagaactttaaaagagtgttatggtatatatgaggcaatagcaattcatgtaagaaggataaaattacctcaattcgatctttatccctaacaacattgtgtgaaggtagctagttatgttttgatttagaaattgtccgtatgtagacttgaataccatgaatttgaattatgttaatgttctgacctctttcttggaatgtt

SEQ ID NO: 162417 - DNA, 397 bp, Glycine max
tcaccggatgacgccgatcgaacatttcctaaccgacgttatgttcttatttcgttcagggattgaattgaaaactcgttatgcgacatctgtcgtgaagtagcgaccgatatttttcagccgacattgcacaattctttttagaaaagctcgctggtcgataatggtctttttacggcagagtaagttttcttgttttggtgttgcataaaatagctacaatgtacttcggctaagtttttcgtgcgagttcaaccgacattttgtttccgccaggaaaacattagcccacctctgcaacaaaaatatttgctaaccgtcttcatgcatatttcattcaacgagtgaatagaaaactcaatagccgaccacggtcgtgaaatagtcccgactgata

SEQ ID NO: 162418 - DNA, 459 bp, Glycine max
  unsure (1)..(459): unsure at all n locations
tatcttctgcgngcttatattcctgcggtgaaattnttatatgctctctttttcttaagtgatgcctttctttttcaattataaaaaataaaatgtgtttatcatctttgatatttaaattcagatcttaacattttaatttacattctttaattgtgtttatcatcttatatctaagagaaaacaaagaaatgtaaattgacaatacttaatttttaacgtaagattgtactaataattctgaactataaaattaattcaattgatgcaaggcggtttaaaatacagcgctattttatataccttctacttgtttacattcctggtttgcaagatttatatacttgttttcttacttgatgattttccttttcaattataaataaattaataaataaatattattatatagattgagcttactctttacttatttaatacaatgcatataagatttac

SEQ ID NO: 162419 - DNA, 441 bp, Glycine max
  unsure (1)..(441): unsure at all n locations
ntctgagaacagaggaaaatgaagacttagttaaattttgttttattttggttagtatttnttagatatccatatttgaaaataaagttgtttatttatgtagagactcatttattataatgtttaaagtattttgaaccattgaaatttctaaattcttattttatggatgctttaaagtatattttttattatgggttgttattgtaacaaaggacattacatctatggtattagagcnaattgatcctaaatcagatcgtggtagtaggtttttttcataaaagaaaatcacatataagcgtataagactgcttgttagaactataaatgtggcatactaatctcatacatattgattgngattgatccacctaatatttgaagggtggtgtgcatactaatctcttagatgttggacttgatcaacctaatatttgt

SEQ ID NO: 162420 - DNA, 368 bp, Glycine max
  unsure (1)..(368): unsure at all n locations
ttacatcagattntagtaatgatccactaacctataatttatataacttaatgccattaacctagggaattaaaggaacttaatggctgagtgtaactgaaattgtggtaaccaaaagtcacccccaacagccatcaagtcagccaccatttggtctcccaaaaggctgatgcctaggttgccaattgggcctttattacaacttgaactaaaccaaactaaagcccttttagttgaataacccacaatatatttttggtcaaccaaatttataacgattgggccattatttagataaactaaacactcacattgagacaaagtggtgccatttagtcctcctncatttgggccatgatacaactcac

SEQ ID NO: 162421 - DNA, 459 bp, Glycine max
  unsure (1)..(459): unsure at all n locations
tggcatccccgaccggcttagcatttcattgactggtgtgatagtatgcctaagaatctatataatataggattgtagatatcttgatttagattgtttgagttcgtttgtggaaaatgaaggtttttgccatagatccatactgcgtttgggggttgaatttttgagatattataactagataaacacttggttcccttgagagtttagtgaattgtaagtgtaacgctctaggttttgtgtattaggaatataccttaaggagaatcctccctaggacattaatgttatactttctataaattattgntgttgttgttgtttntgaagatattatattattacgattattttttattatattatagttttgtgtgattgttatgcaattatgtaagtgttgtagttattatattgatgttacgagaatgctangtttagttcttataattagaatgc

SEQ ID NO: 162422 - DNA, 406 bp, Glycine max
  unsure (1)..(406): unsure at all n locations
tcangatcttgatgataatgatgattcattnggaacttattgttgaaatttaaaaatatttgatccttctattcatgttttctatacctgtcatgttaacttttctttcaaattctgtttcataatccatttgtttaaaatttcaatatatctaagttatttgctaagcaatgcccctattaaggaacatacttttgtttggaccaaggtgcttaatatggttgatacaaatgatgctttatagattcttangccttatgtaactagtttgaatttctcctgctggctgtgttatgtttattggtgctcagagacaaagtcatcctctcatttttggagctgctttgaagctctggaaatgcccttctggcatttttgtaaaacaattggaatttggaagtgtttt

SEQ ID NO: 162423 - DNA, 413 bp, Glycine max
  unsure (1)..(413): unsure at all n locations
tgaaaaaaaaaaagtccctactacaaagactacttaaaatgccttgtgtcgcaacgtgccctttgcgggcgagcgagggcgaggctcacgggtgcgctttccaaaggaggaaaggtgcgcggagtcgccaccaacgtttatttgtggaaaacgtcagaaaaaccgaaggaaaccggtcaaaatgaaaattctaagttcgggagttctatttacgcttgaggaaggtattaacacctcttacgtttgtctcgaaggacaacagcctatcttttagatttgtggaattgtgttatcttaatttctctttatttcttgaggtcgacaaaagcggngcttttgctcctacgtaccctcctttggagaggaaatcagacctacgtagttctttcttatgcatggatcaagtgattctt

SEQ ID NO: 162424 - DNA, 466 bp, Glycine max
  unsure (1)..(466): unsure at all n locations
tggcactatcaacactataaggcaaattcccanataaagcttggtggcagaggaatcaaaatcttgttctgccaccgcttctccttcattctcctccactttctcttcttcaactaaaccagcaccatcatcatccacaacaacaacagcctcttcttgtgcaacagcagcagaaattctaggtccccacaacttgtgcgaattaatggacaaaggttccaccaagtgtgacccaaacatgccacggtttgagggcactgttgttatgagagggtctattatggagcaattcttggaggaacgaagacatttgacactgttaatagaagaagaaaacaaggaagctatgcctgcagcaacaatggcagccatgttgttgttgtgatgtaatgcaactcacaagtgtacattacaagtgattttgatcactttatacatgatgaccatgatgatgatgagagagaaa

SEQ ID NO: 162425 - DNA, 458 bp, Glycine max
  unsure (1)..(458): unsure at all n locations
cattatgatgtctcactccaaattcaaacctattttaaaagtttattttgggccaacatgctactaatagaacaaaagttgaaaactagtggatcatccactatgattttgtcacgcgtctaaaagaactcttcaacatttacataagtatttctatcttttataagtgtagtccaataaagagtggattcactcatactataatctatcaatnttagattgttctttattacttaatttaaattgtcatttgaatctatcatgattgaaacaaatttagaaaggaattattcaagatcaattcactacggaatcatgaagagcttgctntatttagaaagattcacaccttcaattgtcaatgcgccataaagactgacaatggtaaaatattgaatgcattgacccccaagaagatctactctttcaacaactataaaaggcaacttatttcatgg

SEQ ID NO: 162426 - DNA, 464 bp, Glycine max
  unsure (1)..(464): unsure at all n locations
tctattataaagaanacccanaaaagcttaaattaaatggcagctacaaatatgataacattgatgaaaaaatgttcaacagtgaagcaggcaaagcaaatccatgcccacatattgatcaatggttttacctttcttcgaccacttttaatccatcgcatgcttctttgggatgttactaactacagaactatggcaaactatgcctactcgatgcttcatcattngcacattccagattccttctcgtggggttgtgtgattcgattcttctctcaaaagtgtctattcactngaagctgttctctctatgttcaaatgcacaggacgagcttgtgtccaacttcacatgctgtatcctctgcactcaagtcatgtgctatgattcatgacatgttgtgtggcatgtcaattcatggacaagttcatgtttttggatttaacaacttgtgttatgtacaaac

SEQ ID NO: 162427 - DNA, 465 bp, Glycine max
  unsure (1)..(465): unsure at all n locations
actcagcttgttttacaatcggggcagtaaccaataagtttgaccatatttctttgtgaagctaaccaatctgtnggataaacagggagctgtaggatcagcaaaacctgtagataggccggatcatgaggtcgatgatcccctatatctgatgagattaaccatcccacaactttttctgaagccattgcaggttatgtgggatgctaccgtgtttggggtgtttaatgaacacttccccttgtacataaagaatgaagatctgtctgaaatagcacacgatggtcaatgtctcagcatatctattatacagttgtagattctgtaagtcaatttagattattgttaattacctaaattattggtttaaattcatacataatttactttgtgttaacaacaataggcatatgactgagacaagtatgcgagcanganatgccgatgtgtatggattccttgagc

SEQ ID NO: 162428 - DNA, 297 bp, Glycine max
  unsure (1)..(297): unsure at all n locations
tgacggcgaatgcaaccataattgaaatcccatccgtcatctangtctgtaatttgtggcgatatcaataaatacgaccaaactgtaacgcaattgcgatccacgtttaaaacctttcttatcttttatttgttatttttttatcaataaatattaattgctaatttatcagctcttattaataaacagaattgaacccgcaaacttattttccttcttaaccacccaaccaacctttttcttcaatttgatgccaaagttgatggtacaacaccctggtctcttggcttctggggt

SEQ ID NO: 162429 - DNA, 449 bp, Glycine max
  unsure (1)..(449): unsure at all n locations
tcaagaaaaagatggcctcagcaaattccttatttccagtttggaattctatcaatagacctncaatctttaatggagagggttaccactactggaaaacccgaatgcaaatttttatcgaggcaatagatctaaatatctgggaagccatagaaatagggccttatatacccaccacagtagaaagagtttcaatagatggtagttcatcaagtgaaagcataaccatacaaaaacctagagatagatggtctgaagaggatagaaaacgagtacaatacaacctaagagccgaaaacataataacatctgtcctaggaatggatgactatttcagagtttcaaatggtaaaatggtaacgaaatgtggacactcttcgattacacatgaaggaactacagattgtanaagatctaggataaatgcactaactcatgagtatgaatat

SEQ ID NO: 162430 - DNA, 450 bp, Glycine max
  unsure (1)..(450): unsure at all n locations
ctttcgggcctttcctgcgaagagactattgtattttagttttaccaaaaatgctactcttaaaaccaaaatggcgtacaacctcctccaataaacacaaacatcaattgtaatttagagcaaactcatgcacatacttccttacgagcattcactcgcacaagatattcttctaactaagaaaaatgcacccatgcacaatcaaggcaccttcgttacctagattatttatatgtacttccaaggtgtatttgctacctacatcacatgcacttccttggctaaatttacatacatgcatactcaaagcatcttggctaccaaaaattgcacacgtgcacattctggtanttctaatacctatgcatatacagaacttcgtgataaatcttggctatctacacaataaggtgctacatttcatgctntattcaagtggtgttactacct

SEQ ID NO: 162431 - DNA, 439 bp, Glycine max
tcagcagatgatgaattgtcaactcttctctcaatcaaatccattctcattgacccgatgaagcatctgaaggattggcaaacaccaagcaatgtgacacagccaggctcacctcattgtaactggactggagttggttgcaactcgaaaggctctgtagagagtcttgacctctccaacatgaacctcagcggtcgtgtttccaaccgcattcaatctctttcaagtctatcttctttcaacataagatgtaacaactttgcttcatcactgcccaaatcactgtccaacctcacctctctaaaagctttgatgtgagccagaactacttcactggcagcttccccactggtcttggaagactacaggcttgagattaatcaatgcatcgagcgatgaattctcaggttttctttccgaggatattggaaatgcaaca

SEQ ID NO: 162432 - DNA, 405 bp, Glycine max
  unsure (1)..(405): unsure at all n locations
tcgtctgcagatccctcatgtaagactacacccaattttttctgtctcttangtttagactaacttaaactgagtttcgtccgcagatccctcatgtaagactagactcagctcgagcagcttactaaagtttagcctaatttagcctaagcttcatctgcaaatccctcatgtaagactaggcttaacctaaacaacattattgtaacaccataattaaaaccaaaacttaacccgcagatccatcatgtaaggctaagtttcaatcctacttcaatcaagttctaaggacccaatacattttccaatgctaaagtcacctaactgtgcacacaaatcggtgatcaaaccaaaggcatacaaacattaagcattgaaggaagcattggacatagaaaacataat

SEQ ID NO: 162433 - DNA, 382 bp, Glycine max
cgctttttgaaattccaagacactagagagctctcaagtatatgacatgtcccacttgtacttttcctatctaatttgcatcctgaaaaatcaaaatactaaaaacctgttaagtttaaggaggtacctttgggataccacaaatttacattggttgtacccttaagatacttaatgatccttttaacagtagttaagtgagattcctttggatcgaactggtatcttgcacataagataatgcttatagcatgatatccgatatacatgcaattaagtagagaagtgatctgatcatacctctatatcttgatcacccactgtttaccttttcatccaagtcagggaggttgatgaactataggagtagatgttttttgca

SEQ ID NO: 162434 - DNA, 483 bp, Glycine max
  unsure (1)..(483): unsure at all n locations
gctattacggacctataaaactcagcttgaggattatggggtacccatcacatgtggtactatgtggcggncgggcgatggtgcacaacaagtgttccacatccacaaagcgcgcataaacccaccatcccctgttgcccacctccaactgagctcacgtactcccacgtagcccatatcctcgtttctctcaacaccgggtccccatcaatcctcccaagctttcccaacatccaagtaatacaacattcaaacagcacaaattatcacagccaagcaaaatagggcaaaggcagaaaaactctgcccaaaacaccaaccaaaatcacagcttttctcacttaaagaccccagtaacaattccttcgttccaattcgttaaccgttggatcgactcgcaaattttactggaagtctatagtacttaagcctacattgtgaccggtgggatctactaagcaacatctagaactcattctggct

SEQ ID NO: 162435 - DNA, 386 bp, Glycine max
  unsure (1)..(386): unsure at all n locations
ntatacggatcaccactcgggtatctncgctcgtcagcgtgactcaatagtcagtatgacagatcttgtgagcgcggaagatgacgtaagtctccgcgtgtaaacgggcttgtcggccgcgattgacgaagggcgcaggagacgactttagtctctgcgtgctatcaggcttttcggctttcaaatagcaaaaaggtttatacggataaccacgcgggtatctccgcccgtcagcgtgactcaaaagtcagtatgacagatcttgtgagcgcgtaagatgacgtaaatctccgcatgtcaacgcgcttgttggccgcgtttgacgaagggcgcangagacgaccttaatctctgcgtgctatcagggctttcgtcttacagatagc

SEQ ID NO: 162436 - DNA, 461 bp, Glycine max
  unsure (1)..(461): unsure at all n locations
tgaccctatcttagtaatagttggtggcaatgaattgctgaaggacatagcagcggactatgcaacaaggttaagagaacaagggaagaacattgaatacgttgagtttgaggggaaggaacatggctttctcactcatgattcgcactcagaggctgcagaagagctcgtgcaaatcattaaacgattcatgcttgaaaattctaattagaatatatatgtgaaaaaaaaaatatcatcaaagggtgttagacttttcatatgtagtgatctagagttaatccatgttttctagtttggtaaaaagggtaataagtgtacgttggttgcagatggagaatgtagtcaattgttaattttatatatgttatntttaactagaanatgctgcattgcacnnagtgtattgctatcttttttcttctgtgtaatcctctaaaaaagagtaatttacaccgttg

SEQ ID NO: 162437 - DNA, 456 bp, Glycine max
  unsure (1)..(456): unsure at all n locations
tctctcangaacagaagccttctgcttatatttacgccttttgggtgcaaaaattggcaaacactgttccattagaaccatcaacccagtttctaaccctgagttaatgtcaataagcgatggtgtccatcttggtgatttcagcaagataatcaccggctttcactattccaatggatatgcttgtggaaaagtagaggttcaggataattcagttgtggggagtcaaagcctaatcctcccaggttctgttgtagaaaagaatgtcattctaggtgcactttcagttgctccaatgaattctatccttcatgagggtagcgtgtatatcggatcttaaacccgagttgcaaccacaaactcttcgtatcatttatatgaaaggatatacgagatggacatggagttcacaatagtagttgcacacatggctgccaatttaacccgcactactat

SEQ ID NO: 162438 - DNA, 353 bp, Glycine max
agatatgaccatttcaatttctcgagagctttcgttgttcaatatcgagcgtctcgatatattatgcgcctgaatcggacctctgagtgaaaagtaatgaccatttgaatttctcgagagcttccgatgttcaatttcgagcgtctcgatatattatgcgcctgaatcggacctccgagtgaaaggctatgaccatttgaatttcttgagagcttccgttgttcaatttggagcgtctagatatattatgcgcttgaatcagacctccgagttgaaagttatgaccattataatttctcgagagctttcgttgttcaattttgagcgtctcgatatattatgcgcctgaatcg

SEQ ID NO: 162439 - DNA, 378 bp, Glycine max
aaagaatgttatttatcatttaacaagttccactaaaataatctttatactgaataaaaaaacaaatatctaagctatgttcaataaaagtaggcaaaactagttagtaggtaaaaactgaaagttgattactgaaagcttttaaattaggttattaatttataaatggttgataaaactatttattgaagtaattaaaaaatataaaatgacatacatagatatatctatatgatcattttatatgaaactgtacttcagtttatggataaaaatatattttcaggtcttataattgtaattttttaaataatcttaaacctctctaaatttttttataaataaatatttttacatatgtttacatattatggatgt

SEQ ID NO: 162440 - DNA, 415 bp, Glycine max
  unsure (1)..(415): unsure at all n locations
tctgtctgctgactaactattcttatgtgagntcacactcttgttctttctttgttcaacatgcatatttggtcaaattcatgaaaagaaacacaaatctcatcttcagcatgcattcaatntaaaacaaggcatacattcatttcacaaaataagaaaaaagtgtttcactgccatattataaaaaataagttaaactgttcacaatgcttcaggataagcatactaactactcatatataaaactagcagtatatgtagatataatggaaatattgtacgaaaaacaaatttataatataaatagatcaacaagcacaaagtgtcatcaagaaataaaattcctgtgactggtccctgatgtcctgtatctaaacattcttctcatctattagatgccatactggagtagttg

SEQ ID NO: 162441 - DNA, 430 bp, Glycine max
  unsure (1)..(430): unsure at all n locations
gtgcactttgatgcaatcctactccgcaagggcattggatataataactccaagcagattgggccagagatgcatgagaaggccctagggttcttatgagccttaggatagatttcgggcccatgggctaagtaccaacccgcttatctttgtaaatattagattaaggcttcattatttttgggccttgtatttagggctccataatgtacgtagggtaccctataaatataggatttttcagccctagtattttanggcacctagactagttgtagtattaggggtagttttgtaatttcacatgcactaagtggatatctgatgtgtgtgggtggaaataaaattaattgaattggtagatgcccaatacaattaaatttagagggggaagtgagcctttgcttactacaccccattgcacatcata

SEQ ID NO: 162442 - DNA, 320 bp, Glycine max
tacgctaaatgcccagatgcccaccatacgaaccacccagagctcccccaatgcgtgaaacagacgagcgaatatcctggcgagccctcaataataatgccagcacgccctcgacacagaaaaagatcaccaatagcctagaagaatcaacaaggcgctgaatctaaatcaagagactacaacctgcaagagggagccggcgcagcaccgtacgaaagacgcatgccgtccgcgttgcgagagcatgaaagtagtcgcggatcttgttccggacaagccacgaactagtgacaccgacgaacttcaaagcatgggagcag

SEQ ID NO: 162443 - DNA, 345 bp, Glycine max
  unsure (1)..(345): unsure at all n locations
ngtacgcacatcgntcgcgtgtatgatatccactccactangtttgaagtagaagagagcttcaaccctataacgcaatgtggcggacaaaagtgggcagtaaacttgaatgatcgtcattggcaatgcggaaggtattctgcgcttcactatccatgttcacacattattgcagtttgtggttacgtgagcatgaactactaccaatatatagatgttgtatatacaaatgaggacatcttataagcttactccacacaatagtggcctcttgggaatgaaacggctattcctccttctaatgacgcatggacacttattcctgacccaactacaactcgtgcg

SEQ ID NO: 162444 - DNA, 422 bp, Glycine max
  unsure (1)..(422): unsure at all n locations
tcttcttggtttctcccccatttgaaaacaacattnttcttaattatcttattcaaaggtgctgccaaggtactaaaatccttcacaaatcacctataaaaacttgctaggccatgaaaacttctcacctcggtcacacttttaggtgtaggccactcttggatagccttgaccttttcttcatcaacttgaacccctttggaactcactacaaaaccaagaaacacaacatggtctttgcaaaaaattcatttttcaaggttaacatacaattgttccttcctaagcacacacaacaccgattttaagtgtgcaacatgcaaatcaagggttgtgctatgaacaaggatatcatcaaagtacaccaccacaaatttaccaatgaattctctcaaaacatggttcattaatctcataaaagt

SEQ ID NO: 162445 - DNA, 402 bp, Glycine max
taacatgtagagaatggaacacatcatcgaaagtatcctataaggaatgtgttcggttctgcaagttaaggaggttgaagtataacttctcaatggttcttttgaaaaattgcatttgcaggtgcaaaaaaaaaaaaaaagaaaaggactacctatataagcatgaagtttagccgcttcaagaagttgggacttggctttgatatgcttatgaaggataaggacacaggccagtaaaactagtgtcgagcaagagtaatgttataaactattgtgcagattatcttcatgtattcattatgaatagaaagggttcaatccttagtgacaccctgatattcgaatatttgaaacgtataatttgctaagatgaaattcaatcgtcacgatatttcatctatg

SEQ ID NO: 162446 - DNA, 447 bp, Glycine max
aaaactcagcttgcaaggaaggggacgaccttagcaagagagatatatattctgaggaggcaaccgaatttctgagaatcattcaacagagtgaattcaaagtaattgagcaattgaacaaaactccagcaaagatctttctattaggctactcatgaatttcgagccttgtcgggcattattggtaaaaatcttgaacgaggcccatgtagtgcaagacatatcggtggagggtttcaggggaataatcaacaacatcaccgtaaacaaccacctgacctttgctgacaaggagatgccccttgagggcacgggacacaacaaagctctgcacgtgtatgttaagtgcatggacgacataatggccaaagtactcatcgacaatggctcttctctcaatgtcatgcccacactacattggattaattccatttgatgcctctatat

SEQ ID NO: 162447 - DNA, 447 bp, Glycine max
atcctttgttgttacgtcaatggtgtctgaaacattgagttaactatgtagcccgaaactacttcattagaagtcattactgaatcatctgacattcctacatattgaatatgtatagtagttgtgttattctaataggatttagttataatgttatgagcaagtttgtgataacattctgtgggtattctatgtaatgaagacatagctaggtggatttcaacaatatcattagtgaaaagctttctaaaaaatgaccccactattcaaacgatatttgctcacgtcactgatgtgtatatgatgaccacatgtgctaatataaatacatttgcaaagcaatcagattaacatcatatggtagtaactgcagggttattcacaaatctgcaagttgaatagcttatgacatctactcttgataatttgatgagcatatattttttt

SEQ ID NO: 162448 - DNA, 394 bp, Glycine max
  unsure (1)..(394): unsure at all n locations
ntcatagaattggttgccactntcttattataagaccaaatagcgttcaagttcagaaaagcttttgaaacaccacttcgtttataacaagcacgtgccaatgctcacaccattctagaaggcattgcttctttatgagatcacactttaaaatgtgtgcattgttcattttgcaaattcttctattccttgtaaacattgtttggtttttgttataatttctcttgcttgtgttccaaacttaagaggcggatttattggtgcaaaacaaggctcttcatgaggataaggatcaattatctccgataggtttgatttaagttctgtgcagtaaatgctttcttctggcatgatctatgncagggcgatatttagtgcagtttctcatcatcac

SEQ ID NO: 162449 - DNA, 326 bp, Glycine max
ttggagaacatggtatggaatggtgagcgtcattcttagtcaaagtgtatttgactgggatagcataaagtacatgattaccgttgaaaatgaaattgcatggagtgaatatgttaacgtagccaattatcttttaattttattcaatagtagttattatttgtgttgctattaacatgcttctattttttttcaagtcacatgaagaggccaaacaatttcgattcaaagtcattcctaattgggatgatattgttgacctatgtgcaaaggatagagctattggactcggagcaaaacatgcattagatgcagatgatatcatg

SEQ ID NO: 162450 - DNA, 380 bp, Glycine max
  unsure (1)..(380): unsure at all n locations
ctaagcttgacggggtgctttatggaggatacgagagagaggacggggaagctctaanttgagcgaataaaggaaggaggagaagtgggacctttgaagagtagctcataagagcttcatttatgagaggtacaacgagtgatacacatgcgtctatgtataatatacgtaggtaccgtgagaagctttcttgagaagacttccttgagaaggtactttgacaaaaccttcttgacaggctagaggttagctacacacccctctctcatagctaagctcaccttctgagatgaagctagactagctaccccccttatagctattaccccaggacaatcatgagatcgtaaagatgctctacaagactctctaatgcctcg

SEQ ID NO: 162451 - DNA, 340 bp, Glycine max
  unsure (1)..(340): unsure at all n locations
taataaagtccttagtgatccatatcgtgtgtgtgtgtgtgatngcattgaattagatgatgtgcaaagatggggattataacttcagtcgacttacatgaaatacatattactgaaacacttgtgtgcttgaaagaaacactagccttgtgaggagtgaagcatagttgatctttctttgatacctatcgtacttgctaacctactttaatctctgagtgcattctttgcatgattccatcatgaaaaccatggcaagtgtgaacttgagggttggaagctgaaattgtttgaaaagtatgcaattatcttagttgttgtgattgggtacatcatgaac

SEQ ID NO: 162452 - DNA, 369 bp, Glycine max
  unsure (1)..(369): unsure at all n locations
tatcttcaacagattagccaccatgcacagcttgacagtttacccaaattnttcccacagctcaagcttatcttctcattctcgtccaacactagccattctcaatacaatcaattgtgtgaatcaaaagtcacacgaggttgctctgggtttcttaagtatctctattgctttcatcaccattcgtaagagctctgctctatttcatcactgtttccagccttagattatctctgctggttatactataagaggaaatatgctgttattactgttacatcaaggtatttgacacttcctatcctatcctattgtttgttcctatccttttaatatatttatgtaaaaagaataaattttaatctacct

SEQ ID NO: 162453 - DNA, 332 bp, Glycine max
  unsure (1)..(332): unsure at all n locations
tcganatcaanactaaacggctgaacgtcgatgaatgattaanaacgaacgaagaacgacaaataacggcggagaatgttagcggcattgatcatgacaacattaacgaagcgtctcggcttggatgttttccttcattcttcttctcctcactaattttaaacgaattctaagtgccaaaggtgtctaacctttttgcctcacccccccccccacaccattntatacaaaaatggtggaggttgatgtcgcccagctcgcccatgcgagcttatagctttcagctgaagcaacatgctcgcccaagcaatctgttgctacctctataacat

SEQ ID NO: 162454 - DNA, 344 bp, Glycine max
  unsure (1)..(344): unsure at all n locations
ntntgactcctgattctttggaacctgcctaactcttgattctttggcatcatcaaaataatcttggaaggcattgcttccacaacaacccataaaggatttagctctccataactgggaagcttcctttacaacaaagagaagagaaaaatgaaggattgaagaaatacaagcggtgaggatgtctcctccacctctaggacctcacaatcactcacaaactcatctcaagctctcaagacagcttcctcttcaagctcggttctctgcaggtcttcacacagcaaaatctctcaaactctctagaacttggacctttctctctctagaactatctagacatg

SEQ ID NO: 162455 - DNA, 338 bp, Glycine max
  unsure (1)..(338): unsure at all n locations
gacctataaaactcagcttaaacccagatatatactacattgtcttcttgtggaacaagngcaccagcatcagtttctctcttaaccttacaatgatagaagggaggagcatggtagcatagcttcatcgtcatggcacgttgacaacgaggatcacgagctagttcattctcggtcttgtacaggatccacagtttgaaccctccaagcccctgcgccacctatccgaaagtatatcacgcgctcgtgaccaacatatccatcatgctcaataggtaaaattctgcccaagctttatgtgtgtgcatcatcttctctgtgagtagatacccgtcatg

SEQ ID NO: 162456 - DNA, 419 bp, Glycine max
tcttgcacaggaagctgctcacaggatgaattatgatgattttcttatatcgtcgtgctttgcgaatgctattaagtttgatttttaatgtactcttttaattattgacttcataaaaacattagttattcacatgagctacagtatttcgctaaaatcttctgccgactgttccaattcctgaacccttggattactgtaataatggtaatggactcttttcgggtactttatgaacgaactgcattatgatgcagctgcatacaattttttatatttgattctccatggctatagtataaaatagattgattgagaggtcctctaaacaaagtaactgcatagaatcattctgattctgctggccatatttaacttttgacaaatcgaagtgttcaagtaaactgcacttacaccgt

SEQ ID NO: 162457 - DNA, 316 bp, Glycine max
tctgacgccttaaacggccctcttttctttgatgagttagcatggaccgttcagatgcgtcaaatcaacacatcactttactgccttctacgagaactacgtaaatgagatttcctctttgatggaggatacgtaggagcagaaaccatgctcttgccgacctcgagagatggttagacgtccaacgccttagcttttctgagcaacttaaatggagcatttgaaggtgcaacgccttagatgaccaccttccaactaaaaagaatcaaatgattcgcccatattgacagaacaactcaggtctgatttccttatc

SEQ ID NO: 162458 - DNA, 375 bp, Glycine max
  unsure (1)..(375): unsure at all n locations
cttttaagtgtgtgacatatgagttagctgagataaaaaattttaggtcatcttgtaaaatatcaatgattcttctttcttcttaaaatatgtttcgaaagaaaatcaaagaaactttttttacaaagataaaatcaaaactcattcctcttataaggatggaaaacacatttaaatctaaaatataatgtactatatcttatctttaacgtanataatgtaacacagaaatcttgacatcgcctaattaaaaatcttaatgtaaatagaataatcttaacggaaataaaaaaacatataaaactaattaaaatcaatccacaattaaataaaaagcatattctttctatatatagttattaaaaaaattattta

SEQ ID NO: 162459 - DNA, 306 bp, Glycine max
  unsure (1)..(306): unsure at all n locations
gatcactaaccaaatggtggttggtgaacctcgggaagatctaccaatctcctttccctcgttggtacaatcccaacacaacttatgcttatcatggaggtgtccaggggcattcaatagaacaatgcgtggctttcaaaaacaaggtccaaagtttgattgacgtanggtggctgacatttcaaaaggatggcccaaatgtaaggacgaatcctcttgccagtcatggnggatcggcggtaatgcggtatttttaagttatttntagtccctttctcaagagagtgaacccttatatctaacatt

SEQ ID NO: 162460 - DNA, 461 bp, Glycine max
  unsure (1)..(461): unsure at all n locations
tctcattctaagaacatgagtcgaaacttaacctatgattttatttgtctgtgatcaaaatctacattctcatgatgtatacaggatcatggattttacacctgcctcgcctcctcctcctcctgctcctcctgttgctccttccgacgcatcagcttcgccatctgccgtgaagcagacacacaaagcctcacgtctacgatcgttgtctactagaccacctggtgctgagagaccagtggtccatgttgatcttgctaccgacaaggccgacggtccccacaggaagaaattaagaacatatttggggattgtgacacgtgataaggtggacgtcacctacgagaactggaaggaggtccctactgctcaaaaggacttgatctgngaggatattcaagcatctttcttctcttatttgatgctgtctaactaatagccaacaaatacattattgtgac

SEQ ID NO: 162461 - DNA, 412 bp, Glycine max
  unsure (1)..(412): unsure at all n locations
tcacacgacagtcactattatttggatggnggagcgtctggcaattttattttaagtgcttcttatttttaaatataactttaattaaaattatagtgaagtaatttatacttaaaaaattgattaatttctggtgtgcatcaagacttcagctatggaagaataactttttaaataaagtcttcgcacactaaccgcactttgattgatacgtcaaaaatttaaatttcaaaaacaattcttttatattaaaatttaacctataatttataaaataattctacttttatagtcgaatctataaagttcgattagacaaaatcacgtttgcattatattagcaagcaatctatcattacagtagtttattgtgctcgccacaaccatattgtcacgataaacaatctatcat

SEQ ID NO: 162462 - DNA, 374 bp, Glycine max
atttgctattattgagcaagcacgataatacgcacacagaaaggatggggtcatatatcatatgctaatgacatagagaagaataatgaaaacgattataacgatcaagattcatcctatctttatgttaataaaggaaaagcaactgccgactcttcaaatatcatattcaggatctgaagtggcgaaacacgaaaattatacattgaattgaatgaaaatctaaaatcatactcgttcaatacaccatgattggatgcaaatgtatgctgtctttctacatctctttgtgcctgatatgaaatcgattacgccaagattcttcgtcctcactttttatcattacgaatggatgcaggagtacttaatgactg

SEQ ID NO: 162463 - DNA, 433 bp, Glycine max
  unsure (1)..(433): unsure at all n locations
ccgttatttanggccgttttctcacctaataaatgataaaatgaatttcaactaatcatttgtgtataatctcgttaatcactggtaaaacaaaatctaaccgatcattcacgttgtaacctccgttaaataaaaaaggcaaaataataataaaataatcaaaatatcttgaaaaataataataaaataatcaaaatatctttgaataaaataataaaaaaaatcaatcagacgtttttctttgaaagtttccttgaattaattgactaataaccaaagtgaaaccaagactaaaatcaactcacaaatcaagctttgttcgcaaaaatcacttgaaaccattttaaggtccaacgccttanacggtcctctttgcttttatcggttaacatggaccgttcaaaagcataaaatcaatacataactntaccac

SEQ ID NO: 162464 - DNA, 457 bp, Glycine max
tgtatcttttatgatgaagcagccatgaagtatctttcactatgtgatgctagctgcataaatcaaaagacaccattggtttctatcttcaactaaaccctttgccagtccatttagataaaatataaacataaaaaaaatccaggttttcatgcctactctagtcatgatgatgaggttttgggtaatgaaacacaaataactgttaaattttttgagagaactaaataagaaaaatcctaacaataaggggaaaaaagtaattaagaaaatcaagagatgtacacattacagatgtacaagaaagaaggataatgagacccctagatcaaccaaaaaaaggatatttagatttccaaatgtttttattatagggtttacgagattcagatctcctaatggttgtgcccctgatgctattcctattgagtacatggtgaagtgtacaattgacatg

SEQ ID NO: 162465 - DNA, 406 bp, Glycine max
gcttgagactggcgctaagcccaatttcacttactcgcgctaagcgtgagggtggcgctaagcgcagcatcgcgatttcatagcctatttaaagcttgtcttgtgcagaattagggtacaacattctatatcttttacacaccttttaggacagcgtgcataatggccagggcacaaaattttagaacagccactgacctatttagggaaaagagctctagaagcataaaagaggagcaacttgtgcattgaagtctaggttttttcatttgagagattattgagtagaaagagtgtgagatgctgagaagtggaggaggaatcccccttcttgtgtaaggaactatcattctctgcttttaccccttcttgtgtaaggaactatcattctctgcttttagtctca

SEQ ID NO: 162466 - DNA, 391 bp, Glycine max
  unsure (1)..(391): unsure at all n locations
tcaacactaaaacaacatagaattatttatactgaaatttaaagactaataaagcataaactaaataactgacatgaactaaatatctgataaaataatctgctcataatttggaaaatcttaaaaactatgcagaatttaaaactcctgatcatcctgctgctgatcttctgcatactcgttcagattcagcactggagcagctggtggatcttgaacaataagctgctctggctccaatgctggtgcaaatggctaggaatcctcatggatgggtgctggagagatatgaattggagaagtaggctcctgagctgctgcatcatcctgagcgattggatcagtctcaaagataaatggctcaggaagaacangctcatcctctgcatct

SEQ ID NO: 162467 - DNA, 247 bp, Glycine max
gacattgattttttcagactctgtgcataaatcggcttacaatcacacttttccagtgagattccatacttgaactttaccactcagcattgacacacattggtttttctgtagagctactggctgctggaccaactaactgctaccataataacctaggactgcgcctctagagatgaaattaccatttctctgaggagtgctggatgttcgagagccctacaaatcgaggcagccaaaggtgttc

SEQ ID NO: 162468 - DNA, 441 bp, Glycine max
  unsure (1)..(441): unsure at all n locations
gcttgtcataactaattctncttacagataacctctcttatgtgtttgccatgaatggntctatatctaacgcaccttgtaagcaaaagaatcttcagtttgaagtgtagacaatgcacaaacccaatttactgtatcctaaaatttactttaattatgaagaacggcggtgacaaggattgaattcttgaccacttggtcgtaaaatccttggtaagagccaactcttctaaaagtttaagctcttaggtagaggtttattcatttgtagcactaaatgatgtttataagtcttatttatggtgcatatcgatgttggtaactacataccgaaaacttgatttggtgcaaacattcttgattatttgagaattggccatatttgcttatcttcttgtaaggagtaacacacaataaacaataatttatatagaattatgc

SEQ ID NO: 162469 - DNA, 409 bp, Glycine max
  unsure (1)..(409): unsure at all n locations
gcttctaaacaaaatattaacttcttatctatctaatcttgnttgaagntagtaacattattatgaataataaatcttttcttttgagtatttaactctacggtataattaggattcaaagttgagactaattgattaaactaaaatatcatcaattcagctaattcacttgatcagtaattaaggctgaatttccttttaaaagaaagtaattaatgttgaattacatgatgaaaagtagagaggataggatacaatagggttatccttactaattcatgagcaattccattagctcgatcacctctaataaatcccatatcaaagggtgaatgcatgtcaatatcttcctacattcttcaataaagtgatcagcctcatatagatccctcccttttgctgataatct

SEQ ID NO: 162470 - DNA, 329 bp, Glycine max
catcgaaattatcctacaatcggaatctaaggttttgcgtaaagaataccagcaaaagagtcgctctgtataaaaccttgctccatctttatctactcttcaaaaactttatgataagaataagtgatcatctcttgcaaccaagttgaattatgcagacatctaatccaagttaggttgaaagaaactaaaccgagatgggtcagttttagactcgaatttggtttccgcgtgtggatggatccttcatgaaaaaagattatcatgcctgatatggacatcttctttgcatagagattattatggcacgtgcactcgaatatgatctt

SEQ ID NO: 162471 - DNA, 479 bp, Glycine max
  unsure (1)..(479): unsure at all n locations
ctcgacccgggatcttaagtcactgcggctgcagcttagacaacttgtgtaatcgattacaataaggctgtaatcgatgtaaacacaatttgtgtaattgattaggataaggctgtaattgatctaaacaaagagttctttcttctgaagaaacttttctaacttagaaatttttcttctaacttactcatgataatgcatgatgcacaaaagatatgatatggactaagatgcaaaattcagtataataatcaatacaaatgccactcaagggagttgggcatgtaaaagacaaaacatcttcaagattttgtccaaactccaagctttagtctttattttgttcatgttgctccctctatctaacaatctcccnctttntggctttgatgatgctaaacttgtatatgacattgagtgcatntggagggtctgagtcttgagataaagactagttcttagtcaatcctaanaattct

SEQ ID NO: 162472 - DNA, 476 bp, Glycine max
  unsure (1)..(476): unsure at all n locations
tgtctcagcgtgtatgcgagaagagaccaacatgttatccatcgtcagcaagtaccaagaagaattaaatctagccacggcccacaagcacaaagtggcagacgagtatgcccgagtgtacgcggaaaatgaggctagaggaagggtgatcgactcgttacatcaagaggcaacaatgtggatggactgatttgctcttactttgaactggagtcaagaacttcaccgattgctagccaaggccaaggcaatggcgaacacctactccgtcctcaaggagatccaggaacttcttagctattgtcagcatatgatagacttaatggcccatataattagagaccctangaagtttgtattgtcactcagatcttgactaattataactttctgaataaaatgagtgtatcccacgtttttactgcacaaatgagtgtgaatcaaatcactccctcattttatctctagcatgcatt

SEQ ID NO: 162473 - DNA, 421 bp, Glycine max
agctctgcggtagctcatggcggcctgtctttgttatttaatttcattcttgctggtttctatgcccgcacatgttaactaattgatgtctatttattttttggaaaaaaaatgatcgaatttgttgtactttgttgatgacaatagtgttaataagagtgttaaaacgagcaaactaaccaaacgatttccacgagacatccttgttaggcattatggaagctatacatcctctgttagagcctactgttgcactttggttctgtattttgagtgacttgtttcaatggctacaaaattgtgtgattctcctatggtgaatggcacatattacttggattgatatactactattgatgtctgcgttgcagtcaaggtctttttgacatctactaacaatgtgaggatattattgtattga

SEQ ID NO: 162474 - DNA, 378 bp, Glycine max
ctacatatgaatctacatataaaaatgtattcttgaatgttatgctgtcacacccttaatgaagaaagcgagattttcatgcacacaataactttctgtgcatcacaaagttattaattagatggacaaaagttagatgaatgctagtcgcatgatccatgtgtatgatgaaggccttgaacaattattcggatttccctccgaaagatgtcgatcagacgaggatgtcatatttttatccttgtataaactgcttgaatcgaagacaccaagtgctatatgacatacgataacatctgtcgtgtgatgaagtcaagaacaattctaccacatggatgtgacatggtgaactgatagacatgcataagggatcctgaa

SEQ ID NO: 162475 - DNA, 408 bp, Glycine max
  unsure (1)..(408): unsure at all n locations
aaagaatgtgcttgttgggcatctggttccatggttgctgtcgaaggaaatgggttggatgatgaaaggatgtcctcagttctcgctctccttcttgatgccatctataagaaaagaatgtagacaattacaagagttaagttgaaagcaacataaaggccgcttagcgagatcaaatttgcttagcggacctgcacaaaacaacacataccacttagcgaaacatggttcgcttagtggatcttaaaagagaaagatatacccgcttagcgacctatagagcccgctaagcctaaaaccagccgcacagatatgcgcttagctntncatgagttgcgcttagcagcattaaatagaagaaaaatctcaaaaattttactaagttatgggagcttagcgaattggatc

SEQ ID NO: 162476 - DNA, 402 bp, Glycine max
gtgaattcattctatgcacccttatgggtccattcttttgtgtatgtattcatcctcattcttctactttcgatattctttttcttcgctctaagtgagtttcgacctatcgtttaagccataaactcacttaattaatgtttaaatgagttttaaccgatcatttgtgtgttaatctcgttcaatcacccttaagaataaaattgactgatcgggcatgtcgtaacctccgttaaatcacaaaataataaaatgaggcgtaaccgaacattttactttgaaagtcctctttattgagttgagaaataaccaagtgacgctgaggctaaaatcaactcacaaatcaagcatctgcccacaaaaaggtgatttgaaaccatttcaaggtccaacgcttgaacg

SEQ ID NO: 162477 - DNA, 379 bp, Glycine max
atcatggacacgcgccaatcattctttggtctttgtgaaaagccaagtcgtattggctctcgaaaataaagaattggtcgcctccatataaaaacaaaatcgattattctatgggcggttgcttacattttgatacaacggcttatattgtgcttcattgcacggctgtgatctcttgatcttcccccaattatggggtagatttcagattggcgaaatcaaagggctcatagcatattcagtggaagaactgatctatttttcctcatcatatcacataagatatggaagacattctctttctattttactgcgagaatttaatctaaactctataatcttcttacatacgtaaaaagacaaacaatcgttagagaga

SEQ ID NO: 162478 - DNA, 427 bp, Glycine max
  unsure (1)..(427): unsure at all n locations
agctcggtgcacctntgctgcacactccatatttctgctacgctgcgaaaattctgtcggcacgcaacctaaaggtcccgttcctgtcaccaaaactcgccttgctaccaaataataaagcctctgcatgcatccacttaattagttcacataacaataccaataattattggtgctgaatagccagcatgcttaaaaaacatcatgacacattaattctacatttatagtacgttagcccacatgcttcctagctactcaatgtttatttggtttcccacaagtcttctccttcggaggtaatatgttcaaggcatggttgacactaaatgtaaccatcttcttagctggaattgaaccttattcaccatgttgtgagagataccctcttcattagaccaatcctttgagctattaaagttataat

SEQ ID NO: 162479 - DNA, 441 bp, Glycine max
  unsure (1)..(441): unsure at all n locations
ctgcaaaatgtttcgtacaatagcgcagatgaattgttcttatatagcatncatattaacaaaggggtggagccaagtccctagcatcattcatccacccaccaaaaccaatcccttcgatcaaaaaagtgtaagtagtttcatttggcatacaccctttgtccaccatcgcagccaacacttcatgggcatcagtaactgtacccactctgcacaacccaagaagaacaatgttgttactaacaacactttggttacactcactactctccatctccatgtccaccaacaactcaatggcctcatccaccatcccattcctgcacaaacaagatataagcgaattatacgcgatcacatcgggatcaacagtgcaacatctgcaaaatcatgcacaatgctcttactttatgcccactactccctatagccgtgaacact

SEQ ID NO: 162480 - DNA, 311 bp, Glycine max
  unsure (1)..(311): unsure at all n locations
atcttaattattaattatatggataaacttaatttgcgaaagtttcatgtgaagatgtagaaactcaggcttcaataatatgttatnggataaaatataaatcgaaaaagaagacagatttggtgtatataggcatgatatgtacatgtagctggctttcgattctaggctagctagttaggtgtgcaactaactagccaccccattttgattntatacatttattgtatggattaattcatgatttataatctcaagtcctttntttgtatgctgataactaattaattaatgcatgaagaagtgagttc

SEQ ID NO: 162481 - DNA, 347 bp, Glycine max
atcgattcggatcattgattagaattagatcgaaaatctgtcgatctgattaattttggtgggactttaaattttgatcttgagaatttaatctaatgtatattcgcgacttattatgttgtatttttatatattttttaacttttagcggttaagctttttaatctactctaacttttttttaacgtaccctaattcaatatgaaataacattctatgtctttagaataatcaaataaaaaataataatcaaaccacacattaaaaaaaaagaagaaaaaaactaggtaactatataagtctttaattatttacgtaagagtgatatttccctttgtcgagctcaa

SEQ ID NO: 162482 - DNA, 471 bp, Glycine max
  unsure (1)..(471): unsure at all n locations
gcttcttgaacgagatcagtatattcattgtcttagattgaaggatgaaaatgttgtacgtgatatattntggagtcatcctgatgtagtcaaattatccaatgcatgtaatttggtatttctcatagatagtacttataaaacaaacaggtataggttgtcattacttgacattgttggtctgacaccaacatggatgacattttcaactgcttttgcctatttggaatgttgtttaggctctagaccggtttcgaggtatttttctgagatgtgatgcactccctggagttattattaccgacagagatttagcattgatgaatgtagtgaaaactattttccctgagtctaccaatttngtttttcggtttcacattgatacgaatgtaaagganaaatgtaaaatccttgttgctcanaanaatacatgagaatatgtcatgaaagcctgaggaagtctggtggatt

SEQ ID NO: 162483 - DNA, 427 bp, Glycine max
tattctatatagctattaactctaacttatttattgatggaaagaacgaaagttctaagataaatcaatgttgtatcaattaacttcaatattattattgtcctgttaaaatgtgattgaagttctgatctccatatatccatgcaaattttaaattaatccaaacaaagacatgcatgttgccttgtgggttttctacgattaccaattatgtttttactttttttaaaaaacaaattgtgacagagagacagagggaaaagggacagagcgtaattttatttttggattttgttgtgttgggatgcttgttgtgttgatgcttcacatattcttggacagggcgtaatccaagaacaagtgtcttgtgtgagtaccttggtgctgttaaaagaaggaagtgcttaactaactcagaacgagatga

SEQ ID NO: 162484 - DNA, 353 bp, Glycine max
  unsure (1)..(353): unsure at all n locations
agcttctatataagctgaaccattttatcaataaacacaagttgagttttattcagaanattagagtttatctcttttatcttagtgagagtgattctcctaaattcttgagtgattcaagaacaccctggcttgatcaaaggactttcacaacctttgtgtgttgccctcgctggaaagagtgattctttccttcctttcatcttcacccttgttctttcaaaccacaattccagaaaatccacctctgcccagaattatctcgtggccataactcccattttacgcactcaaattaagtgattcttgaacctaaattgactttaaaacgagacctttcaccctcgtttgga

SEQ ID NO: 162485 - DNA, 236 bp, Glycine max
ctgaccgactgtcatatgtaatcaataaggcattgagtaataccctaatttgagcgagccattcctgtgacagcgacctcacttatcaattcgatgacttggcacccatcgttacgcaattcgagaaggtccgtgttatgccaaatgtcaaatgataacagtgctgcacaattcgtgatattgcccgagatgccgcatatgctaaggaagtgttaatgcgcaatccgagtagttct

SEQ ID NO: 162486 - DNA, 375 bp, Glycine max
  unsure (1)..(375): unsure at all n locations
ataatgtngaaggaacatagaatttcaactgggtgactttgtttaccttaatctaagaccatataatttgccgtcactagctaataggatcaatcaaaagcttagtaggcattnttatggtccttttaaggttgtatgtgggattggacagtggcttatgaagtggcttcactagctcactcatgcatttaccctatatttcatatatatcttagttaaaaaaggttgttcaagctgatgttctatgccaacagtttcctgttttctgtattgaggagctggaattacagggtcaactagagacagttttagcatccaaaagacttccaaatgagtttgttgacgttttaattaattgggtgatctcctagaatt

SEQ ID NO: 162487 - DNA, 378 bp, Glycine max
ttcttccaccctggtgaatcttgactccatctcattgaagcacatgttcactgtgtatcccaaaaggtcaaacctttctccaacaatggtttgaagaccgtcgaacctgtccaaaatctgtgaaagaagagatgaatcttctccatcatgtacttcttcaccaacatgtagagcaccttttttcactcaaagccatcgtgctctattcgataaccaaaggatgcaatgactgaagcgcctattatgaaggatctcttgattggaacataatgctcagaatcaagacggatgttaaagtgctgaatgaagagagtgactagatgtggatatggcaatggagcatccaatcgcaattccttatgcatgcgatatctaaca

SEQ ID NO: 162488 - DNA, 404 bp, Glycine max
  unsure (1)..(404): unsure at all n locations
actttttagttntaaaataaacacacccgttatatctgatgatgactattttcgcaactttcaccatcaatgtgattgttactgctgtcaatgtcactgccaacgctaatactaccattatcttttttataaatttaattatactaaaaattccctcaatttttttttgtgacaacatctttctcgtgcttcgtacgagtatcctttcttctatataatagttagtcaataacattcaacattataagatttttaatacaaccaataacaataacattcaacatgtaattcaaatacatgaatgtcctaccaagtcaaatccttatgagatgcaggaacttctttcttgttaacaaatgtaaccgccatcttgtcttgagcgacgattctaaatgcgtcttaat

SEQ ID NO: 162489 - DNA, 356 bp, Glycine max
tgggatacgaacctatgcactaatatttgaattctttctataaatagctctctatatattcttgccaaattcacaagctctcgaaacactttgaatatcttgatagaaaagactaagagcttatggttcatattactctgaaagattggtaatatttattctgtgagccaacgatcatcaaatattctgatttgcttagagccaacaattacttggtaagacaaagaatattgcgttgttcaaacttggcttgtagatgcacaagtgacaacgattaatacttgtaactttgacaagtcagtgagacttggcgttttacaaagaactggatgccatcttggtgactgagatgaact

SEQ ID NO: 162490 - DNA, 278 bp, Glycine max
  unsure (1)..(278): unsure at all n locations
actaatacaattgctggccaagtttcctggtcctgcaagtgaagatcctcataagcatgctaacgagttccatatttgttgtacaccatgaagcccactgatgtccaagaagagcatattttcctaaaagctttccctcattctgtggagggagctggcaaagattggttatactaccttgctcccaggaccatttctagctgggatgaccttaagagggtgtccttggacaaattcttccntgcatctacgaccactgccatcaganaagacatttc

SEQ ID NO: 162491 - DNA, 398 bp, Glycine max
  unsure (1)..(398): unsure at all n locations
tctcaataagttcttccaaatggagccttaatatcagtatttacgacttttacttttaggaaaaatattgtagttattaagtattaactattacattatcttaattacatactttattagacctaaatttaaaatgatacttattctttntataaaatttaatctatgatgataatttatttatttattatttttagattaaaaataattcttattaaaagaagagagagaaaatgtattcataaataattaagagatagataagtattaataacaagaataactttaacaaaaatattaaattaagaaaactcatcgtatcaataaaataaatatcntcttctctcatgattaacanngancttatattatatattatatatatttatatatattta

SEQ ID NO: 162492 - DNA, 393 bp, Glycine max
tgtcatgtgcagaattatggtatacactttaagcagatgattgtttcttatttcagagcacaccacagtgcttatttcgggaaaagagccctacaagcagcaagatgagcaacttttgtagagatacctacgtttcgtaagtttattattgttaggatatcttctgtaatggctggctaaacaccctagttggggatttctaatgaacagctgatgtaaatacctaatatctaattgattatgttttctgtgttcaatgcttaatgtttgtatgtttttggtctgatcatccatttgtgtgcatagttaggtgactttatcattgggaaatgtactgttgccttacaacttgattgaagcaggatcgaaacttactcttacaagacggatctg

SEQ ID NO: 162493 - DNA, 459 bp, Glycine max
  unsure (1)..(459): unsure at all n locations
gatcttaagtcacctgcggcatgcagcttgatatgactttgacatgctctttttatagaaatangcctgtagtcatttaatgattaaggatgatttgatttacggataagggccatgaaggaagcattgctgcctctatgaaagcttccatggaagtggaactcatccacaaatctnctgaattcatgtctcagaatctttcaaaaagccttaataaagttgaaattaaaaccatcgggacccgggcatctatcaccaccacaactccaaacaacatctttaatctcttgatcagaaaaaaggggcaatgagtccctctctttgattctgatcaatagagtggaagaaaacgccatcaacggtgggtttgaaactcttatcttcagaaaatatatgaaggaagaaattaaaagcttcattcttaattcngtcaggctgttgaaacccaattccatcaat

SEQ ID NO: 162494 - DNA, 439 bp, Glycine max
  unsure (1)..(439): unsure at all n locations
tggcaaaggaagaaggagaataataagttcaaagagactcacaaatcaatgtggaaaaattgcttgtgtaaagaatgaattggaaaagatagatgtatagaatgattgatttgaaatttaaaacaaagccttgcttttatagactcttcaagtctggtcaagataaccattagaagagttatgacttttagaaaagcttaaaaccaatttgaaaaaatcaaaaactatttgaagagttacatcttttgatttgttcagaaactatcactggtaatcgattaccaaatcagtgtaatcgattacacaaagcttttttgtgacaggatgtgactcttcacatttgacattgaatttcaacgttcaagcacactggtaatcgattaccanaacattgtaatcgattacaacattntgaaatcaattggaacgttgtaaattc

SEQ ID NO: 162495 - DNA, 466 bp, Glycine max
tgcacaaagtgagaatgaagcctcagctgatggaaccttgttcatacagattgttggtaatctaagattcatctgtcacagcagaccaaagatcacattcaatgtttgacttatgagtagatttatgactgaccctatgcaatcacacttgctagctgctaaaaggatcgtgacgtatctaaatggaatcattctccctcatcaaaccaaacaggatgataatctacatcttgtaacctattcagattcagatcggcgtggagattcggtcgataggaaaagcactatgggacaggtatttctactgtctggctctctcatatcctgaaactcaaagaaataatcagtggtggcattatcaacctgtgaggcacaatatattgcagcttgttcacctacttgccaagcactttggctctcattcctgaataatgaactaaaagtatctctggatgaagctattgaa

SEQ ID NO: 162496 - DNA, 424 bp, Glycine max
  unsure (1)..(424): unsure at all n locations
ctcgacccgagatctctgagtcacctgcggcatgcaagcttggaactntatcaatagaagaactcatgtgtattatgcaattatgagttggttgagatttctgataatgtggaattcccttccacacttgtgattccccccgatttcaaatgagcttcatattacagaaagaaataacatagcagagatatgcagtgtataaaaaattgttggcttggctaattgactctcatcacagctctaggtcctttgtataattcaattaccaccaaattaccttanaataagagttgtgacacctcccctcacagaaagaattattcttattatcccatnttgcaatttgatgatcatatgctcgtgtcaagtacagagggcccgcgatcacaatctggctgccatatatggcaagagactattcaac

SEQ ID NO: 162497 - DNA, 432 bp, Glycine max
ataaactcttcaccggtaatcgattaccagattttaaaaactctggcaacgcacaaaattctgagaaaaaattttctcgtaaaacaaaactgtgctatgtttggtttttgaaaaaaaatattttcaatacttccctttgtgaaatcatcttctcttgaatcttgattcttcttgatgtcattgcttgaatcttgaaattaatcttgatttaatattgatcttgaacttgttgactcaatcttgaaatcattctcttgggctttttgtcatcatcaaaactacttgaatcaacctgattgatcatcatgaagcttgcttctaccatctccccctttttgatgatgacaaccctgacatcaataaacacatacacattctctttcctatgcgatcactcacttaattctcatattctcccgcttgttttgagtt

SEQ ID NO: 162498 - DNA, 444 bp, Glycine max
agcttaagaatgagtgcttgtggatttaatgatttagtggatttggatggaatgcatctataatacccacttgttaatgtagaaatctgagggagatacctatgtctaaaacttagtaattgaattgaagctgaatcttcctgttgtttttgtcttgttcttctttagagtgagaaaatcttatcaatttaagaatttagttgctgttaaaacaagacattgagaaaatattgatcactaatttatacattgcttccttgtatgataatattggttagcactcatccaatgacaatctattgtaccagttttataattaacgagaaagccagctgaatttaaatattaaggtgtcacaacactagttctaattcttcaaataacagaggttttcactgtagttaatccttcgtagactgttgtcataatgaaattgacgagtga

SEQ ID NO: 162499 - DNA, 446 bp, Glycine max
  unsure (1)..(446): unsure at all n locations
tatccgacctcccatcaccagagccttcatagataagtactgcatgcccaggcaggcacagggtcaagtgccgtaacatccacctgcatatgcaccattgtcgcctctacatgagataccatccttggggtccatctccgatcacctgaggagattagagctccaaatgcatangtacatgcagcatgtgtctatccagcaggcggctaatcacatgggccaggtgcaactaaacgagtccttctaccagtacacccaacaccagcacagctaggaccccagtcctttcccttggcctatccccgaacagttcggggccataattgtctggcctggagatgagaccgattctgagagaacggcaagatccgcatgagcccctgcggatgacgatggagctcaagtggatgaccacatggctgacatgctggatttcttcacttaat

SEQ ID NO: 162500 - DNA, 435 bp, Glycine max
  unsure (1)..(435): unsure at all n locations
ctaacgtttctaaattacactactgctatgtagaaattatggtacgcgataaacagctaaaaacaataaaggaatttgaaaagatagggaaaataaggcagataaaagagataatgcaaataataggcaggaaaatgacaaggttntgtgtattgatgtttgtgtcttttacaatgcaataggtcttatttacaataattgactaatggatacattagttgaagcattattaaaaatccctaaaatctagtagatcatggctttcatcgcttcaatcacttccttatttttcaaattgacttccatgttctcttaaaatgacctacacactatccaaagtgttccattccagtcgttttaccattttgccccatttcaaccacgtttgtcgcctcaatcggattccttatgctagttgtagtgaaataccaatta

SEQ ID NO: 162501 - DNA, 478 bp, Glycine max
  unsure (1)..(478): unsure at all n locations
actaagctnacacaattcgtgggttgtccacacattaaccaaatctattcttttatcccgccttacacaaaattcaccactgacatactccagtgccacatttgcattntgtatcaatttactattgcggtgcaaaataagagtgatttcactactcatcctataggtaaacatataacatcattatttgtattcacaaaccctgtttatacacaacatccgtagcgaaaaagtaaaaatataattttgagaacccaaatataaacctcaaaatgaaacatcattcgaagaaaaggaatacgaagccaaatgaaaaaaaaacgagtgaagaaacgtagaagatgaaataaagaaatgcatagaacaatgagtgaagaaacatagaaatgcaaacctgacagtgcgatatagaggacgaanatgcaaacctccactgtggctatcgaaaagtaatagagagagcacattgctggtcatc

SEQ ID NO: 162502 - DNA, 404 bp, Glycine max
  unsure (1)..(404): unsure at all n locations
gcagcttcaaaattgataatggacaagaaagttctcagaaattttgttctaccaacatcatcagagttgtccaagactgaagaattgaatttggtaaatgacaaatgacgagtcttggtgttgatctttgtttctttcccaagttcttctgatctaaagtaaaaatctccaccgagtgatgtggctagatcatgcatgagatcatgcatcacaaaacatttgccaaaaggccaactacttctatttgtacttgaacgttggaaaaatgatctcgaaaccaaatcatcaaaatactcatgaccaacctcttctaaagtcctaccatttcttggtttcttcaaaagatcttcggccatccacaacaagattaattcatttntatcanattcgtaatcttgtggata

SEQ ID NO: 162503 - DNA, 481 bp, Glycine max
  unsure (1)..(481): unsure at all n locations
actaagcttgacgcattttaagtctggtggtcatctcaagtttttttgtcatggtggatangtggtatacaacctcttcaaggcggtctatggtggcctggtgactgtagtgagtggatatgattgaaggttggggtttcggcatatagagacagccatgggagacaatcatggagggcaggtcagactaattcgttagaaacataactacactatgctaagctaactttactaaacaactatttcataattcttctatgtttattgatattgctgatagcatatttatagctgaacatatttcacaattatggtccaacattggccagctaccactacacgactaacaaccctgcattgaaacggttacaatgaatatggatgatggattataggcaataacagaatgatatgtagtaataacagaatgatacgtgatgggatattctccanctggtatgggacacataatcacgtaaat

SEQ ID NO: 162504 - DNA, 441 bp, Glycine max
  unsure (1)..(441): unsure at all n locations
ccttcgccgccatcttcattctcaactcatccaaaccgacgaaaccgatcgctttccgagacgccattgcagagaagctttcgattgattgattttcaatacactgcgcaaatctacgagagagagttgcgattaaatagagagataaaatgaggatcgaagttaatttggaagagaaatgatgaaattatgggaaattattattgcatgagttaaaggaaggaaagagcaaggaaattacgctctttccgatcgcttcgctgatatataaggttntcttgtcttctttttcttatgcgcaaataatcggagactcgtgaagaatgcgttatgccacggattatatacaatgcgctccacatgcgaaattaattatttattcgagtaataatgatacttggaattcantcaattactttccctgcttaatgtatcctcaca

SEQ ID NO: 162505 - DNA, 453 bp, Glycine max
  unsure (1)..(453): unsure at all n locations
cagctttaattaagtatatatcattatttattgtttatttatatattgcattggagttttgaaaacaactgctttgaattaattagctttttcaatcaaacgagtaatgtgaaaattgaaatacatgcacgccttangttctgggaggggttagtgaaaatatttagttgttttaaaaaatatctattgaaattaaatgttggaccctatttgaattattaaaattaaaattaaatagccatcgatcttctataaagttatatgataaagatttattattatcatactttcaaaataagaattattcttgttatatatctctccttaagatatatgttattcagtatgatcaaattttggatgcttatgattgtctagttagacaagtcaaatatttatttagttgcagcatggcaacggttgtcatggcttaaaatgagttaaatacggtct

SEQ ID NO: 162506 - DNA, 469 bp, Glycine max
  unsure (1)..(469): unsure at all n locations
tgatatctcacattttttaaaaaaaggtgtgcgcattccataattggaanaaaagagaataaaaaaaggcgaaagtgaaaatgagacacgtgtgttatatgcgtgataaaaaaagaaaataggataaaaggaacgaaaacattctaaagaaatgggtgttaaaaaatcgaaaccctttctaagagccattcaaaattatttagaacttctttcttgctaaatggtaatcctattattggtaatgcttccatggacgaactgagggtgtctgtgattgcttgaagctgactggctggtgcatgctgtgttctattctaacgcggctgccatgtatatgtagtataatgcatcatacatggactactacataatacatacgtaaacaacacttagaagatgttaatgtcatccaccaaacagtgaaactacataagagtctttatacggctcatctcaatgaagaaattta

SEQ ID NO: 162507 - DNA, 412 bp, Glycine max
  unsure (1)..(412): unsure at all n locations
tcgcanagcttacggtaaaatcttggacttatccatggtagaagtctccacagaggccattgcctccctcacccagtattatgatcagccgatgaggtgcttcacctttggggacttccagctatcacctatggtagaagaatttgaagagatcctacgatgccctctatgaggaaggaaaccctacctcttctcaggggtctatccctcattagctagaatttccaagatagtccaaatctcggcgcaggaattagaccacaggaagcaagtcgaaaatggggtggttggaataccaagaaaatatttggaggcaaaagcaagaatcttggcaggtaaaggcgagtgggccccgttcatagatattctcgcactgtccatctttggaggagtcctctttccgaatgtggat

SEQ ID NO: 162508 - DNA, 451 bp, Glycine max
  unsure (1)..(451): unsure at all n locations
tctagcagtaaatcaagactcgtcatcttttgtcttgactatacacttgcctttcgtgaaggaaacaatataaccactatcataaaattgacttatgctaagtagattatacttcagacctttaacatataagacgttgtctatagagactacagaatgaataccaattgtacctaaaccagagatctcttccttaccaatgtctctgaaagaaacttctccccccttgtgtggttttaggtctaggaacatanacctcttccccgtcattgtccaagtactagcttaaacccttcctttgtcctaccaaggatatctccaacaagcactatttgagattttggacccatatctttttgggtccaacattggttagacccctatacattngtttcttcttcttgatgcatctaaccatagagtgttcatacttatcatagaagttcacatt

SEQ ID NO: 162509 - DNA, 350 bp, Glycine max
  unsure (1)..(350): unsure at all n locations
aaatagacgggtacacataccagtgatgcatattatattgaccattatgtgntgcttctcttggctccatgtgtaacaggaaaaagactggttttcacatctgatattaaactaccaacattggcatacggtgttacagataagagtgtttataaagctatataaggaaaaaacaagtgaacaagtcaagcatcgatgtacaacagagggataatcaacatgtatgttatatagacatttggagatccaacatgcagctcatacacagacagaacacatgataaaaaacgtactatcgtcaaaggatggattacctcatatgttgctcggatacatgaatactcatactc

SEQ ID NO: 162510 - DNA, 465 bp, Glycine max
tctttaaaactagtcacttaatatgttgtgactttcgaaaaaatcttcagaaacaagtcacttgaagaattgtgactcttggaaatttatttttcgaaatcaatcactagtagtcgattaccattaaggtgtaatcgattacatatcaacagatgtgactcttcattttaaatcttgaaaattaaaatgtctaaaagctctggtaatcgattacattgtgtaatcgattacacaagttgaaaatgtttaaacacaagttgtacctcttgaaatatgaaatcttaacgttttaaaacattggtaatcgattactatcttctggtaatcgattaccagagagaaaaactctttggtaatgattgtgtaaaaacttcttgtgctactcaatgttgtgaaaaactttcttaatacttatcttgattgagtcttctcttgattctcgaatctttagtattgaatcttgat

SEQ ID NO: 162511 - DNA, 443 bp, Glycine max
  unsure (1)..(443): unsure at all n locations
agcttgctatctatgggttagataatatggtgttttattaggtgcgatttcccccctccctttactagttatgagacccacatgaatagattgggattagtataagcatgatgttttgcttgttggctttcattaaaaaaaattacctaattaatgtaactattgtaatgttttgggagagcctcatgatgtcagtagctctaacactttttcatgttaaaagggaaaaaaactcacaaggacgaaagttagtcttggaatatcaatcaagttgacttttactcttccaaagacgtaagtatttctacttatttattaatcactataattaaacctagattcgcttaatgtcactnttgatatattatgttttataattatcttgcttagatacattacagtttaaaaagtttattatggtcctttatgttcttgaaatatat

SEQ ID NO: 162512 - DNA, 481 bp, Glycine max
actaagcttgatgcttttgtgaatgcatcgaaggtaatagacctcttgcaagaaattacgtgcatatagagctacagatgtcttggaattgatacatatggacatttgtgggccatttcatacaccttcatggaatggtcaacaatattttatatcattcatagacaattactccagatatgcatactcgtttcttatacatgaaaattaacaatctctggatgtgttcaaaacatttaaagttgaagttgaaaatcaactcaacaaaagaatcaagagtgttagatatgaccgtggtggtgaatactatggcagatatgacggctcaagtgaacaacgtccggggccttttgctaggtacctagaggaatgtgaaatcgtcccatagtacaccatgtcgtggtcacctagcatggatgtagtagctgatagatgaaacaaaactcttaaggatatggtaagaagcatgattcgtcattct

SEQ ID NO: 162513 - DNA, 246 bp, Glycine max
ctattcaggataacaccggtttgattatctgagagcagggtctattgtctaattatatatattatatattatatatatatttattattattatattagggggttgactggtgcattacagctgcctacttcacttacgacaggtgtttcatggctaggagtcgaagatatgctacaaatctttgcttgccatgaaaccaagaacatcacagcttaagttcttacaatcattgtgtactgctaactg

SEQ ID NO: 162514 - DNA, 436 bp, Glycine max
tctagtagtcacgcttcttatcctgcgggattgtctagttctccttgaagtaacctctaaaggattctctgaatgtggcggggaccctatgggtgatgccatcagcctgtggaaataaaaaaaattatgttagcacaatttcagttatctaataggcaataacttgtaaatttaattataaatctatgcatgacaattataaaacatggaataggtatatggtactttgtgcttacgcagttaagtaggaatgttctcccataaaccctcgtcatgatctatacgatttgcatatacatcatcctcttgttattcatcattaatcaaaggcatgtctttggagaaaggcggaatgtcaatgacatcaagtggtgacccatcaatatggtgaccgatagaaattgttctcgctcgcaaaaccactgaccatctacag

SEQ ID NO: 162515 - DNA, 410 bp, Glycine max
  unsure (1)..(410): unsure at all n locations
cgtcagaggcttaccacatatcaaatgtganaaagattgtgtatgaagcatgtgccaaaggtaggcaaaccaaatatagtttccaacacacaaatgcagtaacatcatagagagtcctagaactactgcacatagacttgtttggcccacccaaaacacttagcctgtgtgggtagagatatggatttgcgatagttgatgcattctctagattcacatggttgtatttctttctcataaagataagtcttttgaagcatttataaagttttataagaaagttcaaaatgaaaaaaaaaattgaaaatagtctttgtacaagtgatcatgggggagatctgaataanaatctctttaaaaccttctttgatgaaaatggtatcccctataatttttcttgtcaataatac

SEQ ID NO: 162516 - DNA, 224 bp, Glycine max
  unsure (1)..(224): unsure at all n locations
gctngagatgaggaagtgttgaatggtgaaacttcctgcttttattgttgaccacagagtggtacctggagatatgtcgcgggggtcacgagaccttgcggacgtcaggtggggtgctattgcccaaaaccaagcttgaccaatcccgacccaacccgggcatagtcggtcagtgagaacctgtgatgtacctaaacaggcgagctcctggcagtcaacaaata

SEQ ID NO: 162517 - DNA, 404 bp, Glycine max
acatttggagaagtaatgaaacaacttgttgatgcgctccatgagaggttggatcaaatggcgaatagagatcatcatgaataagaaacgaggagaatacggaatgattgtgttcctatacaaaaccgaattgatggtattaaactcaacattcctccatttaaaggaaagaatgatccggacgcctacgttgagtgggagatgaaaatagagcatgttttctcatgccacatctatgaggaggaccagaacgtgaagcttgccgtcacggagttttccgactatgctcttgtgtggtggaacaagctacgaaatgagagagcttgacatgaagagcccatggctgatacatggacggagatgaaatagatcatgatgaagcggtatgttccggctagttactc

SEQ ID NO: 162518 - DNA, 433 bp, Glycine max
gcttgctctaaatttacattgatgtttgtattgatgggaggaggttacatgccatttctgctttaagagtaacgtcccactggtaaaactaactttccaaatgtttgccttcgcaggaatggccccgaggaagcttgcctcaaagaggtccaggaaggacaaggcggccgaaggaactagttccgccccggagtacgacagtcaccgctttaggagcgttttacaccagcagcgcttcgaagccatcaagagatggtcgtttctccgggagcgacgcgtccagctcagggacgacgagtatactgattttcacgaggaaatagggcgccggcggtgggcaccactggttactcctatggccaagtttgatccagaaatagtcctcgatatttatgccaatgcttggccaacagaggacggcgtgcgtgacatg

SEQ ID NO: 162519 - DNA, 398 bp, Glycine max
  unsure (1)..(398): unsure at all n locations
aagagaatgagagagagagagagacaaagagagagagtggaaatagaacgacgatatggatagaagttgaactcttaagtgtgtcacacaagcttcttattcattataggtatgacaagttgcacacatgtttctatttatagcctaacacatgggaagcttccttgagaagctaggaaggtagcttacttatgaagctagaggagcaaagcctccttgagaaggtagaggggggctactcatacccctccaatatataatcttatctccatgcctaaatacatgaaaatacaatgggaagcttccttgcgaagctagaagaaaaaagcttacttanaagctagaggggccgctactcacacctctccatagctaagatcacccatgcgaacatgcat

SEQ ID NO: 162520 - DNA, 384 bp, Glycine max
  unsure (1)..(384): unsure at all n locations
ttggaaaaataaaatctaatgtggagttcacaactgtctaactgcttgtctctcccaagaatgccatagttttttgtaagagttgggttaagactgaaacttgtgatttttttacagtgttaggctatgtcatatatatagatgagttttaatatcaatgctgcattttttaaagataaaaaatatgcatgcacatactttctgtatgtgttgtcaactacaccaatgacatgacatgctttagcttgcatcanatctgcatgtgtagtcatgttgtgcagggtcctttcacgtgctttatgttaatgcagacaacaatttagcatacacgtttnttcacaatgtgtattcaactcagacaacgatataccatacatgtttttt

SEQ ID NO: 162521 - DNA, 476 bp, Glycine max
tattacaacatccttcaaacttctgactaagctttggtatattcactccatcccttcttccacaatcttaaccacccaagcctttcatgcctcttttacagcactcatgccttttaattgtttaagtctctattggctttgcacgccactcatcccaactacatctcttgctttctcatgcaagttgttcttgttccttctcgcctctgcatatttaaaacataaaacactacgaacttgcttaagatgagaacctcctacaccattccccactgttcttccagctccgcttgcccacccatatcctttcttaaaatgtggcatatttgcatgtaactctgtgtccctaaacataatcgagtccaattgtgtttctagtaacctatcattcttcaatcgcagaaacctcacaaaaccatatctataacccatgtatctcttgttgttacgataaatatccgccacactctgcaata

SEQ ID NO: 162522 - DNA, 424 bp, Glycine max
  unsure (1)..(424): unsure at all n locations
cacctttaaataaggttataggaaagagcatataacaacatatttgtggtaatagagtagtcatagacaatgttatgagaaccggaccatgttctacaccgggttaatatcataaatgatccaataactgaatcgactcggccttgttcaatttctggtctaaccagttgaaccggccgaatcgatccgagtttaataacactaattatagacatagctgcactaagtactaacctcattgaagtgaaatgagtggaattcaggaaaggcatgtttgtttctggcttccctgagacgagaataagtgcttttccgtttgagaattgttcgttagtttgtgctcataagtcataatgcatccaatggttaaatagggcanagagatgagacccncatangatacaatacattgactcagaaaatt

SEQ ID NO: 162523 - DNA, 468 bp, Glycine max
tatggttccttcgcttctttagtggggaatttgtttcttagattcattgcgagcacaaagggggaaagagataccattttcaattgatttcttccctattcttgtactcaacagatttcgcagaaaaggaaaaagaaaaaatcaccaaaggaagaacaagagggagggaggagatatgagagaaatatattctgtgatgactaaaaacggttagtatccaagtattattaatggtattgattttaaactgataaaattaatcattttgaatcatttaaaaaaataactaatatcaacattgtaaaaaataaaagagcaaagtgcaaaaataaaaatagaagactaaatatatcacttaacctataatacaataacatgcaaagttgcaaactagttattagcttcgcattcatatatattgtatagactatattgcatctttattcttaatcagactattatgtatct

SEQ ID NO: 162524 - DNA, 367 bp, Glycine max
catgaaaaattcaaatttcaagtctaaagagtcacaactcttcagaaactaactatgtaatcgattaccacttttatgtaatcgattaccagtatggaatttttgaaaataactcccaagagtcacaactgttcaagaaaattttgtatgaccatctaaggcctctaaataggtgacttgggatacaaaatatgttagagtgtttctgaacaaaattgtcttatcctctcaaaaccaaattgtcttatcactctcaaaatattccttggccaaacacttacaaattcaataaggaatcttgagggagcttcacaatgtaatatccttctcttaaagagagaaacttcttctttttattcaaaggaaa

SEQ ID NO: 162525 - DNA, 213 bp, Glycine max
ctttactatggatgttcatacattattgaatctcgaggttggaataacgtgagcttcgacgaacctatatatgtggtctacacaaatgatctcatcttataagcatactctgaacattggtgtgctcatgggaacgaataaggtatttactcttgtgacgacgcatggacacttatctctgacgcatctacaattagcgcgaaacgtcggtct

SEQ ID NO: 162526 - DNA, 394 bp, Glycine max
  unsure (1)..(394): unsure at all n locations
ataaataaaggaattaatagatgaacacccaattataattcatataatatcaaaccatcagataacagataaacagaaagaatgaatatcacaagatacctgaacagcatcatggagttgtagcatctctttcttttccaatatcccagccttctcaaggttttcaacatattcaattaaatgatttaacactgcatatgttgcttgccttgtttttacaacacgcaaaacctgagaatctgacattcatggtattaaataaagaacatttgagaaaaaaagttcattttaacaccataaccagaaaatcgcgcacaacacactgattgagataaaagaccaatcatttgacctgacaggctaattaagtagaatcattaaacanaatagaaac

SEQ ID NO: 162527 - DNA, 368 bp, Glycine max
  unsure (1)..(368): unsure at all n locations
aataatgtacaatgaactcggtgaggatcagtattatgaacgcgatgatcagacagactcggactatgagtatgaacaacgcgaacacggatactatgactatgaacaacgagaagatggtgaaaatcacgacgaagattacctggaagaagaagatggcgatgattttgctaagaagatcggtgtcgctcattcataattattatggagaaactgagaaacaccggaacgtgttccncttatgatcaactctcatataagtctcttctctgactgagcaacacttatgcttaaaatttgcttgtagaactcacaaccgctctatgatcatcacatttgtttcttgtattaactaacccctctatctt

SEQ ID NO: 162528 - DNA, 459 bp, Glycine max
  unsure (1)..(459): unsure at all n locations
ccgtgatccttgagtcacctgaggcatgcaagcttacttgtgtganaccaacaagcagtctgatatcagaagttctttcgttctagtatctgtgtccttaggcacagtattggcatatggctgatttctataagaatcatttagttcaatgaatgataaccctagggaaaggaggatatttttcaatgaataccagaatacttcttcagccacaattaaagtttttgaactattctgtttggtgtatgactgtaaaatcttttcgacaattgttaatgatgggtgtgccatagtaacattgctgtccaccttccncttttcatctttgatcaaagattggaggaggcctaactttgatttcaaatactccaagttttgacataatttgtctaaatacaagaatgctggatggagaccatagaaacacaagtaccaagcacgctgtttataacacataac

SEQ ID NO: 162529 - DNA, 413 bp, Glycine max
tgcacatacttgatacccattctacattttcagctaacagattattacctccaaggtcaagatagatcaagttggagagattcccaatctgagatggaatcttccccatgaatccagaagagaggtcgaggtgagtcaaagaggtcattgcacaaaggaaagaaggaattgccataccttcaaaatcattgtcgctcaagtcaagatatcgaagcttatagagattcccgatctgagagggtactgttccgttggcaaaaacataactcaggtcaagatacaccaaatttgagagattcccaatctgatgaggaatcttcccacggaactcagtatgagagacggtgacgtgagtcaacgaagtcattgtcccaagaaaagaaagaattgacataccttctccaagaaatcta

SEQ ID NO: 162530 - DNA, 319 bp, Glycine max
  unsure (1)..(319): unsure at all n locations
agcttatatattnttgaagacccttccacatatgtgctcctccaaagaagtcttgatctgaaagctttttgtaacttcagaccatgaacaaaaactttcccatgaacatccaacttgtttacagtgtgctctagctcgaatggtgtcaactcttatccatttcagcatggaaaatagtatagtctctcatggcttcaataaacattttgatggtatcaaactctatcccaacctccaaatgcacttgtccaaaactacttgtaggattgtattgacgatacaggaatttagaaatggagtcaccttcatcatcactatt

SEQ ID NO: 162531 - DNA, 447 bp, Glycine max
  unsure (1)..(447): unsure at all n locations
acaagcttgtatcttttttgaccccagctccaagacaggtgtaatgataacatttgtcattagaatattctcaatcatttattatgttataaatgctttaaggccatttgtattccttcatctaacaaattaaagttttggaatgattggttgtgacataatatcaaagcctctctaaacaagtggtcaagactctctagatttctatccttatattgcttccatacttctttataaagaagttgaaattgaaatcaagcataagtaagcctgcacatgattcaaactcccacaagggattgtgtttgaaacgctataaaacattgctaatatatctttgcctaacagttataagttgtaacttttgggataattggttcacatcacactataccacttgtctcactcntacaattcaacctanatgctcgcatttccattacacgt

SEQ ID NO: 162532 - DNA, 395 bp, Glycine max
tttccagggctctgtattccttacattccttctggtttggccatcaagtccctgcattcccccacattttgcttcttctttgtagttcatacttcacaatccaagtaagcattttctgttttgttttactttcctttaaagttgcaaaccataggatagaagatttaattttcaggattgtactgttggtaggttagtgttcttaggtttcgggtttactgtagacaatgtagtatttaggttaggattttatagtccattaggggcctttgttgggaaaaaatggggtgaaaacccctgtgtattcctggaaattacaatgaacgcactaagcgcgcctgctgtgcttagccagttcattgcatatgatgaatattttgatttgcagatgatcg

SEQ ID NO: 162533 - DNA, 473 bp, Glycine max
gctgaaagcttatagaaaattcataattcttttctaaatgcccactttgtgtatacaaaacataaactactacatgtatgtactttttttccctatcccaaaaatgtaaattatgtgagacatctgtagcaaaaaatcttaaattgtgaagaataatagtgctaatttaaaaaaatgaagtttctcaatgaaaaaaaaatgaggtctggcttcaccactcaaacaaatatgttaaattctagttctatgaaatatattgccagttaccacttcactagcttggcatagaagcattgtattcaaatcatggtagaaaaggctattaatacactatgtattgtgaacacacacattaaaaaatcctacttaattcttcaataactgatatcttgtcctatgccctaatcctatctattgcttatgatggagactggtgatgtatcgtgagattaatcattcttctattctctccg

SEQ ID NO: 162534 - DNA, 412 bp, Glycine max
  unsure (1)..(412): unsure at all n locations
gggcgactaaatagtggagagtgctcccacctagctcgtggtacgcgggtaggtagtgtaggggatttttttacccacctacacatcctttcttctcaatattnttaaaatacactnttttttattatataaagtacattagttttcggatgctttgagaaatcaagattgaccaccccgatttctagacattagccttttttttataaaaataaattatttatttttaaatttatgttttaatttaaattattaaaataataaaatattatattatataaaaatatttttaattaattctaaaaataattttttgttaaaataatttttatttgtttaagaaaatgatgttataagtataattattnttcttatattatntaatctatacaagactcttgaagaaataaaa

SEQ ID NO: 162535 - DNA, 448 bp, Glycine max
tgagctataaacattaatcttaaatgtccgacatgtgttatccaaaattatctttacactgccaaatttaatattaataataacttctattatagattttaaatttttgtgccaaaagatttgttagcacaacaagtgagatttaattgggataaattatatttttcatttcttgttattcttctaaagcagcattatcttgattgtttttatctctggataaaatatatttgaggtctctataaaatttgaaaataattaatttcattattataaattttttcatattaatttggtccctataaaaataaaacatatctttgttgatccttaatggtaactttggtaatttggtgtgactatcacactaacacacatattttgattacaaataaattaaataatttgtaacagttaaaacctctaaaactaaatgaattaaatgact

SEQ ID NO: 162536 - DNA, 413 bp, Glycine max
  unsure (1)..(413): unsure at all n locations
agcntggaacattcnctactcatgttatatatatttatatgataggatgggtcttttcaggcataactacggcgtttctaagagtacatccttttgatattatccttttaatgttcagttctattctatatttaaaatactacattctgctacttgtatgatcgatattctctgtaaatatctttttaatatcgcgtaaggaaatatctattcttatgtctatctcttagttctggtagagtgcgagtatcagtgatagcatggagttatttagtgcctatgggtatacaatatttcttataccacacatgtctcgacagtgtgtgtgtgtgtatatataccccnacaagataagttagatttcacttgctcaacacatattatattgcatcacagacatcctcanatcatta

SEQ ID NO: 162537 - DNA, 361 bp, Glycine max
gatctacgctctatcagcgttggttttcaaaaaataacggtggatttgagaactacgagaaaaaaggaatctccaacatgtagttcttctaaaaaaggatgagactctgtttccgacgcggcggcgccgccacccatggccggccagccactgcgccggtaaacaacttccggcggtgtgtgctagagagagaagacagaaaaagggaagagagaacagagaagagagagaatagctttttataaatgggaaaaaaaccgtgcccgagcccttatatagatgccggaccggttcggttttttttttttgcttggaccaaaccggtccggttctccttttgtggcccgctggactcacctct

SEQ ID NO: 162538 - DNA, 349 bp, Glycine max
  unsure (1)..(349): unsure at all n locations
cgccttaaacggtcccctttgcttttatcggttaacatggaccggtcaaaagcataaaatcaacatgtaactttaccacttttgcaactacataggtctgatttcctcattgcaattgaggatacgtangagcaaaagcctcgcttttgtcgaccaccccaagagatcgttaatggtccaatgccttaacgtttctctcttttcaaaaacaagagattgttaatggtccaacaccttaacgtttctctcctttcaaaatcaaaagatcatttaatggtccaacgccttaaatgaacctttgtcggtaaaaatgatcttgcggaaaaagatanaacaacttaaccaacgt

SEQ ID NO: 162539 - DNA, 356 bp, Glycine max
ctcacgattgtcacgtgctcatgctttaattgttatcccgggctatacgagacatcttgccgaacaaagtcacgttaacgataacttgcctgtgctctttcttccatgctatatgtagcaaagtcattgatccaataatgttggatgagttggaaaatgaagccgcaattatattgtgccagatggagatgtatttccccctgctctctttgacatcatgattcacttgattgtgcatctggtcagataaatcaaatgatgtggtcctgtttatctacggtggatgtacccggttgagcgatacatgaagatcttaaaagggtatacaaagaatctatatcgctcaaaagcatcta

SEQ ID NO: 162540 - DNA, 389 bp, Glycine max
aaacgaacaaatgggaacagattgccaacataaaaacacatgagaagcgttcaacaatttgaagtttaaggtttaggagagtccatggaaaaaacacccctaaactcatacaacattgaaaacttttcaaacttttgtttacccctctgatgctcttggccttgatgtatgctgcagatttgagatgaaacctcttaccaagaaaaaaagacaatatcaaagaaggaagaacagaaattgatgaagagaacctaggtttttgttttttccatacccaccgagaaagaggaacttccagataatgcttttgtttatgcgtcagaaacattattatcacagatgtagtgtctattcatttctcaaatattctgataaacgtttgaaacttg

SEQ ID NO: 162541 - DNA, 265 bp, Glycine max
ctgctggatgctgttgagaataatgagcactatcacgggttgcgcgaatggctcggacatattcaaaatgtatgcttaaatgctgaagatatcttgggcggatttgagtgcccgaaccttataaagcaagttgtcaaagcattatgcttcacaaggatgaaagtaggccacttcttttcttcgatgaaatctcttgctttccgtcttatgattgctcatcgaataaaacatgttatacgtatattgtgtaagatagccgctgatg

SEQ ID NO: 162542 - DNA, 456 bp, Glycine max
  unsure (1)..(456): unsure at all n locations
cttattccctagtggatggcgcctcctctcacctcttctactttatcttctactgcaactccatggtggaaaatcactgctgaaggacctcattgaagcttaaagatccagcctccatagaagcttctcaagaaagcttgcatcaagtggtaatcagagaacaagagcttcaagtaggtgtctcttaaacctccattaattttcaactttaccttctcctccattgttgtttcttcatttttctccatgtatctcctcaaatgtcttgtgctaaatgtttttaatatgattctttagaattctcactgattaaacttgctatagaagctagatgtgattttctatggttcaaatttcttgttcttgttcttgaacacgtaattgtgttgagttaaagttctttgagtttcttcttgctatctnttttgtagctgaaacctaaaccataaaattctt

SEQ ID NO: 162543 - DNA, 388 bp, Glycine max
  unsure (1)..(388): unsure at all n locations
tgttctgaatgaatgagaatcttgtactgcgtgtcattatcattatgaggtacacattgatctccgactagcttatataggtgtgattgtgaaggtagaattgatgacgctctcctccttttactattcatccttaacttgtgtctaattgacgaatgaaaatagatgtataattataagaaattaaaaggaaaataaagataggaataaattggataagaacatatgataagaaaaaatagatgtataattataagagatgctattttaatttgcgctctagtatcttccatatataaacgaaaaagagagcatctcatgcttacagcacttttgctttcagtggcgatanatatgtcaaagtatgaactttaggatttgtattctt

SEQ ID NO: 162544 - DNA, 279 bp, Glycine max
gaaaattgatattccgcttggactgactcaaatgagattgcccctttcgataagatcttagttttctcgatctattcttgagtcatgaatttgtgagccctatttactaaattgcaacatgtcatatatactcgaacctctgcaccactatcattaattgattatgatactcatgcgtgatccgcgaagagagaaattctaccttgcacccagatgaagaatcttctgcatatatactaactacgtcgcgagtaaaaaggagcttgttaaataaacctc

SEQ ID NO: 162545 - DNA, 408 bp, Glycine max
  unsure (1)..(408): unsure at all n locations
atctattacaatgaggttgtaatcgattaaaatagaacgctgttgcctctaaagaaatttgtctaacttagaaaattgtctccacacatactatgatgatgcacaatacaaaacaaatatcaaatatactaaggtgccacaaccaagataacaaccaatacaaatgccattcaagggagttaagcatgtgaaagccaaaacttcttcaagcttttccttaagcttcaagctttagccttaagttgttcaccatggtgctcatgttgctccccctatctctaacaactattttcacacttagagaaaaaaatggaaagaaatagatcaaatggtatagtaatgaacccaacggagataccaacatgactagaatatgtccaaaanaacattcccatctttccaaaatct

SEQ ID NO: 162546 - DNA, 454 bp, Glycine max
aacaagcttcccgtcagtggtaccttaagtttcatgggataatttcttcatttggttctgatgaaaaccccatggatcaatgcatataccacaaggttagtgggagtaaaatatgctttcttgttttatatgtagatgatattttacttgcagccaatgatcggcgtttgctacatgaggtgaaacaatttctctctaagaattttgacatgaacgatatgggtgatgcatcttatgtcatcgacattaagattcatagagatagatctcgaggtattttgggtctatcacaggaaacctatattaacaaaattctatagagatttcggatgaaagattgttcaccaagtgttgctcccattgtgaagggtgataggtttaatttgaaccaatgtccaaagaatgactctgagacggaacaaatgaaaaacattccttatgcttcagttgttgg

SEQ ID NO: 162547 - DNA, 416 bp, Glycine max
  unsure (1)..(416): unsure at all n locations
ttggagtagaaacatgggaccaactcattttatttcaaaaaggaagtcgtatctagtcaaggtctgagagaccatacaagtttcctaacgatttctaattatgtgggccattaagtctatcatatgctgacaatagtcgagaagcccatgaatctcttcgggggcggagtaggtgtctgccatcgccttggccttggctaacaatcggggaagttcttgactcccgttcaaggtaagagcaaaccgatccatccacatggttgcctcttggtgtaaagagtcgatcacccttcctctagcctctntttccgcgtatacttgggcatattcgtccgcaatcctatgctcgtgggccgcggctagacctaactcttcttggacttggaatgatagctacatgttgtctctgtctccat

SEQ ID NO: 162548 - DNA, 451 bp, Glycine max
  unsure (1)..(451): unsure at all n locations
agcttagctcaaccttggctagcttagcgcaccaaatcagccttagatgcaagggttggtcgctaagcgcttgagactcacggcttagtgcatgaacagtgatgcgcttatcgcgaggcttgcgcttagcgaaaggactatntttcagaaaaaagttgtctaaggtatttttcagtcctttgtccaagaaattgaaacccttatgttaaacattcacagattggctgatatactcctatgtatagattatatagcaagttccaaatgattaaatgcatgaaaaacaaagataatagaaattaaaactgggttgcatcccacgaagcgcttctttaacgtcattagctcgacgcatagcttaataccttcaaggtggcatgaaagtcacaaagaacacatctctcttgaagtttctcttctactagaaatccatgaacttatataatctgga

SEQ ID NO: 162549 - DNA, 453 bp, Glycine max
  unsure (1)..(453): unsure at all n locations
gtcacctgacgcatgaagcttgtagtggaaaataattcatcccttctttgttattgaggccgctggtccaatagttcttcatgttcttcgtgttctttgtgttcttcatgacattcatagcactattgcaaaattgtgagtttgatccaaaaaaaaaattgtttgagagtgttggatattttagcaaatataaaaattttatggtcctaaaagagaacaacatgaaaggacaaagtgcaaaaggaaaaaatattttggggtcaaaatgaaaatatcaaataatctgacgaaccaagtgtaaaaaagttttagaaaacaattatagtcaaaatttaatagccctctctcctagtgcgtacttattgggtgcttttaatactctcattngtttcgaataattgtagtggattatacttgtcgcaacctgccctttcacgggagagcgacgcgtga

SEQ ID NO: 162550 - DNA, 465 bp, Glycine max
  unsure (1)..(465): unsure at all n locations
tgctcccctatctctacatatgtgtcatgtttttttatcttaaacccacccaatgggtatctagagcttcgattgaagatcaattctgcatttgtttaatgatgggtctaagtcatcagagatcaaccattatgtttggtatttttttgttctatatcttcaagattcaattaagaagatggtcaacacaatcaagattgagaaattcacaggaaataatagtttcaacctctggcgcatcaagatgcgtgccttgttgaaagaacaaggaatttatgcacctctctttggcccaccatcgaaggttgataagtgtgtacttgagtcgcatgatcgaaaagctcactctttgattctcttggttttgtctgatgaatacaaataccactcanagatgtgggtatgtaaaaagaacaaaattcttcaatcttcaaagcttcttcatctctaacatatgtttcatgt

SEQ ID NO: 162551 - DNA, 215 bp, Glycine max
agtcaaaactttcataccactcacataccaccaacttattgctcatgaacccaccgaagaccttaccaacggatttcactggctgggtcggtaaaacaaacctaataaccttatttcttcaggaccatgttatgctgtctgtagttcatctgcttgatcttctacttcaccgcatgatgctatcttcttaaaactaagaagaacttgaccttctt

SEQ ID NO: 162552 - DNA, 269 bp, Glycine max
gctcgtcagcgtgactcacatgtgagtatgacacaccttgtgatcgcggaatacgacgtaagtctacacgtgtcaacaggcttgtctgcccgagtgaccaatcggctcccaaaacaaccgatcttctatgtcgtgacggtatggttttccctttaccaacagcctaagaaatgtttattcggatatccactccggtagttctgtgcctcaccgagactcacatgtgaagatgacacatatggtgagcggcggacatgacttaaattttt

SEQ ID NO: 162553 - DNA, 435 bp, Glycine max
  unsure (1)..(435): unsure at all n locations
cgtcccgggatctctaagtcacctgcggcatgcaagcttttctttacaatcaacctgtctattgacttataattctaattgcaagatcacattcttgttctttctttgtctaacatacacacttgctcaaacttatgaaaagaaacacaaacttcatcacaatcatgcattcaatccaaaatcagtttataacacccatttcacaaaaagataaaagagtttcactgcatagtcctcaagatcaagtcaaactgttccatatacttcaaaacatgcatactaactattcacaacaagtatataacataagtttaaaccagaattctctaaggaaagggacttaaaacataatagttatgataattatcaacataaacagaaggacatgaatntaagaatcctgtgactgatcctatggtcctctctcatctatct

SEQ ID NO: 162554 - DNA, 433 bp, Glycine max
gaataaaaaattctcacctgtcgacagactctatggattatgctcctctattgaccaccacacagacctttgcccttctggcaacaatatgaagcaattgaacaacctgaagcttatgctgcaaacatctacaatatacctcctcaacctcagcagcaaaatcagccacaacaaaacaattatgacctctccagcaacaagtacaatcccgggtggaggaatcataccaaccttagatggtcgaatccttcacaacaacagcaacaacaacaatagccttattttcaaaatgctgctggcccaagcagacatacgttccttcaccaatccagcagcaacaacaacaacaacaaccccagaaacaacaaacagttgaggctcctccgcaaccttcccttgaagaacttgtgagacagatgactatgcacaacat

SEQ ID NO: 162555 - DNA, 362 bp, Glycine max
tttctcatgtgcacccatacccaatctccgggttcgaagaaaccttcctttctcctttgttggcttgtttagcatagctcttatttttcctctcaatttgatctttgactctctcatgaagcttcttcacatagtccgcctttgcttgaccttctttatgcttaaaaacagaaacattacgcatacgcaaaagatcaagaggagttagtgggttaaaaccataaacaacttcaaaaggagaacaattagtggtgctatgaacagctctattgtaagaaaattcaacatggcgtaaacaagcttcccaacgtattaagttctctctcaacactgtgctaaacacaagtcccaaagtcctatta

SEQ ID NO: 162556 - DNA, 346 bp, Glycine max
  unsure (1)..(346): unsure at all n locations
cgcctaatatatcttttctcttgatatngaataacagacactctgcgatacattcgaatggtcatcacttctctcacagatgtgcgattctggcccataatatgtcaagacgcctcaaattgaaccacggaagctctccataaattccaatggacatatactttgtactctgatgaccgattctgcgcataatatatacagacgctcgaaactgaacaacggaagctctcgagaaattcaaatggtcataactcttaacgtagaagtcagattcatgcgcgtaatatatcgagaccctaattttgacatcggaagctctctaaaactaaatggcataattttactc

SEQ ID NO: 162557 - DNA, 436 bp, Glycine max
  unsure (1)..(436): unsure at all n locations
gtcacctgcggcatgccagcttgtcttgcaccttgtgnggaactctttatccttattacctttatctttttccctaaactattaatgaataaattgcctgttgttttgacattaaatgattgtttctttttggccactctcttaaattattttcttattgaatcttctcttttgggcatcattcagctcacttttggcatcccaggctcatagaggaacttaatttaatttgtttgtcagagtatagttaagtttgcacctacatgttttactttaaatcttatgcaccttgatgggaattataactatttaatttgctttatggttatttcctattgaaaattattgcacattccctttaaaagcttatcatgtcttttcttaacggtatattcatttgttggcggcctgtgatgtggtggtgtattctacgtga

SEQ ID NO: 162558 - DNA, 384 bp, Glycine max
  unsure (1)..(384): unsure at all n locations
tgcagctttatcttgcatggaggggagtttcttttactctcaatactgagattattgacacgtaatctgacggtagtccttcgagaaacgcatcaacatactactcgtgacgaacaagaactctgacgccagcaagttcatcaacatatcctntgattttgcacaagtactcataaattgatttgctgtcaagtgtaactatgcgcatcgcagtgcgaagctatcgagcacgggacttcgtatgcaggctaaagtactgatgaatcttctccanacttgatggagtgattcgacccagaacaccaataatattgatttcgaaagagtagattgaagccaaacaaggagcatntcatcnttgaacctccaagcttcatagtcagg

SEQ ID NO: 162559 - DNA, 443 bp, Glycine max
  unsure (1)..(443): unsure at all n locations
gagttagaagtggcaatggaaaatacttgtttctttgtgaaattagtggaacttggcgactttgcaagaactgaacatagtttagtggtagagatgaactagtataaaactttccgcatatgatatttatctcttcctatgtttatttgaccttgggattgaatttgattctgtaattttaaaatacgtttttataaagtctgtttcaatagtttgactatgtctgtttgtgaaaatttggtatttgtcttttaaagtcattttcagatgataagctttgtgttgttgaaaaaggtttagaaaatttctaagagtcacagtttaccccccttcacccttcttgaacatgtgctttacatggtntagtctttaacaaaagttgactggtaaggtgtaaaatgaacagccggcctttgggttttatttaataaataataataaat

SEQ ID NO: 162560 - DNA, 409 bp, Glycine max
  unsure (1)..(409): unsure at all n locations
ctccttcttccatggcttattccctagtggatggcgcctcctctcacctcttctcatttgtcttccgctgcatctccatggtggaaaatcaccattaaaggacctcattgaagctcaagatccaacctccatagaagccccacaagcaagcttccatcaatacgtaggagcaaaagcctcgcttttgtcaaccaccccacctttgctatcatgacccaagagtctggtagcaggcggagacacctttcggttatccatgcctcgtcgttcggagactccaagtttgattggcaagcagaggccaatgtggtcatttgcaccctttctagagatgtcagcatctcccggtagagactatntttagtctcgcacaaaacanagaactacgttggtctgagttcctcatcac

SEQ ID NO: 162561 - DNA, 354 bp, Glycine max
ttctctctctttcgaatttgcttggaaaaactgcttccgcgaagaaaatccaagccgaggcgcttccgaatcgtttccgtaacgtttccgtgaggaattttgcgaaggtttcgaccgttcgtcgacgttcttcattcgttcttcatcgctcttcgatcttcaacgggtaagtacctcgaaccaagcttttcgattcattctatgtacccgtggtggtccacattgtgtttcgtgtatctttattctcgtttcatttactttttataccccctttcgacgtgcttaagccattttatttaagtcatttctcgcttaacctaaaaataaaataaattctcaccgatcgctcgaatt

SEQ ID NO: 162562 - DNA, 412 bp, Glycine max
  unsure (1)..(412): unsure at all n locations
aattcacgggtcggaacataaaaatatttttaaaaaacaatgtgtgcgccagaagggtgaatgcaatgaagatttttcccgaagccctgaatggactcggatgtgtgcgaaacttgataaaagtgtgaatgtatgtatacatgattttgattatgtcaaaagaagaatcaaacaaggctcattttgcttcaagattaatacaagattgtttcaacaaacaaagccttgattcaagatttcttcaagatcaagccttgcctcacaatgaaaggtttcaagtcattcaaggcacatgtaatcgattaccaatacatgtaatcgattaccaatggttngaaagtgtgtaatcgattacacatcatatgtaatcgattaccanagactctgaatgttgggaattcaaatttaaatg

SEQ ID NO: 162563 - DNA, 426 bp, Glycine max
  unsure (1)..(426): unsure at all n locations
ataatccgaanatgtcaaagaattgcgcattgaaaaagcataacaaaactttctatgattggtttaaagatacaatctttgcatatgagaatgcttcagaaacattaagaaaactagcagatgggcctaaaagaaatgttataacctggcaaggatacaacataaacaggtattcattgtacacaaaagcacaagatgacaaaagtacaatgtagaacagcagggtcaccctaagggctgaatctcaacactttgcaagtgtcaatgacgccaatccctgtgtagctctcataccttactttgngttcattgatgaaatctgggagcttaattatgtgaaatttacagtatgtgttttcaaatgtaaatgggttgatagcaacacccgtgtgcacaccgatgatatatgatttaccctggtagatc

SEQ ID NO: 162564 - DNA, 293 bp, Glycine max
  unsure (1)..(293): unsure at all n locations
tcttaccaagtaaatggatcattnttaaggtccaacgccttaaaatgatcaccttccaagtaaaaagaatcgcttgattcacccttaaagaagaactacgtaggtctgatttcctcttcgatggagggcacgtaggagcaagagccccacttttgtcgacctcaaaaaataaaaagaaataaaagttaaggtaacacaatttccacaattctaaaaaataaggctgttgtcctttgagacaaacgtgagaggtgctaataccttcctcanacgtaaatacaactaccgaactt

SEQ ID NO: 162565 - DNA, 466 bp, Glycine max
  unsure (1)..(466): unsure at all n locations
ggcatcacatttaaacttgaatctttgtcaatgagtaccttcgcgacgacatggtccatacatctgactgacacatgtaaagccttgttgtgccctctctcctcaatgggaatctcttcttccataaacgcgatataattattggtggttatatgattaacaatgccttcaaaagcctcaactgagatgtcgtgtgctacgtgggcttcgttgaggacttttatcaacagtgcatgatgaggctcagagtttatgagcaattcgagcaaagagattctcaccggagttttattcagttgctcaactactttaaactcactttgttggatgagatgaangaactcatgagcctctgtcaaagtcactgtctttccttgaagaccatctttcttatcagactcctctaccaccgaaggatctacttcttttganggggtggctatgtctgtgggactatggccatggg

SEQ ID NO: 162566 - DNA, 429 bp, Glycine max
  unsure (1)..(429): unsure at all n locations
atctctcagtcacctgcggctgcagcttattcgcttgtgaatcattactattacttgtatttaataaaatatagaacttttcctcttaagaaaattttctatcttaaaaacttctcactaaccatgataattcatgatgaaaaacccaattacacaaacatggcccataaatataacatgggagcactgagaatccaacaacacctaaaactcagttcctaccaaaaaatacccaagttcattgaacccattacaaaacanaaccgcaacattctaataccagttaaacaaaactaanagaaagtatgacanatttcttgtatattgtgtccaataagaaatagtcgagtaaactattggctataacctcccttacaatatgtcataacatccctagtatggtttctatatacaatatctcctaatatt

SEQ ID NO: 162567 - DNA, 451 bp, Glycine max
  unsure (1)..(451): unsure at all n locations
tgcaagcttgttagtgatgaacgtncttttatggatcttattctacatcaattaaaaaatttcatagatggaaattttatgaaaatttaaaaaggcaaaggaaaataggtttaaggtaagaaaatagaaagaataatgccacaatccctaggagggatttcgttttggttcaaagcaacaagggatttcggtttgatgcttttgaacaacaaatcccttgttgtcgatagtcatcagacaacaaatctttggtagtggcgaggatgttgtgggtgtcactagaaaagcgagacatgcatttcggaaatgcattaatggaaaacatgttttttttttctttctaaaattatcgtcctccatgaaggagtgttcagcaaagagaggaattaatagaagtataaaacacatatcagtcaataagtctagcccagctttggcaaagagtctgcag

SEQ ID NO: 162568 - DNA, 483 bp, Glycine max
  unsure (1)..(483): unsure at all n locations
tctagtggtaattctgtcaagaccaattaggtcaaataaaaatgctcatgagattcttttatactctctataattgcctgaattgaaattcattaaaaatcataaattgtgatgtctcacttttaaataagaagaaataatcattaaattaaatgagaagtaacccaccaaaattgatgagagtgtggaaagagtatcttaacatacttttgttatttcatcactccctaataaaaattgatcaaagatgaatcatttctatgttaactatatggttctagtttcatgataagggttactcactaaaattaataattttgaataaatttcaattaaacaaaaagaatgtcacatagtattgttagaattctttattatttcatcatttcctaataagaatctgccaaagatgaatactctctgatgttaagcacaccattctaattntctttgtctaatatattataaaatatgctaaatatg

SEQ ID NO: 162569 - DNA, 235 bp, Glycine max
taagtcacctgcggatgcagcttactgacatattctaaagaagctagattctttctgctcgcaccaatattatggcggagcactccctcgtgagatgagaagcttgagcttaactacgcactggctatagtggcttaacctacacctaatacaagactacttgactataagaaaagcgacctctaatctaagactacttaaactgccctgtatataccaggcttaatccttattc

SEQ ID NO: 162570 - DNA, 357 bp, Glycine max
  unsure (1)..(357): unsure at all n locations
ttcgacaatcctatcaaaaagctcaccccctgcacacagctccataacaacatgaaccgcgacagcatcctcaaaagcctccttgatggagatcacattaggactccctgccaagtggtgcattatctgaatctccctcctcacatcctccacatcctcatctgtcaaaagcttcctcttcagtattgacttgcaagcatactctttcccactgatcttctccacacaaaggaaagtggttccaaattggccttgtcctagcttcggtcccaaattgtaaaactccttaaggttaccggttttccttagcaaaacagaatcagttntaaggcctgcactngctagcctcttcacatt

SEQ ID NO: 162571 - DNA, 268 bp, Glycine max
aaacttgacataatatgatgcttgttgacgaatggccagatggaataatcatacattatgtgatccatgcattttatggtgaccttaatgcaatgcttggattaagaattccacaatgttgacatatttgaaatgtttataatttggattgctttgattttaatttctctcatttgtcatatgcttcgcttggataaatcaattcaaatttcttccattttaaatcctctgtttggatagggcaatttcatctcctccatatgcaaaa

SEQ ID NO: 162572 - DNA, 436 bp, Glycine max
  unsure (1)..(436): unsure at all n locations
gtgcagagattttggaagtattatgaggggatagttcattccattaatgcaaagcttaagagatgtcaaagaatgacagcaaaagattaaagggagggactcaaggtcaggtctaaagcctgaatatagctccattgtcaactgccggacatcatgaagcagagcatacttggtgaccttatcgaggagttcaggctcagtccaacaaaggtgaagagtaagattaagtagggaataggcgtcgtctcgtctagacaaaacccaggttgcaaatttcataaaccttccaaccccgcgtttctttaagagataaggatcaggacagtacgcgagactgatgagtcgtttgcaaaggtccttccatcttttagacaagacacaagttngaacagcactctctgtgttcataanattcaatatatggagcagaatggag

SEQ ID NO: 162573 - DNA, 419 bp, Glycine max
aactatctgagctagatttccatttgcacaagaatttcattgtgcattgagtcacaatgtaatttgtctctgtatgagtgaactctatgcaaggttcactctgagtacacatatcccaagggaggttagcacactaatttaaaagttagtacactaatcaagaagattatgataagatataccagatttaacaaaagcacttttaccatttttggcaaaactctactttattcttttatagttagttttgaataagtgcaagaagccatataaggcatggctgagcttgtggagagaacctcaagggttgtccaagcttccgattattcatattaatggtcattcaaagtgcttagattaagaagataaggataagggcttgtaattccattggtccaagcatttcacctataataagt

SEQ ID NO: 162574 - DNA, 421 bp, Glycine max
gtaacccacaaaatgtccaagaatattggtttgaaatagcataacaagactctttgtaaattggtttaaagatacaatctttggtgacaataatgcttctaaaatgctaaggaagttagcagataggcctaaaagaaatgttataacttggcaaggatacgatataaaaaactattcgttctacataaaatcataagacgacaaaagaacgatgtaaaatagtggtgtaagtctaaggcataatctcaacactttgctgttgtacatgatgacaaacctcgtgtagcttctatgtcttactttggggtcattgaagaaatctgggaggttaattatgtaaaattcagtgtctatgttgtcaagtgtaagtgggttgatagcaatatgggtggttgaaccaatgatttcggatttactttgg

SEQ ID NO: 162575 - DNA, 388 bp, Glycine max
  unsure (1)..(388): unsure at all n locations
atcttaagtcacctgcggcatgcanngctttaataacggattgtctgatatctcttcatcacaatgaagaaaactcttgagacctataatggctttgagggtgttggatctgtggttgatgttggcggtgggactggagctattattaatatggttgcctctaagtatcccaccacaaagtgtgttaattctgacttaccccacgtcatcaaagaagctccagcttatacaggtgctttttagtccatatcttacgagtttagattgactctactaactataaaaaattaaaaaataagctaagctagtgttctaacttggatctttcttacattctcattcctgtgataattaatttgctaatagtagcatcacttgtatgtaataa

SEQ ID NO: 162576 - DNA, 397 bp, Glycine max
tcccttcttttatttcatctatttaatgttgcaagaaattctttcataccttcaaaattgacgtattattccttttctaaatttaccggtatcaataaggggaaataaaagtatttcaagaaaggacaactcacttcaataaacttattgtttaattacgacaatttaataaaaaataataaattatttttaattcttaactaatgttcaagggatacaagattacaactaaaaaatttatatttctttaccgagaaaaaggcattatatttattaatcctctcttcagctttatgaattgcttataaaaattccattcattaactaattgatccggtgctgattataaatatctatgttaaaaaacacttttttagaataatgataaagatatata

SEQ ID NO: 162577 - DNA, 444 bp, Glycine max
  unsure (1)..(444): unsure at all n locations
atctctaagtcacctgcggcatgcaagctntgttccaaccttaccccacagttttctccaaaagtgactaaggaacttggtgtctaggtctgaaacgatgcttcttggtagtccatggagacacaccacttccttgaaaaataacttagcatcatggcacgcatcatcttttttcttgcatggtatgaaatgtgccattttttaaaacctgacaaccacaaaaaaatagagtccttacaattccttgttcgaggcaaacctaaaacaaaatccatagataagtcagtccaaggatattcaggaacaggcaaaggagaataaagaccatggggcatgaccctatactttgagtgcttataaacaatgcactggtcacaaaacttatgcacatcatgttttatatgccgccaatagaaatgctcatgtaacatgtctaaagtcttt

SEQ ID NO: 162578 - DNA, 456 bp, Glycine max
  unsure (1)..(456): unsure at all n locations
aatttcagcacatttttttgtatagacacatctcttcaaatcattccgaaaacgcaccatggaccctcttatgtgtgtgtctgactctcaaaagcaagagagagatttttaaaagagaacttaattgtcaaatgctctctcaacaaatattggccaaacatctgcaaatctattgagaattcttctaggatcttcaatttgtatcatctactctacaggagaagaattnttctgttcatctcttaaactcacttgtaatcaagagactacttgcctcttgcgttgtgagaatcttgaacacaagggtgagggatcccaaggtgtgttaaaagtctattaaggatttacagagatagtggaaaatctcaagtgagttgcttgaggactatacgtacgaacacggaagtggccgcaccagtataaattgagtttgcatgtctctcttcccttatctca

SEQ ID NO: 162579 - DNA, 375 bp, Glycine max
  unsure (1)..(375): unsure at all n locations
gcttatttctctaagggtctatatcttaataactaccaccacttcaagttttacttggtgtgcagctgcatctgtaaagaatacttcaacgccatgttcaattgtagattgaagtctgtcaagctcttccaactcgacttgtttggcttctaaggccgactatacttgaacatactcaataatgacttcctctggcactggctctccatccacaacaaatgtggtagcctcttcagctgctttcttattagtttcttttgcagtcatggcttcaataaaggcaataatgtcagcttctatctatagagccttttttcctctcaagctacttatctaccttagctnttcatatagaattcacgagagatagtctag

SEQ ID NO: 162580 - DNA, 370 bp, Glycine max
acttttcctatctaatttgcatcctcgaaaatcaaaatctaaaatacctgtgtaatttaacgaggtacctttgggataccacaaatttacattggttgtacccttaagatacttaatgatccttttaacatagttaagtgagattcctttggatcgaactggtatcttgcacataagataatgcttatagcatgatatccgatatacatgcaattaagtagaaaagtgatctgatcatacctctatatcttgattcacccactgttgtacctttctcatccaagtcaaggtaggttgatgtagctataagagtagatgtttttttgatttttctataccgaattcctttatccggtctatgcaactattg

SEQ ID NO: 162581 - DNA, 425 bp, Glycine max
  unsure (1)..(425): unsure at all n locations
gctttgagcaaattaaacgacattaaccttttactcggatgtctgantgagtcccgtaacatatcgagacgctcgaaattgaatgctgaagctttgagcatattcaaacgacaataactttttactcggatgtctgattgagtcccgtaatatatcgacacgctcgaaattgaatgttgaagctctgagcaaattcaaacgacaataaatttttactcggatgtctgatatagtcccgtaatatatcgagacgctcgaaattgaatgctgaagctctgagccaattcaaacgacaataacattttactcggatgtctgattgagtcccgtcatatatcgacacgctcgaaattgaatgttgacgctctgacaaattcaaacgacaataactttttactcggatgtctgattgagtcccgcacata

SEQ ID NO: 162582 - DNA, 306 bp, Glycine max
ctcgattgactgaaagcctcaacattcaatttccagcatctcgatgtgtgacgggactgaatcacacatccgaataaaaagttcatggcgctcgaatttgctcagaacatgaacattcaatttcaaagcgcccgatatgttaccggactcaatcaaacatccgactaaaacgttattcgtcgcttgaattggctcagagcttccacattcaatttcgagcgtctcgatatgttacaggactcaatcagacatccgagtaaaagatattgtcgcttgaattcgcttagagcatcaacattcaattcc

SEQ ID NO: 162583 - DNA, 303 bp, Glycine max
  unsure (1)..(303): unsure at all n locations
gtattattactttntaatggtaaatttggcagttggtgtctatttgtgtctttattgttgtcatttgcatgtatccttggaaaactgcagataggtgagtatgtagaaatctggtgaaggctcttcttttattgaagtacactgctaagccacaatacaagtgatcgaggccgtacccgaatcaaataaacatgaaaatgcagtaactaggaagtgatcctaggtcgtttcctaacgagcagtgacaaaccaagtgttcataatatacttgcagcaagcgtaacgattggggggggggggttt

SEQ ID NO: 162584 - DNA, 462 bp, Glycine max
tcttatccaagactcatcttggtggtgaagctccttcttcatgtcttattccctagtggatggcgcctactctcacctcttatactttgtcttctgctgcatctccatggtgaaaaatcaccattaaaggacctcattgaagctcaaagatccagcctccatagaagccacacaagcaagtttctatcacaagtcatacagtcatattattccgaactttagtttacaaattcatgaactgacataactaactatagtttcaaaacctagcctacgccagcaaatttaacgttgtagaagaaacgctgcatggtgaatgtgattcaaaggtgttttgatgataacaatgatgacaacaaaagatgatgacaaaggtgatgaacaaaaagctcatagatgaaagaacaactcaagcgaatcaaagaacatctcaagtgaatcaagaacaagccaagagttcaa

SEQ ID NO: 162585 - DNA, 407 bp, Glycine max
  unsure (1)..(407): unsure at all n locations
atggggcttcaccatgtgggtggaattctacacttgaatagacaaataattaaattaattaattattaattaagatcatttcacaccctctgtgtcgattacgagaagatatgtggttgtgcttgcaaatactcttataatatgaaaaaactccttaaggaatacaatatggttgctatatatcatatgagaaagagtaaattacactaattattcacaagattgcatgaaattacactaattactccgtaattattctttagctgttttattaaaaaaaaacattacaataagacatcttatacatttatactaatctcccttaattattcaaaaaatattatactctttttccctaagtccagggaagttgtgataatattnaagtacgaaaattttgtaattca

SEQ ID NO: 162586 - DNA, 369 bp, Glycine max
tatgttcattgggagtttatatgaatattgagtacttaccctccaagatatattttttctgcaaggatgaatgcacccatgatggctacgataatcatcatcaaagggctgaaagcagtaacgaaaacaggcccttttttctgcatgacaatcccttgaacatagtaggtgatacctgattatattattccctagttcaacaacaaatacacagaaaaatagaataaaaattattgtatattccgagactaggacatgcctataatcttgactcctgatcaatttttatgtcataggtaattgagggttcttttaattgtaaaaaaataattaataaaactcgattatgtgttacttaaaaaataattg

SEQ ID NO: 162587 - DNA, 396 bp, Glycine max
  unsure (1)..(396): unsure at all n locations
tcctactatggntactgtgccagtccttttagccaccactatcatcgctccacctttccccattgttgctccctttttgagcatgctagtgtgacgaccatgaatgctctaaaaatcctgactcctttntcttcagcttcactagattctccctcagctgttttggcatcattgttgccttcctcctcttctcatcccagtgtctccttagatcacgtttacacttctcatgatattgatttgatgtagagcatgggatataggtcagagaagggaactctagttggctntgtgtcttcttttgacaagaaccacattcagttagttggggtccaaaatgcaactgattctgtgaaggtcttnccccacagaagtcttgagatttctgaggaaaat

SEQ ID NO: 162588 - DNA, 472 bp, Glycine max
  unsure (1)..(472): unsure at all n locations
aaaaaaaaagaaantaagttagtattatatacgacaagttagtattttatatatatatatatatatatatatgaccctaatagccaaaaaagaaaaagcaaattatccacttattttttggagcaagtgtgctacaaatccaagccgaaattgcttgcatcaatggcaaattaaccacttattattcgtgttcttatcaagtagactttacatgctttattaagctggtgatagaatcacatatcccaacaattctacagttcaacacaaattcatccacttagaataatcgaaaacaaataatcttgagaactatttgaaatttggaagtattgaagtggaaggcgcttacatatggtaaaatagtatattgatataagcataacctcgtatttatataattaaattgagcttacaacagtggtgaacaactagaaattaagcggtgtatggtacattaattctatcatag

SEQ ID NO: 162589 - DNA, 436 bp, Glycine max
  unsure (1)..(436): unsure at all n locations
cctaactagggatcgatgtttagtaatttaggctacatcacagaacacaaaaacatgattgattagagaaacatctttagatacatcagcttgtttgttaggaagacccaacacttttacctattgcagtcaatcttacttacttgcattttatacattttttagcctagacttagtttaattntgttctaaaccatcaattataaatgtttctttcaacaatgccttatttatgaatntaaccttgtctaatactagttccctaagttcgatacttggattcatccattttaattttgaatacttgatgatccggtgtgctttccagcgaatcggatttccctcgaacatanttgtataaagaanaattggaccanaaagtaattgcaggggaaattcaacaaaaagcagtctagaatttctttcttttttatac

SEQ ID NO: 162590 - DNA, 373 bp, Glycine max
  unsure (1)..(373): unsure at all n locations
ctggaagaaagtgatgaggtacaagcnctaaaggcaaagcttgttatagcccgggtagtcgaagagaagttcaagtccatagccatcaaagtctgaaaagagtatgatgaactaagggacgtcaatatggccacagctgaagccttggaacgagaaaccaagaatgccggaaaggaagaacacgaccaaaacaagttttgaggggctttataaggcagcaatagtgagctcaagctccgaagaggtgaaaggaatcatcacgggtcaaaggcatgatctggaaggacgagctaaaggtttgccttatgtcgaaaagaaatttgtcccaacagttaagcgagactgaagggaatatgtgggccgtcatcgatga

SEQ ID NO: 162591 - DNA, 247 bp, Glycine max
  unsure (1)..(247): unsure at all n locations
ttttgtcttaacggagactagggtggaggcttgcgaggtcgggccctgagctgctcacgctgcttggctttcaagaaaggcatgcgctggaccgcgaccactctgatttggtgttgttatcaaggagctggtgaaaaaaactggctgctgctgatatgggatatatggatgccttggntggagggggaatgagttcaatgcaacctggaactgcctcacctcggatatgcactagcacgccgacgag

SEQ ID NO: 162592 - DNA, 325 bp, Glycine max
tttataacatccgtatgaatgagacataacaattgccaccaaactgtggacaacattgtgcaagtcccatgtatcaaaccactaatatagacgatattgtcattgaccattacacagctgtacacaaaattgtatatattaacaatataataaaattgaaccacattgtcattggccattataaatactaaactgtcaaacttaattaaacataaaccaaagtcgtttgccaagaattcaataacataacaaccattaaccccataatcctaagataatgcattgatgacaaccaaatatattctaccctaattaaattgtatgt

SEQ ID NO: 162593 - DNA, 392 bp, Glycine max
atcatcaagtttgggacttatgtttgacgagtcttatgtgcaacgcatgtgttgtgctcttgcatacatatcactcatcatgggtggcatgtactggagacatcgtgccgtgaatcagtaggactaaccaagggcggaccttgggttttgcaagccctttggaggattgactagggaattgtctaaactgggttttgggcgccatgctgttgcatacatgtcactcaccatgggtggcacatactgcagacttagtggcgtgctcttgcgtacatgtcactcgttgtgggtggcatgtactagagacgtagtggcgtgctcttgcatacatgccacttgttgtgggtggaatctactagagacttaagggtgtgctcttgcgtacatgtcac

SEQ ID NO: 162594 - DNA, 386 bp, Glycine max
gaagctagagcttagctgcatatacctctgtaatagctaagctcacctacttgagatgagaagctagaacttagctacacaccccctataataactaaggtcgcccccatgacaaataacatgaaaatacagaaaaaataagtgcgtactacaaagactactcaaaatggcccgaaatacaaggctaaaaccctatactactagaatggccaaaatacatagcccaaacgaaggaaaaacctattctaatatttacaaagataagcgggcttatacttagcccatgggctcgaaatctaccctaaggctcaagagaaccctatggacattccttggatctctagcccaatctacttggagtcttctacccaatgcccttgcgagat

SEQ ID NO: 162595 - DNA, 318 bp, Glycine max
tcctaccccccgccccaagggcattggatagaagactccaagaagattgggccaaagatgcaagagaaggccgtaaggttctcatgagccttagggtaaatcttgggcccatgggctatatatgagcccacttatctttgtacatattagattaggatttcattatttatgggtcttgtatgtacggcttcataacgtaagtagggtaccctagaaatgtacgatgtttcaacccttgtattttagggcacctagactatgtgttgtattacgggtagttctgtaatttcacatgcattaagtgaatatctgatgtgt

SEQ ID NO: 162596 - DNA, 286 bp, Glycine max
cttatgatccttaggataaatttcgggcccatgggcctaactccagcccgcttatctttgtgaatattagatttaggtttcattatatttgggccttgtatatacggctccataatgtacgtagggcaccctaaaaacataggatctttcaacccttgtatttgaaggcacctacactattgtgtgtattaaggcgagttttgtaattgcacatgcactaattggatatttgatgtgtgtgggtggaaatgaatttatttgaatcggtccaatcccacttcaattc

SEQ ID NO: 162597 - DNA, 436 bp, Glycine max
  unsure (1)..(436): unsure at all n locations
aagctcgaatatgttttgactcttacatgcctaactcccttgagtggcatntgtattggttcgcatcttgtatgcntcatcttagtacatatgatatctatcttgcatcattcatcatcatagctagcgcgaagaaaaaagtttctaagtaagaaaagtttcttcaagaggcaaaaactctgttttaagcgattacaagtttatcgtaatcgattacaacaagctgtttgaagcttaaagagtcgagtctcgcatcgattcaatcaactaacgatatcttataatttattgctctattgcttgagacaatgactcgattattcaggagtctttgctttaatcgattaccaagtggtttaatcgattacttctctttcgtttagttgttcaanagtgaacaacaacactttaatccattactttgagtatctaatcg

SEQ ID NO: 162598 - DNA, 291 bp, Glycine max
gaacaactcgcgtgaatccatgatcgatcaaagaacacctcacgtgaatcgagaacacttcaagagttcgagatttgaatgaaggaacaattcttcactccagatgaaagtgtatagacctgaatcaagattctaggttcaagatctcaagaatcaagatcaagattcaagaatcgagagaaggcttaatccacataagtatgaaaaggttctctcaaaaattgaatagcacatgcgttgtttcacaacatgtttaccaaagagttcttactctctggtaatcgattacca

SEQ ID NO: 162599 - DNA, 469 bp, Glycine max
  unsure (1)..(469): unsure at all n locations
gtcacctgcggcatgcaagcttgtggcagataatgctgnggtggatttcttgcatctcagatggctgccaagcgaacaggtctacattcttgccaataaaagcaaagtaagaggtatttgcatcgataattaaatacccgattgtaaagttcctcgagagctggccttgaccaaaggtgctcattacgtcgacatagcctttagtttctagtctttttcctgcgaagccaaggagtgaaccgacgtgaggctggatggtgtcaggagagatttcaagcctttggaatgttttccaatataagatgttagtggagctaccctggtcgatgaagaccttagacactatgaagttggtgattatgatggagataaccatggggtcgcctttggtgatagggttgattcccttgaagtctctgtcagtgaaagtgatcggaggaagacttcatggtgatggtgtgtaacatag

SEQ ID NO: 162600 - DNA, 293 bp, Glycine max
  unsure (1)..(293): unsure at all n locations
aactaactttccaaatgtttgccttctcatgaaatggccccgaggaaccttgtctcaaagaggtccaaaaacgacaaagcggcccaaggaactactctccctcctgaatatgacagtcaccgctttaggaacgctgtacaccatcagcgcttcgaggccatcaaggggtggtcgcttctccgggagcgacgcgtccagctcanggacgacgaatatactgatttcctggacgaaatatggcgccggcggtggacatcactggttactcccatggccaacttcgatccagaaat

SEQ ID NO: 162601 - DNA, 418 bp, Glycine max
  unsure (1)..(418): unsure at all n locations
agctctgtgggaaaccaacggttgtaggccaatgctggatggtgaagttaatgtgtggagtcacaatcttgaattagccaagtcattagttgggcacccatacgctagtcaattgactaaggacgagaagacaattattgttgatatgacaaagtcaatggtgaaaccaagaaacattctactaactttaacattgtgtttggatggagcaattaaagtgagtaaagtattttaactgagctattaaaatgcttcttatattttaatctattcggataaagtattttagaagtaattaaaatgtcatcattttctaaagcattntaatagactaaattagaataattctaaattctcacagaaaccacaggaattaaaattccccattcctctctttcactgtcagccactcactcac

SEQ ID NO: 162602 - DNA, 394 bp, Glycine max
catatgataacaacatctttcttaattatcttatccaaaggcgctgccaaggtgctaaaatccttcacaaatcacctactataacttgctatgccatgaaaacttctcacctcggtcacacttttaagtgtaggccactcttggatatcctcgaccttttattcatcaacttgaaccgctttggaactcactacaaaaccaagaaacacaacatggtctttgcaaaaaattcatttgtcaagggtaacatacaactgttcctttctaagcacacacaacaccgattgtaagtgtgcaacatgcaaatcaagggctgcgctatgaacaacgatatcatcaaagtacaccaccacaaatttaccaatgaattctgtcagaacatggttcattaatc

SEQ ID NO: 162603 - DNA, 399 bp, Glycine max
ggctagcataaatagtagtgaaaacccacacattgagagatctcgggttgatatgtagatggacatgataagttgaataaaacaccatagagattaagatagatgtcgccccacatagatgtcgtcccgcatagatgtcctcatgagagaaacgaaacacgaagaagtcatggttcagatccaaaacttgaacagtgcctatacgagcccataatttttggagtctagccgatatgaagttgaggttcactgttttacccattaatttcactaacaggggaatgcttcaataaccacaccaacgctcatattgttcaacattaacttctatctcagggagaggattaatgggctctactttctctatctcattatcatccatcaaaggagtacgacaga

SEQ ID NO: 162604 - DNA, 460 bp, Glycine max
tgcctcttctgtgactcatcgctacaacggcttgtcggctttgcatacctacatcaaagttgtaaaatcagcacacatgttggttacaaatgaaaaaaagaaaaaatattcagaacacaacctgttagttgccaaactctacaagtgcatgtccattcagctaaattgacctcaactttttccccccacatgtggacctcatatctcacgcccatgttatcactacaccaaattggagtccattgattagcaaaatgaatctccttttctagtctttcgtattgaactggacataatggtccaagttttccagatagtttaaccttgtgggcagccatggttctcgtgatgtaacatctaatttgttcaagcatggtgagaataggcttgctcctatacctgcaaatcttggcattgaagacctcacatgtgtttctgcatatgttgtccactttgggta

SEQ ID NO: 162605 - DNA, 418 bp, Glycine max
  unsure (1)..(418): unsure at all n locations
ctcgaccgngatctctaagtcacctgcggcatgcagcttctagatgttacttctgatcaaccagatagaatgcatccttatacnaggagaaaagacatttatcacaaaagatggcaacatttgctacagggtcatgcctttcagcctaaaaaatgcaggcattacgtacctaatgattgatggatcgagtctttaaacagtagatcgaacaaaatgtcgaggtatatgatgcaatcctacccccaagggtattggataaaagtctccaagagaattgggctaaagctgttaaagaaggcccttgggttctcaagaacctcagggtagatttcgaaacccatgggccaaggttgggtccacttctttttgtaatattagaatacgttttccttcttttggccttgtatttgccctctat

SEQ ID NO: 162606 - DNA, 384 bp, Glycine max
tgaatttctgagaatcattcctcagagtgaattcatagtaattgagcaattgaacaaaactccagcaaagatctttctattatgctactcatgaatttcgagccttgtccggcattattggtgaaaatcttgaaccatgcccatgtgatgcaagacatatcggtggagggtttcaggggaataatcaacaacatcaccgtatacaaccacctgacctttgctgacaaggagatgccagttgagggcaggggacacaacaaagctttgcacgtgtatgttaaatgcatggacgacataatggccaaagtactcatcgacaatggctcttctctaatgtcatgcccaaaacgacattggataaatcgcatttgatgcatcgatatg

SEQ ID NO: 162607 - DNA, 382 bp, Glycine max
  unsure (1)..(382): unsure at all n locations
ttgcgaacacgtaatagttaatcttaataaatntcattttatcttttacattgaagcttgttgaagctcgcagttaaaagccttacccattttcattactcataactcgtttcatgacataaaaatgtaaaatttaatggatcaaaaataagattaaacttttttaaattaacatttattttttaatttttaaaataatataaaaataaatattttagttttctattttaattttttttaaaatgtgttcgttttttaatatttttagacatcgatggactatatcaaaattttcgttcttttaagaattaaattataatcaatttatagaattagagattaaaatgattatttatctcacataaattattaaaatatacac

SEQ ID NO: 162608 - DNA, 383 bp, Glycine max
tcgtgtatgcgctccacgcccgccatgcgctcttttttgtttcttgcgcgcacaaactcgagcgcttcctgcatcagatctggcgcggccgggtgcaaatctggtttaactgtaaccggattcaccaccgcataactgtgccgggaagttgcgaaatgccaatgtaaatgcgaatgctggacttaataggtgggacacggaggttcagtggagtgtactgagagacatagattgtgaatttagttagcggaggcgttataatgatgggagaggctgcggtaggagagacaaatagaatgatgacgcggaaatgaaatgaaatggaaaacgatgcgaaaactatgtgttatgctatggggctggcgcgcttgcaaaattaacca

SEQ ID NO: 162609 - DNA, 368 bp, Glycine max
atgatgatatctatacagatggatcttatatatctatatatctatagatagatatatagatctagatatatagatatagatcatacaatgaagtaccgcacgagtgggtatataggaatccaaatctgccgaatcactcatgttatgatcttctacatcctaggtcttcccgttccttcatctggcttatgttcttcatgtagcattcagactgaatgactctatgaaattacgtcgctacttccacatggtacgggtaacgtaggagacatctctatttttcccggcgggaatccttagaattaccacagcttagctttcaattcgcctctgaccatcaaatgagatgtgaataacccgtcctcccc

SEQ ID NO: 162610 - DNA, 363 bp, Glycine max
  unsure (1)..(363): unsure at all n locations
catcgataattggtccagtttaaacgtgatgcctaagaacactttggagaaattaccattcaatgcctcccacttaaagtcgagttcaatggtggttcgtgccttcgacggcacccgctgagaggttaggggagagatcgatctcncagtacagataggccctcacacctatcaagttactttccaaataatggatattaaccccccctacagctgtctgttggggngtncgtggatccactcagtgggagttgttccctctacactccaccacaagttgaaattcgtagtggaagggcatctggtcatcgtatcaggcgacgaagacatcttggtgagctgcccatcctctatgccttatgt

SEQ ID NO: 162611 - DNA, 435 bp, Glycine max
  unsure (1)..(435): unsure at all n locations
aacttggcctattttgtccaatcgcaaatgtggccttttctgggtcgtgaaacgcgtggcttcgagtgggacttcgaaaatccacgtttgggtggacctctttctctcttaaatttcgcgggtatggggttttgggagatatgatgggtggatatgttacgtctccgctgtgtgatgattatttgtgaacgcatttgctgaaaacttgttgaaattgccatgtttggatgagttaaacatacccattctgttttanggtttctgagatgatgttcgtgatgttcatatgctgaaattgctgatggaaaactgctacacatgaacggtggaactaacctacggttataaagcgagaatgtgatgtatgagtggaaaagagtacactttgacattggaagctaatctgatcttgggtaatggggtacaggactatac

SEQ ID NO: 162612 - DNA, 416 bp, Glycine max
  unsure (1)..(416): unsure at all n locations
agaaagagagaatgtggtatctcgaaatcgaaggaataaaagaaggagagaagtggaactttgaagtgtatctcataagactttcattcatcaaagttacaacaagtgttacacatgcttctatttataatctaggtagcttccttgagaagctttcttgagaaaacttccttgagaagtttctttgagaaaacttccttgagaagctagagtttagctacacacacctctctaatagctaagctcacctgcttgagatgagaagctagagcttagctacacaccccctataatagctaagctcacccccatgacaaaatacatganaatacaaaataaattcctactacaaagactactcacaatgcctcgaaatacacggctaaacgctatactactagaattgccgaaataca

SEQ ID NO: 162613 - DNA, 307 bp, Glycine max
aacttgccctgaacccttatgtaatttgaagcctcatgtcttcctttctgagaacacactataaactgcctaaccccccctgctgttactccataactttattatgtaattactgcttaaggcacgcacatatggtcctaaatcactacacattcagctacgattaaccctttgtgcctaactagggttttgaaacatcataacagagacagaccattgaacaatggatcttcatcattaacatacaacagagacataccttcgatggaagcgcagacacgatcttcacaaacgcgaactcgacaat

SEQ ID NO: 162614 - DNA, 364 bp, Glycine max
  unsure (1)..(364): unsure at all n locations
aaatgacagaatgacgagaaccgaaaatgctgacgatgaacaccatgcactanctgtggtggagtctgaccgacggacaaatcattcaaggagacacgatgagtcaagagagatcaaaatcacaattgcatccacaactagatatgagtaacatgcaatgttactatcgtagtgagagtggtcatgtgccagcgaggtgcaaacaactgaatgagaacttaaaaaaattaagatatatgaacatagatggtgtcaactcccaagctaatgaagtaaaagtgttgaagatgaagatgacatgtctttggcaacaaatgatgacggtggtataacaccatacgcgatgatggattctcctgtggac

SEQ ID NO: 162615 - DNA, 431 bp, Glycine max
  unsure (1)..(431): unsure at all n locations
ctaaagaagctagagcttagctacacacacctctctaatagctaagctcacctccttgagatgagaagctagagcttagctacacactctctataatagctaagctaacccccagtccaaaaatacttgaaaataaaaaaaaagtccctactacaaagactactcaaaatgccctgaaaatacaaggctaaaaccttatactactagaatggacaaaatacaaggcccaaaagaaggaaaaacctattctaatatttaccaagaagagtggatccaaccttgacccatgggctaaaaaatataccctaaggttcatgagaaacccagggccgtctttagcaggtctagcccaatcctcttggagtcttctatccaataccctntgggcgtaggattgcatcactcaaccaggaccacattaagacacacat

SEQ ID NO: 162616 - DNA, 355 bp, Glycine max
caacagccttctacaggaatcttctggagggcccaagtgggcctggttgctatttgcacccccatttttactaagtacaccccccttgcctttttttctgtgattcttttttcgtaaagttacggaaacttacgaatttcgtatcgatacttgttttctttccataatgttacggaaccttgcggattacataatcatccgctttttgacttacggaatgttacggaacctcactaattgtgcaatgatgcttccatttgagttccggtgtgtcacggaaccttacggattgcgcatcaatatttgtttgtgctttacggactgtaccggaatataacaaattgcctaatgatgg

SEQ ID NO: 162617 - DNA, 453 bp, Glycine max
  unsure (1)..(453): unsure at all n locations
gcttaacaccaaaacatggagaaaattcgatacaagtcctgtatcctgaaaacagaaccaaccttctgcacttatcatacagtccaagacaccctgaagctaaaacatcaacctcaagcaggacaatacgtgatacacatttcgtgtacaaattaacaatagttaacccatcaaggagctaaacaacttgtgtgcagctgtatgctagacttcttccacttgatccataagataaatcactgaagttatataatggtattgacaccaacaagacaaaattcgtgctgagtcatgctagacttctagatatcaagaatgatatcccaccataaagtgaatagaaaacgtctgaagaatgaacagaggcgagtgaagaagagaatatatagaacataagggtgtcgtgtccacctttccncttcacaccttaatatggatcctcataaatattgg

SEQ ID NO: 162618 - DNA, 350 bp, Glycine max
cgctgttttatttttgatttttggaagctcattttttcttaattctaatttctggaaatcgatgttcttttcaattttggtttgtgtaaaattttttatttatccttaattcctatatgctcgcatgtttctactttaattcctttaacgctctatttcttttatttataattcccataagttcacgcttataaggatcaagatcgaaaaaaaataccaacttactgaaacaaacaaaaaatatagcacgatatcttaaagggaccacaatctaaaaaaaaacatatactttaatcgaacaacaatatatttaagctacaatcatatatgtcttatcatggtgacataat

SEQ ID NO: 162619 - DNA, 60 bp, Glycine max
agtcaaagttgaaattgtgggaactgaacaactgacgacgtgactaatatgatatgaact

SEQ ID NO: 162620 - DNA, 335 bp, Glycine max
tcaaagagaagttcaagtccattgccatcacagtgtgaaaagagtatgatgtactaagggacgtcgatatggccaccgctgaagccttggaacgagaaaccaagatagcccgacaagaatgaacacggccaccaaagtgttgaggggctttataaggcagcaatagtaagctcaagctccgaagaggtgaaaggaatcatcactggtcaaacgcatgatcttgaatgacgatctaaatgtctaccttacgtcgaaaataaatttgtccccacagtcatgcgagactgaagggaatatgtgggccatcatcgatgagtgctaatagaagctaaatc

SEQ ID NO: 162621 - DNA, 358 bp, Glycine max
  unsure (1)..(358): unsure at all n locations
aatatagggggagaaaacggatgcacattttatctatatacagttgtttgttgtttgcttgaatcttgatttcaggtattgtattgtcatcatcaaaaagggggagattgtagatgcaattggctttgatgttttgatgatgatcatgatgatgtgttgcaattgatgcaaatgggcttttcaagattaaaattcaagacaatacttcaagattacaagtcacaacatcaagatgatcactagaatattaggaagggaattcctaattgaattagcaaaggtttggccaagtgatttaaaataaaaagtgtttttcaaaggttntactctctggtaatcgattaccagaggatgtaat

SEQ ID NO: 162622 - DNA, 429 bp, Glycine max
aacaacattcatacagcacatgctatctcagccaagcaaaacagagcaaaggcagaaaactctgcttaaacaccaaccaaaatcacagctttttctcgcttaaagaccccagtgacaattccttcgatccaattcgttaaccgttggatcgactcgaaaattttaatggaagtctctagtacataagcctacattgtgaccgttgggatctactagcaaacatgcagaactcattctgcactagactttccacagccaaccacacacaagcattgttctgcacttgtgcaaaattctgctgcacaatttcacagcatatattctgcataagtgcagatttcgaaaatcacacttgccttcaaccaatcttgccaaatcaaatactgacaagtccatatcatgtaccaatcatgtctaaaccaaagtcaa

SEQ ID NO: 162623 - DNA, 212 bp, Glycine max
  unsure (1)..(212): unsure at all n locations
ctcgacccgngatccttaagtcacctgaagctgcagcttcgaacacagactatgtgtctgtatctttcatccatactggacatgacacaaaggttatccacaactccactgatctcccttcatcaagaatcacaatcgagaggaagatggacaagatcatctacctctagcttcgcgaggaatttctagaagcattcaggggatctattctc

SEQ ID NO: 162624 - DNA, 396 bp, Glycine max
  unsure (1)..(396): unsure at all n locations
tactcagcttagacccacaaataactcacagtgccgttatgttgtttggtgcaccaccatcatntcctatcttcaccttgcgatgatataaaggaggagcatggtaacatggctacatcgtcttggcacgttgacaccgatgataacgagctgtttcattctcgcgcttggacaggatccactgtttcatccctccaagcctctgagggacggatccgaaagcagaccacgacctcgtgaccaacatgtccatcatgctatctacgcgaatttgtgcacaaactttctggtcgtgcatcttcttcgtctggggaagatacccgtcatgggttggctgggaaacgccaacaactctatcatgtcgcagttgagaggttccaaaacatgactctcacc

SEQ ID NO: 162625 - DNA, 442 bp, Glycine max
gcttggtcttgatatttcctcagttctttaacaagctttgaacaatatacttgtccttcatttaattgtctttgggcttggcgaccacgctcaacaaagtacttttgacacctactgtacgttgatttcaccaatgctgttatgggaatgttgcgacaatcctttaaaaccttattgatacattatgagaggttggttgtcatgtggtcatatcgacgtccttctctatcataagccatcgtccatttttcctttgaaatgcgatcaatccatgttgctatggctggactcagttgacgaaatttttctaaattttgataaaaaatgtgctcgcaaggagtgtaggctgcataaaagtagttatgaataacaattttaagtatatatgacagttaaataaacgtgaccatcaaatatgaaatcttacccatattcttcaaca

SEQ ID NO: 162626 - DNA, 388 bp, Glycine max
  unsure (1)..(388): unsure at all n locations
ttacggaacttaaatactaagcttctagctttcattggtgatcttgatctccttttggtgctctaagttgcgggaatgtgctcaaatatgtgggggcaatttggtatgttctcttgcttgactgggttgaattgggggtttgtatgaaatggccctatgcctataatgcattttgaagcaatgggacatgccacattgttcccgttctcttgctattgatgcntaaacgcgcgcccaccaagtgttcggtgaaatgcctcaatggcattagcgcgtgattttcgtagggaaacaacccatggggcaatttggtttgcacatattttctattttttgggacatgcattcagtttcgaaagggctaaagtaattgcccctcatatatcct

SEQ ID NO: 162627 - DNA, 291 bp, Glycine max
taaatctttctttatggttaacattgtctctagaacatcttcattggatttattgatgaaaactatacatttccacgggaaaaagaggctaagttttgaattgcagatagtagaagttgggctaaccgcatgtccaccgctaagcgcaacttcagcgtgctttacgcaaaggagaatttggccgagccttagcatcatagtcacgcgctaaccacgagataattgtgctagcccagcaggtgcgttcagccaggctaagcgcaagactggcgctaaacccaatctcactta

SEQ ID NO: 162628 - DNA, 456 bp, Glycine max
  unsure (1)..(456): unsure at all n locations
cgaggtacttacccgttgaagatcgaagaacgatgatttctaatgaagaacgtcgaagaacagtcgaaaccttcgcgaaattccttacgaaaacgttacggaaacgtttcggaagcgcctcggcttggattttcttcacggaaacaatttttccaagcaaattcgaaagagagagaagtgcctaagggggctaaacctttttcacttcacttctccccctatttatagaaaattgggggagaagcttgccacccagctcgcccaggcgagcagggttgcttcctccagaagcaacaaccttctggaggaatcttctggagggcccaagtgggcctggttgctatttgcacccncatttttactaagtacaccccctgccgttttttggtgattcttttttcgtaaagttacgaaaacttacgaatntcgtaacgatacttgttttctttccgtaat

SEQ ID NO: 162629 - DNA, 410 bp, Glycine max
  unsure (1)..(410): unsure at all n locations
catgcnagctatacagcacatcttagtgatgacccacttacttataattaaaataacttaatgccattaacctagagaatcaaaaaaaacttaatggctgagtgtaactgaaattgtggcaaccaaaagtcacccccaacagccaacaagtcagccaccatttggtctcccaaaaggctgatgcctaggttgccaattgggcccttattacaacttgaactaaacctaactaaagcccttttagttgattaacccaaaacatatttttggtcagccaactttacaaggattgggccattatttagacaaactaaacactctaaaattgagacaaagtggtgtcatttagtcctcctccatttgngccatgatacaactcacaaccatcgactttctccttgaaactgggc

SEQ ID NO: 162630 - DNA, 411 bp, Glycine max
ctctgttttcaatatagagcgtctcggtatattacgggttttttatgacatccgagtaaaaagttgttgtgcgttgaatttgctcaagcttttgttctcagtttcgagcgtctcggtgtattacgagactcaatcagatatcggagttaaaagttattgtgatttgcatttgctacgagcttctattttcaattacgagcctctcgatatattataggactcaatcgaacatctgagtaaaaatttattgtcttttgaatttccaacgagctttcgttttcaattacgagcgtctcgatatattatgggattcaatcggacatccaagtaaaaatttattgtcttttgaatttactacgagcttccgttttcaattactagcgtctcgatatactacaggacacaatcgga

SEQ ID NO: 162631 - DNA, 408 bp, Glycine max
  unsure (1)..(408): unsure at all n locations
tcaaggaatctcgctagatgacagtctctgttcttcttggaaggtaccacaagatattgtacttccatatcctcatttgaagctttttctttcttcttctctcttgttgtctcacttatactcttttctttcccttctttatttttttttcaactttttctttttcttcattttctttatatttttctacctctttntcttttcttggncgtttatttctttctcctcaaccattattggtttttcactctcatgatttgtcacattagttacctcctctttctttttctcagtgccaccctatcctcatcctcaactaccaaatgcttcttgtttcttgtcatcacaacaatacattcctctttgggattcttttatatgcttgccccacagctattggatgacttt

SEQ ID NO: 162632 - DNA, 453 bp, Glycine max
tgttgtcaaggctgacacaaagccaaccggggtcttctgctctatcttataagttgcaccccacagtgagtcagcctcactagaggtgtacaagtgatcaagcgagacgtgagaggacgaagaatgcgacacaaccgctgccaaaaccacaaaaggagaagccaccaaagacataaagcaaggaggtagtaccatgggagcaccagtggctgccacaccaacacttaataaaggtgtcatgatggtggacacaacaccacagtagaatcaaactaagtggctggcacaatagctttaacagttgcaggggtaacctcttgagcaacaacaacgggaggaggtgaaggagcatgagtagcagcgatagtagtaggagcctcaatggctggtggagctggaggcacatcttgcacagtcaaaagctgactcgcagtaggcatcacaaagccttat

SEQ ID NO: 162633 - DNA, 428 bp, Glycine max
ctgagctgcagctttaagggcgagacggcattgctatgcaagaaaaacacgggaagcagttatttcttgtcaaatcccccttcattttcttttcaatttgattttgaataatgctatttctacctacatttttgacaattttaaatctcaattcaagtatggttgataaactattttagtctaattttaacttttttgttagttgcaaagtttatttaaccatgttagcagtgcttgataaaattttcgtaataacctgcaacatttttgagacatcattccaagtagtattttagtttctaacttcttaccgttctttttagcttttaaacacatttggtatctttatctcttacccctctagataatatacgagtctattaccatacggatcaatataataaatcatcctacttaagtttatgcgt

SEQ ID NO: 162634 - DNA, 482 bp, Glycine max
accttagatactcagctggacgttttataaaccgtaaagattaaaatgttatattttattattccacgctgctttctgtgtagagttccaaagaccgacaatcggtttctaatgtttagagaatctgatggctgagcctcttgggtttctttctgagttagcaatggggcacttaagtcgtgcctcacctttacgagcagtaggtgctgaacccttctgctgcctgggattatcctaattgatggttttgattgagatttgagaagcagtttcttaaaattttcaaacttaacaaggaagaatcatatggaaatgcctatccatttgtttacaagaacttaaagcttttctaaataaaatgtttatgctctcaaggtcctcaaatggaaacttttttaatcactccccccatctttctttttagcactattgcatacatgattctctttatgatacagcgtaatgatgctagtgaatggcat

SEQ ID NO: 162635 - DNA, 368 bp, Glycine max
ctgcagctttacttaactaacatatattgtttgcgcggatctataaataactaaagaacatatttacataattatttgttctgattcatgaaactttacattaacatatcttttatttatcaatatattatcacagaatattctcaaattggagggtgaccacctcactaaagtccattaactcgaagacaaaagtgaaattcacctcatagagcacgcaaagaaatatatttaatgaaagaaaaagtcccccctcatggtcaagaacataaaaatgatgtgaataagacaccaaaaactattcatctacaaagactttcgtatttatttccttttgccgcgacctattgttgaatttcgtttctctg

SEQ ID NO: 162636 - DNA, 442 bp, Glycine max
  unsure (1)..(442): unsure at all n locations
ctgaagtgaggaagngcggaagggtgagacttcctactttattctttgaccacagagtggtacctggagatatgtcgcgggggtcatgagaccttacggacgtcaggtggggtgctattgcccaaaaccaagcttgaccaatcccaacccaacccgggcatagtcagtcagtgagaacctgtgacgtacctaaacaggcgagctcctggcagtcaaccgataaaagaacaaagaccacaaagcaaggaggcttgtgtggtggctggccacctatgaattttgagtgatatctggaatatggcctctggtaatcgattaccaagggtgtgtaatcgattacaaggcttataaatgaagacaggaagttaagatggtctctggtaatcgattacaaattgtgtgtaatcgattaccacgcctagaaatgggatcaaaaacgtga

SEQ ID NO: 162637 - DNA, 438 bp, Glycine max
ttgatatatatgatggactcatggtcactatgaatgacaaattccttgggataaaggtagtgttgccatgttttcaaagcccgtactaaggcatacaactccttatcataagttgaatagttaagggtaggaccacttaacttttcactaaaataagcaattggatggccttcttgcatcaacacagctccaatcccaacatttgaagcatcacactcaatttcaaaagatttttgaaagtttggcaacgcaagtatgggggcattagttagcttttgcttaagaacattgaaagcttcttcttgtttctctccccatttgaaaccacatattttcttgagcactacattgagaggtgctgccaatgtgctaaaatccttcacaaatcgtctataaaaacttgcttaagcatgaaaactcctcacctccgtcacggac

SEQ ID NO: 162638 - DNA, 440 bp, Glycine max
actcagcttccagttatggagagctaaatcctctattggttcttccttgtatgtacttgatgtaaatacctgtatatctatttaatgatgttttatgtgttctctgtgctatcagtatgtcatttcagtgtgtttttgccttgatcacgtagatgcatgctttattaggatcattcaacagtggaaactggtccgattcttagaacttgataggacagggctagtttatcatattatcacgggggatcggggtacggtaatctagttatttgtatgtttgtcttaatacggctctggtcgagtttagtccaacaagaggaatctgaggatgatgcttaatcaggattacgctagactatcatgaggaatcggggtttagcatttcaggagacaccatagaacacatgagcattgttaagtggagaatatccttttaacat

SEQ ID NO: 162639 - DNA, 341 bp, Glycine max
gagctagagcttagctacacacacccctctcataactaagctcacctgcttgagaagcttccttaagaagattcctaaagaagctagagcttagctacacacacctctctaatagctaagctcagccccatgagaaataacatgaaaatacaaaaaaaaaagtccttactacaaagactactcataatgccccaaaatacaaggctaaaaccctatactactagaatggccaaaatacaaggcccagacgaaggaaaaacctattctaatatttacaaagataagcgggctcatacttagcccatgggctcgaaatctaccctaaggctcatgagaaccct

SEQ ID NO: 162640 - DNA, 407 bp, Glycine max
cacctgcgcatgcactgcacattatgttgcgtttttatcaccaaaatttcaacacacagatgtatatgaataatgcccacaccttatgaggaaactatatatacaggtcgacatacactcataatgagaagctgatcaataatgctcttattgcttcatcggacctgtgacagaaaactctttaaattatcctgctcctctttgatgcatggttcatccactgccattgagtccacccccaacacctgaaaacatgcaattataacaccaccagagtgatcttataaacgagacatttaagtttatgcactctacaacattacaccttcgagcatgacaatctcttgaaaggcatgacaaaattcctctcacaatctagatgtttatcatacccttcctgaaattaa

SEQ ID NO: 162641 - DNA, 437 bp, Glycine max
  unsure (1)..(437): unsure at all n locations
atccaatgccattaaaatggaagaaaacacattatttattttattncttatctgctagtgcttccttttcctgagaaacatttttgagatataaaataaaagaatggattngtgttcaatggtgcaattcttataaaattatattttgcaacttaacatttttattactgcacttttgtcatgtctttcttgcatgtgatccaattggaatatgctagtcctcttcctttgaatctgaaacttgatgtcacattggctgcaggatattcttcgacttttgacattatggttcaaccatggagctactgcagaagtacaaatggccctaaagaaaggattttccctggttaatatcaatacttggctagtagttctacctcaaataattgccacgatacactctaataaccatgctgttagagagttgatacagtcac

SEQ ID NO: 162642 - DNA, 149 bp, Glycine max
gggtaaacacgtggggggggagttttttttcaccccaacggcgggtccaagacttagcaccccccccaccgaatatagctgggaagatcgactgtaatacttgggtaggaagactatctccgggacgataggtgagagagctaaagcaa

SEQ ID NO: 162643 - DNA, 452 bp, Glycine max
  unsure (1)..(452): unsure at all n locations
actcaagcttgaccttgttgtcctcctcaggtggtgcaggagaatatctgctctattgngagcaaccactccaagtaagcctccggatcattctttccttttaatggaggaatgttgagtttaataccatcaattcggttttgtctaggaacaccatcattccctcttctcctcctttcttcttcattatgagctctattctccatttgatccaacctctcatggagcgcatcatctcgttgtttcattaacctctccaaatgttgcatcaaagcttgcatttggaattgcgaaagccccactccatccttaggattagtacctgacatctcatactaacaaatcaaacgttacaagacaattatagttgctgggtgaatacctcacccactcaagtgtatcacacaattatggctattctctaatgaaacactcttgccttttaccactct

SEQ ID NO: 162644 - DNA, 462 bp, Glycine max
  unsure (1)..(462): unsure at all n locations
ntaaacggaanagcaagtaccttgagggatggtgaattttactagtcatgttcaatccaaggttatttcaaacacacccttagaaaaagcagcgataagaagtagaggtttaagaagtgagacaagaacaaaaaaaaaagtgaaaattttataggaaagaaaaactctgtaaactaaaaaaatttcaactaagttgaatttaaattaaaagggaatcatgaatagagtttgtagaaagaaaggattattttaacttgggggctggggcaaaactatagcggttattgcggagtttggcaggtcaatgcaatgtagaaaaaatgcaaaccttaactaaattcgcaagaatcatatccaaaactatagctggacccccttttttttttgtttccctagtatctagtcaagatatntttttggtggtgcatttgaattggtcttgtgtggaggtggcaagcgccg

SEQ ID NO: 162645 - DNA, 372 bp, Glycine max
tctcccttctccatggcttaatccctggtggatggtgcctaccctctcctcttctactttgcctttcgctgcatctccatggtggaaaatcaccattgaaggacctcattgaagcttaaagatccaacctctctagaagctccacaagcaagcttccatcaaaatcttcttctcatcaacctctacatttcttcccaactatccaccaagggttcttcatatcttgccctttttcctttgaaattggctccaccacatgagagtatagtcagtgaattccatggctaccaccttcatctttctatcctcggtgtaattatggcatgcaaatagctgtctaattttcatttcccactacaaatacgctttcgg

SEQ ID NO: 162646 - DNA, 293 bp, Glycine max
  unsure (1)..(293): unsure at all n locations
cacaagtgacatatgtgtgcttccttgtctattcttgtccccaagacccataagtgctgggcctcttccaacagctgattgttacaaacaattatgctatttaatctcccttctgcttccaattgcttgtgactntgactttggttctggatatcagatgtggtagccatgtcttttgctcctttttcacgtgaggttcttctaccacaggtttaagctggggggctttagagtgagacaatcttgtctttaccagactagtaataataggttggggtgaatccacttgagaa

SEQ ID NO: 162647 - DNA, 440 bp, Glycine max
gcttaccaccacaccgacaacaataatgttctctacctggctgcgagtgggagtgagaaagaagagtcgtgatgtggagaggaacacctactagggcgaaaccaaagctacggcagagacgaacaatcgtgactgacttagggtgtggagccaataagttttaaaaaatcgagttcattaacatcagttttctccaaaaaccgatgttaacaaagtgttgttaatgttaacatcggttctttctaaaaaaattgatgttaacttatcattcaccaacatcggttttttgggcaaaccaatgttaaggacgtgatgttaacattaacatcggttgttttaaaaaccgaagttaacttatcatttaccaacatccggtatttgggcaaaccgatgttaaggaagtgatgtaacatccgttttaaaaaatgatgttacctact

SEQ ID NO: 162648 - DNA, 442 bp, Glycine max
  unsure (1)..(442): unsure at all n locations
tgtactgaatngaatagtcatagcctagtaacttctatttatttacttattaccccagtgtctatatactttgggacattaagtccttcaacctgtgatgatcagtgaggatgacggatggatggccgacaaggtattgtcgccatttctggattgacatggtgatggcgtgcaactcatgaacataggttgaggttcgctgcaaagatgggtagaatgattcactgaagaaagttattaggtgtttgttttgcatgagcataacacccatggctagactagatgcatcagtctctagaacgaaacggtcactaaaatttggtgaggctaggataagagccttattcattgcaacctttagtgcttcaaaggactattgggcttctatggaccaattaaagttgtccttgcaaagaaagaaggtgataagagatgatgcaat

SEQ ID NO: 162649 - DNA, 442 bp, Glycine max
agccttgctattgttgtgctctctgtcttatagttactatcatttcaaagagacattactgtctggaaagactctgtttctcttgatgaagtgtatgctactctgatatcaaaggaattgaatgaacgaaaggagaagaagtcctctacaagtggtgaagggccgacatctagacgcaagaccttcaagaatgatattcaatctcgtaataagaatccaaagctacaaaaccacaagaatggtgaaggaaacatcttctaaatcacatgttatcactgtaaaaaggagggatatacaacgaaagtttgtcctgaaaggcacaaaaatggtggcagtaacaatatgaagaacgactcacgaaacgctacaattgttcaagatgatggttatgaatatgcagaggcactgatggtgcatgacaagaattaaaaactatacggat

SEQ ID NO: 162650 - DNA, 474 bp, Glycine max
atcttaagtcacctgcggcatgcaagcttgcattatttcgtagaacattaatcttattttagatcagtatcaatgaataattcatcttgtgttaatccgtgtatcgcaattcacatggatatattattgataaaaaggggaaacaaaatacacatctttcaaaatacatgtgttttagtgagacagaacgatcgtaaaaagattattaatatgaaaatttcatctttaatattttttttgaattattgcatgtgtaagagtttatctcttataaaccaaccgtttttaaaatattccatgcataaataaatattaattatatgttatcttaaatataaaaaaataacataaattaaatataggttgactcgtctgagtacttatccgaaggaaaattattactacagtatatcatagttaaatgaccaatctgaaggcatgataagagatcctaaatttggggaattgtcaata

SEQ ID NO: 162651 - DNA, 301 bp, Glycine max
  unsure (1)..(301): unsure at all n locations
tgtgagttcttgaaggaattagctcttgagaatgttttagtctatggggagatagaaaccttgagaaataaacttagaaaatttattggtagtaatgaagcctttaacaaaattattagggcacaaagaaaccttaaagacaaatttggccatggtttcatagacataaagattgcacatggtgaagaagtcactatttgctacttctgtgttaaattgggtcatgaaactcataagtacaaggacctccctgtaaagggcaacccatcgaaggtttgtntggtgcataccaacacccaca

SEQ ID NO: 162652 - DNA, 464 bp, Glycine max
  unsure (1)..(464): unsure at all n locations
ctttctattaacatnnatctcaactgtgtatatttattctattcttggaattngagggtatagattaaattgaaataatcttaaatcccgttaattgatccatgaatntattaatagtctttgaatccagaattgaccttaagtttaaaaaaactttagataatttttgcgttatacataaaaaaaattatactaaattttattactcactagctactttaaaataaaaagattcaaacataaaatacatattgaaaatcaattttaaccaacaaaattaattttacaaatacttatataaagacacactatgtggaccgacatgcatcatccatttagtattattaatgataaaagaactctgtgacagcttttctttatacctngcaagccgagcaacattaattattctaaatatgctgcagttctctcacatgtcatgaaccctcttgctctggttatat

SEQ ID NO: 162653 - DNA, 447 bp, Glycine max
tatccaacctcccattaacaggaccttcatagaaaagtattgcatgccaagggaggcacaacaacaggggcaagcacagtagcaggggcaggaccaccagtagcagccagacgcagatgcattgttgccacctctacgacaaccaccatctctgctcacatgcggatgatagagctccagatgcacgcatatatgcagcatgtggccgaccagcaggcggccaatcatagggtttaggtgcaactgaatgagagcttttacctgtacaccctgcatcagtagcgctaggaccccaatccttacccatggcctactcccgagcagttcgaggccatggtcgcatggcctggagacagacccagttttcaggcaggggcaagacccgtagagaccccaggagatgaagatggagctcacgaagacgatgacatggccaatgtgatggac

SEQ ID NO: 162654 - DNA, 489 bp, Glycine max
  unsure (1)..(489): unsure at all n locations
tctcgaccccgatccttnagtcacctgcggcatgcaagctttaggaacatagaggcatggtattacttgagaggggagttgagtcctatggctctgccatggttgcacgcgagcgccaaccaattgcttttgcatcattaggaatggctactgacccaaaggagccttgctggtacaaaccttgggatcccggaggacctcggcagactcgtaacaccttgaggacaaggtgttttcggatgggcataggaatgttatgaatcaccccaaggtggtgcaattcagcatagagcaatccaacacagaagaagaaatagcagtagacaaggtagagacaaccactaacctcgggaccaaaaggagaatatacaggttgcactacctgaagggattaatgaccagtgcaaataccacacgctgagctggcagcttgctattggtgaatggagatacttgtctgctacaagatccattctgtaatctgtattg

SEQ ID NO: 162655 - DNA, 308 bp, Glycine max
  unsure (1)..(308): unsure at all n locations
ccgcttgcactactctctgtaagttgaagcttgatgtgtattctaattcctcacatcttaagctaagtgcatattgcaaaaatattntgtgttgcagaaagtgctaagcacagcctgccgcgctaagccccagatgcttatgggatttacaacttcaagttgggcttagcacaaggttaggctaagcgctagggttttaaacttaaacgtcacgttggctcgctaagcgcagttgtgcgctaagcgcgccatacgaatttcagtttttaaaaatcaaaggcagaggcactttgggtggttaccttgca

SEQ ID NO: 162656 - DNA, 445 bp, Glycine max
  unsure (1)..(445): unsure at all n locations
ctcagctgcctacttctatctagacttcctctatcatcactggtttgagtcttctttgtggttgntccattggatggaagtcctcttcaaggatgatgtcatgcatgaagatgcatgagttgattcctttgacgtcagagattttccatctgaaggcttgcttatgcttctttaggacctgcattagtccttattcttactgtttggacgatgtgctccaaatgatggctggtttctcatgctctccctctcaacagacatatttaaggcgaggaggcaggggctttaatataaagataggtttttattcaatcaacgtgcctagatcttttattttattttccagcatatcctttgaggagtttatgtgctagatgcatgcctctagctctttagtatgctctgagagaggtctcgcacgatgctggttaaagcaagctctaat

SEQ ID NO: 162657 - DNA, 356 bp, Glycine max
agctttatatgacgataagaggtatttatagttggaagcggtgagctgatcacgactttatttgatattagaaaaatcaacatagagtctatcataacgagagttaacaagtgaaaactagagtgaatgagtattttattctaccatctcaggtcatgtttggctgatgagccctattcaaaacaacaacattctaggattaactagcatgatatgagaaccttgccactacaccggtcactccactgcttttgcaagacttattgcgtataaatataaataatataatatattctccattaattaaaggtattgctagaatcaatattatcgctaatgctccaatgaatacttat

SEQ ID NO: 162658 - DNA, 465 bp, Glycine max
  unsure (1)..(465): unsure at all n locations
cgagatgaggaagtgtanaagggtgaaacttcctgcttttattcattgaccacagagtggtacctggagatatgtcgcgggggttaggagaccttggggacgtcaagtggggtgctattgcccaaaaccaagcttgaccaatcccgacccaacccgggcatagtcggtcagtgagaacctgtgatgtacctaaacaggcgagctcctggcagtcaacagataaaaggaacaaagaccacaaagcaaggaggcttgtggtggctggccagctgtgaaacttgattgatatgtgagatatggtctctggtaatcgattaccaagggtgggtaatcgattacaaggcttaaaaatgaagacaggaggctaagatggtctctggtaatcgattaccacggggtgtaatcgattaccaggcttgaaaaacaggtcaggaagccatgagggcttctggtaatcgattacca

SEQ ID NO: 162659 - DNA, 270 bp, Glycine max
ttctttagtggatggtgccttctctcttctcttctcactttatcttccgctggagctccatggctaaaaatcaccattgaagaactttattgaagcttaaagatccagtcttcatagaagcttctcaagcaagcttccatcaacttctaacatgatcaacactacacaaatcattcacattagccccaaaataatgtttacatgtaatcaatatccaactaaactttaacagagagaaatttaccatttgcataatcattagttagtcat

SEQ ID NO: 162660 - DNA, 412 bp, Glycine max
  unsure (1)..(412): unsure at all n locations
ngcttgcactctctatgcctgctttattctgtttattatggctcctttatttgaacattgagaagcaatatgttcaactccttgacacctgaaacatttgatatcacgagatgtcgaagatgaattaatttccattttacccttaggtgtagcaaatgaatttttggacttagcttcatcttttgactatgtcacagatttgttgttttgtcaatttgacttccatgaagaagagaaagcaaatttgaaagtactcttagctttcaatttccttcccacttgaatagatttgtgcagcatgtcctccatctccatataatgctgctacaattctaccacattggctatatccttctttagacctccaatgaatctgtgtggaagcaatgctctacaagattattttgatgat

SEQ ID NO: 162661 - DNA, 449 bp, Glycine max
ctttctcgagaggcttccttgataagcttcctcgtgaggcttcttttataagctagaagtttaactacccacacccttataataactaaattcacctccttgaaataaaacatggataaaacaacacaataaataaaattaaacatcaattataattactaataatatttcagggtgttacacttcctctttaagtttcttatccaaggcactctcttggtggtgaagcttctccttccatggcttattctctagtggatgacgtatcctctcatctcatcttcattatcttttgttgcaacttcatggctgaaaatcaccattgaaaaacctcattgaagctcaaagatccagcctccataggaacttctcaagcaagcttccatcaatcatcatatatcttactaaagatataactgatgctaatgtagtgcagtctgctagttcat

SEQ ID NO: 162662 - DNA, 435 bp, Glycine max
  unsure (1)..(435): unsure at all n locations
ctgcagcttggtgaaatgaagaatgcctattctttacttttaagcataatttgtattgctcgcttagcgcacagtcgcgcttagcgagacaatatgacatttgggtttaaagcagccttgcgcttagcccatcgtcccgctaagcccaattccaaattttcaaattctagagagatatttaggcttagtgcaaagacacgcgcttagcgctgtctgcaactctgattggtcctgcaatttgcgcttagccgccaaaggtgggtgtgaatgtatgtatacatgattttgatgatgtcaaagaagaatctaacaaggatgcttcaaatgataagcacttgcttcaagaataattcaagaatgcttcaacaaacaaagccttgttcaagattcactaaaaccaagcctggccttaaaacaatgtgctntcaagacatg

SEQ ID NO: 162663 - DNA, 492 bp, Glycine max
  unsure (1)..(492): unsure at all n locations
tacggaccttaaatactaagcttaagaataatggcctcagcaaacttcttatttccagaatgattttcaatcaatagaccttcaatctttaatggagagggttaccactactggaaaacccgaatgcaaatttttattgaggcaatagacttaaatatttgggaagccatagaaatagggccttatatacctgccacaatagatggaagcacaacaagtggaagcacaacaatagaaaaacctagagatagatggtctgaagaggataaaagacgagtacaatataatttaaaagccaaaaacataattacatctgccctgngaatggttgaatatttcagggtttcaaattgtaagagtgctaaggaaatgtgggacataacagatgtgaaaagatctaggataaacacattaactcttgaatatgaactatttaggatgaatgcaaatgaaagcattcaagacatgcaaaagaggttcacacatatagta

SEQ ID NO: 162664 - DNA, 381 bp, Glycine max
ttggagacatgtgcagaactaatacgttcttgagtatgcattaaccggtttctctttaatcgaccgtaaaagtttgacgcgggatcatatctccttctcttattcaaacacataaactggaaaaagtaaatgcatgatgtttaattaatttattttaacatttacaagcactcacatttatcttgctcacataaataagtcaagcacctatcaggagcgcgatcatctcttcgtatgttcaaccattcgggataataatttgacaatgaagaaaacgtgactgaattgacgtatagtatatcttttttgtgcttaatactgaaataatctatcatgaagaattgttttaattttacataaaaaatctctaattagtacatt

SEQ ID NO: 162665 - DNA, 382 bp, Glycine max
  unsure (1)..(382): unsure at all n locations
atcgatgttatattgaccaaaaaaaaacaaacattagaccggcacatgtcttacagataattggtgttatattgtagaccacaacctacaattgcagcgcaatcaatcgtggtcatggcagtgatccttgatattaccggaaaatgcntacaaacgccactcagatggttgaaactttatcataaataccccaaaaaccatgacactgaggctgcaatggccgttgcagatgatttttttaaaaccttgagcacaatattgcatgttttgaggcttcctcaactgcatcagcaaatacacaggatagactataaattgtggtccacggccacaattgtccacaatattgctaatcacaacacaaccgagatatataaacatg

SEQ ID NO: 162666 - DNA, 385 bp, Glycine max
  unsure (1)..(385): unsure at all n locations
ctttattatgtagntggcttcttagctctcagacgattctatttacttgttatagcatccgtgtaatactttgtaggtgataaagagagctttataaatgattctcctcttcatttcttccctcgctgctttgtgctgctgctgctgctaaacttacggttgagccttctctcgaggttattagcgcttctctcttacaatggtgactctcatctctctatctctctctctcttaattatcacattagatcttcaattgtttctccaattttccattcttccattcatgtgtgcaattttctatcttgaaatggcaaaaaaataaaacactaacgatagagagaatgatcatcattttttttattatcaatactaagtttttaga

SEQ ID NO: 162667 - DNA, 445 bp, Glycine max
  unsure (1)..(445): unsure at all n locations
ttggagctgacccatatatgtcctaactctntatgattggtgattcctacgttcttgaccttgactcgatagaacctctttttaagcgaaggcgcctgactcgaccccatgttttactaaagtgaaacaaaacccagtgcaaatcaaaactccgacatctatcatgggtggaatggatgaatgcatgaagaaatgcatatgacacacatgcaatttatgaatatgggagctcggaaaattatccccttcttagatacaacgtttgggcagcatggcgcccgacgcatgtatttaaaaaggtgacacggacccttcatctgtttgacaaagtgaggggatcaagacggaactcgtgcatgatgcatatgcgaacggcacaacacggngatgtacatagtacggctatatccacaaacaaatataagcaaaggggcacatgacattt

SEQ ID NO: 162668 - DNA, 374 bp, Glycine max
  unsure (1)..(374): unsure at all n locations
tctacttatgtggcagggcgggcttccttcaccttcttgtctccaacgcngaatttgaccattgttcttccttcccgcgatgcttcttttcatgtccgcctgagtgggcttatagcctaaaccatacttcccacgatttccttgggtatttatcaggctagttatgccgccgttgttttttcctaaacccatcccgggttcataaccgttccccaacataactcgggccatcattaccgctgcatnggacagacaaggctgcccaaagagggagtccacggaggaaatgctgaccacctcaaaagactggaaagcagtttctaacgattcttctgcggcttccacataaggcatggaggatgggcagcttacca

SEQ ID NO: 162669 - DNA, 314 bp, Glycine max
agcttcaatgaaacacttaaaagaattctattgcttgaatcgcactattatcttatctcctaaagataccttctgcgtcaagtggaaaagatcccacttagtaacggagccatctatgttggacgaaaacaagcggctttcgtcggggccaccggggcaccaaataagcgacgtcactcttccgttagggtttccgtgtatagtctgcaagcgccaaaaatcaaatgaatcagaacgagaacaacatgggaacgacgttgtataggagaaagttgaagaatgaaatgatggttagttaggatggtaccagctga

SEQ ID NO: 162670 - DNA, 320 bp, Glycine max
  unsure (1)..(320): unsure at all n locations
tagaagattgcagntntagagaatcatgtgaatttctttctgttaaattctngnttcctttccgcttataacaaattgaacttagtggagaactgcattgacattcgctattatttgtagctcagcgttgcgttaggaataacatctaaaattgtaaataattgtttgcaggctaaaaaggagaaagaaagagaatagaaacggaaggagaatgagaaataagaaaaggatagagaacgtgaaaaagataagtctaacgaacgtaataagaaggatgaaacagatagtgataatcaagacatggctgacagccatggtta

SEQ ID NO: 162671 - DNA, 408 bp, Glycine max
agcttggtggcttgctcatggcgtttatgtttcaatacttcaaaaggttgcccttaagctacttgcacaaccttgttcatcttcatgttgtgaaaggaattggagtacatattcatttattcattctttaaagagaaacaagatgacatcacatagagctgaagatttagtatttgttcatagcaacctacgactactgtcaaggaatactccagaatatcatctagaggaaactaaaatgtgggatgtaactggagatgattttggatcacttaatgaatgtggtattctcgaaaatgctagctctgctttagatgaaccaaagtcagagggtgtctttctcaatgatgatggctagtttgtgaaattctcgaagacttgaagatgctaatacatcatcttacttta

SEQ ID NO: 162672 - DNA, 459 bp, Glycine max
  unsure (1)..(459): unsure at all n locations
nttaaagtgagtcattaagtgtttttatgaattatgtgtcataaatgaattacatattgtcatgaactagctatacccccaaaagcttaagttttgggtgttgttacatcagtacattaatggtttagttacatctctaaacacctcacacaagagcccgttgaacttaaagtgttgttagcccatttacatctctaaacacctcacacaagtgatggttacacattgcctgtcggattgaattgtcattttcttaattttctgcttatgctattttgtatgatttggcataaaatttcctcatatggccaaagtattgacacaatgctgattaagttcatttatttttttacatgctactttgtgataggttctaaggttataattctgtattaggcagttatgacttgtgacgtcacacttatagtattatatacatggtttgattgacaggcttgt

SEQ ID NO: 162673 - DNA, 458 bp, Glycine max
  unsure (1)..(458): unsure at all n locations
ttgaacccgagntccctaaaatacttgggacaaatttctatatggtgcaagactaccatgatcctaaccaattttttttaggtgacacataactgagtcttattaactcttttaaattgaaaatcttaattacatgttacgtgaaaattggacgagatcatgaacatttgatagtgtcagactatataataatttctcgacgatttgattatagtgcgagcgatgtaacagaaaaatgtatgtatgatcagggagcaggagtattctccacaagtgttgagccaaagtgttctgtatcatgttcatttccctccactcaaccatttatgaactcaaatcatcatgtgagggattctcagcaagtagcaaattgttcgcgtgcagagccctgccacggcataagccaacctgtgctagctcagccaacaccaatcatgagaggcactactgtgtcttta

SEQ ID NO: 162674 - DNA, 309 bp, Glycine max
acctctcttcatccgaatctgccaaacattactactctccaaaataattacaaacacgaagcacagagtatataaccatcactcccaacgctatcggccatacactcactgacccttattttggccgcccatggccaccgcacacgtacattggcagacatcatgttctataatacctcccacagcaggactaacccagagagaaagtggacaaagaaatggacaacaaaaatctaatactatacggaacgtgaaatgcccctctcttactcttcatccaatacaacgccactcctttaaaccaaaccc

SEQ ID NO: 162675 - DNA, 363 bp, Glycine max
acacttaaaactcagcttgtttggattccatggtcttgacatagtcggtattttgtatatatatcagtaccacttgtactaatcttattattataatacatattaattttgctgacaaaaaaaaaactaactgttccaaccagtcaactcagactaaccagtaagcacctctttaattggggacctgccaacagtttttagtttataaaatctcttcaagagacatggaaaaagttataagtaagcatactactcatgaagttctgatgaaacggtgtctatgacacaaaaagcacaaagtccagtatgaacacatggtttaggagagggcaaagtagagaaaatatacaaaagaataattac

SEQ ID NO: 162676 - DNA, 297 bp, Glycine max
  unsure (1)..(297): unsure at all n locations
agcttanganaatgcacgttattcatctatttctaacgatgacatgaacgcccgcaacatgctattcaattactcctctaacaacgcatcccttcaattaacacagacgaattatcagagaagctttgagaaagaacacaccgcactatcctggagtaaagactgaaactccgtcatgaaacgagggctttcaacgatgacaaggactaaaccgccgcgatgaccaggactagcacaacaccgatgacgaggaccaccacgacgcgagtagctcatcaccctaaccaaacttgaaca

SEQ ID NO: 162677 - DNA, 287 bp, Glycine max
agctcacgataagtaacgagagtgtatcataaaatttaccggtgtaacaccatatttagggtcaaggaacctagcaatggggatatctgcctgtcccttgtgcatgctgatttttcttccaagaaatttcgtttaactaatgagacgcgacataatatatatatatgtatatatatatgtctgcttggagaacagattatttggctgtaaaaagcgagttgagatcgcgcagaggaattacatcagttcttttttgaataaccatcacatactttgagatctactat

SEQ ID NO: 162678 - DNA, 401 bp, Glycine max
  unsure (1)..(401): unsure at all n locations
tatcacactagcacctctttcctagaacacaacctacttgagcagtaagaataagtagcctcaaaagaaaggaagaaggtttattactctcttcatctccttcagatgcgtgctctactccctcaaccatnctctcaaaaactagtgatatatcctgtccaatagccgaattccacttctcgctctatgaatatttaacgggaacggcatctttttcttttttatcttcattaccatcgccatcatccttcttctcccgagtcttccccttgcttccaccatcatcattatcattaacgctctcttcgtgttcagtggtatcttctcagtctctttccagaacctggatagtgatcaccgtttaatacatcccggaacagttcctctatcctaagttcacg

SEQ ID NO: 162679 - DNA, 456 bp, Glycine max
tgtggattctctaatctggaacataccaacaaatgtgctctatacagctaaaattacggattttcataattcggaaacacatgaacgaaaagaaaaacaaaaacaaaaacaacctgttccacaaaatgaatgtgcttcgaatgtgttggtgattgtcgtctgtgttggcagtgatagtcctcacgggtggcaaagaaagtcgaagggggatgcaaaggataagggttcgaagaacaagaaaataggggaagcaaaggtattttggggctttaattctgttttaattataggcttcaataaactctttttttagtacctacaaaataacctgttttgattttggtacacaagtaattctggaggaataaatttttaggattatataaaaatattattattttcttatactattcaaaaaaattaacatatgccaaatatagaacttatttattaata

SEQ ID NO: 162680 - DNA, 426 bp, Glycine max
  unsure (1)..(426): unsure at all n locations
tgcttgttgggtacgccttaattaatttattattgttgntactttaatataccaacatgccgcatatggatatttcccaagtatttactagcatttcaataagcttgacttctcttatattaattgttgcttaattgttattcttcattacgaataatgacttttcaaagcaagagaaagcctgttgggtaccccttaattaactatattactcgccgttactcttttataccaaaatgttgcaaatggatatttcccaaatatttactagctcttcaataagcttaatttcttctcttacactgttgattgatagtagccaggtgacgtctatcttgacacagtttactaaatatatcttacattatatttattcatcgcgcagatatatatctatacatatatatatcataatatctatctata

SEQ ID NO: 162681 - DNA, 291 bp, Glycine max
aatgggtgttagacaaccagtgattgaagttccacaagctgttgaaagtgatcatgtagatcaagttgtttgtgaggaacaaaatgatgatattgaacaaactagtgaagaaccagttgaacaagttcctcagcaagatgaccaaacaacattaagaagatctacttgagtaaaaaagatagcaattcctattgattatgtagtgtacctacaagaatcagattacaacattggagccgaaaatgatcctgagacgttttcacaagccatgagtttaaggatcaaattgtg

SEQ ID NO: 162682 - DNA, 463 bp, Glycine max
agtcacctgcggcatgcaagctacatgtgtaattgatataaattaatttattaatttgtagcggctagaactctctaaaaatgaattaaataatttttaacagctaaaaacttttataaattgtaattttccgtcacctctctaagtgatttttggtgtcttctaagtgtgtttaagaaagtaaacaaaattaattaaatttattagtcacatcaaagaattgtctaactgagttatcactaagcgaaaaaaaattatttttacaaaaatcaaattaatataaaaaaatttatgaagacaaaattaatagtttttaaattttagaaggacctagaacatattttatccttaattatatgaccttagaaacgggaaataaaaatataaaaagtcaataaacgagattttgtaaaatcactctatctttagaaatactgaaactaatgtcccacaactaatattt

SEQ ID NO: 162683 - DNA, 341 bp, Glycine max
  unsure (1)..(341): unsure at all n locations
taatgagctggnnaagcatacacgaagacacatctggttacgtgataacaagcacatgaagctgatcatggtctctcggatgaatatacgcacgcctctgagtggagtaggaggtcctggcctaaagtctcccaaagctattaacaaagcttccatcatgtctctgactcggaagttcatttctccagtagatcattgggccgagctgatgagagcaagggttctcaaagatggatttcaggcgtgtagttataccaaaacatctctgaggtcacggaacaaacaattttggaacacagtctgcccattggatgatctgaaatggccaaaaaacaacctct

SEQ ID NO: 162684 - DNA, 376 bp, Glycine max
  unsure (1)..(376): unsure at all n locations
tgttagttaaaacagtgttaggggttttgattcgcatacaatgtacgtcattttgacatgttttggttagtatttgatggcccaataaaggactatgttgaggggctaaaaagccccaagtttttttggaaatctcgatgatctcgctaagcgcgcctgtgcgctaagcgagttcataagtttttgttgaatatctggatttccagatgaattcgctaagccattccttatgcgctaagcgagttcatcttctctgatgatgaatgttatgtatgaacttgcttagccgacattccgcactaagctagttgatgtgttttcagacacttataaaatattttgttntgcttgtggtggccaagcgagtcctctcgct

SEQ ID NO: 162685 - DNA, 420 bp, Glycine max
ctaagctacatagccctaatcttaaactaattctaacaaaacatttattccctataaatctaaagctacagttaaagtcttctaccctagagttaagacatgaaaaagagaaaaagaatcaaggaacttacttggatggtgtatgattgatgcttcaaagtcgaaaatgcataaagaaattacagattcaaaatgtgcagatttttggagagagagaatgtagagacgaggtttctgtaatctggcaaatgtgagtgtaactgttgttacactcacttaagcagtttttcgatactttcgcttagtggaccgttgcactaagcgagcaagagagacgtttggtttctcaaccaggatcgcttagagaacatgtgcacttagccgacgtttcaaatccaatatctttttttcttggaacag

SEQ ID NO: 162686 - DNA, 414 bp, Glycine max
tgcaggctgcaagctggcacatatagattagatagcactcgttgtaagaacactgcatttgttgcatctacaggtagaacaacactacacgttagcagctgaataagaattattaaacaaaataatgagagggaatgcagtggctaaaatacataacactaggcctcgtaacaattaaaatttatgatataaaagtacatgttactcttacagatcaaaatttaaattaaatcctccacaccagacttaaatctatatatgatggatacccattagtaagcgaggtaaggtggtttaacaaataaggcatgttgcctactaatcttgacattagtgagagaactggggcctttgggcattgtgaagttcaaacacttcaagttctatcagtttaaatctcttatcctttctgat

SEQ ID NO: 162687 - DNA, 372 bp, Glycine max
  unsure (1)..(372): unsure at all n locations
tcaggtattcagtgcaacatgggctcaggtattaattgtatcttatgccaggatggnggcattgcatttcttttggtggttgaggcagggaaacagtcacaaaattttatctgattattatcaatgatgctataaaattcagtgacacagtttataccttactgtggtgacattccattttagtggtctaaagataatagagcagatactagtccttattgataaaaacagtagaactgatcctaggccttactgataaagcagtagtttatgctgttgagattggagcatttttttttccccatgaaagtacaaaccaccaattattcattaaaataaaaagggatacgaacccgtcatgcacatgtcatt

SEQ ID NO: 162688 - DNA, 457 bp, Glycine max
  unsure (1)..(457): unsure at all n locations
taaatatgatgtttatgaactacttagattctntgttatgtcttattgggtgcatgccttttacttgggtaaactcagcgaaaaacttggatattcacacgaaattgcattatcatattacaataaagctattgcttggaacacatcagctgttgatcctgtctacaggatgcatgcctcacgtttgaaattattatttaagtgtggaaaacagaatttggagattttgaaggttttccctcccttttctgatcattaaactctattttgctattattttatttgtctttgacattgtccatttattctgactgcactaattttcacatctctagtttttctgtcctttacagctgcagttaattcaaaggttaaccttcaatctttttaattgactagataatttgggcactntatctatattttagtattgtttggtcctcaacaggttctctca

SEQ ID NO: 162689 - DNA, 430 bp, Glycine max
agcatgcaacttctgaggagggattgtgttatgtttttttctacgcaaatccccttacgaatcattcaaattaaggacttatcataacttgaccagtgtaccaaatttgtcacaagtagtaagggactctgctagcacttggattaatgcaaatcaaatttaaaagcaatggataaagaattcataataaagataacgaaatatattagacaagacaaagatttaccgatgaaaataaacgatttaaattaaaagatgacacagatacaagatcacgaaaatcagacagataacgattaagataagatcagatcaaatacaaaattcgataaatacgatgtgataagttgggacctgacccgccctgtttgctacgatgatgagttatgatcttctctatcaataccggatttattctcccactccggta

SEQ ID NO: 162690 - DNA, 300 bp, Glycine max
  unsure (1)..(300): unsure at all n locations
ntgctgcatggggttcaacaataatgtanctggccttgtatctctatttgataccagatcaacggtctacagatactctgcacagaaggaaccaattgaaggtccaaacatgtgataaaacaaaaatgtatctgccacacactnttctgccacgtggcaaacaatcaacggtcaatttccctttccactgtccattttgtctttagccttagcgcaagtccatgcccacctcaaactttcttataagtttaatcactcagatataaatataaagagagagagaaaagaagaagctatcaa

SEQ ID NO: 162691 - DNA, 328 bp, Glycine max
agcattgcttatacacacgccgaggttattcttgacgactttttctatccacgcgacccaagagtccagtatcatgccgacacaccttaacgctatccgcaccttgtcattccgagactccaagttcgattgacaaccacagaccaatgtggtcattctgcaccctttccggagatgtcatcatcttctggccgatactattttattctcacaacattttcagatcctgacccaagagtcaggtggcacgcagacatacccaagtggttatctgtacaaagacaacatttgttgatcctgacccaagagtcacgtggccacgcggaat

SEQ ID NO: 162692 - DNA, 260 bp, Glycine max
aaaactagggcaaatgaagagggtgagaatgagggagaagcccatgctgtgactgccattcctatatagccaagtttcccaccaacccaacaatgtcattactcagccaataaccaaccttctctttacccaccacccagttatccacaaaggccatccctaaaacaaccacaaagtctgtctaccgcactttcaatgacgaacatcacctttagcacaattcataaacaccaaccaagaaatgaattttgcagcgagaa

SEQ ID NO: 162693 - DNA, 457 bp, Glycine max
  unsure (1)..(457): unsure at all n locations
atcctcttagtcacctgcggcatgcaagctngtcaagaacactgaggggcatatttttatttaatttattctttgcataacttatcaatattacttactgttacgaaaattaatttaagtctttatggttatttattcaaactaaggcgttatacgagtggtctttgaacgaatttatgatagattttcattatcatttatgaagcattcagtcattcggcaggattatgcacttgcttaaatttatttatctgttgactactatacaccgcaattaatcgagatgaattatatacttggttctagctggtacgattgcaaaaggaccttcggcgcatgaatgcagagaaccaaacgctgaaggagatgctcagccatgtcagcagtaactacgcgaacttgcaaatgcatcttgcagcagtactgctacagcaacataaccaacgcactgagaaca

SEQ ID NO: 162694 - DNA, 459 bp, Glycine max
  unsure (1)..(459): unsure at all n locations
tgagtgcctagttcacataatgttttgataatctaatcttttgtgcaaatgctagatattcttctttttcctttttttcttctccctattggttggacttgggctatctaccgaggtaaatcatccccttgcttcgacgtgttagttgttcaagctacagcatataggatgaaaatgagccgatcggataanaaagtcaaacttaaactataataaaaacttgttaaacttgacaatttaaataataataataataattattattattattaaataaaaaacttttaaaactcttcggattcttataaaataataaatagaaaataaaagtactttttaagttatattgtaacctatacgcatttcacccctaagcatgtccgngtagtttttaatattatgttgttttttcatttttttatatactntgtgttttaacgacttgaattcaatatgatt

SEQ ID NO: 162695 - DNA, 442 bp, Glycine max
  unsure (1)..(442): unsure at all n locations
ntagacagattttcagataatccttggtcccattatatatcttatgttctctatgtttatactacattagtggtagcattggttttgaaaatttatctagttgctggcttaattttgtaggtatggcaagagttttggattactggggatgttgatggacgtggtgtcccagtgtcccatccaaatggtccactggaccatgaccttttcttgttttctgcaagagacacagttaagcttctaagaaatcatcctagtcttgccctatgggttgggggaaatgaacaagttccacccgatgatataaatgctgctcttaaaaatgatctgaggctccatccttattttgaacgtgaggatgaaaatagcaaacctgtaggagactggttcccaatgttcacagatttcagtcattatcttgatggcacacgcttttacatac

SEQ ID NO: 162696 - DNA, 285 bp, Glycine max
  unsure (1)..(285): unsure at all n locations
gctatagcctgaacttatatcattctggtcttctttaagaaactccagacgggcggggtagtctnttgtatcaaccactatcaaaacatccttgtggctctgcttcaataacaatttattcaccttatagttgagatattcccatggaaaacttaaaaatttcatgaacaaaggtcctgttactttccacagtaatttaatcacttggtggtatttggccaacagattatatttcgagccattatacaaacttttgagttttaatgtagattggggggggggggg

SEQ ID NO: 162697 - DNA, 254 bp, Glycine max
  unsure (1)..(254): unsure at all n locations
taatgaaacanacaaaagcataaccctaatccatatcttttctataattaatgagagagaaaagaaattaatgaagaattggttaacctgtgatgctaacaaaggaagaagaagggatgacaaaggatgattggaagagaaataaagaaaatggaagagagattgacgaacggaggaaggcacaaaaacacgtatattatgaggaacaagagagagaaattttgagggttgaaatttttttaggacataattgt

SEQ ID NO: 162698 - DNA, 333 bp, Glycine max
cctttagaaatgttgacctcgagtgtatatcggtgtttcttctatgtttcaattgtacgtagcttgtgtcttcttcacagatagggcatgcacgatggcccttaacactgcatccactcaaattcttgtatgctggaaagtcattaatggtagaaaataacattgcacacaatgtgaatgtctcatttcgatacccatcaaacacaacaacttccttgtcctacaactttgtcaagggttcaatcaaaggactgagataaacatcatagacaacatcaattatttttacttcatgcactaccaaggaggtaagttgtaaattactagcaaaac

SEQ ID NO: 162699 - DNA, 383 bp, Glycine max
agcttcaccggatgatgccgatcgaacattttctaatcgacatcatccaattggtattcacggattgaatagaataaacaatggccggtgtcggtccttatatggccccgactgataactttcagccgacattgcgcaatttcttttacaaatgctggccgataatgttctttgtctacgatagaggaggtgtttttgtcttggtgttgcctacaaaatatacaacgtatgtcggctaggttttttcttgcgagctcaaccgacggtttgttccgaccgacactggcatgttgatcttctcatttaagaggcccagaaaacgttggctccaccccggctaaaactaaaaaacatttttcatggaaattgatcgaaataatgat

SEQ ID NO: 162700 - DNA, 291 bp, Glycine max
tcaatcataaggaaagacggacttactgaggaaactacaacagtattgtttccatgaaacgggaaaaaatgattgcttcgcgatcgcggtttctgtctactcaatttctttgtattaatggacaattgcttctgtgactagtgctgagttctgaatgacgctctttcacttttcttcattctcgagcctcatggctagtgtctttgtggcaactattctggcttttgcttgcttctctgcggcacctttagttgcaacgcgtacggagtacctctactgcttgcttttacg

SEQ ID NO: 162701 - DNA, 466 bp, Glycine max
  unsure (1)..(466): unsure at all n locations
gctcaggatcatgcaaactatgagtctgctgaagatgtttatgtagatttctccccataccagggtgccttcattgttttatttttccttttctgctaacgcttgtaactgcntttgtcttggaatgttattacttaattttgcattcatctgcatgagtttgataactgaagtggttgtcttgctgaagaattattcaaacaaatattctttgaagattttgttaagtctttttttcattagctatatattactatggtgttggagtttcttttcaaaaaaagttgtgttgcttgctatttgttagttgggtaacaaaccatctttacattgaaacttcgatttaacaatattacactgtattcattggtcaatcagattaatggttcaaagttcttctgtcattaaatggtggagttcataggcatggtgtctaatcttggtgctctctactatggcatttcac

SEQ ID NO: 162702 - DNA, 242 bp, Glycine max
tagcttattaaaacctacgaagagatctcatatattcatccaaagaacatacgaaaactgagaaatatcttcaggatcaagtagatgtttcactggatgagtccactcacacatacgaagcttgcataactcttaaagacaaagagtcccagctatgtcttgagataagaacagtgcccgaaaaaaagcttcccttcttaagaactcttatgagtgggaaaacaaactgaaagaccttcaaa

SEQ ID NO: 162703 - DNA, 374 bp, Glycine max
  unsure (1)..(374): unsure at all n locations
ctccgcgaggtacgtagtcaaatacgttatgctatgttttcttgagagtagncngacccgaattgagagtggcatcggataataaacaaaaggtttttgtttgcgattctacaggctccgctgacgtgcgtgtgttgctggattctcttgatcaaggtaacactaactcgtatacttcatttgacctattttattttttctgggtagcaataagtaatgttgcatgatgtttagtaacgtgttattctgtttgcactataatagagaatgaaccatgatttctgtagatggatccacggggtcttgaaatgatcgcaattgtttaacttttacgtccaacgaggggcttgactgagtgtttgaacatattttgt

SEQ ID NO: 162704 - DNA, 453 bp, Glycine max
  unsure (1)..(453): unsure at all n locations
nttcaaaaaggttcatcaagtcaagttgaaatatggttgtttctattctgcaaaattggggcaaaagatgaatcgagtcacatcactgcttcgtctactgccaaacatatttaggattgttgatgtccttgttacttccagtttcaccttgacaaagatgtcatggaccatgttgaaaatctaaattgattcaaccccatatcctgcgtaaaaattcgcaatacttcgactgtacatcattcgcatgcatccatgcttttcattggttgcattgctcgttgcattctttccttgaaaaataaaataaaatgaacttaatcattgttataaaaaaagaaagggacacgctttacgacgcccttaccgaactcgtgctagagctagagtaatgggtgaagtagaggagatacaagagaagatgaaggccgacatggaggccattaaagaaaaatg

SEQ ID NO: 162705 - DNA, 373 bp, Glycine max
agcttaccacatgttggtgaatacgctcttttgtttccatgaattatgcaatcttttagcctatgttgagcatatactctatcgagaaaaatagataacaaatttatatttcgaaaaaaatccttagctaagagcatgtactaatacaacaaaaaaacaatgtaaaaaatcatgctaatatccattacaagagttcataattacaagggagttgattggaaaaaaaaactttggcataaataaatacgtgagtaaatctagggttagacttcatatcatcatatttaagtaactggcagagttagggtatgcattcaatcatgactcgtataaccaagaaagtctacctcagatgttcggcatatactaactt

SEQ ID NO: 162706 - DNA, 302 bp, Glycine max
ctgagagttcaccatccttttctatttctcaaatcttaggatgaaaatagagacaattgttggaagctcccaatattttcttttgcacctatgtacgcaggtattgtcttgtattatctcttatgtgaataaagtttcataatgactgactgaatttaagttttaacaccactaactttatagcttcatgctccataggcttttacattttattggcaataaaatatggtaaataatatatgtcaagtagttccaaaccaatatatgtacttttatgggtgaaaagatttattacattggac

SEQ ID NO: 162707 - DNA, 369 bp, Glycine max
  unsure (1)..(369): unsure at all n locations
cgatcagaattgccatttcttggattataaggttgaaccaagcttatgctattacaaaaaggttcatcaagtcaagtgaaatatggaagtaaccgccctgcacaattggggcaaaagatgaattgagtcacatcactgcttcgtctactgccaaacatatttaggaatgttgatgtccttgttacttccagtttcaccttgacaaagatgtcatggaccatgttganaatctaaattgattcaaccccatatcctgcgtaaaaattcgcaatacttcgactgtacatcattcgtatgcatccatgcgtttcattggttgcattgctcattgcaatctttccttgaaaataaattaaaataaataaaatg

SEQ ID NO: 162708 - DNA, 329 bp, Glycine max
caaaaactcgcttgagggcgaaaaaacactgttgcatcttttttggggagaatgggaatgtatgtatacatgatttagatgatgtcaaagaagaatctaacaaggttgcttcaaatgataagcatttgcttcaagaataattcaagattgcttcaacaaataatgccttgtttcaagattcactaaagaccaagccttgccttaaaacaaagtgctttcaagacatgcaaggctctggtaatcgattaccaagaagtgtaatcgattaccagaagacagggttgagaaatagctgttgaaaaagttttgaatttgtaattttcacatgt

SEQ ID NO: 162709 - DNA, 418 bp, Glycine max
  unsure (1)..(418): unsure at all n locations
agctttacagcagattttagtaatgacctcttatatttataattaaaataacttaatgccattaacctagggaattaaaacaaacttaatggctgagtgtaactgaaattgtggcaaccaaaagtcaccccatttggtctcccaaaaggctgatgcctacgttgccaattgggcccttattacaacttgaactaaagcccttttagttgattaacccaaaacatatntttggtcagccatctttacaaggattgggccattatttagacaaactaaacactctaaaattgaaacaaagtggtgtcatttagtccatctccatttgggccatgatacaactcacaaccttggacttttcttcttgaaacttgngctcgtattcacatagtatggacaacacttgttgaagagctttctt

SEQ ID NO: 162710 - DNA, 459 bp, Glycine max
  unsure (1)..(459): unsure at all n locations
ctgagcanattaaacgacaataactgttgactcggatgttctattgtgtcccgtagtatatcgagacgctcgtaattgaaaacagaagctctgagaaaattcaaacgacaataacttttaactcgggtgtccgattgtgtcccttagtatatcgagacgctcgaaattgaaaacagaagcactgagcaaattcaaacgacaataactttttactcggatgtccgattgagtcccgtaatatatcgagacgctcgtaattgaaaacagaagctctcagaaaattcaaacgacaataactttttactcggatgtccaatcgagtcgcttaatatatcaagacgctctgaattgataacagaagcactgagcaaattcaaacgacaatatacttttactcggatgtccgagtgagtcccgtactatatcgagacgctctgtattgaaacacgaactctgagc

SEQ ID NO: 162711 - DNA, 443 bp, Glycine max
agctatataagtgcgggtctgggagactttttgtaagtgttcgcgatatgcgaagatgatgttccaagtactttggatatggtacgaccatgctctcctgatttccagctgggaaattggcgagtggaggaatgccccggcatttacgcaacaagcataatgtaaacctttacggttttaaaagctctatagttgggcctaggctttagagttttcattttgttaaggctttgtgtcttctgtttttgaatttataatacaaggatctttcttcatctgttcctggtctctacccattctcattcatttgcatgtttacttctttttctaacacggcagattcgatgacgagtcccccgacggtactatacctgtgacccgtctatcaacttcggcaagaaatgatcaaacagaagatgaacgagatgaggatgtgggacttc

SEQ ID NO: 162712 - DNA, 272 bp, Glycine max
aaagaaattgtccgagacattgaggttatgtatcttatcacaaatacatatgtcatgataaataataagtgaatctggttgagaatttgatgacttcatttgcttgcaataaaatgaacgatttcatctttttgctcgtttcaattataattttctcattctattttcgcatgaactagtctgttttgttttcttcgcactatgtctcttaagatccgtaacaacctccgcacatagttcttcaactcttcaattgtaattgataaaaaaaa

SEQ ID NO: 162713 - DNA, 410 bp, Glycine max
ctttgacccactatgtagtctagagtctgatccttgttgtctgtcattctaaaaaaatgttgaatttcaccacatggtaggtcagcatattccctttttcaaacccaaagggcctgttcaggggggatgttagagatctaatataaaattcatgttgtttataatgccacaaaattgtccagaacctttgaaatgatttcatttatgatacatcttgttttccaaatggaatgaaacattaagaatttgttttccttttcataatttggaggataaaatctgtagcactctcaaagaaaatgactgtaattcatcattgacatgtttaggaaacatcttttatctacctttctttggtgaatacatttgttagagtgacgcaatgatttattgcatgtttcatttataag

SEQ ID NO: 162714 - DNA, 389 bp, Glycine max
actcagctaacaaagaaaaatgacagagaagcttaaatatgtgttgacctaagaagattatgacaacaaagaacactattatacaaggttggcatgttctaaccaaaatagaactgaaagactgaggttttttttttaaagttgttgattattctttgagttaatattctattaatttctaaaccgtgtcgtcattattcattggcaggtgtttattttaatgaaacaagttatgccctatacatgcattttgcatccaatgattgaagagatggatgaaattatagttgcgcaagccagggcacatgccggttaattgagaaattaatcccaaataagtataaaaattaaaatacatatataatgctttagaaaaatggcatataatg

SEQ ID NO: 162715 - DNA, 281 bp, Glycine max
ctcaagagagcttctaaggaagttttctattctataaatagaagcatgtgtaacacttgttgtaactttgatgaatgagagtcttatgagacatacttcaaagtgccacttctctacctcttttcttccttcaatttcgtgctcccccatctctctttctctccctctttcttttcctccattgaatcatcctctccaagcttcttatccaaggctcatcttggtggtgaagctcattctttcatggcttattccctagtggatggcgccgcctcttacct

SEQ ID NO: 162716 - DNA, 461 bp, Glycine max
  unsure (1)..(461): unsure at all n locations
agcttgngtattgctgcattctactaatatattgaattgtccactactttgcctgagaataacaattgcttgaccacaacaacgctggaggcagtaagggacaatggtctttcaaataaacttgttgtacatgaacaaacattatatcatgcgctgaccgtgtcaaacgaactagcgaagtcattgcataattgttatactaactatattcaatgtacctgaacaaaatgatttccaaacacgtgaccgacacatatcgtgcggtggccagaagaataggtggtggttgacttctaagagggaaaaatgtcatgctttgttgtcgggacaacgatacaaggattacgttataccgtgaagcaatgacatatctcatgtctgttatatncatccacttgtccacactaacctgaatgaaccacacatacacatgtaagtaatttacacattgttattaaaaa

SEQ ID NO: 162717 - DNA, 468 bp, Glycine max
  unsure (1)..(468): unsure at all n locations
tgcccagagaaggagtccatggaggaaatgcttaccactctcataagactggaaagcggnttctaatgactcctctgcggcttccacataaggcatagaggatgggaagctcaccaagatgtcttcctcgcctgatacgatgaccagatgcccttccactatgaatttcaacttttggtggagtgttgagggaacaactcctaatgagtggatccacgggcgccccaacagacagctgtagggagggttaatatccattatttggaaagtaacttgacaggtgtgagggcctatctgtactgggagatcgatctctcccctaacctctcggcgggtgccgtcgaaggcacgaaccaccgttgaactcggctntaagtgggaggcattgaatggtaatttctccaaagtgctcttaggcatcacgtttaaactggaaccattatcgatgagcactttggctacgatatg

SEQ ID NO: 162718 - DNA, 301 bp, Glycine max
gaatcatcggacgttccagatcaatggcatcgtccattgaatctgactacagcctgtgtgctcaattactagcgcgccgctattatcacgactgaatgtgcacatgcgagtaagaggtatagaaccttgagtatgcttcaacgtttacacataaagttgcagcgtctcgatatattacgagactcattcacacatcctaaacaccaagccatgtcgatcaaaatcgctacaagctatcgctctcaatcacgagctgctcgatgaatgatggtgacttataggacatacccttcaagagaca

SEQ ID NO: 162719 - DNA, 275 bp, Glycine max
  unsure (1)..(275): unsure at all n locations
tgactntggtttaaacatgattgatacatgatttgttatttgtangaatcgatttgggcaagattggatgagaggaagtgtgaatttcgaaatctgcactttgtgcagatttttgctgtgaaattgtgcagcaggattttgcacaagtgcagaaaaatgctatgtttttgctggttgtggaaagagtagtgcacaatgagttctggatgtttgctagtagatcccaacggtcacaatgtaggcttatgcactatagacttccagtaaaattttgg

SEQ ID NO: 162720 - DNA, 285 bp, Glycine max
tgctataatgggcgaccacagagtggtacctgaatacatgtcgccggggtcaagagaccttgtggacgtcaagtggggtgctattgtccaaaaccaagcttgactcaatctctacccaacccccgcgtagtccgtcagtgagaacctgtgatgtacctaaccatgcgagctcctgtcagtccacagataaaaggaggacatgaccacaactcgaggaggcttgtggtgcgctggccagatgtgaattttgtggaatatgtggattgtggcctctggtcatccatt

SEQ ID NO: 162721 - DNA, 154 bp, Glycine max
tgatcccgtgtgatgactgagtgataatttaatcccattcgaatcagaactgcgacctctatattggcttgtgcggatgaatgctttggggattgcgcttgactcatttgcttattgagagtgcggtggcccgatacattgactactttttaga

SEQ ID NO: 162722 - DNA, 209 bp, Glycine max
aagggggaccccaggcggcgagaaacaagaaaactcccccaaccctccaacccacggacgaaaaagagagcgaccaaacacaggcgacgcccacgacaaggagaggacacagcccgcacgcgaccgccacaaaaagggcgagggggcaaccagcgggacacacggaacacaaacaaaaccctcccgagaaaccgcacagaccccccaac

SEQ ID NO: 162723 - DNA, 327 bp, Glycine max
gacacaagttttgcactgttcacattggtacaactccctccatcaatgatcatcatgcaaactttgccattgatcaaacatctagcgcggaaaacgttttctctttgactctactccatagacttcacgtgatggccaagtaactgcctaaacatcaacaattctgcctctggtgattgctccacttcctcctcatcatcctcactctcttttccgtattccactacggactcactaatgtactctccgactctaagaatcacggctttcttggtaaggcactcatatgcataatgccccaagccttggcaccgaaagcactccaca

SEQ ID NO: 162724 - DNA, 398 bp, Glycine max
aaactcaagctgttcgagtacttaacccgggaagatcgaagaacgatgatttttaatgaagaacgttgaagaacggccgaaacctttgcgagaatcctcacggaaacgttacagaaacgtttcggaagcgcctcggcttatattttcttcacggaaacaatgtttccaagcaaattcgaatgagagagaagagcctaaagcgctgaaccctcttcttcttcacttcctccgttatttatagcaaaataggggagatgcttgccacccagctcgcccaggcgagcaggagtgcttcctccagaagcaacagccttctggaggaatactctggagggcccaagcgggcctggttgctatttgcacctcctatttaactaaaacacccttgcctttttatg

SEQ ID NO: 162725 - DNA, 346 bp, Glycine max
aacttgagttaatgttatttaacactccaacacgacttttcaaagagattctaatttcagaatcaacattagggtttaaaccaaaaatactagatcatgatcacttcatattcatattctgaggttatatatgtcattatatatataacaggagtgggtctaagtgacgcgtgtggtatatatagtatatatgcttgcatatatacccgcactataagcatgctataaaggaatcctttcttccgtggcgttattagctcctgccttgccttgaaaatatctgatggtttttaaggcatataattcatctcctcattcaatttcttgcttactacattcaaaacac

SEQ ID NO: 162726 - DNA, 300 bp, Glycine max
  unsure (1)..(300): unsure at all n locations
atcttgctaacttaacagagctaagattcactcttttctcgcaggtntcttcatccattaaagttgatagcgctacacatggccgctactgtgaaaagagagatagtgggaactctaaacactctttgtagcatatcttcataaaactaccacttgccaatgtcggcttgcgctcaaagttgacttttagtgtacaaatctaatataacattaacagcataagacaaaaggaattaagaatattaagacaagacaatttaaatcttccctttgtgcgttgtggcacgagttgcttattga

SEQ ID NO: 162727 - DNA, 446 bp, Glycine max
  unsure (1)..(446): unsure at all n locations
agcttncactccanaagaagactcaatttatttttagtatgatccccctttacataagaagagcggttaattgacaggatcacattcacgggtggtgcggactcttaaaaaagaacgaaataagttatcactgttaaatccaccacataacctgaataatgatcacttactaaccttcaatttgcttcaggagttgttcttctggaacatatattctttcaagagttttaccaatctttccctcccagagagtaacaagctcattaaacgacaaggtattagctggtggtctaatgtaaacaatttgttcaagttcttggatatccacagaattgattgataagttccaatatctcttccttgttaaaaccagtgtcatgaagcacatgtaatatgaaaagggaccagaaattatagtacttctagcaattttgatcctactgttc

SEQ ID NO: 162728 - DNA, 462 bp, Glycine max
  unsure (1)..(462): unsure at all n locations
tgtggttttataaaacttgtacttcataaagaaatgtatcttcataaatcttattttatatttaatatattttctaaattattatattaaaaatttatatattattaatcaaagagatttgaacattaatcaaataagttaatttaaaatataaaattttctttaatggaataaataagaaaaaaattgatttaaacaaaaaacttatttcaaataggtgaatgttattattgaaactttaaatattatttaatatttgaaaataattttatcaattaatgtttaaacatgattcgagaatttaatatttccttattatacttcattcttataatctttaattacatgatttaaaatatgagtatatccttattttataaaactgatataacttaatatatattacctaaaaagatatattgctcactacaaaattattaanaatgaataaaataaactgat

SEQ ID NO: 162729 - DNA, 451 bp, Glycine max
  unsure (1)..(451): unsure at all n locations
tgcaagcttancatagtttggaagcccaacttctttttcttcttaactagatgaataagatgatgcatgttaatgtgtgaagccctacaatgccacaaccaagaatcatctatcttacttatcaaatactcagctcatgaaaagatgcatgttcaatgtttagcttatagatattacttattctcttgccaacgtggacaatctcaccgggcatagcttcacttataagacaacaattcttgttgaattcaattttgaaacctttgtcacatagttgactaatgcttaggaggttgtgctttagtccttccacatataaaacattctttatttgagttctgtactgatttccaatattcccttctcccattatttttcctttattattgtctctaanagtgacgtatccnccatcttttgacacacagtcagagagtattgacttatcact

SEQ ID NO: 162730 - DNA, 452 bp, Glycine max
  unsure (1)..(452): unsure at all n locations
ctaagctttcttaganatttggtcattattgtgggtgttgtttattatttgtataaactagttgtagaaacttaaaaagatagttttttatatttttgtatacattttgaacaagagtaggttttgatcatcaaagattgaagaactatagagatgatctcctaatagcaagatgtgttttaaccatattgaaacaggacccttgatcaactcgaaataatgaagattcattgaagtgaagctaagcctcaccacaatgattctataaagctaaagacattggagttaacaggaactcgccccaatgaataaagttcaatgccatgaagatcaagtgtagagtccttaattcataagtttaatttcggtgcaatgataagttatgtaatctcgactctatttaaagagcttgtaacatcatttatgataagagcatggaaactagatggacc

SEQ ID NO: 162731 - DNA, 425 bp, Glycine max
  unsure (1)..(425): unsure at all n locations
accggatcttaagcacctgcggctgcagctnttaaatgggtgaaaggctcacatttactttcttctacatcatattcaaactggtccaaataaataataaagtcatcccgactcaaagaaagtcatataagtctcatacacataatatagaacctatatcctaatgtcacatcctattagagcgcggtgttcccgtgtcctctatcatgaggttcttcatagtcatccacctattcgtctgctctcccgaacacaagttcaagatcatcacaggatccaaacacaacaacacacagggagtgagttatcacattcctagctaatagagaaacaagactattaaatatacatattatataaatgagataccacttgttaacatatctcacgtacttcacccttcgtcatcatactcactttcaata

SEQ ID NO: 162732 - DNA, 321 bp, Glycine max
  unsure (1)..(321): unsure at all n locations
acacataaaactcagcttgtaaagaacttagataatatcaagaacaagcttgtnttgcttatcgttcgcatgtatgacatccactccacaaggtttgaattagaggagaccttcaatcttattatgcaacgtggtgggcagttaacttgaatggtcattattgtcaaatgcggaaggtattatgcgctgcactatccatgttcacatattgttgcagcttgtggttacgtgagcctgaactactaccaatatatagatgttgtttacacaaatgaacacatcttaaaagcttactccgcacattggtggcctcttgggaat

SEQ ID NO: 162733 - DNA, 426 bp, Glycine max
tgcagctattgaactgctatgatcttttaaactttaattctttcttaattctttcctccaggtaactttaggattgatggcataaggatatatgcacaatttgttttattaagaattgcaaatgaaaaccaactctttgaagccactatgtgtgttagtttaagatatctgtatagttttcaagaaataaataaaaaaaagctttcattgataataatattaaaatatacgataatgagagaaaatataacaatagggtataatatctttaagacccttaactttttagaattgtggtttttggtccttacatatttcattgaaacttattctccttccatatgtattagtccttgccatctatgtccttcattaaatgctaatcttcgcgtaaaaaatggagacatgacattaacatgttaatca

SEQ ID NO: 162734 - DNA, 395 bp, Glycine max
  unsure (1)..(395): unsure at all n locations
ngagggagaacttgatgccttggtcaacctagtaactcatcttgtcatgaatcagaaatctgcacctgttgcaagagtctgtggtctatgttcttctacagatcaccatacagatctttgtccttctttgcagcaatctggagtcaatgagcaacctgaagcttatgctgcaaacatttataatagaccccctcagcaacaaaaccaacaacagcaaaataattatgatctttcaagcaacagatacaatccaggttggagaaatcatccaaatttgagataggcaagtcctccacaacaacaacaacctgtccctcctttccagaatgctgctagtccaagcaagccatatgttcctcctccaatacagcagcaggaacagtagcagtcacaac

SEQ ID NO: 162735 - DNA, 442 bp, Glycine max
  unsure (1)..(442): unsure at all n locations
tgcagctttctagattcttcttaaactttttttttctgcaagtgaaaantctgcagacaacaaaagtgtgctatatctcttcattctcttctccctntgctaaaaagaattcaacaccgactaatcgcctgaattctttttgtgtctctcttctcccttttccaaaagaacaaaggactaaccgcctgaattcttntatgtctcccttctccctttccaagagatttctcttgattcttcccattcctttaaacaaaatatttcaaaggactaaccgcctgagatacctattgcttccacttacaaagattcaaaggactaatcggctgagaattctttgtcttaacacattggagggtacatcctttgtggacaagtagagggtcatatacttgcgttgtataactgaaacaagagaggtcatctcttgtgatcattcagt

SEQ ID NO: 162736 - DNA, 382 bp, Glycine max
  unsure (1)..(382): unsure at all n locations
ctcattaagaggctnnctctagaaggccgctcgcggcttctttgataagctctctcacgacgcttctttgagaagctagatccttatctatccacccctctattaactaaattaacttccttaaaaaaaattacggatgaaaataacgcaacaaataatctaacatcacacataattactaataatatatagatatatatatcagggtattacaacttcgacctctcagaataagaaaaggaagaagactaagggtgctgcagaatggacttctcatccaaagatacaaaataaagatgaggaatttacttgttacttctgcaagaagtcgggacacatgaagaaagagtgttccaagtatgccgcatggcgtgtgaagaaa

SEQ ID NO: 162737 - DNA, 330 bp, Glycine max
aactatttctgctccggagtacgacagtcaccgatttatgagcgctgtacaccatcagcgcttctaagccatcaagggatggtcgtttctccgggagcgacgcgtccagctcaaggacgactagtatacttgatttcatgaggaaatatggcgccggcggtgggcaccactggttactcctatggccaagtttgatccaggaatagtccttgaattttatgccaatgcttggccaacagaggagggcgtgcgtgacatgacatcctgcgttaggggtcattggataccattcgatgccgacgctatcagccagcttctgcgatatccgat

SEQ ID NO: 162738 - DNA, 353 bp, Glycine max
tacggacctataaatactcagctcgataaactatcaacacaaaagcaaactttggttttgcatgctatactacaagcatccaacatcctttatcagtgatctggataaaaacaatataatgatctaagccaaccattcagataatatcaaatgcaacaccacactcgatcaagctagatctgaatcaacgaatttcaggacaaaccctgaaataacacatatcggaacacgatcacgaattcaaaaccctaatcgcacgccatcaatcgacaattcacacacgacatgttcattcacaaacaacgcgcgcgagacttcaagattaacgacgcacatgcaatcatttacagaac

SEQ ID NO: 162739 - DNA, 468 bp, Glycine max
gatcttaagtcacctgcggcatgcaagcttgtacaaatcagtttcgtgcataatattcttcatcctgtatggaccatatatatcctctcatccgtgtatctagcattatattagccgccactccttcttgggtgagcccgaaagcaatttttcatctgagagtgaatcctgatgcatgggcctggtcttgggatcattgatcagttaattaattctaagaccgagaaaacattttctaatttcttcaaggtcaatatgacgtatattccttgcacgatcctctataacattattttctctgctcttctccaaatatttcttctttaggcgttgttcttgctggtacttccttagaggttcacctccaattatatatgtactgtccatcattttagcatgagcagatgcctcatcacgggccatctgctctttcatgtactttctttgagtttcacctcaatcacagct

SEQ ID NO: 162740 - DNA, 373 bp, Glycine max
  unsure (1)..(373): unsure at all n locations
atccaacctcccattaacaggaccttcatagaaaagttttgcatgccaaggtaggcacaacaacaggggcaagcacagtagcaggggcaggaccaccagtagcagccagacgcagatgcattgttgccacctctacgacaaccaccatctctgctcacatgcggatgatagagctccagatgcacgcatatatgcagcatgtggccgaccagcaggcggccaatcatagggtttaggtgcaactgaatgagagcttttacctgtacaccctgcatcagtagcgctaggaccccaatccttacccatggcctactcccgagcagttncaggccatggtcgcatggcctggagacagacccattntcaggcaggg

SEQ ID NO: 162741 - DNA, 413 bp, Glycine max
  unsure (1)..(413): unsure at all n locations
ggatcttaagtcaccgcggctgcaacttgaaagcccgggagcctattattattcangtccatacccatcaaagtctgaaaagagtatgatgaactaagggacgtcaatatggccaccgctgaagccttggaacgagaaaccaataaggcccgaaaggaagaacacgaccaaagcaaagttttgaggggctttatagggcaacaatagtgagctcaagctccgaagaggtgaaaggaatcatcacgggtcaaaggcatgatcttgaaggacgagctaaaggtttgccttaggtcgaaaagaaatttgtcccaacagttaagcgagactgaagggaatatgtgggccatcatcgataagtgcaaagagaagctaaatctagcggcgactcacgagcaaaggctagaggatgagta

SEQ ID NO: 162742 - DNA, 323 bp, Glycine max
tgcttgagaagctactatggaggctagatctttgagcttcaatgaggtccttcaatggtgattttcagccatggagttgtagcagaagataaaagagaatatgtgagaggaggtgccattcactatggaataagtcatggaagaagaagcttcaccaccaagagagtgtcttggataagaagcttatagaggaagcttaaatggaggaagagaatgaaagagagagagaaaaagtggcgtgggaatgaaggatagataacgagagaatttaaactttgaagtatgtctcacaagactctcattcatcaaacttatttcaagtg

SEQ ID NO: 162743 - DNA, 408 bp, Glycine max
  unsure (1)..(408): unsure at all n locations
cttgctgcaacccgttgaatatgcacattatctgtggtgtgtgactcanaatcacaaatggcacaagtgagaagactttaaagtagtgttgtcataactattttcagttattataactgaattggttttggcaccaaagcataactagagtgtacatatatattcttgatcatgtaatgcagtggtgcgggttttgagagtggctgaaaaacagagaagctgaaaaactgcagaaaaacagagagttcaatagagaaaaagagctacgagattgagagaggtgttgttaaaagagagatcaaagctagctgctgcttgtattgaacttgtaattacattatcaatgtgatgatgagaagctgcactttcccgggatgtagacacattgccgaacacgtaaatcttgga

SEQ ID NO: 162744 - DNA, 334 bp, Glycine max
caaaattagctacattattttaactgagttggagaccatctcatatttttcctaactagatgattgagatggtgcatgtttatgtgtgcagtcctacgatgccacaaccatgtatcatctatcttacttaccaaacaactcagctcatgaaatgatgcatgttcaatgtttaacatatagatattacctattcttttgccaatatggacaatatcgccgggcatatgcttcactaataagacaacaattcttgttgaattcaattttgaagcctttgtcacatagttgactaatgctcagaaggttatgctctagtccatcaacatatagaaca

SEQ ID NO: 162745 - DNA, 335 bp, Glycine max
  unsure (1)..(335): unsure at all n locations
gggagtacgtgagctcaattggaggtgggcaacaggggatggtgggttatacatgatttgtggatggtgagaattgttttgcaccatcgcccgaccgccacctagtaccacatgtgatgggtaccccataatcctacaagcttgaaatgaggaagtgtanaagggtgagacttcctgcttttattcgttgaccacagagtggtacctgtagatatgtcgtgggggtcaagagaccttggggacgtcatgtggtgtgctattgcccaaaaccaagcttgaccaatcccgacccaacccgggcatagtcattcagtgagaacctgtgatgtacctaa

SEQ ID NO: 162746 - DNA, 357 bp, Glycine max
  unsure (1)..(357): unsure at all n locations
cttgttctttttattaaatgagaagttctggactcatcacgttatctaaaaaccttggggtggatccaagtgctccgatcatccatttgcatactcatgttttggtggcatactcaccgttgtttatttctttaggaatttcatcataactaagaaaacaccaaggcacccctataacactcgatccagaaaaatggataatgaagagggcgtgcaggaacagatgaaggccgatctatcggccttaaaagatcaaatgctccaccttatgaagactatcccagaagatttaagccaagcccttacttttcaggggcaactcccacctatgaagacatntccggcaagacatgggga

SEQ ID NO: 162747 - DNA, 434 bp, Glycine max
  unsure (1)..(434): unsure at all n locations
cctggttggacttgaatcatatacgttgtagttttatggagatgtggccagttacttctacagacagaaatgggcacagaaagaaatccttgatttcagaaaatgtgcaagcaaaaaacatatatttaagaaagtgttattgttcaagtaagtggcaaattaagattggttatgttttggcagtggtagttttgacacaaaaaaagatagagatataagagtactaacaatttagttactatcttgtataagtacaataacaactattgagaggttctttagtgaaagaaagggagaattacaatacttgatggttgagtttagcaaggactttgtacccgacnttaaaatctttgacttgtggtcctatcttaacatatttctctgccacatcagtgcctcatgcaaaaataatgaatgaatgtaaataatag

SEQ ID NO: 162748 - DNA, 454 bp, Glycine max
tgcctgtccgatgcagcagtaatgatggcccgtgttatgttgttgatcggttacgaacccggaatgggtttgggcaaagacaacggcggcataactagcctgataaatgccaaaggaaatcatgggaagtatggtttaggctataagcccactcaggcggatatgaagagaagcatcgcgggaaggaaaagcagtggccaaagctcgcagttgagacaagaaagtgaaggaagcccgccctgccacataagtagaagctttataagtgcgggtctgggagacgaaggtcaagtggtcgcgatatacgaagatgatgttccgagtacattggatttggtacgaccatgccctcctgatttccagctgggaaattggcaagtggaggagcgccctggcatttatgcaacgagcataatgtaaacctttacggttgtaaaactctatagttgggcct

SEQ ID NO: 162749 - DNA, 362 bp, Glycine max
atgttcactctgtggaacatcaacaatggaattgggatcatccaatgatgataaatcaagcccctgcacatttgaacttaaactttcctgcaccaaattcataaaattggctagatgagcttgctgacgatcgtctagcacgaggtactacacttatctcttatatttacgacaggcgcattatagttgtttgtgaacctcgaaactctgtataaaccaagagaaatcacaatttgggttgccgcaatgaaagacgagctctcaatgattgagacaaatcaaacctggcatcttgtagaaagacctcaatacaggaatgtgattggagtcaaatgggtatatataactaagcttgatgctga

SEQ ID NO: 162750 - DNA, 432 bp, Glycine max
ggaccttaaaactcagcttgctgtgaagcctctatgggaggggatctttttcttaatgaggtgctgcaatggtgaatgcacaccatgaagatccatggaagatcccgagaagaggtgagaggaggctccatccactccggaataagccatggaagaaggagcttcgccaccaataatgtgccttggataagaagcttggagacgacgcctcaatggaggaaaagacagagacacgggggagcactaaattgaaggatgaaaagggggagagaaggtgaactcttgatggtgtctcatgaaactctcatctatcaaagttacaggaagtgttacacatgctgctattgatagactaagtggcttccttgaaaactttcttgagaaaactccttgtgaagcgtattgagaagacttcttgataagtatagctta

SEQ ID NO: 162751 - DNA, 320 bp, Glycine max
gcaatattgggtgtggaagactcaaatttcgatttggtggaattatacgtgtaaatccactttgagcaactttaaattgatgttatggactactgtgacgtgagagtttgcttcatatttacctcattctaaatttcactgttcaaacctacaaaacccattgaatggaggggtgttggacatctagattctgagttgctgtgctttaaagctcgacttctgtttatacatgaatgatacatgtattgggacttgtttgaattcgtttgcgccatactggatgagggaaagtgagattgtcattatctgcgcttatgcat

SEQ ID NO: 162752 - DNA, 365 bp, Glycine max
  unsure (1)..(365): unsure at all n locations
tagtaaagctaagcactaacagaagtcaatgtaaaacactaattacattaatgtctttgaaatgtaaaagacaaaagacattgaagtctttgaaaatggtgactgaagacattgaagtctttgaaaatgtaaaaaagactgaaggcattgaagtctttggaaatgtaaaaggttaaagacattgaagtctttgaaatgtaaaaggctgaagacattgaagcctttgaaatgtaaaagatagaagacattaaagtctttgaaatgcaaaagacaggagacattgaagtctttgaaaatggtgactaaagacattgaagtctttgaaaatgtaaaagactaaagacattgaagtntttggaaatgta

SEQ ID NO: 162753 - DNA, 478 bp, Glycine max
  unsure (1)..(478): unsure at all n locations
ctcgtacccgcgatccttanagtcacctgccgcatgcaagcttgaaagagcccgggtagtcaaagataagtttaagtccatagccatcaaagtctgaaaagagtatgatgaactaatggacgtcaatatggccacagctgaagccttggaacgagaaaccaagaatgcccgaaaggaagaacacaaccaaagcaaagttttgaggggctttatagggcagcaatactgagctcaagctccgaagaggtgaaaggaatcatcacgggtcaaaggcatgatcttgaaggacgagctaaaggtttgccttacgtcgaaaagaaatttgtcccaacagttaggcgagactgaagggaatatgtgggccatcatcgataagtgcaaagagaagcttaatctatcggcgactcacgagcaaaggctagaggatgagtacgcccagatattaccagaaagggaagcaacggaaagggtaattgat

SEQ ID NO: 162754 - DNA, 457 bp, Glycine max
  unsure (1)..(457): unsure at all n locations
ntgaaggtgcgtagcccaccattttccatagtagaatctgtttatgtgtctactatcattgtcatcgnttttttcgtcattgaggtgccacttgagctgccaggttctccacctttgggcgtattctttgaaagatctgtgcccccttttttgcacatantttgtagttgcatcctatccgaagccattataccgacactgcctaacgaaggcaaccattaggtcctcccaagagtggactcgagaaggttccaggttggtgtaccaggtaacagctaccccagtaagattttcttggaaggaatgtatcagtaattcctcatcctttgcgtatgcccccatcttctgataatacatctttagacggttcttggggcaagtagtccccttgtacttctcaaagtccagctccttgaacttgagaggggtgatgatattgcgtattgggaacaactct

SEQ ID NO: 162755 - DNA, 191 bp, Glycine max
catatgtccataagactggactaatacatttgctgcccaacgtttatggtcctgcaggtgaagatcctcataagcattttaaggagttccatattgttatttccaccatgaagccccctgttgtccaaaaagaacatatttttttaaagggttttcctcattctttatagggagtggcaaaagaatggcta

SEQ ID NO: 162756 - DNA, 359 bp, Glycine max
tcttatccaaggctcatcttggtggagaagctctctctttttggcttattccctagtggatggcgcctcctctcacctcttctcctttgtcttccgctgcatctccatggtggaaaatcaccattaaaggacctcattgaagctcaaagatctagcctccatagaagctctacaagcaagcttccatcactcgaaacattgaagatctacacgaggtagggcagaaggagctattgttatacatgctggaggaggagctgctgatgtataagctggatgatgagctgttgatgtagcaagaacctcagctggccttgcccttagtcttctggcccccctaataataactgttggatcat

SEQ ID NO: 162757 - DNA, 253 bp, Glycine max
tggagaagaatactttgactttctggaggaacgaataattttgtgtgtcgaaggaaacacaagaactctaccttctcactgtgaatttcacacatcatcgaacttgaatgagtccctccttattcaaaacttcacaattacctgggctaaagaaggagattgctatctccaacttttccactccaccatctattccataacgagaaagaatggtctccatggaattaaaaagaacgatgaatcgattgatgaa

SEQ ID NO: 162758 - DNA, 348 bp, Glycine max
agcctacgcaaaagttagggtatacatataagaaacaagataaagtaaaaaaggattaagaataacagaatagcattaggagcatgtttattaaaggttctatccagaaattcaaactataagagacttcagtcaagacttgaaatgacacatgaccatgtttcttcatcccaaacactaatttatcctttgctaccccctccaagccaaagtatattagttttcttaaaacaaaacaaaacaaaaaccctgagtaggaaccaccgctaaactggtgggaagagcaatgaaaacaacacatgcatgaggtttactaagctatacgttgcgcaacaatgatgtcaaaaa

SEQ ID NO: 162759 - DNA, 452 bp, Glycine max
gcttatagtcattacttgttgttaaccatataccaaagtcgattgttcctttgatgtagcaaataattcattttatggccttgggatgagtagtggttggagtctacatgtattaactgatgagtctagtagcatatagaatgtctagtctcatgcacgtcaaatatcgcaaactacccaccaaactcttgaaatttgtagcatcaaccttttctgctttgtcaaactttgataacttcattttgcagtccatcggtgttccaattggcttgcaactgtacatctcgaatttcttgagcatctctttcgcatagttttgctatgaaatgaagattccatctttcttttgctttacctcaatgccaagatagtatgacattagtccaatatcagtcatctcgaactctttgattatcgctttcttaactcttcaacatacttggatacttctc

SEQ ID NO: 162760 - DNA, 465 bp, Glycine max
ccagctttacgtgaccttagaaactcagcttatcaacaacatcgatttcataataaaatagcattggttcttaccaaaaaccgatgtctgttatcagaaaacaacatctatttttagtgaaaatcgatgttgttttattaccagcaacatcgattttttactaaaaaccaatgttgtcttcatatattaacatcggttttggtaaaaaccaatgttgatatgaagatatatgacttttttttataattcttactatataatattgattatttaaataatcgatgttgtaattttatgttaacatcggttttagaaaaccgatgttaaccgtattactttcaacgtcgatactttcaaaattggttgataaccaatttggaaagtccttaataaccgatgttaaaaacctatcttctagtagtgtctcacccctggtcttccatgggcaaacctgaccctatctac

SEQ ID NO: 162761 - DNA, 334 bp, Glycine max
  unsure (1)..(334): unsure at all n locations
agcttgattgatgcaaccatgaaggttatatcccttaagcaaccacccatgacatgatcgctcatgtgggtaacgctctatctgccgcggaagagctgaaaaagttccttgtggctgattcattggaagaagtgaacataanactggacaagttctacatggtcctcatcttgagaagcttacacttaaactttgatcatgtgtgtgatcaagtacttgctggggaccaggttccatcaatggattccctcatcactagacttatccgcgtgcctcatgtatcgaaggatgaacatcctgctgatagtatggagacctcagccatggctgcctc

SEQ ID NO: 162762 - DNA, 437 bp, Glycine max
acctataaaactcagcttgattatgagaagaacaagtttgacaagcaagaatattgacatagtaagttggtaatatatatatctttattattggatatatttgtatttttaatttgttgtcagttgccgctctctacacgcctttttaatctacaatgaaatggttctttataagatacttattagttaataaccatattttatgcaagattgaatgtaattgtgagccattatttcattatttcaagttcctgcaactataagttgtacactgctcgaacaagtgtaccttatcttaggtgtgcaattcagtttgaaagataatatacacttctgcatagggttccctaaaggaggttggtttgttatggtgagattggggaaatgatttatcttatcactaggtctttgccttttacattcacatggagtgacat

SEQ ID NO: 162763 - DNA, 416 bp, Glycine max
  unsure (1)..(416): unsure at all n locations
tgcagcttgcaccagctcgccagcgatttggttgcttcctccaaaagcaacagccttctggaggaatcttctaaagggcccaagtgggcctggttgctatttgcacccccatttttactaagtacacccctgcctttnttttggtgattcttttttcgtaaagttacggaaacttacgaatttcgtaacgatacttgttttctttccgtaatgttacggaaccttgcggattacataatcatcctctttttgacttaccgaatgttacggaacctcactaattgtgcaacgatgcttccattttgatttacggtgtgtcacggaaccttacggattgtgcatcaatactttcttntgattatcggcatatcccggaacttcacaaactgcctaatgatgggtaccaagcacctcac

SEQ ID NO: 162764 - DNA, 297 bp, Glycine max
gcttagctctgtgagagaaagggaccaatcccattttttactttgatcttgaaagatgagctgaaggtttgctcaaggtccaaaataaacctgtctcaatggtgtgcgagacagagaccaacatgttagctatcgtcagccaatatcaagaagagctaaaattagccacagcccacgagcataaagtggcggacgaggatgcccgagtgttcgcccaaaaggaagctcgaggaagggtgatcaacttcgtacatcatgacgccacaactgtggatggagcaattccttcttaccttg

SEQ ID NO: 162765 - DNA, 309 bp, Glycine max
agcttcttatccaaggctcatctcggtggtgaattcttcttctttcatggcttattccttaatggatgagagcttccaaagctttaagttcgtgctccttaaacctccatggattctttgctttaccttctcttctattgttgttcatcatatctctccatgaatctcctcacatgtctcgtgccaaatgtttttaacatgattctttagagtttccactgattcaacttgctatagaagctagatttgatcttctctcgttcaaatttctcgtcctgttcctgaacccagaatttggctgagcttacg

SEQ ID NO: 162766 - DNA, 383 bp, Glycine max
  unsure (1)..(383): unsure at all n locations
agcttactacagnttattatgtttatgtagcaacaatttatataattcatgtctcagcagttcctaaatatatatatagcttctacagtttttaaataatagggtgttgttgctcttgatattcattgttgatctcataattagtaaaatattttatggtatatcttatacttaatttttagatctaaggcttgtatatataaaccaagaaagtcaataaatatttctgattcaataaaattaaatagttatgggatttcctattttactctttttcctttccacactataagaaatatatgtgtataaattatttacagattaagagataaataagaatctattattgataaatgagtaattgatatgatgttgaattttat

SEQ ID NO: 162767 - DNA, 391 bp, Glycine max
agcttgagaattctggtaaaacagtgaaatagctgctattgctctgtttttatatactgcattttgtgggtttccaatctatttattcataatttgttgactggacccttgaaatagtttaaaggaagaactctgtacaatttgaatcgctacttgcttttccactaagtaatgtctttggatattgcgaggccctggaaaacattcgaggattgaacccaccattatctgatttttcctcttcctctttggattggatgcaaccttccccttttctttctttgattcttattttctttttcttcgatgataagattcatccaaaatatgcccttatctgttgctgcatctgttattttgacccaactctgacatagtgatatgacctgga

SEQ ID NO: 162768 - DNA, 396 bp, Glycine max
acgctgcctagctcttgctggagtggaatttcttctgcacgtgtttatgattattatcaatatgtataaatctggcaacagattctaaaaatgagaataataataaataagaccaactaagatgtacaagtcttctacccttcaaaggcaagagcaattcaagaatgtagacaacaccgccatgcttggcagcagcccaggccagttctggtgtgcttgccaatgcatagagcacatggagagagccttcacgacaacttggggctgagtgaagcatttgtaataaaagcaggagactagatccatctgcaaccatggcttgcaaacaaggagcatgtgctgttaagagtgacaacactcctatgcaaagttgaggaatgttactgtgtgatgctt

SEQ ID NO: 162769 - DNA, 390 bp, Glycine max
gtgaacgcagctgcagcttggcgcattccaaagctggcgatatttttctgtccatgacaactctatcatgacgactaagaaacaattgttaacttatcatcaatacaatactcactaccgccctctgattggattcgccatccatgtcctctggcttccatttgataaaattttctttctgtatatgtggcctatatgcacactctataactttttaatgcttcagatgtacatgaagaagcagtctgtctgaacctgggataaaaaaaatcttaaatgacaatatgctttttaaaactattgtttgtgtgatgcttgctttctagaacaagttctctaaatcttgacttgtagctggccccagagtatcataatccatgaaccatgtta

SEQ ID NO: 162770 - DNA, 347 bp, Glycine max
  unsure (1)..(347): unsure at all n locations
cgacctagcaaccggaaatactcaacgacttttgaaaaccggctaccctctgatgcatcaaaatttgtaggccaaggccgacgaaacaacctcagaggagcttcaacaagttctccatcttcagccaaattaggcccagagccatcacttttctttttcttttcatctctatcaatttccatttgatgtttttctgaagaataagatctccacatttgcaatccaacttgttgcaaatcatgacttataattgtataaaactcaagggtgggacnccggccagtccccacttcaccaaaatattctacttcaagtacagctttntggctagaatacatccncataac

SEQ ID NO: 162771 - DNA, 399 bp, Glycine max
agcttgtgagaaatcgaattcggaaacgaagatatccaaagcaacgcattctcttgagacgccattgatgatcgtcaccaagctctatataccataaaagagtgcttaacagaagtgaagaagatgaagatgagataaagagaaaaacagagaaagaacttacagaatcagaaaatgttattatgattgggcaaccgatctctgttacaaagagaagtatatatagagttctacaacagttagtttttactaactaaccttctaacaaagtcttaactaacattgacacttaactaatgtagtaactgtcataactaactaagaactaacatggtaacagccatagttaagtgagtgtgcaggtgaatactggacctcctatctactactctatactac

SEQ ID NO: 162772 - DNA, 406 bp, Glycine max
catcctcattggaagtttatggtgcaacatatttctttggcctaacaggaactccaatatttttacagcttctaatgttatgattggtttggccacaccttccacatgtaaactcagccaatttcctctttagcttatgtcctgtgacattgtcctcatctacagatctccttctatttttctttggccttcctctttggacctttttatgtggtggaacagggtgtgtatactgtgtctgggcccaatattgtggtccttggactggttcaataaaatgctggtatgtcttattataagcttctattgacagccactcatgacacatgtcctcaggcttcccttctttgtgagttattgttgcaatggcatgtccgcatggcatccctacatcaaagttgtaaaa

SEQ ID NO: 162773 - DNA, 400 bp, Glycine max
  unsure (1)..(400): unsure at all n locations
agcttgtaccctttcagctgcggacgagatattatttcatacatctgaaatagagagaaaaaataaatggttagaataacctatacccacctctaacagggaagcgggagagaaattattagataatcgtggactacttcgcgttcatgattcaactaatatgtgggtgatacatttaagtattttaagtttaaaaacaattaataaaaattcattacgtctcatgttgtggagattagttgaaacttgaaaatataatgttctcagaccccatctaataatttatcaaagtggggaccatatagcgagatgtgccacaaaagttgcactancatgttcccattgtttcacaaacaaatgattacgaagtgcatgaaatgaacgtttcctttaccacccc

SEQ ID NO: 162774 - DNA, 392 bp, Glycine max
tacttaaacacttttttatatgtgtgtggatgtgtgtgcgtatgacatacagctagattattaattatgcttcctttaatcttctctttccaggttgttttgtatgatttgagcaaaagacctatacaacgcaggtttgtaaggaaagatgaagttataacggaaggtgaatcagtatattttgatggacatttagtaaaagtaggacaacctgaaggaagtcatcactctccagcgaagttaaatgaacgagggactggcaataatgttggaaggagacaactaagacatggacaaaatggctttcacaacgtcaatccatcttttgctaaaggttagtccttgactaattcacaaatttatctttcaatccgtatagtccgtactactat

SEQ ID NO: 162775 - DNA, 390 bp, Glycine max
gcttgaccaatcccgacccaacccgggcatagtctatcagtgagaacctatgatgtacctaaacaagcgagctcctggcagtcaacaaataaaaggagcaaagaccacaaaacaaggaggcttgtggtggctggccacttgtgaaacttgattgatatgtgagatatggtctctggtaatcgattaccaagggtgggtaatcgattacaaggcttaaaaatgaagacaggaagctaagatggtctctggtaatcgattaccaaggggtgtaatcgattaccaggcttgaaaacgaagtcacgaaactaagggagcctctggtaatcgattaccaacctgtgtaatcgattacacagagggatgggtcactggtaatcgattaccaagtat

SEQ ID NO: 162776 - DNA, 416 bp, Glycine max
  unsure (1)..(416): unsure at all n locations
tctcttttcttgtttaattattatattttgtttttaattcttgtatttggctatgtttttatgacatttgagcacttattatttctttttaatatttgtttagtatgactgaacatgatgattatatttacttgctcttggttgtttatggttatgaattttaaacttaattattttgataatatatgatcagtggtatgtacttttatttggttattatgaatgactttctggattatatgacattctatgaagtattatctttctaagattgatgaatggctaagttatcttgtttgattgttttctattctcttgtatgattagtcatttatgtatgttttatatttgttacgcactttggctttttgttgatgccaaacggggagagaaatanggaataaatcaagaactca

SEQ ID NO: 162777 - DNA, 383 bp, Glycine max
  unsure (1)..(383): unsure at all n locations
agcttgntaaagaacttacaagaaatctttattatgcttgttcgcacattgttcgcatctatgatatccagtcaacaaggtttgaagcagaggaagccttcaatcctataacgcaacatgacggacaaaagtgggcaattaacttgaatggtcattattgtcaatgcggaaagcattttgtgcttcactatccatgttcacacattattgcagcttgtggttacgtgagcatgaactactaccaacatatagatgttgtttacacaaatgagcacatcttaaaagcttactccgcacaatggtggcctcttgggaatgaagcgacaattcctccttctgatgacgcatggacatttatccctgatcccactataattcgtgtg

SEQ ID NO: 162778 - DNA, 397 bp, Glycine max
  unsure (1)..(397): unsure at all n locations
tcttcactccatatacacaataactcgcctgctgggtttgttgttgactgcatttnccaccctacctccttgcgccccccccccccacacacacacaaagcttggcacaagttcatgtcaatattttctttcttagtctcttgaatacacaacaaatcaattttttctttctagactattctcctaattgcagcccattttacccccctccctaaaccccttacattgtaggaaataatattcatgggttttgtgttcttgcacccaatctctctgcctccttcaaatccctttcctccatttcctcaattctgttgattagcctctcttggtctatttcacctgtcatccccatcaccttagccatgttccagatagcttctgcctccactagctg

SEQ ID NO: 162779 - DNA, 390 bp, Glycine max
tgcagagttacgtcttggatcgatttaatcgattaaaactttatcgtaatcgattacacatctttttttgagacaatgattgatttattcataagtctatgctttaatcgattaccgggtgatataatcgaatacttctctttctataagtgtttcaaaagtaaacaataacactttaatcaattactttgagtatctaatcgattacattgttcttgagttgtttctagtgtttggaaaaacactttaattgattaaaaaataatctaattgattacttcatttaattgatcgattaccttgtagatttaatcgattacacgcgggtataattgttttctccataaataatcaccttttgtgttctctctaataacacaatattttaag

SEQ ID NO: 162780 - DNA, 350 bp, Glycine max
gcagcatgcaacttgaacgcgtgtaatccatcatttttcatttgagaatactggtaatgtgtctactatcattgtcaatcattttttctgtattgaagagccattttagctgccatgtcctccacctttgggtgtatcctatgaaagaacccgtgccccctatttgcacatgttatatagatgcatcctatccggagacattatactggcactgcctaacgaaggcaaccattatggctcttcatgaatggaatccggaacgtttcaagttagtgacccagtaacaactaccccattaaatttttcgtggaaagaatgtttcacaattccttcatttttgcgtatgcccc

SEQ ID NO: 162781 - DNA, 399 bp, Glycine max
  unsure (1)..(399): unsure at all n locations
ntgatctaccactaccaccgccactattatcttagntttttattattattagtactttgatttctagccgcgtatttggctatattattatgacatttgaactatttagtatttcttttatttgcatggtatgattgaacaattatgaattatgttatatgactacgtggtttttatatatttgatctattcatgtttcttgcttcatgattggtttatactctttaatgaatgtcttgtttatgattagtagtgtatgtatgttttttacttgttacgcactttggatttttgttgatgccaaagggggagagaaatatggattaaatcaagaactcacataagaaatcaacttaatttcaagtgaagcttaaacttcaaaacaaagggggagaatat

SEQ ID NO: 162782 - DNA, 370 bp, Glycine max
agcttctcaagcaagcttccctcaagtgtttattagagcacaacagcttcaagtaggtgctctttaaacctccattaattttaagctctaccttctcctccattgttgctacttcagtttttctccatgtatctcctcacatgtcttgtgctaaatgttgttaacatgattatttacaatttccacctatttaacttgctatacaagctagatttgattttctatggttcaaatttcttgttcttgttcttgaaccatgaattgtgttgagtttaagttcctttgagctgaaatatttaatgagttttatagacacctgtaacaaaattagaaaaaaagaaccacgtgatttggaaaaaaggaaacaata

SEQ ID NO: 162783 - DNA, 302 bp, Glycine max
ttatgatagccgccgatgatcccaatactggcttccctaagctctctggtctttcttcacgccccatcacatgccttgccaactccttggagtacctttgcattggggtcactgaaaccccgtgtaatgaaacgcgtgatgatttcatctaatggcgctcctctcatggggtagccaaactgtcttatggcgaaaacgggattataattaatacaaccccttgttcccatcaagggaacatttggacatccttcgcatgaagatagaatcttgattcttccttccttctaacgaggggacca

SEQ ID NO: 162784 - DNA, 400 bp, Glycine max
accaaatagaactcttaaacattgatgttctggataaacaacatgtcatgcacatatcaaagcacaaaatgaaacaaatattaaaaaaagaataaaagagagaaaaaaaacttaaaaccaaaactagccttccgaatatcctatttgctactcctatgtacacaaaaaaatagtgccacattacacccactgacccacatcaagttacatataagaaaaaaatgaattgaaaacaaaaacgaatgttggacacaaaacttcgattgtggaaacgcaaacttgataaaaataaaggaaagtacaaacagagagtgagagaattgcgtatctcacattcatcagcaaatgtaatatacatttctatttctatgtattaaaaaagaaaaaggataaaataaat

SEQ ID NO: 162785 - DNA, 434 bp, Glycine max
  unsure (1)..(434): unsure at all n locations
ctcgagcttctncttatcttgtttcagaagtcagaattgaattggaaacaatcaagatgatcatgaatcttaaatcagtcaagagctactaaattcaaatctgaacaacatggatgttgtgggaacaaaactttttcctctacaaaaattaacctgcttttttattttcttaagaggggtaaccacctaaagcaattgccttatgcatattggactcacttttgaaatttttttacactactataacttgcaagttttttttgtctgcctttgaatattggttgttagtctgaaaatagcaattagaattccatgtttacatttttgtgttgaaatctttctaatgaagggaaatatactagtgtgcaatgtcacatttctttnttgtttttttagctgtttgatgatcgtacataccgattattctattttat

SEQ ID NO: 162786 - DNA, 401 bp, Glycine max
gccgctgcagctgcttattgctccgctgtgcgtgcatgtttttatttcttctgccgcacgtgatcgtacgcgttattttgtcgtgactcgccagtaattgcacatcttataagacccacacagagagatgtggcgcgccagcgacagaaacaaagaaagcccacatccggtttggacaatgcgggcgccagatagtactaccttgcccctttttcttgtattgcctcgttactccctggcgcatgatagataatctcgcgccttttttcctttattctgtttttattggctaggtccacatgcaggcgagagtaccgttgcttcttgatattggctctctttagccgttggattaataaatctgctctgatgggttgggggatactgtgagagcgcacgtg

SEQ ID NO: 162787 - DNA, 430 bp, Glycine max
  unsure (1)..(430): unsure at all n locations
agatttanctcttgtagttggcatctacattagtatgtctaaaagctcaagtatattaatttccaaatgacaaagaccaaacttgccaactcaaaataggatgaaaaacatcagcagtcacatcacatgtcagagagagggagagaagaagatcaaaactgtgagctcaaatgaatgttcaaatagcaaagcaaacaagacttaatttcaacagtgaaagtaaaagaatagaaaaaactgggtcttagcatcactttagagaaatctagaagcacatgcctataaagaatcgtgtttaaaaaggttgtgaaagtctaaataaaagtagttcagatgaacctgatcaagcacctatccattgatacgcgaagagctgtctagaacaaattaagaattataatattttttccatgaaataggactcgaaaat

SEQ ID NO: 162788 - DNA, 396 bp, Glycine max
agcttgagccatcagaagacttgcttattcatttattgctaatttatctgccttcatagttttgtccgtttaagatgtcttataactgtcacacggacaaatggtctcttaatgagctcatttcattaatgtgtgcaagaagaggagaagatgaagcaagaaaggactgaaagtgctcatgttgagagtaactctaaagataagggcaaaagaaaaagaactgaggagcccaagaatgaagctcctaatggtccaacacaaaagaaacaaaatcaaggtgacaaccgtttcttttgcaataagcctagacatgtaaagaagaggcactatttacattctaaatagattgccaaccaaggcagctgccaaaaacactttatgagctttgggttgggc

SEQ ID NO: 162789 - DNA, 395 bp, Glycine max
gacaagtttccctagccaatcgtggcctaataagcaacattttgttctacagtgggaagaagacgatgatcctgcatttcaaccagatccaccagacgaagttgaaacagctggtgaccccaatttgcaagatcatcatttgtcttataatgctttaaaaggctcatcacgtcttggaataatgaagtttcaaggatcaataaatggattgggagtgcagattctactagatagtgggagttcagataacttcctccagcctagactagctcaatgcctgaagttacctgtagaaccaattcctaatttgcaggttttggttggaaatggaaatgccttgactgctgaaagattaattcaagacttggaggtgaaaatccaacgtcatacactga

SEQ ID NO: 162790 - DNA, 396 bp, Glycine max
ctgcacgcttgtttcaaaacttgttttggctgtcctgtgaaggatggaatgggaacttggaaagagaaaaaaagaagaagcacacaccatattattatgatgctgaggataagcttttaagttaaaaaagatgatggctcttgtaatttctctgtagatcgagcagcacatgtgactcactcagggcacccatgtggtgcagtttgtggatgccaggaatgatggaccctgaaaaagttatagttgaggtttcttccgttttctatttaagatatagattagttacaagtagttttctctcgaggttcaacacactgcctggtcaaatcatatgtgaccatgcataatctgcctgtctattgtttatggtaatgggaatgcttttatagaaaatac

SEQ ID NO: 162791 - DNA, 336 bp, Glycine max
tatcttgaacccgataattatgcgctttttgaaacattcttctaatctcaactgctaacagtctttctctgccgttgcttatagtaatgtggatcttactgcaagggatcttttcctcagcaaacacaaatagtaagccattttcatctatggcaaaacatatatacaaacgacagccacgacgagcaggaggaaaaacagaaatcctaaaaatacccaccaaatggttattaatagctcttgtgctctcagcttcgtaaaccaaatcttgacagcgacacggtatttttaactgtaacatatcatgtgtcctctctactggaaaattcttaatgc

SEQ ID NO: 162792 - DNA, 394 bp, Glycine max
tgcaaccttgaatctcttagaactactgcttcttctttttactcaacctctctgaagctttctggtcttccaaaacttgaaaactagcgctatacatcatttaattctcttctcccttttccaaaaaaacaaaggactaaccgcctgaattctttcgtgtctcccttcttccttgtcaaaaaattcaaaacgacacagtctgagaattcttttgattcttccccttccctaatacacaagtattcaaaggactaacccgctgagaattcttttgcatccccattcacaaagtatcaaaggtctaacagcctgagatctttgccttaacacattggagggcacatccttttggcgacaagtagagggtacatctactcgggtttgactcgaaaca

SEQ ID NO: 162793 - DNA, 432 bp, Glycine max
gaagtagaggagaccttcaatcctattacgcaacgtggttgtataaagtgggcttttaacttgaatggtcattattgtcaatgcggaaggtattctgcgcttcactatccatgttcacacattattgcagcttatggttacgtgagcatgaactactaccaatatatagatgttgtttacacaaatgagcacattttaaaagcttactccacacaatggtggcctcttgggaatgaaacggctatttctccttccaatgacgcatggacacttatccctgacccaactacaatttgtgcgattggtcggccaaaatcaacaaggataccgaatgagatggattgggtcgaaccatctgagcaccgacaaaaatgtagtagatgtggagccgaagggcataacagacgtcgctgtccaatgcaatctgagcat

SEQ ID NO: 162794 - DNA, 396 bp, Glycine max
agcttcaaggtcaatggacaccgattgaaatctttcctcacaaatccctccttagtggatgtagtggttgaggagacctccttacttcaccctacttctctttcgccatgacttagggaattttctttcttctgtctccttctttacttttattgcacttgtccaaatatattgattgctttggttgttcttgatcttatgattgtgctacattgaggataatgtgttgttcaagtgtaaggggggggagaagattgttctttaattttgtaggttttctagtttaagtttgttaggttctacgttaattttgttattttggttttatgttttgtacaacattgcatgttcctctttgaattttgggttatgtacaggtaatgggtaattgttttt

SEQ ID NO: 162795 - DNA, 416 bp, Glycine max
  unsure (1)..(416): unsure at all n locations
ttatacaagggagcanaagatacatgtattattcaaggtatgttatttggtctaaagagcttgtgtatgtacaatcatggccttcatcatgtccttacttatacatttcattctaaaatttagagattcatgcacagattattactcatagttagtcgctcactcacagttaaaggtcacactctcaccggtttttggttcaagcttttctttcacaatcaatctgtctactgactaacaattctaaatgcaagttcacattcttgttctttctttgttcgacatgcacatttgctgaacttcatgaaaggaaacacaaatctcatcttaagcatgcattcaatttaaaacaaagtcatacacccattttcacaaaaagataaaagtgtttcacaaccatgtcatctacaataagt

SEQ ID NO: 162796 - DNA, 379 bp, Glycine max
  unsure (1)..(379): unsure at all n locations
agctntgccagtgcggagtggatgtgtgaatgactggttgccatgatacatgaagaaacccctcaagagcaaccaaattgggtgtggccgtgtcctctggtgttcgaattgacgaactggcaaatcgtcaaacaacccgggatttccgtggcaaactcaatgtaatttttttagttctaaccctatttctaggcctacgctttagggttgtctccctgtttgggcatgtcttttgttaccacaaaattataaatacataatccttcttcatttgctcttgcactttcgtctaatttcattcttttgcatatttatttttttgcgattaaatggtacaaatcccacaatgagtcctgtgaaggtaatgatactgacgacc

SEQ ID NO: 162797 - DNA, 395 bp, Glycine max
  unsure (1)..(395): unsure at all n locations
ttntaaaataagcataagctaatattaagtcaaaatatgtatattttgagaagctacttggagntgatgcggaagcggaaaacccaaaacatgaaggagatgtttaatgatttttttgacaaaattgtccctagctaatttgaggaatgacatccaatacccttggactcatcacacaaagacagtggtaatgctcgacctaacgtctcagcagccgcttcttcacctgctttgtctctgtagctcactttgatcccatggtgctctcttcggttcatgtttgttaatcttttcttcttcttgttgctatttgagttgcacgttcattctttgttgtactgtgtatgtatttgagttcgcgattnttgttgtggtcgaactgtgtatgtatttgc

SEQ ID NO: 162798 - DNA, 391 bp, Glycine max
agcttgtggtttatgcaactggaatccattattgaggtgaaatcgaacgcttgcgatttatgcaaaaaatggaatctacaaatgaagtgaaatcacaagctattcacatttgtcgcaaaacgaaagatattgcacaatgtttcatagcctctctctagctgtcacaatagctcagcaacgtgaatcaatcaactaagactatagaatcggcatagcctggaacctacccgaatcgtggcctgcatttttgaatttgaatttaaatttttttgaaatttggaaatggaaaacggtggaacgaacaaccagcggaagcagaacgcgggaaccttgcgcgggagctgatgaaagattgaggaaactaacacatgtcaagaaataataaaaaaat

SEQ ID NO: 162799 - DNA, 398 bp, Glycine max
tctatataagctggaaccatttatctataaacacaagttgttttttattcagaaaattagagtttatctcttttatcttagtgagagtgattctcctaaattcttgagtgattcaagaacaccctggctgtatcaaaggactttcacaacatttgtgtgttgccctcgctgaaaagagtgattctttccttcctttcatcttcacccttgttctttcaaaccacaattccagaaatccacctctgcctagaattatctcgtggccataactcccgttttacgcactcaaattaagtgattcttgagcctaaattgaatttcaaaacgagacctttcacctcgttttggaatcacctcatttggagccctgtagcttcagttattgccatttctatatt

SEQ ID NO: 162800 - DNA, 392 bp, Glycine max
agcttgttgcaggtttcagaatttgaaatctgaatatataggtgcagggacgcattgtaatcgatgacacaaatatggtaatcgattaccagagagcaatgttgccagaaataactgcttgtaatcgattacactattatggtaatcgattaccagaggttattttagccagaaaataaaaacaaaaggctttctaggagataagaagttttgagttactatcaaaatactttttcatgagaaatatatttaaaaatactttatgaataattctcaatcatgtaattcacatatcatattatgcacaaacattaaaacatgtaaataatcaattttatcaaaacaatcaacataagtatgaagagtattgattttattgaaatatatgaacg

SEQ ID NO: 162801 - DNA, 397 bp, Glycine max
  unsure (1)..(397): unsure at all n locations
tccatcacatgcgtncaaaatcttcatgattcacatacatattgtctcattaggtacgtttattgctatttaaggcttcaatacaaacctacgagctcatatgggacaccataagattggcgtactttttggttggaataatcaacctgaaaatacacaacaaggtacgttttattgcattactttccttaattgtttaaatagtggacaaagggttcccatggaccctaacagaataaagctcattcctgagtagcccactccaccaactctaacggaaattaggggctcccatgacataacaaacttttacaaaaggttttcccatatttttctatacttgtaacattactcattgagctgacgaggaaccatgtattatcatgggaaaatgcct

SEQ ID NO: 162802 - DNA, 392 bp, Glycine max
  unsure (1)..(392): unsure at all n locations
agctngctctaaatttgatacttcttcttgttcatcaccagacgatgaagaggatatgcccattgatgtttttcttcataactgtcatatgatttccctttagtgcaaaacatttaatgaaaaattcaaagcttctgctttttaagacactgagctaaggaaatcaaatgaagatttgaaaagatgatccagactctagaagaaagtctgagcttggccattaagactagcgaaactttcactgttgaaaaactaagggaagaagtagcatgtcttactaaagactttgggaagttcttggaaaattcaaagactgtcaccattcttctgaaattccatcaacatcctcatgacaagtctggcctacgctttgaaaatggaacatcatcctc

SEQ ID NO: 162803 - DNA, 419 bp, Glycine max
  unsure (1)..(419): unsure at all n locations
tgtgagagagatcctcagatctttttcttgagattngatatgaaagtcactgcaatagaggaggcccaagacatttgcaacatgagagtagatgaactcattggttcccttcaaacctttgagctaggactctcggataggactgaaaagaagagcaagagcctggcgttcgtgtccaatgatgaaggagaagaagatgagtatgacttggatactgatgaaggtctgactaacgcagttgtgctccttggaaaacagttcaacaaagtgctgaacagaatggacaggaggcagaaaccacatgtncggaacatccctttcgacatcaggaaaggtagtgaataccagaagaagtcagatgaaaagcccagtcacagcaaaggaattcaatgccatgggtgtgaaggctatggacacat

SEQ ID NO: 162804 - DNA, 350 bp, Glycine max
agctttgtttggagcctcaatggttattgatggttaaaccaaggcaacgcgagggagacggagagagagttgtctgaaattcttctctgctcagtgacgagagagagagttgctttttggttttaaaaggctttttcctcttttcttattattttatttaagctatgccacatgtctccatttgagtggagcataaatggcccactttctcttttgattgtgacccatactcacccacaagaagtgagaaaaacctgacctttgaaacactaaaatcctgcctcggtttgcgtgccgcttctctacttctagtttctcgcgttactctgcgtccgtccgggtcagttttc

SEQ ID NO: 162805 - DNA, 304 bp, Glycine max
aaacattgcaacaacttagtagtgttcaaagttcatatgaatggccagtgtcatgcccttgaatttgctaactattaataaatggttaaatgtatttatcgcgctatttgattatatgattgacttgaataacttgacgaatggcgtgaattggtcatgtgtgattttcttgatgtggatgttgagttgtgtggatttttattgacataagttgaaattataagatttcaaaatttacctaaatctattccagtaaaattgcatttctagattcgtaaccattggatcattttcaaatttgact

SEQ ID NO: 162806 - DNA, 359 bp, Glycine max
agcttgaaggagtgtaagcgaccatttttcatagtacaacactggcaatgtgtctactatcattgtcatcattttttcgtcaatgaggagccacttgagctggccagatctccaccttagggcgtatactttgaaagatccgcgccccctttttgcacatgtcttgtaactggatcctatccaaagccattatactgacgcagcctatcaaaggtcaccattatgtccttccaagaatggactcgggaaggtctcaagttagtgttacacgtaacagctaccccagtaagactttctttggacagaatgtataaaaaatccctcatctcttgcgtatgcccccatcttccgaaatacat

SEQ ID NO: 162807 - DNA, 246 bp, Glycine max
ctcttatgcgatacctatgcaaagaccaccaagaagatcccatctagcctttgcttcctcaagatccttccccatgaattacctcaccaattagtccgcatgtccatttacccgcacccgtaaagaattgttccttccagaaataaggaagattgagcctcgaaagagctaaagcagtggaggctcgcattcccgtctcaattacggactatgtctcggcctacatgcatcctcccagtcaagacc

SEQ ID NO: 162808 - DNA, 389 bp, Glycine max
tctggagggtacaaatcactcccagatatatgttttctggggattttttcctcgactcgagacttggggggatgcagtcactgaatccttcaccatttaaagtgagcaagttgatgaacttccaaaactactatggcaagtgatcttattaatagttgagcatgagctgataccattgtaattcattctctatagatacatacgaggatcctactccacacatgttctactttttgtctgtcttcctacattaatttcttttctttttctgttttggccggggttcacgtgacatataactgatattttcaatgtaaaaaaaagagttgataagatttaattatttgtcatatgcagatggcttgaaactataataagttttgaaccat

SEQ ID NO: 162809 - DNA, 414 bp, Glycine max
cctctttatgattcgaccaacctctcgtctcaattttgatccacttaaatgtgttcgctcttttattaccttaacacagataaaaataaaattggttaccacaacattagaccaaaaatccttttatttttcaagatattgtgattataacatctatttatacatcatcctaatcaattcctatacttaagagatgagagtaaagtctagatgattgcatgtgaaaacttgtttcgtaaagaaaaattcatctcgatagttgttattggacaaatatattctgaatctttttatgtggttgaattccccccccctctttctgttttaattatagttcggatttctaaacaatgtatacaaaaccacgtcgatcacatgtggatttgatcttctcaaccaatggttcaatatgcc

SEQ ID NO: 162810 - DNA, 385 bp, Glycine max
catgcaagcttaagaacccaaacttgtagcgtcaatgttttgttatatgctcacggctaaaaaaccaaattttggtcttagaattagaacagcatgaaaattaggacttgcttgtgagagtttttaatcgaatctgggctgccccatgtttgatactttgcatagaggtagcatggaaaacaccttgcaatagtgtgtatatatgggtaaatataaggggcatgatattcctagcaaagtgtgaatgattatcttcctaaatgaatatatgatagcgtggaatttccttttgaatgcaagtgtgtgcaggatataataagctttccatatgcatataaataaatgtgagtgaaacaactaaaatttgtatgatatatatttcacg

SEQ ID NO: 162811 - DNA, 326 bp, Glycine max
gacacacggggaacacaaccttcgctaggatgtaaaaaagtacgcgatagtcactctttcgactcgtgaggaagaatatgtaacaactacttcatgtgcttgccaaacagtctgtctcagcaattatttaaaaaagctgggcatgtcacgagaagagttaaccaacatctttgcggataataagacaatcattgctctagcaaaaaatacagagcttcatgatcgaataaaacatattgatacccattcccactacataaaggagtgcatagcaagaaacgatatacatgtccaatatgctaagtctcaagaccaagtcgctgacc

SEQ ID NO: 162812 - DNA, 395 bp, Glycine max
agcttgttcagcagtattaaaactgtatcagtatacaacctagtatcatatgctcgctaaaactgccagatattgggctacaaggccatagatatcaagagttcttttaagacatgttcacacttgacatacaagataatcatgacaggaacaatacaatcaacatgtaacatcaacaatgtggtataataaacagagcccattgtggtttacaattctttatggttcgcgtttcaccagcatcatagtataaatgagcttaaaattcttccataattaaggttgttacaaattcgacatccaaattgaacacatttcaaggcatgtataggaagttgtggagtaattctcaagatcttggaattagttcctttgatcttgagattaacatactc

SEQ ID NO: 162813 - DNA, 361 bp, Glycine max
actacattaaacaaaatgtagcaagtgaattaaacagttgaggcgatcctacaagctcgggaataaatcttctaaaaatacaaggcttgaaatcagccttgtacgtgccacaaaaggcctataatagttaagccaaggagagaaaaaaagattaaaaaaatgttaataattacctttttttattaaattacggttttaaacaaaaaaataactatatactgttactatatccaatatttaatacaaatattaaatattggatataataatagtatatagtttttttttgttacttgtctacataaccaataacgctgagtggcccgtggccgagaaatacagttttgttgattgatccaaa

SEQ ID NO: 162814 - DNA, 394 bp, Glycine max
agcttctattgacagccactcatgaacatgttctttgctctcctccttcgagaattattgttgcaatggcatgtatgcatggcatccctacatcaaagatgtaaaatcagcacacatgtaagtgaggaatgaaaaaaaactataaaaaacacaacctgttagtagccatactccacaagtgcatgttcattcacctaaattgacctcaaccttattcccccacatgaggacctcatatctcaggcccatgttatcaccacaccgaatgggagtccattgattaccaaaatggaatactttttatagtcttttatactgcactggacataatggtccacgtattccagaaagattaaccttgcgggcagacatggttgtcatgatataacttcta

SEQ ID NO: 162815 - DNA, 312 bp, Glycine max
tttaaactgacgcgcctgactcgatcccatgttgtactatagtgaaacgaaacccagtgcgaatggagactccgacatctatcatgggtggaatggatgaatgcatgaagaaatgcatatgacacataccctgcgtcgagattgtcctcttcttatatacaacattccggcagcatggctcctgatgtatgcatttaagaaggcgacacgaaccctacgtctgatcgtgacaaagtgaggggatgcagactcagcccatgcatgatgccgatgcgaaaaatgctcatcacgatgatgtacatagtatgacca

SEQ ID NO: 162816 - DNA, 403 bp, Glycine max
  unsure (1)..(403): unsure at all n locations
agcttgaaattgaacaacggaagctttcgagaatatgttattntcataacttttctcacggatgtccaattcggggacataactgatgtagacgctcgaaattgaacaacggaagctctcgacaaattcgaatggtcataacttttcaaacggatgtccgattctgggacataacacatcgagacgctcgaaattgaacaacggaagctctagagaaattcgaatggtcataacattttacacaaatatccgatttgggaaaataatatatcgagatgctcaaaaataaacaacggaatctctagagaaattcgaatggccataacttttcacacagatgtccgattcggggacagaatatgttgagacgctcgaaattgaacaacggaagctgtcgagaaat

SEQ ID NO: 162817 - DNA, 340 bp, Glycine max
ggacgtttccattgggaaatacaatgataagggactttgtgatgttgttcctatggacgccagtcacttacttttggggagaccatggccatttgataaaaaagccaatcatgacggttacaccaacaagatctctttcattacttttggtgttgcataaaaaatgtacaatgtacgccggctaggtttttttgtgcgagctcaaccgacattttgtttccgccgaaactggcatgttcccatttattttggccactagaacattaccccacctctgcaaaaaaatatttgctatcccacttcatgcctatttcatctacggaatgaactgaaaactcaa

SEQ ID NO: 162818 - DNA, 393 bp, Glycine max
agcttctaatcgggcggttggagcttgtttctgatatttttcgctctctgattttgtccgcgagttgggacaaatgtaataatctgctgtggattattttattttatttttaaaaaaagatggacaccagccaacatagtttagtgaatgctttttttttttttaattgtttgcatgtacatgtacttaagctgactcgaaatttgctaaattttttataaaatcatcttgatgaatgtttgattgacatggccacgaataaccttattttgtttcctggtttgacatgctgcacggtttgattctacttccgccttggattctgagtgtgatgacgaattttacagtgtctatgatggtatgtcagtgtttcccccatcaccccctaaatac

SEQ ID NO: 162819 - DNA, 409 bp, Glycine max
ctaactgcacttattcttgaaagaatcaaagaaatcaccttttttatgtgttgtattttggtacttaattgacctgcttgtgtgtctggtaatatattaataacttctatctaaacttcttggtgataagtttaatgataagtataattcttggattttgagaaaagtataatttacgctacaatattggttctttatgtcgcatttttcctatttatgtcatttatgtttaaaaaatcattttcatcttttatatttttgaaaaaaattacattttaatcctttgttcattttctgttagtatatcaatgttctaaatttaaaataattaatgtaacacatgacagttaacaatcatatgggattgtatgcgactattctatcatttttatgttatcattataataat

SEQ ID NO: 162820 - DNA, 389 bp, Glycine max
ccgccatctgtacctcgtataattggcacagacctgtgatcaatgctggaaatcccagtgctgttaacgagagtgtacattcatgcccaatgataataaaatattgccaaggacacaacactagagggagagataccaatcattaatctatatttattaacgccgcaattattgtttacaaagatagcctaagacgtggagatcctaatgagtccttgaggaagcccaaacatttagtctttgaattgccccaagtatcatgcataatatcgcttgataacatcagaattcacaagcgaaggcaactcttcatcatccatattcatgagcaacaatgctcttcctgagaaagccttcttcaccataaatgatccttcatagtttggggc

SEQ ID NO: 162821 - DNA, 431 bp, Glycine max
  unsure (1)..(431): unsure at all n locations
tatagaccactcaagcttgaaggtangagacgatgagtggagtgagagggagagatttattactacattttgtgcctcaaaagaggtctgaactttgaagtgtaattctcaaatgatcaaagttgaaaaaattcacacacatggcctctatttatagcctaagtgtcacacaaaattggagggaaatntgaatttctattcaaatttcacttgaatttgaaattgaatttgtggagccaaattttggagccaaaatttcactaattatgattagtgaattttagttatggttcagcccactaatccaagatcaagtccaagattgtccactaagtgtgctttggtgtcatgaggcatgtaaagcatgaaggacatgcacaaagtgtgactatatgatgtggcaatggggtgtagcaagcaaatgcttacct

SEQ ID NO: 162822 - DNA, 386 bp, Glycine max
tagcttagcaaaccatagaagagacaatgttttatgcttgactaaaatgaaatgaaaacccgccagatctacttctccatgcgcaccaacaagaatagtcttacagtaaaatcaacagcctataaagaccctaatttgttgtcacttcccacttctcacgcttattcatatggaaataatggaaaggtcatccaccacagaaaacaatataactactctgcgtgttacatttcatgacagcgacgggatgggggatcaaatctacaaattcttacaacgtaaccacttcttcaccatcacctacgagcctaatctagaccatggccgcgtatttgcctattaagtacatcttattggtaccaaggtgacaagccataatatcaaaa

SEQ ID NO: 162823 - DNA, 347 bp, Glycine max
aacaagccagcatcgaatgccctccagactctgacttttgataaatgcatgggtgctgcgtgcgtgcaactaccatgaatttcacaaaatggtccaatagcatattatttcaaacattcttggagccaacgcacaagttggttacaacttacaacaacattctagttactttgagattatttgagtatattctctaattttgtggctcctatgaagtttcttgtttttttgcctcccaaaattcagaaacgacaccgtcccccgacagagaagccatggtgaaaaatatttcaaggcagtttaacgaacatgtgaagagcttcacactgaagcaagtgagtcactcc

SEQ ID NO: 162824 - DNA, 398 bp, Glycine max
agcttgtaggaatatggggtacccatgttttgtggttctatgtggccgtcaggcaatggcgcaaatcaattctccacatgcacaaatcacacataagacccaccatcccgcagtatgccgaccttcagtgaactcacgtacttccacgtagcccttatcgctcgtcctgtcaacgccgggtccccatcaatccttccacaacatccaagtaattcaacatccaagcatgatgaattaacacagccgacaagacagggcagaggcagaaaactctacccaaaacacagaccaatatcacagcttttcacactcaaataccccgcgtgatattctctgtgtccaatttgataaccgctggatcgactcgaaaattctactggaagtctctagtacataac

SEQ ID NO: 162825 - DNA, 399 bp, Glycine max
ggtgcattgaagaaaataacaaataatcgtcataatttcaaggcctatatggcccaagtccaacaagaagaaaaaacacaaagacaaaggcagcctagacacaagcatcatcgccttgctccgcagcaccctgcccttcattagcaacctcctcctctgcatcaatctcctcctcatcaagtaggacaccatttttcacatccttgaagggatcgaagaaacccaagtcaaggtcctttgcaaagaaaacagcctgcctaacaacattctgaaagtctttctcatgttgctccgcggcctcctccttgtacagaattagctcttcctcgagctccttgttggcttccctctctttggcatcccgcatcttggacttcccgaatctggactccgactccc

SEQ ID NO: 162826 - DNA, 398 bp, Glycine max
agctttcacaatatccaacaattcaattttttttatcatgaaactatcctaaaccaagaaaaatagagtggaggcagaaaactctggacaaaactcattcaaattccatagttcttcctactcatatacctcagtaacattctcttcattctgattttctaaccgttggatcgccatgaaacgtttactggaggttcccaatacagaaatataaattttgaccgttgggatcggctagaaaatatctagaacacgatatatactgcctttcccgtgacctgcactgcaccaccatttttctgcataataggcaaaatttactcagtaacattctctttgttccgattcgttaccgttggatcgccttgaaacatttactggaggttcctagcacataa

SEQ ID NO: 162827 - DNA, 396 bp, Glycine max
tagccctagaggggatggaccttttctattcttgcgacctttttctgccccagaggggagagtatagagtcactcccacctttaacatttcttatttaattccttttgcaggtgaaagtgataatattgaggaggaaccaacaaatttgaggtcaaatcctcttcaacggggagaggatgatgcaatcctccctatgaagggactagttaccaaagccatgagcaagaggctctaagaggattgggttatagctgctgaataaagccctatggttctcatgaacctcacggcagatgtctgagcccttggaccaaaggtgggtccacttatctttgtacatattacattaagaattcattatttttgttccttgtatttagggcttcataatgtac

SEQ ID NO: 162828 - DNA, 398 bp, Glycine max
  unsure (1)..(398): unsure at all n locations
gcgctgcaagctttgnttggagcttcaatggttaatgatggataaagacaggtcccgtgagggagagggagagagagttgtctgaaatttttttctgctgagtgaagacagagagagttgctttttggttttaaaaggcttttccctcttttcttattattctatttaacctatgccacatgtctccatttgagtggagcaaaaagggcccactttctcttttgattgtgacccatactcagccacaaaaagtgagaaaaacctgacctttgaaacactaaaatcctgcctccgtttgcgtgccgcttctctagttctagctcctcgcgtttctctgcgtccgtccgggtcagttctccaaagtaagctttatttatatcaaaacactcacaataaaa

SEQ ID NO: 162829 - DNA, 228 bp, Glycine max
caacatccacacttattggtaaagtatagaaggcagtgtaagcctgaaattgctacttaataatgttaaaagatttatcgcgttatttgattatatgattgacttgaataacttgaagaatggcgtgaatcggccatgtgtgattatctcgatgtggatgttgagttgtgcggatttttattgacataagttgagattataagatttcaaaatttacctaaatctatt

SEQ ID NO: 162830 - DNA, 386 bp, Glycine max
agcttcatcttcacaactttatccttgtctgttttcttatcgccaccatgacacctcaccactgtacctaggtatttttatacaaccttatttttcgcgactctatgttctttatagcttttccagactctgggtttggctcacctagcatggctgagtttttgccaagtgccatggtggcggaatggcatggcatggcggtggagtggcagcatggttgagcttttctccttttactagggaaaagtccttttgattgtcaatgttgcttctcaaaatccttaatatgtgttgtgtttgttacttcttgcttttcccctgattgtgccttctaattaatttaaagctttgatattttcatctttcttattctttttagtaactac

SEQ ID NO: 162831 - DNA, 302 bp, Glycine max
catgttatatttctgcccaaatgaatgtaacaaaaataaattaaaatgaccacggttacgacttctattgttaccatttgaaatggttgtgcatttgtggatcaattgaaaatgatttgctttgaatgggatgcacgacatgttaatagaaagccataacggcgaaacatgtttaacttgacacacacttggagaagaatgctttacgcaaaataaagttaattaaattttaattaatataaaacaacaactaatcaaaattttttgttacccagcctacttgtataaattagtttattcta

SEQ ID NO: 162832 - DNA, 394 bp, Glycine max
agcttataatatatcgataggctgcgaaataaacatctgaaactctcgcgaaattcaaatgggcataaattttcacacggatgtccgattcgggcgcataatatgtcaagaggctcgaaattgaacaacggaagctcttgagaaattcaaatggttataacatttcacacggatgaccgattcaggcaaatcacatatcgagacgatcagaattgaacaacggaagctcttgagaaattcaaatggtcataacatttatctcgaatgtccaatttaggcgcatcacatatagtgatattcgaaattgaacaacagaagctctcgtgaaattcaaatggtcataacttttcacactgatgtccgattcacggttataatatatcgatacgctcga

SEQ ID NO: 162833 - DNA, 397 bp, Glycine max
gcatacgaatggcagtcacagcatgggtttctctctctttctcaccctcttcattagccccagttttctcagacgtcctactaggatgatcaaatttgcctctattcggatccacttcgatatttttgctagtgaagaccaaatctgtaaaacttgaaggtgcgcagcccaccatcttttcatagtagagtaccgataatgtgtctaccatcacgattatcgactccctttccattattgggggtaccacctgtgccgccagatccctccaccttttgggcgggttcttttaaagatccgtccccctttttgcacatgttctgtatttgcatcctatccggaaccatatcgaaattgtactgaaactgcctaacaaacgcaaccattatgtcctttc

SEQ ID NO: 162834 - DNA, 297 bp, Glycine max
cttttttttttgcgaatttccccgaggcatggtaaaacgaattgatctaaaaataattcgggctatcaagccaaactatgcttttcatgcgggaccattcaattttatggaaatcgtaccgtttgaacctttttaggacacactttgtacatcgacaaaaactctgtccctgcctataactctaaccaagaatcccgaatctgcccatcacaatccgaattgaaaatatgccacctcgatctgggacatcaaaggacaaggctgtgtcgaaacacaacatccccaatgttattatga

SEQ ID NO: 162835 - DNA, 391 bp, Glycine max
  unsure (1)..(391): unsure at all n locations
agctntaaaaactttcattctaccctctgatcccttaacatacttaatgctttccctaattttttttacagcaggaccaactactttcaacccctcttgaacactaaggtttaaaatgtgagcacaacatcagatatgaaaaaattcaccaccacttactaaaccattagtatgcaaaagtctttccttcaaatagtcttgcattttatcattggaagaagcatcatctagagttaatgaaaatattttctgctcaatcccccattcttccaaaaaaaccatatataactttagccatctcacgccccgagtgtggaggaggaaaatgagaaaaattaaccattttactattcaacttccaatttgcatcaacataatacgcagttaatga

SEQ ID NO: 162836 - DNA, 412 bp, Glycine max
  unsure (1)..(412): unsure at all n locations
tctttgaatngcatgaaagtcagaggatggagggaggaataactttcaactttcataatagtgaaaatgaatngataatacccatcctttgttgaacttgtaaaataattaacggtttcctacattatcaattataggaaaccaacaagatcttgaaacttatgattctcaccaataataaataaacaaataatgcatacctttctccatacgacggtctctctccggtgtactttaatttccttggaagaggagagaaataagatttcactcccttgactattctttatacctttctacgtttgtgatgactgtagatgagagagagtacttttctatcatgaaggtgaccttatttcatgttagtaagtattaacccccttttataaccactactcccatcaagtagcag

SEQ ID NO: 162837 - DNA, 391 bp, Glycine max
gagatgaggaagtgttgaagggtgaaacttcctgcttttattgttgaccacagagtggtacctggagatatgtcgcgggggtcacgagaccttggggacgtcaggtggggtgctattgcccaaaaccaagcttgaccaatcccgacccaacccgggcatattcggtcagtgagaacctgtgatgtacctaagcaggcgagctcctggcagtcaacagataaaaggaaaacaagaccacaaagcaaggaggcttgtggtggctggccacctgtgaattctgtgtaatatgtggattgtggcctctggtaatcgattactaagggtgggtaatcgattacaacgcttaaaattgaagacaggaggctaagatggtctctggtaatcgattacc

SEQ ID NO: 162838 - DNA, 388 bp, Glycine max
ttgagccttggttccctttccttggtttgaagctcactacaagccttaagtgaaaaaccatgatatcaccatatccttaaggaattttggagctttggaattggtttgggaataaatatggggggtttttgtttcattggacaacttgtttttgtggctatgcttcatgatgtattttgggccatacttgatgtacattgtatattggttaaatgttggacatgctgaatgaaatgttgtttctcaaacgctatagagtaaaaaaaaaaaaatattcgaaaaaaagaaattcgaaaaaagaaaaagaaaagccataagttgagtgaataagatcttaaatggcacaagaatgatgaaactcttcatgtttaaattttatctttacttc

SEQ ID NO: 162839 - DNA, 395 bp, Glycine max
  unsure (1)..(395): unsure at all n locations
agctntaatgtttgaattaaaaatgttcagttactgctggtaatcgattaccaaatatttgtaatcgattacacagtgcaaattttgaattcaaattttaatagctgttgtaaatcagttttggccactggtaatcgattacatcctctggtaatcgattaccagagagtaaatctcttgaaaaagaccttttttaacttaaatgtcttggccaaaccttttgctacttcaattggaattcccttcctatttaatgtaatcttcctaagactctagagactgtcttgatcatccatcttgaatatctttgatttctttgtcttgaataaaactttgagaagcatgtaattctttggcatcatcaaaacatcagcttgatcctttgtctacaatta

SEQ ID NO: 162840 - DNA, 412 bp, Glycine max
  unsure (1)..(412): unsure at all n locations
tctntgagaaaacttccttgagaagcttctctgagaaaactttcttgagaagctagagcatagctacagacacccatctaaaaactaagctcacctccttgaaaagctagagcatagctacacactcccatctaaaaactaagctcaccttcttgacaaaattcatgaaaatacaaaaaaaagtcactactacaaagactacccaaaatgccctcaaatacaaggctaaaaccctatactacaagaatggccaaaatacaaggcccaaaagaaggaaaaacctattctaatatttacatagataagcgggctcatacttatcccatgggcccaaaatctaccctaaggctcatgagaaccctagggccttcccttggatctctggccagaattacttggagtcttctatcca

SEQ ID NO: 162841 - DNA, 397 bp, Glycine max
agcttctctaccaccccatttttctccccctttggcaacatcaaaaagccaaagttcgtgggaatcaatacagataaaataatgaagtggataaagatcaattataagtcataaccaaccaaaatcataaataagtcataaccaaaatataatccaaacattcataattcaaaaccacatagaatctaaacataaaagactcaagtccaaatactaaaagataaataaagtgcaaaaaatgataacttaactaccatagccaaaatacaaggcttaaaagaaaattagaaactaaactctaagaaggtggaggtggtggtggaaggtccaagctctgacgaatataacccacatcttcttcaagctgtgtgagacggatatccatgccggcagagcg

SEQ ID NO: 162842 - DNA, 412 bp, Glycine max
tttctttgagcaaagcaaaggcttgctcttgttttccaccccaggtaaatgccacattcttcttcaccagctcattgagaggtgatgcaattgtagagaaattaggaacgaaccttctatagaagcttgctaacccatggaagctcctaatatctcccacactttttggggtgggccattcttggatggccttgattttctcagggtccacttggaccccatttctaccaactacaaaacctaagaaaactatattatctacacaaaaggtacacttctctatatttgcatagagggtgtttttcctaaggactgaaagaacttgtttgagatgtcctaagtgatcatctacgctcctactatacactaaaatatcatcaaaataaacaactacaaatctacctatgaaatc

SEQ ID NO: 162843 - DNA, 269 bp, Glycine max
cctgctgctgcagctaagccagtcgaggtagatttttttttctgctgcgcccctatcttttaagatgaaaactactctagcagctctgcacagcagatttccagctccacgcatattcgctactttccacacgcttattccgcttcatgccctgtatctgaccaaaataaatgtcctgtcaagaacagcatctcttaacaaaaaaagttgcttactaagccgggttttagaaactcgggttcttaccataaatctcccttgaagagact

SEQ ID NO: 162844 - DNA, 254 bp, Glycine max
ccacgaagaccccggacattatatatactagcctagacatgatcatcactttaacccaaaccattgaaaattatggcttatttctctttccttgctacacctaaatataatcaacagtcttatcctgattatgctgcaaattgtttatttcaccattggctatgccgatatccatcatatattcatttgctcttttgattctgttccgagcttaaatctaatatatctgtaaaataaaggggtctgactaatat

SEQ ID NO: 162845 - DNA, 390 bp, Glycine max
agcttcaaattggacttcaaagacacacttattggttgaaatcaacttaaagtagtggaggaaaatacaaccagtttaatgcgtggtcggcttgacctcggagaattgattttgagtctaaaattactatcagatatatttctaaatattcggatctatgtcggaaaacaattcgaaactaattctacgtccataattgatcttggattgaaacaattatgagtcgtctctgccttacattcaaaattctgtattgaattttatttctaacttgattttataataaaacattcagacataaatcatatcacttcaaaatcaatttcattcaaaatcaattttactaatgtttatccacacacacacttacaattgcgagaaacatgctaa

SEQ ID NO: 162846 - DNA, 333 bp, Glycine max
gagcttaacacattagcttaactaacaatttaaatccactagcttaaactttacaagcttagaacagaaacttagtacccaaattccttgttaaggctgttcacaggagcagtggcagcctttccaccaccatattttgccacaaattcatctttgacacgctctaaaaaagccatgggtaactgtcttccaattgattcatctgcaacaacacaatatgctgcacaattccgaaagttcgatattttagaacactaccaaactcaaaaaaaaattaagggtcacctctacaaaagcagtatcagttgataaaattagaacttaaaagaaaac

SEQ ID NO: 162847 - DNA, 400 bp, Glycine max
agcttctttccttaatatctaatatcagaggttaaaatttagtactctagaggatggccggcgtgcaactctagatcttaacaaagaagaaagatttttcgttgtaagataaaaatttataaaacaggaaatggaaaaaatatgaatgaaaatgatgaaaaatcacaaaaattacgtcagtgttgactatatacatcaagggatgtcttaatctttttttttatcataaaaagttggaataaattagatttcgaaggctcaccaataattgtttataaatatacttacatcataaaagtattcacattaagagaaaaacagatacttttggtgtatgtaaaaagaaaaaaaaaaatatctagattgctcacaggttatctttctctttttgaatagttat

SEQ ID NO: 162848 - DNA, 417 bp, Glycine max
  unsure (1)..(417): unsure at all n locations
tggccagtagcttaagtacaatgtccttttgcttctcacactttactctgatgagaacatcttttcctgagactcttgcttcaactttatgacatttctttataggtttatcatcacacgttttgtttattttgaaacatcctaaggattccgtctttctcttcttgttctcttgttccaaatctttcacatgctgctgaagatatttcacatactctatagcgttgctaaggacagaagccttgtccatctacacattaattaaaaatatcttaattcttattttataagctaataaaggattggtgtgatataaatttctcaagtttggctttgatattacaatatctacaaaaactttattccacccgatgagncatatatatatatatatatatatatatataccaagacatc

SEQ ID NO: 162849 - DNA, 385 bp, Glycine max
agcttgaaggtgtgtaacccaccattttccatatgagaatactggtaatgtgtctactatcattgacatcattttttttgtccttgaggagccatttgagttgccaggttctccacctttgggcgtattcttcgaaagatccgtgcccccctttttgcacatgttctataggtgcatcctatccgaagacattatactggcactgcctaacgaaggcaaccattaggtccttccaagaatggactcgggaaggttccaagttagtgtaccaggtaacagctaccccagtaaatctttcttggaaggaatgtatcagcaattcctcattttttgcgtatgcccccatctttcgacaatacatctttaaatggttcttgtggcaagt

SEQ ID NO: 162850 - DNA, 280 bp, Glycine max
attattagcaccttgatttctagccgtgtatctggctatattattatgacatttgaactatttagtatttcttttatttgcatggtatgattgaacaattatgaattatgttatatgactacgtgggttttatatatttgatctattcatgtttcttgcttcatgattggttatactctttatgaatgcttgttatgataatagtgtatgtatgttttttacttgttacgcactttggatctttgttgatgccaaagggggagagaaatatggattaaat

SEQ ID NO: 162851 - DNA, 381 bp, Glycine max
agcttgtagtcattaaaagagaaagaacatgtgattagaattatgaatgaaaatgctagtcagtttgtcagattgattgtgaagaaatgcattaattgtaacccggtgagagtgtgatccttatttttgagagaaaacggctatcattaagtactgacttttgcatgaatctcttaattatggactgaatgcatgaatttgaggatgatgaaggccatgttttgattgtgatagccacttatccaaaaagctgaccatgtgcatgaatgatttatcccttgcacccagttttgagctgaatgaatgtttgattgattgaaccttgagcctatacagctttatctcctgctactttgtcttaggttgtaggagagcatcatc

SEQ ID NO: 162852 - DNA, 316 bp, Glycine max
tgatttccagattgagtccacaagttccagatcaagtttaatttccagcttcatgagaagattcagaatcaagagaaggttgatttccagattcccgagaagaaaacaagaagacttctccagagaagtattgaaaagatttttcaaaaaaacaaacatagcatagttttgtttttcaaaagagtttttctgaaattttctaagttactagagtttttactctctggtaatcgattactagtttcctgtaatcgattacaagtggcaaagtttgattttcaaaaggtttaactgaattttcaacttttcaattgat

SEQ ID NO: 162853 - DNA, 401 bp, Glycine max
agcttttaccacaacaaaataagacacaaaatcagttggagctggcagagattcaccccagcaaagttgcacttcaccacaatgaatctacaaagctgaagaccttgaaattaagagaaactcgctacaatgagttgtctattcgccccagtggataaagtccaaaggcatgaagatcaagtgcagattccatagttcataagtgtagttttggtgtagcaagcacaaaaaattaatgtaatcttagctctatataaaaagttttgtaacatcctttgtagagacttttggttcatttgtaaactatcaaatagaatctttcttcttctctctctctcttcttttttcctccattgttactcttttaaggttttatttgaatccttcatgatccaaatgag

SEQ ID NO: 162854 - DNA, 424 bp, Glycine max
tcacaagttcagtagctcgcacaagcttatcacctgaaacatccacaagggtgaggcatgactacttttcactttcactattgagactatacaaagtggaaagaaaaacagacgcatatgaactcactgttgcagcatgctgctatgagcctcagtatgcatttatcttgtgctgcttcgaaattgaaagcatcatcatcaagtgaagtagtatccagaccaacagaagccatttcgtccattgttctctgaatctgcatgtaccatgattacaaattcacgtattggacaacagagttaaaaacaacttaaactcaaaggtacaagtgcctacgatgaattgggtcagatgtgaatcaagacttatggcaggctcgctacaagagaataatgatcatttaaattgaacagggtgtgagaaaaa

SEQ ID NO: 162855 - DNA, 350 bp, Glycine max
agcttagctctggatgtttgttagagaaattctttttatagtccgctaacctacctcaaaaaaaagtaaagacatacacatatatatatatatatctgctcgacagttatacgacctgtatactttttgatacggaaatcgacattcgatcaacacaaattacaaagacacagcatgggaactcactctgaatatgtatagtgaaagcgatatatcctccatcaactaacttaattgacacattcatatcatccaaactatgcggactgtggggcaaaatgttccggcaaacacacaacaaatgcacaggttctcggacaggcacaacctgtatagctagcttatagcac

SEQ ID NO: 162856 - DNA, 305 bp, Glycine max
ccgctctgggaaagagcgataccatctgtgttgatcattgtgatttttccgcggctattgtaaaaattgagaaccgttattacaatggtaagaaacgacagatacgtcgtaagcacaacactgttagagaattactctcaataggagctgttagagcggatcatgtacgcactgatgataatttagcagatcctttgaccaaaggattagctagagagaaagtccataacacttctaaaagaatgggactattgcccttactgcgatgatcattcatgatggtaacccgaccaaaatgactggag

SEQ ID NO: 162857 - DNA, 374 bp, Glycine max
  unsure (1)..(374): unsure at all n locations
tagcttattatccaacgaaattcttgcgggtgattctccnttttccttggctcattccctagcggatggtgcctcccctctcctcttctcctttgccttccgctgcatctccatggtgaaaaatcaccattgaaggacctcattggagctcaaagatccagcctccatagaatcttcacaagcaagcttccatcacattggaccattaatgatctttttatttttggaagaggtaataaagttacgtggttattttacgccttctttagaaatctatgtttaaacaataaacgtggaaaagaccattttaaggccctggaccttaaaaatggctcttttggtgatgaataaaactcggcttatgaattgatttt

SEQ ID NO: 162858 - DNA, 369 bp, Glycine max
gcatcaaccgcactaaatgcaattctatgaatttcaaaacaatgaaggattggtgcttaacgcaatctggtgcttgggccaattcatgaaaattcaattccagggaagaaattgagcttaacgcgcttaacgctgctacaataatttttcaacaaagaacgaattgcgcttagcgcatcatctccgctaagcccaaatcagtgaagttcaattctagagaagaacatgggcttaacgcagtgatgtgcgcttagctgaaccatctaaccaattggtgaaaggtcaaagcgcttagcgcaagcaacaacggcttagcgcgtgaagacatggcgcttagtgcaagggttgtgcttagcggatggacaactg

SEQ ID NO: 162859 - DNA, 393 bp, Glycine max
  unsure (1)..(393): unsure at all n locations
tagctttgcggatttggcttcgtggcgatngtttttttgggtncgaaaagaggcaaatgtaatcatcatgcttggacgaatgacaaaactggggcaaatgaacagggtgagaatgaaggagaaacccatgttgcgactgccgttcctacatggaaactcctccaccagcttaacaatattattactcagccaatatcaacccttctcattacccaccacccagttatccataaaggccatccctaaatcaaccataaaaacccacctaccacacttccaatgacgaacaccacctttagcacaaaccaaaacacctaccaagaaatgaatcttgcaaacgaaaaagcctatagaatacaccctaattccggtgtcttatgctgacttgctccc

SEQ ID NO: 162860 - DNA, 320 bp, Glycine max
atataatccatgcggaagccacgcacattttgttgggtagaccatggaaatttgacaagaaagcactcctaatggccccctccatgaaataaccctcacccatggaagcaaaatggttaaacttgtttccaaacaccttgacacatcgtcggggatcaactaaaaataaaacttccataggatgacgaaaagaatacaaaaagaaaaaataccaacctttaatggttaacgaagaatgtaacgagataagtgccttcctccacggttagctcacaaagaaagtcattttgcactaaagacaaatattaaagaaacttttc

SEQ ID NO: 162861 - DNA, 428 bp, Glycine max
tggaagaatgtggacacctctggaatattctggagatgtttggaaccttctatatatttatgaaagagtatggaacggagtagaagagtgtaaagactcctaaaatgtgtggagcattctagagaattaatctccaccctaggatacaagtaatctccaccattcattgtgaaggtggagtagtataaataagggtaggagccttcattcctatccatccaagacaaagagtgaatctacttcttagagtgagaaagagcctctttgagagagaagataaatagcttggaaagtctctatcctcaagcttgagtgagccaccatagagtgagtcacatttgtaaacacatccttgtaactctactatcactttgtatagtggaaaaatctccatattggagaattataatcgtgtgcgtccattacta

SEQ ID NO: 162862 - DNA, 362 bp, Glycine max
ttgagctggccgacatcaaacccaccagactcgctgcttacccacaatgaacatatcaatctgaggaccttgaaattaaaagaagctcgctacagagaggcgcatattagccccagcggatcaccgtccaaaggcatgaacactaagtgcagatcccactagatataaccgacatcttgatgcagcacgcacatcacataaatgcagtcttaactttatataaaaagttttgcgccaacctatgttgagactttcggcacattcgtaaactatcagatagcaactgtctgcatctctcactctcatcttcttgacaccattgacgctccaatgagagctctatttgacaccctcatgaccca

SEQ ID NO: 162863 - DNA, 378 bp, Glycine max
  unsure (1)..(378): unsure at all n locations
tgcttcatatggtgcacaatcttttcggtatacttagtgggattctccaccatcttttgttgatcaggagctccttacgtattgggtataggcagaggcttcctttntatagatttccttagtctcctcttttgggtaccggttggcacccccccccccccctatagtattgttctctctcagttcgcttatatcaatatatttcatggtggtttttttggagctttaggggttggggtggcaacatggttggggatgccaacctcttctgctccttatcctctgccctttcttttgccaaaaaaaagaaagtgtacggactacggaagaaggttntaattgctgtttagttgattactgtgcaatggatgcacttac

SEQ ID NO: 162864 - DNA, 396 bp, Glycine max
  unsure (1)..(396): unsure at all n locations
ctatagaattctctctttagttnttttatgtgtggcggtgttgggaaaggctgtataatgaaaatgacaaaaatgaataacttaattgtaaattaaggactaaaatgactggaacttatgatctcagtgattgaaatggggggcttgctctattgtatttactattttttttataaaaaaaaaccgtttaggattactttttatgccctttcagttaaagattttacgctgttaactagttagaaatcactgacttttagagtagttattgcaacaatcaataatcttattgtacgtgatagtctatgattggatgacggtgtaaaaatcatttacactgtaagtgtatttaaattaaatccaagtgtgtgattgttggtgttgagttaaagttac

SEQ ID NO: 162865 - DNA, 386 bp, Glycine max
agcttctgttttccatttcgagcgtctctatatattccaggactcaatccggcatccgagtaaaaagttattgtcctttgaatttgctaggagcttctgttttcaatttcgagcgtatcgatatattacgggactcaatcggacatccgagtaaaaaattattgtcgcttgaatttgatatgggcttccgttttcaatttcgagcgtgtcgatatattacaagacataatcggagtaccgagtaagaagttattgttgtttgcattaggtacgagcttccgttttcaattttgagtatctcgatatattacgggaatcaatcagacattcgagaaagaagtattgttgtttgcattttgttcgagcttccgttttcaatttcgagc

SEQ ID NO: 162866 - DNA, 377 bp, Glycine max
ctaaccaaggggagatggaccattttaagtgcttgaaaattcattgacaatgcataccaagttgagctgccccgtgagtataatgttagttccaccttcaatgtctctgatttatctctttttgatacagatggagaattcgatttgaggacaaatccttctcaagagggagagaatgatgaggacatgaccaagagcaacggccaggatccacttgaatgacttggacgacctatgacaacggctatagcaaggaaacgccaggaagctcttcaacaagcgctgtccatactatttgaatacaagcccaactttcaacgagaaaagtccaacgctgtgactcgtattatggcccaaatggacgacttaatgacacc

SEQ ID NO: 162867 - DNA, 364 bp, Glycine max
agctagagctcgctgtggctgccccatttatctcttctgaactcgtccctgctacattcctccttttgggccctttatgtttcccactctaatgcttcaaccgtagtcatgtcgacatctctcagctcatcacactttttcctgaccctagagactgtcatctttagcttctccttgaccactttcattatttcgagttcctctttcaaagcttgcacttcttcgctttcctcagggactttagcttctttcccacttaggccttttagctttaggagccaagttatcccttgcgtccaagacttcaaccacttgtgaaagccgtcgatgacgccattgctacttcccttaagctccttatctt

SEQ ID NO: 162868 - DNA, 413 bp, Glycine max
  unsure (1)..(413): unsure at all n locations
cctataaaactaagcttacaagcaagcttccatcacttttgacgacggnaagtgttatttcttaacattggcccganaccttgcacataagtaagcacttagcatgacatatggtctatttttaattaagtaaaggagtgatccaatcatacctctatatcttaactcatccactgatttacctttctcatctaagtcaaggtaggttaaagttgccattggagtaaatgcttctttgcatttttccatgccaaatttcttaattagttttgtacaatatttcgtttgatttacgaaggttccatgtttcatttgcttgacttggagtccaagaaagaagttcaactctcccgtcatagacatctcaaattccttctgcatacaactagaaatttccttacacaaaatttcat

SEQ ID NO: 162869 - DNA, 314 bp, Glycine max
taaatcttaaagctaaacaaattccatacataatattgcacaggttaaacaattagcacattaaagcgtgataggacataacaacggacaacatcctgccgtctctaaccaagacatgatgtactaataaattataagacattcatccaaatccaaatagacacacacgccatcataataatcatgaaaaagactaaataaccaacgtcatttacaagtaaatgatttaaaaaacagtcacagaccaagacttccgcaattgcagcagtatcgccatatgtttacaaaatttcccacaacattaaagattgtga

SEQ ID NO: 162870 - DNA, 402 bp, Glycine max
cttatttagaaaaataaaactactttatctgaattattgttctttttaaaaatttcaaaaacttgatttattatgaaaaaaaggcatgactggtttttttattttcaatataaaggtgaatgtatacattatgcgtgtttacttacacgtttaagacgtcttttttatagatattttcacatcaaaatataaaaaagacaacatcttgacgtggatcaaaatgccattatacgctaaatcaaacatccctattgcttgtagtttcgctttttaatataataatgtgatcacaatattttaccgattccccaatcactctaaattaattaaaagtacactaaatgaagaggaaaaaaagccaaagaataaagttgtatgggcatgaacttggtgccgagctcg

SEQ ID NO: 162871 - DNA, 389 bp, Glycine max
agcttatgatatgaaacagaaacacccacgtatccctgtaacaattttgtaataggtcgcaaatacacatcaaggagggcctcatgtcactatctattttcttttactagtgatatgtaagtgtaattcgtcaccaactaattaacttaaatcattttcttgtgggtaacaaccaacaactgaataacacaacaccccacatcacaaaacgcaccaagatattttttttttttttgtgtgtgtgcgccatgctgggcttacattacagtgcctgtaacgagaaaattctttgaaattctgtgctcattaccgcagattcctcgttctccaagagtaacagcccgcaatgacaaatactaatattaacggctaagccaactcacaggaat

SEQ ID NO: 162872 - DNA, 341 bp, Glycine max
atatggacaaaagaatttcaagggaaatccttgccctcgagcttactatccgtgcacaattgcaccatcatgcccagttagaaaacaggtatctagctatatgactatatatacattaattacatacatcgacgagtcacaatttaataacgcaaaggaaaattattgttgacacgcatttgggggggttgtactttatacactccattgagtaaaacagtcaagatagagataatttttttataaatatatatttgctttctcttcgacttgttttactctttcttaatctatatcttcttcttttttcattatatcgcttatgaaaaaattgtaatttt

SEQ ID NO: 162873 - DNA, 388 bp, Glycine max
agcttcctcggggccattttctgcgaaggcaaacatttggaaagctagttttaccaagaaatgctactcttaaaacaaaaatggcatacaacctcctccaataaacacaaacatcaatgtaaatttagagcaaactcatgcacatacttccttatgaacattcactcgcacaagatattcttctacccaaaaaaatgcacccatgcgcaatcaaggaaccttcgttacctagattatttatatgtacttccaaggtgtatttgctacctacatcacatgcatttccttggctaaatttacatacatgcatactcaaagcatcttggctaccaaaaattgcacacgtgcacattctagtatttctaatacctatgcatatacaaacttt

SEQ ID NO: 162874 - DNA, 321 bp, Glycine max
atgatgaaaacacccatggtagtagctggtcttctaagtccagcaaccttctcaaaaggaagaaagataacaaagacatctacgaaagggatattatttcttcttatttttgcaaaacgctttcaaacattcatagtttgttacaaaatgaacaaaactcaacggctacaacagaaagcctaactgctagttagttactctaacatattagcttctaacagttgtattcttctccaaactgcttgcctattttgtgtacatgcatggcttaactatcaagtacgtagtccttcacgtgcaaaggagtattactttgccttt

SEQ ID NO: 162875 - DNA, 396 bp, Glycine max
agcttgcctgtccgatgcagcagtaatgatggccctagttatgttggggaacggttacgaacccggaatgggtttaggcaaagacaacggcggcataactagcctgataaatgccaaaggaaatcgtgggaaatatggtttaggctataaacccactcaggcggatataaagagaagcatcgcgggaagaaagagcggtggtcaaagctcgcggttgagacaagaaagtgaaggaagcccgccctgccacataagtagaagctttataagcgcgggtttgggagacgaaggtcaagtggtcgcgatatacgaagatgatgttctaagtacattggatttggtacgaccatgccctcctgatttccagctgggaaattggcgagtggaggaacgccc

SEQ ID NO: 162876 - DNA, 409 bp, Glycine max
  unsure (1)..(409): unsure at all n locations
acggctctgatcacattcattccccacatagagaaaggccacggttttgatcacttttggcattcncctacatggatgcaacagtcgctttgcatggtgagccagtaatagcctgcccttagaatctttctggccatggcatgcccattagcatgcatcccgaaggaccctttatgcacctccacgagcattcgctcgggttccttagcgtccacacatcggagtaaaaccatagcatgatttcaactgtacatgatatgatgcaatcctaccccgcaagggcattggatagaagactccaagtagattgggccagagatgcaagagaaggccctagggttctcatgaaccttaagatagatatccggcccacttatctttgtgcatattagaataatgtgtcattatt

SEQ ID NO: 162877 - DNA, 394 bp, Glycine max
agcttcttaacttttttcattttatttccaaatttcaaactttgggcttgttaacttagtagtgttaggttgaatttctgttcatacatagttttgttaggttagttgttcattacactacaattaggtttttattgtggatacaatgtgcttgttttgattagggttagacggcctaataggggcctaagtggaggggtgagaagcccctgctttttctggaaatcgcgatgagtgcgctaagcgccttgctgcgctaagcgagttcatcatttctattgaaaatcttgatttccagatgaactcgttaagcacggccctatcccgctaagcgcgttcatcttctctgattgaaagttcaattgcttatggcctcgctaagcgcgactgtgcg

SEQ ID NO: 162878 - DNA, 388 bp, Glycine max
aaaagcatcatatgctgaatgtgaatgctatggttttaatgacgggatacattaccagtcttggatggaagtttatcactatctaatgacaattcgccactgaaaatgtaataaaataatatgttgcatatcatagtctgtcttaaaatataaaaccacagtggtgaataagcaaactccctttgataccttgactagaaaaaccaattattttgactaaaaattgccaatccacgtaagcaaatctggtcatttgtatgcaatcttactgtaaaactgaagacaatgtttctcacacaaaatattttaacacacaactagtggtatttggtctagtggtatgattttcgttctgggcgcccagctcgattctcggaatgctcccatg

SEQ ID NO: 162879 - DNA, 399 bp, Glycine max
  unsure (1)..(399): unsure at all n locations
agcttcttgctgcgctcgtcgttcacgacatttttattcgtagggtttcttcgaaaacctgcagcacgggcttccggagctcttcgctgctgaaccgcgagcgcaggaaccgcagctccgtgagcaggtgctcgatctccacgtcgcgaaccgccctgatcgcgccaatntgtcgctccatcgctgcaccgaagttcaaccgaactcaaaacgggagtcagagagtggtttggtggttgggagtgataagaaggggtcatgatttttaatccccgctaacataacatactaattgctaacattagccggtaaaaataaattgaactaaaagcacgttcataaaaagggaaaaacgaaaagattgatgtgtagatgtgaaccttggatttcgaggtcgat

SEQ ID NO: 162880 - DNA, 422 bp, Glycine max
  unsure (1)..(422): unsure at all n locations
atcgctggtgttcgcagctcgaacatacattcttgtataaattacttggaattggtcactatgaattttgaactgaaatttttactgaattttttagacatctggcccaaataataataaaaaaagaagaaagctatttggattaaaggaaaaaataataaaaattacacaagttggcagaaaaatcaatatccaggaaaaaaatgtgaaagggaagtgtgtttgttgttttggcttgaaatttgttctataattggtgcctattttataccaatcttagttctgaaatttgaattgaaaattaatgtgaaaacaagttccaaaactagagatttcttgagtcttttttatagtttttttttactctagagccattctaagtttctctttgagtcctagctcgattntatgtgcttttcatt

SEQ ID NO: 162881 - DNA, 404 bp, Glycine max
  unsure (1)..(404): unsure at all n locations
accttaaaactaagcttaactgaccttaacgagaggacgttggactgttttttgcttaacaactgcccaatctgcacttttcttcagactttttcttcatattttgctttaattctcttcccaaacacttggaattntcttcttttaaatcctgctgataacaaataaatttgatattaaattcatcattatctcattaaaaacaaacaataacattctttttgattattcttaatcaaaattgactatcaattaaactcaaatttcccaattatcatgaaaatagtaggaccaaccaacccatcaatccttttttattaaaaaaaattaatatttatttcgatatttattaatctttaattagtttattcttttgtctaaaataaactattagtacactcaat

SEQ ID NO: 162882 - DNA, 390 bp, Glycine max
agcttttacacacatggagggtcagaaagagtttgttcaaattgacactaatgatttgtttccttatcttctagttaatattggatctggcgctagtatgatcaaggcatatttgtttagcttcctctttttatctaacttgctgatatctttggtttatgttttataaagacaaactgtccgcaatccattattttaatctgggttaacacacgttgatggggatggaaaatatgagagggtcaatgggactaatgttggtggtggtacttattggggattgggaaggctgttaacaaaatgtgagaggcaagttttctgataattctccatttttttcctctttatctactcgctatatttaaactattcgcaaagggtttcttaaaa

SEQ ID NO: 162883 - DNA, 419 bp, Glycine max
  unsure (1)..(419): unsure at all n locations
ctatagaccactcaagcttgaagcagagagatttcatgtgaatcctgcggctcctttctatatttntgttatcaagnacnggngaaccactactactagtgtttggttttttcatcttttcaatttcacaaaggcaagtatatgctataaagtgcttgagccactatggtttggttgagggtggtgatatatatggagtgagatgaagatgattgaaaaactaagagagacacgtttatatatagacaagggaacgggccacggtgtactgtgtatgagagtgtgagcaatacaaatcattgatagtgtcgctgaaaaacgttgagtcgcactgtgcgccccacactataaaatgacaataaagcccatgataattattgatggctacacggaaactggacctcaaagtccgacaaata

SEQ ID NO: 162884 - DNA, 407 bp, Glycine max
ctgagaaacatgtgatcctttggcatcatgcaaacattcttcttgatcctttgtctacaatctcccccttcttggtgatgacaatccctgaaatccagacaagctatatacaagatgatagcacgttcacacagcccttactccccctatcttttggcatgtatgcctaactttaatgattttaattgatttctaacccaagttctaggttctctccccctttggcagcatcaaaaaagaattaagcaaaacaatcaatatctaaacagagcctaacatacaaccaaaataaatccatacattgtcataaccaaccaaaggaaagtcgagaaatataatagaagtgcaagattacgataactagagcaacaaagaaccaaatacacggcgataaaacatagtactaa

SEQ ID NO: 162885 - DNA, 405 bp, Glycine max
tcatcagatgctgtatttccgtatcagctcctcctattgaataacgatatgcacttcttgcattgtaaatttgctttatcgtggtgtaactgtcgacattgtgctccttcaacgttagcaagatgtttttcggtttcaccatcgactttgtcatatcaacaactaatttcttttcttccttagtcaatcgcccggcgtatggatgtccaactaaggacttcgcccattcatgattatgaatcccacagatcaacttcaccatacaaccttcccctccacgcactggtttcccacgaagcctgaagggacaaccacatttcctactcccggtgtcttttctaacgaattctttatttctacacttgtacgtaccacctctttcacacccaattaacacaaatgaac

SEQ ID NO: 162886 - DNA, 325 bp, Glycine max
  unsure (1)..(325): unsure at all n locations
agctttcacactatccagcaaatcaattttgtttatattgaaaccatcctaagacaagacggatgcagcgtgtgcacataactctggaacaaacatcattcaagtccatatgtgttcctactcatatgccctcggaacaattctgttcagttatgaattactaaacgnaggatcgccatgaaacctgcactggagcgtcccaggacgaaaatataaattgtgaccgatgggatcggctagaaaatatctagaacacggcttatactgccttgtccgtgaacttgcctgcaccatcattgttttgcataaaggcaaaaactactct

SEQ ID NO: 162887 - DNA, 338 bp, Glycine max
  unsure (1)..(338): unsure at all n locations
tggccatagacgggagggacatgttcttgtgctgggaacttcttacgcccaagaaaagagagtatagtgacactaccgctttaaacatangacatttaattacttgtgcatgagaacatgattattatgttgaggaacaaactaatgagagggccaatcctcttttagggggagaggacgaagcaatcccacgtaggagaggactatttacctactccatgaccttgatgctgtaagaagactggtcatagccgctgtataaagacctatggtactattaacctcatggccaatgtatgagcccttggaccaaagatgcgtccacttatgctttgaca

SEQ ID NO: 162888 - DNA, 387 bp, Glycine max
agcttccttggggccatttcctaaaaagacaaacattttgggaagttagtgatgcaatcctactccgcaagggcattggatataaaaactctcaagtatattgggccagagatgcaagagaaggccctagggttcttatgagccttaaggtagatttcgggcccatgggctaagtacgagcccgcttatctttgtaaatattacattaaagtttcattatttttgggccttggatttagggctccataatgtaggtagggtaccctagaaatataggatttttcaccccttgtattttatggcacctacactagttcttgtattaagggtagttttgtaatttcacatgcactttgtgcatgtccttcatgctttccatgcctcaag

SEQ ID NO: 162889 - DNA, 305 bp, Glycine max
atcatcctactatgacgactgagaaaactggggcaaatgaagacggtgaaaaagaaggagaaacccatgctgtgactgccattcctatacgaccaagttttccaccaacccaacaatgtcattacttaaccaataacaaacctccttcttacccaccacccagttatccacaaaggccatccctaaatcaaccacaaagcctgtctaccacacttccaatggcgaagaccacctttagcacaaaccaaaaacacccaccaagaaatgaattttgcagcgagaaagcctgtagaattcaccccaat

SEQ ID NO: 162890 - DNA, 385 bp, Glycine max
agcttagaacaataaactaggccttctcttaattgtcttcgggcttggtgaccacaatcaacaaagtactttcgacacctactatatgttgacttgaccaatgctgttattggaatgtcgcgacaatctttcaacaccttattcacacattctgataggttggctgtcatgagaccatatcgtcgcctaaatgtatcgtgagccatgctccattttttctttgaaatgccatcaatccattttgctatggctggactaaattgacgaaattttactaagttgtgatcacacacatgcttgcaaggagagtacgctgcatcaaatttgtcatcatcacaagttatacctacacatgaaactcaaattaaattaatggataaaaaaa

SEQ ID NO: 162891 - DNA, 253 bp, Glycine max
aaaccgatgtaaccaaagatggaacgttacatcgattttattcaacacactgatgctaactgagcatacgttaacatccggtttctttaaaaccgatgttcacacatacacattatttacaattatgccaccgaatttactgtagcatcaattttgtcaaaaaccgatgttaaatctactttttctagtagcgcatgatgatagaagttaccttgcatctcttcactatcattccttctatttgctaatctca

SEQ ID NO: 162892 - DNA, 395 bp, Glycine max
  unsure (1)..(395): unsure at all n locations
agctntgatttcctttgctccggaaacctttcttttttcatgtgcacccaaacccaatctccgggttcgaagacaaccttctttctccctttgttggcttgtttaacatagcttttatttttcctctcaatttgatctttgactctctcatgaagcttcttcacatagcctgcctttgcttgaccttctttatgcttaaaaacagaaacattaggcataggcaaaagatcaagaggagttagtgggttaaaaccataaacaacttcaaaaggagaacaattagtggtgctatgaacagctctattgtaagcaaattcaacatggggtaaacaagcttcccaagtttataagttcttcctcaaaactgtcctaagcaaagtttccaaagtcctatt

SEQ ID NO: 162893 - DNA, 378 bp, Glycine max
agctatccaaaaactcacatggtcataacttatcacacgttttttcgactgtttcgcacaagacatcgagacgctcgaaattaaacaacgaatactctccggaaatctaaatggtcgcagcttgtcacacagcacttcgattaacgcgcataatatatcgagacgcttcaaattgaacatcggaagctctcgagaaattcaaatggtcgtcacttttccaacggaagtccgatctacgcgcataatatatcgagaacgtcgaaattgaaccacgaatgctctccagacattcacatggtcataaattgtaacacagaagcccgatacaagtgcataatacatcgagacgctctaaattgaaccacccatgctctcgag

SEQ ID NO: 162894 - DNA, 277 bp, Glycine max
agcttcttgcgtagccgctcttggtgctcagaatattccaaaaacaaatccctcttattactagctattttgaattctttagttcctgaatgtacaaccttcaaattgttactcgttcccctctttgagaatgaggagtatcttcataagacttcatccagctgatttttgtcgccagtttcatcatccaccacccttttcttctctaccttctcacgtttgttgttggccacccacatatccccctcttaccttcccgcttgctttctctcttccc

SEQ ID NO: 162895 - DNA, 385 bp, Glycine max
agctttaataaaaaattattaatgctaattctgctccatattgtgttcctactcttttctgcaaatacctctctcacctcatctctgtaagctagttcacttacaaccacaccacattaggattcataatttttttattaaagtttttgaatgattaataatttttatttaattttataattaattcaataattctattaatcataattattagttaataattcattaggagaccaaaattgtcaatttataaaattaggagatcaaattcacaattcaaaattacatggaccaaaatcatggatttaaaaaagtaagggattgaaatacaatttaacctattatatcatacaaaaaaatattgaaaatctaacatgtctttatg

SEQ ID NO: 162896 - DNA, 348 bp, Glycine max
ttgcattgccgcgctgcgccaatgtgccatgtgttatgttcttaatgcgtcgggttcatagtctgatagtgccgaatggcctccattttaacatttgtttgctatttcttgattatgtaggaaatttgcgatgctttaccttgcttctacatatcttaatgttgtagtgcactctgtaaaatttccgtgctttttgctgtgtaagcattggtttctaattctcttatcatgtttgttttactttcaggccaaagcccaatctcatcaaaaagctcatgagaaggctcatcattgaaagcaatgagagatcccccggttattatctgtcattgatggagtaaatactga

SEQ ID NO: 162897 - DNA, 370 bp, Glycine max
tgcctttagtggctcaagatttgtatcttccttaaacattacaatatcaactgtgggtgaattcaaatctccaccatttagagcatgtacctcaattccagtatcaactatatttctgccatctatacctccattatgcaatttttcttcactgtccaacatgttatcaattgtagttgtttcttcatcctccttatcatgttcaccagaaggtaaccgaagatctatatccatgatgaaaacagctttctgcttgatggtttaaagggtactgaattatatagaaaagacatgtcaagccatcaagtaaactagtccctcctcaataacatatacagcgcctccctatgtgattttgtattttctacga

SEQ ID NO: 162898 - DNA, 361 bp, Glycine max
cctgctacaatccctgcccattagtaatggacacactaacatatatttctctaacattgatgataattattgttgatatgattataatcttttcatggctgactttctattgacatgttaatgtcttaattgatgaaacaaacaggaaagccctgaagttcccaaaaggtctatggctatgccattgcctgttttatgtgtggaagatggtgtgacaattttacgtttctctgaaatctttggcattcatgaacctctcagaaagggagaaaagagagagcatccacattctattcctagaggtacttggagattggaaatgtttacctgaattttgtctccatgtgttacggtctattat

SEQ ID NO: 162899 - DNA, 389 bp, Glycine max
gtggcttgtataaacaactttgttcttcatcatttccaatttatacatttcattataaatttcagagattgatgcaaaaattattactctatgctagtcgttcactcacaatttaagatcacactctcaccaggttatgatcaagcttttctttcacaatcaacctgtctactgagtaatatttctaactgtgagcctactttcttgttctttctcatctaacatacacacttgctcaactcatgataaaacacaatattcatttcaatcatgcattcaatccataatcaccatttcaaaatcatatcaacaatacgttttcaaagagtcaagttaaattgttctttatgcatcaggactttcaaaatgttttcaaaacaaaaagtatg

SEQ ID NO: 162900 - DNA, 410 bp, Glycine max
tgcgaacgcaaacatgtggaaagtttattttaccagcgggtttctactcttaaagcaaaaatggcatataacctcctcccataaatacaaacatcaatgtaaatttagagcaagcttatgcgcatattatcttacgaacgttctcttgcacaagacattctattaactaagaaaaatgcacccatatacaatcaaggcaggttcgttacctatattatttacacgtacttccaacgtgtatttggtacttacatcacacacatatccttggctaaatttacatacatgcatactcaaagcattttgaggtaccaaaaattgcacatgtgcacatcttggtatttctaatacctatacatacacaaacttcatgatgaatcttgactatctacacaataaggtgctacatt

SEQ ID NO: 162901 - DNA, 415 bp, Glycine max
ctatacagtcgactgcacgcatgccaacttgtgcatccaataccctgcagacgatgtttcatatgctcctaaaactggactgactcatttgattccaaagtttcatggccttgcaggtgaagacccgcacaaacatttgaaagaattccacattgtctgttccaccatgaaacccccacatgtccaacaggatcacatatctttaaacgctcttcctcattcattacagggagtggcaaaagactggctgaattacctcgctccaaggtccatcacgagctgggatgaccttaagagagtattcttagaaaaatctttctctgcttccaggaccacagccatcacgaaggatatctcacgtattagacatctcactggacacagccttgttgattactgggagagattaagaaac

SEQ ID NO: 162902 - DNA, 339 bp, Glycine max
acatcacaggttttcactgactgactatgctccggttgggtccggatcggccaaacttggtttttgggcaatagcaccccacctgacgtcctcaaggcccctgacccccgcgacatatctccaggtaccactctgtggtcaacgaataaaagcaagaagtctcacccttctacacttcctcatttcaagcttgtaggattatggggtatccatcgcatgtggtactaagtggcggtcgggcgatggtgcaagacaattctccatatccacaaatcatgtataaacccaccatcccctattgccacctccaactgagctcatgtacttccacgtagccct

SEQ ID NO: 162903 - DNA, 395 bp, Glycine max
agctttgatgcaacatctggagaggttaatgatacaacgagatgatgtgctccgtgagaggttggatccaatggagaatagagatcataatgaaaaagaaaggaggagaagagggaatgatgatgttcctagacaaaaccgaattgatggtattaaactcaacattcctccctttaaaggaaagaatgatacggaggcctacttggagtgggagatgaaaatagagcatgttttctcatgcaacaactatgaggaggaccaaaaggtgaagcttgccgccacagagttttccgactatgctcttgtgtggtggaacaagctaccaaaggagagagcaagaaatgaagagcctatgacatgggcggagatgaaaaggatcatgagggagtggtatg

SEQ ID NO: 162904 - DNA, 395 bp, Glycine max
tcttgtagatttggtagcctcgttccaagtcatgtggtgtttgcacaccacgtggtgaagggtgtgcacgactcaatcctcgtgccatcgtcagagaagttaaaggaggcgcagaacaccatccacctcgccatggggattgtgtggtggtgacgattgcgacggacatgtaagacttcgacgttgtgaagcgcacaatggacgatgtacgccccattgatgtgctgcttctgaatcacaatgtgtttgtgttgcttcttccttaagtcaatatcatggaaacattggatcttatcaaggccgcacggcggtttctgggttatgggttggagttcttagttcttgtgtgttctggtttaaagaacatgaagaaacggattacggatctgggttct

SEQ ID NO: 162905 - DNA, 391 bp, Glycine max
agctttccctttttcatggcgaggcacatacataggtttggagactataggaaaattgctggtaccttcgggagggggggcttcgatgtggcgtggactttctttggtggaggatgtggaaggcctttcttacatttagcaatagaatgtccaatgttttggcagaaatagcaaaactaaggaagcttttcatactctatttgaaaaagaaggcgaagccctctctttccacgagaacctgattgtgaaggtttttggacaaatttagatcaataattattctggcaaaatatccaaaggaacgcttctaagtatcattatcaaaggctatcggaacccctagcgctcctctaatctggaagagcgtttttgggtctccaatattcatgag

SEQ ID NO: 162906 - DNA, 404 bp, Glycine max
  unsure (1)..(404): unsure at all n locations
tcacgtattggagaaccaactgtctgtgtcctgcgttgatttgttataagacgtggaggagcaacttccgtcgaatgtggtggagaagatggaatttcattgacattttggtttggggtacctaaaggacaagaagagagaattggaagtacatcctggatggaagaagaattgtccatagatggtgagaagaagggtgtgtcttcaaagaaggttacatctgcagacatatagtattgcctagtagatggagaatagcatttgtaacctttttgaagacgagaataacctaaaaagacacacttgattgctcgggcagagagtttgtctaaaccgggagagagatcttggacaaaacaagtacagcccaacactttatgtggaacatggaatanatgatcatg

SEQ ID NO: 162907 - DNA, 385 bp, Glycine max
  unsure (1)..(385): unsure at all n locations
agcttgcttgtggcgcttctatggaggttgtgatctttgagctntcatgaggtcctttaatggtgattttccaccatggagatgcagcggaagacaaaggagaagaggtgagaagaggtgccatccactagggaataagccatggaagaaagagctttaccaccatgatgaaccttggataaaaagcttggaaaggatgcttcaatggaggaaaacatagagggagagaaagagaaaggggggtgcacgaaattgaaggaagaaaaagggagagaagttgaacattgagttgtgtctcacaagactctcattcataaaagttacaacaagtgttacacatgcttctatttatagactaggtagccttccttgagaagctttcttg

SEQ ID NO: 162908 - DNA, 405 bp, Glycine max
ccttgaatgaagttgaaaacctccttcttcctttcctatagcttattatgcctagcaccaccaccaccaccacaaagggagagctctaaaatcttctattctctagctttctttctaatctctctaacttctcactacgaaggtgtgatgatctaacgattgatcgatgatatttatacgttaggttgagaggcaacgtaataaatacgattaatagtggataagaagccacaagtcctatggttactaaacctttaagtccattaatcccacctcttgattttataacttcttattgttattaattttaataattctgtccaccttttattttattaaaatacgaattttaatactaattattcccaccacaaaaaaaaaatgaaagacttcctgcatactctc

SEQ ID NO: 162909 - DNA, 373 bp, Glycine max
  unsure (1)..(373): unsure at all n locations
ataataaagcataacaaagatccgcctgggtggattctaaagtgaatggacaaagaagacttgcccataagaaaatactaataaaaatgtacaagataattggatggactatggatcaataaaatacatgatctaacatttggtagatataagcatcatcttagcaattaaaattgaatattaaattgcaattattattattttgacaagaaaaagaaacagactgtnttcttttggaagacaaagtgtaatatagctgacaacggcattattagaaaagtaaaacttaatacttagcaggcaatttcttgctacaaagttctactgctagtgtttgatggaaaaacatgtgaatctaatcaaaggatcaatg

SEQ ID NO: 162910 - DNA, 340 bp, Glycine max
taattgcatcccccttttctcaataattgcattaaagaaatggtcttatatcatcatcatgctttgattcttctttcgtctcatcaacaatgccagatagtgaaaagtgtagctcctaatgagacgccacttgttctctcttccatccttaaagaaatggtcttatacgtttttccatttatatacaactattaactattaacgatgtgttgcagaaatatttttaaatttaataattacacacttaacataattataaattatcatttaaagaatttattatataagttaacccattttatgggttgtaattggatcagagtgtaaatatttttttaat

SEQ ID NO: 162911 - DNA, 300 bp, Glycine max
agcttgcccctccggttagattagctgctttcactctgccatcctaatgatatcaccaagggcagtgcatcatgtgatccctagcttgcttgtcaccacttaccaatgacgcaagtatgtttcatccacttaacgatacaaacggatcacatcagacccatcgtactacaataatcgggccgtacaaaatggaaaatgaacacagaatcgctggttcacattatgtgcataggaacattatcttatgtgcgtacatttctatcgatatcactagatgacgaaatggataaattatctacc

SEQ ID NO: 162912 - DNA, 398 bp, Glycine max
agcttagggatgagagcaataaaagaagaattactgtccttatggaatgtagcattcacatagaattctgcaataaaccttaaaaaatcaggttttagctccttccaaaagtgtttaataaatctaaaattaaacccatctggacccgggcttttgtcgcttccacagttccacacagcacaccttatctctttttcattaaaaggctgaaccatcatctccctctgggtaggagacaaagcattaaaatagactccatccaggttgggtctattcagatgaggttcattgaatctactctgaaaatgctgcaaaatctcagccttaatcaagtcaggattttctacccaagtatcatccatcatcatccacctcaaagtgtttctccttctgctgta

SEQ ID NO: 162913 - DNA, 390 bp, Glycine max
caccactacactaactcatagtcaaactcttttagaaacacagatcaaagtcaatcccactcaaattttaatggaactccatcatggcttaactaaagagtatatgagaatgtacgaaggagatggaataatgaaagtacaaaaactcaccaatgcaatggattccctccaagctctagtgtgtaaaaatgtatggaggttcaattttgaaagtgtgggattttacttcccgccttaagaaagttttaagcaagataaaatgaaaaaggatggctagtggaggttcaattttttaaataaaaagacttacgcgaacggaaagttttacggattctacgttttccctctcacttacgcataatctagacttatacatacactcgttctcct

SEQ ID NO: 162914 - DNA, 392 bp, Glycine max
gtacgtaaatgactttcgaatattttatatttaatattttatggaagaggacgtttattttagccaaaagagtatatttatggcatttttttttatacaagtggaagatcaatctatcatagttgagaggatatacgccctagattaaaatgaattttatattaacaattggatgtgggtttgagttaaatatgtttttagtttatttaaaatatattagtgaattttgatttttaatctttataaaaaaaattaattttcatcgatcaaagagttaaaatttgcttttggttcccattattattatatgacacttgttgagggcttatatgtttagcaaaagataacgctagaaaatgcttgctagtgttgtggtacaatgtcaccatgta

SEQ ID NO: 162915 - DNA, 381 bp, Glycine max
agcttgtatttaaatgtattttaaaaaaaatttattatttctgatttcttattccttttattattagtacatatatgtgaggggtagagggcgtcgcagttccattgtgggaacccaacgagtttaatcacttgaggcacgatgagttaaaataattttaaaaataattgagattttgaaaacgattgagtagctgcgtgcattgcatagtttataggtagagtctgtgtgttaaaatattttctgcgttggacctgaatcaagagggagaggccctaacaaacttctcgaactctaggtattgggagtaaatacactcgatttgagtgttcttttaagtctgtatcgatcttacatggttggagcattctcgcataatac

SEQ ID NO: 162916 - DNA, 398 bp, Glycine max
ttgcgtacgctgctcatcatgaaatgcatatctgccgcggttattgcgtacttgaattgactaaagctttattcacatcatgtaattagacaattattggattcccttggcttcattgcaatatatgtatataaatttcttatttgctatatgtgtattatatatatatatatatatatatatatatatatatatataatacactattagctattattaataattaaatatgtttatctatcggtactttgattatttgttgttattatatgtgcgtatatatttaatattacttgtagctttatactagggtgctatatctatttgttacatgtaaatatatttaaaagcttttaaggtagatatattttattgttataagacatgcttatttaatt

SEQ ID NO: 162917 - DNA, 392 bp, Glycine max
atcgcctttacctaaagcagtctttgtattcatttaaaatgcatgaagatagataagtcggagaacaattggattagtttaataaactgattctagatcttgaaaatattgatgtcaccattgatgatgaagatcaagctttgctattgctgcgctttttgcctaagagttactctcatttcaaagagactttattgtttggaagagattctgtttctcttgatgaagtgcacgctgctctgaattcaaagtaattgaatgaaagaaatgaaaagaagtcctttacaagtggtgaagggctgacagcaagaagcaagaccttcaagaaagatagtaaatttgataagaagaagcaaaagcccgaaaatcacaagaatggtgaacgaaacatc

SEQ ID NO: 162918 - DNA, 398 bp, Glycine max
agcttttacaaatttaaaaggatgataaagtgttataacactagtagtgcaaatttattttctcttttatttttacatttttaattcaaaattattttatgagggcaatatatatatatatatatatagatatattttacggggacaaaaataattatttaaaatattcaagaaagaaaatcacctagtgggggcaaatgcccccatagtaggcaatgtgcattgttcgagtgtgtcagcaagtatatcgattcgcacaagtagtataaaacggtaagaccgagtatcgtatcctcaggaaatttgtttcactcagaccatgtacattcagtatgtaaacacttatatggatcaaaaacaaggtaaatgttgagttgtgtactaaaaaacctatttga

SEQ ID NO: 162919 - DNA, 344 bp, Glycine max
  unsure (1)..(344): unsure at all n locations
cttggtgggggtgcctcccttcccttcacccanaaagaaaaatgccacaccataaatattttattaagaccgctacgttaatttagatgataaaatcaaattaaattgattttcaaaattagaaaactaaattaaactcaaaaatagaatatcaaatccaatctcaataataaattagatgaaaaaaactaatttaacctattatataaatatatattataaatggttaaatataaaaataaatttattttgaatagaatttatgataaaagtatagaattgaaatatagataagaatatttaagctaagcgaaagaacagttatatttatagaaaagagatag

SEQ ID NO: 162920 - DNA, 297 bp, Glycine max
agcttttatcgtttattggagtatattgatctccttttggcgctctaaattgtggtagtgtgctcaaatatatggggcaattttgatttgttttcttgcttgattagggtgaatcaagggtgtgcatgagaaggtcctaggcctataatgcatttagaagaaatggggcatgccacattgttcctcttctctcgctattgacgcctatacgcacgccctccaagtgttgggtgaaatgcctcaataggcttagcgcgtgagttttgaacggaaacaatccatggggcaatatggatc

SEQ ID NO: 162921 - DNA, 391 bp, Glycine max
  unsure (1)..(391): unsure at all n locations
agcttctagaggaagcctcttaatgaagcttctatagaaagctagatgcagctgcctcggtaaaaacgctgcccacccttcattaaccgttggatcttctcaaaatttggtcttacacttcacaagacacttttccatgatctaaccgttgggatctttgaaaagatgtctggagtgtgctagaagcctcttaatgaagcttctagagaaaactacatggagctgcctcggtaaaaatgattcccagccttctttaaccgttggatcttctcgaaatttggtttgtaacttcacaagacactngtccatgatctgaccgttgggatctgtgaaaaaatgtctgtagtgtgctagaagcttccattcccgaaagcatctcttatttaagcat

SEQ ID NO: 162922 - DNA, 396 bp, Glycine max
  unsure (1)..(396): unsure at all n locations
gtaagcaaaatcaatcaacaataacattttactctcctgtttgttgtctcccttcgnatattgagacggtcgatattcagaatagaaactctgagcaaaatctaatgacaataactttgtactcggatatccgattgtgtccatagtatatcgagacgctcgaaattcagaattgaagctatgagcaaaatcaaacgactataactttttactcggatgtccgattgtgtcccgtagtatatcgtcacgctcgtatttgataacggaagctctgagcaaaatcaaacgacaataaatttttacacggatgttcgaatgaactccgtaatatatccagacgctcgtatttgaaaacggaagctctgagcaaaattcaacgacaataactgtttacaa

SEQ ID NO: 162923 - DNA, 393 bp, Glycine max
agcttgttagcttgatgactcgtcatattatttttcttgactagcatcaaatcagagaattaaacctggacatcttttagaaatgcttgctgaattaagacaggcagaaatccagtgtctccatttgggacaaaaacccattctttgcagcatataatccaaaaaagcccatgagactgagtcataggccttttcaaaatccaccttgaaaaccatagctggccttttgcttatacaagcttcctcaatcacctcattaagaactagtacgccatgcaggatgtgtctgttttttatgaaagttgtctgcctctcatcaataagaccagatatcacttgtctcaatctatttgctaataacttagctatcaccttgtacatacatccaatcaa

SEQ ID NO: 162924 - DNA, 420 bp, Glycine max
  unsure (1)..(420): unsure at all n locations
ctaagcttaaaaattaagaccaaaacattgtacataaaattnttacattcttcaaataataataatactaatatagacatattataaattattttttaatttctattctaaaatattaatttaaaatattataataaataaagcgttcgtatttaatattattattattgaaattaatttttgatttagtatttgagatttgaataaatatgaacaaaaaagttactaaatagcatccttcattattggttttttttaaaaaaatttaatgattcccaaaagagttaaataatcaaattatcaattgttaacaattttggttaaaacaacccacagtgaaacagacaaaatattaataagaaataaacttattgaatctgaaggtcttataaggaaaaaatgcacatccgtcataaattt

SEQ ID NO: 162925 - DNA, 378 bp, Glycine max
agctttaagagtgtgcctaataaagcataatttagatgcttccatgggtggatactaaagtgaatggaccaagaatacttggccataagagaatactaatacacatgtacaagataattggatggactatggatcaatcaattacgtgatctaacatttgtgagatataagcatcgatgttagcctattacattgactattaaatcgctggtattatgattgtgactagaaaaggaaacctactgttttcttttggaagacaaaatgcaatataactgacctcggtcttattagaaaacgaaaacttatttctgtagacgcaatttcgtgctacaaagatctactgctagtgtttgatggaaaaacatgtgaatctaa

SEQ ID NO: 162926 - DNA, 310 bp, Glycine max
tgtgtccaagaataatgcacattttcatattctacctatgtgttggaagtataaatgttgtcccagatctaactgcatgcccttttctaataaatgcattaaagaaatgggcttatatcatcatcatgctctgtttgttctttcgtctcatcaacaatgcccgataatgaaaagtgtgctactaatgagacgcaccttgctctctctcccatccttaaagaaatggtcttatacgtatttccatttatatacaacttttaactattacggatgtgttgcacaaatatttctaaatttaataatcacacac

SEQ ID NO: 162927 - DNA, 342 bp, Glycine max
tactatatggctacttgaatttcttcaaatatgagcctcaacataattcttaaaaaattcacgagctagccaccttgctataaagcttgctccttccaagaataacaaacaacattgaacgatcatccaagaaataatatttgaaccaagcctacacaacgttgtggcgagtgtaactcttattgaaagcgaatggatgactaacatttacgaattcctacagaaaagcccactcttggaaaatccaacaatcgtataaaggcttaagagaagtgtaactattatgtaatagagggaggagacctggcagaagagacttctgaccccctataaagtgcttga

SEQ ID NO: 162928 - DNA, 388 bp, Glycine max
agcttggcccttctcgaattatatttatgcgaacatcatagtggaaactacgcgtaatggtaccgtacaatgactcgaactgccatcctattctctgcatcgtggagagacaaatggaaccccccaagtctcagcgcaacgtttgaagcatctgattcttccaacactctactgtgcaagggatacttcccaagtgtcgttgataattagtcgggcgccatgtgacgcggaatttatttatcatcgcaccaacgctagcacgctttctgccttaattgcgttgaatgcgaattaatgagccattatcttcataatgcctcttagccgaaccaccctacgacgagtttgtgacatttacatacatctcattcttctcgaaaaagagaat

SEQ ID NO: 162929 - DNA, 391 bp, Glycine max
agcttgaggttaatctcaaaactacaaagacatgacttgtgagaggtttacaaagaatttcataaaaagatgatttactttgtgaagcatgtcagaaggggaaacatatagtggatgactactcaagatggacatgggttatgttccttgctcaccagaatgagtcctttgtggtattctttaaattttgtaaaaggattcaaaatgaaaagggagtatgcattactttaattagaagtggccatggcagagagtttgagaatgaaagcattcatatattctgtgaagagaatggagctcttcataatttctctaatgctagaacacctctacaaaatagtgttgtcgagagaaaggatagatcattacaagaaatggctagaactatgct

SEQ ID NO: 162930 - DNA, 326 bp, Glycine max
atctttatggagaaggtaccttactggaaacccaatgcaattttattgcgcatacacctaaatatttgggaagccatagaaatagggccttatatacccaccacagtagaaagaattaccatagatggcagttcatcaagtgaaagtataactatagaaaaacttagagatagatggtctgaagaggatagaaaacgagtacaatacaatttaaaagccaaaaacataataacatctgccctgggaatggatgaatatttcagtgttttcaattgtaagagtgctaacgaaatgtgggacactctttcattaacacatgaacgaac

SEQ ID NO: 162931 - DNA, 333 bp, Glycine max
  unsure (1)..(333): unsure at all n locations
ttggagaatggagataccaaagccttaaaaattccacactagaatccaatactttccacgtgggactcccataattctctagataacatacttagctactaatattcttaaaaagaagtgcttaacagtaaattaagtataaaattgttctggtgttggacattaatttaatccacattttcatatgctatatgttnataaanataaaaaataattaaacccaacacctagacatcacagaattgaatagtanattagaatgcaaataattctcaattgcaaataattagaattgaatagtaaaacaaggaggaattgaggacacaagacata

SEQ ID NO: 162932 - DNA, 379 bp, Glycine max
  unsure (1)..(379): unsure at all n locations
ggtgatttgactggtaacataacaactcaatagcagttcaactcaacaattagcctggtcagtctcatatctcataccatcatggaaacaatgtcaagaatcaccatctatacatgcaaccatcaagcanttatcatgcatgaagttcatcaatcaatcttcaccatgttacaccaagtcataagacaccaagaacaggctttactccatggagagttacactacatgagcgattaacccaagtacatctctttatttagttacacattgaccatacggagagactcaaataaaccctacagaggaaatatgatttaattcaaatggatgagtgtccgaattgacctacctcataaaggttacaaagaccttatcctat

SEQ ID NO: 162933 - DNA, 374 bp, Glycine max
tggagatatgtcgcggaggtcaggagaccttggggacgtcaggtggggtgctattgcccaaaaccaagcttgaccaatcccgacccaacccgggcatagtccagtagtgagaacctgtgatgtacctaaacaggcgagctcctggcagcaacatataaaatgaacatagaccacatagcacggaggcttgtgtggtggctggcagctgtgactcttgtgtgatatatgggttatggcctctggtaatcgattaccaagggtgggtaatcgattacaaggcttaaaaatgaagacaagaggctaagatggtctctggtaatcgattaccaaggggtgtaatcgattaccatgctcgacaacgaggtcaggaagct

SEQ ID NO: 162934 - DNA, 268 bp, Glycine max
tatgatcttcgccagcctctgggcgagctaattttttttttttttgaaagtttttttgtatcattattattatatatttcctttctaaaacttataaccatgcgtaagccttaggcgaattcaagaaaaataacgatctttactggcgacgaaaaggataaaaaacataaaattaaagagcacaggttagaaatactatgttgcctcctaggagcgctatcttaacgtctttaaccgaatgcggtgttgtggatggggcttagacatc

SEQ ID NO: 162935 - DNA, 227 bp, Glycine max
  unsure (1)..(227): unsure at all n locations
ggagcttaccttcaagcctttatcgcacagcaaacacttcgtatgttgcttcttgtggactagatttagacctataatatcagctatgaatcatcacntgaaactaatattacatcttcatatcttgtagaatatcctggttgaagattggccaaccttgcttaggacaaccctagtgtgagtgtctagacttagataaccaacactggtctttgaaactttgaaat

SEQ ID NO: 162936 - DNA, 196 bp, Glycine max
ttcctttttctacctctaattttttgttacttttctgtgtttcattttcatgattctcacatgcttgctaaagtgaacatgatcttgagtccactgatactcttaactaatgatttatggcaattttgtctgttgccataatatggagtagtcttattgcagatttttgtgaccacctaattttacattagaaaaa

SEQ ID NO: 162937 - DNA, 399 bp, Glycine max
  unsure (1)..(399): unsure at all n locations
gctgaagaagagtaataaaaatactttattntatattgattcactcaacttaagctacattcagttcatttttaccaaccaataaatgattccactaatcaaacttgattacaacaagtattcttttctgtcactttcggcttacaagtattctcaaggtcactactagcataacccttagactctccctgaatctcagaacacccaggtattgttttttcactaagtcactcctagctttctcaaatagaagtttgatatagaatcaaatattctttacaacactcaaagagtgaatntacaatgaagctctaatctctcacaagtactntgattatcacaatggatgaactctcttaagttcagtatatctctcaacaaatggttntcatttctcta

SEQ ID NO: 162938 - DNA, 412 bp, Glycine max
acaaaacagacaaaataactgaataaactttcatatggatttaggtcacagcccaacagttactaatcagctaatttctcatccaatattgaaaccatgcaaatacatctaaaggaagtgcaattcagtttcacattcataatgctcgaacgtaccccgaccaacctaataaatatttggaaaaagtcaaccgtcagtccagtgtaattgtgaagaaaaagagaaagaaagcggataaaataatatattagagatatagatcggtttatttagttacaagttagttattaattcaattagatacaagttagttattcttgtaatcaattatgtaatacattgctagcattagttatataaaacgtcatggtattcatgtgaaagctaatgtgctcattctgagtattatcta

SEQ ID NO: 162939 - DNA, 357 bp, Glycine max
atcgaagcgacacacatccttttcgagacaatgattgatttattcataaggctatgctttaatcgattaccgtgtgatataatcgattacttctctttctataagtgtttcaaaagtaaacaataacactttaatcaattaccttgagtatctaatcgattacattggtcttgagttgtttctagtgtttggaaaaacactttaattgagtaaaaaataatctaattgattacttcatttaattgatcgattaccttgtagatttaatcgattacaggcggttataactggtttctccataaataatcacctcttgtgttctctctaataacacaatatcttaagctccaacagagc

SEQ ID NO: 162940 - DNA, 418 bp, Glycine max
  unsure (1)..(418): unsure at all n locations
catgggaccaactctttttatntttatatggaagtcgtatctagtcaaggtcttagagaccatacaagtttcctaacgatttctaattatgtgggccattaagtctatcatatgctgacaatagccgagaagcccatgaatctcttcgggggcggagtaggtgtctgccatcgccttggccttggctaacaatcggggaagttcttgactcccgttcaaggtaagagcaaaccgatccatccacatggttgcctcttggtgtaaagagtcgatcacccttcctctagcctctttttccgcgtatacttgggcatattcgtccgcaatcctatgctcgtgggcacgggctagacctaactcttcttggtacttggcgatgatagctagcatgttggtctcccgctcgcataaacgctga

SEQ ID NO: 162941 - DNA, 343 bp, Glycine max
aaacacaagtatatttatcatgaaaacattgttgtggaaggaaattgtagtgttgtgattcaaaaaatccttccacccaagcataaagaccctaggagcgtaaccattccttgttcaattggagaagtcactgtgggaaaggctcttattgatctgggagccaatattaacttaatgccactctccatgtgcaaaaggttgggagagttggagatcatgcccactaagatgactttacaacttgctgatcgctccattaccagaccatatggagtaattgaagatgtgttggtcagagtaaaacattttatcttcccgacagactttgtggtaatggatatct

SEQ ID NO: 162942 - DNA, 297 bp, Glycine max
ggagagagctagatacgaatagccaatggctgatacatggacggagatgaaaaagatcatgaggaagcgatatgtgccggctagttactcaagggactagaaattcaagctccaataactaacccaaggcaacaagggggttgatgagtattgcaaggaaatggatgcgctcatgattcacagcaaatattgaagaagatgaggatgtaactatggctcgatttcttaatggtctgactaatgatactccgtgatatagcagagctgcatgagtttgctgaatggatgatttgcttc

SEQ ID NO: 162943 - DNA, 452 bp, Glycine max
ttttgaatgattctagttacaaaactcttataatgttctcgagatatatatagccaaatagcactctgtttacgagagatatatatattgatatttcactcttgattctaaccaatcacgaatacactattagaaattacactttcaacatcggttatttagggcattttacatcagttctaaaaccagtgttgaaagtgtcgatgttgaatgtatcattgttaacatcggttttggaaaaccgatattaacataaatatgataacatcggttttctaaatatctgatgttaaacacaatgaactacaacaaaaaaagtgtatgcatgatgaacattgacatcgagtttgtagtaaaaccgatgttaatattgtatattgacatcggttgtctagaaaaaccgatgtcaatgtaatctattaacatcgcgtttctacaacaatcgatgtaat

SEQ ID NO: 162944 - DNA, 404 bp, Glycine max
cctagaaccccatccgccttttcctgcacaccatacccattactataagccataacaagatccaactgttgtcaatactgacgaccaaagccgcatgatgttgtcagcacccttatctaacaggtataagcctaagcttaaaaatattaagttcatggaaatattattttcacaaggtcctcaagagtcatatatagctgcatacagtggtggttgaatctcatcacaacggatactacacttttagtctccaataaagactaaatattctgagctactaacacattcgttaatttagcaacccttcacacactgaatagtagtatgtagaaaatggtaactgagatcgaacaatctgaccgatgaatagactcattttgatcaacaatagctttacttttaac

SEQ ID NO: 162945 - DNA, 356 bp, Glycine max
tgctcaccataaaccatgacctattgtgatattatcgatccttaccctcggaagcaaaaaaagaaaagaacgacaatttccaatcaaagagaaagcataaagaacagaaaggaaaattcccaatcaaagagtgggagaaagctaaaagaaaagaaaggaaattcccaatcaaagaatgagagaaagtaaaaagaagaagaaaaaggaaggaaagaaagttcctgatcaaagaagcaaaagatatatgcagaaaggtcttttgaccagacaatatctgaacaatacagaattgtcaccacatgaacataacgaatgaaaggaaatcatgacctaaagtggacttcttcctttgatta

SEQ ID NO: 162946 - DNA, 350 bp, Glycine max
  unsure (1)..(350): unsure at all n locations
agtttcaacgangctagattcacctctttatctaattcacagtctgattcttctgatgcagtgcctaccatcaggcagaggatgactttttcttccttttttgtctcctcgccgaacaatgtgtcatccagttcttcccatgtgctcattagtactttctttcctttagggttgaagaaccttttcttgtgatctcgcttatcaagatatggatattttgacttgaagtgtcttggtttcttacactcataacatatgatggagcttctatccttgtcctttgtttctctatgtggtttcttggatcatttctagtctgatccacttcttttcttccacatgttccttat

SEQ ID NO: 162947 - DNA, 406 bp, Glycine max
actgtctatcttgtgcgattaccatcagccaaactcatcattctagtctgagtacatactaaatgatgctttaactgacgcaaacacttgtcgcgatcagttaaatcccgctgaacagcgtgcaccttaacctctcctggcaaaaatcgagtaataataggtggttgtctcccatagacaatctcaaaaggagtagtatttgtggaagcatggaaagctgtattataccaaaattccgcccatggaatccacaccatccaagccctgtgttgatcagaaataaaacacctcagaaatgtctccaaacaacgattcaccacctccatttgcgggtgatatgccatgctcaacttcaagtgaattccttgcaacctgatcaactcttgccaaaagttgtaacaaaaat

SEQ ID NO: 162948 - DNA, 289 bp, Glycine max
  unsure (1)..(289): unsure at all n locations
ctacacatataatacagtcccaccacccacagccctcaaatccatgctcatatgtcgatgaggcattctaccgagcacttggtgcgcgcatgtttatgcacgaatatctagacaatggggacaatgtggcacgcgccattacttcagaatacaccctacgccaaggccatcccttaaaccccttcatatcaccaaacaagcaacaatttgaggataaatccctcacgtttcttagcanacacatgcaatctacagcaccataatacatcaatggaaagctagatagccc

SEQ ID NO: 162949 - DNA, 405 bp, Glycine max
tttgccatgccatgcatataagccttactgatcttgcgcttaacaggtgcctcatgggttaacgaagataaacacttaaaaactactaatggcatttgaaattcattcctaatgcatgtgacctgtgttagcgtaccaaaatagcagccctcaattaaggcttagggactaaagcgtttactaacctcactttcccatcctttcacatattacattatttggaaagaaaaaaatagacccatcctttcatatatcccatatatggacggatatatggtgaggaattctagtcctctcattcttcctcacatcttctctgaatctaaatcaaatgacgagaattataaatcaatgaacacaaatatttgagaggcctaatgtctctttaaactaattcacgtaaca

SEQ ID NO: 162950 - DNA, 285 bp, Glycine max
gccacccatggtactttctgctatttttgataaatgctatataaagggcggaactctcggtgtggacacaacattattggtgattgtcacaccttaaagtgagcacttatacatatgttctgctttttacgatttactgcaaatcatccacataattctgtcacataagtgtgcatgtcaacaaagtctctgtcgagactcattgattatatatgctcatatcaatggattgatttgggcacaaataaaaaatatgtacaacatctatatacataaacattctaa

SEQ ID NO: 162951 - DNA, 352 bp, Glycine max
tccaatccttgtgttcggactctcagccacttatgatagccgccgatgatcctattactgcttcccctaagctctctgtcctttcttcacgccgcatcccatgccttgcgaactccttggagtaccctcgcgttgtggtcactaaaaccctgtgcgatgaaaggcgtgatgctttcgtctaatggcgctcctctcatggggtagccaagctgtcttatggcgagaacgggattataattaatacaaccccttgttcccatcaagggaacatttggacatccttcgcatgaagaatagaatctgattctttctttcttctaacgagggaaccaattaacagacgcccccccat

SEQ ID NO: 162952 - DNA, 283 bp, Glycine max
gcacaaaacacccttctgcattgatcactgtatcaggatataattcatactctttgaaagtttgcggtacttgtctctctctttgtgaccttttgagtcgctctccacatgatggacatcatcatcactttgtttgtcttcaacgctcacaatcacctttattataccactgtcatcatcatatatatcccaattctaaccctctgttctatctatcaacacatcgtttgcttatcataatccttcctcattctaggatcatacaacttttaagtaccagttg

SEQ ID NO: 162953 - DNA, 375 bp, Glycine max
acccagctcgcccaggcgagcaaggttgcttcctctagaagctttagccttctggaggaaggatctggaaggcccaagtgggccagaatgctatttgcaccccctttttactaaatgcacccccttccatttttttggtaattctttttccgtaacgttacgaaactttacgaatttcgtaacgatacttattttccttccgcgaggctacgaatccttatggattatgtatttactcttctttagctctcgaagaagttacggaaactcacggattgcgcaaaaacacctcttttcgatttccgccacattacggaatttcacggatcgcgcaaggctgcttccttttgatttctgagacgtctcgggacttca

SEQ ID NO: 162954 - DNA, 410 bp, Glycine max
  unsure (1)..(410): unsure at all n locations
aaaagagattgttctttgagcaaacagacgagaaaaagtgtcttcataagaaagaaatcgaaatttaagaattaaaacccagaaagaacaggaaaaaagtccatctaactatctctcaatctctatatgcaaatattataaagcttatgcacataatttcttattgagcatcatgtaacagactgttcagtaacttaaacaaatacaatagcacggacactaagaataaacattcagctataaaatggaaatatactatacagaaaattaacaatctctgaaatgtaaatnttatatccaatcaaagatcaagtgtgacaatgaattagtgaatcttttatacaattacctaaattaaacaacatgtcgcagcctaaacacagtgaatcgactaaattcattgataccga

SEQ ID NO: 162955 - DNA, 386 bp, Glycine max
tttgtattgaagttctttttggctaaaatttacaagaggcagaagtacagtcaacttaaggcgaggaccaaaattgttgaccatgcaatagaaactagagttctgatttctatctagtatctagagcagtatcatgttctgtggcttgcaattttttaaaaattgatgttcttatttgacaatcctttatttgatgcagacaatccattatttgataatgatctttcctcattatttttctcatttctactactattctttatatccataataatcaggtgcttcttcatcaggtttattaataacttgaaccctctccttctttgttcttatttataatgcatctaatcttaaatttacatctttacctccaatgaatcttgata

SEQ ID NO: 162956 - DNA, 308 bp, Glycine max
gattttaagggtaacagtctgaaaacctgggaagaagttgatgaaaagtttctgaagaaatatttcccggagtcaaagactgcggaagggaaagctgcaatctcttcatttcatcaattccctgacaagtccttaagtgaagcgttggagaggtttagaggtttattgagaaagactctcacccatgggttctatgagccaattcaattgaatatgtttatagatgggctgagaccagaaactaagcaactgctagatgcttcagtaggggaaaaaataaagctgaagacccctgaagaggcaactga

SEQ ID NO: 162957 - DNA, 354 bp, Glycine max
  unsure (1)..(354): unsure at all n locations
aagcagcgacagcttaaaaagaagcaacttcaacaaaaatgggaattcaaacatttcagttgttgcatgttccgtcgcatcttcctttccaataatttctaccaacttgtcacagttctgtattacaagggtctgaagcttcccaacatttcgggcaagggacaaagggaacagtgtcaccaagtttttacaaacttgaacatccacatattgcaaatcgggaaagctgagaattcctcgggaggttttgttccatacacatttcacattcgacaagctttctagagtaagctttntcaatggaaggagcattcccttgcgggtggcatcagtgtcatctatggcaaatattac

SEQ ID NO: 162958 - DNA, 358 bp, Glycine max
tgcaaatcaaggtcttgcttttatagactcttcatgtctggtaagaaaaccattagaagagttatgacctttataaaaacttgaaaaccattggaagagttacatcttttgatctttattcaaaacttatcactggtaatcgattaccaaatcattgtaatcgattacacaaagcatttttgtgaaaggatgtgactcttcacatttgaatttgaatttcaacgttcaaacacattggtaatcgattaccaaatcattgtaatcgattacaccattttgaactcaattggaacatcgtaaaatcagttgaaagcttcttgaacacaactcttgctactggtaacgattacataaactg

SEQ ID NO: 162959 - DNA, 435 bp, Glycine max
tcattcgaatatggttacttcgcctcaaccaggtgaagttcttctttgcacccttttcattggtcaacactctttgaaagtgatggtgtgtggttagcttttcgaccatgaaaccattgtcctctcctttccgcaagctcatttgtggtcaaagagaggatacgttgaagaagagggaaagagaagaaggaaaaaggagaaagagggttgacacagggaaccgcaaccattctcacgaaccatgatgttctcattgttgacattaaaattcataagatgagaattcctatgtataggcttacaaccaatatgaaatttctaaacaatctaatctattagacttatttgaaatgtataataactaactaaaactaaagataaaagacacaatctcgcataataataagactctatctaaacttaatattatatata

SEQ ID NO: 162960 - DNA, 267 bp, Glycine max
  unsure (1)..(267): unsure at all n locations
ctaatacaaattacatattttacaaatgagtaatgctaacaacatattctttgttaggcttaattactgttttcatctcttaatcggngaggtcttgcttttctagtcccataaataaaaattaagttttcttagtcctcaaatttcaaaaggtattttttttagtccctttgcgtagatcccattaatgaagtggatgaaaaggtttctaaaagggaggttgaatagtgacacttaactaactatagctttctctgataagaacat

SEQ ID NO: 162961 - DNA, 386 bp, Glycine max
  unsure (1)..(386): unsure at all n locations
aagagctaggttttttccaatgttatatttctgccaaaatgaatgtaacaaaaataaattaaaatgacaagggttaggacttttattgttaccatttgaattggttgtgcatttgtggatcaattgaagatgatttgctntgaatgggatgcacgacatgttaatagaaagccataacggcgaaacatgtttaacttgacacaaacttggagaagaatgctttaggcaaaataaagttaattacaatttaattaatataaaacaacaactaatcaaaattttttgtacccagcctactgtataaattagtttattctaagtaattactggtgagttattctggtaatctgcacttgttggagaacacaatgtgtattcattaattt

SEQ ID NO: 162962 - DNA, 289 bp, Glycine max
  unsure (1)..(289): unsure at all n locations
tccacccagtgttaaagaactttgatataaggtgaacagttgactatatgcgttgggatgccgctaagataattataatcacaagagaaaaactagacnctaagactattactgggtatntcattggatatgctgaaaggtctaaagggtataggttctattgtccatcccacaacactangattgtggaatcaagggatgcaaagtttcttgaaatgacttgtcagcggagtgatcaattcataacatttcttctaaaaggatcactatgaagctgaacctttgggac

SEQ ID NO: 162963 - DNA, 382 bp, Glycine max
  unsure (1)..(382): unsure at all n locations
tgacgcacangacgcgcatcaagtgtgtgcctctgttagaaggccacgtaattatactaataataataatacaatataccttaacggtatgtttgttacctacggtagaagataaacaagacattaaaaaaaactatgacatttaaattataaataaaatgaaagtaaagaatttttttatttattattggtttcaaaggctatttattctttcacctttcctctcattaaatatataagagaaaatatgattttagattcaaatctaacaactattgacggttttttactcgaacacattgcaagcataatatccaagcccacaaccccacagattggattaacagattataagggaccttanattttaatggtatcacat

SEQ ID NO: 162964 - DNA, 348 bp, Glycine max
actatgacgatgattatatgacatggtataagtgtggtggtgggggtggtcacttcgatgaaatgagaaatctggtggctctaggtcaatcccagtgaggagcttatcccgatccagtgagttagtgtgagcatgaccattggaattgttgccttcacccatttcctataacaacacaatgggaaaacaccaaatcgaaagagttaaagaagacaaaaaaaattatctatgtattgcacaaaaatcaatgatcatcacattcatagaataaaaaaataaacagaaattatttctttatttcgtgtctcattaccaaagaagaaatccaattcttccacgagtcttcca

SEQ ID NO: 162965 - DNA, 383 bp, Glycine max
  unsure (1)..(383): unsure at all n locations
atggctgcgcctangattgcccatgctaccttgaaaggtccgagtgtggtaaggagatcataattggaataacacttggcttagctgctggtggtgtgtggaagatgcaccactggaatgaacaaaggaaaaccaggaccttttactatttactggaaaagggtgagattactgttgttgcagaggaacagtgaaaaagttcttgttttgttcgctatgctctccatttataggcttttctttcccgcgttatattcaattggctcttttaatgtagatgaggcaacatactatgagattgaaaagactatgtctcttgaactgattgaatactcatgtggcctgtaaagtttcagcaaattgtttttttatggcttgcttat

SEQ ID NO: 162966 - DNA, 376 bp, Glycine max
aactttcattgaacagaaacctagctaaactatccatcatatctcccaaaacccaatacccacgataatcaagtgagaaagaagtctacccaaacctcaaatttcgaggtcccacacgtagagatgcacttcacgactccgaaaatgcccacctttcgcgatttggagcataaatgatgaccaaaggttggagctttgttggagcttcaatggagaatgaagaagaaagataaagcaacgtgagggagagggagagagagcttctgaaatatgggctgagtgaggagagagagagttgctttttagtttaaaaaggctttttcctctttcttattattttattctaagctatgccacatgtctccatttgagtgga

SEQ ID NO: 162967 - DNA, 361 bp, Glycine max
gggatgtctccttcacctctagaacctcacaatcactcacagactcatctcatgctctcaggatggcttcctcttcacgctccattctctgccagtcttcttacaacaaaagctctcaaaactctctagaacttggatctttctttctctagaaatctctaaacatgcaaaagcttcgagaattggccaaactccctctccatttttgatttcaggcttaaataggtggccttgttggtgcatgcgtgcgtagcgcaactctggctcgtatagcgcgcattagtgaatttcggcttagcgcgtgtcttctcgctcagcggatggactcaagtggtgcacttagtatgatgacaccttgctc

SEQ ID NO: 162968 - DNA, 345 bp, Glycine max
  unsure (1)..(345): unsure at all n locations
aatcagcgatcaatcatcgtacatcaataattctgaggatttattntttactagcgatatccaaccttaagtaggtcaggaatctcatctcttgaagtcacaagcccaataagtttgtcaccaacagtatctggcatcactgaagtaatgacctacaataaaagaagacatacaaatgagagaaaatatgtataagtgaattaatgacaaagaaacaacagtcaattcagatccagaataattctatagaacaacaatctcaactaaaataaatagatattagatagtactaaccttgtgtaagatgcacttgatcgtacggctttctttccacctttaagcagt

SEQ ID NO: 162969 - DNA, 356 bp, Glycine max
  unsure (1)..(356): unsure at all n locations
ttcattttaagtttagnccaacaagagggatctgaggactaagcttagtttaagttagtctaaacctaggagggttgtctaaattaagcctagtccaacaagagggatatgaggatgaagcttggattgattcagtctaactaggcatcgaggtttagtaatttaggctacaacatagaacacaaaaccatgatttattagagaaacatctttatatacatcagctggtttgttagaaagacccaacatctttacctacagctgtcaatcttacttccttgcattttcactgtttttagccaagacttagtctaattatgttctaaatcatcaattatcaatggtcctttcaacaa

SEQ ID NO: 162970 - DNA, 365 bp, Glycine max
ggaagtaatgggggaaatcgacattcccattcagataggccctcacacttgcaatgtggtgtttcaagtaatggatataaatcctgcctatagctgcctcttgggaagaccgtggattcatgccctgtgagtggtcccttcaacgcttcaccagatattgaacttcgcagtgggtggacttttactgatagtgtccggtgaagaggatgtgttagtgagttgcccctcctccgcaccatacgtagaagcggcggaagagtcattggaaacggctctccaatcctttgaggtggtgagctgcgcctctgtggaaccgagtccgtcgtaccttctctctcaaagcggcataatggggcgcgtgtatg

SEQ ID NO: 162971 - DNA, 401 bp, Glycine max
  unsure (1)..(401): unsure at all n locations
gtctattatcattggtatcatctccctctccatcattgngggcgctacttgagctaccagatccctccacctttgggcatattctttgaaagattcatgctccttcttacacatgttatgtagctgcattctatatcgaaccatatcagaattgtactgatgctgcctaatgaaggcaaccattaggtccttcaaagaatggacttgggaaggttctagattagtataccaggtgatggctaccccagtaagactttcctggaagaaatgcatcaataatttttcatctntcatgtatgcccccattttccttcaatacatcttcagagattcttggcgcaagtagtccccttgtactttatgaaatctgacaccttgacatntgaacgaatgaagacatc

SEQ ID NO: 162972 - DNA, 161 bp, Glycine max
ttgcttgcaaatggtaatgcaaacttttgagtcgaaacaacaacacctcggttggtttaaaataatgttggtggctctttaactgagattgactctggattgaattgaacacaagcttctttttttacttcttacccagatctcatcaaatgcttgatttc

SEQ ID NO: 162973 - DNA, 421 bp, Glycine max
  unsure (1)..(421): unsure at all n locations
catgtggcactatttttggtttgtcgacggngcacaacaagntttccacattcacaatgcgcgcataaacccaccatcccctgttgcccacctccatctaagctcacgtactcccatgtagcccatattctcatttctctcaacaccgggtccccatcaatcctctcaagcttccacaacatccaagcaaaacaacattcaaactgcacaagctatcacagccaagcaaaacagagcataggcagaaaactttgccaaaacaccaaccatatcacagcttttctcacttaaagaccccagtaacaattccttcgttctggttcattaaccgctggatcgactcgaaaatttactggaagtctctaaacttaagcctacattctgaccgttgggatctactagcaagcattcagaactcatt

SEQ ID NO: 162974 - DNA, 357 bp, Glycine max
acctttatgataattatattttatcatacttggatgacaggcctttgttttcacaaactatttttaagtcactggacaacatagaccatatttgtattcttgcattttaactcatgaaaatcacttctctgcgaaaaagtctatatctttagttaacatactattcaacacccccctcttctagtgtgatctttgatatttcggttaaaagtccaattagtgtggggggactcaccaaaactgacttggcattcttgattaaaaggagttataaccattggtggtgagaggggcatgtcactagtactggacataggtcatgtactcttaatcgcatctattaattatgaaaaccat

SEQ ID NO: 162975 - DNA, 368 bp, Glycine max
  unsure (1)..(368): unsure at all n locations
aacaagaggagccacaaataaaaagtattgcgaaaaccttaaaataagcctttttactttcatagaacggatcagacacaaaaacacaacaattatagactactataatctatggaaacaataacaaactctcttcccatcagctggtaaacacgtactcataatataatgtagtaaaaaagaacacgtactcataacaattactgctctatgcagcagaaccaatgactccactgcatagctnccatcttacccacaaaactcgttaaacatcaatattttgcttgggaacgagtggtcttccaccacatggatcntaactagcctaaaaactgatatctcccaagttccaacgcatttttccccct

SEQ ID NO: 162976 - DNA, 257 bp, Glycine max
atgtgccgaatcggacatccgagtaatagtttgaccgtttgatatctataagctacgttgcctatttcaccatctcgaatatatgcgcctgatctgcatccgagtaaaagcttgaccatttcaattatcgagcgctcctttgtcaattttagcgtcttataatatgcgcggaactgacatccgagttaagtttgaccacttgattctcgagaattctcgtgtaattcgacgttctattatatgccctgatctacctc

SEQ ID NO: 162977 - DNA, 329 bp, Glycine max
gttgctcaagttggtaagaatgggaagttgaaaaaagtttaataagatggctgatataacaaaattcgaactgctgagtagggcccaagaatgcaaagaaaggcaatgggcccaatgaatgaaaagaaacccaatgtgcaaatagcaaagcgctgactacgacccaatgaatgcaaagaaagccaatgggcccaatacgtcaaaagaaaccgaagttgcaaatagcaatattcataatatatgtagtgttcaacgtcaaatacggaaattggtcagcaaattaaaaaagatggacaagttaaaagtacataaaaagaattaacgatcca

SEQ ID NO: 162978 - DNA, 405 bp, Glycine max
  unsure (1)..(405): unsure at all n locations
tacactcaaacattgtcatatttagagattttngcttaaactaagaaaacatgacacttgggtccaatgatgcccaacctcacaagtcaagtgttccactcaaggcatgatttattaaggttatcacttccactcattcacacatttaagtccctcaaatgaactttgtttttaatcccatttttcattcaaaaaatcacataaagcatgaatcactaaggtcttttaggcttataacttgattgggcttgctacagatctttgcttttctagacaattaaaatcatccaaggatcaatgagagccataaatatgcaatttgacataagcagtcacttatccttgtcaatttctttttctaaccaagtttctcttgagtatgaatctgacactatttattctagc

SEQ ID NO: 162979 - DNA, 358 bp, Glycine max
tgaagccgcctcgagaaaaacgcttcccagccttcattaaccgttggatcttctcgaaatttggtttacaacttcacaagacacttgtccatgatctgaccgttgggatcttcaagaagatgtctggagtgtgggctaagcttccgttcctggagcatttcttatttaagcatttcggccattgctttcgtgtatcttaggaaaaacgtcatttcttctcctttctttcttccaaagtcatttctaacatcccaatcactttcttcatctcccacagccaccattagccaccacaaaccatcgttgttctccattgaaaccccacaccgagaggaaccctttcaccgaagcggaatct

SEQ ID NO: 162980 - DNA, 323 bp, Glycine max
caaagctctcaaaacaccttgtgaacttttagagaaaagactaaaagtgttgagtgatatatccatctataagacaatcatacaatagtcattgtgcaaacttccaacaaatattattgatttgtttagagctagtagtggcttggtaggacaaagaatattgggtttaagtcaagcttgcggtagagcttgcatgtgtaagagctagaagtggtagcgaaaaatacttgtaaccttgataagctagtggaaacttggcgagttaccaagaattggaggtagcctcgcgcttgagatgaaccaatataattctgtatgtgctt

SEQ ID NO: 162981 - DNA, 385 bp, Glycine max
cccaagatcatcacccctcccaagttcaaggtgctggactttgacaagtacaaggggactacttgtcccaagaaccatctaaagatgtattgtccgaagatgggggcatacgtaaaagatgaggaattgttgatacattccttccaagaaagtcttatcggggtagttggtacctggtacactaacttggaaccttcccgagtccattcctgggaggacctaatggttgccttcgttaggcagtgtccgtataatggcttcggataggacgcaactacaatacatgtgcaaaaaagggggcacagatctttcaaagaatacgcccaaagggggagaacctcgcagctcaagtggcacctcaatgacgacaaaatgatgacaatga

SEQ ID NO: 162982 - DNA, 418 bp, Glycine max
  unsure (1)..(418): unsure at all n locations
gaaccattagagcctcaccttcctgattcaggtccaacccctaaaacaacttttgcacgcaaacactactcaagaattatacaatacccacgacctcacacttgttctcaaacacgtttaatacattgcactacaatntaacacttcaggttcctaactaggaaccccacactttccttttaacacttcatgcataaacatttttctcaaggtaaacaccagtcgggttattgtataattcacaactcacaacacaggtattgtcacatcaagtattaaccatacatttattcacaaccatatcccatgtctgcaatttaacatctcgcaatgtcacgatccaccatcgcatggttacgtatcattcacacaataacacatgttcaactntgcactcatactcaatttcaataacaat

SEQ ID NO: 162983 - DNA, 227 bp, Glycine max
cgtcaaattgttatatgtgattaactcacagcatgaaaagccttcacgaattaatgccatcctattaatatcttaaattcgaagaattgttacatgtaacatccacggtatacttaaaaaaggcttatctaataacttcttaacgccataaaatgctgtccagcactagctctgcttctagaacacttattcgagttaaaccatgatatccttcttccttgaccata

SEQ ID NO: 162984 - DNA, 235 bp, Glycine max
caggcgcacaacggctccggcaagagtacatgtttcgagcttgggatgctcacccgcgtcgacccaaaggtgcaggcgccgcaggcgctctgtgtctgccccacccgggagctggccattcagaacgtggaggtgctccgcaggatggggaagtacaccgggattgcatatgagtgccttgtgcggttggaccgggatgccgttcatgtatctaaaagggcacctattatggcgc

SEQ ID NO: 162985 - DNA, 351 bp, Glycine max
  unsure (1)..(351): unsure at all n locations
caattaccgaatcctcaatgtaattctgaattaccatgcctttcataaacnnntattcacaactcatctttaaaaagcactttcaatgacgtggttttggccacctggtcaatcgattacactcctatggtacatcgattaccaagagagtacaatctctctgtaaaaacattttatgcttaaattcattggccaaaactcttgatgtttcaacttggaattcccttcctaagtctctagagattatcttgatcatatatctcgaatctcttggattcttgtcttgaaataaacttgagaagtgcatgatcctcttgaattaacttgagaacacatgatcctttgcataat

SEQ ID NO: 162986 - DNA, 413 bp, Glycine max
  unsure (1)..(413): unsure at all n locations
atgcatgccgaccagctcggccaggcgagcaaggttgctttcttcagaagcaacagcctcctggaggaatcttctggagggtccatgtgggcctgattgctattcgcacccccttttttactaaatgcacccccctttctatttttttgtaattctttttccgtaacgttatgaaactctacgaatgtcgcaacgatacttattttccttccgcaaggttacgaatccttacggattatgtatttactactttttagctatcgaataagttacggaaactcacggattgccaataacacctcttttcgatttctccacattacggaattntatgaaccacgcacgtctgcgcactttctatatctgatacgtctttggacttcattcattgtatgttctctatggataatctc

SEQ ID NO: 162987 - DNA, 321 bp, Glycine max
  unsure (1)..(321): unsure at all n locations
cactcctatcatggctacatggtgttcttcatttttctccgaaaagcccattcctttcatttgcggtattgtgactccaatccaatctgattctcctctttttatggcccgaatgaaaagtcttcacgccgtatcgctccggaatctagttggtctccatgtttaagttactgaanacttttgaaaacattattcgaacattacaaattttgccagaacaatatagacctctactaatagggattcattcatcctgtgaaaacgggaggaaactaatcaggatctctactagtctattagtgattacatacacagtgattc

SEQ ID NO: 162988 - DNA, 359 bp, Glycine max
tatgttaacacacgcgtcggcatagatagtcatatgcctttgctaccagacaaaagctaataacaaaatctctaagcactaattgagagcactatagcactaaatgatatactaaagcatagagcattcataacagaatatagtactactacagaaacccactaacgaaattggtgccaaaatcactaaacataatctttccagcagtgagtcattatcttcctctttctatcatatccagacccatgtaaccgattgtaaagttatattataactttggctgagaaaaaataaaggaagagattgtaaaaatactgtcgccaccattctttattatatattacacctataaggtaata

SEQ ID NO: 162989 - DNA, 152 bp, Glycine max
attgactctatagacactgaaactgggcaagaaaggggaaagaggaaaccatgctggacgcttctatcacagttcacacccaacatgctactagcatacaactctctaccacccagtatccaagcatctaataaccaacctgctacccttca

SEQ ID NO: 162990 - DNA, 71 bp, Glycine max
  unsure (1)..(71): unsure at all n locations
taaaanccctctaacttatcaaatatctctataccatttttgacaatgccttaaatatcttaaaagttggg

SEQ ID NO: 162991 - DNA, 377 bp, Glycine max
tataggagactactgtgatgaatctttatgcgatataatccctatggaagcagggcacaatttgttgggtagaccatggaaatttgacaagaaagaaatccacaatggtctcaccaatgaaataaccctcaccaatggaagaaaatagttcaaacttgttcccttgacaccttcacaagttgttggggatcaagtacaataaaactcacatgggatgaggaaaagaatagaatatgacaagaagatcatcctttaatagttaagaaggagcgtaaggaggtaagtgtctcctttaagaggttagcaatgaatgaaaataattttgcaatatagaagaacattaaagacactctctttcttagacaacctcagcatct

SEQ ID NO: 162992 - DNA, 342 bp, Glycine max
  unsure (1)..(342): unsure at all n locations
attatcataatcaatcatctttgaatcatctatcttttacatcatcttctttcaacatccttgaatcaatctttcaatcttctctcaacagcattcaatatctttcaactctttctacagaattgtcttattctttttctcttcatctttctaaaagttntttatcaacactttttctttaaagaaaagttctttgttcaaaaacgaaggactaaccgcctgaattcttttgtgaaaagaacgaacagaaaacgtttctcttcatctttctaaaagttttttatcaacactttttctttaaagaacagttctctcaacagctattcatcnttttcattctct

SEQ ID NO: 162993 - DNA, 398 bp, Glycine max
  unsure (1)..(398): unsure at all n locations
tgactacncaacataccgccccacaaccccatacccacgaaatttaagagagaaagaagtccatccaaacctgaaatttcgaaatcccactcgtagccacgcacttcacgactccaaaaatgctctcctttcgcgatttggagcataaatgatggccaaaggttggagctttgttggggtttcaatggagaatggaggagaaggaaaaagcaccgtgaggaagagggagagagagagctgttctgaaattgggctgagtgaagagagagagggttgctcttcgggtcttaataaaaggggtttctctttctctattattttaattaagcaatgccacatgtctccatctgagtggagccagaaggggccactttctctttttgactgtgactcatact

SEQ ID NO: 162994 - DNA, 314 bp, Glycine max
agacaccctctccgcccttcattcccggctcggacttttctggcttcgccgacgccgatggatccaaagatcccaaattccgagtcggcgacgccgtttgctccttcgccggcctcggctccttcgctcagttcatcgacgctgacgagtcccagatgtgagaactcggccccgctagcaccttacaacgtttctttagggtaaataaccaaatctgtccggaaagcatgatgtgcaaaaagtgccttacattatttctacatctgggagaccacttccccactacctcgcaaagcccacggactcatctgtgg

SEQ ID NO: 162995 - DNA, 318 bp, Glycine max
gcccaattggtcatcaagggctgcactcaaatatttgttacttcttgaacataccattatagctgcctctatgctgcaactaaagggcaacctctacgctggaaaatataaagaaactgtgagtgcactaaaaaacgcatgaactaatctcctgcattcgctgctcaagggaagtctaggaacttagtcaagtgttcttaggaccctaattagaagctaagtatatgcatacagcaaattggaatatgcggaatgaaataaagtgctcgggaccacctgaacaatgtagaaacaaacagcccaagaacccattttaag

SEQ ID NO: 162996 - DNA, 438 bp, Glycine max
  unsure (1)..(438): unsure at all n locations
gcgaccggtgctgcgcagaatttgttgagtcctggaancaatgtcagaaatcctagtgccctgttggacttctctgggtccactgggtgtcttagaggtgcaatacctacgaactggtggatggcatctaagataagctgcgccacatgaacactgatcttggtcatgatgttgtagaccaactgacatttgggtagcgtgagatcatagttgtggtcgcttggaaggatgttcttgagtagaaaggtcgtccagatttgagttagagtggtcatgctagtgcgcatgatccgcacccaattccctgctacgcttcatgcaaaatcatgtccggtggaacaaagtagctgacctatagcctcttcatcaaaacctgaaaattggtttcttctctcagtgcattcgcatcattgtccctcttctaagaccaatggatgc

SEQ ID NO: 162997 - DNA, 177 bp, Glycine max
acctgagacgcacctaaacaggcgagctccagggagacaacagataaaaggaacaaagaccaccaagcatggaggcttgtggcggctggccagctgcgaactttgattgataggcgggttacggactctggtaatcgataaccaagggcgggtgatcgatgacaaggcttaaaaaag

SEQ ID NO: 162998 - DNA, 384 bp, Glycine max
aatctcttatgtaccctcaaaatgacataataataacaatattactccatgtttctttcatagacatactgaataggtttgtagttgaattctcatcactcatcatgctggttgattgactaataacaatattactacttggtgcaaaccctgatacaagcagacaagtcaatggaggtaaattgggtaaaataatattatcaaacattgaagtttcttacacttcacttgcggaaaaaatgttgcttttaaataatgtaaaaaattcttaaggggtttcctaaactatcaattataggaaacaacacgatcttgaaacttatgattctcacaaacaatcaattacaatagaaatgttttggtatcttctcctaagaagactga

SEQ ID NO: 162999 - DNA, 281 bp, Glycine max
tatgccacggtaggcacaacaacaggggcaagctcagtatcaggggcaggaccacctattgcagccagacgcatatgcattgtatgtcacctctatgacaaccaccatttttgttcacatgcggatgatagagctccagatgcacgcatatatgcagcatgtggtcgaccaacaagcggccagcatatggtttaggagcaactgaatgatagcttttacctgtacaccctgcatcatgttcgctaggacctcaattcttacccatggtctactccctagca

SEQ ID NO: 163000 - DNA, 344 bp, Glycine max
atctcgcattgattgaactaaaggattaagtgaagccacctatggatgcagcagaagaagcttcaacctctggtcatcagttgcaagaaatgatgagagaaatattctatgatggaataactgatggacttcttgaagcacagaatatatttccttctctagatattgttaaaatcagaagtgctgccatgaacaagggcaatagggttgcatggtcagccgaagggaatgtgatactacccacggttgaaatgaggacatacacgagtggagttctcggtggactcgttgaagcaaaggaggtatgctttcctgatttggacatatgggcaacactaaatact

SEQ ID NO: 163001 - DNA, 394 bp, Glycine max
caagcactcaccatctttgtaccaagttgtatgccatacatatcaatttcaaaaatcaaaagcattggagaaaattttgttcattgtaatccatacagttccaaaactttggtgacattcagtctctttaacttgagaaatgcaactaacaattctagcaatggtttgtagtctagcactattttttagaccaattgtatttcaagtatttagaaaattataatatattttcataagaattatgaataggattagaggacataccaaacaagatagaattataattaataaattataggttgtgtttgctctaacatctcagattcatatgtacaagtaaataatacattgatgccagattgtgacataaagtagagcatgtttatatatttca

SEQ ID NO: 163002 - DNA, 346 bp, Glycine max
caacgaaccataatatgtacgcttttattataccttctatcgcaaaatatggggatacaatctctattttgtaatgccatacggccactctatttcttttacataataaatcgacgttcaagttctatttttctctaatattcatacacaatatctaccgctttttcaatttggttaatttggcttccaagtacaaatcttgttgctacaaccttatttccagaatcattttccttttaaaatcacgaaaatcacatttaaaattgttgcaagcaatcttgtaaaattctatatataagctcaataactcttatgtttatatgatatctttgaaaataacattttt

SEQ ID NO: 163003 - DNA, 430 bp, Glycine max
  unsure (1)..(430): unsure at all n locations
agcttacataggactttttttcatcatattgcctccagctgaggcatcaaggatcatcttggtttgaggtttcaaaccactatggaagatatgcatttgtgcaatgtcatcaaagttatggtttaggcacctctgcaacaaagctttaaatctctcccatgtctcacagagaggtttgtgagatccttgggaaaaagtcatgatgaagggttttacactgataaatcttgatggaggaaggaacctcgttatgaatttttcctctacctcttcccaagtgttgaggcttctatttggatgtgattgaagccatgtntttgccttacctgctaatgaatatggaaaagctctgaggcagacagcttcaacatcttcgttaaaagctcctatggtactgcatagttccatgaaggtagataatgcgtgtatg

SEQ ID NO: 163004 - DNA, 311 bp, Glycine max
cgctaaactgctgggagttggaggccatcttctcaattaaatttctggctttagcatgagtcatgtctccaagggctccaccactggcagcatctatcatacttctctccatattactgagtccttcataaaaatattggagaagaagctgttctgaaatctgatggtgggggcaactggcacatagtttcttaaatctctcccagtactcatacaggctctctccactgaattgtctaatacctgagatatccttcctgatggatgtggtcctggaagcatggaacataatttctatgaatactctctta

SEQ ID NO: 163005 - DNA, 383 bp, Glycine max
ccacacgacaccgaactactatatgggtactcgagctttttccaaatttgagctttaacataatgatcaagaaagtaacgagctagccaacttgctatcaaagcttgctagtacaaagaagaatagacatcactgaacgatcatccacgaaatataatcgaaccaagcctagacaaggctgtggcgagcgtaactcttattgacagcgaacggatgactaagatttaagacttcctagagaaaggcccactctcggaaaatccaacaatcgtataaaggcttacgagaagtgttaactattatgtcatagagggaggagacctgtacagaagagactacacgacccctataaagcgcatgacccggagcatccattatgtata

SEQ ID NO: 163006 - DNA, 367 bp, Glycine max
  unsure (1)..(367): unsure at all n locations
accacctcgatcaccaaccagatggtagtattgaaccccgggaagatctaccagtctcccttcttttgctggtacaacctcaatgcaacctacgccaatcacggnggtgtgctgaggcattcaatagagcaatgtgtgcgcttcaaacacaaggtacagagtttgattgatgcacggtggctgacatttcaagaggacaacccgaatgttaggacgaatcccctcactagtcatggaggctcaacggttaatgcggtggaggaatgtggacctcggcggctaaagcggatggaagaccgtgtaacctctatgaggttcatatcgaagcacttcttgaagcggcatgatctgccttgcagggacaggg

SEQ ID NO: 163007 - DNA, 446 bp, Glycine max
  unsure (1)..(446): unsure at all n locations
agctntacagtagatgccactcttctccttnttttgaangatatgccgacaaggaaacacatgtatattcaccaggaaaagatcgttgtggaaggaaattgtagtgttgtgatacaaaagatccttccaccgaagcatgaagaccctgggagtgtaaccattccttgttcaattggagaagtcactgtgggaaaggcttttattgacctgggagccagtattaacttaatgccactctccgtgtgcaaaaggttgggaaagntggagatcatgctcactaagatgactntacaacttgttgaccgctccattaccagaccatatggagtaatngaagatgtgctattcaaagtaaaacatcttatcttccccgcagactttgtggtaatgatattataaagaaatgacattcttgaatataggaaggcattcatctaactgcagct

SEQ ID NO: 163008 - DNA, 425 bp, Glycine max
  unsure (1)..(425): unsure at all n locations
ttaaaactcagctcctcgtgcttcttgagaactacatccttatctatttattcctctattaactaaattaacttccttcaaaataattacggatgaaaataacgcaacaaataatcaaacatcaaacataattactaataatatatagatatatatatatcagggtgttacaattatcactcagatcttgactagttaaactttctgaataaaatgaatctatcccgcgtttttactccaaagatcagtgcgaatcaaatcactcccacattttatctctagcatgcattcatatcatgcatcgcataagcatctcttcatggcatcataatgaacatattattcctgcatttgtctgttatcatattccaacatcacantttgcatgagtcattgcatcatcatgccatatgcgtcaacatact

SEQ ID NO: 163009 - DNA, 370 bp, Glycine max
cgagtattgtattataatctgtgcgacacagttatgttttggtatatgtattggggtcgcgcgcaatataaactttgattctaaaatttgtgtgatggactcttggttgcggctacagctttctgatgaactagctctcttatctctaatgtgtagggtatcttgacgcttataattaatgtaataattgcgcaaatgtcttgcatggctttgcttctcatgctagttattaaaccacactttttgtggtgtcattagcattatttccaaatatatattttcttctcatctgtctctgtgcgtgtaattggacatattaatctagaagatatgtcgatatttccaggatgctccatacctacacttgagt

SEQ ID NO: 163010 - DNA, 450 bp, Glycine max
  unsure (1)..(450): unsure at all n locations
tcttctcgntagggtccacatgcttttcctggatttctcgtcaacatggaatgcaccccctgaaagtatttgggaaaatggggcgagtatgacggcaaatcataatatttaaatttaagagttggtctatgttttcctagacactttaagaaaaaactgtagataggtaatagaagcttgatagcatgtgcaagaagtaacctgaaacacatatctctgatcagaactatccactgacaggacacccttcattctgtataggtcatctccttcttcttcaatcactctctcaagccaatcgtcaacctagaccatcatttaacggacagtgagaataaaaccattaacaagagcaccaaagatgtgaccattaaagcaagtcagtaatttaagactattttgtgtaggcttannaagaaagagtagcaattacctcatcaagatcaagag

SEQ ID NO: 163011 - DNA, 305 bp, Glycine max
gaaaaattggatgagggaaagagtggtcttctaaatctgcactttatgcaaaatattgctgttgaaatgtgcaccacaattttgcataatctcagaagaaatgctatgtatctgctggttgtagaaagaatattacagaattagtagctggatggttgctatttgattccaacggtcaatatgtatacttattgtctacagactttcagtataattttcgagtactatctacggttaacgaattggaacgattgatacgtatctggattttatcttggaaataccatgtctttttgataatttac

SEQ ID NO: 163012 - DNA, 425 bp, Glycine max
  unsure (1)..(425): unsure at all n locations
tgcagcttgccgccaactcgccaagcgatctatttcttccaggcgagcaggggtgcttcctccagaagcaaccgccttctggaggaatcttctggagggcccaaatgggcctgggtgctattngcacccccatttttaccaagtacacccccctctgctggtttttggcgattcttttttcgtaaagttacggaaacttacgaatttcgtaacgatacttgttttctttccgtaatgttacggaaccttgcggattacataatcatcccctttttgacttacggaatgttacggaacctcacttaattatgcaacgatgcttccatttgatttccggtgtgtcacggaaacttacngattggcatcaatattttttttgggttttcggcatgtcctggaatttcacaaatgcctaatgatgggtg

SEQ ID NO: 163013 - DNA, 451 bp, Glycine max
  unsure (1)..(451): unsure at all n locations
gaaactaagcttctatcanggctcatctggtggtgaagctctttctttcatggcttattccctagtggatggcgcctcctctcacctcttctcctttgtcttccgctgcatctccatggtggaaaatcaccattaaaggacctcattgaagctccaagatccagcctccatagaagccccacaagcaagcttcaatcatcttgcaagggtcatgactactgtaggagacatgtttttcttttcttaattcttttaatattttccttctttcttcttcccttatttgttccctctcaccttgatttattcctaccctctcttttcctttttcttttctttctagttttcctttccataacttgagggaactcaactcatctaagattctagagagagaaagtccttatgactagtaccctcaccattaacactagatgaaagatgactccta

SEQ ID NO: 163014 - DNA, 208 bp, Glycine max
tattctgaattccagcgtctagatctactactggactcaatcggacatccgagcaaacagtctttgaagttagaatttgctcaaaccgcctgctccgaacaccagagtgtcgatataccacttggcagcatcggacatctaagtgaataaatatggtcgtttgaagatgctcagagcatttggtttgacattagagcgtctggatctc

SEQ ID NO: 163015 - DNA, 472 bp, Glycine max
  unsure (1)..(472): unsure at all n locations
ntctanagntttctggttttctaaaccttgaatacttttttgtgttattcatctttctcattcccttctctctttgccaaaaataattcgcaaagactaaccgtctgaattctttttgtgtctctcttctcccttttccaaaagaacaaaggactaaccgcctgaattcttttgtgtctcccttctcccttgtcaaagaattcaaaacgacacagtctgagaattctnttgattcttccatttcccataaacaaaagatttcaaaggactaacctcctgagaattcttttgtttccccattcacaaagtttcgaaggactaaccgcctgagaactttgtcttaacacattggagggtacatcctctgtggtacaagtagagggtacatctacttatgttgttgtgactgagaacaagagatggtacatctcttgtggatagttctagtggagggtacatccactatgtgtca

SEQ ID NO: 163016 - DNA, 394 bp, Glycine max
  unsure (1)..(394): unsure at all n locations
cgacagaancggtaaacaatcccaaacacaagataaaattcccaaaattatttagtttatgtaatttgaatcatttaggaatataattggtctctagcgtacaatatctaaactttcaagtccacaatatttctgcgtatggtacatttggctntgtgcaacatattttacgcatcaacttggaacaatctaataggtagtttaagagatagtgttagtggaagataagttcaattgaacatgccttaaagataggagcaagaattgagctaagagactacaggtcgaaaataacattagttgaaacctttgtataatagctaatattgataaaaatgacagccaattagtggcctaatggtggacagcatgatcttacgtatttcttatctct

SEQ ID NO: 163017 - DNA, 396 bp, Glycine max
  unsure (1)..(396): unsure at all n locations
ctctcgctccctacacattctaatttgactaactagaatagataataactcttgaagcctttgaaaaattcagggtattcagttttgcccctcaagtaccacttacaatgctgttgtagtggattacttttcgtgtctataaagatatgcaatgcaataaaaagggagagggcttaatagatgctaatagaataccaagagaaggagagaataaacaaagaagaaaaactaagaagaagccaatgacctcatttccttntaaaatcanttttcaaaaaaaaaaaacttcagccaactgttgtttcgtcttttatcaccaattatgaacctataatgccattggtcccctcttgatttcactttattgccttagtagaaaattgaattcaaattaat

SEQ ID NO: 163018 - DNA, 404 bp, Glycine max
  unsure (1)..(404): unsure at all n locations
gtgatgatatggactntgccggcagaaggatcactgtttgtctttcacatgcacatntaatcataccacttggacgaatgagataactggtgtcaatgtagagggtgagaatgagggaaaagcccatgctgcgactaccgttcctatactgtcaagtttgccaccaacccaacagtgtctttactcacccaatatcaaaccttctgcttacccaccgccaagatatccacataggccatccctatatcaaccacanagtctgtctaccgcacttacaatgacgaacatcacctttagcacaatccataaacaccaaccaacacatgaatattgcatcgagaagacctgtataattcaccccaattccagtgacttatcctgacttgctccgatgtctacttgat

SEQ ID NO: 163019 - DNA, 368 bp, Glycine max
  unsure (1)..(368): unsure at all n locations
ntccacatccacaatgcgcgcataaacccaccatctttttttgcccttctccaacggagctcacgtactcccacgtagcccatatactcgtttctctcaacaccgggtccccatcaatcctctcaagcttccacaacatccaagcaaaacaacattcaaacagcacaagctatcacagccaagcaaaacagagcaaaggcagaaaactctgctcaacacatcaaccaaaatcacagcttttctcatgtaaagaccacagtaacaattccttcgatccaatccgttaaccgtgggatcgactccaacatcttacttggagtctataaggtgtaagccatcatttgaccagtggattacttacaacatcc

SEQ ID NO: 163020 - DNA, 452 bp, Glycine max
  unsure (1)..(452): unsure at all n locations
agctnttgatagagcccaatgagattatcttctgcgggtgatggataaaatgagatttcacatgaaacaaataggttggatgaagctttgttttaaaattgtaaattaccaagtcaaaataaatgggaaccatgtaggaccaatctcacctaaaagagggctaagatagggtgactcattgtcaccctaccttttcattctgtgcacaaagggattctccttcatccttaaaaaagtcgagtgtaggggagatattcatggtataaaggtgtagagaggaacacctgttctctcacaccttntatttggtggcaattgttctctattttgtatgatatcagagaaagaaacaactagacccactcaaatccttgatacctatgaaagggcttctggccanatgatncaattagacaagtcatatatttntttcagcaccaacactcaacaat

SEQ ID NO: 163021 - DNA, 472 bp, Glycine max
  unsure (1)..(472): unsure at all n locations
tgattagtaaggggcctgatgcccttgctggaggtgtctggtactccgtagaactgacagagacccgtaattagagcttgacaactccaagaccctgttggacttcttcgagtccactgggtgtcttgcaggtgcgatccctgcaaacaatagatgaaatcagaaatcagttgagcgatgtgcatacttacatatgatgatgtgaccttgccgggggggaacgggcaccctataggactacagaggcccgtaaccagagctggaaaccctagggccctgttggacttctccgggtccactgggtgtctttgtgggtgcgattcctgcaaacaatagatggtatcagaaatcagttgaaccatatgtatacttacctatgtcacgatggcatgacctcgctggnggaaatggcaccctgtangactgacagaggcccgtaaccagagctggaaaccctanggccctgttggac

SEQ ID NO: 163022 - DNA, 314 bp, Glycine max
  unsure (1)..(314): unsure at all n locations
ccacctatgcactcctcaatgacatagcatcatttctggcgctaaactgctggttgttggaaaccatcttctcaattaaatctttggcttcagcatgagtcatgtctccaaaggctccaccactggcagcatctatcatacttctctccatattactgagtccttcataaaaatattggagaataagctgctccgaaacctgatggtgagggcaactggcacatagatttttaaatctctnccaatattcatacaggctctctccacggagatgtctaatacctgagatatccttcctaatggctgtggccctg

SEQ ID NO: 163023 - DNA, 342 bp, Glycine max
  unsure (1)..(342): unsure at all n locations
ntntattttcagtagatgaagatgaattctttgtcctttatggactcctctaaggacaatagcatcatttcttgcactgaatatgtgggagttggaagccatcttctcaatcaaattcctagcctcaacaggggtcatatcaccaagagctccaccactggcagcatcaatcatgctcctctccatgttgctaagtccttcatagaaatattgcagaaagagttgctcagaaatctggtggtgaggacagcttgcacacaatttcttgaatctttcccagtactcatacaagctttctccactaaagtgcctggtgcctgaaatgtctnttttgatggcagt

SEQ ID NO: 163024 - DNA, 438 bp, Glycine max
  unsure (1)..(438): unsure at all n locations
ttgaccaaaccctagcaggagttgtttccttatagactttgtctagcaccttgtctccaagactgaggatgattgcactgtgtgccttctgcagtggttctttcttatacccatcaaccatcatcttttcaagtttggcttctccatcaagtgcttccaccaggccctgttgaacaagaagagctctcatcttcaatcgccacagcccanaaatcatttgccctatgaatttttcaacctcatacttggccgagcccatttcttgaatcgaactcaaaaaatctgtccacgttcaccgcaccaatntgttgtgccaagatcagattntacttcacaaaagaatgagtntcttgtatgaacaagaataagaataatgcacaatataaagatgaaccanaactgcacaacactcacagcaaccactattattcaatatct

SEQ ID NO: 163025 - DNA, 341 bp, Glycine max
  unsure (1)..(341): unsure at all n locations
atttaaatgaatgaaacataaagcaactaaataactaataaaatttttttttcatgatttgcaaaattaaaaaaaaaatagaatttaaacatcctgctcatcctggggctcgtcttcttttaaatccagcactggaacagctagtatgtcctgaagaatgggttgctctggctncatggctggggctgaaggcatggtgtcctcaaatataggtgtaaggaatggctctggcatgggatctggagaagtctcctccttctgagccatagatgtatctgtagcaaatgaaaagggctcanaaggagtgagttcatcctctgctaaaactggctcctctactg

SEQ ID NO: 163026 - DNA, 249 bp, Glycine max
  unsure (1)..(249): unsure at all n locations
actcagcttttcatgggagggttcctctcgattggaatggttttgtattgtatcgcagcgggacaggccttgttgagccgngcttgatgaggctctttgggtggggagatgtctttgctggactggggcgacttggggagtttcaacgcggccgaaagctggatggtgtgacatactgatgagtatcatgagggttactgaggtttggtcagcaggaccgaggcacggatgacattccttttttttttg

SEQ ID NO: 163027 - DNA, 446 bp, Glycine max
  unsure (1)..(446): unsure at all n locations
tgcagcttttattggaatcttgaaattcatgtattttctctgatttctgaaatttttgggataaaaatggtcattgaccaatcccttttctatgacttaaccaaattacccaatgacggtgtaccatttgaaggcacactgaatgacgactggaaatttgatttctctgcccatgatgcctgccagttggtttgcaccaacaatgcggatatgaccggacgtcttcttgccggatcattggcttttgaaagccgcatccttcactatttaattgtgcgcattttgcttccacggtcttccaaccttgcccaggtttctgaggaagatctaattatcatgtgggcctttcatacagggcgtcaacttgactgggcacacttagtcagatatcgcatgcataaggcattgcgaataaatngctcactaccatatccacagcttgtcac

SEQ ID NO: 163028 - DNA, 293 bp, Glycine max
actaagcttatctgatgtttagagatatttgtatttgcttatttatcattatagaataaaatatgggatatgtttttgcgggacaattttagatttattatcttttttttctaagcagatgtgatcgactacactagacattagcattggtgacaaatatattgttcaaccttcgtaccatattattattattattattattattattattattattattattattaatattattattattattactctctcttttcgttaatcttttctttctccaactttcatccatcttt

SEQ ID NO: 163029 - DNA, 183 bp, Glycine max
tcttgacgctggcaacaacctatggatttagacattgtagcattatatgcttgctttagaagaatgtcctttcttattcgttggaaccacgtcttattcttgaagtgaacaccctttatggcgaagacatctaccgatgtgacatatatgactgcgctataacacatgcgtttacataggact

SEQ ID NO: 163030 - DNA, 349 bp, Glycine max
gtggtggaacaagctacaaaaggagagagccagaaatgaagagcccatggttgatacatggacggagatgaaaaagatcatgaggaagcggtatgtgccggctagttactcaagggacttgaaattcaagctccaaaaactaacccaaggcaacaagggggttgaggagtatttcaaggaaatggatgtgctcatgattcaagcaaagattgaagaagatgaggaggtaactatggctcgatttcttaatggtttgactaatgatatccgtgatattgttgagttgcaggagtttattgaaatggatgatttacttcacaaagcaatccaagtagagcaacaattaaaa

SEQ ID NO: 163031 - DNA, 411 bp, Glycine max
  unsure (1)..(411): unsure at all n locations
ctgggatatgggaagagagtagaagagtgtanggactcctagaatgtgtggagcattctagagaattaatcttcaccttaggatacatgtaatctccactattcattgtggaggtggagtagtataaataagggtaggaaccttcattcctaacaatccaagtagagagcctctttgagagagaagatgaatagcttgggaagtctctatcctcatgcatgagagagcctctttgagagagaagataaatagcttgggaagtctctatcctcaagcatgagtaagcctctctgagagagaagataaatagcttgngaagtctctatcctcaagcttgagtaagcctctctgagagagaagataaatagcttgngaagtctttatcctcaagcttgagtgagccaccgtagt

SEQ ID NO: 163032 - DNA, 425 bp, Glycine max
  unsure (1)..(425): unsure at all n locations
agcttgntcttgactcgtcttctacttgtttgtacttttcaatcacatttcctcattctccattccactgtcattgatcttcaagaagcaaatgactccattgatgaagaatattcaaggcctacaggctctacatggagctacatcatgtggtatcaaaaacatcttcatctaggtgatattcttttgcttcctctatcttttgtttggtccattcactttaattccttgttcttcatcgtcttctccatgtatctccaccattgtcttgtggtttggtgttgtttagattagattcaaaanaaataaacggattaaatcttagatctacacttgctcttgcatttctatnggtcaaatattatagatatactcttgaatcgtgttctgtgttgatatacgttctatctttcatcagcataatc

SEQ ID NO: 163033 - DNA, 447 bp, Glycine max
  unsure (1)..(447): unsure at all n locations
tgttcttggattttcctcaattcttaacaagctgtgaacaatatacttgtccttcatttaactgtctttgggcttggcgaccacgctcaacaaagtactttcgacacctactatacgttgatttcaccaatgttgttatgggaatgttgcgacaatcctttaaaaccttattgatacattctaaaaggttcgttgtcatgtggccatatagacgtccttctctatcgtaagccatcatccatttttcctttgaaatgcgatcaatccatgtaggctgcataaaattagttatgaataacaattttaagtataaatgaaagttaaataaacatgaccatcaaatatgaaatcttacccaatttcttcaacattntcttttgtttggcattattgaattntcgaatgaagttgcttgctatgtgtcgcactcagtagacatgataatcg

SEQ ID NO: 163034 - DNA, 398 bp, Glycine max
gaagaacaaaaggttgaacccttctggtatctgacgatcacttaaaattagtgagaaaaattggttccgtgaaaaaaatccaagccgaggcgctcttgtaacgtttctgagacgttttctggggtggattcgcgaaaaattttcgctgttcttcaccgttcttcggtccgtcttcgtcgtccttcggtcttcaacacgtaagttcccgaaatcgaacttttcaattcattctatgtacctatggtgggccccactttgttcgcgtactgttattttcattatatttactttctgcacccccttttgacgcgctttagtcatttatttaagtcattttctcgcctaatcaaaattaatatatattacactgatcatttgaattgtacacctgtgaattc

SEQ ID NO: 163035 - DNA, 330 bp, Glycine max
  unsure (1)..(330): unsure at all n locations
acgctcaacaaagnacttttgacacctactgtacgttgatttgaccaatgctgttatgggaatgttgtgacaatcctttaaaaccttattgatacattctgagaggttggttgtcatgtggccatatcgatgtccttctctatcataagccatcatccattttttctttgaaatgcgatcaatccatgttgctatggctggactcagttgacgaaatttttctaaattatgatcaaaaatgtgcttgcaaggagtgtaggctgcataaaattatttatgaataacaattttaagtatatatgaaagttatataaacgtgaccatcaaata

SEQ ID NO: 163036 - DNA, 405 bp, Glycine max
  unsure (1)..(405): unsure at all n locations
agctngtatacctaaatgagtatgttgctcttcatggatgtcngnnatgccttntagaggcttgaaaagtgcaagaaaatgagcagtattttctggaaaacgcgatgaactcgctaagcgagcatgctacgctaagcgagttcatcaatgctcattgtatgtaacgttatctgaagaactcgctaagcgcgcttaccgcgctaagcgagttcatcttttgaggatgaacactcatcctcttgctgaactacctgtggctaagcgaggttgaatcgctaagcccaggtaacttaaatcattgttttgttgatggtcgtgcgctaagccgagctttcctgggccaagcgcgaatggttgcggcatcctctgagcttagcaagcttcgctcgctaagctcccaacact

SEQ ID NO: 163037 - DNA, 313 bp, Glycine max
  unsure (1)..(313): unsure at all n locations
tcagagcacaagagctttatttttgtgtttcttaaacctctattaagttttagctttaccttcgcctccattgttttttttttcatttttctccatgcatctccttacatgtcttgtgctaaatggttttaacatgattctttagaatttccaccaattaaacttgctatagaagctagatttgattttctatggttcaaaattgttgttcttgttcttgaaccatgaattgcgttaagtttatgttcctctgagtttagtcttcctatgtttgtggctgacacctataccattatattcttacanaaacatt

SEQ ID NO: 163038 - DNA, 334 bp, Glycine max
gcctggaccagcgaggacagaaccaagaccagctgagccacaacctccggtagtagatccttctgcttcttcggaggttgagatattatctcctcaaccagcttcacctctgataatattcccgatgactcagctgatgaagctggtgctcctcctaattcaccatcctgctacctagaggatggttcagacttttctgattggatggatggctgaggaagttgtggttcatcttgacaagaatgtggatatttcgatgatttcgtgcttcttttggtgtgctttttgaattactattaacataactatgggtttagaacaatatctctttttt

SEQ ID NO: 163039 - DNA, 457 bp, Glycine max
tatgcgcatatttccttacgaacgttcacttgcacttattattctattaactaagaaaaatgcacccatatacaatcaaggcagcttcattacctagattatttacatgtacttccaaggtgtatttgttatttacatcacacacgtctccttggttaaatttacatacatgcatactcaaagcattttggggtaccaaaaattgcacgtgtgcacatcttggtatttctaatacctatacatacacaaactttatgatgaatcttgactatctacacaataaggtgctacgtttcatgctcttgtcaaatttttgctacctacagtcgcatgcaaaatcaagaatattttcctttgctgaccaaaattgattaaaacgattcattattttcgtatgtattctcctacctaacatcaacatatttatatatatcttttttgtgagaattttgactac

SEQ ID NO: 163040 - DNA, 318 bp, Glycine max
ggaacccaccacaggcggcaatactaggactttggtcttctaaccgcggattcgggtatatcaagacatttgaacaatttggagatgcaattctccctatgaacggaccgatcactagaaccatgagccagaggctccaacaagattgggctagagctgctgaagaaggccctaaggtggtcatgaaccttatgatagatatctgagcccatggacgcaaggtgggtccaattatctttgtacatagtagactaagatgtcattataattgtgccttgtattaagggctccataatgtgggtgaggtaccctacaaat

SEQ ID NO: 163041 - DNA, 336 bp, Glycine max
  unsure (1)..(336): unsure at all n locations
cacaagaaactcagcttagagcgacaacacctatgagtggaaagagatgcctattcttttcagaancaggaatacaccccaacacatgaccatggcagncacgacataccacacatcctatgactgttcggaaaaaacaattatagatatcttggctgcaagattttctggccaattaaaatgatggtgggataattatctcactactgaacaataataaaaaatatatagtgttgttaaaacggatctcaatggaaaagtctttacaaatgacgataatgaagagatccctgacgctattaacacctttatctttacaatagttcaacacttcat

SEQ ID NO: 163042 - DNA, 360 bp, Glycine max
  unsure (1)..(360): unsure at all n locations
ctaaaacgttcaatggacgctggttactgatttccatatacgngnnaaacggcgcacagggcgaatatcgaatgcaaattttaattgctgatgcaaatcatatttggccactggtaatcaattacatcctctgtgtatcgattaccagagattgaatatattgtaaaagaactttttaactaagatttcttggccaaacctattgctacttcaataggaatttccttcctattgaatataccctttctaagactctacagactgccttgatcatgcatgttgaataaagcattgagacgcatgtgatccttcggcatcatcataacatcaagttgatccttcgactacacatgtgatcct

SEQ ID NO: 163043 - DNA, 425 bp, Glycine max
  unsure (1)..(425): unsure at all n locations
agcttctttgggaccttgttctttccatttattcctctttcagaaccatgctatgtgctcgcgactggtccctttcttcccttcgcaacttgagttcattattgctaccccatagagctccgcgaaatttgttccggccatactcttccttgcgagccctcttggtctcttgttcaagggcttttgcggtaattgcattctcttcccgtaacccggcgcactccttccgaacgtgtgtagcagccaacttgaacttctccttggcgagttttgcctttcctaactcgcttttgagagcttggacttcctcgtcctcttccggtgcttcaaaattctcttcgctgacgactnttaacttggcaagccaatctaaacctcgtatgcgaactttcagccattcgtgggacccaccaatgatgccatta

SEQ ID NO: 163044 - DNA, 439 bp, Glycine max
  unsure (1)..(439): unsure at all n locations
tggagaggatgcttcaatggaggaatttattgaggttataaagagggagggggagcacgaaattgaaggaagaaaaagggagagaagttgaactttgagttgtgtctcacaagactctcattcatcaaagttacaacaagtgttacacatgcttctatttatagactaggtagcttccttgagaagctttcttgagaaatcttccttgagaagcttctttgagagaacttccttgagaagctagagcttagctacacacacccctctcataactaagctcacctccttgaaaagcttccttaagaagattcctaaagaagctagagcttagctacacatacctctctaatagttaagctcacctncttgagatgagaagctagagcttagctacacacnccctataatagcgaagctcacccncatgacataaaacatg

SEQ ID NO: 163045 - DNA, 415 bp, Glycine max
  unsure (1)..(415): unsure at all n locations
agcttcctctttaagcttcttatccaagtttctctctnnggggngaagcttctccttccatgacttattctctagtggatgacgtctcctctaacctcttctcctttatctttcgctgcaattccatggctaaaaatcaccattgaaggatcttattgaagctcaaagatctagcctccatagaagcttcataagcaagcttccaacaagtggtatcagagcacaagagcttcaagtaggtgctccttaaacctccactaattttcagctttactttctcctccatnggttgttcttcgnttctctccatgtatcttctcacgtgtcttgtgctgaatgttgtaacataatttttagaagttccaccattaagctgctatagagctagattgatttttatggtcaaattcctgtc

SEQ ID NO: 163046 - DNA, 369 bp, Glycine max
  unsure (1)..(369): unsure at all n locations
tacggacctatgaaactcagctttagccttgatttagggaatttgagtttctctgtttatggactctaattnttgtattttcatgtattttggcatggggtgagcttagctattgaagaggtgtgagtagcccccctctagcttctcaaggaaggtttcttccttacttcccaaggaagcaacctttctcgcttctcaaagaagcttcccatgtgctacgctataaatagaaacatgtgtaacacttgtcataactttgatgattgagaaacttgtgagacacacctaacagttcaacttctctccctaatctccttcaactcccatgcccccctccccccaccctctatgatgcaatcctacccccta

SEQ ID NO: 163047 - DNA, 466 bp, Glycine max
  unsure (1)..(466): unsure at all n locations
agctntacaggggacacaagccacatatttttttttncgatattcgatataanacncaaacagagaacagaaaaaaagccaacaacttaattaagattttttaaacattttttgttatacaaaattttaaatacacctttaagttttaaagaggaacaaaaaaactttaagtgtaattcagtaggatggaagattaatttgcacaaaggatcaaaattattgaaaatacatcaaaattctaccaaaaaaatcaaatattttaattaaaaaaatatcttttagtatttagatatatatgttactaagtgcttacacaattttaaaagtgttagaatgttacttataaaactattgttcatttaacaacaaaatcaaatgaagattttaaacagtnactaataattaatatactaacattatatatatcacaataatataaaaaaacatcggtcaacatttatctatt

SEQ ID NO: 163048 - DNA, 494 bp, Glycine max
  unsure (1)..(494): unsure at all n locations
ctaagcttgttcttcacaaccttgacaagaacctgacttcctatattcttataatctctaaaggatattcgtaccagaaattagacttaatgaattcaatgcaatcttaaaatacccaaattattgcacaagcaatgataatgtataaaacattacgtgcaagaagaaaaaagttgtatccaagatagagagtgaaaagctctagcttctatacaggacatcattagatcaataatccaatgaacaaacaaaatggtttgcttaactactaatagatatccacaatccaaaggtagggactgcatggatggttaaagaactaaaaagtaaagatactcaacgcatttagtattttacaatggacaatttctttcacaatcaaaccacgtgttcaagcaaccagttttccaaaagaactgaattgatgacaaaggccttcctccaannaaaattacaagattggtctcaaatgactaatgctaatatattttctc

SEQ ID NO: 163049 - DNA, 458 bp, Glycine max
  unsure (1)..(458): unsure at all n locations
agnctttatacatatatgaagttagtttcttgtctaactaactactaacaatcataaccaactatcaactactttctaaccatattngactctataatgaatgacttctaatatggctaatatctcccctctagctcgagaatgtatgtttgacattcctagcttgcaattgagaaattggaatacactaggtacaaaccaattcatcaataagtttttggcgcctttacaaactaattttctttaacttcttttattaataaaatattcatctatataagtacaaacaaagttcatgtgaattcgacactcagacttctatttttactttactacttgagacgcattggtgcacttgccaattcatcaacaacgttttgacgtcattgtcanggactatgttctttngtactcggtatattggatattctttcntaattggtatctttcttaattct

SEQ ID NO: 163050 - DNA, 429 bp, Glycine max
  unsure (1)..(429): unsure at all n locations
gatatacacaatattctatcttcaatatctgtaaattccacaatntacataacgattctggaagagttttgaagccacccctagaaagatttaagtatcttagatgttttaaatgaccaattgatgacgacaattttcctcttcgttcacaatgaagcacacgcaaagaataacatttcaatacatgaggagaaagttcatcagtataggccagaggccaagttcgacgaatatcaagcaaaggttgcaatatataggtcctcagagaattgacttgatgcatctggattgaatcggctcgctcagatgataaccacctataatatgagagatggtgacttcttttggacaaagttgtacaccattgtcatttgaatgcacanacctcttccgcacaattgagcagatctgaacagacatcatcttgaa

SEQ ID NO: 163051 - DNA, 418 bp, Glycine max
  unsure (1)..(418): unsure at all n locations
agctngcatacgacaatggagcttatctttttgatttatcaatgctaagaaaattcaggatttaaagagggagttgaatgctttggaggcaggtatttctgatagaactttgactcaacctgaagtggagctcaagaaatctcttcaagagcagctatggcatgcagctaatgcctatgaatcgatgttgaggcaaaaggctagagtgaaatggttaaaggaaggggacagaaattctgcttacttccataaactgattaatcacagaagaaggcacaatgctatccaaggattgatcattgatggggtgcgggtccaggaccctagtagtgttaaaaatgaggcttttaatgcatttaaagacagattctctgagcagaatcttaatagaccaaccctggatggtgtgcagctacct

SEQ ID NO: 163052 - DNA, 415 bp, Glycine max
  unsure (1)..(415): unsure at all n locations
gatgatgancaaggtgatgacaaaaagctcaaagatcaatcaaagaacaactcaagtgaatcaagaacaattcaagagttcaagataagaatcaagaagaattcaagactcatgaagaaagtttagagtcaagaatcaagattcaaggttcaagatctcaagaatcaagatcaagattcaagactcaagattcaagaatcaagagaaggcttaatcaagataagtatgaaaagtttttctcanaaattaagtagcacatgatttttctcanaacatgtttaccaaagagtttttactctctggtaatcgattaccagattggtgtaattgattaccagtagcaaaattgtttggaaaaagttntcanattggaattacaacattccaattaatttcaaaaagttgtaatcgatta

SEQ ID NO: 163053 - DNA, 417 bp, Glycine max
agcttctttaagaaaacttgcttgagaagtttattttagctacacacacccatctaaaaactaagctcacctgcttgagaagcttccttgagaagctagagcttagctacacacccctataatagctaagctcacccccatgacaaaaaaaaacatgaaaatacaaaaaaaatcctactacaaagactacttaaaatgccctgaaatacaaggctaaaaccctatactactagaatggccaaaatacaaggcccaaaagaagaaaacaacctattctactatttacaaagaagagtggacccaaccttggcccatgggctcaaaaatctaccctaagggtcatgagaaccctaaggccttctttatcaactctagcccaatcctcttggagcctctggctcatggctctgggaactg

SEQ ID NO: 163054 - DNA, 473 bp, Glycine max
  unsure (1)..(473): unsure at all n locations
ctcagcttctcagggaagtntctcaagaaagcttctcaaggaagtttcctattctataaatagaagcatgtgtaacacttgttgtaactttgatgaatgagagtcttgtgagacatacttcaaagttccacttctctccctcttttattccttcaatttcgtgctccccccttctctctttcttttcctccattaaagcatcctcttcaagcttcttatccaaggcaattcttggtggtgaagctccttcttccttggcttattccctagtggatggtgcctcccctctcctcttctcctttgccttccgctgcatctctatggtgaaaaatcaccattgaaggacctcattgaagctcatagatccagcttccatagaagctccacaagcaagcttccatcattntctaagttaccagagtatttactctctgngtaatcgataccagtntcatgtaatcgaataccagtga

SEQ ID NO: 163055 - DNA, 388 bp, Glycine max
agcttatggctattctcaagataattctttatgttcttccaactgcatgattgactttgccacacaattctaagccgttattcagtgctgcaattaaattctcccctttatgacttctaaataaacagtgcacaatttttttatcaaaatttttaatgatcttataaaaacgtaaagtcaaactttgaacattgaaattaaaagaaatattatacagtgtagataagactctgaaagttacatatgaaatcaaaacctgcactttctacaaacatgaaaccaacatttcttacaacaagaatttccaagcaaataaatgcctaaaactagataacaatagcattaaaattcaacttcacccaaagctagccatatttcagaaacgcat

SEQ ID NO: 163056 - DNA, 393 bp, Glycine max
  unsure (1)..(393): unsure at all n locations
tgacttcaactcagtattttttgtcctaccaagtcattgttggttattaacaaatcaacaagaattgttggaagttcacacaatgactaagatatgatcgtcttacaacagatatatcacttagtacttaagtcttttatttcaagatttacaaggtgttttaagagttttgtatctatacaaaaaatatatagaaagatttacaagaaagaatgaatgaatgaatgattcgcgcaagttgattcatatcttggatcttcaaagcttcttctatttatagttntcatcttcaagtatttggtgtctcttaacggatggattcttcactctaagtctctgtctggctgatgtattgtgcgcattgaagcacttaatgtttgcattgaatgcaca

SEQ ID NO: 163057 - DNA, 406 bp, Glycine max
  unsure (1)..(406): unsure at all n locations
aagaatcgaaatgttggaagtaaactgacaagggaaaggtaaattgccgaatttaaaggatcaacgagttcattcgatcgaatgaaccatttaaaagacaggcattctaaagtgaaatgaaaaatgcattgcattcgaaatgtaaagtttacagaaacttaaaatggttcacaaacatacattctccttgcgtactcgtttctctctgtgctgggtactttgagtatataaggatttgtataaatgatttgcgacctcgaaatctgactaacaactgctatatatagacatttaaaaataaactgccctaacggtcgaacattatnctaacgccaagtgttctgctacgtacaccttgcatgcacataactgctccttagaacgcgtatccacattgctcgaagtc

SEQ ID NO: 163058 - DNA, 343 bp, Glycine max
  unsure (1)..(343): unsure at all n locations
agagagagtccaaaacaccaccaactagacgatcatcccagatccaactcagtacgaggaaagggaaatgcccaaacagcaggcccaagccgcgtcacctttagaaggaacgcataccgcgtcaccttgagaaagaacgcaatcggcctaacgtctagacaggacaagagaatccatgtgccacataaacaaagaactggacgacagggacaaaaacatgacccaacgcagagagccattgcaagagaacagccccgagagcgaagagtttcagcagcggcaacatgcctacatgacgtacgaccacaaacagggaccgaggntccagcaaagacgcagcaca

SEQ ID NO: 163059 - DNA, 346 bp, Glycine max
acacaaaaactcagcttgtccgcaaaatactgaaaccgcgttggggctacctctttaacgcctcttgctttatcagataacatggactgtcaaaagctaaaatcaacatgtacttaccgcattcgcgagaactacgtagtcgatttctcttcatggaagaatgttgacaaaaccccgcttgtcacctcatgagatgttaaggtcaacccttactttttaccagtaaaggatcatttaggtggaacctaacgaccccttcagtaaaaattctttatcaacccataaagaatcttcgttgattctcccgtgaggcccaagacctagccaattttgtcccaatttttta

SEQ ID NO: 163060 - DNA, 354 bp, Glycine max
  unsure (1)..(354): unsure at all n locations
agcttcattaagaagctttcntctaagtctttctcgggcttctttgagaagctctctcaagaggcttctttgagaagctagatccttatctatccacacccctctattaactaaattaacttccttaaaaataattacgaatgaaaataacgcaacaaataatcaaacttcaaacataattactaataatatatagatatatatatcagggtgttacaactcttgcaagagtttaagtgaagaaattagtggctattatagaggacgccatagttcacatacgaaacattattcccaatgaagagaaaaggatagaacgcctcaagagggttacattagcctctaatattccat

SEQ ID NO: 163061 - DNA, 306 bp, Glycine max
  unsure (1)..(306): unsure at all n locations
tatctaacaatacgcaagtgaaagcattcagtgcctttcacttctcgcaaagaatggtcaatccctgaaatcatggatgaaaaagaaatggataaaaagtttttcaagttggccaaagaggaaatatggcagaaatgtcccaagtgcaccatgtttgtccaaagtagtggcggatgtgaacacattacttgcaggttctggtatctatctatggncgcttttgtggcttttgatttgcacactatataattcatcgtgattctcataataatggaaatatggaacnatgatatcgnattatctctc

SEQ ID NO: 163062 - DNA, 437 bp, Glycine max
  unsure (1)..(437): unsure at all n locations
tgaatcacaaatctgcacctgtcgctagactctatggtttatgctcctctgccgaccaccacacagacctttgcccttgtgtgcaacaatctgaagcaattgagcagcctaaagcttatgctacaaacatctacagtagacctcctcaacctcagtagcaaaatcagccacaacagaacaattatgacctctccagcaacaggtacaatctcgggtggaggaatcataccaatcttagatggtcgagtccttcacaacagtagcaacaacaccagccttattntcaaaatggtgctggcccaagtagaccatacgttcctccaccaatccagcagtaacaacaacaacagcagcaacaacaacaaccncagatacatacaaacagtgatgctcctccacaaccttcccttgaagaacttgtgaggcaaatgactatg

SEQ ID NO: 163063 - DNA, 375 bp, Glycine max
tcgaaagagcataacaagacttttctaaataggtttaaagatataatcttcggcgaccataatgcatttaaaatgttaaagaagttagcatatgggcctaaaagaaatgttataacttggcaaagatatgatatcaacaagtattcattctacaccaaatcacaagacgacaggagtacaatgcaaaacagtggtgtaagtctaagggttgaatctcaacactttgctactgtacatgatgacaatccgagtgtaacttccatgccttactttggattcattgaagaaatctacgacgctaattatataacatccaatgtctttgttttcaagtgtaagtgggtagatagaaatatcggtgtgtgaaccgatgat

SEQ ID NO: 163064 - DNA, 461 bp, Glycine max
  unsure (1)..(461): unsure at all n locations
tgaagcatgcaagcttggnatgaagctatccacacatttattttattcttgaacactccaacacccaccacatcctgcttcatgagactatgcttttcccatatttgtcattgttgtgctcaacatcttggccactgttctgttgctccttagctacttcacttttctaaccaaatactgctcaaactggcgccaagttaacccaatgagatggatttccatccttcgagctcggcacgaagaggaccccttcatagcattctctcctgccatgtggaaccgagggcttgatgagtctatcatcagagaaatcccaactcttcagttcataacaggagaagaaggtgaggaccaaagtgtatatggttgcgtggtgtgtttgactgagctcaatgaacaggatgtgctaaaagttcttcccaatcgcaaccatgctcttcatttggactgcattgacattt

SEQ ID NO: 163065 - DNA, 404 bp, Glycine max
  unsure (1)..(404): unsure at all n locations
tggcactcaagatgatgacgaactgtgactaggaaagttataaagttaatccttaatggtctttatctaatttcttgaaggatattaatattcctttgatgctgaacggtgatagttttttgcctagtgttgtatatactaatgagtgtcgagaagaaacgtgcttgtcataaatgataatcctaaaccagcactaggcttttctctgattntggatctaatccaaaagaaatcaaatttttgaagacaagcaaagtctttgttctctttagctagctctcttacgagttatattgtcttactcaaattagtgtagtaatcaacgtacagcgtttaaataatgtagttatatctttaatacaataataaaacgcatgccgcttgaatacatataagaagcctac

SEQ ID NO: 163066 - DNA, 425 bp, Glycine max
  unsure (1)..(425): unsure at all n locations
agcttatgctgcaaacatttataatagatttctctcatcagcaaactaacaacaacagaataattatgatctttcaagcaatagatacaatccaggttggagaaatcatccaaatctgagatgggcaagtcctccaccacaacaacaacctgtccctcctttccagaatgctgctggtccaagcaagccatatgttcctcctccaatgcagcaacaggagcagcagtcacaacaaagacaaccagtaactgaggctcatcctcaaccttccttanaagagttagtgaggcaaatgaccatccagaatatgcaatttcagcaagagacaagaacctctattcaaagtctgacaaatcagatggggcagatggctactcagttgaaccaatctcaagcccaaaattctgacaaatggcttcacaact

SEQ ID NO: 163067 - DNA, 395 bp, Glycine max
  unsure (1)..(395): unsure at all n locations
atgtagggtttcttcgacccaggacaatgtgggttctgtggggttccaacgtcgacaatataagttttccagcactgtagggggttctgtggcttcgaccgacaacaatgtgggtgtcgagggagcggtttccggtagatttcaggcgggaggagaaagaggagcgatntcaggcaggaggatgacaaagagaagagggagggcaaggttttcgagcgcacgccggcttgtgaaatctcaatttttttaacttataaacataacaacatcggtttttaatggataaccgatgttaactaaatatagttaacatcggttntgtaaaaaccgatgttaacatcatatacattacatcgngtttttaacaaccgatgttaaaatcaacttcttaacat

SEQ ID NO: 163068 - DNA, 472 bp, Glycine max
  unsure (1)..(472): unsure at all n locations
ctgcacaaggctcttaatattngaatatttccttgtataaccttcacccgacgacgacactgacagaaaacttatcttctccttttggacaaagtaaggcaagctgggggcaagtaaattttcttcccatcagaccttggatgcaactgtgatcgtatccccatatcagctagaccttgacgggtattcaagacaatccttgtcttgccttgaatgttaaggagcgtcccaatcacactgtcacaaacatttttctccacatgcataacatcaatacaatgtataacgtctagatcagaccagtacgaaagatcaaagaanatggacctcttcttccatatgcaactcttacttntaatacttctttgggtctttccaaatacaatattcaggtgttgaacccgctgatatacctgctcaccagccaacggtatccgtgcaatatcgtgcacttgaacttcattaaaagctt

SEQ ID NO: 163069 - DNA, 440 bp, Glycine max
  unsure (1)..(440): unsure at all n locations
gcttgaagggacacccacatttcctagtcgccagggtcttttcgataaatnncttntncctacacctatactcgtcactccttttacagccaattaacacaaacgtagtccttcctctactacctgtgtttgtgttcgaccataaaatcaccgccacatatctgttttcatgagccacggatcgagcccaccacgaaacatcctctcggcactcaaacacctacaaaatccacataatttaaagtttctactagtattcattttattaataatgtgacaaacattaacattataacttgagaagtcttgacgcatnccaacaataacatgtgggtattcgaccacatgatcctcattttcttattacattagcgcgacagacatattgcatcattcctcttttcgcactctaccaatcaggccatattgcatttcataat

SEQ ID NO: 163070 - DNA, 435 bp, Glycine max
gcctcggagagaactatgacatgcttttcaatctgacattcaccacagaatctggctttctctattttcagattgggaatgcctctaacagcacctttggcaatgattctcttcatgccctcttaatgcagatggccaaatctttgatgccatattatgacttcatcttctttggaggatggacatgtggaggagtaacttggttcttgaggtgtccataagtagcaagtgacctttgatctgctgccctttattagaacttcattcttctcatttgtcaccaagcattctgactttgtgaaagttacattgaatacttcatcacacaactgactgatgctgatcaagtttgcagtcagtccttctcagccagactttgtcagactaggaagccatatggacaacttcccatccagggactttcttaagccatct

SEQ ID NO: 163071 - DNA, 479 bp, Glycine max
  unsure (1)..(479): unsure at all n locations
gacacaagaaactcagctgccccagctcgctgggagcaggttgcttctcttatatgcaccatcttctggagaacttcctagaaggcccaagtaggcctagtttctatttgcaccccctgtttactaaatacaccccttgcctttttttgctgattctttntccgtaacgttacggaaccttacaaattacgtaacgatacttgttttctttccgtaatgtcacgaaaccttacgaattacacaatcatcccttctttgtcttccagaatgttacggaactttacggattgcgcattaacacttccttttgacttccggcatgtcacaaaacttcacaaattgcctaacgatgggtgccaagtacctcgaagtggtcaaacgagggtcgcattccaacaaacggataatccccagacgaaattatggtatgacaacttggaagggtaattggcacacnatggtgtccgattgaatcggga

SEQ ID NO: 163072 - DNA, 470 bp, Glycine max
  unsure (1)..(470): unsure at all n locations
tgcttgtggggcttctatggaggctggatctatgattttattggtgtcctttaatggggattttccaccatggagatgcagcggaagacaaaggaaaataggtgagaggaggcgccatccattaaggaataagccatggaagaaggagcttcaccaccaagatgagccttggataagaagcttggagaggatgcttcaatggaggaaaagaaagagggagagaaagagagaggggggagcacgaaattgaaggaataaaagaggtatagaagtggaactttgaagtatgtctcacaagactctcattcatcaaacttacaacaagtgttacacatgcttctatntatagactangtagcttccttgagaagctntcttaagaannactccttgagaagctttcttaagaagactttcttgagaagtttctttgagaaaacttccttgagaagctagagnttagctacaca

SEQ ID NO: 163073 - DNA, 451 bp, Glycine max
  unsure (1)..(451): unsure at all n locations
agctngcttgaggagctgctatggatgctggatctttcagcttcaatgaggtccttcaatggtgattttccaccatggagatgcaacggaaggcaaaggagaagaggagaggggaggcaccatccactagggaataagccatggaagaagcagcttcaccaccaagaatgtgccttggattataaacttgaagaggatgctttaatggaggaaaataaagagagaaggggggagcacaaaattgaaggaataaaagaatgagagaagtggaactttgaagtgtatctcataagactttcattcatcaaaggtacaacaagtgttacacatgcttctatttatagactacgttgctttcttgagaagctctcttgagaaaacttccttgagaagcttctttgaactttctttgaaagctagagcctatctacacacacncctctaataacta

SEQ ID NO: 163074 - DNA, 491 bp, Glycine max
  unsure (1)..(491): unsure at all n locations
cggaacttgaaactaagcttccacatatccaagcaaaacaacattcacacagcacattctatcacagccaagcaaaacagagcaaaggcagaaaactctgccaaaacaccaaccaaaaatcacagcttttcccactcaaagaccccagtaacaattccttcgatccaattcgtaaaccgttggatcgactccaaaattttactggaagtctatagtgcataagcctacattttgaccgttgggatctactagcaaacatccagaactcattctacattactctttccacaaccagcaaatacatggatttttctgcacttgtgcagaattctgctgcacaantttacagcaaaatctgcacaaagagcatatttcgaanaccacacttccnctcatccaattnttgccaaatcaattcctacaagtcccaattcatgtatcaatcatgtctatacccaaatcaagcttcanaacacagcaacacagaatct

SEQ ID NO: 163075 - DNA, 416 bp, Glycine max
  unsure (1)..(416): unsure at all n locations
agcttggagaggatgctttatttttngtttataaaganggagagaaagacagaggggggagcattaaattgaaggaagaaaaagggagagaagttgaactttgagttgtgtctcacaagactctcattcatcaaagttacaacaagtgttacacatgcttctatttatagactaggtagctttcttgagaagctttcttaagaaaacttccttgaaaagcttctttgagaaaacttccttgagaagctagagcttatcttcacacacccatctaaaaactaagctcaccttcttgacaaaatacatgaaaatacaaaaaagttcctactacatagactactcataatgcgctgaaatacaaggctataaccctatactactagaatgggcacaatacaacgcctaaaagaaggaaa

SEQ ID NO: 163076 - DNA, 358 bp, Glycine max
  unsure (1)..(358): unsure at all n locations
agctacaagaataatggtctcaacaaacttcttatnntccagaagagattcaataaataagccttcaatctttaatggaaagggttaccactactggaaaacccacatgcacattctcatcgaagcaatagacttaaacatttgggaagccatataagttggaccttatgtacccaccatggtggctggaaatgcaacaatatataaacctataaaaaactggactgtatatgatagaagatagtgcagtacaatttaaaggctaaaacatcatacttctacctaggatggataatatttacggttcaaatgtagagtgctaagatattggacacttacagttcccatatggaccact

SEQ ID NO: 163077 - DNA, 444 bp, Glycine max
tggagaggatgcttcaatggagaacattatttatggtgtgatttagagaggggggagcacgaaattgaaggaagaaaaaaaagggagagaagttgaactttgagttgtgtctcacaagactctcattcatcagaggtacaacaagtgttacacatgcttctatttatagactaagtagcttccttgagaagctttcttgagaaaactttcttgagaagcttctttgagaaaacttccttgagaagctagagcttagctacacacacccctctcataactaagctcacctccttgagaagcttccttaagaagattcctaaagaagctagagcttagctacacacacctctctaatagctaagctcacctccttgagacgagaagctagagcttagctacacaccgcctataatagctaagctcacccccatgataaaatacatg

SEQ ID NO: 163078 - DNA, 380 bp, Glycine max
tcaaactaagctggattccatggggaagacctaaaacctatttttccttgtttcacagatccccagaattggttggaggtggctgggggacaaatcaatttggccagatctggttagtgaggctgtaccttcacagaatataatcactctatccatcagcagacagcagaactaccattctaaatggaaagtttctataagcttggactggagtcaacggaaagagatattgatatgagaccgaggctgtgattatggtgaatccaggcatatctcaaatcagctagatacatgtcgaaactacctatgcgtcatcaccaactctttacgttcttcaatcatgctctcccccacagaatataaacctgacttaaacccct

SEQ ID NO: 163079 - DNA, 340 bp, Glycine max
agcttgcttgtggggcttatatggaggctgtatcttttttcttcaatgaggtcctttaatggtgatcttccaccatggagatgtagcggaagacaaaggagaagaggtgagaggaggcgccatccactatggaataagccatggaagaaagagcttcaccaccaagatgagccttggataagaagcttggaaggatgcttcaatggaggaaaagaaagagggagagaaagagagagggggaaacacgaaattgaaggaataaaagagggagagaagtggagctttgaagtatgtctcacaagactctcattcatcaaagttacaacaagtggtactcatg

SEQ ID NO: 163080 - DNA, 447 bp, Glycine max
  unsure (1)..(447): unsure at all n locations
taacttggaacctatctggcttgtataaaaatctgnacctatcgcaagagtctgtggtttatgctcctctgctgaccaccatacagacctttgcccttccctgcagcaacctggagcaattaagcagcctgaagcttatgctgcaaacatttacaatagacctcctcaacctcagcaacaaaatcaaccacagcagaacaattatgacctctccagcaacagatacaatcctggatggaggaatcaccctaatctcagatggtctagccctcaacaacaacaacaacaacctgctccttcctttcaaaatgctgctggcccaagcagaccatacattcctccaccaatccaacaacagcaacagccccagaaatagcanacagtcccagaatgactatgcanaacatgcagtttcaacaagagaccagagcctccattcaaagctta

SEQ ID NO: 163081 - DNA, 271 bp, Glycine max
  unsure (1)..(271): unsure at all n locations
atgggttntttgaaaccggtatgactagtcgcgatactttgctcaactctatgaggtttgataaaactgtaaatgatcattccccaagccgtaacagacacatgcaggtagttcactaattatgcagtagcctaactctggtaggtttggggggggggggctgacctttaatcttattacccatcactatttttcatcttaatacttcatgatatacctctattctctctgatattcttcaccatctttaactgttcaggaatactcattt

SEQ ID NO: 163082 - DNA, 223 bp, Glycine max
tgctccatgaatcataccgactgaaagagcttgtctgaattgaaattcacatgacctggagagcaacactcttgaacgacatgcaacatactaatatttcaattatagtaccttatgatgtattactattagatatactactcatgatagcttcccatggaagttatccaattgctggagttataacatattacgaatgttggcttgatgatgctatgctact

SEQ ID NO: 163083 - DNA, 435 bp, Glycine max
  unsure (1)..(435): unsure at all n locations
ctgagctgcagcttncaatcatagtaggcgagttgttttcttcgcnctaccaattacagtttgcgtgttctcaacaaagaggaacagtcacttgtcctcaagtgataagaccacagtggttattccgaattgtggttgtgtcaaagaattccatcatatgaacacaagttgcaagctatgtttttaactaaccaacagcttctcatagagatatgcacaatctcaaagataggaacataattattaagcgacacaagtgagattagctggcaagcaagacagatatcaaggaaggttcatcttgccaatgccttatggccctatttctctaagcacaagtgttaaggctattctcaatcacaaccccttaagctcaacttgtgattcatctatgtatacgtacaaacccatatttatctaagacttctactgtaa

SEQ ID NO: 163084 - DNA, 475 bp, Glycine max
tcgatctcgccatcaaacctcagtcactggtgctacttattttttgtttccaaacacttttacgggccatttcaaatactccagaggataagtctagtcgcctatcaactacaattaccacctgaatcgcatatccatctagtgtttcattattctcttctcaagccatatcatcaatctcctgactggagcaacgttattgctgacttaccaaacacaggggaggacaatcaacccatcattaccacctttccattctaaatactaagtgggatacttctactaaggaccctcggttaatggtttcggttcaatggcacggaatgtcccctgacaacacttcatgggaaagttgggacaagccttaagttgagtatcaccttgatgacaaggtgcttttggaaggacaacgggatgttatgacagaaataaatcagcaacaatgtacacagcaagcaggcacaagttacattag

SEQ ID NO: 163085 - DNA, 469 bp, Glycine max
  unsure (1)..(469): unsure at all n locations
tgtaggattatggggtacccgtcatatgtggtactttgtgtagatctggcgaaggtgcaaatcaactctcccacatccacaaatcacacacgaacccaccatccccagttgcccaccttcaactgagctcacgtactcccatgtagcctttatcctcgtccctctcagcatcgggtccccatcaacccctccaagcttcctcaatatccaagcaattcaatatccaaacatcatgaactaccctaaaccaagaaaacagggcagaggcagaaaactctgcccaaaaacacattccaataccacaactttccttactcaaataccccagtaacattctctttgttccgattcgtttaccgttggatcgactcgaanattctactggaggtccctagtacataagtctacattatgaccggtgagatctgctagaaaacgtccagaacccagtatgtactacctttctcat

SEQ ID NO: 163086 - DNA, 427 bp, Glycine max
agcttcatgatgatgaaccaagcatttttgatgatgccaaaagcccaagtgattgattcaagacttcaagatcaagcatcaagaatccaatccaagggttaagattcaagagaagaaatcaagaagcaacaagccaagacttcatataggataagtattaaaagatttttccaaaaaccaaatagcatagttttgttttacaaaagaattttatcaaatcttctaaggttaccagagtgattactctctggtaatcgattacaagttggcagtaatcaattaccaatgactagactgcgtttcaaaatgttgtcaatgatttgaacgtccaaattattttcaatagtgtaatcgacacactatattagtatcgattccagtgaatctgatgttgaaattcaatccattgtgaaagtccaactttcat

SEQ ID NO: 163087 - DNA, 482 bp, Glycine max
tcttagtttcagatgatgcagatgggtttgtagctacctcatgcactcctctaatgactatggcatcatttctggcgctaaactgctgggagttggaggccatcttctcaattaaatttctggcttcagcaggagtcatgtctccaagggctccaccactggcaacatctatcatacttctctccatattactgagtccttcataaaaatattggagaagaagctgttctgaaatctgatggtgggggcaactggcacatagtttcttaaatctctcccagtactcatacaggctctctccactgagttgtctaatacctgagatatccttcctgatggctgtggtcctggaagcagggaaaaatttctctaagaatactctcttaaggtcatcccagctcgtgatggaccttggagcaaggtaatacagccagtcctttgccactccctctaatgaatgaagaaaagccttcagaaatatg

SEQ ID NO: 163088 - DNA, 428 bp, Glycine max
  unsure (1)..(428): unsure at all n locations
agcttatgccataatgcgtcttgantttgttttatcacaaccacgccttagaccacgtaattccgcattaaaggattcaccataacaagctacactatcaagtaaatatagattatcatacgcgcagacagttccaacaatatctgaattaaaagacaacctacacacattatgtccaaatgaacataaataatccaatttgtccaagtaagaaattgaaaccaaatgccgtctaaatgaagatacaacgaaagggtctttcaaatcaaaataaaaacccgtacataataataatctaaaatgccctatagcttccaccgattaccatcttccacatatattcatctttcagaatcaattggctgctgatagcttacacaaccctttattgatacattgatgttagtagtgacaccagaatctaacca

SEQ ID NO: 163089 - DNA, 321 bp, Glycine max
  unsure (1)..(321): unsure at all n locations
taggggtcaactcaatcaatcagatggatgctcataattgtgcaaaggatncatcattcacaaacagggtaagctatttggctaagtggctaattcaatcaatcacagccttcatcatttccaaatcatgcattcattaattattcagagattcatgcaaaaattggtactcaatgctagtcgttctctcacaattaaagttcacacaactcactgcgttatggctaatgattacattcactatttatctattaaacaaactaacaatgttcctcatgccccttatgaatgttctatctcttttaatacctgatacttatt

SEQ ID NO: 163090 - DNA, 371 bp, Glycine max
agctttgagacgcatgtttttctttggctttatcaaaacatcagcttgatcctttgtctacagctcagactcatgagtggtaagttgaggtcaaaatggattggtttttttgtgggaactaacattttttcttatggtacagttgagatcaaaagtgaatccacagataagagcttcaagctcaatggacaccggctgaaaccattcctcacaaatccttccttagtggatgtcgtagtggaagagacctccttactccacccgacttcttttctgccatgatatacggaagtttctttttcctatctccttctttacttttgacgcacttgtccaattttattgattgatctgattgctcgaatcttatg

SEQ ID NO: 163091 - DNA, 465 bp, Glycine max
  unsure (1)..(465): unsure at all n locations
tcaagaaaaggccaaactcctctccaaaatctgantttatgcttaaataggtggttntgtttgtgcttgcgcgcttagcgcaactctgaaccgcttagcacgcattaatggatttcggcttagcgtgtgcttttctcgctcagcggatggactgaagcggtgcgcttagcgggatgacccttcgctcagcgaacatgcacaactcatccttcttccagattcttcctcacgcacaaccgaggagtgttgcgctcagcggatggctcgctaagccagaagattggcttagcgagaggatgaaaattagcacttcacaaacttgcctaattaacctaaaattgagaggaaatgattattatacacacaaaatgaanatactaagtatttattacctatctttaacanaaagtaattacaacactacanaataaccataaatnggaggagattngatacaatttacac

SEQ ID NO: 163092 - DNA, 451 bp, Glycine max
  unsure (1)..(451): unsure at all n locations
agctttgagcaaattcaaacaacaataactttttactcggatgtccaattgggtcctgtaacatatcgagacgctccaaattgaaaacagaagctctgagcaaattgaaacgacaattattttatactcggatgtccgaatgaatcccgtaatatatcgagacactcgtaactgaaaatggaagctatgagcaaattctaacgacaattactttntactcggatgtccgattgagtcttgtaatatgtcgagtcgctcgaaattgaaaacaaaagctctgagcaaattctgacgacaagaacattttactcggatgttccgattgagtcctgtaatatatcaagtctctcgaaattgaaaacagaagctctgagagatttctaacgagactctcgagtattagaacagaagccctggagcaaatcaaacgacaataacttgttacttcgat

SEQ ID NO: 163093 - DNA, 400 bp, Glycine max
  unsure (1)..(400): unsure at all n locations
acagggtaagggaagcttacttggatcgctgaaattggatgcaaagaagcaaggagagcaggcaaagggtgagagcacaatgcagagaagaaaaatacccacgaaatgccaaaatgcagtttaaaagcacaaatganaatgtaactgccaaaggcagttatgccttatttttggcggtttcaaatgcctcacttagtgcatcaactcggtaagcgagcatacataacatttaagtttccaaacacacgtgcttagcgggcaaactcgcttatcccaatgcannaaattcaaattttctaaagaagatttgggcttaacgtgaaaatcacgcttagcgaagtctcagctctgattgnctacaactctccttatcggcagtggccgacttttgaaaacatct

SEQ ID NO: 163094 - DNA, 404 bp, Glycine max
  unsure (1)..(404): unsure at all n locations
atcagctcacccaggcgtattttttgcttaaagctgaagctttcccatggcccacgcgagccaaatgctggcctgggtgagtttatgtctaaaaaatgaccattttgcccctttccttgtggcttttgtttctggatctaacaaacaaacatcaaccctgagcgaccctttggcattgcgctgcaactggtgcccaacaccgtaattcaattagcaatgatcaaaagatcatgttcaaatgataaaaacattatacctggatgaaattagggtctgacagttgcccctctctacttatcttttattaaaaataaaagataagtgaagacaatgacactatattcatttgagccgtctgactattcanaatccgatgctagagataacatgagaagtgagaactg

SEQ ID NO: 163095 - DNA, 379 bp, Glycine max
  unsure (1)..(379): unsure at all n locations
cattcatctttttcattcccttctccctttgccaaaaagaattcgccaaggactaactgatgcaatcctaccccgcaagggcattggatagaagaccccaagtagaatgggccaaagatgcaagagaaggccctagggttcttatgagccttagggtagatttcgggcccatgggataagtacgagcccacttatctttgtaaatattagattaaggtttcattatttttgggccttgtatttagggctccataatgtaggtagggtaccctagaaatataggatttttcagcccttgtattntagggcacctagactagttnttgtattaggggtagttntgtaatttcacatgcactaagtggatatttgatgtgtg

SEQ ID NO: 163096 - DNA, 454 bp, Glycine max
  unsure (1)..(454): unsure at all n locations
tatattccactgctatgaacctctataccagattttttggagacacttacatcacattttcgtgttagagtaggaggattgaaagttaattttgggctgcatggcttggtcaccatgcttcaattacttgaaacactattggaactttatgtcagtagctccaagctattcatcattacgacaaaatgaaactttatgggaggagtattgacagatactcattagatgttagattagttagtcaaacaaatacatgaatttatgtaacaaagaatggtattgggcctgcaattgattattccatggcattgcaagctatcctatactcaggaacaagtggtgcttataaatcaaacagttctacaactatacaagtaatgcatacaanaacaatttcaaagtagtttttgaatcaaagatataaatacctgagttggaggctgtagcacaattg

SEQ ID NO: 163097 - DNA, 430 bp, Glycine max
  unsure (1)..(430): unsure at all n locations
agctngcaagagccatacacacctatttttatgtctaaattcatatacgcattgggtctcatgcacaaatattatgtttcttcttccaaatggaacgaaaaatctattatgctttgttatgatatatctatataataattgtacacgaattttattatgtttcactcatttttattccgtttcaatcgtcattgtctagatacaattttagaaaaacagaaaattatttttgaaaatagtaaacaaacaagctcacaatttaaggaagttcgggttcacaaaataaaaaggacaacctataaaccaaagatacgtgaactaaacaatcccgtacggattaaaaagagtaatgacccgcttgttcaatatttaaaaagtcttttattataaaaaaacatcctgaaaatcataataattatgtaattttcac

SEQ ID NO: 163098 - DNA, 361 bp, Glycine max
  unsure (1)..(361): unsure at all n locations
ttaggacaggatgggatngagctacttgtagaccctattgatnngttatcttgncaataatacagggaatcgtgttatgatgggagagagctggacagggcaatttccgatcaagaataaaatgggggagaagtttttagctgtagcaactaatacgcctttntatgacgatgatggaagcttagttgggctaatttgtgtctctattgatttgcggccctttctcgaaatgaaagttccaatgcctagtgtaaggaacatcgagtcagattcagattcatgtggaacccgacctagaagtagcattacaaataaacttggccttgacactcaacagccgcttcaaacttctattgtcttc

SEQ ID NO: 163099 - DNA, 397 bp, Glycine max
acccccaataaggagtccaacgttgaaaacgaaacgagaatgacgtaaattggaacaaactctcacctcacacaagcctataacatcaatttaaacctgctcaaactaaatttacacccaaaactccaccgaatcaaaatttgactcctcaacacccaaatttaccctagaaatggctctttgttcactttggtcatctggttttctctctagcacaacccaaactttctcataagtcctaaatggcatttcaagctaagattaactcactctaacctccaaataccactatatccagaattggccttccaactctcagagtctcacatctgtctccactcacaacaccatactctcaccttctaaccctaggataactctactcttcatctctaac

SEQ ID NO: 163100 - DNA, 407 bp, Glycine max
  unsure (1)..(407): unsure at all n locations
tcactgataacatcgcttgttgtacagttgctttcnatgccttctagctaaggcattcctttntattatttccttgagaatgaaatgtcttcatcctcacccgcagcaagcactttttctttgtttgttctttgtgtgagtttagtgcttctctgattcgtagtgggacccgttgttcattaatggaggttcttccttttctatctattaggaactacttgtagaagaaaatgttggaaaataaaataaaaaaatatgaaggaaaataaatacaaagaagatgcatagtcttgaattaaataacaaaataacagtagcaaaataaatttaattgacaacacatgaataatgcattataacatacaataagcacanagaaaaaataaattaagggaagaaagatatag

SEQ ID NO: 163101 - DNA, 482 bp, Glycine max
  unsure (1)..(482): unsure at all n locations
gacacaagaaactcagcttgaaggatgcttaatggaggcaagaagagggatgatttggttctttgaanatgnctcacaagactctcattcatcaaagttacaacaagtgttacacatgtttctatttatagactaggtagcttccttgagaagctttctcgagaaaacttccttgagaagcttctttgagaaaacttccttgagaaactagagcttatctacacacacccctctcataactaagctcacctccttgagaagcttccttaagaagattcctaataaagctagagcttatctacacatacctttctaatagctaagctcacctccttgagatgagaagctagatcttatctacacaccctctataatggctaagctcacccccatgactaaaaacatgacaatacataagaaattccctactactgagactactcaaaatgccccgaaatacaacgcttaaaccctatactact

SEQ ID NO: 163102 - DNA, 444 bp, Glycine max
  unsure (1)..(444): unsure at all n locations
tgtcgtgttaattcggaccaaagatctcaccctttatatatactatatgaaatnggngaaggaacatgagttaattcttttttttttttggctgaatatattatgtcatattgcgatcaaagctttgaaatatatatatatatatatatccatacacatatatatatatataaactcgttggccagtgtatcaaatcgtcacaagtagtaaagcactcgaaagttcgagtgtcgaatctttcgtacttagattaatgtaaattcaatttaaaagcaagacatactaatttaaaatataagataaaggacgctggtatataagataaagtagagataacagaattaaagatatattataagatatgggatactattaaagaactttagataaaatcaccagatagagaaaaacattaaagattatatataaagatacataaattc

SEQ ID NO: 163103 - DNA, 418 bp, Glycine max
  unsure (1)..(418): unsure at all n locations
agcttcaattattatgtcaggtctatatttaactngncaaaatcagggactaaaaaaaatattcttaaattctaaggattaaaaaaaatacatcctacaaattcaaggattaaaacagtaattaagtctattttataaaactggaagtgaattgtcaaggtggataacatatgacttatatcaaattgttgcaataaaaaatattaacaagtgattatctctttctaggttagatcggttaacattctttcttatttattttatattttatatttataatttatattgaatacattaactattttatccattgattgtgaaatattatatatacttgattataaaacatcgttagtttttcttcttcacataaaaaaattatttgactaatataacaattaataaaaacactttattg

SEQ ID NO: 163104 - DNA, 362 bp, Glycine max
  unsure (1)..(362): unsure at all n locations
tgttaaatgtcttcctgtcgattgaaacaatttatgatttctctacatcaactagtagatatcttatggtgaagctactggagagctngccttgaccaaagatagtcatcaagtccatgtagcctctagtctctactctctcgcctgcaaatccaaaaagtggaccgacatgaggatggacagtgtcaggggagacctcaagtctctagaaggtttttcaatacatgatatcggtggaactgcactagtcgataaggaccctaaacaccatgaagtttgcaatgataatggagacaaccacggtgtcgtcctagttgacaggtttgatacccttcgaagccatatacctgaaagtgataaga

SEQ ID NO: 163105 - DNA, 284 bp, Glycine max
cacaaagcttcatatgccgagttggagtacccacaaacaaaatacacaccttcgtaataggctaaaccatgcctaatatataacttaccttatgttttaatccaacgtgaattgagttgatggtcctaaaaatatattgataatatggacatacatcaccaaatgatataagacaatctagaacaacagaaaaccttatactagaggtagtatcattcaaggtatcgaaccaacatattagttattacaataaaaaaataaagcctacatctccattctatttg

SEQ ID NO: 163106 - DNA, 312 bp, Glycine max
ccacagagtggtacctggagatatgtcgcgggggtaggaaaccttgggacgtcaaggggggagctatagcccaaaaccaagcttgaccaattccaacccaacccgagcatagtcacgcagtgagaacctgtgacgtacctaaacaggcgagctcctggcagtcaaccaataaaagaacaaagaccacaaacccaggaggcctgtgtggtggctggccagctatgaatcttgagggcgatctggaatttggcctctcggaatcaacaaccaagggtgagcactcattacacgccttaaaaggagacagaagtt

SEQ ID NO: 163107 - DNA, 318 bp, Glycine max
  unsure (1)..(318): unsure at all n locations
agcttcgagaagagagaatatcttaactggcggngccttttctctgctgtgggagcaccctttttgaaccaagagccatcatgctctttggcggtaccaaaagaagccatcacagcagcacccattaaaaaggatctcttgattggaacctaaggttcaaaatcaagaggaaatttgaaatgggggaaaaagagagtgacaagctgtggatatggtaatggagcatttaatcgcaatgccttatgcatgcgatatctgactaaatgtgcccagtcaaatttacgccctgtatgaaacgctcacatgaatattacatct

SEQ ID NO: 163108 - DNA, 344 bp, Glycine max
gagcggcacccgcaaaaagagagaaagaatcctttatcacctaaaaagaaaacgtgccaagccacgaatacgaaccgataaccataccagaatgtgaagagaattgcttagaaaacaaacacgacacaaggcttagcatgaaggctgtaatgtaaataatatggctgcgccactgcacctccaagagaaacggaacacagatgatgactcccgcgcacaggaaacataaagaaaaacgccatacaacccaatgggaaaaatttcaaccgactaacccaggtgcgccatcgatcaaagatgtcaaaatgacagcaaagcaaggacaacgcaaactgctagcatga

SEQ ID NO: 163109 - DNA, 278 bp, Glycine max
tatctttggtctcatgtgaaacacactggttaatcctaactagcttttcctttaccattttctacctagcctttcaaagatcacatgtagggttcccttcatttcatttgggagcaatttgaaagatatcactctttgaaaatgagggtcctctgttttttcactttttcctggtactgaagaagactagcttcactttcagcctgtaatttgatttgggcttccttcaaggcttgaacttcagcttcagctttactcgctcgctcatcgagtatttg

SEQ ID NO: 163110 - DNA, 413 bp, Glycine max
  unsure (1)..(413): unsure at all n locations
acctgaggctgcagcttcacgaccggataagtaggttttttttngtttttaatacatattattttctaaaaatattttattctataaggatttttttctctcactccttttactaaaaaagtatacattacgggttgcaatgctagttagtattaatactattaaataaataaataaattaacacgaggccaagtggaagtaataaaaccaccgaatagagtggatccttccatcgtacaatgaagtaggcgcccccacagcgtcccctaaaaagtcagaactcaaaaaaggcaaccccgaaaaatcaaaacttctcagttactgtgccacgtcaccgcattcgcattgaaagcacacgacacgcgtttcccatgcaggtaaaacaaacatcacaacaaaaaacgcgttattt

SEQ ID NO: 163111 - DNA, 394 bp, Glycine max
  unsure (1)..(394): unsure at all n locations
ctccccctcctccaacactacaggggtcttcaaaaatgtgttaagagtatcctcatcaaacttcactaagtgacctctcaccctcacctgcttaggtgatttatcctcggggtcatagaggttcacataaaactccttcacaatagcaatgtctatgttactgtcagaaaaatcagtcagcttctcatcccaatggcctttctcgagttcctccttgaactcatcaaactctgtgtaatggactaccacattcctctctggtagtagctntcgtggcactacaatgtcagtgtatctctcccaagcctcttgggatgtgaatctggatctatcanatctagctggggtaggtgtagagggtgctttcctcttcttagatgccatattcaaaata

SEQ ID NO: 163112 - DNA, 418 bp, Glycine max
cagcttatccttatggcttgcctgcggactttatctcctgtgccactctggaagattaagccaagcccctactttcgaggggcaactccccccttatgacgactatcccgggcaagacgatgaagaaggagatacccatcttggccgcctgctccacctcaaagatccgtccccacatgaactaccccaaccgaacatagtccgccatatcccggcctcaccctcacccgtaaaagaatttgttcccttcgcggaagataagggaaagattgaggcgcttgaagagaggttaagagcagtcgagggccttggcaattacccattctcggacttagcagatttatgtctcgtgcccaatatcgtcattcctcccaagttcaaagtaccggactttgataagtacaaagggacgacatgt

SEQ ID NO: 163113 - DNA, 316 bp, Glycine max
aactggaagaaaaacggatgagaatgagcagtttgatgaggcagcatgatgtgcatgtgaaaagttatgctaccctttgatccgagataatacctaatagtgaggtgaaagcctttgtgacttgataagaccgcgaataattcttgaagccttattattaaggggggacatttctctactcttattacacctctcgagctgacctaaaggggggaaactcacatgcatatatgcaacccaagcttggctgccttatatatgggatgattttgccagggtggcagattacctttctttggagggagatcgaccaaac

SEQ ID NO: 163114 - DNA, 451 bp, Glycine max
  unsure (1)..(451): unsure at all n locations
atcttaagtcacctgaggcatgcaagcttcntgtgggtgtgcagttcaatgtttattattattatgagtgctcaaagggggtgttgtgcaaagttggagagtttcctcaaatcaaatcagtgggtttgaatcacttgtgggttgatgtgactattatggccatgatgttggtaggttacagactaattgcttatttagcactactgagagtgaggtagagctagctaagatacgtgtacacatagcaacagaacttggaagagttttgtcctaattaaactgcgtgaagaataatactagactagatagaatattgtacttctgatgcaaattatgtaatgaaattttgatcaactctctctctcaatgganntttttttagtgtaatttctacgcactttagtgtaacatggtttataatatccattactaaaaaaccttgtaaacatga

SEQ ID NO: 163115 - DNA, 464 bp, Glycine max
  unsure (1)..(464): unsure at all n locations
ggcttgtggggcttctatggaggctggatcttgagctttttgatgtcctttaatggtgattntccaccatggagatgcagcggaagacaaaggagaagaggtgagaggaggcgccatccactaaggaataagccatggaagaaggagcttcaccaccaagatgagccttggataacaagcttggagaggatgcttcaatggaggaaaagaaagagggagagaaagagagaggggggagcacgaaaatgaaggaagaaaaagggagagaagttgaactttgagttgtgtctcacaagactctgattcatcaaagttacaacaagtgttacacatgtttctatttatagactangtagcttccttgagaagctttcttgagaaaacttccttgagaagcttctttgagaaaacttccttgagaagctagagcttagctacacacacccctctaataactaagctca

SEQ ID NO: 163116 - DNA, 361 bp, Glycine max
ttttttcttctaccctgaattattctaatttggcctcagcttacgctaccgaaatactaaaggacttgatgaaaccaaatttgtaaaatttcttcacgagaaatctgcttggggcgaaaaatatcatttattgaattagtcctacatggtgttcaagaaacttctgcaaaagcttaatgttctggataatgctttgctaaacaaagtttccagggcttaatttttttcctttcttttctttagtgtctttatgtgagaattctggagaatgatgctttatttcctataagttggagagccaaaccgttattttaaggcaaattgcaatttgtccccctttcgctccatttcattacgtccc

SEQ ID NO: 163117 - DNA, 346 bp, Glycine max
tggctcgcggtgtccggaagaagacgaaagcttgtttgttctacttgaatggaagaagaaaagaagtagcagtggtcttccgagaagaggaacgcgtttttaaatttttaacttaaagggcaaaatggccattcactaaaattgctgggtgcaccagcaatattgctgggtgcaccaccaatattgttgggtgcacctagcaactccctatgtgttattaagtttgctattctcttttgaatactaaatctactatctccgcttactattttatctcaaatcttagttcctgttatatacaccgacacattgtacgattacaactatgcttttaatccatattgct

SEQ ID NO: 163118 - DNA, 251 bp, Glycine max
atttttcacgaatatttaggacaaccgacctggccaacatacaaggggaaagttacttacacgatcataaaaggcttaaagttcatcaggtaatggcatattccaagaacatatagaggtatcataaccttaaactaatcacagcatttatattctcaattgagaaaaatagaaaccctatcttcaaatgcaaaaaaaataattacatttgaaaatggatgtaaagctaatatggctttaaaaaagtgaat

SEQ ID NO: 163119 - DNA, 457 bp, Glycine max
  unsure (1)..(457): unsure at all n locations
ctttttgagaccaacctagactanaggaagaagatcgaatgngatgtgaggngaggngtgaggaaggagaccaaaagcttcagtaaggaagaagaagaanaaaatggtgagcaagaagaagcggaacgtgggagggagggagagaaacnaaaatgaatcattttttttaaataattaagtcaggggtacaaatgtattttccccttaagtgttgggtgcaccaacaaaaatgctgggtgcacctagcagcactcttgctattttgaccttttattattacttttattgtttaatgtatttgttaagaaccaagaattgaaatgagaaaaagatccccctccaattcttcttccnnctattatatctaataaaccccaactaactaactaactaaccccttaacaaataattcctgactgtagtactaacttataatagtctaactatgtaatcactt

SEQ ID NO: 163120 - DNA, 159 bp, Glycine max
ttataatagacctcccatctttaatggagtgggttaccactactggaaaacccgcatgcaaatctttatagaggcaatagatataaatatttgggaagccatagaacaaggaccttatgttccctctataatagccggaagtccaacattataaaaacc

SEQ ID NO: 163121 - DNA, 275 bp, Glycine max
agctctgagccagaatactattttaccattaaccttgacccagggtgagaatgtcgatccttaccctcggaagcaaaaaagaagagaaggaaaatttccgatcaaagaagaaatagagaaggaaaatttccaatcattgagaaagccaataaaaaagagagaaggaatattttcaatccaaggataaaatagaggaaaggaaatctccaatcaaagagtgggagaaagcgaaaagaaaagaaagaaaattccccacccaagagtgggagaaagtt

SEQ ID NO: 163122 - DNA, 443 bp, Glycine max
tgaagtgaggaagtgtggaagggtgagactttctacttttattcgttgaccacagagtggtacctggagatatgtcgcgggggtcaggagaccttggggacgtcaggtggtgcgctattgcccaaaaccaagcttgaccaatcctggcccaacccaggcatagtcagttagtgagaacctgtgatgtacctaaacaggcgagctcctggcagtcaaccgataaaagaacaaagatcacaaagcaaggaggcctgtgtggtggctggccagctatggatcttgagtgagatttggaatatggcctctggtaatcgattaccaacggtgggtaatcgattacaaggcttaaaagtgaagacagaaagctaagatggcctctggtaatcgattaccaagggagtgtaatcgattaccaggcttataaatgggatcatgaagtcgag

SEQ ID NO: 163123 - DNA, 189 bp, Glycine max
ggaagagaacacttacaggcacctgctagcccaacaaaagagcgtcattgaaaaggctgggttgggataccacaaccactagaacactgaaagctgacaaaatcttttcaaacgtgcaaaagcttccagctcacccatcataagatgctactactggatgaagaagggacatcctcccttcaattgtcg

SEQ ID NO: 163124 - DNA, 329 bp, Glycine max
  unsure (1)..(329): unsure at all n locations
ggacactatagaaactaagcttggagtttccagtgccgatcgcttcgttantgttcattcttcntcnggcttcaatccatcagtgggctttccttcagtgtccagcatcttgggatgttcccagcctttgatgacagctttccaggttctgctatccagtgatttgaagaaggccaccatccttgctttccagtattcatagttggttccatccagaattggtggtctgttcactggtcctcctttcttctccatgttcatcagaatttatctccctagatctcactcagagatatcgactgcctgctctgataccaattgaaattttg

SEQ ID NO: 163125 - DNA, 386 bp, Glycine max
  unsure (1)..(386): unsure at all n locations
gacctataaaactcagcttcaccatcatgcagaagaaacgataataatatcttatgctgaaaagatttcctttctttgtgaagaaatttcataaatttctcccgaaaagaagaattgtctggcctctaaacttcctccttgggtgataatcacaagaagattctcaagcccttagatgntacaaatgcaaccaaattggtcacatcaaggccaattgtccttcaaatgaagagtggcccgagaaaagcgaaaagaaaaggtttgatgaaagaaggactaacaaagcctacattgcatgggatgacaatgattcatctgatggttcatacaggagattaatcttctaccaaggattatgatagtgatgagaacatctcttaagaatg

SEQ ID NO: 163126 - DNA, 457 bp, Glycine max
agcttgaccaagaattatgtgaatgggttttatgttgaattctgcggtgccctggggccgagatgatggtacagagggtgaaccaagagctgaagtttcttttggtgaggtagccatggaaaagcagagcgtctggaatgaatttcgaaatttctgagagctattgggaaatgctgatgaaaacacgaatgccaccaaaatataaattcgaatgaagaatgtagaggggcgtgtgatgcaacggtcaaatctgttttggcccagtaatgaacgtgctattaattttaagtgattcgtttgggcacgttcagatatcagtagctgctataatttctctagcagacaaatgcccagcttgctcctcagttttcaaactgatttgcatccaatgcctttcgtgaaaatatctgctatttgctcctcactgtcaacatgctccagtgtgataacttatcat

SEQ ID NO: 163127 - DNA, 445 bp, Glycine max
  unsure (1)..(445): unsure at all n locations
tatgggtaaatctgggacctagccatgtagaagtctccttatatgcctttgcctccctcgcccagtattatgatcagccattgaggtgcttcacctttggaaacttccagctatcacccatggtagaagaatttgaagagatcctaggatgtcctctanggggaaggataccatacctcttctcagggttctatccctcattagctagaatttctaagatagtccaaatctcggcacaagaattagaccacagaaagcaattcgaaaatggagtggttggaataccgagaaaatatttggaggcataagcaagaatcttggcaggtaaaggcgaatgggccccgttcatagacattctcgcactgttgatcttcggaggagtcctctntccgaatgtggatgggttggtggacctagcagcgatcgacgcttttctcgcctatca

SEQ ID NO: 163128 - DNA, 280 bp, Glycine max
cacaacaagtttaccacaatcaccaaaccgcgcataaaacgcaccaagccactattgcccacctccaactgagcccacggacgtccacgtagcccaaaacctcggttcactcaacaccgggtccccatcaatcctgccaagcttccccaacatgcaaggaatacaacattcagacagcacaaactatcacagcccagaaaacagggcacaggcagaaaactctgcccaaaacaccaaccaaaatcacaacgcttctcacttaaagaccccagtaacaacc

SEQ ID NO: 163129 - DNA, 223 bp, Glycine max
tgtccacactaccgcggagtcgccaacgattttgttgaagtgattaatagcttctcatccttagagtgtgcgcccatcttgcgacagtacatctttagaatgggtttgggacagggcgtccctttatacttgtcgaagtccggcactatgaacttcggtggaaataacaccagtcggtactatacaaaatctgcatgtctgcatcggatatgcccaattcttc

SEQ ID NO: 163130 - DNA, 448 bp, Glycine max
ccaagcgactgagcatgcagctggggaagggtaacaaagcctgcttgttctggttacaaaaacctgcaacaagcttcatgtgcttatgatagagaacaacatgacagcttgtattagagtcaagccgtgaactcaactcaattctaaacatagttttctttttctgatttctcaattagtggaaaccatccctactctaactttatttatgatggtttaatatcgaatctcatatacctttgtagaattaacttattgtcctaaatatactataaggagattggagaaataagtgggaaacatgatatcaaaattagggagcaaggaactgaattttttttaactcaactgagattacgttgacaaaaagggactttcaataatcatggctgctattagaactatagtcatggccacaccaaactatctcaatctggttatctaccac

SEQ ID NO: 163131 - DNA, 448 bp, Glycine max
  unsure (1)..(448): unsure at all n locations
nttgttatctanctcataagcttctagtgagtctaaatttttctaccgaatgccatccatgtactccaaaacaaggactntttctgtagactataattggaagcaaccagattatataaataagaaaaattatggcnaaaagataaaagaataagaataaacaggaagcacattcattttgaacccctaacaaacttaaggtaccaacacttatccaaccactggaaatttgcactaaacatgatataaaaacacattaataagctaatcagcatataattatggagaaaattcatttttttacttggtatggcaccttgtcgggaaatatgtaaaaaacaggttacttctattctcagattgaaataaaaatatgtaaaatacattaatatgtctaatcaggcctggacatgataattaatggcatcatgtncccattctaagaagt

SEQ ID NO: 163132 - DNA, 441 bp, Glycine max
  unsure (1)..(441): unsure at all n locations
agctaagagaaaagtcgatctattgagtgacttttnacactgattgaagaagacccataaatactagaagctttgaagacatgaagaactaattaaagcactcattcaaactctttatggtaaaagctctgtgtcaattcatttaaagattagaatagcctctcaaaacaccttgattatcttgacagaaaagtctacgtgttaagattgtctatccatatgtaagatgattaagtgttagtcattgtgcaatcaagcaaacaaatcttcttattcgcgttagagcagatagtgactttgtaagacaaataatattgattataacaagcttgagttaacgagctagaagtggaagtgataaatacttggtacttattgaagtttgtggaacttggtacgttaccaagaaattggaagtagtctcggtgcttgagatggact

SEQ ID NO: 163133 - DNA, 228 bp, Glycine max
  unsure (1)..(228): unsure at all n locations
actaagctgcgctgggtttccgctatgctttggggttgataatgctcaaaaagagagatcaagaaatgaagagccaattgttgatacatgggcggagatgaaaaggatcatgangaagcggtatgtgccggctatttactcaagggatttgaaattcaagctccaaanactaacccaaggcaacaagggggttgaggagtatttcaaggaaatggatgtgtgctcatg

SEQ ID NO: 163134 - DNA, 383 bp, Glycine max
tgagatgaggaagtgttgaagggtgattctttctgcttttattgttgaccacatagtggtacctggagatatgtcacgggggtcaggagaccttggggacgtcaagtggggtgctattgcccaaaaccaagcttgaccaatcccgacccaccccgagcatagtcggtcagtgagaacctgtgatgtacctaaacaggcgagctcctggcagtcaacagataaaaggaacaaagaccacaaagcaaggaggtttgtggtggctggccagctctgaaacttgattgatatgtgagatatggtctctggtaatcgattaccaagggtgggtaatcgattacaaggcttataaatgaagataggaggctaagatggtctctggtaat

SEQ ID NO: 163135 - DNA, 214 bp, Glycine max
gtttactcttataagcgagctgaagtgggacgatcttattgatttatgcagcatcctctcttcaaaagatctgtctataccaggtgaacgagttattattaaaatttgtccatttaccttgaattagaaactaaaaaatatatcatttttttatgtattgcaatacatactagtcgaatatggaaaccgtaagagttaaatctaaccaaatcac

SEQ ID NO: 163136 - DNA, 307 bp, Glycine max
acatttataattcgattctatttaagatacagaataccagaccggtgacagaactttgaattcatttttgtctgttggagccaatatagaaatctgatctcttctttcatgagtatgtgctctttggtctctgctcttcaatggaactctgcatgcaaagatacatccacaaatcaatttaacggtctgatgttaccactagaatctgaatctcatccataattgcagatgcatacatttcatcctgtctctctatctcttcaatgtcaattgagatcgcgatcgtgatgtgtttgagaatcgatac

SEQ ID NO: 163137 - DNA, 293 bp, Glycine max
  unsure (1)..(293): unsure at all n locations
tgagatgaggaagcgcanaatggagaaactacctgctnatactcgttataccacagagnggtacctggagatatgtcgcggtggtcacgagaccttggggacgacaagaggggtgctattgccccaaaccaagcttgaccaatcctgacccaacccgggcatagtcggtcagtgagaacctgtgatgtacctaaacatgcgagctcctggcagtcaacagatgaaaggaaccaagaccactaagcatggaggctttgggtggctggccagctgagaaatctgtgtgatatatg

SEQ ID NO: 163138 - DNA, 434 bp, Glycine max
  unsure (1)..(434): unsure at all n locations
ggatcttaagtcaccgctgctgcagctgagatatgaagtgttgatggttttcttcctgctttgatcgcagaccacagagtggtacctggagatatatcgcgggggtcaagagaccttggggacgtcacgtggggtgctattgcccaaaaccaatcttgaccaatcccgacccaacccgggcatagtcngttattgacaacctgtgatgtacctaaacaggcgagctcctgtcagtttacagataataggaacaaagaccacaaagcaacgaggcttgtggtggctggccagctgtgaattttgtatgatatgtggattatggactctggtaatcgattaccaagggtgggtaatcgattacaggcttaaaattgaaacagaggctaaatggtctcttgaatctattacacggcgtgtaatcgattacacgcttg

SEQ ID NO: 163139 - DNA, 465 bp, Glycine max
  unsure (1)..(465): unsure at all n locations
ntgatgcatgccatgtgtttggagaaattgcatcatttatctactntgctcttctccgntttcatagtctttcatcatgatactcaaacttatgattttattctctgaatcacttgaagaatttatgacattatcttcccaagtgatgtatcctttgttttctttcttctctttgaaattcctcttgtcagatttttcattcttcttttgaagacaggacaattgaatctcatgtgcctagattgatcgcattcagcattttggggctaaggaggaatcttcttctttcttctttcatcatcatcttctttcttctcaagtttttttttatgtagttgcatttctctctaccattatgggaataaaggaatcaaattcaatggcttcccatatctttaaatctattacttctttaaagatctgcattccgagtttccaatgatgataaccctcaccattgaacat

SEQ ID NO: 163140 - DNA, 311 bp, Glycine max
  unsure (1)..(311): unsure at all n locations
gatctntaagtcacctgcggcatgccagctaggtcagagacgtcttcnttggcctatacaccatgaaggatgtgtgtgattttgatgaaagctggctgcctctcatctctgagaccagatataagttgtctcaaagtatttgctaataactcagctgtcaccctgttcatacagccaacccatgatccggtgctcgtagcctcagaagactggggatgattgagcttggccattaaagccatgaaggaagcattacctgcctctagggaagctgccaagcacatggaactcgtcagaaaactttctgaagg

SEQ ID NO: 163141 - DNA, 413 bp, Glycine max
tgaagagaatgctagactggcgaactttatttgtggctattatgagagaggggggagcacgaaattgaatgaagaccaatggagagaagatgagctctgagttgtgtctcacaagactctcattcatcataggtgcaacaggtgttacacatgctactatttattgacgatgtagcttccttgagaagctgatttgagaaaacttccttgagaagctgttttgagaaaacttccttgagaagctggagcttatctacacacacccctctgataactgagctcacctctgtggagaagcttcttatgatgattcctaaagaagctagagctcagctgcgcatacctctctaagagctgagctcacctccttgagatgagaagctagagcttagctacgcaccctctataatagc

SEQ ID NO: 163142 - DNA, 382 bp, Glycine max
  unsure (1)..(382): unsure at all n locations
ccttgaaactagctttccttggtcttgctgggttcatttttattataagagaagatttaagccttaatttactatctcctgcgaggatattctctctacaacatattcccaaatcgcaatggtgaaatggcaaaatgattctaaagggtgtcaaatttagggtgatccacgataacgagttgcatcatagttattgaacaagttagtggtaaaaaaaagaatttggaaggaataagaaatgattgggagaataacaggtaaacatttgtaatgtaaactgactaaatgtttattatagtaggacttgaaccatattatttatnttcttattatatttataaatgatttatttatctttcaagataataaaatctttatttta

SEQ ID NO: 163143 - DNA, 400 bp, Glycine max
  unsure (1)..(400): unsure at all n locations
tcgccgctcaatctatggctggaagcaatcttcttcgttttggnnngggcanagntcagctctactctacttgagtttggtatgactcaatgtgaagctgatcactcactatttttccttcattctaagtctagactatgcctctatctcattgtatatgtggataacatcgtcatcactggcgatgagtccgcaggtatcctacccctcatatctcaccttcatagtcacttttagactaaggacttgtgccccctcaagtacttccttggcatcaaagttgctcaatcctcatctggaattgtcatttcctagcaaaattattcctgagtcatactgccatggatcctaatatgaagcttcttccaagtcatggggagccattcaaaggccctataag

SEQ ID NO: 163144 - DNA, 432 bp, Glycine max
  unsure (1)..(432): unsure at all n locations
tgaagcatgcacactctcancataatatatcaaagcaccattatgttcaaagcctcaacgatcgaacatggtatatcgtaattaaaataccaaattacaaaataaatagggagaggaattcataactgaattacatcaaaggattatatatgaaagttcttttattttcttacaggttattgctgaacacctttctgaagaacaaatcattggtttgaaggaaatgtttaaatccatggacacagataacagtggaacaatcacttttgaagagttgaaagctggtctgccaaaactgcgtactaatgtttctgactctgaagtaaggcaattgatggaagcggtaagaatcttgtctgattataccttagcatttttggtacttttgtattacctaatcccctgcagttaactttcttcatttcgtaactt

SEQ ID NO: 163145 - DNA, 217 bp, Glycine max
ttaagatttctatgggacgaaagggatcctcttcataaaccttcacccatcacactattgggacgtctcaccatgtgcatcgccagtggcaatcttatacagtaattggggctccttacactcattaactccatatacacattacatgcttagtgaagccgccgaaaatctcaagcgaaataatgatatactatcaaataagtctaaagaagcgaat

SEQ ID NO: 163146 - DNA, 259 bp, Glycine max
ttctgctaaccaaatcctatggggatgctggagtaatgaaatgcgatggaataatggtgcaaagaattattaccttcttaacctatcactagtcatcaatctggattttggggaaagcaatgaaatcattgctttacttcttcaaatatattgattttacaaagcctatagaaatatagctgttggtcttactattcatccttttagttcagccaaatgtgtgtatgagtaagtaatgatgtaatcccaaaataataac

SEQ ID NO: 163147 - DNA, 420 bp, Glycine max
  unsure (1)..(420): unsure at all n locations
cctgagctgcaagctttacccctttagcttcaccggagagggtatnttctctatcacataaatccttgctctatctacttttatccccttcacagaaatcttatgtcctagcacaatgccttcttgcaccataaagtgacatttctcccagttaagcaccaagttggtatcttcacacctttttaatactctctccaaattagatagatagcattcaaaagaagatccaaaaatagaaaagtcatccataaacacttcaatacacttctccaccatatctgaaaagattgccctcatacatctatgaaacattgcaggagcattacaaaggccaaaaggcattctcctataagcaaacacaccaaaagggcaagtaaatgcagccttctcctgatcattacggtttacaacaatttgatt

SEQ ID NO: 163148 - DNA, 475 bp, Glycine max
  unsure (1)..(475): unsure at all n locations
ctattaaagaaaatcgatcaaccttcaaaagccaagatatatctcctgtgttccataaaaataatctcgtaacgctacacaagccatgaatgatattcaacatacaaaaaaccaattttacctatgaaagaatccaaaattaattttatgacttatcatgcttaacatgtatattgtgtgtcatttaatcatcataactcgaccttactctgagtgttagccaccatgagaatgaatttaaaattaattctgaatccatttagtgatagaaatgatgttagtaacaattaaaaataggataattggacgtgctttatcacagtatagacatgaaaacctaccttcacgttagtaacatcatctctatcacttaattgactgtcgaatcttgactccattatcatccttcttgataatgatcaacgtcaactcangatgactaaatggcatgcaatgagcatgcanaacatgatac

SEQ ID NO: 163149 - DNA, 335 bp, Glycine max
atgtatatatgccaaaaggtgattaattgaacaatgtattggcattgctcttccgcataaatagttaatcattttatacaaaaaaaaaaatgatgcccatattggcagtattggagtgcccgtaccccattagaacattaatcattaatcatccctcacaacccatgagaaccaccagaataagaataaaacccccaggaaataagaaatcacaaccaattaaatattccaacactccttacctctttaaaacaaaaaaccatagggatgcatctttgcaaggttgagaaaaattcccagcacattgttcccatatgcctgcagtgcatttgctt

SEQ ID NO: 163150 - DNA, 418 bp, Glycine max
  unsure (1)..(418): unsure at all n locations
ctacttcaaaaccccttgaactacttcacattgatctatttggtccctctanaacaatgagtttgggtggtaattactatggcttagttatagtagatgattactcaaggctcatatggactttgttttaaccaaaaatgaagcttttggtgctttttaaaaacttgccaaggtgattcaaaatgaaaaaggtctcaacattgtttcacttagaagtgatcatagaggtgaatttcaaaatgagtcttttgaaaacttttgtggagaaaatggaattcaccataatttttctgccgcaagaacaccccaacagaatggttctgcggagaggaaaagtagatccctcgaagaacgttgaagaacccttctaaatgaaataaggctacctaagtactttcgggctaatgctatacatact

SEQ ID NO: 163151 - DNA, 401 bp, Glycine max
agcttatgccacatcaaccaaagcgaatatactattattgttggtaatcgacatacagaggataaaaatggattaaagcgaaacttcttaaactccgaagaacaaagatgaaacaaaaatgagggactaaagggtatttacgtgaaaaaatcacatgaaaagtgagagttactatatttatcgaccagggaactcatatctgcacatgggcggtcgaagtaaaaatcaaatttctattaagttccttaacatcaaaactcctacatttcctaagtaacttcttggtactaatcatattttctctttatataatattatatggacaacattggctttttactttatatacattaccacgaaaaagatataccgatgatcaagaatatcttctgtcaattcaa

SEQ ID NO: 163152 - DNA, 459 bp, Glycine max
tgcttgtgagctcctatggaggctggatctttgagcttcttttgtgttcttcaatggtgattctacaccatggagatgcagcggaaggcaaaggataacatgagaggggagacaccatccactatggaataagccaaggaagaatgagcttccccaccaagaattgccttggataacaagcttgaagaggatgctttaatggaggaaaagaaagagagaacgggggagcatgaaattgaaggaataacagacggagagaagtggaactttgaagtgtatctcataagactgtcattcatcaaagtcccaacaagtgttacacatgcttctatttatagattacgtagcttccttgagaagctttcttaagaaaacttccttgagaaacttctttgagaaaaattccttaagaagctagagcttatctacacatacccatctaaaaactaagctcaccct

SEQ ID NO: 163153 - DNA, 401 bp, Glycine max
gatccttaagtcacctgccgcatgcaagctcgtaaagagctatatgctggtttattgtcttcccattcctctctctggaaggggtggaatataagatattctaccctctcagcctttaggctctaataaagcataattgtgttgtatactcacctttaaaaccttgctctcttctttatatggagagttatcttctacattaataacgcttgcaataaaaccttttgagagaaaatgctttgtttttataaatttcagatggatgtgcggactaattctctcgtcggccatcagggacagctgacacagataacgaaaagcctacgattgccaacaatggtgtggttcagagcgaaaaacaactctacctattggaggcgatggctgggaaaaatcacaaa

SEQ ID NO: 163154 - DNA, 328 bp, Glycine max
taatgttgactttttgttcaaagatctgagtcctttttcaactcatcaagctcattattagaacggtgcattctttttgtactaagagctcttgcttaaacatttccttgggctcttcttctgaatcttcaaaacttgtggttaaggatttcaccctttctttcgagtcttgaaaatccttaagaagaatcttttgcccactggatacacttttgtccagtaatgctttgaccttctcacaaacaaagttgtcttgtacatcactaggtaaagtggttcttaggacaaaactaactaaatgacctggatggattttcctgaaatcctc

SEQ ID NO: 163155 - DNA, 419 bp, Glycine max
  unsure (1)..(419): unsure at all n locations
agctctaaaatntgaattaaaacgttcagaaactgctggtaatcgattaccatatatgtgtaatcgattacacagtgcaaactttgaattcaaattttaatagctgttgtaaatcagttttggccactggtaatcgattacatcctctcgtaatcgattaccagagagtaaatttgttgaaaaagactttttaacttaaaattcttggccaaaccttttgctacttcaattggaattcccttcctatttaatataccctttctaagactctagagattgtcttgatcatccatcttgaatatctttaatttctttgtcttgaataaagctttgagacgcatgtgaaactttggcatcatcaaaacattcagcttgatccctttttcacatccataactgggaagcttcctttacaacaa

SEQ ID NO: 163156 - DNA, 418 bp, Glycine max
  unsure (1)..(418): unsure at all n locations
tacgcgacacttaaatctaagctgcaagtttgtctcgatcgantaattaattgcagtcttctcgtaattgattacacagttgtttttgagacaatgactaatttattcacgagtctctgctttaatcgattatcatgtgatataatagattacttctctttccataagtgttttagaagtgaacaagaacactttaattgattactttgagtatctaatcaattacattgttcttgagctatttctaggttttgggaagaacactttaatcgattaaaaagataatctaatcgattaccttgtagatttaatcgattaaagatggttataaacaaccaccttgtgttcactcttantacacagttttctaaagtgtgaaaaacaacgaaataagcttctaaatgagctaagttcacat

SEQ ID NO: 163157 - DNA, 401 bp, Glycine max
  unsure (1)..(401): unsure at all n locations
agctcgcttctacagaggttacacaatgtttatncctangccttcttcatgcaattcaatggttaggttagctagatctgccatttgttacgatttaaatggattgcaaaattatttttgttcttgaggtggactccgttgtgtttgagtgcaaaacattttttctttcccaattcaactttaaggttaagtttgtctttttcaaacaaaaaaaaaatgtcccacacactactcaatcaaatgagttagattcatttatgactctatcaccatatttattcgtaataagatttataaggaggaaagaaaacgataaaatacgagatattancctgaggtaaataactgaacaaacctcctttttatgttccctcttcaagagctctctgttatgacaatga

SEQ ID NO: 163158 - DNA, 409 bp, Glycine max
  unsure (1)..(409): unsure at all n locations
atactaagctgggaagctagcttctaacttcggaccgtagatcttgtgtgtctttgaagaatgaattgtgaagcacacacacgtatgtacgatgtctcacacncaacacacaccctcaagatatacatatgcacacataatctctcggctcactcacgcacacactctctcatggcgcggtctctcacacacactacactagcacttgatcttactcgtcacgcacacagagagaaatacatacacactacctctgattgactcacacgcacacactgatggcgagacacatatacaatcagtgacatagacggagctcagagaaaatacacgtgcacacttacggacaccgtatcacactcgcatacagagaaacactcgcactctgacactcatactcacatacaca

SEQ ID NO: 163159 - DNA, 363 bp, Glycine max
agcttacgcgatctgagaaagtgctgtattgtgattgacatcgaaaggaggtgctttgtcgcaattccgtgagttttcgtacacttcttccagagctaaaaaagagttaatccatcatccgtgaagattcgcaaccttgccgaaggaaaattagtatcgctcccaaattcctaaagtttcgtaacgttaccgaaaaagaattacctaaaaaggtaaagggggtgcatttattaaaaagggaagtacaaatagcaatcacgcccacttgggcctttcacattcttcctgtagaacgctgctgcttttggaggaagcaaccttgctcgcctgggcgatctgggtggcaagctccttccctatttt

SEQ ID NO: 163160 - DNA, 166 bp, Glycine max
  unsure (1)..(166): unsure at all n locations
gacactatanacactcaagcgngcagaatccactccaatgccggcgcagtatgctaacttattctcatactcactcaataacgcaacggccgccacaaccccaaccaaagactcccaacctaccattccctgaggatacacatccaaccgcacatgtgcctatcat

SEQ ID NO: 163161 - DNA, 364 bp, Glycine max
agcttcttgatatattatgcgccttaatctgacctctgagttaaaagctatgaccatttgaatttctcgagagctttcgttgttcaatttcggatgtctcgatatattatgcgcctgaatttgaccttcgcgtgaaaagttataaccattttaattgctcaagagctttcatagttcaatttcaagcgtctcgatatattatgcgcctgaatcggacctccgagtgaaaagttctgaccatttcaatttctcgacagcttccgttgctcaatttctagcgtctgtatatattatgcgcctgaatcggacctcccagtgcaaactattgacatctgaacttctcgagagcttccccgttcaattt

SEQ ID NO: 163162 - DNA, 386 bp, Glycine max
acggacatatagatactcagctctaactcggaggtgcgattcaagcgcataatatatttgtttctctctaaaataaccaacggaagctctcgagaaattcaaatggtcataacttttaactcggaggtccgattcatgcgcataatatatcgagacgcctcgaaattgaacaacggaagctctcgagaaatgcaaatggtcataacctttcacaccgaggtccgattcaagcgcataatatatcgagaccctcaaaatgtaacaacggaagctctcgagaaataccaatggtcataacttttcactgggatgtccgattcacgcgcataatacattgagacgctccaaattgaacaacggaagctctcgaaaattcaaatggcata

SEQ ID NO: 163163 - DNA, 409 bp, Glycine max
cgcttggtatctcaatggacactatacagtttattctatatgatatgagtgaagatgataagattaaatcttttactttttctgcaaaagtggatttttcgggagcttattactttcgtttttagatcgtcaagcaattcttttggaaccttactagtctatttggtaattaaggaagtggtccagaaatacaaaagagaaagataacgaacgttgctagcttgatgaaattgctttacaaaaggcgtacgtgtataacaatatattctctcgcagctaattaaaacagttagaaatgtatataatgaaaaacattcatcaatctttaaacaattgatggctactatcaacaaccaattactatcttgtaatatttttttcttaattttctcttctctatttcttctgt

SEQ ID NO: 163164 - DNA, 248 bp, Glycine max
tatcttcctatgtggagtaaagacccacataagaaggcaagtgtgtctcacttatttaagtggagaggaatcatattacagagtgagacacaatgagagagactcatttgagagggaaaaatatttatagagagagaaaatcattgggattctcgtatacctaccggagagcgttttttatattgcaactgcggattcgttcaccgttggatcgggttgatctttggacaacaggttctacacacttg

SEQ ID NO: 163165 - DNA, 387 bp, Glycine max
  unsure (1)..(387): unsure at all n locations
ctgcagcttctaaggaagttntcttaataaagcttctaaggaagctacctagtctattaatagaagcatgtgtaacacttgctgtcactctgatgaatgagagtcttgtgagacataccttaaagntccacttctctccgtcttttattccttcaatttcgtgctcccccctctctctttctctccctctttcttttcctccattgaagcatccttccaagcttcttatccaaggctcatcttggtggtgaagctccttcttccatggcttattccctagtggatggcacctcctctcacctcttctcctttgtctttcgctgcatctccatgatggaaaatcaccattaaaggacctcatttgagctcaaagatccagcctccata

SEQ ID NO: 163166 - DNA, 404 bp, Glycine max
aagatcatcatttgctctggtttcatcaacttatgaattctcattgcttccttttgcttctcctttaaaatcttgtccatgaatatgcatttgttataaagattctgcaatatcatttaaaatatcctttcttcgaggaatagcattagactcatcaaatgaaacatgaatagattcttccatgaatagattttaagttatattgtacttgtcttctttcttcctcacttcaatttccctaagattttctgttgttgtatttccagccaccatggtgggtacataagttcctatttctatggcttcccaaatatttaagtatattgcctcattgaagatttgcattcgggtttgtcacaagtggtaaccctctccattaaaaaaaaaggacgcctatttattga

SEQ ID NO: 163167 - DNA, 420 bp, Glycine max
agcttagtttctaggagagcattcatccatagataaacctttacttctgtttttttagatcctaacccatacttgccttgatttaggcactcagctttcattcacggaattacagcatacacatttattaaattgatccatatatatacacacacacacacacacatatatacagaaacagtatatgtatgtacataaatcagtgtgtttatgttgtttactttgaccacttcaattttgacccggtatttcccccaaatttgggacaaattttctttgaaccaagcttcttgtggatgatgctctcttacaacctaagacaaggtagcaggagataacactatataggctcagggttcaatcaatcagtaattcattcagctcaaactgggtgcaagggataactcattcaagcacatg

SEQ ID NO: 163168 - DNA, 298 bp, Glycine max
attacactggctatttaattgattacacacaactctacttggtttctctataaatcaccacctcgtggtctcactttgaagagagaaaaacaagcttttagaataattgtgtgcgactcacaccttctagactttgtgtttggaagatgtcatgggaaaaagtgagttgtgaatgtcttgtgagatcaagaagagactcattattcaagcaaaggtgtctacatgtgattgcatacgtcgcgtctctccttgactcaattttcatgtgttgacatgttagcatttgcatgaatttccg

SEQ ID NO: 163169 - DNA, 343 bp, Glycine max
attctaaacaataatctacttgttttttaatcgaacaataaattatgataaataataatgtttttattatcactatctttatttgtaagagttaaaattagtatttttctgggccagcttaattggaatttaatctaataggaaactggcaaattggatgtgtttctggtatcttttattttataaacctcgtatattctcgagcattatcaaaactcaaacttaggattacttattaactagaacaatgctgtgccaattgatcctaatactaagtgataactttatgaaattggaaaagtcctattgaaggccttgtctcaaatggagtctacagtttgct

SEQ ID NO: 163170 - DNA, 364 bp, Glycine max
cctccacaaacgacaaggaaagaaaagagaaatagaaaatcaaacaatccaagatcggacgaaaccaaaccaaaaatagaaaaagaaacaaagaaaacaatgaaaagaatctccggatcacacactgcctgaacaatgcgcaaaattgtcaaaaagaaaaagaacaaaggggcaaacaaaaacctgtttgaaacccgagggatgcctgaagcaaccacctccatgctcgctccacgctgaaccaaagagaatagagaaataaaccgacaagggaaaggccagaacacccaacagcccaaatttcccaccaaagctcaactctctaaatagtcccattgatccatgccttcacatgctatcttcg

SEQ ID NO: 163171 - DNA, 367 bp, Glycine max
  unsure (1)..(367): unsure at all n locations
cctcaggcattctcaaattttgttgtgaannaagaagcaagcacaagaaataagcctatgttattgtgcaagctatctatggggccaaccacatcaaatgattatgatcatggatggctcaacattctcacaaaacgtaaaccttatcacttcccaattgagcttttcaaacctattatgacatgtagaggaaaaataatcgacttcaaatcacaaaacgtccatagactttcatttttaaacacaattaccccattgcttgaacatattgtataacttaaaaaaaaacatgcacatctgttcatgccaacagaattgacctaaaatattcgactacgaaccccacacaactaaagaaatcaaccat

SEQ ID NO: 163172 - DNA, 429 bp, Glycine max
ggatcttaagcgactgagctgcagctatggtagacgaaccctttaatttatctctccgaaaagaaaaaatgaatggtaacaacaaccaccatacttcatcgacggtctcgaatccgaattctaaatgcctaactacattacttaatactaagaaaattaaattcaccgcgatacacatccttatctatcgaaacacaattatttccatcacaatcgtatttctagcgcatacaaatttattttggataacatatcccacttaatttttaattatctttgctgattaaaaaacttgttcgacccttgaataatttatcacttctagtgttctcaaaatgttattcacaacagctttcttaaaaacactaaaactttctcaattacttcttacttttatcttccaaccatttatctatttctctcattatt

SEQ ID NO: 163173 - DNA, 419 bp, Glycine max
agcttcgcttatgcgaggtgctgtaatcttatatcggtccatgctcagtgttgtctaatacaaagcatgatgatgggaggcacaacaacacatgttgtatatgagataagaagctgcaattcgtcctttgcaatcacagctttcctaagccaaatgaacaaacaaaccacgaaatttaacaaatggagaaaaggtttaagaataacaatgtccaacgagatatttggacttaatggaaaagaacatggtacggaagaatgaacatataataggggaatgaggtccataccatcaacttcatatcagatgaaaagaacagagggacggcggaaatttacgccgaacaggagaaagagaggaaatcgatctaccatatttacatttcgtaatggattggagatattaaaccttatattcat

SEQ ID NO: 163174 - DNA, 477 bp, Glycine max
tgtcggaatctccctcggcattcgcttgaaacattctttttatcttggtcttcttcttcatcgtcttcttcgtcctccttggcgtcgaaaaaggcgcggaacgttgaagtcggagacttgaaggagaaggaggcgtggaatttgaggggaaaacgaagggattgaggggttctgatcctcaaagaactaaatgcctccttgaggagttcttcgcccgagagagagagagaagcgagactaacgaaagaaatgaagggtcacatgtctctgtagctgctagcgaaataagagagagaaaaaaataataaaaatataatcattcaaagacggtgggataagatcgtctttgtatagagaagcaccatgacggtcttttcaatgaccgtccttaaatctgtaatttaattacgagcgcgccatcccattattttcaaagacagtggtatgtcgaccgacgttgttagcgtgtcgtaataa

SEQ ID NO: 163175 - DNA, 406 bp, Glycine max
agcttaaacatttagtaagcgtcatatatttaatgaaaaaaagttctcacagataatgaaatgaccaagcttaaaaatgaaagagatacaaaatagaattctttgtaaaaatacagaaagtacaagagtctcgaataaaattcctctgcataatgtttaaatgatatttaaaaaattaaaccaatttaatcttttctttttcttttctcttactatcacaaataccccccaaagcactatgctataaatgtctgagtttaaaaaacgcaccggaaaaattgaactttaacctttatcagaataaataaatgcaaatttttcttgattaaccacagtttacactggcctatcgatttaattacacatctctaactctttgctcatgtcacaaaaatatgaataccgc

SEQ ID NO: 163176 - DNA, 392 bp, Glycine max
  unsure (1)..(392): unsure at all n locations
tatcgggtcatcttgatntnggcactatcgtgtgatgatttttctatgcttggtatctggccttcgagatatcatgcaggggcgctttctgaggttgggatatgttgatagcggcctccgtttgtactatgcacaaactacctttttatgggtgagaatggtgaatcgcatctactcagttgggataaatatgctaagtctgggacttcgggctaattggcatttattgcctcatacatgcgataaatattcatttaacccgtggatgagatatactctattatggatctgttgtaattacgcactactggtaccattacattcacgaacttctatcttccggctcaaacaaaaccacctataatcattacgtgctatctagccatagacta

SEQ ID NO: 163177 - DNA, 345 bp, Glycine max
  unsure (1)..(345): unsure at all n locations
agcttgcagagcgaccatcagccattcttttttttatgcacnaccattccgcctgtcagaactctcatatgtctcgactaccatactgaccacttagctgacttggctgcgactaagggccactctgcgagctctcatattttatttctagcagccgccaccaaaacaacatcctttgtcgatcaaatctccaacaccatttaaccaacagactgtccctgaacgatctccatttaattaaaatccaacctaacatgcatcatttgggcgttacaattcgtactttaaatataacacttatgcacttaaacaaacaaagcaactaaacctttcctcttcctcttc

SEQ ID NO: 163178 - DNA, 469 bp, Glycine max
  unsure (1)..(469): unsure at all n locations
gactctgagaaaggagtatgacagatatgagcctgtgtctctttgaaagaacagagtagagatctgctggaagaanagcatttagattctggagtttaccgttgccattcctctttatcccattgtccagcatttacaagagaatctgctgcagcagattctttagctaaatctctgcgtgcctgtcattcccagccgttgtacatgttagaggtaattatctaggtcttatttggataaacttttcaataaacacttgtcagagaaaaaaaaataagaatataaaatgaaataaggttctttcaacttaaaattagcttatgcatcgagtggctgcataacaatcataaaatactatggacattcattggatcttgactgagtacatgattgtatgcagtatgctcaaagctcctcatcaaacataatcagtctcgccgaacatcttggtacacgaatatgtgatcat

SEQ ID NO: 163179 - DNA, 352 bp, Glycine max
  unsure (1)..(352): unsure at all n locations
agcttctacttatgtggcggggcggtgcttcttttactttcttatctccacggcagctgtgagcactgttcttcctctccgcgatgcttnttttcatgtccgcctgagtgggcttataccctaaaccatactttccacgattttcttgagtatttatccagctacccatcgccgccccgtctttgcctaaacccctcccgggttcataaccgctccccaacataactcgggccctcattaccgctggatctgacaaacaaggctgcccacagagggagttcacggaggaaatgctgaccacctcaaaagactggaaagcagcttctaacgattcttctgcggcttccacata

SEQ ID NO: 163180 - DNA, 461 bp, Glycine max
  unsure (1)..(461): unsure at all n locations
ctaacctcatcatctctcatagtctttaagtctgggagcctatccaatccttgtgtccggactctcagccacttatgatagccgccgatgctcccattactgcttcccctaaactctctgtcctttcttcacgccgcatcccatgccttgcaaactccttggagtaccctcgcgttgtggtcactgaaaccccgtgcgatgaaaggtgtgatgctttcgtctgatggcactcctctcatggggtagccaagctgtcttatggcgaggacgggattataattaatacaaccccttgttccatcaagggaacatttggacatcctttgtatgaagatagaatcctgattcttccttccttcttggagaanaaggtgtgaaaccagccacacatagagagccagtgcacaacaaacaatctctgcgcacacttgtcacatccccgggtgaacctcgcatacatg

SEQ ID NO: 163181 - DNA, 381 bp, Glycine max
  unsure (1)..(381): unsure at all n locations
agctnttggagaaagcggagatcacttttttcgccttcttccaagccctaccaagtgttcttgagttcttcttacatcaaacttacgtaagtgaccttcattttcaaccctaagcttgattctcacttcattttcttgctttattctcacttgccatctcacaaccttattttgcactcttgaacgatggaaacttgaatctaaaacccatcattcttccttctaaattttgcggagtctacaagaagtaagacgggggcctgtccaattcttgaaccatatgcttgctgctgaattccttggaacacgccgatttgacattttcagcttgctgtcatgcactgaaactgtgagctgagctatcctacttgacttttctat

SEQ ID NO: 163182 - DNA, 399 bp, Glycine max
tactaagcttgaaccacctataaataccatgtaatcatccgttgttagtctttaataatacttgatcatttcttccttctcttgcttgtgggaggtttcttgggcctcgaacaccaagtataacacatgttttcttgaatttctttgtctagaaaaccacatcattaaccagttgagccaactacggttaagcgacatataggttaaattaaatttaaagtgagcttttgtggtaaactaaagatgattactcttttcattttgggaatgtgccatgcatcaatgggagagagcgcactcactctttttctgattaacgtctacggtgtgtttgttacacatgacagttgaggggtgaaagtgaaagacaagcgaaaagagctgaaagtaaaaaataat

SEQ ID NO: 163183 - DNA, 396 bp, Glycine max
agcttaacagaaattgaactctttcttactagcaaataccaatacaaacaatgctctatcttgccacaaaattttgtgttggaataaaactagtcgactatttgaaccacttaaatgaaccacttaaatgatttccatgcacattactgcaaaagaaaactaatgattggccaatgctctaaagtatggtattgataactatagaatgttcaataacattccacatactcttagactatagtttataaaccttacaacttattcaaggcaatgcatgagctaatttaagtggaatggatccttccagatgattattggcaagaattctggatgacagtaatttgaagcaagctaacacccctaaaaaaaccaatcttagcagccttatgaaaaaat

SEQ ID NO: 163184 - DNA, 279 bp, Glycine max
ctatacaccttgtgtggttctcctctgacataccctatatttcttccggggacctttgctcgatgacgtgcgaacattctttggtcctcgtgaggtgctcggcacccatcattatgcgacttgtgaaattccaggacatgccgaataaccaataaaagtattgatgcacaaaccgtaagtttccgtgacacaccggaaatcaaatggaagcatcgttgcataattaagtgaaggtcgcaacattccgtaagtcaaaaaggcgatgattatgtaatccgc

SEQ ID NO: 163185 - DNA, 420 bp, Glycine max
gcttaataataactttcacacaatactctatcatattcaataaatatataactcctgcaaaacaaaggtggagttttgaaaacagaaactctatctacaaacatttgatcttttctatttttagtttgccgatagtataaagaaacaaactacggtactacgactagtgatgaatgggaacactttattttctatttcaagtgttagagcactaacccttacttatattagttataatcctaactgataaaggaaacaaatcatgataagataaggaaatatggtcaccaatcctaagaaataaggagaaaatacgaaaactaatcctagaggataatttaaggtatttttatttattctaacaaaaccctgcaatgacaaattgacaatcaattgaatataacggaaggaatatgagac

SEQ ID NO: 163186 - DNA, 477 bp, Glycine max
  unsure (1)..(477): unsure at all n locations
gctgtganaatcttgtgtgagatcacaacatgacatgcttgatcattttcttctatctccacccaagatcaacccaagtttcatgtttcatgaagattgcggaggattgcgatcttcctcatccaagaccgcacgatccacccatgccaatcttcctgcaggccaagttttgatacaaaacccctttgctatcccagctgaatcgtatgcgagtgccctaaaattctatgtttcacccattttgaaaaacgatgactttgattctcactattcctacctgtactctcaatatcactgcaaccacatttctgctctgtctctgccttgcatccactgggttgttgcatactgttcataacatgtgtctctcacgttctgttatgttgttcttgctctgttttgttggtgcaatgtggagcctcttgtctatgtaagaaatcacttctctttattggaccaattttgcggatgagtcat

SEQ ID NO: 163187 - DNA, 416 bp, Glycine max
gcatcttaagtactgagctgcagcttgcaaaaaaagagaaatttttattcttgctgtgctacgggcttcattcctaattgctatgtctagtttagggggaatgtattttacgtaaaatgcgtaataccatcttttgatattgtaattgtcgttttgctcaacaattcgtagtaggaagtaattcgttgctactgtccattacccatttcaattaaatataatttgttggtgaaattcgttgctgaaatctgcagcttattaaatataatttcgtgctgtataactttttgaagttattgaagtagcactaaactacgttgtcctactccaactccaaatccaacacagtgtataatttctaaaagaaagagaagaaccatgaccttaaatgaatttcacataatgtttgacatccc

SEQ ID NO: 163188 - DNA, 453 bp, Glycine max
  unsure (1)..(453): unsure at all n locations
caaatcatgactgtcgcgtgctctttatctctcttataattcgatttcctagacagaagcaattaacatattaaatatgttaacaatagagttaactaagccgacgctgagaaaaacataattaaatatcggctaagccgacacagagtaaaagaataaaaactcatccaagttagtgttagattctaattttgacggtttagatgtcaactaagcctactctattagcgtccaccttcaaaagctgacgctagcanaattagcgggtgggttctagtggccacatcgcatatgacgtatatccaacaataagggcgttggtagcttcgattcttgtctggtagagtcggcttttggccaacgctaaatgggtggtttcttgtaatgaatgcatacttaacgtaactaaaaataaattaaagcgataacataatctgattgatgtatactaat

SEQ ID NO: 163189 - DNA, 395 bp, Glycine max
agctataagaaaaatggcctcagcaaatttcttatttccagaaggaaattctatcaataaacctccaatctttaatggagagggttaccactactggaaaacccgaatgcaaatttttattgaggcaatagacttacgtatttgggaagccatacaaatagggccatatatacccaccacagtagaaagaattacaacagatggtagcacatcaagtgaaagcataacaatagaaaaacctacagatagatggtctggagaggatagaagacgagttcaatacaatcaaaaagccaaaaacataataacatctgccctgggaatggatgaatatttcatggtttcaaattgtaagagtgctaaagaaatgtgggacactctatcattaacacatg

SEQ ID NO: 163190 - DNA, 479 bp, Glycine max
  unsure (1)..(479): unsure at all n locations
cttcatcattaagtntgtgatttgatgtctcccgaagttgtcttgtttaccacgctacctcaccctagacatagcttgactcatcaaggacataagaacttggccttcttccaaccaaggttgatacctgtttcttaacctcatatcacttattggatcacatgtgaatacacacccggggaacattccaccataccttaaaggcatgctcattactagggtgtaagggtgtgcttgctttaaagaagataaataatatataagaaatttcgggacttactcctcttacactctactttaattaaatattttttcttttctaaatcaaacacaccttaaaaaacaacgccttactcaccctttgaccatagatctgataggaagacatgtaacaatttaacgactcccattgtggaacctagatctcacctcaacctatgacgcaccattacctataaatactagtgctcctcacaatc

SEQ ID NO: 163191 - DNA, 346 bp, Glycine max
cttaatcatccttctatagtcgttggagcggactctggtccgcgtactcacacatagcctgcactgcctccttatcgcaagtgcctgtattcgtgctaaacctgcacttctcgctcatcatgggtgcttgtatttgcgcttagcgtacctcttctcgcttaacgccagtgcatgtattcgcgttgcgcgttgagcgcgtcttgtgttaggtctaatgccaaaatcctcatctttcatattatgggcatttgttgcatctttctggctttgaatccctcattcttatatatgcgatccacatatggaacaaacacgcattcttaataatgaagcacaaataaccgct

SEQ ID NO: 163192 - DNA, 408 bp, Glycine max
  unsure (1)..(408): unsure at all n locations
agctacagagctgatgcaactctcttgtttatattctctncattcttgccgccgaagaatcttctccttgctgttttacagatggacgctccacatatggtggatttcctctccttttgacactgctccttctcatctgaacgattgctcatgtcggaacagatgaatattattttacactttgatgggatttgtgattgtcaactcataacaaagaaatgacgatccggctttgagtgcctgcactactaccacttttgtgtatttgcgacatggaagtgaacactcatttcccctttctttcacatattaatggatttctcatctttgtcacagcccgcggaaacgcatttctcattcttcctttccaaagtatgaatgagataagaatctccaatgtcataccac

SEQ ID NO: 163193 - DNA, 465 bp, Glycine max
taagagaagaggactcgagtatctgcttaatggcatattctttttaatcaattaccgaggattgcttagcgataactagaaggaagaagtagtcgttcttagaaacaactgctgcaaacacaatgacaggggacgtgagtaaattcctaaatatccgtaagaaagatggaggagtcatcacctttggagataacaaacagcttaaatcaagggcattggaaagacacgtaaccttaactctactcacatagataatgcgtattatgtacaagggctacatcataatctacttagcatacctcaattgtctgaccatggttatgaagtaggttcagacctaattaatgtatgattagagagccattatttggaaacgtcatacttgcacgatgtggggataacaacctatatactgcctccttggaagaaccttatagccagacatgcttcatgacatcaaatgat

SEQ ID NO: 163194 - DNA, 418 bp, Glycine max
agcttatttgtgacaaaattgaatttctttttcttatctttgtacggactactcacaaaatccatttagatttctttagtgtcctataagccatgcacaaggtagataagtcaaggaaacacaaaaatccaaaaataagccacaattgtcaattaagctcaatcatttgcctaagaccaaaactaaattaaagtgagaaaataagagacaaaaagaggtcaaataagataagaagaatagaaaaatactaaactacaaatgctcaatctctcccttcctttccctctcaaatcgttcgatatccaccgagttaacttagtttgttaaggtactctccctctatacctcgattacacatttttttttgtctgtggtttcatttagatgatgaattgcattccacgaaattgtgaacctc

SEQ ID NO: 163195 - DNA, 346 bp, Glycine max
  unsure (1)..(346): unsure at all n locations
taagcttaggttgctcaatgctcagctgctgcatggaaggcttagtctgttggcggcanncagagacacaaaccaaaacccttgcacagtacaaattctgattaaggccacttgggttacaagttgaccaacgcatccagtttgccttcaagcttcttactttcagatgatgcaaatgggtctgtagctacctcatgcactcctctaatgactatggcatcatttctggccctaaactgctgggagttggaggccatcttctcaattaaatctctggcttcaacaagagccatgtctacaagggctccaccactggcaacatctatcatacttctctctatatcac

SEQ ID NO: 163196 - DNA, 406 bp, Glycine max
atccttaagtcacctgcggctgcagctattcatgggatgaccatgcctctttgatcacaaaattcaagcttatctagtttatcaccatctaatagattctgtttctcaagctcatgtaatcctctctcactaacatgacctaatctcaaatgccaaagttttgttttatcaatcaatgtattactagctaccgatgcatgctctacaatagtggaaccttcaagaataaacaagccattacttttattcttgttacccttagctatgattaaagatccatttgaaatcttaagaacaccatttaaaattctagttgaatatcctacatcatccaacatgtttatggaaataagatttctcttgagtcctggaatggaccctaccatttttaacaaatactctctat

SEQ ID NO: 163197 - DNA, 360 bp, Glycine max
cacatacacatatcgtgaagggtcacgaccctcgaatctgaatatcaagagtcttgccgctgcgaattgattacaaacactcgatcctcgatcacatgcccaaaactcacattccaaacccctttttcaaaaaagctatttccgactactagagcctcgcatgtcctggaaacactccgttccgacgcacggctcgatcttacagaaaccccgaagcccggcctcgtcctttgaacccatcctatattaatcttgaagcaatgctcatcctccgaagcagccctcgctgactctcccttggcatcatcaaaatcatgtatacatacatccacacgtacgagatcacggtacatctattac

SEQ ID NO: 163198 - DNA, 333 bp, Glycine max
  unsure (1)..(333): unsure at all n locations
agctttcaactcaatacaatttcaatcatttatagaactccaacatatagtagactcttcaaaggattgaaatatgtcgtattcatatatagcccacctttctttaaatatatagcacatattttgttcatggacaatgttgaatgcgtatcccaatatttggtcaatacgcttatatatgttttcgaacccccaccacncccccactccgctgtcgctcctcaaccatctctctcctctctcacttcccctcctccctcccccaccatccatccctcctccgtacccactctcctccctcctcccacctccctcccccccgtcctcctcctc

SEQ ID NO: 163199 - DNA, 484 bp, Glycine max
tactaagcttgtataaaaggaagcaagttataaactcttttcatagcttttactttatttctagttcaaaaccgcttgaactacttcacattgatttatttggtccctctacaactatgagtgtaggtggaaattactatggctcggtaatagcggatgattactcaaggcttacttggaccttgtacttgaaaaccaaaaatgaagcttttgatgctttttgcaaacttgccaaggtgattcataatgaaaaaggtctgaacattgtttcaattagaagtaatcatataggtgaatctcaaaataagtatcttgaaatcatttgtgaagaaaatggaattcaccacaatctttcaacccaagaatacctcagcataatggtgttgtggagaggaacaatagatcgcttgaagaacgtgcaagaacccttcttaatgatacaagtctacctaagtacttctggacacatggtgtacatactatc

SEQ ID NO: 163200 - DNA, 415 bp, Glycine max
agcttgtctttcagtgtctgaaatgttgctgaacattcgtcatcaaacttgaaggccacatctttattcagcaggttgcttaggggtctcgcaatctttgaaaaatccttaatgaatctcctgtagaaccctgcatgccccaagaaacttcggacacctttaatattcagtggtggcggcagcttctctataacctctatctttgcccggtcaacttcaatccctctagctgagatcttgtgacccaggactatgccttctcggaccatgaaatgacacttctcccaattcacgactagattcgtctctacgcacctctgaagtaccatctctatgttcctcaagcaactgtcgaatgaggatccgaaaaccgagaagtcatccatgaacacttcgatgcttttctccaccatat

SEQ ID NO: 163201 - DNA, 396 bp, Glycine max
taggcggggtgtctgcccaagattgatattatatacatattatatcatgcttaatggttattgcattaatttagtactaaatatgtttcagctatttgtatctcaagtttttcctttctttctgtgtggtatgagttttgtaattcttgtcctaattctgaaaataaagagtcaatgacataaatcatattgatgtcatatagtataaccagttagaatttatgtaatgtaaaagtctcaaagattgtcattgtgggctaagcctggctgtcatattctttcatgaaacgtgctattgattgcttattttggtttggctctaaattttatgggtttactgttagatttactttaataatggcggagagttgaatggtattcctcatatacgaactc

SEQ ID NO: 163202 - DNA, 406 bp, Glycine max
  unsure (1)..(406): unsure at all n locations
atcatatctcagattatctgctaggattagctttcctatttcctcattatctcttactattagttcccatgtttctttatcttttcatgatttgtttccttaatcagctaggattatgattaatataaatgggggttagagctctaagttttacataacaaaatcaacacattgaaatgttatctctgttaatataataattattgtttcattctttttcatctttctttctatacttaaaccccataatgttaaaaacaaaccatagtattgataacgagcatgtcatcaatcttttttgctcagcggcatttcatcatttatcttagaacttgggcttaggacctnaactcacgcgcataaaactagcttatatcgtgacgactctttaagccttatcacgact

SEQ ID NO: 163203 - DNA, 422 bp, Glycine max
tgcagcttcatagggagccatgccaatcatagagtgaaaactattgttataagtgaactctatcaaagccagaaaactcttccagctccccttttgctataagacacacgccctcaaaaggtcatccattgactgaatggcccgttcagtttgttcattagtctgaggatggtaggctgaacttagtctaagcttggtccccaatgctctgttcaggctctcccaaaatctagaggtaaacctacgatctctatcaaacactacgctagatggcacaccgtgtaatctgacaatgtcactagtataaagggaggtcaacttctccaaggaaaaattgatattaatgggaatacagtgagttgacatggtcagtctgtcaacaataacccagatagaatctaaacccctgggggttctatgta

SEQ ID NO: 163204 - DNA, 415 bp, Glycine max
  unsure (1)..(415): unsure at all n locations
agcttcacaagcaagctctcatcaagtgtgttattattcataagagcttcaagtaggcgctccttaaacctccattaattntcagctttaccttctcctccattgttgcttcttcatttttctccatgtatctcctcacatgtcttgtgctaaatgttgttaacatgattctttaaaatttcaaccgattaatcttgctatagaagctagatttgattttctatggttcaaatttcttgtttatgttcttgaaccatgagttgtgttgagtttacgttcctttgagttttgtcttgctattttttgtggctgaaacctaaaccataaaattcttaccaaaacattaaattagaataaaaccttaaaaatatagagtgacttgttcacctattgtaggtttttcatagaagtcatg

SEQ ID NO: 163205 - DNA, 412 bp, Glycine max
gtttagagatctctacagagagaaggtccaagttcttatattttgagagcttctgctgtgagaagactgcgtgggaactgagcgagaagaggaagccatcctgagagcatgagatgagtctgtgagtgattgtgacgttctagacgtggaggagaccatcccaccacttgtatttattcgatccttcatttctcttttctctttgctgtaaaggaagcttcccagatatgaagagctaaatcctctgttggttcttctttggaggtactggatggaaatactggactatccattcaatgatgctctatgtgtcatctgcgctatcaatacatcatttcagcgtgactttgccttgatcatatagacgcattacattttgtgcaaaatagcaattctccagtgaaacattgag

SEQ ID NO: 163206 - DNA, 401 bp, Glycine max
  unsure (1)..(401): unsure at all n locations
agctcgcttaagaccgcatatcgagtgctttaattngcacactatatgttcctttccttcaactgagaactccatttgttggtccatataaacattctcctctaaatcttcattacgaaagacagtttttacatccatctgatgtagctccaagtcataatgggctactaatgccataataatccttaaaaaatctttttgtgagaccagcgaaaacgtctctttataatcaatgtcatctttctaagtaaatcccttaacaacaagtctagcctcgttacattcaaggctgtcataagagtcacatttagtcttgaagacccacttacaaccacactttttacatggaatttatctcttcttcatggcattcaacccattctaaaattatcacagcttac

SEQ ID NO: 163207 - DNA, 440 bp, Glycine max
taatatagcttgaacgctggaccttggctcatcaaacactcatctctatcttctgtctacatatatatgtatatatatatgcgcgtgcgtgcgtgcgtgtctgtgtatgtatgcatgtattcatttaaataatggtgcgctgtctcgaaatgtatatcgcgaaaaaaatctactctaattctccatacgcaaattaacagagttttcatttgaaaattgaaactcctcgcgcgttaaaatggtgatattgtagcgatgaagccagtcgtcacaatgtgtggggagagttctgctttctgacggaatgggggggattaataccgtgacttttacatcgattagtggactaaggaatacgttcatatgtcgatcttgcataagacgttgaccgacctttagataaactcttgcacggcgggaaagctggtgatgacatcgtg

SEQ ID NO: 163208 - DNA, 500 bp, Glycine max
acggacacttaatactaagcttacaatctgtttaagtccaagcccacaaacaaaataaatttatattgtctgctctcttcaagtccaagccggttcagcccaattccggatccaagcccaattgcttataattctcctgaaattaaattaaaaatacaaaattagtcaagtaggcctaaatgataaactgcataattaatttgacaaataaggctaatcagtaattaaaatggtgacaaaaaagattaagaaataggagaaaataatgacactgaagctcttagactctggccaaactcttgagtctattactccaacaattatgtcactctctaaaccagttctttggatttgctgcaaaattcctatgaagtcccatggtctagtcgtctagaaataactcttgctatgtgggaaaatatagacaacactatccatgtctgttacaataccaaaagtttaatagtgtcgttctccattaaagcttttttggaactgcg

SEQ ID NO: 163209 - DNA, 411 bp, Glycine max
  unsure (1)..(411): unsure at all n locations
agctngaatacataggaaatgttatccntttggaaggcacttcggagggatgaccttacacattgaaagcttcgagcacactgaataccttaatagaactgtccatgcaacccgtatccaagttgctagccaaagaaacttgagaaaataaaaatagaagatttaatttgctgaatggttggcgaagaatcatggaagtgaagacgattcctacaatgctacacactaacaataacaaaaatgatagcactaaatctcactgtcttgagttgggcattacatctcctatgaaagagaaccacaagagagtgagagggcgaccaatccaacgaacatcttagcaagtaagagaacccatctctgaaaataaccacaacctctgcgcggaggatgatatgctccagagcttta

SEQ ID NO: 163210 - DNA, 328 bp, Glycine max
tctaatagctcgggcgctctacacaaggccctctctacgcatacagagagcgtcacaaccacaaacactttctgccgcatatattcagagaagtacaactcgccaatgccgccttttcgctcatagttgactctcattgtaccaatcgaatatcacgtctacgacatacgacaaaaaacaaaattaagaatgctaagacaagacaatgtgaatcttcccttttgcgggctatggcatgaactgtttactaaacctatggatgtcactttctgatgatcactcccaccacttgacgatcgagtaacctgcccactctcctttgtactat

SEQ ID NO: 163211 - DNA, 368 bp, Glycine max
agctttagcttctcaagagaggttcttatataatcttctcaaggaagtttctcaagaaagcttctcaaggaagcttcttaaggaagtttctcaaggaagctacctaagctataaatagaagtatgtgtaacacttgtggtaactttgatgaatgaaagtcttatgagacacacttcaaagttccacttctctccctcttttattccatcaatttcgtgctccccccttctctctttcttttcctacattaaagcatcctcttcaagcttcttatccaagtcacattcttattggtgaagctccttctttcatggcttattcccttgtggatggcgcctcccctctcctcttctctattgccttccgct

SEQ ID NO: 163212 - DNA, 464 bp, Glycine max
  unsure (1)..(464): unsure at all n locations
tcttaactaactaacgtatcttacatatacatatacacatttcttttactcagtgtcttacatgtttatttcatgactccaacacatgtttatgtgtaaaaatactttcaaatatatgcgttggcatgtagatgaaatgcgtcaatagtaagtagtgataaaacatccaactgatgatgagtaggggtgaaaataagttgaaattttcttagagacctatggtccaactcatttaaggttcaactcaacttggtttatttaaaaaaaaattaaactcaaacttttttaaaaatctttttaattaaataggttagatcataagtcataagataaatctattacgctcgatagatcgacctgtttaataataatatgtctaatatgatatattatattataattttctttctaaagcagaacacaaaataaaacaaatacattttgtaagacttanaatggaaaca

SEQ ID NO: 163213 - DNA, 398 bp, Glycine max
agcttatgcgcatatttccttacgaacgttcacttgcacaagacattctattaactaagaaaaatgcacccatatacaatcaaggcagcttcgctacctagattatttacatgtacttccaaggtgtatttgttacttacatcacacacatctccttggctgaatttacatacatgcatactcaaagcattttggggtaccaaaaattgcacatgtgcacatcttggtatttctaatacctatacatacacaaacttcatgatgaatcttgattatctacacaataaggtgctacatttcatgcccttttcaagtttttgctacctaaagccgcatgcaaattcaagtatattttcctttgctgactaaaaatgtatccaaattaaaaagtatatatt

SEQ ID NO: 163214 - DNA, 448 bp, Glycine max
  unsure (1)..(448): unsure at all n locations
gaatatanatactcaactgctttaatagagacattacatcgttctcatctttttgtatttgacatgcgttcaaaatgatctaatatgtgaaacaccttgtacatcgattctgataaaactgatgttgaaagtacgatacaatatcggttttgtcaaaattgatgtttttgcaaaaaaaaaatattttgtctatttgttaaatgaaactaaacctataaattaaaatcaaaatcaatctggacattattaacgatattcaaatatatatatatatatatatatatatattcaaactattatcccataaatactattaaataaagaaccacttaaagtgcacacataaaatatactaaacataacttataaaaatacatgaaacaagtatatcacaccacatgatataataactctaatacactacatatccataagttatgtcaaacat

SEQ ID NO: 163215 - DNA, 371 bp, Glycine max
  unsure (1)..(371): unsure at all n locations
aacacgttttgcttatttatcaaagnctaacctaacatattctcatccctagctatgttagaattacgtgggggctcacagaaaagagatcaccactacacttcaattaacttttttacttaaaaaaaaaaacagctatttcccaaagaaaaagcccagaatacaacagaattggtatgaataatcctttgtggatgtcattatcttcatttatcttcattcgtatttatcttttataactcttttgttatctttgtatctataaatatgttactcctctcggaaagaatacatacaattatcattctctcttaactctcttggtctctactttctctatattattctccccaccagttctattttatttt

SEQ ID NO: 163216 - DNA, 312 bp, Glycine max
ctgaccgttgggatctttgacaagatcgcttgagtgtgctacaaacctcttaatgaagctcttggagaaagcttcttaatgaagcttttatagaaagctacatgaagctgtcttggtaaaaaccctgtcacgcccttgttagccgttggaccttgtcgacatttggtgtgctactttacaagacacttgtccatgatctgaccgatgggatctttgagaagatgtttggagcgtgctataaacatccgttcccgagaacatctcctattctaacatgtgatcctctgctcttgtgtacctgacgataaaaaa

SEQ ID NO: 163217 - DNA, 413 bp, Glycine max
  unsure (1)..(413): unsure at all n locations
agcttanctacacacaccgctctaataactaagttcatttccttgagaagcttccttgaaaagattcctaaagaagctagagcttagctacccacacctccttgagatgagaagctagaacttagatacacaccccctataatagctaagctcacccccatgacaaaatacatgaaaatacaaaaatagtccctactacaaagaccactcaaaatacctcgcaatacaaggctaaaaccctatactactanaatgaccaaaatacatggcctaaacgaaggaaaaaaaacatattctaatatttacaaagataagcaggctcatacatagcccatgggctcaaaatataccctaaggctcatgagaaccctacggccttcccttggatctctggcccaatctacttggagtct

SEQ ID NO: 163218 - DNA, 429 bp, Glycine max
actaagcttgtaatatttattggcataattcgtctgttgcattatgttctttatgtctttacaggctactttctcgttgacatctcttgtcttgaatggaattgccatgacaggtttattgttactgtctttgatatttggcagctgatattgcgttgtgggaggtaatttcgattggattaactcaccattcttcacttgccaatttgttatggcatttgttgttggatcacctatgatgtcttgtctccaagggtaatctatttcctttctgatggcataagcatgaaaccaatcatagaaaacgacattaattttgactctttcgacaaatatgtagaacttgtctctggattgtcctctgtttgtacccttgtaatgttggaaaaaccatctcctttgaggctcattctccggagaataaaaatc

SEQ ID NO: 163219 - DNA, 411 bp, Glycine max
  unsure (1)..(411): unsure at all n locations
agctcatgcgcatattaccttacgaacgtttactngcacaagacatcctattaactatgaaaaatgcacccatatacaatcaacgtagctccatcacctagattattcacatgtactcccaacgtgtatttgttatttacataacacacgccctcttggctgaatctacacacatgcatactcaaagcattttggggtaccaaaaattgcacatgcgctcaccttggtatttctaatacctatacatataccaacttcacgatgaatcttgactacctacacaaaaaggtgctacattcgatgcctttttttttttttcaagattttgctaccctaagccccatgccaattaaaacatatctctcttcgctgactaaaccttgtttccaattaaaaacgtatatatttttt

SEQ ID NO: 163220 - DNA, 445 bp, Glycine max
taatgacccactaacctataattattattacttaatgccattaacctatggaattaaaaaaaacttaatggctgagtgcaactgaaattgtggcaaccaaaagtcacctccaacagccaacaagttagccaccgtttggtctaccaaaacgctgatgcctacgttgccaattggttccttattacaacttgaactaaacctactaaagcccttttagttgattaacccaaaacatatttttggtcagccaactttacaaggattgggccattatttagtcaaactaaacactctaaaattgagacaaagtggtgccatttagtcgtcctccatttgggccatgatacaactcacaaccttggacttttctacttgaacttgggcttgtattaaatagtatggaaacacttgttgaaagcttcttggctttcttgctcacccttgc

SEQ ID NO: 163221 - DNA, 418 bp, Glycine max
  unsure (1)..(418): unsure at all n locations
tgcaagctctatanggagccatgccaatcatagagtgttaactattgntataagtgaactctatcaaagccagaaaactctcccagctccccttttgctataagacacacgccctcaaaaggtcatccattgactgaatggcccgttcagtttgttcattagtctgaggatggtaggctgaacttagtctaagcttggtccccaatgctctgttcaggctctcccaaaatctagaggtaaacctaggatctctatcacacactacgctagatggcacaccgtgtaatctgacaatgtcactagtataaagggaggtcaacttctccaaggaaaaattgatattaatgggaatacagtgagttgacatggtcagtctgtccacaataacccagatagaatctaaacccctgggggttct

SEQ ID NO: 163222 - DNA, 468 bp, Glycine max
ttcgcaagccggtatcatctatcctatctcagacaaccaatgggtgagtctccgtccatgtagtcccgaagaagaccggcctcacagtgataaaaaatgagaaggaagagttgattcctactcgggtgcagaacagttggagagtttgcatggactatacgaggctgaaccaggttaccaaaaaggaccattttccccagccattcattgaccagatgcttgaacgcctggcaggtaaatcccactactgtttccttgatggtttttctggttatatgcaaattactattgctcctgaggatcaggagaagaccacattcacctgccccttcggcacttttgcctataggaggatgcctttcggcttgtgcaatgcccctggtactttccagccgtgcatgactagtatcttcagtgatttcttagaacatcgcatagaggtgtctatggatgatttcactgtatatg

SEQ ID NO: 163223 - DNA, 294 bp, Glycine max
  unsure (1)..(294): unsure at all n locations
ttttcttaagggaatgactgaataatgtacatttcagcgcttcaccctatatagatactaagtctattacgatgggaggagtgaacttatacaaatgacataaattgccttcaatattttcaatttcgacaaactaataaatatcatccaccaattctaccatgttattttattctttgctttacagttgcttatgatacaccacatgcgtatatgatcaatcaaccgcgcnttttaacagaaaacgtaccattttgggaaggctaatctcatttttttttgtctaactttatg

SEQ ID NO: 163224 - DNA, 449 bp, Glycine max
  unsure (1)..(449): unsure at all n locations
tgcgcaagaatggccaagattttttttaacacatgggcacgcaaaccctgacatcccgccgaaacccgccgagaaagcagtccccggcgccggtgggatcaacctgatcagccacgaacggcgccaccttaaacgcacagtttggacaaaaaaccttgcagacatccttgccgtgcgtgacgaccacgcaacacaacttcctcacctcctccacgtgaataaaaacggcttcatccgcggaagccttcagaaacgcgacgcgcggcaagaggtggaagaacccgatgtctctcagcgctacgtggctcacgcgaccgtngatgttgtcgaacctgcgaatcatagcctggatgtcgacgaacacgtggtcgcagatagatagcattctctccagtgtccgcgggagaatctcaccgccgacctcgaccgcgagttcgaacccgaatccg

SEQ ID NO: 163225 - DNA, 417 bp, Glycine max
gtcacctgccgctgcagctttgctggaaatgtatatgattttgtatgcccgaagaaacaccatttcctagttaaccatgcattacgtaccatgttcaattattttgtttttaagcgaaacgggtttatgatcccaacatggttggctcgtggtgcctaacacatgaaactaagaatgtagtgtgaagtttcacgcttccccctttttgtttttgttttgtagacgaaaacgccaggatgagcaaacatgaaaacaaatggtatgcaattttgcagatcaaaaagtttgttgaacgcatatgcatgatgatgccatgacttatgcaaaatgtgacgctggaatatgataacggacaaatgtacgatatgtccattatgatgttatgaagagatccttatgtggcgcatgatatgaatg

SEQ ID NO: 163226 - DNA, 339 bp, Glycine max
  unsure (1)..(339): unsure at all n locations
gtctcacgattgtcacgtgtagatgcatctttttgtttccgtggctatacgagacatcttgccaaacaaagctacgttaaccataactcgtttgtgccttttcttccatgccatatgtagcaaagtcgctgatcctatcaagtttgatgacctggaaaataacgctgccattatactgcgccacgtggagatgtattttccctgccttctttgacatcatgattcacttgattgtgcatctcgtcatacaaatcanatgctgtggtcctgtttatttgcggtggatgtacctcggtgagcgatacatgacaatcttaaaagagtatacaaagaatatat

SEQ ID NO: 163227 - DNA, 413 bp, Glycine max
  unsure (1)..(413): unsure at all n locations
agctcttctttcacaatcagtctgtctagtgacttatgttggaccttgtggcctcaatagtcttaagagggataggcttanaatgcagaagaagcaacaataatcaatttaacaatgttctttaaacaagcaagacacaattgattgccacaaaataaataagataagggaagagagaatgcaaacacaattttatactggttcggccacttcccgtgcctacgtccagtactcaagcaacctacttgagatttccactatctttgtaaaatcctttacaaagtctgaaccacacagggacaacccatcccttgtgttcagatgctntacaataagagactcacagtctcttagccaatctcattgaatcagaagaatggaagaagcattctctcttcaagagaagaatatta

SEQ ID NO: 163228 - DNA, 451 bp, Glycine max
  unsure (1)..(451): unsure at all n locations
tagggggagaagtgaagtttatttcgttttagccacttangcacttctctctctttcgaatttgcttangaaaattgtttccgcgaagaanatccaagccgatgcgcttccgtaacgtttccgtgagtgatttcgcgaacgttttcatctgttcttcaccgttcttcatccgttcttcgttcttcaacaggtaagttttcgaatccgagactttcaattcatttcttgttttttttaagctttcatctttatttcggtcattttcgatttcttttcttccttctttaacgcgcttgtaccatttatttaagccgttttctcacctaataaatgataaaatgaatttcaaccgatcatttgtgttgtaatctcatctaatcacttttaaaacgaaatctaatcgatcgttcacgctataacctccgctaaaccacaaaaaagtaaaataatc

SEQ ID NO: 163229 - DNA, 427 bp, Glycine max
  unsure (1)..(427): unsure at all n locations
tcttaagtcacctgacgcatgccagcttataacaacaaaattgccctcaccattttcatatatgcatgngaattatgacgcatctacaagaatcaagccactgctattgcgcaaacaatcaatggcgcaacacacaccaaatgattatcatgacggatggctcaaattctcacacaggtaaaatcatcactttcaaatcgagctttcaaaactatcatgacatgtacagaagaatcaaggatttcaagtcacaaaatgtcaacaacttttattttcaaaacaaatacccattttttgaacatatcctataattcaaagaaaaacatgcaaagccctacgtgcacacgaaattgatcccaaaaattaaactgaaaattccatgaaactaacaacattaacaaactaacacacctaacaaatttacaaa

SEQ ID NO: 163230 - DNA, 407 bp, Glycine max
aagcttaagaaattctatggtaccctcggaaatgtaaggatcttgttttattattgagaaaccttcttcattcaattattgacccaaaaattagttttaccaaaagaccataattgattctatgcttattttttagattggagcagactcaacagactaacagtgtattagtgtttagtgacagcctaactgcagactcaatcttgtcaaaaaaagaaggaaaaaaaataaaagaatcccaggagctataattgcagagactacttattcatcaatgtccataagttcggcaaattttataaatttaggtaattcattgttcacatttatatataaaaattaaatatgatgtcccaaaaccacaaaataagaattaactctgaactaaactaaagccaacttttaaa

SEQ ID NO: 163231 - DNA, 402 bp, Glycine max
  unsure (1)..(402): unsure at all n locations
agctngagaataaagatcttcccatctatttatcttctctatcaaagagactatataactttctaactttctcactctaagaaatgaattcactcttttttggatagttaggaatataagctcctactcttatttatattactccacctctataatggatggtgaagattacttgtatcctaggttggagattaattctctagaatgttccacacattttaggagtctttatactcttctactctcttctctattcttttataaagatccagaaggttccatacatctctagaatatttcagaggttttcacattcttccacaagcttttaaagagttctacactactctaaaatttctctttctacacttttttaaaaagctataaaattttttacaacct

SEQ ID NO: 163232 - DNA, 409 bp, Glycine max
gattggtgtgttttatatcaacacttgtttttaatcgggtcatccaattaaactacatttccaaattgcattctcacagatatcagtccgattattggtcccgcatttcataaagtttctttattcaagaagaaaataaggtaccaacaaaccattgaagggttaattggagctcttaacgtctacaaatattgcaatagtatttcacgttctttgagagacaaaaagatcttaaaaatcaattaaggggacgatggaattaatatatcaatcttgatcgaagattctctttctctttcttgcatggttattgctattgaagcatattgactatctacgtaacaatgaacacaatcatttgcattgtcatcgatgtctccaatcagctataaggtatccgtgtttaata

SEQ ID NO: 163233 - DNA, 407 bp, Glycine max
agctcttgatggaacaacagctatggaggatgatctaccaaccatatagacattcatgaaccaaatctcagctgaaaagtaaggaaaattaagaaaaaattgtaattcttaggcaactttttactgagcttacgccctatgaaagtacttttgggcttttattgtgtatactgaacattacgtagaaaaatttatttgggctagtgttgactttatgacttatgaccttcttataaatctttttttttctttttttaacttatctatgaaaattttaccaaaaatttattaaatatatttttatattattttaataaatttcataatcaattttatgaataattacttgtttcaaaataccttataaaataaatacttaataagttggttatcaacgtgcattaaac

SEQ ID NO: 163234 - DNA, 473 bp, Glycine max
ggactcacaccaaacatgacaagtttaacatgctttcatcatatttcttcacaaataaccatcacaatgcataaacctagtaaaactacccatcatatctcccaaaacccaatacccacgaaaatcatgtaagaaagaagtctacccaaacctgaaatgtgaagtcccacaatggagaggtgcgtttcacgactccgaaaatggcttcctttcgcgatttggagcagaaaaggtgtgcaaaggttggagctttgatggagcttcaatggtgaggaagaagaaaggaaaaagcaacgtgagggagagagggagaaaagcttctgaattttctgagtgaggatagagaacatagctttttatgagaaaatgctttccttttcctattattatatttgtttaaaagcatttgccacttgtcccattgtgagtggaacaaaagggcccacctttctctcttgatgtgactcatgcac

SEQ ID NO: 163235 - DNA, 228 bp, Glycine max
agctatgcgagtcacgggcctggatgtttgttacgctggcggcatcctgtcgcgggagaaattcccccggatgccttcattaactttgccgaatcgcaaaagatgattgtgccgctgactcagcacctgtttgagttaattgcccgcgatgccgcagaattagaaaaagtgctgccggtaggcgtcaaatttggtattaacattgcgcccgaccatctgcacagcgaa

SEQ ID NO: 163236 - DNA, 215 bp, Glycine max
aaaactaagctctcgtggcaatggtccgcgcacgtaaaccttctctttcctacggcacacttttctaatttgcggcatcgggcaattaactcaaacagtgtgagtcacggcacaatcatcttttgcgattcggcaagtaatgaaggcatcggggaatttctccgcgacaggatgccgccagcgtacagtacttcatgcccgtactccaaagcttg

SEQ ID NO: 163237 - DNA, 317 bp, Glycine max
ctatcctcccttacaggaatgcagagagagctggattgcacacaacgtttctatttgggtacaactgtcaaactccttattaattacaactttatgaattattgcttgccatattgaagaaaaaagacctgacaaccagctgtcctgaaggaactaaaatcatggaatccaacaagaactctgcatgcttcctgcatggatatcatcaataacttgcatagctggaggattgaccatctactaaatataacgagctcgtaactaacttgcatagctggaagactaagcttctcacgtacatgccatgctcgatcttt

SEQ ID NO: 163238 - DNA, 405 bp, Glycine max
  unsure (1)..(405): unsure at all n locations
gttctattctgtatattctatctacactattgttctctcttgttctaacccannaccaacagctaatgctatatattattcttctataccagacaaagaacatggactttagatctctctatgacatactccaacaaatcattggtcgtggttttgtttgtgttgtctctttaaacttgacacctgcagctatatattctcatatggccacatagctagagattgctgctaagacttgttagtaaatttaataaatgttagattagcagagagcatgtccctaaatgtcaatctatatgttttagaaatggtgaaaagggggaaaacagtgagacagactaaaacagcttgcgaatagaaaggaatatcagatcttgcaaaaattatttatactgcctcgggcat

SEQ ID NO: 163239 - DNA, 379 bp, Glycine max
  unsure (1)..(379): unsure at all n locations
tcacctgacgcatgcagctccatattaaggggcgttatttcatttgtatatcncaccaatatattcctttctaaagttctaaaaacaataattactctctctaataataagccaatgtcatgattgtctctaagccaatttatgctaaataacaaatacacacgcatttcatttggaaagcattctcccatacctatactttttaacgaataaaggtttaattgaagaatccatacatgaacattccttgattaaatctgactgaatccatcttcacttgaacataagccaattacctaccacctctatgagccattgtgaccaacattaaagcaataaaaagccacaacgttatatttcttgtcagtaacactcatat

SEQ ID NO: 163240 - DNA, 422 bp, Glycine max
gcttctagccaaatggacttaccttaaattaactcctttgattttctttttgagccttgattccctttccttgttgtgaagctcactacaagccttaagtgaaaaaccatgatatcaccatatccttatggaattttggagctttggaattgctttgggaataagtgtggggggctcttgtttcattggataacatgttttgttggctatgcttcatgatggattttgggccatacttgatgtacattgtgtattggctaaatgttggacatgctgaatgatatgctgtttctcaaaggctacaaaaaaaatatcgaacaagaaaaaatcgaaaaagaaaaagaacagcaataaagttgagtgaataagatcttaaatggcaaaagaatgatgagactcttggttctactctctatgtctaa

SEQ ID NO: 163241 - DNA, 367 bp, Glycine max
  unsure (1)..(367): unsure at all n locations
agctctaacatcagaccacctncatggttttggaactacttcacatggacctgatggggcctatgcaagttgaaagccttggaggaaagaggtatgcctatgtcatccacaacagagtcacacttaaaagagggactccaaccactctgtatgacatctggaaagggaggaagccaactgtcaagcacttccacatctttggaagtccatgttacattttggcatatacatagcaaaggagaaagatggatcccaacagtgatgcacgaatattcctgggatactctacaaacagcagagtatatagagtattcaattccagaaccacaacagtaatggaactcatcaatgtggttggtgatgatct

SEQ ID NO: 163242 - DNA, 449 bp, Glycine max
  unsure (1)..(449): unsure at all n locations
agtataacttccgttacactttcttaagcagattctgacactctcgcttagcggaccgctgcgctaagcgagccagagagatgtttggtttctcaatgacgctcgcttagcggatcagcgcgcttagtccctgtttgaaattcaaaatcagtttttttttttacacatagaggcttggcttaccgctcggataagaccgcttagcgagttatgcagatcaaaaaacctgcaactctcgctaagccgggctctgggctggcttanctaaaatgatgcatcttaagtacaaaggagcatgcgcttagctgaaaaggactcgcttaacgctcacattgccgcaaggaattcagcttatctgccatgactagcgctaagcttcatgaaccccagttctggccgcaaagaaatgagcgtggtggcaacgactcacgcttagccaaagtgtatga

SEQ ID NO: 163243 - DNA, 314 bp, Glycine max
  unsure (1)..(314): unsure at all n locations
aagctatgagcaactgagactatttttttttgttacancaacttctcggtgagttccgtactatatcgagaagcccctcattgcacacggcacctcttacaaaactcatacgaccgtcacactttactcggatgtccgaccgagtacaccaatatatcgagatgctacaacaagataacgcttgctcgtaccccactcaacgacgaccactctttacctccgttgttgattgactaccggaatatatctagacgctcaaaactgatattcgtaggtctgaattaattgaattgacaataaatatataaacggat

SEQ ID NO: 163244 - DNA, 330 bp, Glycine max
gcctgcctttcaggggtaccaaagtgaatgcaatgaaaatgatgatgaataagctggtatataacaacaagctgggtatactcccaattcctgcggctgcactgttgacattgggggcggtagttctatatatacttcaattactctcccaacatttggtgggaaatcaactatttcaaggaaaaaacacactttggttctcataagggcgttcacctttagcagagaaatgtaaacgaaaaaagtatttaaatacgtgcatgagtgttatctgtctaaacactaagccctcacaacgcttttttggggctccaatttcctttacctatg

SEQ ID NO: 163245 - DNA, 465 bp, Glycine max
tctacacttaacccccaagaccaataaccaactagcctgatatgctatgaaaaaagagccaccagctcctctataagagcccccatatcctttagttccatcaaagaagaataaggagcactacttcaagtgtctattggagatattcaaggggttggagataaccatgccatttggggaagccttacagcagatgctgctctacaccaaattcatgaaggacatcttcaccaagaaggggaagtacattgacagtgaaagcattgtggtgggaggcaactgcaatgcagtgatataaaggaagctgcccgagaaattcaaagacccagggagcgtgacaatcccttgcaccatacggaatgagtcagtacggaagactctcattgacttatgagcaagcatcaacttgatgcccttgtaatgtgtaagagaattggaaacctgaagatagaccctaccaagatg

SEQ ID NO: 163246 - DNA, 344 bp, Glycine max
cttcaatcctataacgcaacgtggcggacaaaaatgggcagttaacttgaatggccatcactgtcaatgccgaaagtattctgcccttcactatccatgttcacacattattgcagcttgtggttacgtgagcatgaactactaccaatatatagatgttgcttacaccaatgagcacatcttaaaagcatactccgcacagtggtggcctcttgggaatgaaacggcaattcctccttctgatgaggcatggacactaactcctgacccaactacaattcgtgcgacaggtcggccaaaaacaacaatgataacgaatgagatggattgggtcgaaccatctg

SEQ ID NO: 163247 - DNA, 411 bp, Glycine max
  unsure (1)..(411): unsure at all n locations
ggaagcggaactcgggctacactccgcaatatacttacgccaacatagaaacacgatggtgttcggtcggaggtatagcactcaagcttacccttatggcttgcctccagacttcactccctgtaccgctccggacaatttgaaccaagcccctaccttcgaggggcaacctcctccttatgccgattatccactgcaagaagacgatgaagaagatgcccgtctacgccctctacttcccctcaatgatccggccccccatgaattgtcncaaccaaacatagtccgccatgtcccgtctccaccgcacccgttaaagaatacgtccctctgcaaaagattacggacagactgatgtacttgaatagaggctgatggcggaaaaagcctctgcaactacccgctctcgga

SEQ ID NO: 163248 - DNA, 391 bp, Glycine max
agctttgattaactccttaatagtgatcttactatttggacttagaaagtcaagtgtttcatcagttttggagttgaaagaccaaatattgaatgacatcaatggtagtaatgactactaaatgcattcttgatgatagaatgtctatatatagcacatgtgtttggtcctagagctcacatcttccatttttgtctgatacaccatctgcagaaagagtgagagcttgaaagaaccaaaacaaagtagttcttttatggatagctggaggtatattttgatttttttttttttttgcatccgagtctatatatgagttggattgacctgccagaggttgttttccgcatttgctaatcacctatgtttcattttgttgtttggaacctca

SEQ ID NO: 163249 - DNA, 355 bp, Glycine max
cactgcatcttggtgcgtcggctccgttttctccaccgttaacaaatccgcaacccggtcgggcctgatggaaggttgggcctggacttgggcctcgggcttgggctcgggcttgagacagcccgtggagcgaatcttccacaagctgaaggcggcggttaagagagcgagccacgtccacaagttgttgagggctgtgagcaagccgaagctcaagtagttgaaggctagagcctgcacattagaatccaacacattcatttttattttattttttccttttatggactaataacactattggatcgggaatttaacaatttttgtgttgcgagagatgaatcgattgcgggag

SEQ ID NO: 163250 - DNA, 414 bp, Glycine max
  unsure (1)..(414): unsure at all n locations
agctntaagagatgttgcgagagaaaagatcttttcttcaatgtggttgaaactggagtcattgtatatgacaaagtcccttgctaattggctatgcttgaagcaacaactgtacaccttcaagatgacagagtcaagaacaaccactgaacaattggctaatttcaacaagattcttggtgatttggaaaatattgaagcaaagcttgaagaggaggataaagctctcttgcttctgaattccttaccaatcctttgaacattccaaggatgtaattctctatggcaaagatcaagacattaccctagaagaagtccacacctcaataaggaccaaggagatgcaaaaatagcaagactcctaatttgaggataatggcgaaagtctgaatatttcaaggcgaaagaatgaaa

SEQ ID NO: 163251 - DNA, 444 bp, Glycine max
gttgagggttctatcttacttctgatatcttgtgttacacctttgttgaagatgaaccaatttcttcatctgcctgagtgttattccaattggcacttcttttcttcaaatgaccaagctcgctcaacaaatattcagcattgatgtaatggcattcccttcgaatctctcagaaaaggagttccacaaacaagaagggttgctttttcattttctttagcatctttctgatcaaacaagtcagaaaatcaactatacctgcatagtccttgcagggacatcaatgctgaatttatagacaccttgaatctataagatataaagtagagaaaaggatcaaaatgtagtaaaatcttatttggtatgctcagcagcagattcttctataatctttttacatttctatgtatcacattattaattattaatgtcaaggactaactc

SEQ ID NO: 163252 - DNA, 419 bp, Glycine max
  unsure (1)..(419): unsure at all n locations
agcttactcaagttataaacaccctttccctattctctcaatacacaaaacacattcttcaaagagaagtggatagaatagaaaatagtagtacaacaaagaaggaaagttagagacccacatgcctacacccacactcttgttagattttgttgtttgattttagggtctgaatcttgaaccctaacatttgggaacttggaattttcataaatttgaatggtttgtgggttgtatgatgttggtttgatgattaaaaaaaagggtcactttggctaagcaagttgtggtaaaatgagaatgcattctataatattttttatctacaaatgctagtttgttagaatattagtnctgcaaggcaaggggatcgaacccccaacatttctccttcctccttttcccataccatccaaccc

SEQ ID NO: 163253 - DNA, 401 bp, Glycine max
gtcttcatgtttctccacatctctaaactctcttcttcaatcaaaaacaatgtctctctctctccccatctgaagagaaaataaacgtcccataaagaatatggaaatctggttgatgaaggccattaaatcaattattcatgaccgacctccagattcatatgtgcttgtttgatcaatcattatcgatccatgtattcctaatactcttcttaataagtcaacacaatgcgttcatagtacctattggtattttaaaaacatctgctaaaattcccacaagcggtatgagagctaccattactcttagatcattgtgatttaaagttcttagcttgaatctctttgattatatgaataataattctatgttgcggatactattatgactcgattgatac

SEQ ID NO: 163254 - DNA, 408 bp, Glycine max
  unsure (1)..(408): unsure at all n locations
agcttacgtacatgaccttcatatttcttcncttttctaaaccngcgtggcaagctgtttctctcgagattctgatgcccaaaatgagttttttgggtattaaaacctacggttagacttaaggtgcatctaaaacaaaaatttctacagaaagttatgagcaaaacaagctaaggagatttttacgaagccataattttagcatgaaattgaattggatagtgttgttgtatgaattgtttttcttgagtttttcacctcaaaaaatgagtttgttaggtatgaaaatgtaaggcaacacataaggattacgaaaaatcgattttcggagcacctagaaaatctaaataaagcttacgaacgaaatttggtgaacctcgacagcacgggaattttggtattacatga

SEQ ID NO: 163255 - DNA, 397 bp, Glycine max
  unsure (1)..(397): unsure at all n locations
gcctcataagcgcgggttcaggacacaaacgtcaagcgttttctatattcgaanacgatattccgagtactctcgggtttggtacgaccatgctctcctgatttccagctgggaaattggcgagcggaggaacgccccggcatctacgcaacacgcataacgtaaacctttacggttctaaaagctctatagctgggcctaggctttatacgtccttccttatgccaacgctctgcgcccttcgttgctgaatctataatacaaggatctttctgcatccgttcctggtctctacccacactcattcactcgcatgttgacttctttctctgaaacggcagatccgatgacgagtcccccgaatgtactaatacctgtgacccgtctatcaacttcg

SEQ ID NO: 163256 - DNA, 409 bp, Glycine max
  unsure (1)..(409): unsure at all n locations
agctntaaaatttgaattaaaacgtttatatactgctggtaatcgattaccatatatgtgtaatcgattacacagtgcaaactttgaattcaaattttaatagctgttgtaaatcagttttggccactggtaatcgattacatcctctcgtaatcgattaccagagagtaaatttgttgaaaaagactttttaacttaaaattcttggccaaaccttttgctacttcaattggaattcccttcctatttaatataccctttctaagactctagagattgtcttgatcatccatcttgaatatctttaatttctttgtcttgaataaagctttgagacgcatgtgaaactttggcatcatcaaaacattcagcttgatccctttttcacatccataactgggaaagcttc

SEQ ID NO: 163257 - DNA, 458 bp, Glycine max
  unsure (1)..(458): unsure at all n locations
atgtctcgtatcgatttaattaattgcagccttcttgttattgattacacagttgtttttgagacaatgactaatttattcacgagtctctgctttaatcgattatcatgtgatataatagattacttctctttccataagtgttttagaagtgaacaagaacactttaattgattactttgagtatctaatcaattacattgttcttgagctatttctaggttttgggaagaacactttaatcgattaaaaagataatctaatcgattaccttgtagatttaatcgattaaagatggttataaacaaccaccttgtgttcactcttataacaagtttttctaagttgtgaaaaacaacgaaataagcttctaaatgagctaagttcacatgttgttattagttaaagaaagaagagaagagaagtgcttagaanagtaactcacaccttcaaatcta

SEQ ID NO: 163258 - DNA, 404 bp, Glycine max
cagctcttaaatggcatcacatttattgtcttttggccgttaatatatatgcgccactttattgagagcgctgggggtgagggcttaattttggatatataccgcggcattattattggctaaaatatatttgtcctttcctattttcaatttgcactgaaactatttatatttaatttgtcttttctttttcaaatctttgaaaacaggaaacaaaataaaaataatgcattaaaagtgaaaatagaaaatgtgaagagaaaataaaattgcaagtaaatgctttgaagtttgggctaatgtcgccttttttttttaagggggaatcaacgggaaaaatccccggatctaaaaactattagtcgcgaggaaaagcagcatacccacacaaattcttaactggc

SEQ ID NO: 163259 - DNA, 296 bp, Glycine max
acgctgcgctatgtcttctgctgctctgctcttgccttgacaaacctcggtgatgcctgcactcgctatataagacgccaattacattctaatatatgcggcgaaatctcatccatctcggctgtcctttttctctctttccaacatgtgccgtcagataagctcttctaaatttcttctccatgtgctatacatcaatgagctctacgttggctactgatcacaactctccttgcccatcggacgagcacttctttcccaccaaccaaaaaaaggccaataccatatgcgggtga

SEQ ID NO: 163260 - DNA, 384 bp, Glycine max
agctcggcacatcctccactactagttattatgatcagcagactattactatcgcgaagatgattaatatcgcaatacacgtctactatctatctggcctacacacacactattgccatactcttgccttgcggcccttttgagactgattcaaaacttatcatgttttctcttaatatatcttgtaacaaaaaagaaaatagtcgatactgtttctaatgagatacacttacatcataacgtcgaacaagataaagaaatatttggcaagccaaatatattgaaacaaatctcgtgagtcctattcttaaatcacatacaccttccctcatatcaggatataccacttcctcttctaccaatacacacattgtctctctgata

SEQ ID NO: 163261 - DNA, 403 bp, Glycine max
  unsure (1)..(403): unsure at all n locations
taataccagctggaagagcctcacggagaaagaaagaggatattttctttctntgaagcatgtctcacaagactctcattcatcaaagctacaacaagcgttacacacgctcctatctatagactaagcagcctccttgagaagctttctcgacaaaactctcctgagaagcttctgtgagaaaacttccgtgagaaactagagcttaggtacacacacccctctcataactaagctcaccttcctgagaagctgccttaagaagattcctaaaaaagctagagcctagctacacataccttcctaatagctaagctcacctccttgagatgagaagctagatcttagctacacaccccacataatggctaaggctcaccccatgacaaanaacatgaaaata

SEQ ID NO: 163262 - DNA, 420 bp, Glycine max
  unsure (1)..(420): unsure at all n locations
agcttacatcccacacaactggtttgttctgttatacccagcactcatanctcattcgagggttgaaagggtgaacatccaaaacataagactgccaaccattgaaaactcagcatttactcatgaaagaactgtcaaaatccaaatcaagatagaaaaataataagaggctagaactgaacccagtaaaagacagatgataggtcttacagattcactatgaccagtcaaagagtgcactaagctgccatcaactgcattccaaacacatattctgcaatctctaagatgaaaagacaagtactcagttaaaattgattacctatagaagagtacggaatggatcacaaagtggtgaatgaatgcacagtcaaatgaataaagatgtattatcatgacaatataatattcatgagataa

SEQ ID NO: 163263 - DNA, 361 bp, Glycine max
ctactctgcattgtagagcccttcctcgagcgctctggttttttatgatatctaatctccatttatccatacctgttctgtccttaatcctctatctttgttttcattatttaagaaatatcttctggttaagcagcatttacatatatactgctcgattcttttcagtacgttaatatgagaactcagagggtatcacttctcctgaagaagggtttaccacccctaattgggtaaggtcagtctgtatataccattttctaaacgtatagactggcggtggcatctttgaagagcctgattgaagtttctttgctttccaccataggagcaacaatgtcatatgttgtcgacttttctt

SEQ ID NO: 163264 - DNA, 402 bp, Glycine max
  unsure (1)..(402): unsure at all n locations
cgcttatagagaagaacaatgatgatacattgaganaccgctatgggctagctaaaatgccttacactntgctctatccttctagtgatgagggattgacttttagaggaattccaaacagtatctctatctaagggctctatggttgctgaagtaccgtccctgcctttaaataaatgtgaaatagaaggaatctgattccttcctcagttgtgtatgtttaacttatgtatttggagcggctgaatgtactcgtatttccatatatctcattttgggataattgaaggaccctaattagtaaaaccaactctatttagtgactgataaagcaacaacaaccaagccttttcccactaggcggagttcactacatgaattacacaatgccaccatgttcca

SEQ ID NO: 163265 - DNA, 464 bp, Glycine max
tctcccgcaatttcctataaatagggggagaagtgaagtgtttttggttctggcccttaagcacttctctctctttcgaatatgcttggaaaaattgtttccgcgaagaaaatccaagtcgaggcgcttccgaaacgtttccgtaacgttttcgtgaggaatttcgcgaatgtttcgaccgctctttgacgttcttcatcgttcttcgatcttgaatgggtaagtaccttgaaccaagcttttcgattcattctatgtacccgtggtggtccacattgtgtttcatgtatttttattctcgtttcatttactttttatacccctttttgacgtgcttaagccattctatttaagtcatttctcgcttaacctataaataaaataaatttccaccgatcgttcgaattgtattatccgttacttcgattaagatgaattccgaccgttcggtcgtgccgtaacca

SEQ ID NO: 163266 - DNA, 403 bp, Glycine max
agcttatggtcagatccgcgtactctccattgcagagggctacctggaggccattgcctccctccccccatattatgaccagactttgaggtgcttcacctttggggacttccaattaacacccacggtggaagagtttgaagagatcctgcaatgccctttgggaggaaagaagccctacctcttctcacgattctatccccccttagctagaatttctaagatagtcaaaatctctacacaagaattagaccgcgaaaagcaagtaaaaaatggggtggttggggtaccaatgaaatgtttggaagcaaaggcgagagtcttatcacagacaggcgaatgggccccattcatggacatccttggacttttgatcttcggcgtggtcctctttcaaatgtgg

SEQ ID NO: 163267 - DNA, 413 bp, Glycine max
tgcagcttgtttggcactcagatcttgactagttataattttctgaataaaatgagtttatcccgcatttttactccaaaatcaatgtgaatcaaattactcccgcattctttacgtactcctcacgtttggttttttaagaaaaacgccataactaaacgcgccccaaggcattcctatcgcaccagatccaaatttatgacgatgggtgaccaagaggagatgcacgaacagatgaaagccgacatgtcggctttgaaagagcaaatggctttcatgatggatgccatgctacgaatcacacaactaatggagaataacatggtcaccgctgccgttgttagttcggctgccgaagcaaacctaactctcccagctaccgcgtaccatcctctcccgaacgtggtaggacg

SEQ ID NO: 163268 - DNA, 407 bp, Glycine max
cacctgccgctgcaacttggactctggcaatttctttaaatctattcacttaacaaggcgcgactttcgaaagaatcttcaaaaacaagtcacttgcaaaattgtgacttttggaaatgtatttttccaaatcagccactggtcatcaattaccattaaggtggaatccattacacatcaacagatctgactctttattttgaattttgaaaattaaaatgtttagaagctctggtaatcgattaaaagtgttgtgtaatcgattacaccagtttaaaatactttaaaactgtttaaacataagttgcaactcttgaaatttgaaatcttaacgtttaaaaacactggtaatcaattactaccttctggtaatcgattaccagagagtaaaactctttggtaatgat

SEQ ID NO: 163269 - DNA, 349 bp, Glycine max
  unsure (1)..(349): unsure at all n locations
accttatctgaatctgaagtcataaccaagagaattctgcagcaacagctgtgggatgtctcaactgcttatgaatccttgctgaggcagaaatctacggctaagtggatcaaggagggcgacagaaacacagcatattttcacaaactgataaattttacaagaagctcacgtgctgtccagcgtatccttattgatggtgtgtgggtccaccaaccagaccttgttaagcacgcagtgttcaatntctttgctgagaggtttactgaacagaatcatcatagacctaccttggatggggtttgtttctcctcatagatcaacatcaaagagaagggttgactgctcc

SEQ ID NO: 163270 - DNA, 413 bp, Glycine max
ctgcaagctgctgtaacattctatgggctggtttttgatctcaatgaggtccttcaatggtgatctttcaccatggagatgcaccggaaggcaaaggaaaacaggagaggggaggcaccctccactatggaataagccaaggaaaaaggagcttcaccaccaacaattgccttggataaaaagcttgaagaggatgctctaatggacgaaaagaaagagagaaggggggagcactaaattgaacgaataaaagagggaaagaagtggaactttgaagtgtatctcataagactttcattcatcaaagttacaacaagtgttacacatgcttctatttatagactaagtagctttcttgagaaactctcttaagaaaacttccttgagaagcttctttgagaaaacttccttga

SEQ ID NO: 163271 - DNA, 430 bp, Glycine max
  unsure (1)..(430): unsure at all n locations
agtcactgccgcatgcaagctngatgcttcaagtaagtgatcaccaacctttttttctagctctagatggatttatcaacaactattgaataaagccattgttcatcaaggtggctttattagacgcatctctacttccatatgatctttatcacattatgactgagatgcattttaaccttccatatctggtgctacaatacatgatttctcatgaagatgttacacactagatgatccattgttggacaacccaaacatctcttaaggttttgatgaaaacaaaaatataaatttgtgttaaccaatttgttacatgtaagtcaacacgattgctgactggaaggaataccacgaaagacttgttcattaatgaataccttgtctactggaagcaggaagtactcctccatccaaacatcaactaaga

SEQ ID NO: 163272 - DNA, 469 bp, Glycine max
ctccttcttcactatatcaagaatcatcgggttgagtcttctctgtggctgccttattggtttagctccattctctaaatttattcgatgcatacatgtggatgggctaataccaggaatgtccgctaatgtccagcctatatccttcttatgcttcttgagaactgataacaacttctcctcttgctcatcaaaaagggaggcagatataattactggaaaacttttgctatcatccaagtaagcatattttaaatttgatggcagaggcttcaattctggtgtggatggctggataatggtagaaagagatggtttctcagcctgtacctcataaagaaagtcagacgtatgtgtacttcctaaaacatggttagttctatctggctctataaaatcaatctcaaggggtaaaacatcaccagacatgtaatcaatatcaaattcagattcactctcaacatcaaat

SEQ ID NO: 163273 - DNA, 437 bp, Glycine max
agtcacctgccgcatgcacagctttgcaagctggaatcatgtatcctttctttgacagccaatgggtgagtcccgtccaggtagtcccgaagaaaaccggcctcaccgtgatcaaaaatgagaaggaggagctgattcctacttacgtggagaacagttggagagtctgcatcgactataggaggctaaaccaggttaccaaaaaggaccatttttccctgtcattcattgaccagatgcttgaacgcctggcaagtaaatctcgctactgtttccttgatggtttttctggttatatgcaaatcactattgctcctgaggatcaggaaaaaaccacattcacctgcccctttagcacttttgcctataggaggatgcctttcggcctgtgcaatgtccctgctacctttcagcggcgcatgattagtattttcagc

SEQ ID NO: 163274 - DNA, 369 bp, Glycine max
aaatctaagcttaatgccggtgagtcactacaaactgttacctggatctctttgtgattaaagctaaatcacttaaccccactcctaatccctcagcaagcgcagttagatgatttgatatgagccagagtcatttagagactaatgaacaccactctatgcctataagagaaacccattagttaccattctaaaactcaggtgtcatagcatgtcctcatgacgaagataacgacaggacaaacacatggttgatcaatccacaaactaacattaaaaactcataaatgaaaagaaaagtgaatattgatgaaataaatagtgaagataattacatgagagttgctagtacaccaaatcctcaactat

SEQ ID NO: 163275 - DNA, 380 bp, Glycine max
atctaacgaccgaccatctgtgatggagagggactcaatgactggacaaacctcctgcttatgtttctagatgaagaagatctaaatattcgggaaacgcttgaacacggtccgtatgttacatatatattaaccggctgtacaacatttaatcaaacgatacattattggactgttgacgatagaccattagactttataactaaaaggcgcgaggctgaattacgtttgccttagaaatacacgtatactatccgcgttcagatatgtaatagtgctaagacacgcgggatactatacgtggtacacatgattgtcggcaaatgtaaaatatctgggtgagcgcgaacatgcgatttcataatcgtgcgaggctgcga

SEQ ID NO: 163276 - DNA, 407 bp, Glycine max
  unsure (1)..(407): unsure at all n locations
agctngccgcccagctcgcccaggtgagctatgttgctctcttcacaagcaacagccttctggaggaatattctggagggcccaagtgggcctggttgctatttacaccccctgtttactaaatgcacccccctttctatttttttgtaattctttttccgtaacgttacgaaactttacgaatttcgtaacgttacgaaactttacgaatttcgtaacgatacttattttctttccgcaaggttacgaatccttacggattatgtatttactcttttttggctttcaaagaagttacggaaactaacggattgcgcaaaacacctcttttcgatttccgccacattacggaatttcacggattacgcaagcctgctttcttttggatttctgagacgtctcgggac

SEQ ID NO: 163277 - DNA, 454 bp, Glycine max
  unsure (1)..(454): unsure at all n locations
tgtgctgtccagtagagtatagcgctaagcgctaatctctctttgtctctaanaattattgaattgggtttagcgagcctgcttgctaatcctattctgcacaaaaaatatttctgtgttcaatcgctaaacgcatggctatcacacttagctcatgagtaaaatttcataatgcgctaagcacaactgtcgcgctaagcgcccaaccttgatttcagttttattttttgcttttcactttgaataaatcttgtctaatcttgtcttatgattttttgtcttgtagatggcttcccgtaagagaaaagcaccagcttcagtatcccaggctaggtatgatagatcaagatttgtatcacaagatacctgcgactgctacgtagacaatgtccttgactggaagatccttctagaaaggaatgtgaagctgtacattacataattcgatgaattc

SEQ ID NO: 163278 - DNA, 396 bp, Glycine max
gcaccgccgctgcagcttataccttggagaggggtcttatttattctttacctttattgggcgactgcgaatagctatctagtcctgatttaagaaaaattgaaaagcttggatggtcactcgatatgactcataacataatgattataaaatatcttattaagaacgatagcttatgactaaacgatcgtataaagctttttacgttatcatgcatgacttatttcattctaaagaaatattagtattagggataatctatatgtatatatatatgggtacccttgtgatctaatagcgttgaattccttttttgtgactccaaacagtgtgatccaataattgcttactaaacaggtggcggcgaacgacaatgtttgaagagacttgggctta

SEQ ID NO: 163279 - DNA, 395 bp, Glycine max
  unsure (1)..(395): unsure at all n locations
agcttcacataaacttggaaatagctcanattgttgttcacaatangatggttttggagccaagtaacagtggtcattacagtctccttgttaacatgtatgctgaaaaaaataggtggaatgaggctgcacagattcggacaaccatgaaggatctgggtgtatagaagagatgtcctggatctagccgggttgaaatcaataagacagttcatctatttgcaggttctgatacatatcacccttcttatagccaacttcacttgttgctagctgaactggatgaccagctgaggctaacacgctatgtccctgaactggggtctattttataatgacttaaactcttccatgtacgagaatccttatactgaggatagatatctttacgatac

SEQ ID NO: 163280 - DNA, 419 bp, Glycine max
  unsure (1)..(419): unsure at all n locations
ctcaagcttctacaaattcaagcactactgcgatctaaatatattctttttttnaaaacaagtaataacactcgaaatcgccataaaatatataaatattcataataatatattttgtggaagacaattcttctccaaccttgtaagatcactggacaactgattctttctcaatattcaatgcatctgcatatactggattcaaatttaaaatcaccaattttgtgcgagttgatccaattaaaacttctaattnttaattaactctttttttcattcagaaatagttatatctttttgtctctgaagtataacaattatttataggagcgaaatcctatcaatcagctagataatgcacaggtgacacataataatagacatagctaccgcacacctggcatcccttgaaatgcatg

SEQ ID NO: 163281 - DNA, 311 bp, Glycine max
  unsure (1)..(311): unsure at all n locations
cctgaggcatgcaagcttctatgtacgacgaaattatttatattctatcnatcacttcaaacgagacctagtgagtactggaactgtgacaaaccacccaacctatgacagtataatctacgttttgtttctatgtccaacttgtgatattgcgaaacaatttcctctgtacaatcaaggttgtggctacccaatcaaatgtgcggagcaaatggctcatgcggaatggtgctggcagcctctattcaaaaccgtatccatcctgaagaacctgtgtaacattttatggctcctcctccgatagaaacaat

SEQ ID NO: 163282 - DNA, 234 bp, Glycine max
  unsure (1)..(234): unsure at all n locations
gctccatccactanggaataagccatggaatgaagagcttcaccacctacatgagccttggatatgaaacatgtaacgatgctccaatggaggaacagagagatggagataaagagagatgggggagcacgacattgaacgattacaacatgtaaataaatggaaccttgaagtatggctcaaaagactctcatctcctatacttgctaccagtgttacacatgcttctattta

SEQ ID NO: 163283 - DNA, 393 bp, Glycine max
acctgcacgctgcagcttaacgaccggataatttgttttctgttttgctcttaatacatattattttttaaaaatattctattctataaggatttttttctctcactccttttactaaaaaagtatacattacgggttgcaatgctacgttagtattaatactattaaatacataaataaattaacacgaagcccagtggaagtaataaaaccaccgaatagagtggatccttccatcgtacaatgaagtaggcgcccccacagcgtcccctaaaaagtcagaactcacaaaaggcaacccgaaaaaatcaaaactcctcagttactgtgccacgtcaccgcattcgcattgaaagcacacgacacgcgttttctatgccggtaaaacaaaca

SEQ ID NO: 163284 - DNA, 400 bp, Glycine max
  unsure (1)..(400): unsure at all n locations
tancagccaactcttgaggatcaagcctcangagtgcatattctgtaataagtaaataagttctccccctcctccaacactacaggggtcttcagaaatgtgttaagagtatcctcatcaaacttcactaagtgacctctcaccctcacctgcttaggtgatttatcctcggggtcatagaggttcacataaaactccttcacaatagcaatgtctatgttactgtcagaaaaatcagtcagcttctcatcccaatggcctttctcgagttcctccttgaactcatcaaactctgtgtaatggactaccacattcctctctggtagtagctttcgtggcactacaatgtcagtgtatctctcccaagcctcttgggatgtgaatctggatctatcaaatc

SEQ ID NO: 163285 - DNA, 409 bp, Glycine max
gcttaagcgcagcctcgtagagtccaaattttatttatatagaccaaatttggaaacatattttttatgaaagttgtagccccaggtgttagctagctaattttttagatttcactcaaaaataatgatgacaactctcgatatgcttaaattagtaaataaagatcaagttgtcagtcataagtacaagtttcatatagattgtgattttacgcatagtatgattccaaactacgtctttgtgtaaacataaaagttagagatctttttaactatagaggtcatagacacataatagaaaacaaaggagatagtcacccaaaacttatgaaatgttttgataaacttaaacatgagatatggagttcttataatagtaaagtgatgcatatttatgatgcatggctta

SEQ ID NO: 163286 - DNA, 479 bp, Glycine max
aagctttaacctcttcaaataataggcttacggcctagaatgctgattaattttcgcaatcaatttaataatgttctttagacatgcaagacaaaattgattgcaataaaataaatgagataagggaagagagaaatgaaaactcaatttatactggttcggccactcaccatgcctacgtgcagtcctcaagcaacccacttgagattttccattctctttgtaaaatccttttacaaagtttgaaccacacagggacaacccatcccttgtgttcaggaatccttacaacttaagagaccctcggtcccttaatcaatctctttgattaagaaggagaagaagaagaagaattctctctttaagaaaagaatattacaattgaagttcatggatgaactcttaatggatttgcacgtgcttgcccaagagttgctgagagagcatttgacaatgaagatctcttgtgctatttctct

SEQ ID NO: 163287 - DNA, 318 bp, Glycine max
tctgtatggcggtgagcagaagagcacaaaccacaaacccttgcgacaggtacagatttctgattcaaggccagctgggttaccaagccgaccaacccatccagtttgccttcaagctttttattctcacatgatgcagatgggttctgtactacctcatgcactcctctaatgactatggcatcatttctggcgctaaactgttgggagttggacgccatcttctcaatataaattctggcttcaccaggagttatgtcttcaagggctccaccaatggcagaatttattatacttctctccatattactgagtcct

SEQ ID NO: 163288 - DNA, 338 bp, Glycine max
agctcttacttacagtgagtgagtcaggcttagttctatcttctgcactaagcacacttccgatgatttcaaaacagaatgatgttgacacttagcgcatcctttcccgctaagcccagcttgaaagctcaacttacagaatgaatctagagcttaccacacgatggcgcgcttagagcagctataataaattttcacagacaggaagtggcgcttatcgcatcatccacgcaaagcccactgcttaaggtgcaacttacagcgaagatgttgggcttagcgcagcgatgtgcacttagctgaaccattcagccaatcaataaggggtctttgcgctt

SEQ ID NO: 163289 - DNA, 416 bp, Glycine max
tccgctttcttatcgagcgtctgctaagcgcaaggaagaatctggaagtagatgagctgtacaggttcgctaagcgcactgcttcatctcactaagtgcaccgcttcagtccatccgctaagcgagaaagacacgcgctaagctgaaattcactaatgtgtgctaagcggcccagaattgcgctaagtgcacaagcacgaacaaggccacctatttaagcctaaaatcagatcttgcgaaaggattctgggctgggattcaaagctttgcatgtctagagattctagagagagaaaggtccaagctctagagagtcttgagagattttgctgtgtgaagatctgcaaagactgagctcgaagcatgaaccgttctgagagcttgagatgagtctgtgagtggttgtgagatcctac

SEQ ID NO: 163290 - DNA, 435 bp, Glycine max
ctcgacccgcgaccttaagtcacctgcggcatgcaagctcggctcgacgccttatttcttgtccccgcccatgtataaacgccgtgctggcggtatacatcttaaacagtcccctccaccacagcctacaacaccacgctcatatctcgatgacgcatttcaccgaccacttggcgggcacatgtgtacgcacgaatatctcgacaatggggactacgtggcatgcgccatacctacacaatacaccctatgccaaggccattcctctctaccgctcactccaacaaaaacaagcatcaactctgacgataaacacctaacgtttcgttctcaacacatgcaatttatatgaccgagatacctcatgggatagctaggaagccacagaatgatgtgccttcttgttggagacgaatcatgaacgaatacccatcc

SEQ ID NO: 163291 - DNA, 299 bp, Glycine max
  unsure (1)..(299): unsure at all n locations
agcaagacggttttgctcaatgcccaacaaaccatactatgtctgttcaacatcctctggatggaaagatcgcttcgtttattggttatggcgatgacatcatatgctctacgagacgattatgacctgatagatcatatgaagaatattctancctatgaatgtgacgtaaaggatctaggtcacctcaagtatctgctagggatggaaattgttcgcattaagaatggtatctttgtctctcgaggaaaggacactgttgatttactataagaaacccgggatgcttggatgccaag

SEQ ID NO: 163292 - DNA, 370 bp, Glycine max
aatggctatattacaccgatcttgatgagtccaaggatcaactgcagacaagacactgtgatgaggagctgactaattttgatgactactacatcgatgttgccattgtgaaagaatgttaccctgatgactacgacctgttagacaactctcctaagcaagtaatggtcagaggccatataattaaaattggtgactatacttggaatacctttccgaagaccccagtgattgatgaagaatgtgaaattgtgagtgcttattagagatgtgcactcctgatgcctgatcctcaataattgactgctgatctttatatcccatggaagggattcaaactagacgctgatggtcacccttcgtagatatt

SEQ ID NO: 163293 - DNA, 348 bp, Glycine max
  unsure (1)..(348): unsure at all n locations
acgcttcatgatgagagcgcnccctaagtttcttnntatttgcacctttncaaccacgttctccaagcacacggtcttgttattttcactcactgcctcggcgataccactgatatctgcagccatcacactcaccatttctagcataacatcactggtgcgtcttctttttgatggttgcttcgaatgtgattgtgatgatgaaggccttgccctcgtgtgctcacatgaaccctgcacttcatcacttgcattaccatcagggcttatctgtacatcacgcaaccccagtgcaggagcttctgcctgctcttcatagtcacgtgtaagatttacatcacacctctc

SEQ ID NO: 163294 - DNA, 436 bp, Glycine max
  unsure (1)..(436): unsure at all n locations
aatcttctaaggaagcctctctatgttgtgaacttaagtatcacaggggtgtgcgtagctaaactccagcttctcaatgaagttttctcaaagaagcttctcaaggaaactctctctagaaagcttctcaacgaagctacctagtctataaatagaagcatgtgtaacacttgttgtaactttgatgaatgagagtctcgcgagacacaactgagagttcaacttctctccctttttcttccttcaatantgtgctcccccctctctatttgtctccctctatcttttcctgcattgaagcatcctctccaagcttcttatccaacactcatcttagtggtgaaactccttcttccatggcctattccctaagggatggcgcctactctcaccgtttcctctctgtcttacgctgcatcttcatggtggaaaatca

SEQ ID NO: 163295 - DNA, 338 bp, Glycine max
  unsure (1)..(338): unsure at all n locations
agcttgagatgaggaagtgtcgaacggtgttattttctgcttttattgncgaccacagagtggtacctggagatatgtcgcgggggtcaagagaccttggggacgtcacgtggggtgctattgcccaaaaccaagcttgaccaatcccgacccaacccgggcatagtcggttagtgaccacctgtgatgtacctaaacaggcgagctcctggcagtccacagataaaaggaacaaagaccacaaagcaaggaggcttgtggtggctggccacctgcgaattttgtatgatatgtggattatggcctctggtaatccactaccaagggtgggtcatcca

SEQ ID NO: 163296 - DNA, 467 bp, Glycine max
gtgatgcatgccatgtgtctggagaaatcgctatcaatatatcttctttgctcttctccgttttcatagtctctcatcatgatactcaaacttatgattctattctctgaatcacttgaagaatttatgacattatcttcccaagtgacgcatcctttgctttctttcttctctttgaaactcctcttgtcagactcttcattcttcttttgaagacacgacaatcgaatctcatgtgcctagattgatcgcattcagcattttggggctaaggaggaatcttcttctttctctctttcatcatcatcttctttcttctcaagattttttttatgcagctgcatttctctctaccattatgggaataaaggaatcaaattgaatggctctccatatctctaaatctattacttctttatagatctgcactcgagtcttccatgatgataaccctcaccattgaacac

SEQ ID NO: 163297 - DNA, 395 bp, Glycine max
  unsure (1)..(395): unsure at all n locations
aagtgacctgcggcatgaagctttcccctagcgtgctataatatgtttagaaccgaagaaganaagggttcatcgccttaagcgtttntctctctttcgacatacctgacgaaaattaatctcgtgaagaaaatactagccgaggcgcttccgtatcgtttctgtcacgctatgctgagtaattacccgaagattcttgaccgtgcttcaagattcatcgcccgtccgtcgttttcttcaatcttcaacgggtaagtaccctcaacccagccatctaattcattctatgtacctgcggtggaccacatcctgcctctgctattttattcctgatttcatttaatttttatacgcggcttcggcgtcgctttaccatttatataaaacctttctct

SEQ ID NO: 163298 - DNA, 403 bp, Glycine max
cgcattgctctcttgcttcaaaacacgtatattgctgtttatctttcgcccgaaagaagcttattttgatgtgcctcttgagtaattgatggtaacggtgccttgtttatccacaaacacagagtgataggtcaattggggaatagtccttgcatctttattcaaccccactttttcttaggtaactgaagccatttgtccaacatcctattcttgataagtcacttctctctaaacagacaaaatgaggtcacatgaacgcctatatttctacttgcaaacacacgtaatgatatgcctttctattttttattttgaaacctattctctttttgaaacttatctgtattttactcgttgctttatgacacccccaccaacgtgcaaaatgagtaatctctga

SEQ ID NO: 163299 - DNA, 337 bp, Glycine max
  unsure (1)..(337): unsure at all n locations
agcttacattgttgagccattgctttccctttttcgcttnaacncactccctgcaagcaagtgtgctttccctcgtttattcggctctccattgatgcgtttcggtgtctcagctgctctttttttgccgaatttgtgaagcacttcacatgtgaattcatgctcgattgttgcgaattgaggggttctaggggatggccctatgcctacgttgcattttgaaccaacggggcatgccacattgccacccttttcttgctattcatgcctaaacatgcgcccaccacgtgttcggtgaaatgccctaatggcatttgcgcctgattttgtgacgaaa

SEQ ID NO: 163300 - DNA, 435 bp, Glycine max
tgcttgtggagcttctatggaagctggatctttgatcttctatgatgtcctttaatggtgattttacaccatggagatgcagtggaagacaaaggagaagacgtgagaggaggcgccatccactatggaataagccatggaagaaggagcttcaccaccaagatgagccttggataagaagcttggagaggatgcttcaatggaggaaaagacagagggagagaaagagagaggggggagcacgaaattgaacgaagaaaaagggagagaagtttaactttgagttgtgtctcacaacgtgacatcctgtaaatttctacccacaattcttggaaacaatgtattctgaatgattatatatatatatataagtattattcagcgtatatgcatatatgttcttgatagaaatacgaatagtgggggcaagatatg

SEQ ID NO: 163301 - DNA, 446 bp, Glycine max
  unsure (1)..(446): unsure at all n locations
tctatgattagtcacgattataaagtggtgccctacaagatacttgtctcattntctaacagcagtggtgatcgcaacgagatcacgaacatatgtggaagaggtgagtaacctgcgacaaaactgtntgctaaaaaaagctatcagatgtcttccttgggacaacaccgcacccatacccgaacccaaggcttctgtctcgaccatgaaaggttttgtgaagtcaggaagtgctaagaatggagaatgtgtcatagcatgcttcaatttgttgaaggcaacgtcagcttcaagggtccaatggaactcttccttggttagcaggcttgaaagtggtgctgccaaagtagcgtagctccttataaatcttcgataaaagccagcaaggccgaggaacccacggagggctcgtgtcatgcgtggttgtggccacttgtggatggttc

SEQ ID NO: 163302 - DNA, 140 bp, Glycine max
tccatccaccccagcggccgtgatctggaccctgaacccccgacaccgaagcagcgcgggcgccccggaagcggagctataatattgtcattcatttcccaagcgctttgcgggagatcctcatggaagagcaccgaaag

SEQ ID NO: 163303 - DNA, 459 bp, Glycine max
tgaccaatcccgacccaacccgagcatagtcagtcagtgattattctgtgacgtacctaaacaggtgagctccctggcagtcaaccaataaaagaacaaagtccacgaagtaaggaggcttgtgtggcagctggccagctatgtatcttgggtggtatctgaaatttagcctctggcaatcgattaccaagggtgtggaaacgattacagggcttaaaaatggagacaggaggttaaatggcctctggtaatcgatttccaagtgtgtgtaatcgattacagggcttacaaatgcagacagaatgttaaatggcctctggtaatctaataccaatgtcgattacacacggtgatagggcactggtaatcgattaccatttagcggtaatcgattacacaatgtaatttgtagatattcatgtgcaaacgctgacgtatttgagtttgggcactggtaat

SEQ ID NO: 163304 - DNA, 460 bp, Glycine max
  unsure (1)..(460): unsure at all n locations
ntactaaaccaatcacatccatatatatatatagcacacgtatattctatgattnaaaacatataaatactaaaattaaattcgtacatgcacagatgatacaatacaaagttttctccattagtctgagctataatctttcaaggtgttacgactctaacttattttaattattctacatcatatcatcaagcactttaattagtcaccagctaattaaactaaaattctatttttaaactagctgtataatcatttatgaaaatgccctccacttttaacgcttgtgacttaattacccttttctaattctataaaatctagatcgtcataatcaaccttaattatgcccacttaatttctaaccttacttacattaattactaattttcttctgtcacacttctaatttctatttctagaccaacatcccattattaacatctacgccattaatgag

SEQ ID NO: 163305 - DNA, 453 bp, Glycine max
  unsure (1)..(453): unsure at all n locations
tctcttcacatacggatccacaccaccagtaacatctttccctggaaaatccttggctctcaccactctaacatagaggtagtgctttttttcaaccaggtcataggtacaagaaagcttgtccctcattacagcacctgcacctatgttgggtgaagtctncctgagagcaaagtctagtgcctctgtcggtttatgcattttcctcttagacattatactcatcgattaacctgcaccaatgtaaggaaaacacttcaaataaagaaagctaagataaatatttacaaagactaaaccataaaaggaaatgcacaattatttacctgttgtgtttaaagaagcatttgatttagaacaagagtgttactatcgcatatagattctaaatttgctcaagagaaacatttcatccaagtaaaaggaaaaagttgagcgtgttgtgcatcatgt

SEQ ID NO: 163306 - DNA, 408 bp, Glycine max
  unsure (1)..(408): unsure at all n locations
ttagacctcgatcggtcatgtcctctgaccgatgtctactgtcatctttttggatcaatatcggtgaataatattttttttgccgagatgggctaatgttttcctgcgccaataaatggaaacatgccagctgcggacganacaaatagtccgttgagctcgtacagaaaaacctagccgaactacattgtaaattttatatgccacaccaaaacaagaaaacttcctctgtcgtaaaaaaaacattatctgccaccgagcgtgtttaaaaaaatgcccactcgcggctgaagaatatcagctcgggctatctcatgaccgatgtcgatattgagtttcacattaatccggaacaacactgcatgacgtccggacgaaatgttcatccgctcatctgtgaagttcatt

SEQ ID NO: 163307 - DNA, 449 bp, Glycine max
  unsure (1)..(449): unsure at all n locations
gacactatgaaactaagcttgatcattgcttattattgttgcattatttgtcttttttgctagattccttgatttggtagagaattttgatcatgattatggaatgtttgaaggagagttacatgatattcttagcaaagctaaagaagcaccatttttgacctggtccagaatcatcggtatgccaactttttccacttgatgatgtacctttcaattctttatcctttcaacaaattaactctttttttgtctcaggtctcttgaattatcttcttatcaaaaaatattttgcagaatatgcaggtcccagatctcattttatgttcagaaaatgataatcttggtccttttcaagttatttccatctctttcccaagactaacagaccttggtggagatgtcaaattgttaaaatggagtgcctctnctcatgtagctcagtatct

SEQ ID NO: 163308 - DNA, 394 bp, Glycine max
attcatccgaatcattttcaatatttctaccacacttgacggaataccaaactggtgcatttgaagctcacattattggcgatgaggaaccacagagggctactcttaaggattactctaactctatcgcgccccaattttttacaagcattgcgcggctggaagtccaaccactcacactacatatccatattccctgatccagttgatccaaggaaatctacttcatggtctgcccaatgaagactcttatgcacaccttgcgacatatatagaaatctgccatacagtgaaaattgcaggggtgccaaaaaatgcagtgacgctaactttgtttcattctcttcggctgagaagcaaagaatgactgcttctttcagggaacaacctgaaa

SEQ ID NO: 163309 - DNA, 458 bp, Glycine max
  unsure (1)..(458): unsure at all n locations
cgaacaactcaatattcttttatcctaccaacacactgttggctctaaaacaaatttaaagatttattgtgtgtttggctcactgaccagctcttaatcgtcttacaaataaatttacactttatataattactttcttctctcaagatgtttaagatgttctaagagcttttaaactttacaacaatatattatagaaagaatttgaatgacaacgcataggttctttaaaacttgtggtagttataggtcttatttttcaagtgtttgttatctctaaaaagatatatttcttcacttgagcttgtgtatgaagattgcgatcgttgaaatattaaatgctgattaagttgaaataacccacaccaattaattcacctgcttatgactaattttcttatntttaaagactaatggaacaaccttcaccctttcaaggactaaaatattatttaatc

SEQ ID NO: 163310 - DNA, 228 bp, Glycine max
agcatgcaacttgaccctgacctgccatagtggttacttttgcattgacttacccaagtgataacgagtcacagaaattgaggggcgctcattcatcaaatcacgtgatttccaatatgaggctacataaatatgcgaacctcgtgtcccacaatttacttggcaatctagtgacattctccatagggatgcctcccttggtacctagtcaatggcttaactaacaac

SEQ ID NO: 163311 - DNA, 441 bp, Glycine max
tgtcaaatattatgacagcaaacaacttaatgtttctatttatatgaatccactctcaaaagaaactgggtattggagtattcttaaaatgaaagagtgtgctataacttactctcacatgtgtattgttcatgtttcgaaatgttcttatttacagcaatggcgtaagagttcgtggttactttgtgtgggctgcatttgacacctttgaatttcgagcggggttttcctaaaattggggacttattcatgttgattttaaacatgatctcctgcctctaccaacaactgctgctaaatggtacaagagattcttgaatcatgtaatttgacacttaaacattcttacatttgactgacaaacgggaaccgatgaacatcataccgacagaagccagggattccatttaaataaggataaacaatcgctcgcatggcaca

SEQ ID NO: 163312 - DNA, 156 bp, Glycine max
  unsure (1)..(156): unsure at all n locations
acagcacacagatggaacnaattccctctatncttaggataaagagagcgtcgagacactctatctatcattttcatgaggagagataggaattcactctctaacacactctttaacaaagttaaagatgattacaagacacaaatgttgagtgag

SEQ ID NO: 163313 - DNA, 284 bp, Glycine max
ctgatacttatgtgctatccttcgccactaatgtatgtcttttattcctgaattgcatacacctcgaataccacgcggcgctattcaacggactacaacagtcatgaaatatgaaaaaggatcccttttgtgatactcactttttcccctattgaagctcttgactctcttacatacattttacgctttgtgaggatactagtatcatttaggaaacgggatccatttccacacaacgaatgcgttttaagcatgctcttatatcatgaatgacgattcctctc

SEQ ID NO: 163314 - DNA, 429 bp, Glycine max
  unsure (1)..(429): unsure at all n locations
ctcgacccgggatctctgagtcacctgcggcatgcagcttgtatctaatggacactagacagtaaattctatatgatatgattgaagatgataagattaaatcttttactttntctgcaaaagtggatgtttcgggagcttattactctccgttttagatcgtaaagcaattcttttggaaccttactagtctatttggtaattaaggaagtggtagagaaatagaaaagagacagataacgaaggttgctagcttgatgaaatcgctttacaaaaggcgtacgtgtataacaatatattctctcgcaagttattaaaacagtttgaaatgtatataatgaaaaanaatcatcaattcttaaccattgatggtactatcacaacgaatgacattctgcgagtttttttcttaatttctcttcttatttc

SEQ ID NO: 163315 - DNA, 457 bp, Glycine max
tgttctgagatcaccggctgggctgtcacctccacatagttgtgacgcggagatttattacgctttctgggttatcttactatgcggagtaaagacccacatcagaaggcacgtatgtctcacttatttaaccggagaggcatcatattacagagtgagacacactgagagagactcatttgagagggaaccaaatctatacagagacaaaatcattgggatcttcgtatacctaccggagagcgtttattagattgcacctgcggattcgttcaccgctggatcgggtcgatttttggactacaggttctacacacttgaaacttcaaactgtttgggtggatccggaaacagatatctacagagagagatcaagatttcacattatgtgctctatatgctaggattttatctcctcgactctattgaacaactgacgattgctctgatgtgactg

SEQ ID NO: 163316 - DNA, 259 bp, Glycine max
  unsure (1)..(259): unsure at all n locations
atctttcacgctaagactgatgtgtcacgtgaaggaagtctttatatttgacacacttctgtcctcttttgactattaaatggtgcatcgaagatatacgttacgttctgtttgctaccctaagtgtgtgcgatgcacccgccgtactctcgcatgcgtgttactcggtgagaggatatgtattggagacgtggttcgggcgtgagtgggcctcntttgtggcgctaatattttgggccccacttcatctcccgctagt

SEQ ID NO: 163317 - DNA, 328 bp, Glycine max
cattctgagagtgtccaagcattgcgctgcggacatgtttggatcaggtggcgacactgagtgaattatggcattctcatctctatttggggataaatactccaatatatgacacaaatcacactcctcttgaaacgcaagatgaacttgctccaccacccccaccttttctatcccaagttagattctttttttctttacctcatacatatatgattcagcgaagttgttgatgggctaaatatgctgaggacctgtttttggacaaactttgtcatacacactttcagaagaacaaactcatgcaagatgacctgagctgctctca

SEQ ID NO: 163318 - DNA, 470 bp, Glycine max
  unsure (1)..(470): unsure at all n locations
actctagctatgatgatatggtctactagaaagaggcaaatctgatcatcatgctgtgataaatgccaaaccataactagggcaaatgacgagggtgagaatgagggataagcccatgctgtgactgccattcctatacaggcaagtttgccaccaacccaacaatgtcattactcagccaataacaaaccttgttcttacccaccgcccagttatccacaaaggcaatccctaaatcaaccacaaagtttgtctaccgcactttcaatgacgaacaccacctttagcacaaaccagaaacaccaacccagaaatgaattntgccactagaaagcctgtagaattcaccgcaattccagcgtcctatgctgacttggtcccatatctacttgatgattcaatgggaggcataaccctagccatagttcatcaacactcatttcttcgagaatacgactcgaacgcaacgt

SEQ ID NO: 163319 - DNA, 464 bp, Glycine max
cataaacatgctaacaatgtacaagctatatataccaaatttatatatttctagcctaaaaaacaatgtcattgttctggttaggacaatgttatgacatactaagaggagactcgggtcgtgaaattataaaataaagcgggttagatttagataaagtctaacttatttggacttacttccactgttaattactagataattttatatattttcataaaaagaacatttttcttctcatgaaatgaatagtgatcgatattagtttatttcaaacatttagaatgaaaaattatattatcagcagactaacttcaaattatcataatcttggtcttaatagactatggtcggcttcataattaatgaataattaaatttgaaagatgagaaacggactgatcttatgaaagtgaatgctgacagtaacttcaaatcttctgaaaagtatcataaccctgata

SEQ ID NO: 163320 - DNA, 405 bp, Glycine max
  unsure (1)..(405): unsure at all n locations
ttggaagtggtaagcaacgcttatgtcgagtcttccttggtgctaccgcactcatctggtgctgcattgatggtagcccatgtgatgttagggcatgggtacgaacccaaaatgggtttgggtcggaacggcgatggcctggcgagcctggtagagttaaagaagaaccaccaaaggttcgggctatgatataagcctacacgcaccgacgtgaggagaagtgccctagaaaggaggggtagaagcttgggccaaccgcaaggaccgcaagcgaaagggattttcttatgtcacatcagtgaaagctttgtcaatgcacgctggatgtgtaaagggcgggttgccacgatccacgataaagttcctcaagagcaatcaaattgngtacggtcgtgccctcctgag

SEQ ID NO: 163321 - DNA, 434 bp, Glycine max
tacgcgacctatgaatctaagcttcaaaccattttatgaacatccaatacaactatatgaaatacttatttatgtataatatagaaacaccatttcttaatgaaccaaaaatgaaaattgttctttttatgggtgatttttatgaatttttataaatttttaaatatgtatgtatcttacacttattgtatcctatatattttttaaataattgtatcgccatatcacatatgtatcggatctgtgtatcatagatgtatgataataataactataaatatttacttagcgtacaacaatgtttataaacgtagctacgagacttacttacagtattttgcggtccacatatgtaattctgatgtgatatattactgcacgatagcgggccatcaaaagatgctatgacgtatgtcaactggttaagaaaggat

SEQ ID NO: 163322 - DNA, 365 bp, Glycine max
taagctgcctccattgttttactaacatcttataatccaagttattatgtcttttctttcatagattatactataaattctcatgcgagttaggttaaaatccatgacactatcaactttctttcatcttcttaacaatctgcagaaacatcataatcacaattcacaagtaaaccaattatctagcattactatgactatttcttgtccaggcccatagttaaacatacacggcaataccaactgctttagcatttaaatatatggaaagccagaaaatagaaattacagtgccatctattacctggtatgagtaatgagtgtgtagattcacaaaagacatgaaacaagtttgtgacgggtgt

SEQ ID NO: 163323 - DNA, 405 bp, Glycine max
cgcgacactataaaactcagctcttactgaatttgcatgttccaattcttgtttatatggtgtaatcgattaccatatattggtcatcgattactattgtatctgaacgttgaaattcaaattcaattgtgaaaagtcacatcttttcataaaatgttttgtgtaatcgattacatggctttggtcatcgattaccactgacaagttttgaataaaaatcaagagacgtaactcttccaatggttttctcaagattttctcaaggttataagtcttccaatggctttcttgactagacatgaagagtctataaaagcaagaccttgacttgcattttatgtacttgatataactcttacaatcttgttgaacatccttttgaacatcttcttcttcttcttcttc

SEQ ID NO: 163324 - DNA, 444 bp, Glycine max
ctataaaactaagcttgttaagatctggcatgttaaactcaaaaacaatatcttatgcaattgttaggtctggagggtccattgaccactatacgacccatcctgccttggattttgatgattacaaaggtataatttactaatggactaatgagttattgttaagtgaacaagatacactatataaatgagctaaagtgttattcaatcattctctatagcttcaataagtatgcatccacccataagtagaaaactgctttattatgatatattaagcgtccaatgcgttgttaaaatgattgtgtccacttaatgcaaaaaccagtgattacacactgagttgtctttattcatgtgcattggacttaaatcacttatacacttcataatctaatccattacattgttcttgaaagatttccagttcttacgaagaacact

SEQ ID NO: 163325 - DNA, 433 bp, Glycine max
gctttaagaaatcaattatttgaataattaatttatgttgatcgatttgtaaaaatgggtacctggccattcaaatttaaaaagggttaataaaatattttttttcatgtttattaattttcaactaactaactagaattagtttgaaagatgacaagttaatttaacttgtagagaaactttttggtgaaggcttttattattgggctttagcccaatcaaattatatggtaagaaaaacaaaaatcttatactacaaaaggtatttacacatgtagattcttttgatcatctatccttactctctaccctaaaaataaggactcttctaagagaattactaagaaagaagaaaactttatacactacaatgtaaaggtgctttacgcagacaaccaataatcacatttcttcaaattatcacgtcacttta

SEQ ID NO: 163326 - DNA, 460 bp, Glycine max
tgcttgtggggcttctatggaggctggatctctgatctttaatgaagtcctttaatggtgattttccaccatggagatgcagcggaagacaaaggagaatacgtgagaggaggcgccctccactatggaataagccatggaagaaggagcttcaccaccaagatgagccttggataagaagcttggaaggatgcttccatggacgaaaagaaagacggagagaaagagagagggggggagcaccaaattgaacgaataaaagagggagagaagtggaactttgaagtatgtctcacaagactctcattcatcaaagttacaacaagtgttacacatgccttctattatagactacgtagcttccttgagaagctttcttgagaaaacttcctttagaagcttctttgagaacacttcctttgaaagctagagcttagctacacacacccctctcataact

SEQ ID NO: 163327 - DNA, 437 bp, Glycine max
cagcttatcttacctatctatctcccaaatggtcttgcatagattcaatggattaaaaacatgaagttctaatccaagatggtttctttgttgcatgggcataatgcaatcactctatgcctagcaatgatcttattaagatggccctacctttgagttctactaaaaattatcctctctcgagcgactaatccctaaaaactgatgcatataaaaccttcaatgtatttctactaaggattaccctcttttaagcgcccaacccctaaagatgatgcacggatgaagcatataatacatttgttggcattttaagcctgccaagccctaactaaacgggtctagcctttcattgtcatgagagactcttacactctacggggttgatatgaatggaagaagatggatggatagaggaaaaaaaaggataatggaca

SEQ ID NO: 163328 - DNA, 437 bp, Glycine max
  unsure (1)..(437): unsure at all n locations
ntacttgtgatgacaagtnttcccctagccatcgttgttctaatatgcaacattttgttctacagtgggaagaagaggatgatcctgcattacaactagatccaccagacgaggttgagacagctggtgaccccagtttgcaagatcatcatttgtcttataatgctttaaaaggctcatcacgtcttggaataatgaagtttcaaggatcaataaatggattgggagtgcagattctactacatagtgggagttcagataacttcctccagcctagactagctcaatgcctgaagttacctgtagaaccaattcctaatttgcaggttttggttgtaaatggaaatgccttgactgctgaaggattaattcaagacttggaggtgaaaatccaaggtcatacactatagctagcagcttacctacttccagtttct

SEQ ID NO: 163329 - DNA, 306 bp, Glycine max
agcttgtatttacatagccgagtatcttactctcggtgaactagcgccaactggagagctattccatcaaataggtgtctggtgtgtaaaagtaaatgtgacatatgaacaggtgtataaactatttgcgcctcaagaaagaatatcacgcgagagaactgaggtgttataacatgtagagaacacggtgatcctcctaacaggggctcgatggtaaaaagatataccctatctcaaaatgcctatgtgttcttatagagcctgctgaatactagacccaatcctcataatgtttaccctcttctg

SEQ ID NO: 163330 - DNA, 298 bp, Glycine max
  unsure (1)..(298): unsure at all n locations
gacatatgatcaaatggggataggcatgaccctcgggtatcccaacaaaaatttngaaattcaaaagatgcaagcatggcatttgatgcaatcctatcccccaacggcattggatacaagactccaagaaaattgggccacatatgctaaagaaagccatacggttctcatgagctttattgtacatttcggacccatgggctaattatgagcccacttatctttgaacatattacacctatgtgttcattattgttgaattgggagaatccccatccaattaaatattacacgggga

SEQ ID NO: 163331 - DNA, 321 bp, Glycine max
  unsure (1)..(321): unsure at all n locations
agcttggagaagtgtctctacctttattcaacgcaccgtngcctttttaaatacatgcaacttggaagttaacataataaccactacattgaagttaatatgataaccactacatgccactacatgctataataaccactacattaactacttctagaatgaaaactacccctatggaagtgggaccggagattggcagccaagagggggtcgaaggagagtgtctggtgcttgttaacgagaaggtgggaagctgccatgggaagagaaggtggcgtggcttctgctgttggtggaggtggcttggcttctactggtgat

SEQ ID NO: 163332 - DNA, 251 bp, Glycine max
atatggcgaatgagattgctcacatctgtgagttcgagccgctgatgaagaagcaactctacatctaggaggagacgctgaagctcttaatcctaatgttcgaggagattacggacatgagtaaagatgggttctccgacgacacttgcaatgacatgctcgttttctaggaagctcgtcaacctacttgggaactcctcatattcgaaagctttacttgggacgccttcttactctctattattattatt

SEQ ID NO: 163333 - DNA, 364 bp, Glycine max
agcttaacagaaattgaactctttctcaccagccaataccaaacaaacatgcttttcttccacataattatgttgtggaataaaactagtccaatatttgcaccactttaatgaaccccttaaatgatctccatgcgcattactgcaaaagaacactaatgattggccaatgctctaaggtatggtcttgattactatcgaatgttcaaataacattccacatgctcttagactatactgtattaaccttacaacttattcaaggcaatgcatgagctaatttaagtggaatggatgccttccgatgattattggcaagattcctgatgacagtactggagcatgttcacccactaaaaaacaa

SEQ ID NO: 163334 - DNA, 386 bp, Glycine max
atacaccttgggtgggtctactctgacataccgtaattttttccggcgacctttgctcgatgacgtgcgaccattctttggtcctcgcgaggtgcttggcacccatcattaggcgatttgtgatattccatgacatgccgaacaaccaaaaaaagtattgatgcacaaaccgtaagtttccgtgacacaccggaaatcaaatggaagcatcgttgcataattaagtgaggttccgtaacattccgtaagtcaaaaaggggatgatgatgtaatccgcacggttccgtaacattacggaaagaaaacaagtgtcgctacgaaattcgtaagtctccgtaactctacgaagaaagaatcagccaaaaacagcagaggggggtgtactt

SEQ ID NO: 163335 - DNA, 501 bp, Glycine max
  unsure (1)..(501): unsure at all n locations
atccttgagtcacctgcggcatgcaagctnttggatccatttgacctctatcatttatttaatcaagatcatcaaaaccttctcttccatccgagaagttggcaaactcaatattcactttcctccttacatccacatcaagaaagaacctcttgaagcattttaatctttcacgaatgagttccatgtcttgatgtggaggaactcgattagaatcttcacttagccattcatgactataatatctacaattaaaaaaaatatatacatgattaaaatttatgtaactctaaaaaaaatgtaagtaaaaaagtatagagtcaattacctaggatttaaagaatgagctaaacaatggatatgagtgctactcttagtccaacggtcaattaatatggagtgcactacctcataaaagggtgatcctttactcctctcctttctctcatactgatatatggcattcttctacttttcaatcattgaactctacatctcata

SEQ ID NO: 163336 - DNA, 457 bp, Glycine max
  unsure (1)..(457): unsure at all n locations
tagtcaaaggtaaggcaagcttagaaaaaccctctatgaatctacgatagtatcctgctaagccaagaaagttcctaatctcaaacactgacttangactctcccaactcatcaccgcctctaccttggaaggatctactgctatccctcccttagatataatgtgccctaagaagctcacctcctctagccaaaaatcacacttggacaacttagcatacagtctattgtctttgagggtttgcaacacaactctcatatgctcctcatgttcctctctagtcttagaatacaccaagatatcatctatgaagaccactacaaaactatctaggtaggggtgaaagatcctattcatataatccatgagcacaccaggggcgttggtcacaccaaaaggcataaccaagtactcataatgaccgtaacgggtcctaaaggcagtcttcggaacatc

SEQ ID NO: 163337 - DNA, 447 bp, Glycine max
tagagtatgacccattggattaaggtgttggattgtctttactctcatattggactcatgaatgagccttgctcagccatgggaaacgtgtgcatcactaccaaatgtggtgtgcttcccttttgaattttttttaccaaaaaaggctaaagtagagttttgccaaaaataagtgttctggctttttttttttttaccaaaactaataaattctatcttaaatgccttgattactgtgttaaccttcctttgaatatgtgtacttagagtgaaccttgcatagagtccactcacacagagacaaattacactatgactcaatgcacagtacaattcttgcacaaatggaaatctagctcagacaatttctatttatctaccaagctttactaaaccaattacacacacacaaaacaaaattctatgattaacaacatataactactg

SEQ ID NO: 163338 - DNA, 456 bp, Glycine max
ctcagcttctcaggcaagtttcttaagaaagcttctctaggaagctacctagtctataaatagaagtatgtgtaacacttgttggaactttgatgaatgagagtcttgtgagacacaactcaaagttcaacttctctccctttttcttccttaaatttcgtgctcctccctctctctttctctccctctttcttttcctccattgaagcattctcttcaagcttcttatccaaggctcatcttggtggtgaagctccttcttccatggcttattccctagtggatggtgcctcctctcacctcttctcctttgtctttcgctgcatctccatggtggaaaaccaccattaaaggacctcattgaagctcaaagatctaacctccacagaagctccacaagcaagcttccatcaatatgtgtgcattttttgaactttgatcttttgaaaattaaac

SEQ ID NO: 163339 - DNA, 81 bp, Glycine max
cagcccaaaaaaaacgagggaaactatttaccgccaaacccccccccccgaggagtgaggaacacggcacaaaaacccaac

SEQ ID NO: 163340 - DNA, 413 bp, Glycine max
  unsure (1)..(413): unsure at all n locations
tcaagacataatntatccttatgaatctaaagctatcctaatattgatcagagaatggtggcccttcttcactcttgaaaagaagacgattaacttcattcttcagtgtggagagaacattatgactcggattcaattcttaaaaagaatacaaacgcgcttaatgaccaaactgccattattaagcctcaagtgccgcccatgacctccttcagaacgaccaaccctatagaggaaaacaggagataacgagaaggtctgaagttttgtgacatctggacatagtctagaataatcaattgtttacacctatctaggctcaatctagtcacacttattattcactatcgataaaagaacctatctgtgtaaaacacttcacacttgacaaatattcaatgaaccatgatgat

SEQ ID NO: 163341 - DNA, 282 bp, Glycine max
accatagaaagtcagctcttgtaggcataaacgacaaccttggttttttttggccatgatcaatccccattatgtatatgagttacatacatgtaaatcgactagaagacactgcatcgtaatgatatctcccttcatgtcagtcattaagcacatatgccacgcggacaactttaccttctcgctaaggccatctgctggcttaacgagccatcctgtgagcacaccacgtttgcctgtaagcacaaggaacaatctagaacgccgatgagtaggacacat

SEQ ID NO: 163342 - DNA, 382 bp, Glycine max
cctacggaccataaaactaagctggattccagtggccaatggaaaataactatattttattatcacacgacattctcactcgtgactaaagaaaatctacagggcatcaaagaaggagatccttaaatctcctatcacacgttaagctagtcgcgttaaaaaagcgctacttgggaggaaacctaaggaactgatctgtcttttattttctattcctatttattttcctgcatctaacctacctctaacatttgcataattcgacgtaagagtgtcggaggaaaaatcaccctactgaattgacaatttgttgcagccgaatctccctcctttaccttaatgctttgatatttttcacatttgccttggtggagagggatct

SEQ ID NO: 163343 - DNA, 369 bp, Glycine max
  unsure (1)..(369): unsure at all n locations
aactattttcgcttcggagtatgatagtcaccgcattaagagcgctgtacaccagcagcgcttctaggccatcaagggatggttgtttctcctggagcgacgcgttcagctcagggacgacgagtatactaattttcacgaggaaatanggcgccgaccgtggacatcactggttactcccttggccaagttcgatccagaaatagtccttgagtttacagaggagggcgtgcgtgacatgagatcctgggtaaggggtcagtggattccgtttgatgccgaccctatcggccaactcctgngatatccgttggtgttggaagacggccaggaatgtgagtatggccagacgaagaaccggcctgatgg

SEQ ID NO: 163344 - DNA, 458 bp, Glycine max
ctataaaagtagtcaactaaaattcgtaatgaatgcaattacttaacaagctaagggaacttaccctccatccaggtgttctttaaatactttgtcaaatgctcgacacatctgtgaaattgtgtataatttggcctatagaaaagaaacacaacttactacgagcaaaatcctagaaatttcaaacataagaaagattgttttcagcattgatcaaagttctgacccctgaatccacagctattggcctgccaattcggtccaactctgcattaagctcatcaattgctttatttattaaggaaatgatactacgtatcttcatcctaataacatactccaaatgctgcagtgatgaatgccagtaaaggaagggaagggaaattactcacgatcactttcaagaaagagaaaagcaacacgaccacatcgctaaggacaatgatgtgaaaaaaaaa

SEQ ID NO: 163345 - DNA, 179 bp, Glycine max
agctttcaactaatagcaattcaatcatttatgagaatcccaatatatagtccactctgcaaaggattgaaatatgtcgcactaatatatagtacacctttctttaaatatatagtagatatcttgtccatggaaaatgttgaatgtgtatcccaatattcgtcataggcttatatatg

SEQ ID NO: 163346 - DNA, 400 bp, Glycine max
ctaagcttgtaaaaaggagcagttaaaactctctcattcttattcttttttctagttcaaaaccccttgaactacttcacattgatttatttggtccctctagaactatgagtgtaggtggaaattactatggcttggtaatagtggatgattactcaaggtttacttggaccttgtacttgaaaaccaaaaatgaagcttttgatgctttttgcaaacttgccaaggtgattcaaaatgaaaaaggtctgaacattgtttcaattagaagtaatcatataggtgaatctcacaataagtatcttgaaatcatttgcgaagaaaatggaattcaccacaatttttcaacccaagaatacctcagcacaatggtgttgtggagaggaaaaatagatccctt

SEQ ID NO: 163347 - DNA, 444 bp, Glycine max
agagcatgcttcaatggatgtatttaaacagggagagaaagagagacgggggagcacgaaattgaatgaagaaaaagggagagaagttgaactttgagttgtgtctcataagactctcattcatcaaagttacaactagtgctacacatgcttctatttatagactaagtagtttccttgagaagctctcttgagaaaacttccttgaaaagctcttttgagaaaactttcttgagaagctagagcttagctacacacacccctctcataactaagctcacctccttgagaagcgttcttataaagatttctatagaagctagagattagctacacatacctgtctaatagctaagctcacctctttgagatgaaagctagagcttagctacacacctctatatagctagctcaccccttgacaaaacatgaaatacaaaaaaa

SEQ ID NO: 163348 - DNA, 452 bp, Glycine max
  unsure (1)..(452): unsure at all n locations
gtctttacctatggtcttcaagcttaggttctcaaagaatggagaaaaagaggaaggcttgagctaaacaaagagggcttgcaccaccaacatcatctctctaaagccaatgaaacacaatccaaagcaacaccaatgagagcttgtacaaatacccatatgggtcaacaaacagaaaagggaaaaagtagaaaaagaagtattaccctccaacaattgctataagctcaaggaaaaagagtgggttgggataacttgtcatgaaaggaaaataagcttcatccgtgagaataagtgaggaatctnctttgggtggattaaggagaaaatgagttaagaattagaaggaaaaaggaaataggcccttctcactaaagcccaacccaaccacaagtccatacacctaacccatctctcataatcaagaacaaacaatcgccactttggttata

SEQ ID NO: 163349 - DNA, 408 bp, Glycine max
  unsure (1)..(408): unsure at all n locations
tcgaccgngatccctaagtcacctgcggcatgcagcttctaaggatgtgagcttatttatgagaggggtgtgtgtagcttagctctaccttctcaaggaagtnttctcaaagaagcttctcaaggaagtcttctccacaaagcttctcaacgaagctgcctactctataaatagaagcatgtgtaacacttgttgtaacttggatgaatgagagtcttgtgagacatacttcaaagatccacttctctccctcttttattccttcaattacgtgctcgcccatctctctttctttccctctttattntcctccattgaagcatccttccaagcttcttatccaaggctcatcttggtggtgaagctccttcttccatggcttattccctagtggatggcgcctcctct

SEQ ID NO: 163350 - DNA, 383 bp, Glycine max
ctaagctttggaaaatctggacttagccatggttaatcctttttaggccattgcctccctcgcccagtattatgatcatctgttgaggcgcttcacctttggggacttccacctatcacccatggtggtagaattttaagagatcctacgatgccctctactggggaggaaaccataccttttcacagggttctatccctcattagctacaatttccaagatagtccaaatctccgcgcacgaattacaccacaggaagcaagtcgaaaatggggtggtccgaataccgagaatatatttggaggtaaaagcaagaatcttggccgataaaggcgagtgtgtctcgctcatagatattctcacactgttgattttgggagagt

SEQ ID NO: 163351 - DNA, 171 bp, Glycine max
gtaacaataaacactcttatccaactactattcttggctaacaaacttctttcacagccaccctatttattttacaataaaaaaaaaatactaacctattaactttgacaaaatacttaatatatctatttcgcccttccggcctatctctcataagaatctaaacgtggg

SEQ ID NO: 163352 - DNA, 447 bp, Glycine max
  unsure (1)..(447): unsure at all n locations
aagctcaataagnnncacctcggccatatctatagatgatgcgttattttttcttcccacctatgctcctgactacacatttggagtatgaagattacagattctttctctttatactgagaaagccacgtggccccggagattgcactggataatccacgtggcctgcttgattgccctgagaaatctgtggggccaagttcatttttggaccgctgacggtgacccaatataaaatctataatacgccttgataacatcttgaatgtgggttgggcctaactcaactcaaaaaatcagttcatgaagtgaggattgcccacgtctttattatatttcggccatatttgccgatatgggatcttaacatattacaatagaatttctatcctgcaatttatctatctatagaatccctacatggctgaancttttttatctcctcta

SEQ ID NO: 163353 - DNA, 443 bp, Glycine max
  unsure (1)..(443): unsure at all n locations
ntaaattacgtacagcagcagaaaacagccacttcttccttctttttttcccctaaaccctccccaacgcccccaagcttcttctccaccacccacgaccatcggtggccactgcgagccgctgttgtttgccattgaacccccacaccaagaggaacactttaatcagagtggaatcttcaaaacttatctcgaggattcggtagagaacgaaacctccaatcttaccttcgcggctttctttaaggtaaccatgattctaagcccgctccttgttagtttgagcctctctttgggtctcttttgacttgggaaccattattggatgtttttatgcttcctttgaaaaaccatagagaatgagacattgtaaaagttatctttttaaaaacattgatgttattttcgtgaccttcactaaaccccggtcacattggcgttat

SEQ ID NO: 163354 - DNA, 455 bp, Glycine max
tcgtcctcagatacttcttgtgggactagactcagcttatatagttgacgaaagactatactaatttagcctaagctctattctcgaatcactcttgttggactaaactaagaccaaactacattctctgaacaccagatgacaaaccataacttacaccgcagatccctcaggaacgagtgagtactaatattgctgcatacaagttctatagccacaatacattacttaatgctgaagatacctaactatgcacacaaatggttgatcagaccgatagcatacaaaatgcatacactgggagaagcatagagcacagcatacacaatgaattatatcttaaagcaattacatcagctgttctttagaaatccccggcaagggtgtcttgccagccattacactaaaacgctaacaatgatgagattgacagtcgagaataacttatccttaca

SEQ ID NO: 163355 - DNA, 417 bp, Glycine max
  unsure (1)..(417): unsure at all n locations
tactaagctttactacaacagaaaataaatagtttctatttcaaaatttattttatatacggctttctgaagagtaatataccgcaataaaaacaaaaggccaataatggttaaaacctattttgaaaaataaatatgaaataatttttattttgaaaattatatttttttttttggttccttgttatttgttcatttaaaggtgccaaaataaactatgttgacccattggcccgttaggtcaagccaagttgaagggagttgttaggtgcacccagcaacattgctggtgcatccagcaattatgtgaatgggcaaaattgtccttgtttaaaaaacgcgaataccttcgtacggaagaaggttcttncattgttattttcaactgcggaagaatcttcttcctgccatctcgtg

SEQ ID NO: 163356 - DNA, 427 bp, Glycine max
ctcgtcccgggatcttaagtcacctgcggctgcaacttcataggtgtccatgcccttagttaattttccttttcaaccattggttgagggagccaaaaaattgtttgaagctggtacaccagaaagacaacttattgaccttgagaatgatgaggttgattctgacaatgaatataatccctcttttgtttgtgacaaggatatggccaccaacttataactctatgaaacaccttgtttaaaagatgtcaaatggatcgacaagcaagtccatggtatccattctactttgactcacatagtccttgccttctttatccctcaatgtccactcatcaagataataatattggtgggtggcagatagaatggcctaatgatgatgatggttagattttctctcaggtaagagagaggatatatgagt

SEQ ID NO: 163357 - DNA, 415 bp, Glycine max
cggaatccctcctcgggatacagagcttagcagcttacttctgttgatcaggcctcacgagtgcaaatctggaataagcacagagtgattccccctcttccacaataatagaggtcattaagaaagtattaagcgtatcctcatcaaatttaatcagatgacctctcaccctcacatgcttaggtgatttgtcctcggggtcatagaggttggcatagaattccttcataatggcaacatcaatgttgtcatccccaaagtcagtcaactcgtcgtcccagtggcgtctttgagttcctccttgaactcatcgaactctgtataatagaccaccacgttcctctcttgcacgaagcttctaggcacaataatgtctatatatctttcccaagcctcttgggaagtacatcttgat

SEQ ID NO: 163358 - DNA, 444 bp, Glycine max
agcttatccatatgctcgctttcatagtaatatttaatgtatctcttcctaagggcactcttaagatcattccaatactctactggaggatccccatgaatcctttgttccctaacaagggaagtccaccaatagagggcatacccttgaaagctaagggtagccaatggaacttttctctcttcgctaatatgacggcaagcaaagagttgttcaaccttcatttcccaatccaagtaggcctcaacattatcttttccatggaaatatgggaggctaatgttaacctcttgaggccttctatccttttctcttctttgggaatgatgcttagtatgcgacatatagcaccctctataataatcgctaagctcttcacttagactcttgccagagtcatgactactatacgacggcatgttttctcttttcattccttcatta

SEQ ID NO: 163359 - DNA, 415 bp, Glycine max
tcacatttgaagttcaacaaggatgtatctgacaataagtttgttaacacatgtctcacgtagcccaacgaaggatggcctaatccacgatgccaaagtaaaacttgctccattttgttgtttcttggataatgcatgtgatgtgcttggcctacattgaaatcctccatattgtaaagtccccctctcttagtaccacgcccaatgatctccttcgtgagaatattctgaagaaaacagaaagatggattaattagcacaacacagctcaagtcctttgtaacttgactcacagacaacaacttatgagatacggagggaacaagtagtgtatttgaaagcaaaacggatggtgataacatcacaattccgcccctggttctgccgataaccaccatttgcatggcaatacttg

SEQ ID NO: 163360 - DNA, 381 bp, Glycine max
agcttattattgctgatggatgtcaaatctttgattagcatctggagggtattcatcaatgtgcaaaaagccctatgccgaccaacaaaagcagatcaaaattcaatttgattagaagaaaccaatctcatatacatccatcctaaacaatctaaagtgaacatatcacataaggtagcttccaatggcacatttataaaaaaacatctatcactttttatgctgtggtgacatatacttatctgtatgtcataaacaggtcaaccaggcccatagggcatagattccaaaaagagaaaggggtagtgggcttacattttaccatccctggcctatttaagggaagccatcagctaatacgcagttccctttactcagcat

SEQ ID NO: 163361 - DNA, 459 bp, Glycine max
  unsure (1)..(459): unsure at all n locations
ggaagaggatgctttaatggaggacaagaaaaagagaatgtgggagcacgaaattgaaggaataaaagaaggagagaaatggaactttgaagtgtatctcataagactttcattcatcaaagttccaacaagcgttacacatgcttctatttatagactaggtagcttccttgagaagctttcttaagaaaacttccttgagaagcttctttgagaaaacttccttgagaagctagagcttagctacacacacccatctaaaaactaagctcacctccttgagaagcttccttgagaagttagagcttagctacacacacccctctaataactaagctcacctncttgagaagacaagctagagcttagctacacacccctataatagctaagcttcaccccatgacanaatacatgagaatacaaaaaaaaaataatccgtattacaaagactactca

SEQ ID NO: 163362 - DNA, 329 bp, Glycine max
agcttagctacacacacccctctaataactaagctcacctccttgagaagcttccttgaaaagattcctaaagaagctagagcttagctacacacacctccttgagatgagaagctagaacttagatacacaccccctataatagctaagctcacccccatgacaaaatacatgaaaatacaaaaatagtccctactacaaagaccactcaaaatacctcgcaatacaaggctaaaaccctatactactagaatgaccaaaatacatggcctaaacgaaggagaaaaaacatattctaatatttacaaagataagcaggctcatacata

SEQ ID NO: 163363 - DNA, 398 bp, Glycine max
  unsure (1)..(398): unsure at all n locations
ctcagcttgtaatatntattggtataattcgtctgttccattatgttcttaatgtctttagaggttactttctcgttgacatcttttgtcttgaatggaattgccatgacaggtttattgttactgtctttgatatttggcagttgatattgtgttgtgggaggtaatttcgattggattaactcaccatccttcacttgccaatttgntatggcatttgttgttggatcacctatgatgtcttgtctcccagggtaatctatttcctttctgatggcataagcatgaaaccaatcaaagaaaaggacattaattctgactctttcgancaaattgtaaaacttgtcttggatttgttttcctgttgtaccctttgtattgtggaaaaaccatctctt

SEQ ID NO: 163364 - DNA, 451 bp, Glycine max
  unsure (1)..(451): unsure at all n locations
aagaataatggcctcagctaactttttatttccagaaagaaactcaatcaatagacctccaatctttaatggagagggttaccactactggaaaacccgaatgcaaatttttattgaagcaataaacttaaatatttgggaagccatagaaatagggtcttatatacccaccacagtggaacgaaccacaatagatgggagcaccacttgtggaagcacaacaatagaaaaacctagagatagatggtctaaagaggatagaagacgtgtacaatataatttataagccaaaaacataattacatctgccctgngaatggatgaatatttcagggtttcaaaatgtaagagtgctacggaaatgtgggacactttacaagttacacatgaaggcacaacagatgttaaagatctaggatgaaacattaactcatgatatgactattaggat

SEQ ID NO: 163365 - DNA, 337 bp, Glycine max
acagcggtcatctatcatttgcagacagagttctgttgtctccgccaaaacctccccgacgtgccaatttcattttcacggagtcaacaacttacccattgtctacgttatcggtacattgccgctggcgtgatcgacctaccttcccgacagcgcggtgaacatatcttgctgacgtggatagctgttgggtcctctacgcccgcccggacttgcttgattttcgaggacgaagagttgtcctgcccaaaaccgggtcgtactgcatagacatggcgcttttgattaccatccatatcacagagcacgatggcaccattccctcctacttcctatc

SEQ ID NO: 163366 - DNA, 357 bp, Glycine max
  unsure (1)..(357): unsure at all n locations
gctaatagaaaaactaaatataatatgtttttaagaagaaaaagaaaaagattattctgaccaacttgcaaaacttgatgaaataagttggaaaacataatctatcataccccaatgcttggaggctccacccttatcaaaggtatggggaagggttattgtacccacccttacccttgcatatggcatacaggcagttttcagatttgaacacatgatgaaatatgttgaaaagagcttaaaatcgaagtataagctacttctatacagagttcatataatctcttccaagggtcctaatgaaacaaagaaattcatanttttcataacaagctaaaccaatcacacactacatcg

SEQ ID NO: 163367 - DNA, 354 bp, Glycine max
tctccttcttctccctataataggggaaggagggaagatttataagattcaaccctcctggtatctaagattcactcaaaattagtgagataaattgtttctgtgaagaaaatccaagccgacgcgctttcgtgacgtttccgcgggtgatttccgcaagatttttaaccgctcttcatttcgtcttcgccgttcttcggtcttcaacccggaagtctcccgaaatggtacttttcaatctattctatgtccccttagcggtcctcatttgtttcgcgagcttttattttcatttcatttactttccgtacacccttctgacgtgctttagttatctattcaagcatattctcg

SEQ ID NO: 163368 - DNA, 175 bp, Glycine max
gcgaccaagcacgagagcactctgtaacggaggcctttttttagcacgcaatctcacattcggaaaactctgcacagccaaagacctggcatactggaaacgcctcagcgaagaaaacgagactcccaaacaccaccaccacatttaatttcatgcacccaacaaaaactctggc

SEQ ID NO: 163369 - DNA, 344 bp, Glycine max
  unsure (1)..(344): unsure at all n locations
ctatttatagacctcgatcggtcatgtttccttgccgacgtctgctgtctattttttcgatcaatatcggcgaataatatattttttccgagatgggctaatgttntcctggccgaataaatgggaacatgccagtttcggccgaaacaaaacgttggttgagctcgcacagaaaacctaaccgacctacattgtaaattttttatgcaacaccaaaacaagaaaacttcctgagccgtaaaaaaaacattatctgccagcgagcgtttttaaaaaaaaaaattgcgcaatgtcggctgaaaaatatcagtccgggctatcttgatatgaaccctcatggcaca

SEQ ID NO: 163370 - DNA, 460 bp, Glycine max
tcttagtttcaaatgatgcagatgggtttgtagctacctcatgcactcctctaatgactatggcatcatttctggcgctaaactgctgagagttggaggccatcttctcaattaaatttctggcttcagcaggagtcatgtctccaagggctccaccactggcagcatctatcatacttctctccatattactgagtccttcataaaaatattggagaagaagctattctgaaatctgatggtgagggcaattggcacatagtttcttaaatcgctcccagtactcatacaggctctctccactaagctgtctaatacctgagatatctttcctgatggctgtggtcctggaagcagggaaaaaattttcttagaatactctcttaaggtcatcccagctcgtgatggaccttggagcaaggtaatacaaccagtcctttgccacttcctctaatgaatg

SEQ ID NO: 163371 - DNA, 351 bp, Glycine max
  unsure (1)..(351): unsure at all n locations
ctgatatgcgctgtgacactagccaggagttgtctctgggatcggataanaacatggcggtgatggtattgatgagccctccaaagactactacacagatatgttgggccactatgggcctggtgcaaaaactttactatcaaagcctgatgaggctctcagctcatgaataattccaacatccagaccctgcgccaggtgtgtgacctggtcaatgacctagaactcgtatggcttctttagtgacacctccttcttaccataaccatgcctgttgtcaagaagacctttgaccgaaacatcctcattccgagcgacgggcgctttattatcttgtacttgcactacctt

SEQ ID NO: 163372 - DNA, 455 bp, Glycine max
ttctgtacctcaatcccccctttttttcatgaaacaagctggaattgttttgaagaaacatagtaaaggactagcatatgtactatgtatgaacagttttagacagtaggttttctaagctatccttgagtaatatatctgttttccaagattcaagatggaaactgtacaatcatggatggttatgctacgttaaggggttacactcggtgcatgcttggattcacattgaatcatccaaaatcacattgagatatcaaataatgttattttaaataaatatttacatgtttggtctcacttagaaaaattgattatgtattcaaaattaattgagttgaagctaatttaaatagattctgtgttgaataatattaataaaatttatactaagttttattgttaatttattttataataaaaacaaccaaacataaatcattttatttcaaaat

SEQ ID NO: 163373 - DNA, 371 bp, Glycine max
  unsure (1)..(371): unsure at all n locations
tatatcccttcatcatactataggtagaanattagaatactacttttcttataacagtaatggagatacttgtcattctccttaggttcttgttcgtgtttcagaagcaaggcctaggtgccaataatagttcaattgcatacataattaagtaataagtagtacttttgaaaattgctattataatctaaaatttcacacaagtgagccctaagtgtcctattttcttgaacttagagactctacaaacatgtaaaactctaaactcatgatttatctacaattgggtagacttcttaccctttacaatgacactcaccagcctaaaattatgcaaaactttgatacaaaggaagcatatatatgcaaat

SEQ ID NO: 163374 - DNA, 465 bp, Glycine max
gcgacactatacaataccaagcttgctctctcatattcaatcatgaagacaactcgcatttacatattattaaagaccatcttaataaaactctatctttttaataaccattgtgcaatatttgtagctatgctatatgatacgagtattatgagttcacttatgcattccattaatttattttacactgtctttttaattcataatatgttacttataagatataatgcaacaccaatccacataattaataaatcatcacttctgtatcaccataagcctaaaataatactttaaaatattgtcacattattaccctataaatattactgaatcatgataataaattctatctcaaatgctaaaatacttgaaacaaactcaccatcttattttatatctcttatatatgacaaacggtcttatcataacaattaaattatgtgttcacacctcagtcctact

SEQ ID NO: 163375 - DNA, 367 bp, Glycine max
tgtagcacatgcacacggcaataacgtcttactcggatgttcgattgagtcacgtaatacatcgaaacgctcgaaattgaaaacagaagctctgtgcaaattcaaacgacaatacattttaactcggatgtccgattgagtccccgaatatatcaagacactcgaaattgagaataaaagctctgaacaaattcacacgacaataactttttactcggatgtccgattgagtccagtaatatatctagacactcgacattgagaatagaagagctgagcaaattcaaacgacaataactctttactccgatgtacgatggagtcccgagccgctcgatatattatgcgcctcaattggacatccgac

SEQ ID NO: 163376 - DNA, 378 bp, Glycine max
  unsure (1)..(378): unsure at all n locations
tgctnttattccgtgaccacagagtggtacctggagatatgtcgtgggggtcacgaaacctttgggacgctaggtgcggtgctcattgcccaaaaccacaacttgacctatccccacccaacccgggcataatcagtcagtgagaacctgtgatgtacctaaacacgcgagctcctggcaggcaacagataaaaggaacaaataccacaaagcaaggaggcttgtgtggtggctggccacctgtgaactttgattgatatatgggatatggcctctggtaatcgattaccaacggtgggtaatcgattacaacgcttaaaagtgaacacaggaagctgagatggtctcttgtaatcgattaccaacggagtgttatcg

SEQ ID NO: 163377 - DNA, 421 bp, Glycine max
taagggaagagaggaatgcaaacttgatttatactggttctgccacttcccgtgcctacgtccagtcctcaagcagcccacttgagattttccactctctttgtaaaactccttttacaaagtctgaaccacacaaggacaacccttcccttgtgttcaagaatcctctacaacaagagacccacggtctcttaatcccttttcaaaaataagaagaagagaagaagaaatctctcttaaaagagataaattgtacaatgaagatcaatcaaaattccttattgaatatgccagtgtttgaccaagacatttcagttcataaaaactcttaatctttcgagaggataaaacttcttgggccatgaaaactctctttaaattcgtgtctccaagtcacctttgatgtgcattcataaaacat

SEQ ID NO: 163378 - DNA, 342 bp, Glycine max
  unsure (1)..(342): unsure at all n locations
agctntagcacatatatcactatagtttatgtgtnccaaaagtagactgttgtgccttttccttcataatggtaaatttgtagtgaaaattgaaatattgaataatagagaagctacgccatatatacactaaatgatcatattttctccttgcgaccaaagaacttgatacaaattctcacaattggcaaccaatacagaagctgttcagaaattagaattggtacttagtggactaccttctgttgaaggagtacattcacttggttgggtgcgttttttcttggccaaaacattacaacctttgaggagatganganttttcttcttttcggcctattt

SEQ ID NO: 163379 - DNA, 408 bp, Glycine max
  unsure (1)..(408): unsure at all n locations
ctcagcttctatataagctgaaccatcttatcaaaaaacacaagttgttttttattcacaacattagagcttatctcttttatcttagtgagagtgattctcctaaattcttgagtgattcaagaacaccctgactgtatcaaaggactttcacaacctttgtgcgttgccctcgccggaaagagcgattctttccttcctttcatcttcaaccttgctctttcaaaccacaattgcagaaaatccacttctgcccagaattatctcgtggccataactcccgttttacgcactcaaattaagtgattcttgagcctaaattgaatntcaagacgagacctttcacctcgttttggaatcaccttattttgagccctgtagcttgaagttttaccatttctataattc

SEQ ID NO: 163380 - DNA, 399 bp, Glycine max
agcttcattcgtacagacaagtttctgttgcacagagggccaatgctaaactcagtcctagatactttggtccctttcaagtggttgatcgtgtgggtgctgttgcttataagcttgctttgcctacttcttctcgcatacacaatgtgtttcatgtttcccagttgaagagacacttcactgctgctgattcaagtcctacactttctgatttttctgctgacagctctagtcttaaagaaccagaggccattttggatcggatgatggttacgagaaaaggtcaagctgtgaccaaggttttagtcaagtggaaacatacttgcctgaggattcacatgggagtttactatgactcagaagcggttcttctttcatctttttttttggcgcaaatta

SEQ ID NO: 163381 - DNA, 374 bp, Glycine max
gcttatgcccgattgtcttgaataaagcaatctaagagagctcacgacttattttgattcataaatccacccacacatcagccccacaactcaatctctgtcatacgcatcatacaacaacactacaaaacaaaacaaagtccaacaacaagactacttctacgaattgatttagaatatgttatgaactaaatagcatgcatgaattagattcaaaattcaaaagatcggcttagaatgacaagaatacatgaacaaatgtatctagaattcattcaacaaaattaaaatccaacataaactttgaacataatgcgacaattattatgactaaacatgactctcagacaacatggaataagtgacttacactt

SEQ ID NO: 163382 - DNA, 357 bp, Glycine max
  unsure (1)..(357): unsure at all n locations
agcttgaatcggacatccgngtgaaaagttttgtttctttgaatttctccagagcctccggtgctcaatttcgagcctctcgacatattatgcgcctgaatcggacatccgtgtgaaaagtcatgaccatttgaatctttcgagagcttccgatgttctatttcgagcgtatcgatatattattagcttgaatcggacatccctgtgaaaagttattgaccattctaatttctcaagagcttccgttgttcaattacgagcctctcgacatattatgcgcccgaatcgcacattcgtgttaaaagttatgaccatttgaatttctcgagagtttccgatgttttattctcagccgct

SEQ ID NO: 163383 - DNA, 245 bp, Glycine max
tcgctctgctcgaaaataaacatcggaagctctcgccatattcaaatggtcagaactttccacatgaatgttcgagctcggcgcattatttgtcgagaggctcggacctgaacagacggaagctcttgacatattcacatggccataacttcccacacggatgtccgaccctggctcattatatatccgcctcgctcggacttacacatcagaaactctcgccatattaaatggcataactttca

SEQ ID NO: 163384 - DNA, 462 bp, Glycine max
  unsure (1)..(462): unsure at all n locations
tgtaggattatggggtacccatcacatgtggtactaggtggcggtcggtcgatggtgcacaacaagttttccacatccacaaatcgcgcataaacccaccatcccctgttgcccacctccaactgagctcacgtactcccacgtagcccctatcctcgtttctctcaacaccgggtccccatcaatcctcccaagcttccccaacatccaagtaatacaacattcacacagcacaaactatcacagccaagaaaaccgggcaaaggcagaaaaccctgcccaaaacaccaaccaaaatcacagcttttctcacttaaagaccccagtaacaattccttcgttccagctcgttaaccgttggatcgactcgaaagttntactggaagtctatagtgcataagcctacatttttaccggtgggatctactagcaaacatccagaactcattctgcactactctt

SEQ ID NO: 163385 - DNA, 454 bp, Glycine max
tgctttagagtggaggaatgaagtacatgttgtggttcaacaattcaccatgcattccactcttgagaaaactccaaatttgggggagggaaatgtttgtgcaaatatttggttaatggaattattgtaatctacaacacacacaaaaggcaaatactaagtttcaaataagtaaatatataaaaattcagaaaatcaagtcaatttttcttgtgtttgttgtaactccatgtggagcttgtacgccttggatcttcttcatcaatggagtcctttgcttctttaagttcaatggcagcggaatggagaaggaagaaatatgattggagacgccacttcaaggagaagatcagtcaaacacaagctcaccaccataggaagccatggataagagcttgaaggacgagaagatgagaggaggaagaagcatagaacgagcacaaaattttgtacc

SEQ ID NO: 163386 - DNA, 418 bp, Glycine max
tctcctttcttttcctataaataggggaaggagggaagaacatataatttcaaccctcctggtatctgagattcacttaaaattagtgagaaaagttgtttctatgaagaaaatccaagttgaggcgcttccgtgacgtttccgtgggtgatttcgcaaagattttcaatcgctcttcgttgttctttggtctgcaaccggtaagttcccgaaatcgaacttttcaattcattctatgtacccttagtggtcctcatttgttccgcgtgcttttatttccatttcatttacttttcgtaccccttttgacgtgctttattcatttatttaagtcatttgctccgctcataaagaataaaataaatttcccccgatcatttgtattataacatcctttaatttctggtgagatgaattt

SEQ ID NO: 163387 - DNA, 399 bp, Glycine max
  unsure (1)..(399): unsure at all n locations
atcactgaattngcactagtgatatcctccatattgacaagcgcaagaatctacaacaatatatcaaagcattacaaataatctcatagtcaaatattgcaatgcctttttccgttaaacagcacaaggaaagacacttgcagtctatattaatcatgttattgaagcttgggaagtatagcgaattagtgattaggacttacgagaatggcttcaactagaattacaactttattggtagagcatatatatgtatcttggcatagacagcaacatctggcactatccatctttagctatcaataagaaataatttatgcactcagctatgggccaattataagattctttcatggtatatacaacagtcttatcaccttttttaaattctgaccttct

SEQ ID NO: 163388 - DNA, 459 bp, Glycine max
  unsure (1)..(459): unsure at all n locations
cgacctataaaactccgcttctaacgaggtgagcttacttatgagacgggtgtgtgttttttatctctagctcctcaaggaagtgctctcaaagaagcttctcaaagaagttttctcaagaaagcttctcaaggaagctacctattctataaatagaagcatgtgtgacacttgttgtaactttgatgaatgagagtnttgtgagacacaactcaaagctcaacttctctccctttttcttccttcaacttcgtgctgccccctgtctctgtctctccctctatcttttcctccattgaagcatcctctccaagcttcttatcaaaggctcatcttggtggagaagctccttcttgcaaggcttattctctagtggatggcgcctcctctctactcttatcctttgactgtcgctgcatctccatggtggagaatcaccattcaaggacctgattgaag

SEQ ID NO: 163389 - DNA, 404 bp, Glycine max
atattgactacccaatgaggtaatgggagattttttccattgaagggtactacttgagctacaccttgagtttgctagagcttctgaattccatttcttcttgtttttctcatcttggccaagctagcctttctctggttcatggtttgaccctagtggagaattcaccttctttggctacaaagccatatctgaaagcaattcaacttcaacaagggtgtttcagcaccaactttggtcaagatcatgatgacgaaaaaagggtttttttctctggcaaggagtggatggttcatgaggctgcaaaggaaatgaggagtattggattctgggtatgtggggttatgcttgcttgcctatatggagatggtaagccatacatggagctgagaaaaattgctgga

SEQ ID NO: 163390 - DNA, 414 bp, Glycine max
  unsure (1)..(414): unsure at all n locations
agcttttaaatggcatcaaatttagtgtcctgtggccgctagtatatatgcgccagtttattgaaagcgttgggggtgagggtttaattttggatatatacggcggcattattattggctaaaatatatttggcttttctattctcaatttggactgaaactatttatatttaatttgtcttttttttttcaaatctttgaaaacaggaaacaaaatataaataatgcattaaaagtgaaaatagaaaatgtgaagagaaaataaaattgcaagtaaatgctttgaagtttgggttaatggtgcctttttttttaaggtggaatcaggggacnaatcccggatctanaactatagtcgcgaggaaagcacataccacaaaatcttactgtcatctaaaatactaaataagaatt

SEQ ID NO: 163391 - DNA, 381 bp, Glycine max
  unsure (1)..(381): unsure at all n locations
cggacagtcctaacttcatgagccggatctcgcggttgttttatgccctaagtccaaatgctgtgctattctttctgctgctctgcttctgtcttgagaaatctcggtgatgtttgcactcgttatataagttgccaattacattttaatatattttgtgaaatttcatccatctcggctgtcctttttctttctttccaacatgtgttgtcagataagttcttttaaatttctttcccatgtgctatatatcaatgagttntacgttggctactgatcacaactctcctttgcccattggaggagtatttttttcccaccaaccaaaaaaaggccaatatcatatgtgggtgatacggtaactccatcgctggtagaata

SEQ ID NO: 163392 - DNA, 421 bp, Glycine max
  unsure (1)..(421): unsure at all n locations
nttgcggatctggtcttcgctgacgaaaagatcaatgtgtgttatttattgaggtaaatctgatcatcctgctttgatgaatgcgaaaactgaggcaaatgaagagggtgagaatgaaggagaaacccatgttgcgactgccgttcctacatggaaaattccccaccagctcaacaacatcatttcttagccaatatcagcccttctcattacccaccacccaataatccacaaagtccatccctaaatcaaccataattcctgtctaccgcatgcccaatgcccaaacaccacctttagcaaaaaccaaaaaaggaatttcgcagcaaaaagcttgtacgattcaccccacatttcggtgtcatatgctaaacttgctccatatctacttgataatgcaatggtagccataacctcttct

SEQ ID NO: 163393 - DNA, 368 bp, Glycine max
  unsure (1)..(368): unsure at all n locations
agcttcatatgcaggatgtgtaattccagctgtgttatctgctntagtgagaaatagaagtggaatctgtggattcgccacaaaatactgaagacgatgagatttgattacaggttcaacctgttggcgccctatcaggaaggtcgaataatcaagcttgtgagagatggaattaggaaaaggagaagtaataaacgagttgttttgagcacccattgttgatcttatcaagctctagataccataacagaactctaaaaaaagatactttgagaacctaaagagaaaaccatctgagaaagtgaaagggagtctactaatcactcgacttgagtatacatttttgttttatagacagaactgatatt

SEQ ID NO: 163394 - DNA, 336 bp, Glycine max
cgcttgtggcgcttctatggaggctggatctttgagctttaatgaggtcctttaatggcgattttccaccatggagatgaaccggaagacaaaggagaagaggtgagaggaggcgccatccactacggaataacccatggaagaaggagcttcaccaccaacatgagccttggataagaagcttggacaagatgcttcaatggaagaaaagaaagagggggagaaagagagagtggggaccacgaaattgaaagaagaaaaagggagagaagttgaactttgagttgtgtctcacaagactctcattcatgaaagttacaacaagtgttacacatg

SEQ ID NO: 163395 - DNA, 304 bp, Glycine max
tgttttgatgatgacccacagcccaacagaatgatgcccagaatgactcctcacgctcatgatcgagattggagaacatacctcacggaagaatcaagactcacgagatcgagagtttctgatgtctagagaagaaacctcacagcaccaagctcagacttgccaagggatgtatcggaaaaaaatatttccagaacccaacatagcccagtcttgttttacaagagaacggtctccaaatttttttaagttaccagagggtttactctctggcaatcgattaccaatccccgttatcgattac

SEQ ID NO: 163396 - DNA, 301 bp, Glycine max
gcctatcataattgataccagttctcttttatacaatgattgcgttttcaggaggctctactttaatcgattaccaggtgatatacaccgattactctctctcttaaaagtgtttctgaagtgatccaaaacactttaatcgattacatcaagaatctaatcgattacattatatctcaaagttttctagtgtttgaaaaaaacaaacactttaatcgagtgaaatgataatataatccattacttctctaacataatcgattacattgtacatttaattgattacaggaggttataacta

SEQ ID NO: 163397 - DNA, 375 bp, Glycine max
gaccttagaatctcagctctcttagatagcggacatctcccgtgggttgcttatggactggacgtacgcaccgggggtggtcgaaccactataaaatttgagtctgccttctttcttgccttaaacttcttttgcgtattgctattcatcttttgctgtaaagaagcgtatttctgaattgctcttgagtaatccatattaacggtgcattgttgattcacaaagagagttaaattggaattgcgaataatttttgtctctcaattcaactccccttcttaagataactaacgacacttgtccaacatagataatgtggatgctgaacagaatctgaatgttccccacatagcttttttaacctgtcccatacta

SEQ ID NO: 163398 - DNA, 453 bp, Glycine max
  unsure (1)..(453): unsure at all n locations
ntaatcttattattacacagattcatcctgatatcatatcctttattatttaaaggattatatatctcgtaacattcttttcgaaaaaactttaaggacaaaaacataattttgtgtgtataaaaaatcttcactattcttgaaaatttactgattaaaaacgtataatatggattttttaattaaaacagcacaaaacatttatattaatatgggacctttattttttggaacaattttgcttgatttacgaaaatattgcttggttgtcactaaaatgtgaaattcaattaattcccttttatcaatttcaatcttcaccagattattcgccctttcaaattttaaaatctctcacaaattagttgcatctcattgtctnccttgtaaaatagaaaccttaaagcctctttcgtaaaggaagtgaggaactgaatctagagagtcaattaa

SEQ ID NO: 163399 - DNA, 477 bp, Glycine max
  unsure (1)..(477): unsure at all n locations
ctctgagtcacctgcggctgcagctatccgcttctaggaagccctttttttatatttggcttatgcagacaacctactcttttngcaaaggcggaagagagctaagtgggaaatttcaaaaccattcttgatttgttttgtaagagctcaatgcaaaaaattaacgtggataaaacacatgttttattttctcaaaatgttttgtaccaagtgaaggagcatttaagtgaaggattgggtttccaaaggacggaggatttgggtaattattcaggggttcctatattacacanaaaggagaactagaatacataccaatttattattgataagatgaatattagattgagtacatggataacttggccattattatttccagggcacgtcactcttaccagtccatgctccaagctctacacatttatgttatgccaataatgcggctttctaaggttagttgtgatgctattgata

SEQ ID NO: 163400 - DNA, 456 bp, Glycine max
  unsure (1)..(456): unsure at all n locations
ctccccgaaaagatagtgttttacgggaataacacagtcaagtctagtctttatgaaacacctaaattagtgttacctgcgagctgccatatttgatattatccctgtttccgaagctgtttgttccatgcctcctctgtgattgttcagcatgatgagaatctgcaaggcttgtttattcatgaccacactcgaatttaatctccattatccttctaatggcttccgccatgtctaaccgctgctgagggttactttcagtgcaagcagcaccaatgaggaggagttgctccatctcagcaagccaattcctagagcctgcaatcttaggatcaagcacttatgattcccttccctcagagatngcagtttccacccattgcaccacattagccccaccctttccattgctgacatactgagaagggaacctcgctgtccgtatctcaatatgac

SEQ ID NO: 163401 - DNA, 158 bp, Glycine max
  unsure (1)..(158): unsure at all n locations
ggatgagagagggnaaaaggggggagagattttttacaagaaagggagttagaaagcggaaaaaatccaaaaagaaaaaggaggaagaatagagagaatatggggggaaaaagctaggacgattggagaagaaaaagaataaggaaaagatagagaga

SEQ ID NO: 163402 - DNA, 448 bp, Glycine max
actaagcttaacatcagaccacttccagtgtgctggaactacttcttatgttcttgatggggcctatgcaagttgaaagccttggaggaaaaacgtttactgaatcctgcacatctgaaggcatcactcatgagttctctgcagccatcgcaccacaacagaatggcatagttgagaggaaaaacaggactttgcaagaggctgctacggtcatgcttcatgccaaagaacttccctataatctctgggctgaagccatgaacacagcatgctacatccacaacagagtcacacttataagagggactccaaccacactgtatgaaatctggaaagggaggaagccaactgtcaagcacttccacatctttggaacgccatgttacattttggcagatagagagcaaaggagaaagatggatctcaagagtgatgcacggatatttct

SEQ ID NO: 163403 - DNA, 319 bp, Glycine max
  unsure (1)..(319): unsure at all n locations
agctngatgcttcaagtaagttataatcaatcatatttcctagttgtagatggatttatcaacaactattgaataaagccattgttcataaaggcggctttattagacgcatctctacttccatatgatctttatcacattatgactgagatgcattttaaccttccatatctggtgctacaatacatgatttcttatgaagatgttagacactacatgaatccattgttggacaacccaaacatctcttaaggttttgatgaaaacaaaaatattaatgtgtgtctaccaatttgttacatggtagtaacaggattgc

SEQ ID NO: 163404 - DNA, 448 bp, Glycine max
  unsure (1)..(448): unsure at all n locations
tggttacctccttcttcactatatcaagaatcatcgggttgagtcttctctgtggctgtcttattggtttagctccattttctaaatttattcgatgcatacatgtggatgggctaataccaggaatgtccgctaaggtccagcctatagccttcttatgcttcttgagaactgataacaacttctcctcttgctcatcaaaaagggaggcagatataattactggaaaacttttgctatcatccaagtaagcatattttaaatttgatggcagaggcttcaattctggtgtggatggctggataatggtagaaagagatggtttctcagcctgtacctcataaagaaagtcagaggtatgtgtacttcctaaaacatggttagttctatctggctctantaaatcaatctcaaggggtaaaacatcagcagacatgtaatcaatatc

SEQ ID NO: 163405 - DNA, 406 bp, Glycine max
  unsure (1)..(406): unsure at all n locations
taagtcacctgcggcgtgcaagctttggagtacagcagagatctatgattttgttcttccgagccgtacattggcttggtgcgatccgatctcatgtagctcaaccacgtatgggatgtacaatccattttctatctagttccatagatcactgcgnaggtgattcgagtgatgcaactctccttttttttagtagtgctactagactcgttagacacaatggaggttgctggaacatatctttttcatttcttccttggctgaatcttgccttatctgcaacaattcaactggaggccaacttcgatgccacgtaataaagattctatagaggagagtgaataggcttatatataataaaccttttcctagaaaggtttcacagaatatctgctaaccctcattg

SEQ ID NO: 163406 - DNA, 439 bp, Glycine max
ctgctcaatagctacaagttgctgcatggaacggcaattgtctgtatggggtcgctgaacacataaacaacactctcttgccacaggtatagatttttgattcaaggacagctgcgttacccagctgaccaatgcatctagttcgccttccagctctttagttttagatgatgcagatgagtttgtagccgcctcatgtactcctctaatgactatatcatcatttatggcgctaaactgctgggagttggaatccatcttctcaattcaatttatggcttcatcaagagtcatgtctccaagggctccaccactggcagtatctatcatacttgtctccatattactgagtccttcataaaaatattggataacaagccgctcccacatctgatggcacggccactggacacaagatttaaatatctccactattcta

SEQ ID NO: 163407 - DNA, 459 bp, Glycine max
taaataggtggctttgttcgtgcttctgcgcatagcgcttttcttaaccgcttagcgcgcattggtgaatttcggcttagcgcaacttttctcgctcaaccgatggccctttgctcagcgaacaagcacaactcatccttcttccagattcttcctcgtgctttgccgaggaatgttgcactcaccggatggctcactaagccagcagattcatttagcacgagggtgaaaatcaacacttcaaaacttgcctaattaacctgaaattgagagaaaatgattattaaacacacaaaatggaagtactaagtatttattacctatctttaacaaaaggtaattacaacactacaaaataaccataaattggacgagcttggtacaatttacaaacggtgtatacaccacacttactcggattcatggactaatacgagtcttctcgctcaacggatggac

SEQ ID NO: 163408 - DNA, 354 bp, Glycine max
cgaaaacgtacacgctataattatacactcgcagatgcagtgctctgttttctgaacattgccaattgctcaactccactccaccaacaaaaaattcctcctttaggagattatatattataacatccctaagttatagtagcttttgctctcagcctttatcattaaaatattttcctcaatggcaaccttttatctgctctttgttgcctctatttatcttgcatctggatagcatgagcattgtttctctcatatgacgtatgtatgattattctgatatcaagataacgagtattgcaattgctgatatatgtttagctcctactactgcacatggtttgtctgtatata

SEQ ID NO: 163409 - DNA, 402 bp, Glycine max
  unsure (1)..(402): unsure at all n locations
ctttgggggaattattcatgtntggntgacatactgttagtcgtcttatacgactaacttttgtatataaaacattttctaaaacttgtatagttccccaatttatagctattctgtacgaatttgtatataaatcttgctttgtttgaatagctgtctttacagcatctcctatgtgatttaatgataaaatttgcacaatttcaggtcaaaaggagttaaaaggagcagctgcgcctagcggacactgttggctcagcgcgcatccaccactaagagtagcttcagcgcgcttaccggaccagggaatctgaacagcactaaaatcaccgtcgccgctagcgcaagatcacttgctatcgagacgtttgctctgccacgctaaccaccaatggcgccaac

SEQ ID NO: 163410 - DNA, 379 bp, Glycine max
  unsure (1)..(379): unsure at all n locations
ntgcttctacaccaatcactcattcaccgtaagtggttgtgtattatttgcgtctggttcatctatcaaatcatcagatatattataaagacaatagtttaatcatattcaagtactaagacaaaaacacacaagggttccaagttcacactcatgatggaagagattaagaactactagcaaatgaatttgtacaaaaaattcaaaagctttccaataatctgaccaatttgaccacacaatagaatttgcttagagtttatacaagatatgtagaaagaaaatattggcgtgaagctcagtgtagatacattgaaaaagatgatgtatctcacacacaagaggggggtgaattggtttttaaaaaccaaacacactt

SEQ ID NO: 163411 - DNA, 355 bp, Glycine max
agcttgtaggattatggggtacccatcacatgtgttctaggtggcggacgggcgatggtgcacaacaagttttccacatccgcaaatcgcgcataaacccaccattccctgttgcccacctccaactgagctcacgtacctccacgtcacccataatcttgtttctctcaacaccgggtccccatcaattcttcaagcttcccaacatccaggaattcacattcaatcatcccaactaacaaccaagccaaacacggcaaggagaaaacctgcccaaactcaaccaaatattgcttttctccttaaagacccagtacactttttctttcaatcgtaaccgtgatcactaaaagtt

SEQ ID NO: 163412 - DNA, 419 bp, Glycine max
cgagtgataattgatatgccttctatcagacacctttgattacgacgcactgcgtattaagtagcaatttctccattggattgtatggaatatatcctttatattctcagatgacaagagtcctaatacttgctccatttctcatggagatgaagtggcacaaccataatatctaaattaaagcccacatgctaacacttgtgtcgtgtttgttttcaaagcaattctcattaacactttggtattgcttaaaagttagtaattcatagcttgtacaacttattctatcgtaagcgatctaaaggtctcttctatattcactgcttgacaaacctggtgacctgataaaaaagagtccttcccagaacaacatctaagatgatcttttacttaaaatcatactagaatgtcatccttta

SEQ ID NO: 163413 - DNA, 273 bp, Glycine max
agcttagtaaagctaggcactaacataattttctctatgcatcaacattcaatgtcgagcttcttgatatattacgggactcaatcatacatccgagtaaaaagttattgtcgcttgaattggctcacagcttcaacattcaatttcgagcctctctatatgtgacgggactgaatcaaacattcgacgttaaagttattgccgtttgaatttgctcagagcctcaacattcaatttctagcgtctcgatatgttacgagactgaatcacaca

SEQ ID NO: 163414 - DNA, 393 bp, Glycine max
  unsure (1)..(393): unsure at all n locations
ttgagcaaattcaaacgacaataactntgtttctgttgtctgattgagtctcgnaatatatcgacacgctcgaaattgaatgttgaagctctgagcaaattcaaacgacaataactttttactcggatgtctgattgacgcccgccacatatcgagacgctcgaaattgaatgctgaagctctgagcacattcaaacgacaataactttctactcggatgtctgattgagtcccgtaatatatcgacatgctcgaaattgaatgttgaagctctgagccaattcaaacgacaataactttttactcggatgtctgattgagtcccgtaacatattcagacgctcgaaattgatgttgaactctgagccattcaacacaaaacttttactcgat

SEQ ID NO: 163415 - DNA, 193 bp, Glycine max
  unsure (1)..(193): unsure at all n locations
gcttcaacgaccggataatattgttattgtcttgtctttaacacatattaatttttaaaaatattttattctataaggatttttntctctcactccttctactaaaaaagtatacattacgggttgcaatgctagttagtattaatactatttaataaaataataaattaacacgaggcccagtggaagtaat

SEQ ID NO: 163416 - DNA, 377 bp, Glycine max
gcttagcacccaactcttgagatacgcctctgagtgcttacctgcaatacgtaaataagttctcccccttctccaacactacaagggtcttcacaaatgtgatcagagtattctcatcacacttcactaagtgacctctcacccctcccctgcttatgtgatatatcctccgcgtcatagaagttcacataaaactccttcacaatagccatgtctatgttactgtcagaataatcactcaacttctcatcacaatggcctttctcgagttccttcttgaactcatcaacatctgtgtaatggagtaccacattcttctctgttagtcgactttctggcactacaatgtcagtgtatctttcccaacctcttgggat

SEQ ID NO: 163417 - DNA, 451 bp, Glycine max
ctaatattagtgttctaacatcctcttctgaagctaccatgtgcaaacattaaaatactgtagttttgggctttttcagtcctagctttttcattgctagcttcacgacaatcataaatggaaaccatgtggtagcttcatgagtgctaaacactattgttttcggctctttcattgctgcgcattgactgaacaacacactacatcaaacaagcttcatgtaaaatcaaaatggtgcagttttattcagcattttgcagcactttaactacatgctaataactaatgttgttgcattaaacgggcgaaaagatcactgcattctgcaatgaaaacacgcgaaatggtaaaccaaacagctgcaaattgaagcttgttgaagtcgagaagaaacaaacgacttcgaagtcatgctccttcctgtgacttcactattcggatgaatggtgaa

SEQ ID NO: 163418 - DNA, 417 bp, Glycine max
tctgttttcaatttccagcgtctcgatatattacgagacttaatctgacatccgagttaaaactaattgtggcttgcaattgctacgagcttctgttttcaatttctagttctcgatatattactggattcattccgacatccgagtaaaaagtaattgctgctttaatttgctcagagcttctgttttcaatttcgagcgcccccctatattacgggactcaatcggatattggagttcaaagttcttgtcgcttgcattcgctgcaagcttgtgtcttcaattttgagcatctcgatatattacgggactcaatcggacatctcagttaacatttattgccgctcgaatcctctataagcctctgttctgaatttccagcgcctcgatatactttacgactccatcgaacatccg

SEQ ID NO: 163419 - DNA, 465 bp, Glycine max
ctgagggtgcgcagcccaccatcttttatagtagagtatcgatcatgtgtctaccatcacgattatcggctcactttccattattgggggtaccacctgagccgccagatccctccaccttttgggcgtgttctttgaatgatccgcccccctttttgcacatgttctgtagttgcattctatccggagccatatcaaaattgcactgatactgcctaacaaaggcaaccattaggttcttccaagaatggactctggaagattccaagttagtgttccaagtaacagctaccccaggaagactttcttggaatgaatgtattagcaattactcatattttgccgattcccccatcttctgacaatacatctttacatggctcttgggacaagttgttcccttgtacttgtcataggccagcaccttgaactagtgatgagtgatgatattgcgctctaggaaca

SEQ ID NO: 163420 - DNA, 360 bp, Glycine max
  unsure (1)..(360): unsure at all n locations
ttgacgcgtnctcttcatgacaagtctatatgtttcgatatcttttcttttctggcccttgctgcacgaaacgtacaatgtagacccttagaccaccagttgggggttgaaaaacagaaaaattgttatacaaatgtgccgcttaaggaacaccactttctctggaagactttctctagactgaagtgtcattaatcttgccaaacagtatctatatgatcatataacagctgctcattcgaagacgacttattaattcttttaaccacatattggatagaatgtacccttgctagattatgcatagcctgataccaaattcttcaacatgccagtccatacttgatacatgcctatctt

SEQ ID NO: 163421 - DNA, 318 bp, Glycine max
tcgacccgcgatcctctcagtcacctgcggcatgaagcttgagtcctaggcctagaattgttttcttgccctcatcttacaccctccatgctgggccctatacatataaaacagctccaccacccaaagctcacaaaaccatgctcatatctccgtgaggcatttcaccgaccacttggtgggcgcatgtttaggcacgaatattcagagaatggggacattgtgccatgcgccacttcttcagaataccccttagccaggcgatcccttcaacccttcatcaacaaaacaagcaaaatctgggaaaaccctctgttt

SEQ ID NO: 163422 - DNA, 320 bp, Glycine max
cgagaagaagaagagttgataggtgaaactttcttctcttatcagcgaccacataatggccctccagatatagtcactgagagcaagagacctcggtacgtatgtggagcgctattgcccaaaatcaagcctggatctataaacgacccatcccgagcatagtcggtcagtgagaacctgtgatgtacctaaacacgcgagctcctgccacgcagctgattgaacgagcaaataccacaatgcaaggacgttagtggtggctggccaaccctgaaacatgattgatatgcgatatatgggcgctggtgatccattaccaa

SEQ ID NO: 163423 - DNA, 443 bp, Glycine max
  unsure (1)..(443): unsure at all n locations
agcttaanattcattatagatgctaggctttttctttctaatggctcctaatcttgcaactggagcatatgtttcttcataatctataccttcttcttgattgtttccttttgcaactaatctagccttattcctaatgattatgccatgttcatctaacttattcctaatacccattttgttcctatgatggggtagttttcaagttgctctactagttcccacacattgtttctttcaaattgatttacttcttcttgcatagcaactatccaatgatcatctattatggcttcatttataattgtacgttcaaccatagacacacaagccatattattgcataaatctttaagagaatgtctacctgctacccctcttgagtatcaccaataatgttgtcaggggatgaatctttgaagcttccattcttttggaattca

SEQ ID NO: 163424 - DNA, 423 bp, Glycine max
tccttctccctctcttcgtcgatcccactttgtcattgcaccgccacctccacactatcgccacattgccttctccaccaaatccctctccttcgtctgcacgctggagcctaccgccgctgatcccagagaatgcacacaaagtcaaacaaaacaccaccttggatgaacttgtaccagtgctgacgctattttcgtggtgtaccggtgctcttgctaagatctaaggtttgatatcatcttatttattgtaggaattacttgaactaaatccgattgttggtactcaaagtcgtggtatcttcgaagaacaaatatatactttgtttccgagagttaatatttttgcttctatattttggttttgcttccaatgtaactactgggtaaatcttaataattacttattgtcatataaaaaac

SEQ ID NO: 163425 - DNA, 410 bp, Glycine max
agcttcaacatggtgcattgttgaacatagtactggagagaaacatttttgctatatcatatatagagattatcggtcaacaaattatcaatgaacttattctatatgcatgtttaaattgtcctattatttatgtttgtatcaattactttaagtaaacaaagttttgcaaatgttattcaattaaacattgatattattggtaacatgtttttatcttcattgaaggtatttgcattatcagttggtccttgcaagataaaatacaaagagattttcattcttatgcccacataatacaactccaacgaacacgatggcaatgaaactattaattaatccacagacaagtagtctattggaacgtacactcacggtaataatttttataaattatttattaatgattt

SEQ ID NO: 163426 - DNA, 438 bp, Glycine max
cgcgaccatagaaactcagctctgatgtcttatggattctcaaagatatgtgtgttatttatgaagcgaccacaacaataacaaggctgtcactctcatccagagataagaacgagctgacgacagatataggaaaattaaacttatgactatgggagctgaagtcgcacaaaacttatacaatgagagtttggggtgtgaactcctcgaatcctgtcctttatttaaaacaaaataatgcgaaaaatgatcacttgtctaaaggcttactccaactcatatatcgttcatgtcagactatttagataggacattaggaaagaagttgtataaaaatatgctagctttagtcacgatacctaatagactatcacttgaataaatatattatttctcttaatgggatttcaatgtggatcgagacatcgacttcacagc

SEQ ID NO: 163427 - DNA, 400 bp, Glycine max
ctattcccccactcgtggcagcaacagtcaagtcatgattcgttttgaagaattcccaataaagaccctgacaatctatgaaacaaatacgggaaggtcagacaatacattctacgtggatccttgggatgatgcaatcaataaaggcccaaaaccaatcaaagagctcatcaagttacaacttggacctaaacctcggcaatgcacgcaactcagtagagacctcaccaactgcaattacaaaaatatagtcgaagtcctacgaaggaacatagatttgtttcgctagtagccatctaatatgtcagacatgcatctcaacatcatatgccaaaaagtggtcgtctgccctcaagccaaaccaatcttacagaagacgagaaacatgggaaaataatta

SEQ ID NO: 163428 - DNA, 438 bp, Glycine max
  unsure (1)..(438): unsure at all n locations
agcttgcttctacaatcattccatttttgatgatgacaactctcgaatcaagatacacatacacatactttttcctagtcgatcactcacttaattctccatattcctcccctttgttttctgagtttatggctccacttctgaaattaacattacattaccttaccgtcgagttccttggatttacaatccctaatatcttttccccncttttggcatctgacaaaaaagccatagtgcacaacaaatttaaaacatacatacatgaccaatcattcacaagacagtcatttgaaaatcatctcaaccaatcatgacgcaagacacatgaatagatcaaatatatcaaaaccacatagctctataacataattcataattggtcaatcctactatgcacataacagagatactaaattgttcaatgtcataatatat

SEQ ID NO: 163429 - DNA, 350 bp, Glycine max
tgtcaaaactcagggcaaacacatcctcggtccttgttctacaaacctaaagttcacccttggtgagccctttctgtttctaagtttcatcttcaaaggaactcgaggtacacaaagtctgtccttgacgatcttctttatatctagtttttatctgtctaggaataccagtatatataataaccaaggtctgcccttggtacagattcctccaaaacccaaggtccacccttggtacgtactcctgtaaaacccaaggcattccctacgtccactcacttccagcaaccatgacgaccacaatcaaaggtctaagttcaacaacacaaactaccaccatactatttggc

SEQ ID NO: 163430 - DNA, 392 bp, Glycine max
agcttgctggtggagcttctatggatgctgtatctttgagcttcaatgaggtcctttaatggtgaatttccaccatggagatgcagcggaagacaaaggagaagaggtaagaggcggcgccatccactagggaataagccatggaagaaggagcttcaccaccaagatgagccttggataaaaagcttggagaggatgcttcaatggaggaaaagaaagagggagagaaagagagaggggggagcactaaattgaaggaagataaagggagagaagttgaactttgagttgtgtctcacaagactcttaatcatcaaagttaccacaagtgttacacatgcgtttatatatagactacgtagctttcttgagaagctttcttgagaaaactt

SEQ ID NO: 163431 - DNA, 225 bp, Glycine max
  unsure (1)..(225): unsure at all n locations
tntctctggcttctttgctacggccgcctatctattgatagaacgacacaatactaacaccgtaatctcactatattccagcgagggatatttctctctacagacattattccacaaatcgcaatggtgagaatgtgcaccaacgagttctaaacgtggcgtccaaattttatggtgatccaactattaaccagtttgacatcatagctctattggaactaaggt

SEQ ID NO: 163432 - DNA, 274 bp, Glycine max
cttcattgggagatttgcttctttttttcctttaaatcacccctgcaagtgagagcgccttccctctgttatttggctctccattgatgtggcttggagtcttaattgctcttttgttccagaacttgcgaagccattcacatgtgaatccatgcttgattgttgtgaatagacgggttgtttgggaatgccctatgcctacgttgcattttgaagcaatggggcatgccacattgaccccattctgttctattcatgcctaaacatggcccca

SEQ ID NO: 163433 - DNA, 203 bp, Glycine max
ggtttttttgttccatcagccatggtggtacatccactgcccactctgaagaaccaacttctaaatctgcctcattaaatagactcccctttttcaaaagataaaggttatgcctgtataaacagtcaatgtcaaagcttagagagcaacacttctaataactaccggttttattaagaagcttttaacctataaatatataa

SEQ ID NO: 163434 - DNA, 351 bp, Glycine max
attaccaccccattgcaatcgattacaactttttgaaattaattggaacgttgtaaattcaatttgaaaactttttcaaaacaattttgctactggtaatcgattaccagagagtaaaaactctttggtaaacatgttttgagaaaaatccatgtgctactcagtttttgaaaaatccttttcatacttatgttgattaagtcttctcttgattcttgaatcttgatcttgattcttgaagcttgatccttgaatcttgattcttgaattcatccttcttcttgaatcttgaagtgttcttcaacttttcctcttgagtcttgaatttggtcttgatgtcttcttgtcata

SEQ ID NO: 163435 - DNA, 321 bp, Glycine max
aaatcatttttcattaacccttaaaattaacatgcataaagtattattatcattatcagattaaaaaacacggagggaagatcctgctatgattggaccgcttgattgttcgttttgtatctgatatctcggtctgagtggcagatccgcgccgatggtgtgagcgaaaacgttattggggcagaaataaaaaaccatagaatagatagaggtacgtacgatttttttcatctgaatctcctttttcgtttctgttgctttatccgaatttcttcatctcatcctgtatataaataatattacagaaattagcgtattatt

SEQ ID NO: 163436 - DNA, 342 bp, Glycine max
  unsure (1)..(342): unsure at all n locations
cttgatcgtgaacttgatattgaacttatactacaatggaggtacattgntggttttgttatgttaatatttaaaattaatatggaattaatcatatgaaaaaacaagggtatgtaaggtaagtctatatttcatggtgttggcagaatgttgtcttacaaactgctgggaaaatcggcagagtcaaatcataacatgatgaaacagaaagcacagaaatcttggtgggcatttggatggtgaagagtctagtcttanaatattttcatgtatcagtaactaaataatggatttattttagcttttactgggttgctcacctatgaacatgttctatgctcc

SEQ ID NO: 163437 - DNA, 339 bp, Glycine max
  unsure (1)..(339): unsure at all n locations
acgccccccccccccaangattacaactttttgaaattaattggaacgttgtaaattcaatttgaaaactctttcaaaacaattttgctactggtaatcgattaccagagaggaaaaactctttgggaaacatgttatgagaaaaatccatgtgctactcagttgttgaaaaatcctttgcatacttatgtggattaagncttctctggattcttgaatcttgacctcgatcttgacgcttgatcctcgaatcttgaatcttgaattcatcctcttcttgaacttgaggggttttcaactnttctcttgagcttgaatttgtctgagcgtcttgcaacc

SEQ ID NO: 163438 - DNA, 247 bp, Glycine max
atgtgttctatccaatcaggatgtgacatctctggtgtgacaagtatatgtttatttctagatcattggaatattgtgtgatataaaaggacctcttttttattaaaattttgctctatcatcactataattttgatggctgatatttcatatgcttgtaactgtgaaacctatcatgtttatttgtataataaaaacttgccttgcatacgtaagtgttcaagaatactgatagctatctgtactg

SEQ ID NO: 163439 - DNA, 379 bp, Glycine max
  unsure (1)..(379): unsure at all n locations
ccacataancctgacgctcacaaaagatgttattgaagagcaatactttaggacgttgtcctttacccactcgtaaccaacgatgaaggtcttccctgcaacggccgaaggagaagagngaaggattgtcgtgacgagagtgggttcctcgtccagaggagcggcagagggtggaaccctctcacggggctgagaactaccctcaccgacatggtgtaggtccagcaacctctcaaaaaggaagactcactattggaagttccatggcgtgcctcctctaacgaggaatcgctgattggagcgaccttccgttccacaagggttattggatcgaacccncaaaatcgttgtcgcccatgcccatagtagaattagaaac

SEQ ID NO: 163440 - DNA, 304 bp, Glycine max
ctggacaacatatgtctgtatgtatgatttctaataaattagaactcctctttgcaccctttttagacttgttagtttgcttacccttaatgcaatctacacaagtctcaaaatcagcgaaatccaaagtactaagtactccttcatttgctaatcgcttgattctctcaatagagatatgtcctaatctccagtgccatgacagagaaaattcttcattcacaatacatcattttaacccaacagaaacgtgcatagaattataagtagcgtctcttttcaattcaatcgaataaagaccatc

SEQ ID NO: 163441 - DNA, 336 bp, Glycine max
agaggaaaagaaaaaggaggccgaggcacccttcaagctggacacttccaatagtacgggtggtttcgtggctgtgtctaccgacataatgaagtacaccagtgtgtatccggacaagcccgaactcaatgtgattttggcggacgagcctgctccttggaagaacttgttatactattttgagatttacgtcaaagacgctgactttaaggcaagatcgccattggcttcactctcgcattatttttaatgaatatagagccatggtcagtggtacacgtactagcttgagtcttaaatcatatttaattggtttttattaaaatatgcattaat

SEQ ID NO: 163442 - DNA, 301 bp, Glycine max
gcacataatatattgagacgctccaaattcaacaacggaagctctcgagaaacttgaatggtcataacttttacctcggatgtcagattcacgcgcataatatatagagattctcaatattgaacaacagaagccctcgagaaattgaaatggtcataactcttaactcgaaagtcagattcaggcgcataatttattcaaacccttcaatatttgaccaccggaagcttattagaacttcaaagtggcataactttttactcggatgtcccattcaggcgcataataattgagacgctcg

SEQ ID NO: 163443 - DNA, 317 bp, Glycine max
  unsure (1)..(317): unsure at all n locations
cccacgccgcccctgatgagtttcgatccaccctcactgcagaaatttgaaaagcaacattttatatgtgattagcagaattttcttttctgacatgatcttgcagctttccttttatatacacatagccattaatgttgaatataacaagcacatttttagtttataatgtccaacttttgtttatataccccatactctacacaatatacaaggctcagaaatcaaggaattgttntacttttgcatctagagatccaaagtagagctaaccaaaactggtgcaatcaataacagaaccaataagagaaatagaa

SEQ ID NO: 163444 - DNA, 298 bp, Glycine max
  unsure (1)..(298): unsure at all n locations
gaacgatatggctctgtcataacctcaataataaagacaatgactattttgggttttcatcattcgcagagaaagactagcgcaaatgtatgtgacgaggacaacattgtctttcaaggagaacttcttttgtgcggtgcaattggactgagctaagtaaaagtttgacctcatctacacacacatgggaaacgaacaagtccattctcaaaacaattatggctccatatattgataagntaaatataaaatatttttacagagagttaaatataaattgtataaggtgtattgaaat

SEQ ID NO: 163445 - DNA, 398 bp, Glycine max
  unsure (1)..(398): unsure at all n locations
agcacgaagtatgggtcaaggaattggttttagattttcagacgaccgagagaaacaacacgtgggagtntagtataccgtccccatggaaaatatatcaatggggttaaaagggtctattaaacaaagctcaaccctgatggcaccaaacataaacacaatgcatggctagngactaaacggtactcacagcggacccactattgacttcagtgagacatttgcaccagtagctcgtcttgaaccataagagctctatagctctgcgaacataacgatgagatccttaactagaatcaaatccctttcttacgacgtcttaaaagaattatttgacaccacaagatcttgtttaagcaataaataactgtatactaaatatccttccggtaaacaac

SEQ ID NO: 163446 - DNA, 343 bp, Glycine max
tggttgatacatggacggagatgaaaaagatcatgaggaagcggtatgtgccggctagttactcaagggacttgaaattcaagctccaaaaactaacccaaggcaacaagggggttgaggagtatttcaaggaaatggatgtgctcatgattcaagcaaatattgaagaagatgaggaggtaactatggctcgatttcttaatggtttgactaatgatatccgtgatattgttgagctgcaggagtcttgtgaaatggatgatttgcttcacaaagcaatccaagtggagcaacaattaaaaaggaagggagtggccaagaggagttttaccaactttggttc

SEQ ID NO: 163447 - DNA, 315 bp, Glycine max
  unsure (1)..(315): unsure at all n locations
cccggagagcgtccgttgtgcaatttccagcgtcttgatatattatgcgcctggaatggaccttccgcgtcgtaagttatgaccatttcaatgtatggagagcttccgtgttcaatgggcagctgcttgaatattatgcgcctgagttggactttgcgagataaggtgtgaccattttaaattttcgagagcattcggagttcaatttcgagcgtattgatatattattcatctgaatcggactttcgtgtgataagttatgaccatntgtatctctcgaccacgtccgttgttaaattcaagctgttcgatata

SEQ ID NO: 163448 - DNA, 353 bp, Glycine max
  unsure (1)..(353): unsure at all n locations
tccatggcttattccctagtggatggcgcctcctctcacctattctcctttgtcttccgctgcatctccatggtggaaaatcaccattaaaggacctcattgaagctcaaagatccagcctccatagaagccccacaagcaagcttccatcaagtggtaatcagagcacaagagcttcaagtaggtgctccttaaacctccattattttttttctttaccttctcttccattgttgtttcttcatttttctccatgtatctcctcacatgtcttgttctaaatgttgttaacatgattctttagagtttccaccgattaaacttgctatagaagttagattngattttctatg

SEQ ID NO: 163449 - DNA, 130 bp, Glycine max
tcttatgttcattgtgtatatgggtgtgggtgggtgtgggtatgtgtattttacatttgtatgaatgtggtttgtaataattattacttttactcttggagggaatatatatatatatatatatatatat

SEQ ID NO: 163450 - DNA, 339 bp, Glycine max
tcaaccgccccccgccccccacagaagaatccaaccaggctcattttgcttcaagattaatacaagattgtttcaacaaaaaaagccttgattcaagatttcttcaagatcaagccttgcctcacaatgaaaggtttcaagtcattcaaggcacatgtaatcgattaccaatacatgtaatcgattaccagagactctgaatgttgggaattcaaattttaaatgaagggtcacaactgttcaagaaaaacaactatgtaatcgattacactaattctgtaatcgattaccaaagaggattctcaaggaatatcgccaacattcacatcttatcatttg

SEQ ID NO: 163451 - DNA, 331 bp, Glycine max
ccccattcattggatggctcaacttttttactggatcccacaaaattcttttattggtgttgtcacctggagaaataatagtaacaaaggtgaccagttgtgcttctttgaccccattcccaaccaagtaaataaagtcattaccagtgattccctctgcagtttaaatgatttatcactccacaaacataatatgcctcctgctgtattgatagctggcaacaatttccaacttacctctgcatgtccccataaagcctgacacatagcttttgcagccatttctttctttgtctcttgaagaccaatcatatccacacccttctgctta

SEQ ID NO: 163452 - DNA, 371 bp, Glycine max
ccaagggggggtgggactcacatatcccaaactatttccccaattaaaaaattatttcactttcttttcaagttatagattcccttaacaatgaacttcttaaatattaattcaaatcaaacaatttgaatatgaatgtaaagcgataataaacaaaggagattaagggaagagaaagtgcaaactcagatttatactggttcggccacacccttgtgcctacgtccagtccccaagcaacccgcttgagagttccactatcttgtaaattccttttacaagttctaaacacacaaggacaatccttccttggtgtttagaattcctttacaacaagagacccacggtctcttaatcccttagagaatgag

SEQ ID NO: 163453 - DNA, 279 bp, Glycine max
acgctttttacctattactggcaattgttacttaacttgcattacctattttaccatagtagttatgtatgtattaaccattcattattcatgttgctccaacaatgccttacttctgaaaaaactttgttaataacaagaccctgagtcgaactcagatactctgtttaatttaaatactgacgacccgggccttccagcgaatgattccttgacatttgataaagaaatgaccaaagtactgagggaatcatatgggctgggtgcataatcatatat

SEQ ID NO: 163454 - DNA, 340 bp, Glycine max
  unsure (1)..(340): unsure at all n locations
aggctgggatgaggcttggctgtaaacaaatcatggtttttttaggatgcaaaacttaagttctaggaaagcattcattcatagattaacctttttctttttattccagctctattacttgcctttccgcacttagattttctttttttcttgaataacaacatacatttttatttttatttactacttacagctctctttttttaacacattgttgtgcttattaactcttgtgtgtgctattatttcttaccattngaagctttcacccaataactcccccaaaattgggaaaaatgctttgaccaaaatttccttcatgatgatgctctctacacct

SEQ ID NO: 163455 - DNA, 368 bp, Glycine max
  unsure (1)..(368): unsure at all n locations
tgttagaggttgaagagaattttaacggaacaattgagcaaaatagaagagaatatgttgataatcatttatccatataaggagaaggtgaacctggctgctagttatgggcagatgctggaagatgaacatgtaaaggtatcagttctacagattgaaagggaagcgagagagagggtgatagagttattgcaccgggaagccatgaaatggatgaatatattcgctcacactctgaatgagagtcaagagcttccgaggttgttagctagagccaaggcagtggctgacacgtacttcgctctcgacaaagatcatgatcttttntattactgtcaacacatggtcgaactaatgacccatataat

SEQ ID NO: 163456 - DNA, 369 bp, Glycine max
  unsure (1)..(369): unsure at all n locations
ttttgttttttttanccnccagaagagaggcgtgtgcctctggtaaaactaacttttcaaatgtttggctttccaagaaatggccccgaggaagcttgcctcaaagaggtccaggaaggacaaggctagcgaaagaactagttccgctccggagtatgatagtcactcgtttatgagtgctgttcaccagcagcgcttcgaagccatcaagggatggtcgtttctccgggagcgacgcgttcagctatggacgacgagtatactgatttccaggaggaaataaggtgccggcggtgggcatcactggttactcccattggcaagtttgatccaaaaataatccttgagtttatgccaatgcttggcaac

SEQ ID NO: 163457 - DNA, 378 bp, Glycine max
ctaactctttcagactggtgactcctgggctcttgatcttgacttgatagaacctctttttaagcgaaggcgcctgactcgatcccatgttttactaaagtgaatcaaaaccaagtgcgaatcaagactccgacatctatcatgggtggaatggatgaatgcatgaagaaatgcatatgacacagatgcattttatgaatatgggagcccaggaaattgtccccttctaagatacaacattcgggcagcatggcgcccgacgtatgcatttaagtaggcgacacgaaccctccgtcggttcgacaaagtgaggggatcaagacgcaacccgtgcatgatgcagatgccaaaaaaaaggggcaaacacggggatgtaca

SEQ ID NO: 163458 - DNA, 313 bp, Glycine max
ggggcaaaacacaccaaatgattataatgagggacggctcaaaccctcacaaagggaaacacaacactcccaaaacgagctctaaaaccatcatgacatgtagagaagaatcaaggactccaagacacaaaacgccaagaacttttattttcaaaacaaccacccattgcttgaacatatcctataattcaaagaaaaacatgcaaagtcgtacgcgcacacaaaattgacccaaaatattaaactgaacatccgacgaaactaacaacattaacaaattaacacaactaacaaattaacaaaaccaacaaaa

SEQ ID NO: 163459 - DNA, 350 bp, Glycine max
  unsure (1)..(350): unsure at all n locations
aaaaangaagaacgacaaagaacgttcacagaattgatgatggaaacattgtggaagcgttacgaaagcgtctcggccttgattgtctccttctttcttctttctttcactaattttaagtgaaatctggatagcaagggtgctgaaactttctactcagcccccctcccctatttatatcaaaaataagagagaagcttgccagctagctcgcccaaaatagggttgcttactatgaagattcctgagtgcaccccccaaattgatcagctcaccccccctcccaaaatgttctatatatgccagatgaaccgaatgctagttacataccccagtttgatgagtgcacc

SEQ ID NO: 163460 - DNA, 349 bp, Glycine max
  unsure (1)..(349): unsure at all n locations
tcacaacaccatacttcctttttgcccttgttgccccgattcttttggcattcgcgtctgtggaggaaacgtaatcaaactatcctcttttcaatccaacctcgattctctccccggcaaacaccagatccgcaaagctggacggcatgtaacccactaacttttcataataaaacactggcaaagtgtctaccatcatggtgatcatctctctctcaaccatgggaggagctactngtgccgccaaatccctccatcgctgcgcatattctataaaggcttcaccctctttcttgacactatctgcacttgagtacggtcaggagccatatcagaattgtactgatac

SEQ ID NO: 163461 - DNA, 347 bp, Glycine max
  unsure (1)..(347): unsure at all n locations
gtgagtgcattggattaggaacgaccatgccctcctgatttccaactgggaaattggcgagtggaggaacgccccggcatttacgcaacgagcataatgtaaacctttacgggtttaaaagctctatagttgggcctaggctttagagattttcttttgttaaggctttgtgtcttctgtttttgaatttataatacaaggatctttcttcatctgttcctatgtctctacccattctaatccatntgcatgtttacttctntatttctgaaacggcagatccgatgacgagtcccccgaaggtactaatacctgngacccgtctatcgacttcgagcaagaaatga

SEQ ID NO: 163462 - DNA, 357 bp, Glycine max
  unsure (1)..(357): unsure at all n locations
ccaagcantaaccacagctcatgacctgttttgctaatgacttacaacttgtctttctggttgtgcatgaagcaaaaatacactatgttgtctatgatgatttcaggtccaagacaaccaagaaataacattgatgattatctaagccccttggttgaagacttaaaaaagttgcgggaggacaaggttggcgttttggatgggtaccaccaacagaccatcaagttgcatgcaatggtattttataccattaacgaatttccagcatatgaaaatttgaagtgatataatgttaaaaggcattgcccatgcccaatttgtgaaaacatataagctntgtgcaactgaagcatggga

SEQ ID NO: 163463 - DNA, 352 bp, Glycine max
caacaaccttctggagggcccaagtgggcctggttgctatttgcacccccatttttactaaacacacccctctgcctttttttggtgattcttttttcgtaaagttacgaaaacttacgaatttcgtaacgatacttgttttctttccgtaatgttacggaaccttgcggattacataatcatcccctttttgacttacggaatgttacggaacctcactaattgtgcaacgatgcttccttttgatttccggtgtgtcatggaaccttacagattgtgcatcaatattttcttttgacttccggcacgtcacagaatttcaccaattgcctaatgatgggtgccaagcacc

SEQ ID NO: 163464 - DNA, 374 bp, Glycine max
cccccgccacaccgcacgctaaacaatccactccaccgcgaccaaaaccctctgcacacaaactccacccactagacctgctacagaaccgacgcaacctttggcgtatacctccgaagcattgctcatatatgggtcatgagaaagacgggccctctctatgctgcaatgtttaagccaattggaaccatctttgcggtcatcatgggaattgcctttcttggcgactctatctatcttggaaggtatatgtttctttcatgtctcaatcataagaaaaattggaggtgtgtccacttatggacttatgattttattaatgggagcatcttgctctcgcgtgaatgaatgcaatttaaaaatactctaatcta

SEQ ID NO: 163465 - DNA, 367 bp, Glycine max
  unsure (1)..(367): unsure at all n locations
aaggttgcggtgtttaaaaagaaggaaagagtcagttcaatgacttgaattataaactcatgtttattatatatgcattattntattattattcaatcctcatatgagaaaaataggaaaagggagggctgcacaaatattctcaaggaaagggagtctctacacaaaggcccctaagttcccttgaaactgtagtatccgcttttatgtgttaaaccttgaatgagtctaacctcttagtcaaataaagtcattttaaggtgaaaccttacgatctgcttaatttatgtgtataaataataattaccgaataattcttgttttactcattttcngattaaattatgataagtaatttggcattttt

SEQ ID NO: 163466 - DNA, 281 bp, Glycine max
ttgatgacactgtttgtgaaaaatgcgacattagcaaggagaaatgggcaatgggcccaattttgtcagacacgcagagacccttcttgggaggtatgtactttgtcattttagttgttttgcacaaaagattcactcgttataattcacttagccataatttcattaatgtttgatttttgcaggatgtgcggaaaaaggcacatgccatccagaagcaaaacactgccccccacgtgtagtctcgtgggggttatgaatatttagaacatacactcatg

SEQ ID NO: 163467 - DNA, 348 bp, Glycine max
tcattgtgcagtaaatcggatggatttatttgcaaaggaggaaatctgtatcaaatatcaatacataataaaatgctattgcatatgcagacatatatgaggttatatccagtatttatcaagttataaaactgcatcattggtagaaatgtctaataatccaagacaaaatatttgaatgggaacaagatgttctatggtgtgttagtctgggattcaaattctaaagaccattaatgctttaatagtgccttaattttgcggattggtttcaccatcaaagtttttcactttcatacttgtgatttaacgtccaagatctttaagcatagtttctcaatgttcatt

SEQ ID NO: 163468 - DNA, 361 bp, Glycine max
ttacggaaaactcttattacgacctttctgttatattttctataaatccttgttgccatcatcgtttttgttgttgctattattattattattattattattattattactattattatcattataattattattatttttgtctactgcaagctgctgttcacaactattatgggtaaagtatcacttagaaggttactctagtattgaaaacaatataccactatattgcgacaacattggtgcaatcaacctatctaaaaatcccattcagaggctaagcatatttagataaaatatcatttcattcgtgattatgtgcaaaaaggtgtttttgacataaagttgtagatgtgatcat

SEQ ID NO: 163469 - DNA, 367 bp, Glycine max
ttttttaccacccacaccccgcggcgcttgcgtaatgcttacgagacgtcctcctgatcgattccatggatgttcttcgtcgttcttcggtcattcttcggtgctcttcgctctccaaccggtaagttttcaaatttgaatctttcaattcattctatgcaccttcagcgggccattcttgttttgtatgctttcatttttatttcgcttactttcgggattctttccttccacttttaacgagatttcaactgtttatttaagtcgctatctcgctaataattgataaaatgaatttaaccgatcatttgtgttcaatctcgtctaaccactataaaataaaatccaaccgatcgttcacgctgta

SEQ ID NO: 163470 - DNA, 389 bp, Glycine max
cagccccttaggcacttttctctctttcgaatttgcttaggaaaattgtttccgtgaagaaaatctaagccgaagcgcttccgtaacgttttcgtgagtgatttcgcgaaggtttttgaccgttcttcgacgttgtacatcgatcttcagtcttcaacgggtaagtacctcaaaccaagcttttcaattcattctatgtacccgtggtggtccacatttggtttcatgcatttttattctcgtttcattcactttttatacccccttttgacgtgcttaagccattttatttaagtcatttctcgcttaacctaaaaataaaataaatttccaccgatcgtttgaattggattatccgctaactttggttgaaatgaattccgaccgac

SEQ ID NO: 163471 - DNA, 266 bp, Glycine max
tcaatgggattcgaatctggacattttccagaattactctcagacactcctgcttgagaggattaaacttggcgggtttccacgcgtggaacccatcataacttatcgcgcattaactcggcgaccttaaagggagtgacagatgtgtgacaggataatccataactgacacactcaattcatacacaatatcaccgcccacgtattgcagaattgagtacgtactgaatgtttagcacttacactcatggctgatcacactttca

SEQ ID NO: 163472 - DNA, 356 bp, Glycine max
  unsure (1)..(356): unsure at all n locations
atatacaaaatggcattgcttagagttctctaactgagttgatgtcaccattcatcaaatatgtagtactaatttggattaaatatttcattaacttttctcataagctcttgatcgtggagaaaagattgagatgcttgtggataagactgacaaccttcgctcacagggctcactntcttctttatatttgattccttagatatacttttaatccttaaaatatacatgatgtcttatttactcntttttattgttggtaacatagtatctacaatatattcttttgtggtattagttcctgccaacgtcggtactagctacntacttttaatactctattatcaataaaaata

SEQ ID NO: 163473 - DNA, 327 bp, Glycine max
acaggtacagatttctgattcaaggctagctgggttaccaagttaaccaatccatccagtttgccttcaagcttcttagtctcagatgatgcagctgagtttgtagctacctcatgcactcctctaatgactatggcatcatttctggcgctaaactggtgggagttggaagccatattctcaattaaatttctggcttcagcaggagtcatgtctccaagggctccaccactgacagcatctatcatacttctctccatattactgagtccttcataaaaatattggagaagaactactccgaaatctgatgatgatggcaactgg

SEQ ID NO: 163474 - DNA, 337 bp, Glycine max
gcacaagcctcctttatgtgaaagatgcaacattgtacaataattgtcatgctgtggacaggctaatcctgatatgatatcacaactcgagagtgctggtctatcttttggtgggaaagacgaaactgggaaacgcatggaagtgtgtctttgcttgaaacccttacggcatggatcttgaatttgccacataatattaaatatttcccttatttgaatttgagttatataaatgcagatagttgaatttcctgtcatcctttcttcattgggctcagtttcatcctgagttcaagtccaaccagggaaaccttctcattattctaaggatttttcc

SEQ ID NO: 163475 - DNA, 306 bp, Glycine max
cgatggattttttgtcgcagcaagcgactgaaaacgtggggtggaataagcgggcccactttccacgaaaaaagttgaaattgaaacaaatagtactgtcagccactcacatgcaaccctattcaggcatcttttagtccaaagctgaataataatacaatttcatttatgctttcactggcctcacaggactcttcactcttttatgtgactcagttctcattcaaagcatggccatagccataggtaccatataataatcacttaatatcaatgtaacaaccttactgactcatttcgagagta

SEQ ID NO: 163476 - DNA, 400 bp, Glycine max
  unsure (1)..(400): unsure at all n locations
gggagaggaggagagacgggggagcactatattgatggaagaataagggagagaagttgaactttgagttgagtctcataagactctcattcatcaaagttacaactagtgttacacatgcttctatttatagactaggtagtttccttgagaagctttcttgagaaaacttccttgaaaagcttctttgagaaaacttccttgagaagctagagcttagctacacacacccctctcataactaagctcacctccttgagaagcttccttaagaagattcctaaagaagctagagattagctacacatacctgtctaatagctaagctcacctctttgagatgaacagctagagcttatctacacaccctctataatagctaagctcaccnccatgacaa

SEQ ID NO: 163477 - DNA, 341 bp, Glycine max
  unsure (1)..(341): unsure at all n locations
caccaggcaccaagccaatcattctcgcgttaagatgacaccggtttattaccccaacatggttggctcgtggtgcctaacacatgaaactaagaatgtagtgtgaagtttcacgctccccccctttttgtttttgttttgtagaggaaaacgcaaggatgagcaaacatgaaaacaaatggtatgcaattntgcagatcaaaaagtttgttgaacgcatatgcatgatgatgccatgactcatgcaaaatgtgaggccggaatatgataacggacaaatgcaggatatgtccattatgatgttatgaagagatgcttatgcgatgcatgatatgaatgca

SEQ ID NO: 163478 - DNA, 246 bp, Glycine max
  unsure (1)..(246): unsure at all n locations
ccacattatttccatgacacaaatgccaaaatgatgatttggaaattttatgcaaaactggtcatgcatgcacctatgccgacactcaagtgtcaaatttttatggtcatgtgaatgctaggctcangaatcaattcctctattttaaattcacccaatggttccaaaatatgttcttttatcaaattgtgcattcatcctagtccattttggggactcgggaaaaatttacagcattcacccttt

SEQ ID NO: 163479 - DNA, 314 bp, Glycine max
cacaaactctgagacacaccctttatacaggccgcaaacccatggaaacttcctaatgtcttctcacagctcgtggggagggccattcttggacggccttgaccgtcgcagggtccactcggaccccatttgtaccaactacaaaacctaagaaaaccatatgatctacacaaaaggtacactactctatatttgcatagaggaggtttctcctaaggactgaacgaactcgcctgagacgccacaactgagtatctacgctcctattgcacactaaaatatcaccaaaataaacaactacaaatctgcctatg

SEQ ID NO: 163480 - DNA, 363 bp, Glycine max
  unsure (1)..(363): unsure at all n locations
tgagacgagaagctagaacttagctacgcaccccctataatagctaagctcacccccatgacaaaaaacatgaaaatacaaaaaaaaaagtccttactacaaagactactcaaaatgccccgaaatacaaggctaaaaccctatactactagaatggccaaaatacaaggcccaaatgaaggaaaaacctattctaatatttacaaggataagcgggctcatacttagcccatgggctcgaaatataccctaaggctaatgagaaccctagggccttcccttggatctctagcccaatctacttggagtcttctacccaatgcccttgcgggataggatngcatcatcatttatctcaacaaa

SEQ ID NO: 163481 - DNA, 388 bp, Glycine max
  unsure (1)..(388): unsure at all n locations
cccctacattggagaacaatagttagtgataatgcanatattatttaaatgcattagttaaattttacttatccattcaagtatgttcctaggaaatctctctttgttattgattcaaccatgtttcaatgtaaagttgacattcatcgcatccatcctttgcattgtgtatggactgaggcaaggaatccatacacaaaaccatgacccaagtttattgacaacttattnggaaaaccgtttatcatattacaagtaattagttaatgaattaaccttgaaataaaatatacttacatcatccacaactgcaatatagagatgttcaaacattgttggctttagaatatttcatttacatcacttagctctatgaacaaagggaaat

SEQ ID NO: 163482 - DNA, 375 bp, Glycine max
aaaaacgaccaaccctcctggtatctgagattcacttaaaattagtgagaaaaattgtttccgtgatgaaaatccaagccgaggcgcttccataacgcttccgtgacgtttccgagggtgatttcacgaagattctcaaccattctttgttcgttcttcgtcgttcttcagtcttcaaccggtaagttctcgaaatcgaacttttcaattcattctatgtacctatagtgcgcctcatttgtttcgcgtgcttttattttcatttcatttactttccgtacccccttttgacgtgctttagtcatttatttaagttattttctcgcctaatcaaaaataaaacaaattcccaccgatcattcgtattggaacatc

SEQ ID NO: 163483 - DNA, 281 bp, Glycine max
  unsure (1)..(281): unsure at all n locations
tacaaggttcctagcgattcctaatatggggggcattaaggctatcatatgctgacaatagcccgaaaagccatgagattcttcgggggcgggggaaggtggccgccattgccttggccttgggctacaatcggggaagttcctggactcccgttcaaaggtaagaagacacccgatcccatccacatggtntgcctcttgggtgtaaagagtccgatcacccttcctctagcctcttttcccgcgatacttgggcatactcgtccgcgacctatgctcgt

SEQ ID NO: 163484 - DNA, 389 bp, Glycine max
ctttgaagaagacctttggattgaatggagctccaatctctgggaccatacttcttcacatgcttcaatagcatctcatcttcttctgctttccatggacctttccttatgtattcttcttgctcctttatcccgtgcatttttccactcatgcaataaaagacaagatcaacacaacataacaccacaatgttttctctaattttctaccttaaccaccttttgttgtgcccgttaaactatttcttctcacacgtacactaatatagtactactactatgttgttcgattgtgaatttctttattgattgtaccgttattcatggcaagtattgcctcgttcccactaacttgcccacgatctctctctcattaatatttttactat

SEQ ID NO: 163485 - DNA, 318 bp, Glycine max
acggagccaaaaaaacttaggcgatagcacccaccaacgacctataagttcacgataaccagaatcatgggccagaacaagagctttagcaagcctccaaagccagagatcggttgaatcacaagaaggcgggaagacccgtttccattgtggacccccatccataggtggacgagcgagctcaacagctaatggctttaatatcccctgatcagcgaggaagaataatgctcgcgacccatataatgcggcgcccttaatatctctcactgcgcttacatacggtaagaataaatcatgcgaatccagcacgaacaa

SEQ ID NO: 163486 - DNA, 251 bp, Glycine max
ccccaaaccagaaaaaaaagcgcccactcaggaaaaaaagcaccccggcccaaagaacctcgcccccatgcaaaccaaagacaccaacggcccccccaaaaccggagggcaacccaacgcaacaacacaaaaacacaaacaaaagagccgttcttctggggccaggcccacaaccacggtaccacggccggcccaaccaaaattcgaaaaccaacaaaaaaacaacccgaccggaaaaaaaacaaaaacac

SEQ ID NO: 163487 - DNA, 283 bp, Glycine max
  unsure (1)..(283): unsure at all n locations
ttttgcagaanagacacccttaaactaactgttgcccccgcaaaacactgagaagcaaacccataagcgattaataaaactactaaaaacaaaccaggactatatcagattcactaatttattgtaggcataaattgcaacatttgggataaaaattctgtgacctaaggaggctggagtcagtaaaaaacccttaatattcatttcaaaagaaggatctaagtataatttgagataaaaaggtaaaaaaaacagacttgaaacaaataaactggaaaatttt

SEQ ID NO: 163488 - DNA, 367 bp, Glycine max
taactaggacccaatacatgtgttaactagtacccaaaacatttattagaggcaggatggggccatcgcccttcaaaacaaggtctatactctataaggtagtgactcactcacgtgcatggtttgaacccaattaaacataatgatataatgataccaataatcacgtgcatggctttgactttgattaagaattttgtggtgatgaaaagagcaacgataaggcccgttcgtaatagcaattcacacaaaactagtagtagtatttagcaaggccggtcttgtcaatgatagtcttgcgtactatcgatccggtccaagttgatactaactgacaggtcaaaactcagacaacacgtctattaca

SEQ ID NO: 163489 - DNA, 310 bp, Glycine max
  unsure (1)..(310): unsure at all n locations
gcacaggggccaaagatgcatgggagatcctgaaaaccactcatgaaggaacctccaaagtaaagatgtccagattgcaactcttggctacaaaattcgaaaatctgaagatgaagggggaagaatgtattcatgacttccacatgaacattcttgaaattgccaatgcttgcactgccttgggagagagaatgacagatgaaaagctggtgagaaagatcctcagatcgttgcctaagagatttgacatgaaagtcactgcaatagaggaggcccaagacattngcaacatgagagtagatgaactcat

SEQ ID NO: 163490 - DNA, 396 bp, Glycine max
  unsure (1)..(396): unsure at all n locations
ccaatttttttttcatggctactacaataccagttatgaaaacaatgcacgaattctaaactgcaacacttagcagaagagtcaatttgtaaagttcatatagcaattcaattataatccaaacataatgcattntatatatattaatattcccccaagagtctacttttcaaatataatttattttcatcanacggaatgtgaatcaaacaaagtaaaaaactgtgtgaagtatgtcaaagctaaaattngtaaaacagcatgtgtgcaccaactttcaacaccaaataatatagaaatgactctaagagcccatactcatggaggataacctcccanaccanaattgcattaaagaaaatagaaactctcaataccttgagagatttgaagtct

SEQ ID NO: 163491 - DNA, 287 bp, Glycine max
ttcgcgtcttgttctgtcattcgccttcttgggtgcatgtctgtttacgctcatttttgcgccgtgatatcggtcctgtatgtgctcttgctttgctattgcttcgctcttgctcttgcttcattctatttcaaaattttgtttcaattctatttcaaattctatttccaattctgtttggggacaattttgctcgctggatgaatttggggtttagggtttaggaggtcaaatttcctaattccctattgaacaaattgcctaaattatcctagacgagattgaga

SEQ ID NO: 163492 - DNA, 368 bp, Glycine max
ggaagaggaaaccggaaggaggttcatgagtccagaaagaagtttttgtcgaactagatggcagtcaatttccagatgtttagtccgttcgtgaaacactgggtttgtagcaatgtagagggcattttggctatcacaatatagtgcaggatgtttggaatggggaacatgtaagtctctaagtaagtaaaataaccattgtagttcacaagtggttgaggcgagggctctatatttagcctctgtagatgatctagagactgtagattgcttctttgttttccatgaaaccagagaattaccaacgaagaaacaatatctggtgactgatcgacgagtgtcaacacaggtggcccaatctgcatcac

SEQ ID NO: 163493 - DNA, 362 bp, Glycine max
gaaggagcctgcgtagtcgaagagaagttcaagtccatagccatcaaagtctgaaaagagtatgatgaactaagggatgtcaatatggccaccgatgaagccttggaatgagaaaccaagaaggcccgaaaggaagaacacgaccagagcaaagctttgaggggctttatagggcagcaatagtaagctcaagctccgaagagaggaaaggaatcatcacgggtcaaaggcctgatcttgaaggacgagctaaaggcttaccttaggtcgaaaagaaatttgcccaacagttaatcgagactgaagggaatatgtgggccatcatcgataaatgcaaagagaagctaaatctagcggcgact

SEQ ID NO: 163494 - DNA, 316 bp, Glycine max
  unsure (1)..(316): unsure at all n locations
aaaggtttgaagatcatcgaacctatccaaaatcttttaaagaagagaggaatcttctccaccatgtccttcttcatcaacaggtcgagcacccttttttacccaagagccatcatgctctttttgataaccaaaggatgcaatgacaaccgtgcctattagaaaggatctcttgattggaacataaggttcagaatcaagagggatgttaaagtgttgaaggaagcgggtgactaggtgtgggtatggcaatgaagcatttaatatcaatcagtgtaccttcaaatggtacaccttcactggnataatgggtaaa

SEQ ID NO: 163495 - DNA, 370 bp, Glycine max
attggtttaaagatataaccttcagtgaccataatgcatcttaaacgttaaggaatttagcaaatgaaccttaaagaaatgttataacttggccaggataccatatcaacaagtattcattctacacgagatcagaagacgactagagtacaatgcaaaatagtgatgtaagtctaaggggtgaatctcaacactttgctactatacatgataacaatctttgtgtagcttccatgccttactttggatcattaaagaaatcttggagcttaattattgtaaattcattgtgtgtgttttcaagtgtaagtgggtagatagcaatatcggtgtacgaatcgatgattcttgatttactttggtagatcta

SEQ ID NO: 163496 - DNA, 263 bp, Glycine max
ctgaaaaagctccctcaaaagggaggctacttcaatctagcaccgcagttgacttactaagtactaaacaacaaataaatgagaccgcggaccaccgatttcatagaaagattcaggaacacgaggagtaagaaacgtattggaaagctcctaggagtagaacatgccactatgccttaaagtaaaaaaatatctatgcttaaaagatgaattatgatccataactattctaattaaacataaataaaaaaatctatatataa

SEQ ID NO: 163497 - DNA, 399 bp, Glycine max
  unsure (1)..(399): unsure at all n locations
tttttatactcacccncnacttgaagaggcatctcctctctctcttcctttctccattccgctgccattcatcttccaagaagcaaaggaatccattgatgaagaagatcctaggcctacaagctccaatggagcttacatcagatactcttcaaatattaagagccttgtgcagttgaaggagcttaagcttgtagggttaaagtcttacgattgtcatgtgctcatgcaacaattgttagccgtggctatatgatacatcttgcccaacaaagtcaagttagcgataactcgcctgtgcttnttcttccatgctatatgtagcaaagccattgatcctatcaagtttgatgagttggaaaatgaggccgcaattatactgtgccaattggagatgta

SEQ ID NO: 163498 - DNA, 295 bp, Glycine max
taaataatcactctaaaaatcctacaacacagtttatagttttatttgtgtgatttaatttcagacaattgcatctaattcttaatgctcatgacatgacctacattgcaataaaaatgtgtttatgggagttaaaaataaactgaacggtttaatatccatattgttttatttacatgtataagtgagaaaatttccagaaattaattctagagtgatatattaatcacataatttgataaaggttaatttaattagaatataatgatgtggaatttagaacattaatatttac

SEQ ID NO: 163499 - DNA, 280 bp, Glycine max
  unsure (1)..(280): unsure at all n locations
cgcccccgacacgccctgggagccttggttaccttaccctgtttcgaagctcactaccagccttaagtgaaaaaccatgatatcaccatatccttaaggaatcttggagctttggaattgtcctgggaataagtatggggggtttttgttctattggacaacttgctttgtcggctatgcttcatgatgtattttgggccatacttgatgtacattgcatatnggccaaatgttggacatgctgaatgaaatgtcgcttctcaaaggctatagagataaa

SEQ ID NO: 163500 - DNA, 393 bp, Glycine max
tgcacttcttgcattgtaaatttgcttgagcgaggtgcaactgttggcattgtgctccttcaacgttagcaagatggcttttggtttcactatcgactttgtgatatcagcaataattttcttttcatccttagtcaatcgcccagcgtatggatgtccaactaaggacttggccaattcatgattgtgaatcccatagatcaacttcaccatccaaccttcccctccatgcattggtttcccatgaagcctgaagggacaaccacaatttctactcccagggtctcttctaacgagttctttattcctacacttgtacagaccactcctttcacacccaattaacacaattgaacttcttcttctgctacctgtatctgtgtcagacctcat

SEQ ID NO: 163501 - DNA, 328 bp, Glycine max
  unsure (1)..(328): unsure at all n locations
aaacaaagcacgaacgcacanacaaaaaaacgaaaaccatgaacaacccacagaatgaacaaagcaagcactcacgcctcaatcaatgacaacgaaaacaaaactaaagagtagagattcagtaaagagaatgcgagagaacacttcacaaatgacacgggagcgctaagggacagagggcagaggaatgggaaaggaatttagaagtttccaaccgcctgcagttacaatcatagcacttagcgcgagagatgcactcagcgcacagcctgacagtacaggcgaataatgatcctgcgttaagcaagggggacgctaacgcacaaaa

SEQ ID NO: 163502 - DNA, 393 bp, Glycine max
  unsure (1)..(393): unsure at all n locations
tttgtggccaagacatgagaagcaatcaagtataatgctacttccttcactaaagcggtgatccatctccacacatattttatcaatagcaacataaaaaatctctgcacggtaatgatgaagattagtgatagtcctcccttctgctcttgaacgaccccgaactggtatttcgtcatccatatttggtaccagaatacttttagcaacacaaaatccttggacatcggcaaaaaaattattccagccactctttctcattgtgccaaccgagctttgacaacatcaactaattccatggcattcacaatattaagatcttttctttgcaatatatntgaaaagctcgttgtgataccaacaactttaacattaacctcaaaataaaagcaa

SEQ ID NO: 163503 - DNA, 386 bp, Glycine max
  unsure (1)..(386): unsure at all n locations
agaagcatgtgtaacacttgtcataactttgatgaatgagagtcttaggagacatacttcaaagttcaacttctctccctttcttccttcaattttccatgccactttctctctctctctttctctctctctctcattctcttcctccattgaagcttcatctctaagctttttatccaagacactctcttggtggtgaaacttcttcttcctatgcttattccctagtggatgacgtctcctctccccttttctcctttatcttccactgcaactccatggttgaaaatcaccattaaaggaccttagtgaagctcanatatctagcctccatagaagttnttcaagcaagcttccatcaattgagcactggcatactatatcat

SEQ ID NO: 163504 - DNA, 323 bp, Glycine max
  unsure (1)..(323): unsure at all n locations
ggaaacgtcggccttgccggtagcaggatagacattgaccacaggtctttctgccccaggtggtctagtggccaatgatcgtagccgtgtcgccttgcgtgtctacttcaacgtacatggagacgctgatgcgtctgcaggaggaggaggaaaaggaggaggaggcnangcatgtggaatatccatggccctttaaagagaaaaagttgagttagttaatattatcacaaaacattgtatgagttatgtaaatgaatgtaccgaaatgaacactatattagaaaaatacgttagacgatgttaattaattctcctttatcatg

SEQ ID NO: 163505 - DNA, 319 bp, Glycine max
  unsure (1)..(319): unsure at all n locations
cgccgccaccttctcgaatatgaaactcccccatttttttttattttataaacttgatcccgtcactattttacttaaagttggttcatatgttaacttgacggttaatatttaatagaatggctagtgtggaagtgtcatgttagcattttcgttaattaccggatgccaagttaattgatgaaaagggatcaaatttgaaaaaaagaaaggaggattaaattcgagagatgatgatagcaaggcgaccaaaagtgccagttatttnttaaaattcctaattgctgattcatctaatctcattgtacttccaggatca

SEQ ID NO: 163506 - DNA, 382 bp, Glycine max
  unsure (1)..(382): unsure at all n locations
acattacctcggctccaaggaatttgtcattcatagtgatcatcaatcacttaagtacattagagggcaaagcaagttaaacaaaaggcatgcaaaatgggtagagtacctagagcaatttccatatgttatcaaatacaaaaagggaaaaacaaatgtggtagctgatgccctctctaggagacacacattgttttgctccctaggagctcaaattttaggatttgataacattagggacttgtatgctttagatgaatatttctctcccatttacgagagttgtgggaaaaaggcccaagatggattctatttggctgaggggtattngttcaaagagggaaagctttggataccccaaggatccattagaaaattactt

SEQ ID NO: 163507 - DNA, 361 bp, Glycine max
ttgtgggggataatgaaagttttacaagccaggcaccttaacagcatgagcccgaaccagaaaatgatacttcttttgaaccaccaattttggagctgttgatggtaaaaagaagattagagacgagatccaatgaggctgctcatcatgaaccaatgctagcgtcaactgatgcaccaatttcaagagtggatccatctttacctctgcacgcaggagactcttccattcctgtcttagagatacatgagggccagaccataccagttctaactttggacacttcttctccagctactccagtatggcatctaacagataagaagaatgttcagatacacgacaatcatgaccagtcaca

SEQ ID NO: 163508 - DNA, 375 bp, Glycine max
  unsure (1)..(375): unsure at all n locations
acattttttggggngggccattcttggatggccttgattntctcagggtccacttggaccccatgtctaccaactacaaaccctaagaaaactatattatatacacaaaagttacacttctctatatttgcatagagggtgtttttcctaaggactgaaaaaactagcatgagatatcctaagtgatcatctaggctcctactgtacactaaaatatcatcaaaataaaaaactacaaatctacctatgaaatcccttaagacatgatgcgtaagcctcataaaggtgcttggtgccttagtgagcccaaaaggcatcactagccattcatacaaaccaaacttggttttgaaagcggttttccactcatcaccc

SEQ ID NO: 163509 - DNA, 327 bp, Glycine max
aacttaaactcaacctctctccccttttttttcttcaattcatggtcccccctctatcttattctccctcttactttcctacattgaagcatccttctcaagcttcttattaaagctcatcttgatggtgaagctccttcttcattggttattccctactaatggcgccccctttcacctcttcatctttatcttccgctgcatctccatggtggaaatcaccataaaggacctcatgatgctcaatatccaacctcatagaatcaccacagcaatttccatcaagtattgaaaagattctcaaaaaacaacatagcacattttgtt

SEQ ID NO: 163510 - DNA, 372 bp, Glycine max
  unsure (1)..(372): unsure at all n locations
cacgccaacaacgaagcataaatatattcatcaggaaaacatcatagcggaaggaaactgcagtgttgtgatccaaaagattcttccagccaagcataaagatcctgggagtgtaactattccttgttcaattgaagaagtcaatgtgggaaaagctcatatcgacctgngagccaatatcaattcgacgccattctccatgtgtagaagactgggagagttggaaataatgcccactcgaatgactttacaattagttgaccgctccattaccaggccatatggagtaattgaagatgtgttggcaaaaaaaaacattctatcttcctggcagactctgcgcgaatggatatctctgaaatactgacatcc

SEQ ID NO: 163511 - DNA, 389 bp, Glycine max
cccgcaaaacacgacaagattaactatatatgaggtgggaagccaaaatctaagagagacattctaagaaatctccaatcaacttgatcatatgttttttcaagattgagtttgaagataatatcccctttcttttattcttattgcaatgcatagagtgaaggacctcttggagtataatagcattattaaatgttccgctgcctagaacaaagctactctggagaggtccgataatgctatatgggaaagtccttagtctcccaacaattacttttgttataattttgtatataacattgcagaggctaatgagcctaagttccttaaaggacgtaggagaacccatttttggaataagggaaatcaaagtcttagaaatcttagga

SEQ ID NO: 163512 - DNA, 219 bp, Glycine max
caaaattgatgaccagccgggctgctctctgggacacaacaagttgcctagcaaaccgacatgacagcgaactatctggcagaaaaccattactcaaaagtgagaaaaaataccacaatcggcagaactctcaagaaactgatcgaaacaacatccctcccttctcaacagtcacaaaagaaagaaaaaactgacgtaaagaagaacaccgggagaaaa

SEQ ID NO: 163513 - DNA, 302 bp, Glycine max
cgcaggggagacgcactaggccccatgccaaccctctaacatggcaactaaaaaatatgagtcacgtaaggataggtcactcaagactttttctctaatcgaatccagctagaatcaccttcgtacagcatccttcttatcacggtaatgcgaagagacgcaaaaattaacacgctccgagcttcttacaagggtgactaaaccgaataagcctataataaaaaaaacaatactatcccaactttgtctaggagccgactccataatgcaacttaactcttatcataaagagagagaaatcg

SEQ ID NO: 163514 - DNA, 358 bp, Glycine max
tctgtcaggggagtttcactaggtcccatgtcaaccctctaacatggcaactaaaaaatatgagttacgtaaggataggtcattcaagtcttttttctaattgaatccagctagtatcactttcgtacagtatccttcttatcacggtaatgcgaagtgatgaataaattaagaggtttttgttttcttacaagggtgattaaattgaataagtttataataaaaaaaatattattaatttaattttgttttgtgagttgtacttcatatatgcaacttaacttttatcataaaaaatagataaattgtagttattaaatacagtctatgttttttattaaataataatacgggtaaa

SEQ ID NO: 163515 - DNA, 253 bp, Glycine max
  unsure (1)..(253): unsure at all n locations
gggattgactatacctaccaacaccctattaatattttatacgtaattcttgacaaaaaataaaacttgcattactgcattgaagatcaacagttaagaaaataaagagtaataaggaaattgtatcttgaagactagggaaatgtaaaaaaaataaaactacgccattaaacttgactgggccacagaattaaggctcacattctattgctatggcaggcacagcntatacttaaggcaagtctactgcaat

SEQ ID NO: 163516 - DNA, 250 bp, Glycine max
  unsure (1)..(250): unsure at all n locations
caccaccgcccgactaanctcattaccttaacccacctttccttgccctccatatctaacctcaacaaccctcatagctccctccaaatgagagccaagctaccaaaactcagagaaccgagcccaatcgaccgcagcccccccgaacactntatcctttcattgaggccctccaaattcaacacttctagcgcccctgccggccctcatccttccttcaacagcttcacgtcatcaatgatactccagc

SEQ ID NO: 163517 - DNA, 313 bp, Glycine max
ccccccgcggggggcttatagaggtattcctgtaaatccccatgcaagaatgcagttttaacatctagctgctccaagtaaagattctctgcagcaacaatactcaaaataactctgatggctggcatctttacaacgggaaaggagactctgagacatcaattccctgtttgtactgaaaccctttcaccacaagtctagccttgtatcttcttctaccgagagattcttcctttagcctacagacccacctattttgtaacgctttctgtccttctggcaatccagtgaaagaccacgtcttattcttctg

SEQ ID NO: 163518 - DNA, 382 bp, Glycine max
ccttggcttattccctagtggatggtgcctcccctctcctcttctccttttccttctgtcgcaacgtgccctcttgggcgagcgagggcgaggctcacgggtgcgctttccaaaggaggaaagatgcgcggattcgccaccaacgtttatttgtggaaaacgtcagaaaaaccgaaggaaaccggtcaaaatgaaaattctaagtttgggagttgtatttacgtttgaggaaggtattagcacctctcacgtttgtctcaaaggacaatagtctattttttagaattgtggaattgtgttatcttaacttttatttctttttattttttgaggtcgacaaaagcggggcttttgctcctacgtacccctctttggagaggaa

SEQ ID NO: 163519 - DNA, 394 bp, Glycine max
  unsure (1)..(394): unsure at all n locations
gtgtcggagaagatcaatgacaatgcctacaagattgacttgcctagtgagtataatgtaagtgccactttcaatgtgtctgatctatctctttttgatgcagatggaggggccttggatttgaggacaaatccttttcaagaagcagggagtgatgaggacataaccaaggtcaaggaccatgaagcacttgaagggcccatgaccagaggcagacttaaacaagcccaacacgtcatagagacaaggctagtcatttgtatagctgccattgatgatgattgaaggcccaagtggagaaagatgaaggcccagaggtagaggcactacccagactactaattgttgctgaaggcccaaactaacttgaaggcccaangttaaataagtttta

SEQ ID NO: 163520 - DNA, 365 bp, Glycine max
  unsure (1)..(365): unsure at all n locations
tgtttttttttgaaccttacgcatctcgaggcatgtgctacatagactcaaatgccatttaccagtgcatgtgactgcacaatgaacatatgcacgcaactgaaaaattctataaataccactaccagctaaagacatttgtataactttcaaatattcatctaaacacctaccactatgtgtcacccanatgcatatgtttgtgtttactacaacagccaaatttccaacactaatgagggcaccaccttcattagtaacaatacaaaaactttcatggccaacaaggccataacccttacacannatggttggatntgttcaacaaaaaataaacattgaaccgcaccatcataatcaacatc

SEQ ID NO: 163521 - DNA, 341 bp, Glycine max
ggaccacatctcccaaccgcaccaatcgaagacacgcaactaacgatgcctcaacagcacaccaggccgacggcaacagtcatgaacaccaagcatcaacacaggacgaaaagaatacgctacccagatcaaaagaactctctggtagtcgagagcagcaactcccattgcctttcccacagaacatgagaacattaaattcaaccgtagggccataacccccttccatgtgtcccttcggggcatacctttgattcccatccatgatgaaagcaatatgacttggcacaggaaccaccgataaaatggcaaacacgcatcttcctatataacaacacaaa

SEQ ID NO: 163522 - DNA, 349 bp, Glycine max
gtttgaagtataggagaccttcaatcctataacgcaacatggcggacaaaagtgggcagttaacttgaatggccattattgtcaatgcggaaggtattctgcgtttcactatccatgttcacaaattattgcagcttgtggttacgtgagcatgaactactaccaatatatggatgttgtttacaccaatgagcacatcttaaaagcatactccgcacagtggtggcctcttgggaatgaagcggcaattcctccttctgatgaggcatggacactaatccctgacccaactacaattcgtgcgaaaggtcggccaaaatcaacaaggataaggaatctaaccaccgac

SEQ ID NO: 163523 - DNA, 306 bp, Glycine max
  unsure (1)..(306): unsure at all n locations
ggataccggatatgctactgtcagccttataagagcctcacaattcagctacagaggatgtagttggtgattcacatggttttccanacgggcaccaagatacatcaatgttgacgaattatgcttatcatgtggcatccacaaggagagttgtcaatgccaacataattcactcgctctaactcaacaacaatctggtttaagcatatcttgatatcatngtaattagtctcttgtataaggtaattttaaaaacatgtctgaccacatgtgtgcttgtctcgaaaattgcctaattcagtatgt

SEQ ID NO: 163524 - DNA, 334 bp, Glycine max
gtggtgagaagaggcgccatccactagggaataagccatggaagaaggagcttcaccaccaagagagttccttgcataagaagcttagagaggaagtttcaatggaggaaaagaaagatagagagaaagagagaggggggagcacgaaattgaaggaggaaaagagggagagaagttgaactttgaagtgtgtctcacaagactctcattcatcaaaattacaacaagtgttacacatgcttctatttatagcctaggtagcttccttgagaaacttctttgggaagcttccttgagaaacttccttgagaagctataacttagctacacacac

SEQ ID NO: 163525 - DNA, 266 bp, Glycine max
acaaaaccatgttcatatgtcatcgaaacattccaccgagcactcggtgggcgcacggtcaggcatgaatagcaagagagcgggggcaatgtggcatgccccattgcttcaggatgcaacataggcctaaggccatcccctacaaccccgcaattcaaacaaatcaagcatgaaaaaaacccaaaattgccccacaaatttgagcacatcctcacaatttagagcaccaaaagatgaacaagatgaaccaatggaaagctagaaaa

SEQ ID NO: 163526 - DNA, 185 bp, Glycine max
tggctttggcttaaaccattaccggttcctaacccgtcccccacataactcgggccatcaatacctgctgcatcggacaggccaacttgcccaaaaaagaatcacggaagaaatgttaccacctcaaaagactggaagccgttctaatgactcttgcgcttcacataagctaaagatggcagcta

SEQ ID NO: 163527 - DNA, 396 bp, Glycine max
  unsure (1)..(396): unsure at all n locations
cctacactacctctgcgggggggaagatgtttggggaggctggggactatgatggcattaggtacgtgtttcaggagatggagtctgttggggtgcagcctaatttggttgtgtacaataccttgttggaggcaatgggaaaggctgggaagccggggtttgcgaggggcctgtttgaggaaatgatcgagtcagggattgtgccgaatgagaagactctgactgcggttattaagatatacggcaaggccaggtggtcgcgagatgcgttggagctgtggcagcggatgaaggaaaatggctggcctatggatnttatcttggataatactttngtgaatatgtgtgcggatgttggactggtggaggaagcctaaactttgttcagggacatga

SEQ ID NO: 163528 - DNA, 393 bp, Glycine max
  unsure (1)..(393): unsure at all n locations
ccatttttcttcagatccggcattgatgacaccttcatatcatactagactcgtgcgctagtcactaattgttctgccatgaattcatcgtcattgaaccaccatntctgtgccaccttcgaaaccgtgaagttgctggtttgctcgcgagactttatgcgtgtgccaagccctatgtacgagacaaataaagcgatcacttcacattttattttatcatgtaaagtattatttgattttgacattaaataatcaggcctaatgtaatttaaatttgatagtcattattttcttaaatatgataaaaatatttaattctaaatattcttgaaattttaaattagatttagctatctctatatgcaaataatattatttatatgatatggtcta

SEQ ID NO: 163529 - DNA, 316 bp, Glycine max
  unsure (1)..(316): unsure at all n locations
acctttgcgaaattcctcacggcaaacgctacggaaacgtttcggaagcgcctcggcttagatattcttcacggaaataaattttccatgcacattccaaagaaagagaagtgcctaatgtgctgaacccttttctttttcacttcctcccctatttatagcaaaataggggagatggttgccgcccagctcgcccaggcgagccaagttgcttcctccaaaagcaacagtcttctggagggcccaagtgggcctggttgctatntgcaaccccatttttactaagtacacccccctggcctttatttttgtgatt

SEQ ID NO: 163530 - DNA, 258 bp, Glycine max
  unsure (1)..(258): unsure at all n locations
cgaaggaaccagncccgctcccgagtatgacagccaccgctctaggagtgctgaacaccagcagcgcttcgaggccattaggggttggtcatttctccgggagtgacgcgcccagctcagggacgaagagtatgccgattcccagggggagatagttcgccagcggtgggcatcactggttacccccatggccaaattcgacccagacatatgcctcgaattttatgccaatgcttggcctacggaggagggcgtgcg

SEQ ID NO: 163531 - DNA, 324 bp, Glycine max
  unsure (1)..(324): unsure at all n locations
gatataggcaatctctctgaatatgccccttttgtctaaagttgaaataggtcgttcctttatcagcataatttaaggagatatgctctagcttaccacacttgtaacaagtgatctaagttgagaaagtagtgagtttactaccactaccaccagcaaaccccataacatcagtcctctgattcttggggcaattaccatactgcttaggaggggtcgagtacggctttccctgantttgaggccattctttttgttattattgggccacatgttaccaaagtggaattgagaacccttggtattacagcttgttacctaagt

SEQ ID NO: 163532 - DNA, 324 bp, Glycine max
gactcgtacaatatttgataatccacacactttcgacttaccacacaaaacatgagcggacttgactaacaactatcaagaaccaacataaagatgaaaactgaaaaataaaactaagaaaactagttttatgattctcaaggatctagacggcagaaaaagcatcgcacgaaacaatgattatgaatcttcgggtttaactttactgaactacctgttcatgcatacacacgttattaatcaatattcatcattctttggtttacaccaactcataaaaatgctaaatccctaatttcctataagaagagataagctccttga

SEQ ID NO: 163533 - DNA, 271 bp, Glycine max
ctattactgaaaaacctatgaaagagatttgtctctcataaataagaattaacagccttggtcttgatttatacagtgtagcagaggtgcttattggtctatatatatagagaggggcttgaacttggtgctcatttggcagcttgagcataactatcatcttgaggacaaagtgtctttcgatggcataagagatggtaggaaaggaataatggctcgacaagatactacaagaataggcaccaatgagaggcccaaaaggaagatcaat

SEQ ID NO: 163534 - DNA, 366 bp, Glycine max
gtcagcagaggagcatacaccacagagtcttgcgacaggtacagatttctgatttaaggccagttgggttaccaggttaaccaaggcatctagtttaccctcaagcttcttagtttcagctgatgaagatgaatttgtggctacttcatgcactcctctaatgacaatagcatcatttctggcactaaactattgggagttggaagccatcttctcaattaaattcctggcttcagcaggggccatgtctccaagggcttcaccactggcagcatctatcatacttctctccatgttactgagtccttcataaaaatattggagaagaaactactcagaaatctggtgtgagggcaactggcacat

SEQ ID NO: 163535 - DNA, 331 bp, Glycine max
acccaggagagagggattacccgaagactatcctccaccgtatttatggaaagttcatggcgcatcggccattcattataaaagccatcaacaatatcttttacaggttcatatttgagacagagaaacacagtgggattgcagagttgcttgaaatattgggcagcataattaatggctttgctttgcctttgaaggaaaagcataagctgattcttgcccgtgcgatgatcccgcttcacaagcctaagtgtgttgctctttatcatcaacagctatcgtatggcataactcactttgttgagaaggacgtcaaactagccgatactgt

SEQ ID NO: 163536 - DNA, 329 bp, Glycine max
  unsure (1)..(329): unsure at all n locations
aaaggtgtatacatcttaccctctctatatcctacaatgcttgcaaacttgagtattggtctacccatcattactcacttncattgggtaagggacatcaaactcttaatcaagttcataaaagtctctcttgtctcctaaaagcttgaaccaagcaacatgatgatggtttttccttttctaaaactttaccctttttccctttgtatgatctcttgctttggaaaaaggcttatattcattcagtagcattntatgatcacatgctacatagcagaagtcaaaaccactatgttcataanaacccctgttcctcatgctctaggctc

SEQ ID NO: 163537 - DNA, 286 bp, Glycine max
ttttttttttttctggaaaaggaaaagtatctccgtctcaacactacaggggcttcaaaatggttaaaatattccatcaactaactaagtgaccatcccctccccgcatagcgattatcgtcggtcatagaggtcacataaactcctcgcctacaatgtcatgtactgcacaaaatagactgttctaatccaaggccttgcgagacctcctgactctcaactagggtaggctaccacttcttccggagggcttcgagactcaatgcaacgttcttccaacctttgg

SEQ ID NO: 163538 - DNA, 303 bp, Glycine max
ggaccttagtgaaactcaaagatccagcctgtatagaaacttctcaagcaatctttcatcacatgtaaaaatctacaaaaatgatgaagaataagaaacacatgttaagataaaaaagtggaagatttgaatagaagttatgtagcagtaatgtgtaatcaaagtctgatagtttcaaaaaaaattaattatatcaaaaaaataatattatgtattgatacccaaaaaataatatctacatatatatatatatatatatatatatatatatatagaggcccgcctatcaggcttatatgactt

SEQ ID NO: 163539 - DNA, 252 bp, Glycine max
accctagggaacagacccccctcggcctttatataaaaaaaaaagggtggagcttgccgcccagatcgcccaggcgagctctgctcgcccaagcgagtaagtggctttctcaagaagtttcctgaggcacccccattttactaagttcacctcccttttttttataacttatggaaaagatactaaagcatatcggacatgattctattcttttttctcttccttctcacccatcttaagtgaaatatgctt

SEQ ID NO: 163540 - DNA, 272 bp, Glycine max
gggaaagaccttgccgccaacttcagaatcgaagtcgtacttgtcaagagcagcagtgaagtcttcgatggtgaaagaaacaccttccattggagcattgcggcatctctcgtaggcttcttcgaagagtttcttaagccttcctctctctttgttctgcgcattggctattgctattgagttcgcaatggtaattgaaacgcgcttttgggattgtcgcgccaaagagaaggttggaaagagagaaaaatagagtgggagccttgacccgc

SEQ ID NO: 163541 - DNA, 383 bp, Glycine max
cccccaccacctcggacattgtttcttgaccaataacagctcctctaggatctgtctcaatgatatcctcgtttgcttccacaagagatgcttcaatgattgactgaagcatggcttcttcaaaagcttccctttcagcaaggtccatgtctttaggagtagtggcaacttctatttttgcttgtctttaagcaagatctagaaaaaagatttgtgttgcaagttttgcttcaaattgagctcactctagttcttccatctaagcattcttcatctcttgtttaaattatgcatgtattgattcaacaatgaccaaatttggcactaccttcaatatataagacatcgtctgtggaggctaaaaagggaatatcaattttacc

SEQ ID NO: 163542 - DNA, 335 bp, Glycine max
  unsure (1)..(335): unsure at all n locations
ttggagcatctataacttgttcaactatattttgtgcaacatttcggttgataagctgcatcaaatctctctttttcctctgtattctttcagcacgaaagtattttttggttttcaattgcctggcaactttagattgaatctctcctttgacaatccttttccgtatcgcatccagagaagccnccttctcaagctcttctaacaattcttttcttgcttcctcaaattccatctaattcaattaagcagtgagtgccaaacagtattgttagagacaatgagatatgattgacaatctaagtaattaatatttaatactccgccgaaaaaag

SEQ ID NO: 163543 - DNA, 372 bp, Glycine max
gcatctaatcttgcaactggagcatatgttccttcataatctataccttcttcttgaatgtttccttttgcaactaatctagccttattcctaatgattatgccatgttcatctaacttattcctaatacccattttgttcctatgatggggtagttttcaagttgctctactagtccccacacattgtttctttcaaattgatttagttcttcttgcatagcaactatccaatgatcatctattatggcttcatttataattttaggttcaaccatagacacaaaagccatattatcgcataaatcctctacgagaatgtctagctgctacccctcttgagatatcaccaataatgttgtcaggggatgat

SEQ ID NO: 163544 - DNA, 318 bp, Glycine max
aattaaacagataaaaaaggtaaaacatttgaaattctaaaataaaactagaaaccagttgttcacacaaaatgatacacaattaacagcaatcaaaatttggaatttgtttaagtccacttctggaccttgaactccaaggcccatgagttaagacgtcgatatttacatataattcccttccatcaggtaattctatagttttaaacaacacatttagcaaaaaactcaaaactgaggtagttgagaagagataaaaagaaaactatatttctcttttggtcatactttataattcatacaacaccttatatagta

SEQ ID NO: 163545 - DNA, 331 bp, Glycine max
ggcgaaagcaagagccacttctagggtaaattgggtgctgaggggtcaaatttcgaatcggcggagttttcgccgtaaaaccagcctgaggaagcctaaattaatgctatagacttttttgagatgagagtttactccaaaattacccattctcattttcacttctcaaaccttgaaaatccactaaattgaggggctttagatacctagattttgaatcgccttggtctgaagctcgtttttggtttagatatgacctatacatgatttacgactcgcaggatccaattcgagcaaaattggaggtggataagacggatttcgaaatctg

SEQ ID NO: 163546 - DNA, 380 bp, Glycine max
  unsure (1)..(380): unsure at all n locations
tttctattcttccttgtagaccgtgacggcggcgcaccttatccgtgatcgagtatagatggagtgcctatagggagcttgggagaccctcgaaggtaacacgaggtgcccatttaggggcaccattcgattcacggctacttctttggtgcatccagatgaacctgcacggacgcttcaacgcacggaggagtggacaactccttggattanctttgtgtatttttgaaggagggtgtatctatgactgactgttacgcttactcttatcgcttgtatgggtagacctgatgatatgacattgatcatagtatacatgtggctgatgccaacactgtggacacctttgctctggatgacactatatattatgcaaaact

SEQ ID NO: 163547 - DNA, 354 bp, Glycine max
aacatgaggactaaataataacggtaaactatgtttgcaatccttttactttaagtaaagtattagtttccttactttgatcaatttggtcttggaattttagaaaaaagaaaattgtttttgtccctcgttaaagttcaagaatcaagtttcgccaaaagtttagggactatttaagaggttagtttagaaaatgaaattttggaaagattgatgtgtggtaacacgtaattcggaaaaattaatttgacatacaatttttgtaatctataaataaattgtccgtagtgtggtgttttgcttggtgttcaaaatcattttcaactaatatttgctatggacttattattcacg

SEQ ID NO: 163548 - DNA, 362 bp, Glycine max
  unsure (1)..(362): unsure at all n locations
ttaaacctccattaattntttgctttaccttctcttccattggtgnttcttcattttttctccatgtatctcctcacatgtcttgtgctaaatgttgttaacatgattttttagattttccaccaattaaacttgctatagaagctagatttgattttctatggttcaaatttcttgttcttgttcttgaaccatgaattgtgttgagtttaagttcctttgatttttgtcttgttattttttggggctgaaacctaaaccataaaattcttacaaaaatattaaagtagaagaaaacctcaaaaatctagagtgacttgttcacctatttgtagtttgtcatagaagtcatgtctagtcat

SEQ ID NO: 163549 - DNA, 78 bp, Glycine max
cccgcccaaaaaaaaatttttttcccccacacccaagacaccccacccccaaccaacaaacaacaaccacccacaaac

SEQ ID NO: 163550 - DNA, 271 bp, Glycine max
  unsure (1)..(271): unsure at all n locations
tgccgcatgcagcctggcgaacaaaaactctgcatttatctctagcatgcatnctctccttctttacccactcctcacgtttggttctttatgaaaaaacaccataactaaacgcgccacaaggcatccctatcgcaccagatccaaatctagaacgatgggtgatcaagaggagacacatgaacaaatgaaagccgaatgtcggctctgaaagaacagatggcctccatgatggaggccatgttacgaatgagccaactcatggagaaaa

SEQ ID NO: 163551 - DNA, 348 bp, Glycine max
  unsure (1)..(348): unsure at all n locations
gttcgtgctcgtacacttagcgcaattctgaaccgcttagtgcgcattaatgaattttggcttaacgcggcttttgttgctcagcggatggactgaagtggtgcacttagctggaagacccttcgctcagcgaacatgcacaactcatccttcttccagattcttcctcgtacttagccgacgaatgatgcgctcagcggatggctcgctaagccagcagattggcttagtgagaggggtgaaatcaacacttcagagcttgcctcattatcctacaattgagagagnattattattaaagacacataatgaaagtgattagtatctattacctatcttttacaaaat

SEQ ID NO: 163552 - DNA, 338 bp, Glycine max
cattttttttgcagagcctgaaagagcctgcggttgtctaagagaaattcatgtccatattcatcaaagtctgaaaagagtatgttgaacttaaggatgtcaatatggccaccgaatgaagccttggaatgagaaacccagaaggcccgaaaggaataaacactaccaagcaaaagttttgagggtgttctatagggcacacaatatgtgagcttaagctccgaagaggtgataggaatcatcactggtcaaaggcatgatcttgaatgacgagctaaagggtttgcttatgtcgaatagaaatttgtcccacagttaacccacactgaacggaatat

SEQ ID NO: 163553 - DNA, 397 bp, Glycine max
  unsure (1)..(397): unsure at all n locations
tgtagaatggctagacatgatacatgtcagggtgttggttggtttattgataaaagggatgccccacattatttccatgacacaaatgcaaaaatgatgattcggaaactttatgcaaaactggtcatgcatgcacctatgtggacactcaagtgtcaaatttttatggtcatgtgatgctagggctcaagattcatttcctctattttaaatcaacccaatgtntccaaaatatgttcttttatcaatttgtgcattcatccgagtccatttcgggcgtccggggaaatttcacagcattcacccttcatgtgtagacacatgtttcaaaaattggttatgatcaatgaattttctttcacagaaaagttggacatcatctcttttcaaaagcatg

SEQ ID NO: 163554 - DNA, 256 bp, Glycine max
acgcttatgtttcgtcattgaagtgacatgaatgttactatccacatctctcgacatggttccattaacattactataacatacacaagttgatattctcaatctcttgactaacccactccagtaagtattgctgccacattgcgctactgaaatccaaaaaattgggccttgcaacaagttctaactaacccccttcaaggaataaacataaactttttcagtgatcttgcctctttgatcatactcaggaacc

SEQ ID NO: 163555 - DNA, 309 bp, Glycine max
agatgcagcgaaaggcgaaggagaagaagagaggggagacaccatccactacggaataagccaaggaagaatgagcttctccaccaagaattgccttggataataagctcgaagaggatgctttaatggatgaaaacacagacagaatgcgggagcactaaatcgaaggagtagagagggagacagtggatctctgaagcgatctctaagactctattcatcaaagtaccacaagtggatacatgcttctattatagactacggagcccctttagaacctctctaagaaacttcctgagaaacttttta

SEQ ID NO: 163556 - DNA, 273 bp, Glycine max
aagctttttgagaaactagatccttatctatccagacccctctattaactaaattaacttccttaataataagtacgggtgaaaataacgcaacaaataatccaacatcaaacataagtactaataattatagatatatatatccgggtggtaccatacgcaccaattatagaacaaaatttgagcccaatcaacaagcgcacttccctttcacctttttttttcctggacactgattcttcaaccaacattgtgtgaatcttcttattttct

SEQ ID NO: 163557 - DNA, 458 bp, Glycine max
tatcgtcatcgattacatggttcttattagactggttgtttttcttgagtctctacttcaatcgattactagtagatataatcaattacttctctcttaaaagtgttttagaagtgatcaagaacactttaattgattacatcaagaatctaattaattacattgttcttgaaagatttccagttcttgggaagaacactctaatcgattgaaatgataatataatcgattacttcttcgacataatcaatgacattgtatatttaatcgattacaggtggttataatttgtttctctataaatagccaccatgtgttctcactctgaacaacttctgaatgagatagaattactagctgatattatttaaatgaataacagaagactaagttcttagatacaatgtgactcacacactctaatctttgattatgaaaacattctgtgacaagtgagt

SEQ ID NO: 163558 - DNA, 311 bp, Glycine max
tcaacatacaagttgcaaacggcagcgatatggcacggttgttatgttttcttaacaccacatctatcgaccagcctgtctgtggatggaaggtcttctacttcacagaatgagccgcataaacacttgatcgtaaccctggaactggaggaggcattaacattaacactgagagaaccaccgtatggaatatctgcgaatgcgaaagcgaaacatatacacatcaacccctgtatcatagagacaaaaacagccattatcacttttgaagatttgggacaaagacattgagagcataactgaaacttcta

SEQ ID NO: 163559 - DNA, 119 bp, Glycine max
ttttcacactaatatttacaagggtacgagccaaataactacctacctacctaactaactacctaacttaactggttacacaaaagcgaccgccgaacctgcaacccaattttgatgtg

SEQ ID NO: 163560 - DNA, 341 bp, Glycine max
ccccccccccctggtctcaaattctctaatgcacaacacacatcccaagccgtccctgtgctcttccccccggattcttaaacacccgacgcatgcacacttgccaatgaactagattactatttctttcactccacacaaatacactcaccactcatcaaacacagagctatggaatcacctccgttaacgactacgcccttcttttcacaacaaagacgcgccatgactgcataagcaacctgaactatctccattgatcgctaacttcgcgccacggaacataatctcattcaaagacaaatataactatcctccactcgacattcatattcccaaaa

SEQ ID NO: 163561 - DNA, 291 bp, Glycine max
  unsure (1)..(291): unsure at all n locations
gaccaaaaactcagctgagggaaacaaaacgctagaaggagacctcttcttattttcgtataaaaggcatttgatcactaaatagatcacctctctaacgactgaagagatcaaggacaatatatatataaaggatttatctgagactgtacgtgatatttgcttaaacaatgtgaatctatatatctttaagaataataggacaaataatatgactcttaattatatgccagctttcttgtctctgttgcagcaccttgtaattttcaaatatcaattnttccacttgga

SEQ ID NO: 163562 - DNA, 272 bp, Glycine max
taccacatgcactcctctaatgactatggccttctctctggcgctcaactgcacaaagtatgcagcccttttttgtactaaatttctcgctttaacaagacgtatgtatctaagggctcctccactgggcgcattcatatactattctctatattactgaggccttctaaaaatattggaaatgaactgctccaaatcggatgggagggcactcgggactattttttaatctcccccaactcatacagctttttcctgagtgcttatacctg

SEQ ID NO: 163563 - DNA, 391 bp, Glycine max
tccatcaagcgggtatcagagcacaagagctcttattttgtgctccttatacctcacttaatattctgctctaccttctcttccattgtagttccttcattcctttctccatgtatctcctcacatgtcttgagctaaattttgttaacatcgattctttactaatttccacctcattaatacttgctaatagaagcctcgatcttgacttatctataggtacaaaatacttagctcttgctcttgaaacatgaattgtggtgaatttacgttcctttgagctatgacttgatattttctgtggctgagacctaaaccataaaattcctacataaatattaattacaatagaacctcgaaaatctatagtgacttgctcacctattgtcgg

SEQ ID NO: 163564 - DNA, 350 bp, Glycine max
tgactctggtttaaacatgattgatacatgatttgggatttgttgaatagcattgggcaagaatggatgagaggaagtgtgaatttcgaaatctgcactttgtgcagatttttgctgtgaaattgtgcagcatgattttgcacaagtgtagaaaaatgctatgtttttgctggttgtggaaagagtagtgcacaatgagttctggatgtttgctagcagatcccaacggtcacaatgtaggcttatgcactatagacttccagtaaaattttggagttgatccaacggttaacgaattggatcgaacgaattgttactggcgtctttaagtgagacaagctgtgattttg

SEQ ID NO: 163565 - DNA, 380 bp, Glycine max
  unsure (1)..(380): unsure at all n locations
gatattntatattgccaagtcactaataactatgtttattntttctatattttttacagaagttatcaaggcattatagattcatgcaatgtacaaagtggaaacattttgtcaaagaaatctcttggaattttatttttcttgacatatctctccgtttctaattctaaaattctttccatcaattcatgcccttaacaaaattaattattttagttaatcacattaaatttgtcaattatttatactatcatttatctttgtatccacttaattgtttctcataaatattttgagagaaaacaattaactaaagatatgaaagacaaaattaatccatcttaaaaaatgatcttattaaatagacaaacaacattatg

SEQ ID NO: 163566 - DNA, 109 bp, Glycine max
cgtaaccattggatcttctcgcaatttggtctgccacttcacaagacacttgtccatgatctgaccgttgggatttttgaaaaaatgtctggacgctgctaaaaatttc

SEQ ID NO: 163567 - DNA, 469 bp, Glycine max
  unsure (1)..(469): unsure at all n locations
gcttctttgggaccttgaacaagaactaactcctctttcagaaccatgctatgtgctcgcgactggtccctctcttcccttcgcagcttcagttcactattgctaccccatagagctccgcanaatttattccggccatactcttccttgcgagccctcttggtctcttgttcaagggctcttgcggtaattgcattctcttcccgtaacccggcacactccttccgaatgtgtgtagcggccaacttggacttctccttgagagcttggacttcttcgtcctctttcggtgcttcaaaactctcttcgctgacgacttttaacttggcgagccaatctaaacctcgtatattaactnttagccattcgtggacccaccaatgatgccattacgaatgcccctaagctcttgatcttttcttaacggngtttcccatgccttatnggattcttgatagtcttggaattt

SEQ ID NO: 163568 - DNA, 375 bp, Glycine max
  unsure (1)..(375): unsure at all n locations
atcatgagcaactatgtgtgttctacaacgactcgcgaaacaaaaggtgatcaaataacaagcagagatttaaaaggtactaggttgcctcctagtatcgcttctttaaccgcttgagntggacgcctgatgacttgtcggtcacggacctagtactttgcttacctttggctttggacttggtcgcctattggttggtcatgtgtcgtangcaatactctaacctttttgtggatgagctgaggggctctggaggtggcgaccgtgcatttgntgactgttgctggcgatccccaggctgttgtggtgtttagacttgcacctgcctggggcgcaatacttcttgatgaaagctcgattatgaaggaacctgat

SEQ ID NO: 163569 - DNA, 282 bp, Glycine max
  unsure (1)..(282): unsure at all n locations
tagcttttncatcattctatgtacccacatttgtccacattgtgtattgagcatcttcatanccgactcatttactatatataccccccgttgacatgcttaagccatttgactgatgccacctctcacttaacttaaaaaaaaaaatcatattcaccgaacggttgaattgtattatcccgtaatttctatgaaatgaattcgaccggtttgtgtgccgtaccaccttttaaatcaaaaaagaggggaaacaaataactttataactaaaaaaacattctt

SEQ ID NO: 163570 - DNA, 106 bp, Glycine max
gggtgacgcaacgttaaaccacccacggttctggttaccctatattcgtggttgtaggcattgtgatcacaggtacctctctatcatccttccaaaaaaatttttg

SEQ ID NO: 163571 - DNA, 369 bp, Glycine max
  unsure (1)..(369): unsure at all n locations
agcttaatacatgaacattacagncatatgtgtttattctttaattaagagggtagggaccatgcattttaccctcttggttgaacatatcacgccgcttaagtctatcagtgatttctaatagaaaattcaccaaaactaccctattaagtacttaagaacaacctgagaattcagaattacaatatacttttcctccaccgactgccaggattatgagtactgataacgcttatgtgataaatatttccaaaacaatatgggcaagacaacaattgataataagttccacctacactaaatcttgatgactattaaatattacaactcgctcacctcattatgtcaacaatgacatgcttaatatgt

SEQ ID NO: 163572 - DNA, 400 bp, Glycine max
ctcaagcttattcaaaacaacattgatgagacctaaacacaagagagaaagataatatgtctatacaacatagaaacaaagtcaccttccacacaccaaacaacatcaacatgcaacactacaggcaacaaaaatagatgacacattcgttggctatgacaatggtgacatcaggaccaacaacaacatcaatgacaacaacaaatccaaacaacattgttagagtcagtgacaaccggcaacggtgatagaagtggtagtgaaaatcggtgacaaaaacatcaacaacgactgagtgggccaacaacgaagatgacacctttgatgaaagctgtgcacccaccattgggaatggaacaattgatgttcctctattctcgcaaataaacttgcattccat

SEQ ID NO: 163573 - DNA, 390 bp, Glycine max
  unsure (1)..(390): unsure at all n locations
tgaacacatgtgtctcacttctattatctagtctgaatcttccatggtcgggtacatgagcatatgcaatgctcccaaatactctcaagtgatcaactcttggcttcactccactccatgcttcttgtggtatttgatctttgacattctttgttggggagtgattggacaaataaaaggcacatgcaacagcttccgtccaaaattcctttggcatatttttagccttcaacatacatctagacatattaagaatagctctcatttttctctctgctaccccattttgntgnggagatctaagaaccgttagagggcgacgaatcccatgttattcacaaaatccattanattcttttgatgtgaatgcaccacctctatcggatctta

SEQ ID NO: 163574 - DNA, 457 bp, Glycine max
  unsure (1)..(457): unsure at all n locations
tccatcagtggtaatcggagcacaagagtctcaagtatgtgctccttaaacctctattaatttttttgctttaccttcttttccattgttgtttcttcatttttctccatgtatcttctcacatgtcttgtgctaaatgttgttaacatgattctttagagtttccaccgattaaacttgctataaaagctagatttgattttctatggttcaaatttcttgttcttgttcttgaaccatgaattgtgttgagtttaggttcctttgagttttgtcttgttatattttgtggctgaaacctaaaccataaaattcttacaaaaatattaaagtagaagataacctcacaaatctagagtgacttgtngatatgaatcctcatggcacaaaggctgacttacgatcgtctaggattaaacctcgatggaaaatgcggaaattgattaacgaaaggatg

SEQ ID NO: 163575 - DNA, 334 bp, Glycine max
  unsure (1)..(334): unsure at all n locations
atagtatcccactgtgtaaactaactttccaaatgtttgccttcgcaggaaatggccccgaggaagcttgcctcaaagaggtccaggaaggacaaggcagcagaaggaactatttccgcttcggagtatgatagtcaccgctttatgagcgcggtacaccagcagcgcttcgaagccatcaaggggtggtcgtttctccgggagcgacgcgtccagctcanggacgacgagtatactgatttccaggatgaaataaggcgccggcggtgggcaccactggttactcccatggccaagtttgatccaaaaatagtccctgagtttatgcccatgc

SEQ ID NO: 163576 - DNA, 291 bp, Glycine max
gaccacagagaggtacctagagatatgtcgcgggggtcatgagaccttggggacgtcaggtggggtgctattgcccaaaaccaagcttgaccaatcccgacccaacccgggcatattcagtcagtgagaacctgtgatgtacctaaacaggcgagctcctggcagtcaacagataaaaggaaccaagaccacatagcaaggaggcttgtggtggctggccacctgtgaacttctattgacatgtggggtatggcctctggtaatctattaccaaaggtgggtgatcgatta

SEQ ID NO: 163577 - DNA, 83 bp, Glycine max
gctgaaaagcttttgaatttttttttttgaccgagggctgaagaatgcccaactggcctccgttttcgttcatgatatcttaa

SEQ ID NO: 163578 - DNA, 441 bp, Glycine max
  unsure (1)..(441): unsure at all n locations
tagtagacaagcaaaaatctaagccttaatcctaaaattttatattcagagaatcgatagtaaatccgaacttcagattaagtgaatagcaatgcaattataaaccaatgtatgattgctttctatcaaaccaaacaaggttgaactccagcatgcatgattcaacttgtattaataggaagatttaacttaaacaactcaacatgacagttgccaattgctaaacattgtttatttatatatagttccatatgagggcaagagtgtgaacgttgaactgtctgatctcacattanaaagatttagaaatttcaatgaagaaatacttagaacatgtgttcaaaaaacattcaaatgcagaagctgttttaaaattatttatttattcaagtgtagaattataataaccacacgttcagcactttgaattcgtgatggctg

SEQ ID NO: 163579 - DNA, 361 bp, Glycine max
cgtgatcctgagtatagaatcgcatttcctcttgacgctcgcacgcgcatgattcaatctggagcactttgaactcatatcatgatccctgtgatcatcatctttgatgtcatgaagccgccttgaccttagagtcttttgtcatcacttttgttatcatcaaagcttctttgaagtcaccttgattcatcatgaagcctgcttctacctattatgtggccaaacttcgtcttcgtatgggcccaactcaatttgctaaataaggtgataccaaaatctatgtaattttaatcagagtcaatgttgccttacaaattgctttgacaatatatcatgctcagtaatttaattgaacaatact

SEQ ID NO: 163580 - DNA, 304 bp, Glycine max
cgacataaatcaacccgccccaaaacccccgaacctgcttctccgtgcgtgggtcccgcatttcaaggatggcctacactttcttgggaactatctctatccctttctgacttacgataaatcctaacaacttccccgaaatcacccccaaagtgcacttggttgggtttagatttaaatggtatttccgcaaccttccaaacagcttacgcacaatgacaaggtgttcgttctcagtccgagacttggcaatcatgtcaactacgtaaacctctatttccctatgcgtcatatcatggaacaa

SEQ ID NO: 163581 - DNA, 383 bp, Glycine max
  unsure (1)..(383): unsure at all n locations
ctagttccgtcccggagtacgacagtcaccgctttaggagcgttgtacaccagcagcgctttgaagccatcaagggatggtcgtttctccgggagcgatgcgtccagctcagggacgacgagtatactgattttcaggaggaaatagggcgccggcggtgggcaccactggttactcctatggccaagtttgatccagaaatagtcccttgaatttatgctaatgcttggccaacagaggagggcgtgcgtgacatgagatcctgngttaggggtcagtggatcccgttcgatgccgacgctatcagccagctcctgggatatccgatggtgttggaagagggccacgaatgcgagtatggccagaggaggaaccggtctgat

SEQ ID NO: 163582 - DNA, 365 bp, Glycine max
  unsure (1)..(365): unsure at all n locations
cataatacatggcgaggtttggtttggttcaacgataacagggatgccccacattatttccatgacacaaatgcgaaaatgatgatttggaaatctatgcaaaactggtcatgcatgcacctatgcggacactcaagtgtcaaacctttatggtcatgtgatgctagggctcangattcatttcctctattttagatcaacccactgtttccaaaatatgttcttttatcaatatgtgcattcatccgagttcattttgtgtactcggtaaaaatttcacaagattcaccccttaggtgtgcacacattntttttcaacaactagctatgatcagcgaattctttatttttcaaagagaattgga

SEQ ID NO: 163583 - DNA, 355 bp, Glycine max
tacgtggcggacgggcgatggtgcacaacaagctttccacatacacaatgcgcgcataaacccaccatcccctgttggccaccttcaactgagctcacgtactcccacataacccatcttctctttgttttctacaccgggtgcccattaattctctgagctgccacaacattcaagcaaaacaacgttcatacagcacaagctatcacagccgagcaaaacagagcagaggcagaaaactctgctaacacatcaaccaaaatcacagcttttctcacgtaaagaccacagtaaccattgcttcgatccaattcgttaaccggtggatcgactcccaatattactggaagtctat

SEQ ID NO: 163584 - DNA, 337 bp, Glycine max
cttgagccaaaatcctgactcaccataaaccttgacccattgtgttatatgtctatccttaccctcggaagcaaaaaagaatagaagggaaatttccaatcaaagaaaaagagaaggaaaatttccaatgaaagcaaaaaaaagaaaagaaggaaaattccccaatcaaagagtgggagaaagcaaaaagaaaagaaaggaaattcccaatcaaagaatgggagaaagtaaaaaaggaagaagaagaaggaaagaaagcttctgatcagggatcgaaggaaaaacagataaaatgtgcagaaaggtctttggaccggacaatatctgaacaatacag

SEQ ID NO: 163585 - DNA, 363 bp, Glycine max
ctatcctttcccagcggagaagaagagccgctgccgctgtttgttgacaccgcacctggaaccctcttcctccggcgcgtctttctcttccgcatcaagctcactaaggtgtgcaccttggctctctacctttgtccttcctcacccaagggagccactaagtcgtgtaactcggatgagtcatcatcgtcctcctacacctccctctttactttctcctccggctaccatcaatccatcaccataaaccatgccacattggcaccccttctactcctcttacacgtcttcacagacaacacgcctaacagaaaaacacaaatgaacattcacaacgcagaactgccacataacagaatacac

SEQ ID NO: 163586 - DNA, 331 bp, Glycine max
  unsure (1)..(331): unsure at all n locations
ttcatatatataattagcatattaaatgctgataaccgcggcatgttattcaaaagatgaataaatagtgcttaccatatgatgaccatcatgatgtacacataaacaaactatagcacattgcttgtgagctaaaagcaactatattggngtgggacccgattgcaccttatacgtttagaactaggttattcttcttggcgagggtgtagttaattttcaacctatggagcacagctactgctacttcttttgtctaagaagaagctactttctttgtggcttgtaccacaactagccacacttaatgcactcacacttaatttctact

SEQ ID NO: 163587 - DNA, 334 bp, Glycine max
  unsure (1)..(334): unsure at all n locations
tttaccctcactgattccccaggttagacactgttgactttgttgattcctgatgacactttttgctttttggtttattattataattatggctttagtacaataattcccttttgctagttttatttatgggtagttaggtggctcatcctgaagcattttgaacagtttgacttgttttttatgacatggcagtaaaacacttttatcattntgagaaaatggttgtatgcttttattttgagttgagtgcatgattgtgatggagtttgtgttcctcttcatgagtttgagcaagtgtgtatgttatacaaagaaagaacaagaatgtgaa

SEQ ID NO: 163588 - DNA, 461 bp, Glycine max
  unsure (1)..(461): unsure at all n locations
accttaagtcgacctgagcatgcaagctngccacccagctcgcccaggcgagctatgtttgcttctccaaagcaaccgccttctggaggaattttctggaaagcccaagtgggcctagttgctatttgcacccccattcttactaaatacacaccttgctctctattggagattttcttccgtatcgttaccagactttacgaatntcttaacgaccttgttttctttctgttatgttaccaaaccttacggattacataatcatcccttcttgccttgcggaacgttatgaaactttacggattgtgcactaactcttcctattacattccggcatgttaccgaacttcaccaattgtgctacaatgctttcctttgacttcccgcatgtcaccgaacttcaccaatcgtctaacgatgggtgccaagtatcttaagcggtcaacgaagtcacatcccac

SEQ ID NO: 163589 - DNA, 465 bp, Glycine max
  unsure (1)..(465): unsure at all n locations
tgcttgagaagcaaggaaggtagcttccttgggaagctatatgaagaaagcttccttgagaagttagaggggggatactcacacccctcaaatagctaagctcacccccatgccaaaatacatgaatatacaatggggagcttccttgagaagcaaggaaggtagcttccttgggaagcaaggaagaaagcttccttgagaagctagaggaatgatggaagcttgcttgagaaactnttgtggaggctagatcattgggcttcaataaggtccttcaatagtgattttcagacatggagttgcagtggaagataaaggagaagaggtgagaggaggcaccatccactatagaataagccatggaaggagaagcttcaccaccaagagagtgccttggataagaagcttanatgggaagctcccatggnggaagagaatgagagagagagagagagagagagaaag

SEQ ID NO: 163590 - DNA, 218 bp, Glycine max
atcatctggttatttgtttactattattgtcatcatctgtctctctcgtcattgaggtgccacttgagctgccaggtctcttcacctttgcgcgtattcttagaaagatctgtgccccatctttgcacatgttctgttgttgcatcctatccggaaccatatcaaaattgtcctatcctgcctaatgaaagcaaacattaagtcctttccaaagtgga

SEQ ID NO: 163591 - DNA, 278 bp, Glycine max
gcgaagtgggtggaattcctagagcttttcccttatgttatcaaacataaaaagggaaaaggtcatattgtagccgatgctctttctcagcgtcatgcattactttctatgcttgaaacacaattgatttgtcttgaatgtttgaaaaacatgtatgaaaatgatgaaacttttggagaatattttaaaaattgtgaaaaattctcaaaaaatggtttctttaaacatgagagctttcttttcatagaaaacaaattgtgtgtgcctcaatgttctac

SEQ ID NO: 163592 - DNA, 377 bp, Glycine max
caaaaacacagcttacacctcagactctgagaatacacggagatgatttcctcttctgttctatgcaaagactcaaacatcacctctcaaagtttgaacatccacctaacatctgctcccttataccaaggaagaaaattctctcgccaactttgctgtctaaaccttcttgaaagcatttcaaaagcatcgtaatctaatccttgatacatcacatagagaggcttcttagactctcttcatcgagtgtcttcacactatacacattcgaggatcgaacagaagactactctctactcattcagctcggagtgacccttttctactatataccaacaatatcgcgctctagcgagagcattcatcctgacgctcca

SEQ ID NO: 163593 - DNA, 109 bp, Glycine max
gaaatacccacagggtcacgggattgatcataggtaatttcatgtaaacacgtctgaagccatgaatctgtccgacgaatcccaaagaactccatatgatgggaaaacc

SEQ ID NO: 163594 - DNA, 356 bp, Glycine max
  unsure (1)..(356): unsure at all n locations
agctagcaatnctggttccagcctgacttatttcatgttccatacccacaacgctggatgactcttataagttaatacagaactatacacacgtattggcctaattccgaatcaaacttttctagcacaatacaaaataaggaagatgcataaactaattctaatttacaagttcgatttaatttaactctaccgttccttcttttgttctggatagggtttattgagaactttatagcaactggactgtagtcatagatatgcagagagaccctatccgtataatactcatttcaacaacactcaaatcttgacataaggaaattcacgaaggaatgaaaactacctatgtgtaa

SEQ ID NO: 163595 - DNA, 375 bp, Glycine max
aacacttgtgcacacttgtgggctcgacatactcgtcaccctcctacttgtctaggctactaccccaaacatcaaacaaactccctcatacaggatacacattctcccctagttaccgaggagcttgcggggcttatgtaactatccaggattcacacaacacacgtgtcatgctacatggcactatgagacacacggcaaccctccatattagccctggcgctggagcacgaacgccaataccttatgagacggctccccaaccatagatgatctctaacccttactattacaatataaaggatcccatatctctggttagcatccggtatctacaggctaccgattattaccaggtacattatctactagctt

SEQ ID NO: 163596 - DNA, 374 bp, Glycine max
  unsure (1)..(374): unsure at all n locations
tgcaagctngggggtcatttccacaatcatatcttatcactgtttcaacaatagttcttttatcaagtccatgcaaaacatctgagtccgcttcggtattcgggaaagtccttcattatttttatcctcaaaatacacatattctttgttaaaaaccctttttgttgtgttttgatccgcacaatattcnaaaatattggtgattgtttctttttaaaaaaagaatattagttttagaaaaaggctgaaacctagacaaagttgtaatccgagactacactatcaaaaatcaaagagcgtgcgaaaatagaaacgaaaccatgcgtaagtttttttttttgtttcaaacaatcatcacaacgcaataacataac

SEQ ID NO: 163597 - DNA, 345 bp, Glycine max
ctatcaattggttctcccagttgccctgttatatgaaaaaccttacccgggtctcaaacctatttgcatactctggcaccgtctcgctcctctgtttaacttcagggacattatcttttttctattcttcatgttttttaaaatatacttcttcataaaaatatgtttgaaagtctcccatgggacaacaacacctgctcccttcagacttgggtgaagtgtcttccaccaacactatgcctcatctgccaacatgggaggaacaaacaacaccttctgttggtcctgacacttgctcactcagaagatcttctttatcatcctcaacctagccttagtgccttc

SEQ ID NO: 163598 - DNA, 250 bp, Glycine max
tctcacagtcacatccttcacttgggtcctgaatggccaccaaaggcttatatatatgtgactcgagacacaccatttccaccagattttgaaaaacaaaaaagcctcatcctcttcacaaaaaaaatggtgtatcctcttacaaattccttggccacaacacttgtgattcaataaggaaatatttgagtgctccaattgttcaacccatctctttcaagagagacttcttcttctcttttccttatac

SEQ ID NO: 163599 - DNA, 354 bp, Glycine max
agctccaagctgatcaagtgctccatgtttctgtttgtaatggcaaaagaccgtatggcggtcatcacatgagcacataccacaaaccctcgcgacaggtacagatttctgattcaaggcgcactgggttaccaagctaaccaatgcatccagtttgccttcaagcttctaactctcacatgatgcaaatggtttgtggccacctcatgcactcctctaatgactatggcatcatttctggagctaaactgatgcgagtcggaggccatcttcttaattaaatctctagcttcagcacgagacatgtatacaagggctccacccatggcacgatctatcatacttctctacata

SEQ ID NO: 163600 - DNA, 384 bp, Glycine max
  unsure (1)..(384): unsure at all n locations
ngagaggattgatggngacccggtgttgagagaaacgatgatatgttctacgtgggagtacgtgagctcatntggaggtgggcaacacgggatggtgggtttatgcgcgcattgtggatgtggaaaacttgttgtgcaccatcgcccgaccgccacctattaccacatgtgatgggtaccccataatcctacaagcttgatatgaagaagtgttgaagggcgaaacttcctgcttttattgttgaccacagagtggtacctggagatatgtcgcgggggtcatgagaccttggagacgttatgtggggtgctattgcccagaaccaagcttgaccaataccgacacaacccgggcatattctgtcagtgagaacctgtgatgta

SEQ ID NO: 163601 - DNA, 155 bp, Glycine max
cacactggccacaagaaccgaaatggagagcccagcgaaaacggaaccggatcatgcacagagagaacgcagggactctgagcataaatccgacctgtgagacgacccaagcattcagggcagggagactctaacagcacggaggcaaagaaaga

SEQ ID NO: 163602 - DNA, 327 bp, Glycine max
tcgagggcatgatattggaagacaaggtgaatgcttgccaaaggtcaaaaaagagtttgtccaagcaattgagcaagaccgaagagaacatgtgggccatcattctccaatactaagagaagctaagtctatctcgcacccatgaatgaatgtagaggaccagtatgtgaaagtattggtccaacaagcggaaaaggaagcaagagagagagagtgatcgactcattacacaaagaaacaatgatatggatggataggctcgctctcaccctgaatgggagtcaagaacttccaagactactaacccaaagcaaaagcaatggcgga

SEQ ID NO: 163603 - DNA, 449 bp, Glycine max
  unsure (1)..(449): unsure at all n locations
gacctatgaaactcagcttggatgccctaaaattttaaggctgaagtcgagaatttatgtggaaagcaaattaagatcgtgagatctgattgaggtggagagtactatggtagatacacggagaatggacaagcacctagtctgtttgcgaagtttcttcaggaacatgggattattgcccagtacactatgcttggttctccggatcagaatgatgtggcagaaagaagaaaccgaactttaatggacatgataaaaagtatgagaagtaataaaaaacttcctcaattcttgtggattgaagcattaaagacggttgtatatatattaaaccgggttccaaccaaggctgtcttaaagacacctttctagttattcaaagggtggaaaccgagtttgcgacatatatgcgcttggngattcccatctgaagtgagagtttataatcc

SEQ ID NO: 163604 - DNA, 300 bp, Glycine max
tggttcgttgaataatcaatggactccaagtttctcatgctgccaatcccattcggcatttttcctattaatttattgtgggacaagctcatcgagaacaatccaataatgctaaacatttggggaggtattgtcctgataaatcgttacttgacatatcaactaagctcataaagtgcatgttcttttgcataattcgatacctgaccttttctaaccagctcaagactatctactaacgcataataacgattatccacaataccaagggtatctattgtaggaaactcacaactaatc

SEQ ID NO: 163605 - DNA, 361 bp, Glycine max
  unsure (1)..(361): unsure at all n locations
nagatggaattattatagtctgggatgtatctggaaatttggaagtttattattgaaggacctggagggggcattgatgtgagattgtagtgaaaacaacctgttattcttgtagctattagtaaaagaaatatcaactggaaatgaaagcaataaacaatacacacccacccttagttgtcttgcttctttctgtttntattagttactaagctagatgccatgaaatctttcagtggcttaggtggcattcaagaggacacatactcttagctggttctgaggatttcaccatttggatgtggaatactgataatgcttgcttacttaatacatttattgggcatggtgataatgtaac

SEQ ID NO: 163606 - DNA, 243 bp, Glycine max
  unsure (1)..(243): unsure at all n locations
acagccgcatgcatgcataactcaacaacaatcaagcagtgtacttatcattgngcaacttcactctgcctacgatataaacacaaatcatattctataccctcacattaatcacatgctcatcacaaaacatctctagtcaacacaacatctctcacacacatatcattaaccaccatcacgtcacaaagctcaattgatatcacaccgaacgtaagcaacaaatatacttatacccaatcc

SEQ ID NO: 163607 - DNA, 363 bp, Glycine max
aaaacaaacatgctattagtgggctgaaatttatatactttacacagacttttagagtgagaactcattatcgtactctataagtcatcagtggagaatcacgtccatgattagagactcttcgaagtaaggattcgcattaaaaatttcaaagcatgttcctctcgacaagaacggcttggcttaagggacaatgttatgaattatccatcaaacaaaccacaccatgatgaggcaagcgctcacaaaatatgagcaggattgctgatttggaattgcgggattgggcccttggatgatcctgacaggaatatgctcctttctgtaagataatggggcaaatttggtatgctactttctcta

SEQ ID NO: 163608 - DNA, 399 bp, Glycine max
  unsure (1)..(399): unsure at all n locations
tctactgatgtggcaaggcagcgccctttcggctagttgttcctttcacgagccttggnccttgttcttcctttncgcaatactttaccttatgtccgcttgcatgggtttataacctaacccaaacttctcgtggttttctctggtacttaccagcttggttctgtcgccgttgttcttgcccaaacccattcagggctcgtagccgtaccccaacatcacccgggccaccatcattgtcgtatcggacaggcaacgtggcccaaagagggaatttatggaggcaatgcttactacctcaaaagagtggaaggccatttccaatgactccctcgccgctgtcacatatggcatatagcaagggcaacttaccaagacgtcttcttccctaattcaatg

SEQ ID NO: 163609 - DNA, 299 bp, Glycine max
tgggagccaatccaacctctgtgttcggactctcatccacttatgatagcccccgatgatcccattactgtttcccctaagctctatgtactttcttcacgccgcataccatgccttgcgaactcctcgaagtaccctcgcgttgtggtctcgacaccccgtgcgatgaaaggcgtgatgctttcgtctgatggcacttctctcatggggtatacaagctgtcttatggagaggacgggattataattaataccatcccttgttcccattcagggaacaattggacatcctctccatga

SEQ ID NO: 163610 - DNA, 243 bp, Glycine max
caagtgaccttagatatcttaacaatggggggtcgaaacaagaaaatccacactacttccccaagtatttagatttatttcacttcttattcacactataaattccattaataaagaactccttaaatccagactcaaatccacaacctggctacgaatatcaagccataataaacaaaggagatatgggaagagacagcgcaactcagatttatactggctctgccacccactgtgctacgt

SEQ ID NO: 163611 - DNA, 307 bp, Glycine max
  unsure (1)..(307): unsure at all n locations
tggaaagaggtttgatgaccacgagtggattattgntgttgatctttctacaggaaacttggaacaaatggatgaagaagttgcatttgaagatccaaaaaagcttgcctgtcaatggagtcattttgagtcactcatgattcagaagacgaacactatgcttcacttccatcaagagcactcagttgaagttcacagttcgttggagaacatcactacccggctggaaaacatataaactaggctaacccttagcaacctccattatctcaataaggatgaagcttagtcatgttttaagtgctta

SEQ ID NO: 163612 - DNA, 441 bp, Glycine max
  unsure (1)..(441): unsure at all n locations
agctngtcatcaagttcttgatacaagaacacatatggatggnggtatatattaacttgcatgggctgtatgactgcaacatgattacactgaatttgttgtagtatgaccacaacaagttatggaacaaaactcaaatataatttcttagaagccattatatcatgctctaattaaaattgaagttaacttctataatgtgtattaaaggtattattagagaattatatgaattaactatgtgaaactttaatcttgattgaagaacgacaatcaaaatttgcattataaatttatcctttttgatagattggttatggtgttattttttaaataatgagatttaggctttgattgctaagttttgttgtggaaattttggagaagtgtgctacaacatcttgaatttctaggagcttcacttaatcatggactggtgac

SEQ ID NO: 163613 - DNA, 454 bp, Glycine max
  unsure (1)..(454): unsure at all n locations
ctggcattgaacataacttntctgcacctagaacctctctttantatggagttggtgaaagaaaaaatatgtctttggaagaaattgctagaaccttattaaatgatactcctcttccaaaatatttttgggctgaagccgttaatactgcatgctatatcatgaatagggctttaataagacccattttaaagaaaactccatatgaactattcaatggtaggaaaccaaacatctcgcatcttcatgtttttggttgcaagtggtttgtattaaacaatggaaaaagaaaacttatgaaagtttgatgctaaataagatgaaggaaatttccttggttattctttgcatagtgaaacctatagaatatataatatgataacactgccatttgagaatcgatcatgtttcactgtgagtcaatgctattctccagaaagatatttagatatat

SEQ ID NO: 163614 - DNA, 359 bp, Glycine max
agctttggataatgttgtgttaccttctcgttaagccaatctgctggcttagcgagcatccgctaagcgcaacactctcgggctcagcgcgaggaagaatcctcaagaagatgagctgtacaggttcgctaaatgcaccgtttcatttctctaagcgcaccacttcagtgcatttgctaaacgagaaagcgcactaagccagaaatcactaacagtttttgcatgcctagggcttctagagagagaaaggtccaatgtttgagagatttcgtatgtgaatatctgtagagaccacagcttgaagcaagagtcgcgttgagagcttaagatgagtttgtgagcgattattagatccttga

SEQ ID NO: 163615 - DNA, 303 bp, Glycine max
ttctcggggacgtctcctccacctctaggacctcacaatcactctcaaacttatctcaagctctcatgacaggttactcttccagctctggtccctgcggatcttcacacaacaaattctccaacggggaagacccgctcacctgtcaacgatatccgaggagattcgcgctctcgacttccattaaatgccttcttcactcgcttgtaacggtgactaggtgttataaaacacccgtgcctattgtaaactcattttatatcatcgctcagacgctagcacgcgtgcgtgtatgtgtgacat

SEQ ID NO: 163616 - DNA, 287 bp, Glycine max
atgtggatgctctgcctgacactcctctgtgctaaaggtgctgaaaccgcgcttaacggtggaattagggtgcccattaaagctacctcttgaaagggccccattcacacccccttttattgtgagtgcctcctctttttaattggttaacagctacctcttgaagttactcagatcacaattttttaaagacggctccaacaaaaattttaaaaaacctccttgtttgagggagacatttttctttcggcacaaaaatgaaaacttatttaatagtcatctcacgc

SEQ ID NO: 163617 - DNA, 424 bp, Glycine max
tcatgatgaatcaagactgagtcacagaagtcttgatgtattctcacgtgatgacaaaaatccagaatcaagatagatgatgatctcaagaatcatagaatgagttcaagattgaatcaagaacacttcaaggttcaagaggaaatttgatttccagaatcaagaatcaacgttcaagattcaagcttccaagaattacgataaagattcaagactcacgattcacgaatcacgagaccactttatctagaccagcattaaaaagtcttttcaaaaactgagtagcacatgagattttctcaacaaccgtttaccaaagagatattactctctggtaatcgatgaccagattattgcatccactaccagtacaatatgggtctcaaaagcttcatctgaattatcacgtccaattgattcaaat

SEQ ID NO: 163618 - DNA, 455 bp, Glycine max
  unsure (1)..(455): unsure at all n locations
agcttatgcagcagaatatacaatagttttttctaaccncagcacgcaaatcaaccacagccgagcaattatgacctttccagcaacagatacaaccctggatggaggaatcaccctaacctcagatggtccagccctcagcaacaacaacagcagtctgctcctttctttcaaaatgctgttgcccaagcagaccatacattcctccaccaatccaacaacagcaacaaccccagaaacagccaacagttgaggccccttcacaacctttcctcgaagaacttgtgaggcaaatgactatgcagaacatgcatgttcagcaagagaacagagcctccattcagagcttaaccaatcagatgggacaattggttacccaattgaatcaacaacacgtccagaattctgacaagctgcttcctaagctgtcaaaatccaaaatgtagtgcatttat

SEQ ID NO: 163619 - DNA, 428 bp, Glycine max
  unsure (1)..(428): unsure at all n locations
gacctatgaaactcagctttcgcaagatacgggaaaatctgcgacttatccattttataagnctctacatattgcctcccttgcccagtattatgatcagccgatgaggtgcttcacctttgggaactttcagctatcacccatggtagaagaatttgaagagatcctatggtgtcctctatgagggaggaaaccatacctcttcacaagggtctatccctcattagctagaatttccaagatagtccaaatctcggcgcacgaattagaccacacgaagcaagtcgaaaatggggtggttggaataccgagaatatatttggaggcaaaagccacactctttggcagtaaaatgcgagtgggctccgttcataaatatattcacactgncgaattttggaggagtactcttttcaacgtggattggt

SEQ ID NO: 163620 - DNA, 379 bp, Glycine max
  unsure (1)..(379): unsure at all n locations
gctttattctgggatagacgaagatactttaccttttactattatancttccaatagagaaactacacaaagtgcatgtgcagtttttgagaagctcatgcataatgaaattggcaagattattattaatgttggagttagctatagctcactctctcatgttgatgcattcattaaggacaaatttgcgagaaaaacatgattgcatgctctaaggaggaagctttaacaattaagtataaagctcttgattgcctatggaagagagatatgtgcttaagatatctaatgagatgcacccgaacctctcntagcaatctcatattgcatctcaaagttgtcactaattggtgtatgaagaaactatcctctattcatt

SEQ ID NO: 163621 - DNA, 483 bp, Glycine max
  unsure (1)..(483): unsure at all n locations
tcaagaattntcctattntatttgtgaccttctggaatattttganaataaaacattaccttttttaaaatatttcattctttatagatgaggcgttatttgatttcaaaatctgattattatatttttaacccgaagttctccttggtgtattcataaaaagtaataatttttcttctatcttaaccattgatatcctttcaaaacataatttttttcttcatttgaattgattttcgatatgagactcgtattcatgtgaattactttaatatgatatcatatctggttagatattatctaaatgttcatatatctaatcgctatcttcattntaattaatatgacaatgataaataaataatatgaagtaaaaatatgataattattacattaaaatctttttaacaatataatcataatcacacaacactataanaattaatcttattcaaagatatttttacaaagcataatcttcta

SEQ ID NO: 163622 - DNA, 346 bp, Glycine max
  unsure (1)..(346): unsure at all n locations
agctcgnataaaatcttagaataggtcttatcatcttatctaggaggatcatgacggtgcttgatggagttctccatgctagcaaagagctattataggtggaatgaatctgctcgatggggtggatgtggccggatgggaatacgtcaagccgctcacagggcttataaaaaagcctattaaacctaaaggctgggcattttattcatttaaatataatatatatatatatactatacttttatatttaataccctaataagtcaataactcttttttatcctaaataaaaccaatattgtgagataaaaaaatcttttaatagactaataggtcagatcaaact

SEQ ID NO: 163623 - DNA, 408 bp, Glycine max
  unsure (1)..(408): unsure at all n locations
gaatactaacttccttcagcaagcctcttttgcgggtcgtagatgggtttacattattaactataacgcatatggtactctggagagatacaaagctaggccagtggctcaaggttttacacaaacagaaggggttgattttcttgaaaccttntcaccagttgccaagtcaactatcgtgcggtttcttttgtcagttcgtgttgccaacatatgatatcttcagtagcttgatgtggataattcctttctatatggagacctctatgatgaggtttacatgaaacctccacctggcatgcacattnnttatcctagccttgtatgtaaattgcataaatcattgtatggatggagcaagctactatgcataggaatcagaagttgtcttctactcttctttcactt

SEQ ID NO: 163624 - DNA, 384 bp, Glycine max
  unsure (1)..(384): unsure at all n locations
atgggaggacaacaacgatcgtataataactttcaacaaagaggtttccaaaacatacatggatactacaaccgagcaggagacaacaaactacaacaaagagaaaatttgtgggaccacaccgcanagttggtagaagccttgaccaaattcaccgaagtggtcatcgccaaccacaaaaacaccatagccacgatcaaaagcatgtaaaatcacatagggaaattgtccaaacaattgcaaaccttttcaatttgcttctctgcaaccaccgaggggaacccaaagtgccattgcaaggctattatctccaccatagagtgtgatgtggaagatgaagaataaacacaggtccaagaaagcacaatgcttgaggaagagatg

SEQ ID NO: 163625 - DNA, 443 bp, Glycine max
  unsure (1)..(443): unsure at all n locations
ataactgagctgcaactgactgtgtgtgtccaaacctctttgaactttttcagccccactcttcctaagccctcttattttcccattccaatgcttcaacggtggccacattgacatctctcagttcgtcaccttgatagctgtcgccttgaactctttcttgactgcttgcacactttcaagctccaccttaaggcctgcaccttctcactcttctcaggggtttcagcctcttctctcacttgatgcctttagtttcaggaaccaaactaactcttgggtccgagcttttaaccacttgtgatagccaccgatgatcccattgttgcttcccntatacatcttatcttatctttgcactgcgctccatgtcttttggaccatctgaatgttcttgcattggggtcactgaaacccactgcgatgaatggcgcgatactttc

SEQ ID NO: 163626 - DNA, 463 bp, Glycine max
  unsure (1)..(463): unsure at all n locations
tataagaacacaatngccttaatcatttccaaatatgcatgtgatttangacgcatcaacaagaatcaagccaaggctattgtgcaagcaatcaatggggcaaaacacaccaaatgattataatgatggatggctcaaattctcacaaaggtaaaatcatcactttcaaattgagctttcaaaactatcatgacatgtagagaagaatcaatgatttctagtcacaaaatgtcaagaacttttattttcaaaacaattacccatttcttgaacatatcctataattcaaagaaaaacatgcaaagtcgtacgtgcacatgaaattgaccctaaatattatactgaagatccgacgaaactaacaacattaaccaattaacacaactaacaaattaacaaaaccaacataactaagcaaaccaaagaacactccccccatacttaaacacacattgtctctatg

SEQ ID NO: 163627 - DNA, 278 bp, Glycine max
  unsure (1)..(278): unsure at all n locations
caatactcaaggcgcgctgagataactaccgtgagagacgagagcggagctacacttttcccttggacaactaagctgacgtccatgagaagctgacttaaaaagatccctctggaagtgatagctaaggtacgcgcacccttctcatagctaaatccaccgtcttgagatgagaagctagagcttagctacacacgcccaataatagctaagctcacccatatggtaaaaaagcatgaaaatacaganagaagtccctactatatatacatactcga

SEQ ID NO: 163628 - DNA, 333 bp, Glycine max
agctatatgaaacatatcatggtatttgttcttcacacacgagaagatggtcactaacacaacatttactaataatcaacgcgagcaacctccatcatgaagcgaaagtgatagaaagatacaattaactgaataacactcgaaaaccttattaaatcttgagtacatgggtactactacataaaaatcacagtctaaggggcttacgcaaccatgttcatagacatattaaaaagcatacaatattgcacttagaaataaaagagattgtatacccttacaaattctgaccatgatagttctcgctgtaattctcctacaaaagttattgtc

SEQ ID NO: 163629 - DNA, 370 bp, Glycine max
atcctcgggactagcaggcgtttttttattccacagatccaccgattatgctgctgactgcacaattaggccacgtatcatcccattgtcttatctcgagtctctacttgaacacctcaaactcagcgtggaaaaccaccacatacctctataggagccattctctaggcatgacaactgctgcctacccctcccaagcctcttgagatgagaacttggatccgtcatatatagcctgcgtaggcgtcaaacgagtctgacttaatttatatgccatcgtaaagtatacacagaaccaggagatagcgcctgtctttacacaatccgacatcacaaaatgtactgacgctacgcttagctaattttgaca

SEQ ID NO: 163630 - DNA, 333 bp, Glycine max
agcttgcatcttgctattgaagaaaaatatattatatctgccatgacaaacatatgcaaacaaactcagcatattcctgttcggctaccaaaagtaaaaacaaaaagaagttcaatctccatgtgttgacgtaaaggacctacataagactcatcaaatatgttcaccaagtcaagagtgtttgtgattcttgcacacaggtatcaacgaacaacgtgttgtttaattccatgcttcaatatttgatttgactacaaacagtatactagcacgagagtttatgtttgaactattcttacaatatgtcttcaaagaaatgggatgagagaaaaa

SEQ ID NO: 163631 - DNA, 281 bp, Glycine max
  unsure (1)..(281): unsure at all n locations
tcctcttctttccttgtcttggaccttggccgatgaaaaacaaacgtagntttatgcgtgaactgccatttagctctttcttcttctcccaataatgaaactggttggtaactatttctaagacataacttcctgaactcctcttgtagcttcaagatttccttagatatctctttcagatgtcgggctggagactctatttcactggcatctgacccccaccctcgaggaatctttgaacactatataacaactatttcggggactcccacttgcacact

SEQ ID NO: 163632 - DNA, 350 bp, Glycine max
tcaaacctttatgaatgcatctaatggggcactgtgtatttccacacaatctgtgctatcacgggatgttacttatctagtctggatatgacaataatccgagtggtgagtcgccacaattactaggacattgcagctggttactggatctgaaagtccacaacaatgagttttctggctacatttctagtggtctttggacatctctcaatttgacaaatgtcatggcgagccgcaacaagttcactggtgtgctacctgaacagctatcttggaatatttcaaggctcgagataagttacaaccaatcttctggcggaaatctcaatggagcatcatcatggactaac

SEQ ID NO: 163633 - DNA, 266 bp, Glycine max
tccctccatggatcccctggcctacttgagaacttatccattgaagaaaacattctatagacactaattccaaaagatgccattgcggatgatggtcccaatctatctctttatctcgttggacgtttttatgaaagaaccatcatagttccctattatgaaggagaggatggttgaagtctagcacccaccattagagaggtagatcaccggatttttctctttgaattctttcactcattttgaatatgatggcaagagtatct

SEQ ID NO: 163634 - DNA, 399 bp, Glycine max
  unsure (1)..(399): unsure at all n locations
tctaagcttgggattacattttttctctctattttgattntcccatgccgtctccacatacataaaacagccccaccatcccaatttttgcaaaatcatgttcatataccattggggcatttcatcgagcactcggtgggcgcacgtttaaacaataaatgcaagagaatgggagcaatgtggcatgccccattgtttcagaatacaacctaagcctaaggccttttcattcaaatcctcaattcaagaaaacaagcaccaaagcaaaccaacactgccttacacatataagcatgttctcacaaatcgaggcaccaaaagatgaagaaagacattaatgggaaacaaaaacatcaaatatggacacttacttgtgagagtgaattgaataccaaaacg

SEQ ID NO: 163635 - DNA, 347 bp, Glycine max
  unsure (1)..(347): unsure at all n locations
actcagcttatgaacccttttaatattaatcaagctgaaatactttctttacaagcaatccactacactctatgcaaaaaaacaaaattaaaaataaatgactggggtgcctcccagcaagctctcgtttaacgtcattagcttgacgcatcgctatattatcctaaatcaatattagttctctccttcagaaccttctcatcaaactccttcaccttgtagcaaacattttggtccgaaaaatgtttttcttcatcaaacaagtcgaagctaatttntttattatcgatgcctaactcctactttttcttttccaggtctactacacaacttgcactggacatgaa

SEQ ID NO: 163636 - DNA, 360 bp, Glycine max
  unsure (1)..(360): unsure at all n locations
agcttgcggactataccgtcgaccaaacactgccgtgtttctgnctcggcctggattaaagcgaggtgagcaccggctccgctttcctaaccatactagaggcggttgtcgaggctttgtcctctatggttttctagagttttaacatgaccttcgagatggaagccatttgatcttttaaggccgatgatcggccttcatctgttcccgcacgccctcttcattatgcattgttctggatccagtgctataggggtgccttggtgttttcttagtcatgatgaatttcctaaagaaataaacaaaggtgaggatgccacccaaacatgaatatgccaatgactgatcggtgcacttgga

SEQ ID NO: 163637 - DNA, 474 bp, Glycine max
actcagcttatcctaatcgctaagcgacaacttatccttagctaagcgtgacctattgtcgcaagcgcaattccttatggccataactgatgtccatgaagctaagcgccagtcatggcagctaagcgagattcattgtggtaatgtgggcactaagcgagtccttatcagctaagcgcatgctcctctatacttaagatgcatcattttagctaagctagcctgaatctggcttagcgagagttgcagcttttcggatctgcaaacctcgctaagcggtctgatcctcgcgctaagccaagcctgtgttaaaaaaaactgattttgaatctgatacatcggctaagcgcgcgtatccgttaagtgagccttgttgagaaaccaaacgtctctctggctcacttaccgcagctttccgataagcgaaagtgtcgaaacatgcttaagtgagtgtaacacagttcactcacaatt

SEQ ID NO: 163638 - DNA, 314 bp, Glycine max
  unsure (1)..(314): unsure at all n locations
ctgcagcatgcaagcttggtcatgcgaaagatattgtttaatgttccctaanaatgtcatacaatggacctgacaattcgcaattgagtgcttcgaagaggtattctggaactcgtattcggatcatagtaactcgtatccacatgaagtctggaagagacacatcttgctgcttctggggtctgcacaaacatgtgtcactcaactccttaatgcttcgacgatccctcacgaatggtaaaagtgtggcccaatatgtattgatgccattcctttacccgggcggtgatagctaataacttgcagatgtaagt

SEQ ID NO: 163639 - DNA, 416 bp, Glycine max
  unsure (1)..(416): unsure at all n locations
ctactatgcagagaatatccaaagaaaataccttcatctgacttatcatcaaatgttcctaagttatcttttccattattcaatacaaaacatttacaaccaaagatatgaagatgtgagatgtttggttttctgccattgaataattcatatggagatttctttaagatgggtcttattaaagccctatttaaaatgtagcatgtagtgttaacggcttcatcccaaaaatattntgcttttcagacttctccatctttttcttgaagatgggacaatcaacccttaaatgtctacgctgattgcattcaaagcattttaaagtagaggatgaagtntctgtccctcttttagaattanaagntgggtcgcttntgatttcctctgactctcatgaactcggtgaatccttttac

SEQ ID NO: 163640 - DNA, 306 bp, Glycine max
  unsure (1)..(306): unsure at all n locations
agcttgaaccctgaagcttgattcttgaagtcaaattncntcgcgaccctctaagtgttcttagattcaatattgattatcttgtacatctcgatcatcttaaacatctggaactcattctctgattatcatgaaatgacctctgagctgtttgtcatcacctttgttatcatcaaaacatctttgaatcaacttgattcatcctgaagctttgcttctacaatgcaaacttttgataaattgtacgaggctcagcatgaagactcgtcctatgaccacactagcgcgataacccctgatgaaatt

SEQ ID NO: 163641 - DNA, 394 bp, Glycine max
  unsure (1)..(394): unsure at all n locations
ctaagcttgaatttagaacttaatttacaaatgtcatgtcataaaattantttttttttattgtaactaataactcttattttatattgtttgaaatattatttcacgataattatttaaattactgtcttacataagctaactaaatgttacttctatcattcattgtatgttaaaaatcttagttaaaaatttatacaatcaactatatattgataatggacaacagtaattaataattagaaatattatactttaactgtaaataactattaatgcaaatttaaaaagaatatttgacccgtgcatgacatgggtcaccccatctattatatagataagttgtacaataacttatctacnctgtgaagcttaacccttatatagaacctca

SEQ ID NO: 163642 - DNA, 415 bp, Glycine max
  unsure (1)..(415): unsure at all n locations
tctaaggaagtttctcaagaaatcttctaaggaagcttccttgtcttaaatagaagcatgtgtaacacttgttgtaactttgatgaatgagagttttgtgtgacacacttcaaagttcaacttctctccctcttttcttccttcaatttcatgctcccctccttctgcctctttttctatttctttttctccattgaagcttcctctctaagcttcttatccaaggtactttcttggtggtgaagcttcttcttccatggcttattccctagtggatggtgcctcatctcacctcttatcctttatcttccactgcatctccatgatggaaaatcaccattaaagggcctcattgaagctcanagatccagtctccatagaagctntacaagcaagcttctatcaagtggtaatc

SEQ ID NO: 163643 - DNA, 375 bp, Glycine max
ctgcaacttagataatagtaaaaatttcttagctgataagccgagcctagtccaacaagagggatttgaggacgaagtttattttacattattctaaacctacaagggtcgcttaagataagcctagtccaacaagagggatctgaggacaaagctagagttaagcctacctaatgagggatcatggttagtactttaggctacagcatagaacaaaaaagcatgatcgattagagaaatattcttatatgcatcagcttgtttgtagaaagacccaacacttttacctactgctggcaaatctacttacttgcgtttttactggttttagcctacacttatgttaatcctattctaaaccattaattatcaata

SEQ ID NO: 163644 - DNA, 384 bp, Glycine max
  unsure (1)..(384): unsure at all n locations
acggtcagatcatggaaaagtgtcttttgaagctgcagaccaaatnttgagaagatccaacggttaacaaaggccgggaagcatttttaccgagaaaacttcatatagcttcctcaaaaagcttcattaagaggctccttcaagaagcttccccgtggcttctttgagaagctagatccttatctacccatacccttttattaactaaattaacctccttgaaaataattacggataaaaataacacaacaaataatcaaacatcagacataattactaataatatatatatatatatatatatatatatatatcagggtgtgacactcaacattctctgtctctatgnttccataggactcaatatatatatatatatatata

SEQ ID NO: 163645 - DNA, 374 bp, Glycine max
tcaataaagtaatctttggaaaaagatatcctcaagctttctgtttttggacatcgattaagaaaacaaaaggaaaaaaaatacatttgttgcaaaagacagcatttattgcgtgttagatgatcaattttaaatcgacgactatttaattactaaagaattaatattttgatttaatcactatgtaaatacaataattctatcttgtcgttaaatttgcgggatcatttgtcattaaattataatattcataaatattgtcattaagatatattattgtttaaaaatcaatctaacattaagtcataacagttaagaattaatttatcattaaattatatataagatgtaatcgttatatgttttatacattc

SEQ ID NO: 163646 - DNA, 452 bp, Glycine max
  unsure (1)..(452): unsure at all n locations
tgngctnggttcaaccccataatccaaggaaaagagangttgatcgccaatactgtgacaacatttcatagagatgaatgactcgggcatacttatgctatgcatggaaaatgtaattatgagattgagatgcccgaagaaacctcatttcctagttagccatgcattaggtaccatgttcaatcatttttgttttttaagagaaacgagtttgtgatcccaacatagttagctcacggtacctaacacatgcaactaagaatgcagtgtgaactttcatgcttccttttttggttttggtttgtagaggaaagcgcatggatcatgcatgaggtaacatgataataaaaggttagcatacagcatgttagatgcatatgcatggtgatgaaatgacttacgcacaatgcaatgcatgaaaatgcatgaacgatcatgtcattacgatgcca

SEQ ID NO: 163647 - DNA, 268 bp, Glycine max
  unsure (1)..(268): unsure at all n locations
cgggccatggtgcacaacaagttntccacattcacaatgcgcgcacaaacccaccatcctcctgttgcccaccttcaactgagctcacgtactcccacgctagccatatcctcgtttattctaacaccggggtcccattatgctcccaagctgtcacaacattcaagtcaaacaacattcatacagtaccagcgttcacagccaggcctaacacagcaaggtataaactctgctctacaccataatcgaaattacagctcttttactt

SEQ ID NO: 163648 - DNA, 364 bp, Glycine max
  unsure (1)..(364): unsure at all n locations
ggggagaagtgatgtttatttatggttcagccccttaggcacttctctctctttcgaatttgcttaggaaaattgtttccgtgaagaaaatccaagccgaggcgcttccgtaacgtttccgtaacgtttccgtgagtgattttgcgaaggttttcgaccgttcttcgacgttcttcatcgttcttcagtcttcaacgggtaagtacctcaaaccaagcttttcaattcattctatgtacccgtggtggtccacattnggtttcatgtatttttattctcgttttcatttactttntatacacccctttgacgtgcttaagccattatttaagtcatttctcgcttaacctaaaaataaataaat

SEQ ID NO: 163649 - DNA, 378 bp, Glycine max
  unsure (1)..(378): unsure at all n locations
agcttgctatacataactcagcctcccttacgcctatatatagcaaaaaatggcctttggaacaatggcaacttgccctggcgagctaatgcttcatcatgaagtaagctggctcgctcgtgcgagctatttccttcgcccctaagaaatttaggggcccaagtgagccataggttancttggcgagccagaggctatcctgtgtgagccaatgtccacaaaactccctgaaatgacccttttgtcccttccttatggtatctctcgcactcttgatcaaaacattgaatgatcaactatttcacactgtaactgacattctacaccgtaagtcgactagcaaggatcataagatcaacacacgatattcctccgaac

SEQ ID NO: 163650 - DNA, 438 bp, Glycine max
  unsure (1)..(438): unsure at all n locations
tggtattctacaaacccactggccaagcgccctatatattaaagtgcttccaatatgactatatatccacagaggccaggcgagaaggattgtgcccactatatgctcacaagaacctgtaagtttggagatagctgcaaatttgaccatcctgtttgggttccagagggtggaatcccggattggaaagaggtgactgcttgctattattatcactattattattttttatgcctatgaaacttatatgtattgtatagtacatttactattggtaattgtataaagggacatttattcttacaaatctatatttaatagaaaagtttagagataatcatatatgaatatatagtggtgtattatataccagtttattcaatttntattgttatatgtcaatgtttatattaagtacatttattagtaaaacccttg

SEQ ID NO: 163651 - DNA, 376 bp, Glycine max
  unsure (1)..(376): unsure at all n locations
tgcggcatgcaacttaatactactcagatatgaaattccttgtcaaanaacataaatcatgcaaagtggactgattccaaatcaagatacttatttatgaaaaattcttccacactacactgattatactttctcaatcaggatacttcaaatttatttttctctaaaaacacttatattatagtgtccatgttaatgtaaaaattacactatcgccacacatgagataattaatgttaattctgctacttggggatggcttgcaggtaatatcatggattttcattacttttaaaagcaatggctagttaatccacgggagtgtctttggctcggacatgactaaattatgctagctgataacattctgtgtcat

SEQ ID NO: 163652 - DNA, 225 bp, Glycine max
acactatttgccacaaaaaaaacccggcgcgagaaagagtagagctcaaaacacaacccagagcacccggcaaagacaaacgggacaaagcccattacaagcaacacatggccacggagggggggaagaacaaacaccccaaaactatgacgcgcaaaaactccaaagacgcatgacaggaggaacggaaacaaagcaggaaagacacaggagccacccccacag

SEQ ID NO: 163653 - DNA, 342 bp, Glycine max
tataaaaaagcttgctaagcttgacaagcggtttgtctaactaataattcttattattattatactaatcataatactaataataactctattttatcacaatttatcatatccatattgtattccatctagaattacttactcccactttatttcatccaatcttttcttacttatccagagttattctatttcgttatgggctcggaattaacatacactgtgagcattggggctgaagacctatttaacaccatcaatgttctagtttaaggagttttctcggataagagaatagtctaggactttaaaactccagctgtatcactgttctacccactg

SEQ ID NO: 163654 - DNA, 439 bp, Glycine max
  unsure (1)..(439): unsure at all n locations
gcagaagtcggtggcagactcaagaataatggaatgtgtagtggctctttctcatacctccattacacttacattgtacctgagcttgcttccctatttttattaattttgctcatgtttatgtgtgaattgaatcttcccctcgaggaccataagataaaaaaattggtaatataagaacctttttatatggatagacaccaaaatctaagaatacatgataattatctatcatccaaacttaactcaggataaaagaaagtagcacattataattttatagggatagaaatgatatatcttaccgtattttctttcatgcttgacttaactctcaacatttattgtcaatgataagaaactntgacatatacttgatggagtgggctatggttcaagttgaaacagtggggaccttgatatggatttggtggagttg

SEQ ID NO: 163655 - DNA, 353 bp, Glycine max
tgccgcatgccagcttcgtctatcacctcgcgtgttatatatctatagcattctccggaaacgcatcatattctatgctatatatcgacaaaatacgcattagttctaataaaatccaatgcattacaatacacacccactatcaatttcttctacatcctaaaatcataaaatgcattgtttgactaatttgacatgcatacagccgaaatcaaaatcaaaagctacagcaataataaaggatctcaatcgcaacactctacaaaatgacaaaactgtgaatgcaaaacaatctctagcaacgattccgatgcttataaaatctcactcacattagaacattcccatacttc

SEQ ID NO: 163656 - DNA, 415 bp, Glycine max
  unsure (1)..(415): unsure at all n locations
ttacggcacttaaaactcagctgtcaaatgactcagntatacctcgtgaagagcacctgttgatccctcacaaaatcaattcaacatgctgttgtatctcatcctttagagtagctggcagcacatatatactcatgtcgtatgaagggattaattgagcacaagatctaattagaacttccttaccatctttggaaagatactttcacaagtagcgattgatgcgatctcaaattctatcatctacataattggaaattgtcttttttgttctgcccatgatagatgagaggccccaatatttgtcagaccctttgattgtatagacactctaaccaaacatgactgcttgcctcaaagatagtgagtattggcgctataaatatatatgacatggtctaagtgagcatttggc

SEQ ID NO: 163657 - DNA, 413 bp, Glycine max
  unsure (1)..(413): unsure at all n locations
aaccactaagctttaattaatttcagcttntcgatatattacgggattctatcggacttttctagntaaaagntattgtagtttgaagttgctcagggctttcgtattccatttcgagcgtctcgatatattacgggactcaatcggacatcagagtaaaaagttattgttgctagaatttgctcagagcttcggtattccatttcgagcgtctcgatatattacgggactcaatcagacatccgagtacaaagttattgtagcttcaatttgctcacggcttcggtattccatttcgagcgtttcgatgtattacgggactcaatcatacattcgagtaaaaagttattgtccgttgaatgtgctcagagcctctacattcaattcgagcttttcgatatattacgggactc

SEQ ID NO: 163658 - DNA, 432 bp, Glycine max
  unsure (1)..(432): unsure at all n locations
agcttctangatgcctattctagatacaatctaatcaggatgcacactccaaacgaggagaaaacaacatttatcactaaatatgccaacttttgctataaggtcatgcccatcagcctccaaattgcaggcgctacatactagagattgatggatcgaattttccaacaacagaccggagtctatgttgaccaatggtcgctaaatcttatagcattgcccatcatgtggtatacctggaagaggtgttcggagagctctacaaatatgatatgcgcctcaacccataaaaatgtactttcgaggtctgtgaaagaaaattcttgggctttatgatcatgcatcggcgaatagaagccaaccccgacaaatgcactgctattttggagatgtgtagtcttactaacgtccaggacatccaaaagctgaatg

SEQ ID NO: 163659 - DNA, 339 bp, Glycine max
  unsure (1)..(339): unsure at all n locations
tggattgattcagtctaagtggggattgatgtttagtaatttatgctacaacatanaacacaaaagcatgattaactagagaaacatctttatatacatcaactggtttgttagaaagacccaacatctttacctactgttgtcaatcttacttacttgcattattactgcttttagcctagacttagatttattttgttctaaatcatcatattatcaatgtttctttcaacaatgccttatttctgaatttaaccatgtctaatactagctccctgacttcgatactcagattcatccgttttaattttatatacttgacgatccgaggtgctttct

SEQ ID NO: 163660 - DNA, 298 bp, Glycine max
gtacaatcaaccatacatgctgtcttgctttcacatgcggatacacctcaccttggtgccctctcatatgccatgaagcaggctggactatctgccctcggtttatagccggagccagtctacagattgcgcctcctcactattgtatgaccacgacctttcaagatatgtgacataacctgccggcttgtttgattattcgttgctaagacgaaaatcttccgcgcctgtaggctcgtacgatgtttaataacttatcctcttcttggtgtgtgactgccttttcatgactatatag

SEQ ID NO: 163661 - DNA, 303 bp, Glycine max
actcacttctgagggtctggatatccacattgttgtcttattgagacaggggtgatcattatgacaattagcacggagacgcgctatagaagtgatgcccaatgatcatgacacggcttgatgagagagcactggaagacatcatgaatcttcgctttcgggggaagctgccgtggataagccactatggcgatggcttcagtaatctttgatgggccatagtacctttttgctagttatcctgccgaactctgaggacctctagcagacgcttgtcctgtggggtgcgcatataaggcaaac

SEQ ID NO: 163662 - DNA, 358 bp, Glycine max
taccccttacctaaatagaatccatcttgggcctttttcccaccactctcataaatgggagagaaatgttcatctaaagcataccagtccctaatattatcaaatcctaaaatttgaactcctacggagcataacaatgtgtgtctcctagagagggcatcagctaaacatttggttttccctttctgtatttgataacatatggaaattgctctatgtactctacccattttgcatgcctcttgattaacttgctttgccctctaatgtacttaaagtgattgatgatcactatgaatgacaaattccttggaacaaggtaatggtcccaaagttggacggctttaataaggcataa

SEQ ID NO: 163663 - DNA, 337 bp, Glycine max
  unsure (1)..(337): unsure at all n locations
nggctctaattacatngatgtttgtatttatgggaggatgttatatgnccattttgctataagagtaatgttccactaaaactaactttccaaatgtttgccttctcaggaatggcaccgaggaagcttgcctcaaagaggtccatgaaggacaaggcggccgaaggaactagttccgccccggagtacgacagtcaccgctttatgagcgttgtacaccagcagcgtttcgaagccatcaagggatggtcgtttctccgggagcgacgcgtccagctcatggacgacgagtatactgatttccaggaggaaatanggcgccggcggtgggcaccac

SEQ ID NO: 163664 - DNA, 301 bp, Glycine max
ctatgctaccgctcctatctactgataagcatggaccgataacccctgtgcgggatgctcatcctccatttatctgaggatacgactcgaacgcaacatgtgcatatcatggaggagtactgggacatttcattgaacactgtatgactcgaagcgtacggtgcaaagactgattgatacgggctggctgatatttgagaatcacttgcgaatcctagcattgacaagcgacaccctacatggtgcaattttgaaagctgtcgtacatgcgtctaatgactcatcaagattctaagtttat

SEQ ID NO: 163665 - DNA, 419 bp, Glycine max
tcgcctttcctaactcgctgttgagagcttggacttcttcgttttctttcggtgcttcaaaactctctttgctgacgactgttaacttggcgagccaatccaaacctcttgctgaatccttgaccacagttgcaattctgctcaaagaggggagacacccggatgaaagatatggttttcttcccccgagaggacatcctagaatttcctcatattcttcaatggttggtactaattggaagtctccgaatgtgaagcatctcataggctggtcgtagtattgggtgagtgatgcaatggcttctatggatacctctgctaaggtcaattctaagatcttttcgtaagtcttgcggaaagcttgcatttggagagggtccatcaaccgccctaatttcttgatgctggtggtatctaaa

SEQ ID NO: 163666 - DNA, 459 bp, Glycine max
  unsure (1)..(459): unsure at all n locations
agcttctgcgtcaagaaggtgagcgtttgtgctgcaatgaatgaagaagatgccttgagagagagaatgaaagaatggataagcgtgttgttgaatataaaagagattgggaatatactgtgtgtgttgaaaatgcaaagtgaacgcgatggaacatgaggctgggaacttgactgtgaaaatttgagggtggatcttcttagtgcctcaatatattctttatcttctctagacacgaggggataacgatgaaatgaaaattttattcttaacttatctttccttctctttatgaatcaatggcatgtaacttcctttctattttattgatcggtttgtgttgccattcaaaaaggtgaaatatggggcactaaacaaattattntttatcaatgtcatgtgactctcttttatttttagccttaacggattatgtcgaagaacttacctaatatttga

SEQ ID NO: 163667 - DNA, 434 bp, Glycine max
  unsure (1)..(434): unsure at all n locations
agcttgatccaaaactatgattatcctgctcacagcangcccgcttggatcatgtctacagctataaacttattcccttttcatgatccccatgttagggtattaactgtgcttctagacaagcatgttgaaagatatttacggagaatggtatgtctgactatgctcacagcttttaattatatggacatctctagcctcaatggatgacaaactaattgatgatactctgtgcagcgcaaccttccatatgttactatggtagtgactgacaatctacacgttattctcacttcagtactattcaatcgcctaatgttaacatagatcgatatgacatgttgactatgtagccatactgccgattctgcgcataaaatcgatctggactcaacctattgctaggctcaatttatcttgccataataatttga

SEQ ID NO: 163668 - DNA, 360 bp, Glycine max
tgcatttggatggctaataattctccttgaggatttccttcactttctgccatggtagtaagaaaaatgataaaatttggtccttgcaatacactcgtgtttatcactcaatttggcttttactcgatgatgatcttatcgctcttgtcttttaccactctactttctctcgtaagttcttaagagaaaaccttatcaatgattctttttcaagacaacaagggaacaatcaagcaacttataatttagagaattacaaagggttaacatggaatattataagaataacatgaatgattaacacaccctagataagacaaattctatataatggtctaagacacatgattagattttcac

SEQ ID NO: 163669 - DNA, 317 bp, Glycine max
tgtgataatgacactacctgcgagaacaacagatattatgctcccgaaaccatcgatcgccaaatgtggatacaaaggtcattgatcctactatatatcatagacagattgaattaaaccaacatcacccagattcaactacctcgtgatgacacagacacaaacactaaacactccaaggagaagcgcttctcttaaagaattaaagcagattcttctgaaagaaacatcaacctaaaaaacttcagtcaattaagtattaatgatcgaaaacttggcgatcttaacacaaatctcaaatctaccacaacattgtc

SEQ ID NO: 163670 - DNA, 92 bp, Glycine max
ccctgctaaatgctctcttttctaaacgcccgatctgaacttaatgcacaccaattctggtaaagttcccctcagaatactagaattccaac

SEQ ID NO: 163671 - DNA, 313 bp, Glycine max
  unsure (1)..(313): unsure at all n locations
tgctccgacttctctttttccgttggatgcatcttcaacgtaaaggggccaccactttggggtggttgtgtcgtttccaacgaattcttccataaagtcagccatgaattgtgttttcatggggctgcgtggttcatactggatgttgaactctgaaagtttgacagaccaggctaccatccttaatgcgagttcacgctttctcaaaacatgcttgatggggtcgttcgtcttgactaccacttgatgactttgaaagtagggcccacgtcgtcnagccaacgtgatgagtgctagcgacaccttttcgatc

SEQ ID NO: 163672 - DNA, 269 bp, Glycine max
  unsure (1)..(269): unsure at all n locations
catgtagttgaattgaactatcttaccgaaactatttgcctaagattatatagaantttggccttatatatggccaggatagaaagccagagatgaaagagcataagccagcagtttttcccactcttcctttgattctataacataaaacatttaaattcactactttgcattaactaagaattccatagggacatattatcataaaagatattgcacattcatggtttgattccttacagaaatttcattaataaactacacttaat

SEQ ID NO: 163673 - DNA, 424 bp, Glycine max
  unsure (1)..(424): unsure at all n locations
agctttananattcagagcatggcatactcttgttggaaatcaacttggtacaaaattaaaagttttaagaattgaccatggcctgtagtttgtttcagagcagttcaatgagttttgcaggaaaatagacatcaaaaggcacaaaacagtccctcagacaccacaacaaaatggtttagcagaaaagatgaataggaccattttggaaagagtgaggtgcatgctactaagtgcaggactgccaaagaccttttgggaagaagctgcaaacacaacaacatatttgattaatagatgtccttcatcagccttagatttcaagacaccaatggaagcttggagtggtgaaccacctaattattcacaattaaaggtgtttggatcactggcctttgctcatgttaaacaagaaaagctggatgc

SEQ ID NO: 163674 - DNA, 390 bp, Glycine max
  unsure (1)..(390): unsure at all n locations
aaataaataattaagtttatggactaaatcgataacataaagacctttaggaacattttaaaaattttattacttaaaatgattaaattgacatctcatactttcaaggacgacaatggtcatttatcatttttatattcttataaattttgataagacaaatgaataattctattattattctggaaagattaaaccaagatgcttatataaaacaaagaacgaacatgcattctaagtgggaaagatgttctatatgaacagaccaaccacatgtcttataatagcgaatggttcaaaatgtcatgataaacatactatgcatattntcctgtatcatatatctgtctacgatcaatgataatgactttataacttatatagatatct

SEQ ID NO: 163675 - DNA, 420 bp, Glycine max
  unsure (1)..(420): unsure at all n locations
agctttggtagctctgagacttggagtgtctntttcttctgcttcttcctcatataggctcaaggtaacttaattttcaagctgaatttgcactttgtgcgagctttcgcgctcagcgcacatttggacttcattgtgagtgtaacatcctattttttcgtaaataaattaaaaaaggctttttagtattaaaaaaataaatagagtaaatgataggttgtcagtactctagctataaatagcgacatgttaggtcagttttcagattgacgatagcttcttaacctcctcttcctctcaatttcgttttcccttctcttcctcccaaaaccctctcttttcctgcataccaccaaacatatcccagaaaaatgacaatctcggactcattcaccgttgaatcatcgtgaaatttgatca

SEQ ID NO: 163676 - DNA, 361 bp, Glycine max
ctactttagcctcaaggatgaattgtccactcaactctctgtgttccattaattattacagattactctccttgaaatattaaccaacggagtgttagatcaaaacttttacttcagaccaaactaatcatatgggatgagtctgatgaggcaccaatgatgaataggtttttcgttgaagcacttgatcaaacatggtacgatattatggtgtctcaaaacaaggataacacgataaaaccattccacataaatgtggttgctcttggcaatgatttccaaataaatcttgattgtgattaagacaggatcaacataagatatcgttgattatgccatacacacttcttacatttggaat

SEQ ID NO: 163677 - DNA, 412 bp, Glycine max
  unsure (1)..(412): unsure at all n locations
agcttatcgcacatcttcagagcgaatgtactatatattctattttttgtncattcgcgtaatgagcttgagcttgatgtaaataggtcttattatacgcttaattatcttcttgtctagttttataaatactcagaaactcttaattgtgcttagtgagaaattaaacttgtgcttagagagagcttaacctcttctttggtttttgattgaaaacaaaattgattcttatcaaggaagctagtcctttgtggtgaattctccttcggcttatcgattcttcgtgaattgtggcatcattctgcttatcttcttcatcttatccattttttttgtttctctcttcttgagttcttggaaggtcaaaaatggtggttcttgatattgcaagcggaacaattcgaaccaagca

SEQ ID NO: 163678 - DNA, 445 bp, Glycine max
  unsure (1)..(445): unsure at all n locations
tagccacgaaagtgagaacacaagctggttatttatacagaacatacttatgattacctgcgattgattaacaagtcaatgcactcaatcattctcaagaagtaacaattatattatcatttcaatcgattaaagtgttctctccaaaatctggaaaactttcaagaacaatgttattgattatgaacaaagtaatcgattatgatntatccggaaccgattaaagcggagactcctgaaaaaccactcattgtctcgactgaacagactaactcattaggcttagcttctaatcaattaaatcgatatgaaagtctctctccaagctacacacactcgcctaatcgattacgattagcattgtcatcgattaaaatacagagctttatgcactgaagaaaacttctaagtttggaaacaatcttcttactcctacatgatgatg

SEQ ID NO: 163679 - DNA, 268 bp, Glycine max
ccactttgccttgttcaattaacttattgtggggttaacaacttacttcacttaattcccaggcatcttcacactgcatatatgtcttgatcacctattaatggccacatatatgctttaacaatacactgccatattctttatatcaatttacttgaccattattcctgccttatctatcgaataaatatttccaatatccttataaaatgcgccacttgtgaaactacaacctattatccaatcgtattacactattactttctta

SEQ ID NO: 163680 - DNA, 424 bp, Glycine max
atccttacagtcacctgcggcatgcaagcctggttgtctccatatctatgccgtttgtatcgatctctatcaagaataaaggttgaaccaattgaaaatagacatgactgagatcacatcgcatgcaattttcatgctgcttatctatattgacctatgtcattgagtgtatcgatgtgatggtcattggcgtctacttacatctgttgtagtgacaaaagttgtagtgattccattattgatacatcatatacacacacgtgttaaggcggaagtctaaaagtaaatcgcgtacaaatgcacgcttaaagattttttatataatcgttacaatatgtaactcaagtggaagattattggagttctatatttcaatgattaatgtggcctactattataagacaattatataactatttatcat

SEQ ID NO: 163681 - DNA, 329 bp, Glycine max
cccaccctacagacgagaacttatcatactgacaatgtctctaatccacatttcgatcgtttcaactcatatggtgccaatcaaccaactctccagcacactaatcagtcatctcctgcataaaatataacaagctctactcggctatgactaaaatgatcctgaactacaccatgtccacatacctctacatagaaagcttcaccagctccaatttcacacacataaacacgcacaacgttccacataacgtcccaccaaagtgcgcccacagtccattaacccccttctcctctagaagcacatatcattcactttaacccacctgc

SEQ ID NO: 163682 - DNA, 329 bp, Glycine max
tcgtcccggatctctaatcacctgagctgcagctgcctaagagagaggattggttttatggtcaggcccaaaaagcgcacatcggtctgactctgtcttccaaatgatccacgaccgggcgggtctctggatgactctgccaccacatcaattgcaagcccacagacgccgaaacgggtcgctacacatcagaacgtgacatggttaccccatgattggtgggtcaaatactccacaaaaccttgttcgaaatcgtactcagcggttactttggcaaaactttgtcccatactggccgacttatcaacaagttgctgcattctcctaca

SEQ ID NO: 163683 - DNA, 378 bp, Glycine max
  unsure (1)..(378): unsure at all n locations
tcatggcagnggtatcagttgcggatggccaatattctgtcatatattcatgccacngcagcctctggcacaccatagaacgtctccctctacaaattgcctatgacagtcggcagaaaatccgtcatgtagaggcatgacgctaccatttgacaacactgcttcatgggctgatcgctgttgcagtttctgtttagtgctgtctaatgcatggtatatttcttacaaaaaaagagactgttaatttgagatacttaaacttagcctcgaattggtccacacatggactacaactgggcttattgtgttgttagttttacaagccaatatctatgaataggtttaacctatatgtacgagccctgtaattacaataca

SEQ ID NO: 163684 - DNA, 429 bp, Glycine max
agctcgtgtcttctactaactacaatttattattttcatcaaatatttgtattttacaggataccaataccaaggcgaggattggtacagttgaagtgagtcgcggtctctatcagttcacacccgaaacaacaaaatcacataccatatgttccactattactcacccaaaatgtaaagtcattcccataaacctatggcactttcgtatgggccatccttccctcgaaaggttacaagccatgcagtcctattatccatttttgaacaataacaaaaacttcatatgtaatacatgtcattatgcaaagcataaaagattacctttctcttctagcatctctcatgcatcaaataaatttgagcttttacatatcgatatttaggggccatgttcaaagacatccatgcatgggcatcactattttt

SEQ ID NO: 163685 - DNA, 444 bp, Glycine max
tcctgccaatggcccaagttacagttctcatttattaatatagtgtaagtatacttatttggagaaatgcccttcgcttgcatttctgtgaaaaatctgtatgcctgatccatctttctcaccttgcaaagtccattgattaaagcattgtacgtgatcacatttggatgtacacccttctcatgcatctcaaaaaagtgcaaaatagcaagtttcagccttcccctgactgcatatgaatgaatcaaaactgtgtaagtgacaactgaaggaaatatccctttgctcaacatctcaaggaacaccgctctagccttcctaagatgcccagccatcaagtgagcatggatgatgctagtatatgttacatgatctggaacaagtccattgtagagcattctcttcacaagttcacttgcttctttcaaattgccaacttgtgga

SEQ ID NO: 163686 - DNA, 424 bp, Glycine max
  unsure (1)..(424): unsure at all n locations
agcctgcttgtggagcttctatggatgctttatctcttancttcaatgacgtcctttaatggcggtcttcaccatggagatgcagccgaagacaaatgagaagaggggagaggaggcgccctccactacggaattagccatggaagaacgaccttcaccacccagatgagccttggataacaagctcggaaggatgcttctatggacgaaaagaaagacggagagaaagagagaggggggagcaccaaattgaaggaataaaagaggtatagaagtggaactttgaagtatgccttacaagactctcattcatcaaagctacaacaagtgctacacctgcttctatatatagactaggtacgctccttgagaagccttcttaacaccaccttcttgagaagctctcttaagaaaacttccttga

SEQ ID NO: 163687 - DNA, 443 bp, Glycine max
cgatgtcacacagagtggaagagtcagtcttcctacttttgtttgttgaccacagagcggtacctagagatatgtcgcgggggtcaggagaccttggggacgtcacgtggggtgctattgcccaaaaccaagcttgaccaatcccgatccaacccgggcatagtcagtcagtaagaacctgtgacgtacctaaacaggcgagctcctggcagtcaaccaataaaagaacaaagtccacaaagcaaggaggcttgtgtggcgactggccagctatggatcttgagtggtatatggaatttggcctctggtaatcgattaccaagggtgtataatcgattacaaggcttaaaaatggagacaggaagttaaagtggcctctggtaatcgattaccaatggggtgtaatcgattacacagggtgatagggcacttggaattgatta

SEQ ID NO: 163688 - DNA, 429 bp, Glycine max
agctcaatcatcatggccactgttcttctttatgcacaagcgcttaacgtaattcttcacataaacaaccaacacaagttctaacttttgcatttcattctatctcaatacaactcccaaacacacaaaatgaatccaaaggactctcttggcttgtaatgaggctggcctacaaacaattcatcgacttttctaggatgcaaaacttaggtcctacgacagcattcatccttacatcactctcctctctaatctccagcttctattgatacgccacaagcacaatgaagttacaacacaattaacagcacatacagcttcacttattcttattcttgaaatactcttccctttcttattgcatcttagcaacttatgattattgctactacttattactaccttcgctctctgcgtacctgcaacttc

SEQ ID NO: 163689 - DNA, 428 bp, Glycine max
  unsure (1)..(428): unsure at all n locations
tcttatccaaggctcatcttggtggcgaaactctntcttctatggtttattccctagnggatggtgcctcccctctcctattctccttttccttccgctgcatctccatggtgaaaaatcaccattgaaggacctcattgaagctcaaagatccatcctccatagaagctccacaagcaagcttccatcaagtggtaatcatagaacaagagcttcaagtacgtgctncttaaacctccattaattttttgctttaccttctcttccattgttgtttcttcattttttctccatgtatctcctcacatgtcttgtgctaaatgtttttaacatgattctttagagttctcaccgattaaacttgttatagaagctagatctgattttctatggctcaaatttcttgtcttgttcttgaaccatgaatt

SEQ ID NO: 163690 - DNA, 413 bp, Glycine max
agctatgaggatataagagatatgtgtggtctcctcccgtgacgcttcagcaaaaataatagtcgtctgcaaaacaaaaagcgtgagatcatgggatatgatcgggacacttttatcccttacctctaattccactgactttataagtaaagcaaagatagcttcgacacatagaataaacaaatatgaggataatgaatctccttgtctaagacccctctgagggtggaaaactctatgaggactcccatttaccataattgaaacagaacaaatacacactcatgtgattatgagagcaccctctgaatcaagatcacccatagtgagaacgacttggcttaaaaactattactcaactctcttctaagcctttgacatgtccaatttgacgcccatgtttcctctatacc

SEQ ID NO: 163691 - DNA, 375 bp, Glycine max
  unsure (1)..(375): unsure at all n locations
cgttatgggtgggtggagaatctgttttggttctacaaatcattaatcaccgggaagcatggctctcgggcttgaacattggtgtgggctactattctttggtcattatggagtaagcacaataagattttattccaaaatggtattttgggcccgtttagatgcagcccaaaaaatcttttatcatcttatctattacaaaaagatcttttttattttttaagagtcgtttggttattaaaatttttttagcttttacaaaagtaaaagctctcaccagagcttggtctaaatctcctattgtcagcttgtgaacatttgctnttgagaaattggtctctaatttatgtttggacaaatatgtcctccaaaaaa

SEQ ID NO: 163692 - DNA, 412 bp, Glycine max
agcttctcaatatcacgcagctatgtcagtttaattagtcatttgcaggaaggagaacattctaagttctgtgtcattatattaattcaaagcaacactcatcaatagtcgctgatatatcttaataaaatcaataacttctcacatcgataataatttaaattatttgtaatatttaattttacatatcgaattaatatgaaggaaaaattattaaataaaatacatgtaagagttcacactaatttagtatctatgcacaaatttatttatttttataaatagctacattaagatatattttcggaaaaataataaattaaattcatgactttaaagttataatataatataatatgaaaataagcaaaaatttaaaaatcatatatatatatatatatatatatgtcaa

SEQ ID NO: 163693 - DNA, 440 bp, Glycine max
aactgaatttacaacgttccaatcaatttcaaaatgtgtgttatcaattacaatatattggtaatcgattaccaatgtgttacaacgctgaaattcaaattcaaatgtgaagagtcacatcctttcactaaaatgctttgtgtaattgattacaatgatttggtaatcgattaccactgataagctttgaacaaaaatcaaaagatgcaactcttccaatggttttcaagttttttctaaaggttataactcttctagtgactttcttgactagacatgaagagcttatacaagcaagttcttaacttgcatttttaagacattaattacaatcttttacatcctttgaatctctttgaacatcctcttgaatctcttcttcttcttcctttgccacaagctttctaaagttttctggtgtccaaaccttgaaaacaaaa

SEQ ID NO: 163694 - DNA, 415 bp, Glycine max
agcttataattcatatatgagaatacatgaatatgtttatgtctataatcctatccgacctttccatttgtcaaatacacccatgccaatgtttacattagctaatccctttcatattacaacaataacaactttttacgtaatttatgttgaagattctatatccattattgcaccatacagatcttgttaatgtaaaaggtgacatcttttaacatcgaacttttaactaatttagaaagccactttccacatatagaaagctatatcttactttattagttcaaactttaaccgtgtaaaacatgactttctaagttaatcgttgaatgaatgtaaatgatgaatggatattaactgaaatgaaccatgtttggaacaaacaagtcgatacaaattaagttcccactgattt

SEQ ID NO: 163695 - DNA, 400 bp, Glycine max
  unsure (1)..(400): unsure at all n locations
gatgagcatatctgattcacagtgaaccatataaacaacattacactcaactaaacttcctcgagacaatgcatcagccaccaaattctcttgaccctgcttgtattctatgcaaaaatcaaattccatgagttntactaacgatttctgctagaatgttgtagctaacctctgatccaaaatatactcgaggctcctatgatcagttttgattacaaacttcttaggtaacaaatatgtctccacttctgcactacaaagacaacaactagcaattccttctcataaatggatagggactattgctgcacattcaagctcctgctgatgaacgctatgggatgattgtcttgcatcaagacaactccaatacctgtacctgaggcatatgcttctacta

SEQ ID NO: 163696 - DNA, 246 bp, Glycine max
agcttatattcctccctacctcttctgtcctatgctgcaacaatactctcctcgatcgccttattatctttatttatctatccttccactcacaacctatgacgcccaccgcggttattacatacctgctgagatagcgctacgacttggcggcctacttgacgaccttagaccaacgacttccatgcttgcatctttgtttagggggctcacagacccaagtatctcgagactcatcgaccattg

SEQ ID NO: 163697 - DNA, 431 bp, Glycine max
agcttaagacatatgacaatataatgtgctattgtgcacgtataaccacatgctgccctgaacctcgcatcttacgaaagtagtcgcgctttccaactagccaaggaagatgttttgtattcaactaagttatgaccaaatacttagctatctgctattttactttatctaaaggtcgagatatgttaatatagtcaaatgaaccacttgctagtgaattgatattattcggacaaatttaccacagaggggtccatttatcaactaattactaaagagagtcttttttcaaagtatttacaagcagggtctgttctaccatggatgtcgccagcagtagtggcgagaaacgctacccgccattgtcaatggcgagaaacttggtgacgtggacggtgccgctattgttcatggccagacacctgacgtgg

SEQ ID NO: 163698 - DNA, 436 bp, Glycine max
catccatagaataaccttcattatgttttcattcattccttccccatacttgcccttttttattaggcacttagctttcattcctgacattatagcatacacacttattaactttatttatacttactgttttcttttttcaagcacaaagaacagaaacagtgtgtatatactattttctttgaccatttcaatcattaaccattgcctcccccaaatttggaacaaatttaccttgataataactccctcaaatttgggacaaatttgccttgaaccatcttctgtggataatgctttcctacaacctaaaataaggtggaagaagatacaactgaataggcttgaggttcaatcaatcaatcaattcattcagcttaaattgagtacaagggataattcattcaatcacaaggttagcgtcttggctaagtag

SEQ ID NO: 163699 - DNA, 401 bp, Glycine max
  unsure (1)..(401): unsure at all n locations
agacttgtacataacttacgaagaagcacgatctattcttgttccacaaccnncgcgggcaccatatccactcgatcacgctagaagtccacgacacctaccatcctatcacgcaacgtggcggacaacaagggcagctcacttgaatggcactattgtcaacgcagaacgttttctgcgctcactatccatgcttccacactactgcaacttgtggttatgtgagcatgaactactatcaatacatacatgtcgatcaacccatgaacacatcttaaaagcatacttcgcacagtggcggtctcttgggaatgaaccgtcaattcctccttttgacgaagcctgcaactaatccctgacctcactaaattcgtgcgatatgctcgccctctcactacgat

SEQ ID NO: 163700 - DNA, 317 bp, Glycine max
acttcccgatcaagcatccagaatccaatccaagattcaagagaagaacataagaagcaacaagtcacaatttcatatcggatcaagcttaacagattttttgccaaccagatagcacagttctgtctacaacagatcctctccaatctttaagttacctgagtgactactctctggtaatcgattaccaccgcacagcttgggtctccaaatgttttcacatgatccgcaatgttcccaaatgactctcacacagtgtaatccattctctatattacgcatcgattaccagtgaatctgagcgacggaactcacat

SEQ ID NO: 163701 - DNA, 352 bp, Glycine max
ttataaacgggagacataatcaataccatattacattaggagattaacatttgatttgtaacagtaccacatgggaattgcatacctggatctatgattcccgttggaatagaaattaacaatattaacgaaaatgcacatgtgatagaagacaacatatctaagcggaagcaccaccattccatggcaccagccatattgaactttcggcgagaatacccatcagtcagtttcatatttgcttcctgaaatcttgactgctgatcaaaacttctaatggttgaagtaccacaaattgtctcaccacagtgtgaatgattgcggctttgccgactccaactataactgatag

SEQ ID NO: 163702 - DNA, 262 bp, Glycine max
ttctcacatgctctcatttcctgagtcaacccaactatttgaacactacaaccaatatgcacttttctcaccgttctcatccctaccttttgcttattacacacatttctctacaatcattcttaacatcaccgcgtttacgcaccttctatgcaatattataacaattactgattgccgaaatgatgatggcatcgtaaaggaggtgcatcgggaatgatacatctttgtccttttcacactctacatcaacctgtatatc

SEQ ID NO: 163703 - DNA, 310 bp, Glycine max
  unsure (1)..(310): unsure at all n locations
cttgggggcctcaataagttgtctatatgagattctattgtttngagctnctttgcttcctcatcttcatcctcaaaatacctcttgctaactattgcgtattgcattctttctttatgaccttttcattgtggggaaccncaccatgcacaaacacaacaaggggctcttggcatgcccacaagtgactcatctttaaccacattgaataacatttgtcaccatgctaacacaatttcattgtacaacaataataaactactcactaactacataacatcattttctcatcactcatttggtgcattac

SEQ ID NO: 163704 - DNA, 423 bp, Glycine max
agcttaacgcacgcgtgcgtgtggtgcgattactgttccgctgcgagaaccgcacccgatcgtgcaccttgtataaaacggtcagaactcagtatcatactctcgggcaacttgtgttacttgcgcaagctactatagcgaatatctgtccactctgaaaagagatgcgtggactatgcaccagtatgactcctacttattataaggacacatacgtgagtactgatgcgcccagactactagacaacacactgcgctctataatccgcgcctgacgctaatatgactttctctatccacaacgcttccgtgtgctatggcgtcccctcatacgctctaccccgatgcctgaagatagcctacgctaatcctggcatgcattcgcctcagacccctcgcgtcgcaccatccgcgaccacattg

SEQ ID NO: 163705 - DNA, 404 bp, Glycine max
  unsure (1)..(404): unsure at all n locations
gattgcaatggagaaggcgtntgctttgctgatgctctcatggccagagttctagtgtattattcccnctctcataatacacgtcacagattaattaattccttcaacttttggaatttctagttcatgaaccgaaaatcctatgaccacagtttataaaaaagaagaaaaaaacacgtctaattataattattatattcaattataatttatttatttattaaatatgatcataattatgaaaatatttaaattatgacctactgggtttctgttaatataacagagtacgcattaagtatttaatccaagttttatgggctggtgggtcaacgcacaaagcttgtgttataagaagcttatggtgtatttaatctcaagtcgaaaataaaaaatattaatta

SEQ ID NO: 163706 - DNA, 433 bp, Glycine max
  unsure (1)..(433): unsure at all n locations
atctntaagtcacctgaggcatgcaagcttataatggagaatcaacggtgctaattatattgtctcatcatacaataatcactgtcaacttcatccagataaatgacaccccactatacatacttatagggcgtattgacacgtatttctttgggtgtagataaacgcatggcggtatactgcacaaatctggctgagaattttactgcaattagaggtaacacgcgtggccatcaactattcataaaggcaagtacaaatctcgcgcaactttagtgctggtagacacataattgacatcttattctaaacccatgctataaataccatatgaaactaacccatcgaactacaagctttcgccaaactacacatcgtctttttctctaacataatctctttgatattttcactgtccaacacatatcgccct

SEQ ID NO: 163707 - DNA, 428 bp, Glycine max
  unsure (1)..(428): unsure at all n locations
agcttcttctgtatatatctttcttcttcttctatctatngtctcacaatggttgaattcttcactttgttcttcgtttaaagtcttaagcccattagagcacttaatgtctgtattaaatgaagcattaaatgcatgtcctttattcatgcaaagtctatgctggtaggctagtgtgtcttgtactttagtagaaaagtcatttctttcatcctagcaggtctgcaccaatagataacatcttttgatgaggattagcacttccagactgtggactccatttatttttcatatgactttaacaaattgttaagtcataatacatttatgtcttaaagatgaattacgactcctaattattttgattagatgaaaataaatataaatggtaaaagttgcgtctaatatgctattagatcatgatctat

SEQ ID NO: 163708 - DNA, 464 bp, Glycine max
ccctcgtcgtgtcatcaccattctggcctaaacccattctgattttatacccatcccttaacataactcgggccaccatcaaggaggcaccacatagatgtggttgcaccggaggagcctccacataaacattgttcataatttctagtgcttgaaaagatgtttccaatgacttttccgcagcttccacatagggtgaagagaatggacaactcactagtatatcttcttcccctgaaactataatcagctgtccttccatcacaaacttcaatttctggtgcaacattgacgggaccaccctaacagaatggatccaaggtcgacccagcacgcaactgtaagcgggatttatgtccatcacttggaaggttatttggcacatgtgtggcccaattctaatcgggagatcgatctcttctctcacgtcacttcggcttaccatcaaaagccttaccaccatg

SEQ ID NO: 163709 - DNA, 354 bp, Glycine max
  unsure (1)..(354): unsure at all n locations
agctntgcggagtagaatcatgggaccaactcatnttacttcaaacaaagtcgtatctagtcaagatctgagagaccatacaagcttcctagcggtttctaattatatgggccattaagtctatcatatgctgacaatagccgagaacgccatgaatttcttccggggcggagtaagtgtctggcattgccttggccttggctaacaatcggggaagttcttgactcccgttcaaggcaagagcaaaccgatccatccacatggttgcctcttggtgtaaagagtccatcacccttccactagcctcttttttcgcgtatactcgggcatactcgtctgcaccctatgctcctg

SEQ ID NO: 163710 - DNA, 221 bp, Glycine max
tgaactcattctatgactcttgagatcatcatctttgatatcatgaagcgtccttgaactttgagtttttcgtcatcacttttgttatcatcaaaagttctttgaatcaaccttgattcatcatgaagcttgctcctacatattatttggcccaacttcgtcttccatgggccgaactcacattgctaaatacttcatacccaaatctatcgctatttaat

SEQ ID NO: 163711 - DNA, 413 bp, Glycine max
agcttgtagagttatgtctcttatttatttatttacaaacgtcgtcatttacacaattgtttttagacaatgattgctttattcatgagtttctactctaatcgattaccacgtgatataatcgattacttctctttctataagtgtctcaaaagtcaacaataaaactttaatcgattactttgagtatctaatgaattaccttgttcttgaattgtctccaggttttgggaacaacactttaatcaattaaaaagataatctaatcaattacttccttgaattaattgattaccttgcagatttaatcaatcacaggtggttataactgctctctctataaataaacagcttgtgtcctctctaccaacaacgaaataagcttttgaatacctaagatcacgctctatatt

SEQ ID NO: 163712 - DNA, 440 bp, Glycine max
tgcccttggtttagacatgattggtacatgatttgagacttgtatgattcaatttgggcaaaattggatgacggaaagagtggttttcgaaatctgcactttatgcagaattgtgctgttgaaatgtgcagcaaaattttgtataagtgcacaaaaatgcttgtgtatggctggttgtaaaaagggtagtacatatggggttatggaaatttgctagccgatcccaacggtcaaaatgtagacttatgtactagagacttccagtaaaattttcaagtcgatccaacggctaacgaattggaacaaaggaaatgttactacggtatttgtatgtgacaagctgtgattttgagttgtgttttgggcagagtgttctgcctttgccctgttttgcttgattctgctagtccatgatgattggatgccgaattacttggatg

SEQ ID NO: 163713 - DNA, 428 bp, Glycine max
  unsure (1)..(428): unsure at all n locations
agcttgtgtttagcctgttaggaatgtattgttttgtaacctttgatttcatattgaggttgcgtggctggcatgtanggtancatcaaccatagatgctgttttgctttcacatgcggatacacttcaccttggtgcccttccatatgccatgaagcggcttggactttctcgccccggttattcaacggagcctgtctacagattgggccttctcactatgtatgaccagtacctctcaagaaaggtgaaattccatgctggtttgtttgattttttgttgttaggaggaagattttttgtgcttgttggtttgtacgatgttgaatatctcatnctcttctgtgtgtgtgattgcctttttaatgactagatagaatctggaaaatgtgtgttatataactggatggttaggctgaggtatcttg

SEQ ID NO: 163714 - DNA, 351 bp, Glycine max
  unsure (1)..(351): unsure at all n locations
tgctctaacggcactatcccagctaatcctnttctactcttacgcataatcttgaaggtaagctggcctcattactctccttttgggcttttccatattctgcacctctgctgaatgttctctttgtacccctactctgtgatctgtgttttccctatcatcccgcggcccttgggaaatcaccttgtcctcaaggtgatagtcattaagcaaagcacaccaatcctcccaagacgtatcatctggggataagccatgccattgaaccaagacttcccaagcttctgaaggggttctgcgataattcacaattgctgccggagtgagaacgggttgatcattatgaaattg

SEQ ID NO: 163715 - DNA, 415 bp, Glycine max
  unsure (1)..(415): unsure at all n locations
agctttncgattcattctatgcacccgcagtggtctatattgtgtttcgtgcatctttattctcgttntgtttactttttataccccctcttgacgtgcttaagccattttacttaattcatttctcgctcaacctaaaaatacaataaatctccaccacacgttcgaattgtattatccgttaacttccgttaaaataaattccgatcgttcggtcgcgccgtaaccacgttggaaatcaaacaaggaggtaaaaaataatataataatcaaaaaaaatcttttatcaaaataaagcggaaaatcaatcggacattttctctttgggatttctcattcttaatcgaattgattaataactaaagtgaaactaacgctaaaatcaactcgcctagtcaagctcgttcataaaaat

SEQ ID NO: 163716 - DNA, 453 bp, Glycine max
  unsure (1)..(453): unsure at all n locations
gcttgtcactagagctgacccatcaattgcgctaactctctcaaaatggtgattcctacgctcttgaccttgacttgatagaacctctntttaggcgaaggcgcctgactcgatnccatgttttactaaagtgaaacaaaacccactgcgaattaaaactctgacatttatcatgggtggaatggatgaatgcatgaccaaatgcatatgacacagatgcattttatgaataccggagcccggcgaattgtccccttcttagatacaacattccggtagcaaggcaccccacgtatgtatttaagaaggcgacacggacccttcatcggtttgacaaagtgaggggatcgagacgcactccgtgcatgatgtatatgcgaaacgcacaacaccgcgatgtatatagtacgacaatatccacaaataattataagcaaaggcgtacatgacatt

SEQ ID NO: 163717 - DNA, 432 bp, Glycine max
  unsure (1)..(432): unsure at all n locations
agctctntaactatgaggaatcacaaatcctattatatttaaaatatcctcccacttttgctccttcctggatattctcctggcaatacagncaccacaaaacataaaacaagaagcaatttccaaccttgcaaagacgacacatcctaaaattcatcgtccagtatctttgccttcatttggtttcataggaagatttccataagggtataatgttaccaaatttctcggatctggaaaaataaaaaaaaactcttttttctaataatatggtttgatccttactctcatagcaaccagtacattatgtcttaatattttatttaaacaatacaccttagccttactgctctttctcaaccatgagacttactgttacagtatcattcaactaacatgtcacactgttgtacttgaagtacgatacataat

SEQ ID NO: 163718 - DNA, 456 bp, Glycine max
  unsure (1)..(456): unsure at all n locations
tgtctcagcgtttatgccagacngagaccaacatgctatctatcatctccaaataccaagaagagttaggtctagccaccgcccacgagcatagaatcgccgatgagtatgctcaaatatatgccgaaaacgaggctagaggaagggtgatcgactctttacaccaagaggcaaccacgtggatggaccggcttgctcttaccttgaaccggagtcaagaacttccccgcttgttagccaaggccaaggcgatggcagacacctactccacncccgaagagattcatgggcttctccgctattgtcagcatatgatagacttaatggcccacataattagaaatcgttaggaaacttgtatggtctctcagaccttgactagatacgacttcctttctgaaataaaatgagttggtcccatgtttctactccaaaaagcttgtgcacatcaaatca

SEQ ID NO: 163719 - DNA, 435 bp, Glycine max
  unsure (1)..(435): unsure at all n locations
agtcanctgcggcatgcaagcttttgggtcggctggctatcatagtatgtttattgagggattctctaacatggcattgcctctaactaagttgactcgtcagaaccacaagtttgtctggaatgacaagtgtgagcaaagtcttcaacagttgaagaggcggttgaccacagctccagtgttaattttgcccgaccctaagaggacatttgaagcgcattgcgatgcaagcgggccacgcttgcgatgtgtgttgatgcaagacggaagagtagtggctcatgcttcacgtcaattacgtcctcatgaagttaactattcgacccatgacttggaactagcagcggtggtctttgctttaaagatatggacgcattatttgtacgatactcgctttgaagctctcagtgatcacaagagtctcatatacttgtt

SEQ ID NO: 163720 - DNA, 428 bp, Glycine max
cgagatgaggaagtgttgaagggtgaaacttcctgctcttattgtttattcacacagtggtacctggagatatgtcgcggtggtcacgagaccttggggacgtcacgtggggtgctattgcccacaaccaagcttgaccaatcccgacccaacccgggcatagtcggtcagtgagaacctgtgatgtacctaagcaggcgagcctctggcagtccacagataaaaggaaaacaagaccacaaatcaaggacgcttgtggtggctggccagctgtgaatattgtgtaatatgtggatggtggcctctggtaatccattacaaggcttacaattgaggacacgaggctaagatggtctctggtaatccattacccacgggtgtaatccattaccacgctctgaaaccaagtcatgacacttatggagcct

SEQ ID NO: 163721 - DNA, 435 bp, Glycine max
agcttgtacccatacttcttaattggagagtctccttatatagaaattaattaacgcatgtgctctttctcttcagaacagtcctcaccatatgatgatccttctcttgttcaccctccatggccatccaagagacagccccagcacctttggttcagcctccataaaaggtatacttgttttgtaaatcgatcgcatcttttctgttttttctttcttgcctcttccacatttgtgtgtgcatgttttctttcgggggaatgaccctctctcactttaatatttcacatggcagttttgcgttaactctttctttataaatattcacaattcttaataagatctcacctatatatttatatctatgaaaaagagaaaaaaaaatacaatattgacatatcattttaaaggatcacacattcttctaagtattgc

SEQ ID NO: 163722 - DNA, 401 bp, Glycine max
agcttcacacttcacacagaggagtattattttgtttacaaggtgaatctccaaactctgagaggtgacttcaaatcctcatgtatgagacgtccagtccatttttgattattctccaagaattctcactatttcaaatcaactaaaaggaaatggtgagaacttacaaaatgtaagacttatggagagaagatactacgctcgttccatcccaaatttgagaacattgttataactatccaggaaaccaaagatttagaaaccatgatgatagaacaacttcaaggatcactgtcagcttatgacgagaagcataagaagaagcatgagatcattgagcaactcttcacgatgcaactgaacgagaaggaacaaagtcaaggaaacgaaagaattcaatg

SEQ ID NO: 163723 - DNA, 333 bp, Glycine max
gagatccacgaacgataaagcggctgattgttctatttccgcctccgaatatgacagccaccgttccaggagcgctgggccaccacagcgcttcgagaccatcaacggatggtcatttctccgggagcgacgcgtccagctcatggaccacgagtctaccgactctcaggaggagataattcgccggcggtgggcatcactggttaccctcatggccaagttcgacccacacatagtcctcgagttttatgccactgcttggcctacacacgagggtgtgcgagatatgccactcccggtgacgggtccatggattccattcgatgcggatgc

SEQ ID NO: 163724 - DNA, 425 bp, Glycine max
agcttgtaaccattagaagagaatgatcatgtgaatataagtatgactgaaaatgttagtcagttgttagattgattatgaaggaatgcattgaccgtatcccggtgagagtgtgatctttaaattttgagagaaacgattatcatttactactaattttcgcatgaatctctgaagtatggactgaatgcatgaaattgaggacgatgaaggccatgtttgattgtgatagccacttatccaaaaagctgaccacgtgcttgaatgatttatcccttgcacttagtttgagctgaatgaattattgattgattgaaccctgagcctatatagtgttatctccagctaccttgacttatgtcgtacgagagcatcatccacaggaagcatggttcaaagaacatttgtctcatatgtgggggagt

SEQ ID NO: 163725 - DNA, 367 bp, Glycine max
tcgtcctagaggtgatggaccttctcaggtcttggagatgtataataacaatgcctataagctggacctcccaaatgagtatggagtccacaccacttttaacatttctgatttaattccttttgaagatggaactgatactgaggaggaggaaccaacaaatttaaggtcaaatccttttcaagggggaggggatgatgcaatcctccctaggaaggaaccaatcaccagagccacgagcaacagactccaacaggattgcgctagagctgctgaagaacgccttaaggttctcataaacataagggtagatttctgagcccatggacgaaggttgggtccacttttctttgtgaatattagaata

SEQ ID NO: 163726 - DNA, 371 bp, Glycine max
  unsure (1)..(371): unsure at all n locations
cgcaagcttatgatgatgagatacgattgttttttggcgtncccatcctaacaaagatgatgacaaaaagctcacgactctgagttccagactgagcaccgaacaccttatgaatccacagatatttgccttcccgactcacgaatcacgactactcaagttgaagatctaagactcaagaaacgaatccttcaagataagtactaaacagttcttcacaacatcgagctcgcagatgaatcttctacaacacctttactccaagagttcttactctctagcaatcgactaccagcttattgtactcgactaccagtttgcaagattgctttcaaaagctttccacttaatttatcacgctccattcgttt

SEQ ID NO: 163727 - DNA, 473 bp, Glycine max
  unsure (1)..(473): unsure at all n locations
gcgacactatacacaactccagctcaggccaaattactctacactgtcataagctatttaagttgttatctagcncaacacgagggatctgaggacgaagcttggattgcttcagcataactacggatcgaggtttagtaattcaggctacaacatataacacaaaagcatgatcgattagagaaacatccttatatacattagcttgtctgctacaaagacccaacatttttacctattgttgccaaccttacttacttgtattccttactgtctttagcctacacttagtttaattctgttctacaccatcaattattaatgtttctctcaacaatgccttatttatgaatttaaccttgtctaatactacctccctgagttcgatactcggattcatccattctaatttaaaatacttgatgatctggtgcgctgttcggcccaccagatctcccttgaacatattagta

SEQ ID NO: 163728 - DNA, 269 bp, Glycine max
cagcttgttgttctgggtgacaaattcttcttgtttgtgtaaccaaagcctgcagcacgcttatgtgcttaggatacagtacaccatgaacgtctgtattagagtcaagctgcgaactcacctcactttctagacacgctttcttctccgtgatttctcattcagggtcacctatccctactctacatttcattcatcatgccttaatatttaatctcctatactcttgtagattcaatctattgcttcaaatatcctatacggagatc

SEQ ID NO: 163729 - DNA, 447 bp, Glycine max
gtgaactataaaactaagctcacggatacactgtccgatgccacaattacatatttattatattgatccgtatccaccttaccgatcaatctgatctgtacgatttactgatcaccctcacacacacccatcaacaacaacaacaacgctttatcccactacgcggggtcggctacatggattaactcccgccataatgttctatcaagtaccatacttctatccacatcattaacttcaacatccttcttgataaactctcttataccctctttgggcctctctctgcctctaaatgtttgccttctctccatctggcctacttccctcactacagactctaacggtcttctctctacatgcccaacacacctaagcctatcttcccccatcttctatacgatacgggctcctcgaatcctctctctaatagctccgcgtctcatt

SEQ ID NO: 163730 - DNA, 426 bp, Glycine max
agcttatcacatcataaagtgattatgaggtgatttcttcatatatataattagcatattaaatgctgataaccgtggcatgttattcaaaagttgaataaatagtgcttacaataggatgaccatcatgatgtacaataaacaaactatagcacatacctagtgagctaaaagcaactatagtggcgtggtgacccgattgcaccttatacgtttagaactacgttattttccttggtgagggtgtagttaattttcaactaatggagcaaagctactgctacttcttttgtctaagttgatgctacttcttttggggcttgtaccaaagctagccacacttaatgcactcacatttcaattctacttgaatatgtatttcttagcttaaaatagatcaaagaacaaaaatggagcatagcatga

SEQ ID NO: 163731 - DNA, 385 bp, Glycine max
  unsure (1)..(385): unsure at all n locations
agcttntgatatttatatatagcgctttatgtgtccatcgcccctaaacacgtagaaatctttactcgagttcacatttgcagaccgcggtcgctggaacacttaatcctttcattaaatgcacataccattccatgttggaaaactactcttgttagcttccttccagaacacttcagccgaaacatacttctttttcgctagagtacgcttatcacaataagatgtgtcctttgatactatttggcaactcccaagcacttatacttaatctatcctttgtgggatctgacatatccaactcgaatgtcttatacgactctttctaccaaacgaatctcacacacaaaatattcaatgaagtcttccctgccttcttcatgct

SEQ ID NO: 163732 - DNA, 369 bp, Glycine max
cgcctcagagatgacgctcaatgaaatatatttttttattatctgatcaagctatgcaagccccaacaaccaaagggaacaactatgatggtcgcaagaataacaacggaaagggaaagtggaacaacaataagtggaaggggtcacgtaacggctctatcagttctggaaatcataaccacaatgaagaaactgacaagaaaaatggagggaatcacaaagtgggaaaaaagaaatacaacaagaaaggaattcagtgttataactgtcacaaatgggaacattctgcacatgaatgcacaaataaaagggttccaagacatgcagatgacgctcacatcggccaagatgatgattctgactctgata

SEQ ID NO: 163733 - DNA, 397 bp, Glycine max
  unsure (1)..(397): unsure at all n locations
agctagtgggtggaggattcatgaacnattactctatcnacgggnctccgcaaaagggtcgaggatggagaattgcactaccccatcactacgccccgttccaagcctcatggcggacgacgcatgaacgaaacacaattcatggtgctcccaaccacggttgacgatggacaattgccctaaccaatcattaccaccggcttctaactccgtggtgaacgacgcatcaaccacaacgccattactggcgctcacaaaacgggctgacgatggagaattgcactaatcaatcactacccatggctccaacctcctgcgtcgaggacccatgatctataatgcaatctacggtgctccaaaatatggctgaggatggccaatcgcactcctcaatcac

SEQ ID NO: 163734 - DNA, 443 bp, Glycine max
tggattaattcggcctgatgagggatcgagggtttactattttatgctacaacataaaacacaagagcacgattgattagagatatatatttctttgcatcagcttgtttgttagaaaaacccaacatttctacctactgttgtcattttatttacctttcattttatagttttagcataaaagtttagtttaaattctgtttgaaattatcactcatacatgttctctcaacaatgcttcgattctgaacttaatttaggctaacattagttccctgtgttcgatactcggattcatccgttttaaattttaaatacttgatgatccggtgcactttccggtaaacccccattgaaatttccctgagacataaatgaacaaaaagtcattgtattggggagtcaacacatacgttgcgtatcattgatgggctgttgagcta

SEQ ID NO: 163735 - DNA, 431 bp, Glycine max
  unsure (1)..(431): unsure at all n locations
agctnggagaggatgcttcaatggaggaaaatanagatggatagaaagagagaggggggagcacgaaattgaaggaagaaaaagggagagaatttgaactttgagctgtgtctctcaagactctcattcatcaaagttacaacaagtgctacacatgcttctatttatagactaggtagcttccttgagaagctctcttgagaaaactttcttaagaagcttctttgagaaaacttccttgagaagctagagcttagctacacacacccctctcataactaagctcacctccttgagaagctctcttaagaagattcctaaagaagctagagcttagctacacatacctctctaatagctaagctcacctccttgagatgagaagctagaacttagctacacaccccctataatagctaagctcaccccca

SEQ ID NO: 163736 - DNA, 376 bp, Glycine max
taaataattaaaatgcaaaccaagccttgctttatagactcttcatgtctggtcaagacaaccatttagaagaggtataacgtttagaaaaacttaaaaccacatttgaaaaagtcaaaaaccttttgaagagttacatcttttgatttattcagaaacaaacacgggtaatcgattaccaaatcagtgtaatcgattacacaaagcttttatgtgaaaggatgtgactcttcacatttgaatttgaatttgaatttcaatgttcaaagacactggtaatcgattaccaaaacattgtaatcgattacaactttttgaaatcaattggaacgttgtaaattcaatctgaaaactttctcaaaacaattttgctact

SEQ ID NO: 163737 - DNA, 429 bp, Glycine max
agcttgcacataatattctgcttgtgtgacatcttataaccttctggttggttcatatagatgtcttcctctaaatccccatgcaagaatgcagttttaacatctaactgcccaagtgaagattctctacaactacaatactcagaataactctgatggtagtcatctttacaaatggagaaatgatctctgtgaaatcaattccttgtttctgttgaaaccctttcatcacaagtctctccttgtatcttcttctaccgccagatttttcctttagcctctagacccacttattatgtaatgctttctttccttctggcaatttagttaaagacaacgtcttatctcttctgaagggatgtcatctcatctttcattgctagctcccactcaatagagtcatttccctatgtagcctcactgaaacat

SEQ ID NO: 163738 - DNA, 440 bp, Glycine max
  unsure (1)..(440): unsure at all n locations
ttcatcattatgtgtngatgagcctagcgtgatcacncttatacttagatggcgctctaacctctcagcaattccatggacaaacttctggttaatacaaaacaaacatattacacaaattattatgaaaatattgatgtgaatgacgtaaactattagtattacttaccactgcatgtctaggcttctccacagcgggcctcgcagatgtggggcctaagggacgactccgggctgccgagggtctgatgcgtggcctaatgtcatgaaaggatgcgagatgcggatgaaccagtccatgtaatcactggcacactgacttggcacaacgcacacctcacctgctggaacgatatcatccgagtagtgcatctacctgtcgtgtatatcatcatacgacacccatgaatcgacaagcagagcacgaatggcctgtgtgt

SEQ ID NO: 163739 - DNA, 377 bp, Glycine max
ccttacgcactcttctctctttcgaatttgcttacgaaaattgttctcgcgaagaaaatccaagccgaggcgcttccataatgtttccgtaacgttctcgcgagtgattttgtgaacgttttcgaccgctcttcgacgttcttcatttgctcttcatcgttcttcacgtctgcaacgggtaagtacctcaaacctagcttttcaattcattctatgtacccgtggtggtccacaattggtttcatgtatttttattctccgttcatttactttctatagccccttttgacgtgcttaagccattttatttaagtcatctctcgcttaacatacacataaaataaatctccaccgatcgtttgaatcgcattatcccg

SEQ ID NO: 163740 - DNA, 451 bp, Glycine max
  unsure (1)..(451): unsure at all n locations
catgtngcaaacatctacaatagacctgctcaacctcagtatcattatcaaccttatcagaacaattatgacctctccagcaacaggtacaatctcgggaggaggaagtatcccaaccttagatggtcgagtcgttcacaacaccagcaacaacaacagccttattttcagaatgctgttggcccaagcagaccatacgttcctccaccaatccagcagcaacaacaacaacaacaaaaacaacagccccagaaacaacaaacagttgaggcccctccgcaacctttccttgaagaacttgtgagacagatgactatgcaaaacatgtagtttcaacatgagaccagagcctccattcagagcttaactaatcagattggacaattggctacacagttaaatcaacaacagtcctcgaattctgacagattaccttctcaatctgtccaga

SEQ ID NO: 163741 - DNA, 449 bp, Glycine max
  unsure (1)..(449): unsure at all n locations
tactacaaacgcanaagacacgcaagactccgcgggtctgttttttatacatgnctagcaacgggaattgcctcgtccagctataataaagtcaataaaaatgactcttttaagagcatgtttagtcctttaaatcgcgtcttgagaccgaaaaagcaaaatcatttatttcatagcaaccgacctaaccattaggtatgcatgtttgagccataacaaaatttccggggattcttattatttcgagtttggaactaatttncaaatataggtggggacttttttttactttttttcatgttcaaagagtataatacgtgggaggtattgcatattgcttctagcttttttttaagtcgcgaaagcgtttcaaatataattgcctttatactattatctctctttttaatatcttcctatctccaatcacaaatgataaatttatcgat

SEQ ID NO: 163742 - DNA, 381 bp, Glycine max
  unsure (1)..(381): unsure at all n locations
agcttgtagagtgtccatgttatgttnctatatttcaangactacgagacctccacaaaaaaggggattaaggagagcacatttattgattgttattgcttgcatttctattacaatgattgtccatttatacgcaccaaatacttattctagcttcttctacaagtcctacgagggaggctaacaataatggattctggaaatatcctaatagaaagatatattccaccagacagaatatcctaattgcccatgttatgttccttttagtgcttgtctccttcttacctgctagcaattcttctgtgttgggttgcctcatcataacatttcttggcccatcaaaaacaccttgtcctcaaggtgttgggacctcaattc

SEQ ID NO: 163743 - DNA, 400 bp, Glycine max
  unsure (1)..(400): unsure at all n locations
tattgcgaacgacacaggtcttggctgagatggggagaataaaaccatcgcagctagtgatgaatggggggaagcgaaaattcaggtatgtgttattcaacgaaaatagagtttttgtgcatgccactcttttgctcttttgtttcttatgtgtgattcttgactttggggcccaaattgcagttgcagactattttttaaaagcttgcatctgaaactttagtaccctgagactgaaacagtacccctttatatacccttcaaatctattgacatgctcatccgtggaggaaagcatctttgctcttattntgcttcatctctggatatcatcacaacttcagacgcttggttctatgatttcacttcccaacgcttacttactctaatatatctttga

SEQ ID NO: 163744 - DNA, 425 bp, Glycine max
agctgggctcgcggtgtcgcggataaaaatattaagcttggctcgcggtgtcgcggagaagaagaagaagcttggcttgcggtgtcgcacagaacacgaagaagcttggctcgcggtgtcacgaaggagcagcacgaattggaagaagaaaagaagcacgaagtggtcttccgggaagaggagcgcgttcttaaatcttttacttaaagggcaaaacgacccattcactaaaattgctggatgcacctagcatttcccaaaatttccctatgaatttggtgaatatattacaataaaaaacaccacttgatgtcttcattttagtcatcccacttgattcttgtatgtgaaatcctcatatatattatcacaatcacatttctcttccaaaatcttccacaatacttctcttaacactcgatcat

SEQ ID NO: 163745 - DNA, 452 bp, Glycine max
  unsure (1)..(452): unsure at all n locations
ntannagcaacctttggagtataggtgtagatgtattttgtatcacccaccaagttnttggagctaatgcccatctatcctcaattgaatcaaatgaaccaaagtcacccgcacaagatgataatttacagaattcttcataaacttttttcctaacattaacatgtggaaaatatctcttaagacatttattcctttggctagaaagttcatcatctctatgaggaggaaccctatttggaacctcattaagccaattatcactatagtacctataaaaaaatatatgtatacattttagtcatactatggttgagaaagagctaagctaagccatacacattattgaaaaattgatataaaaatattaccttggatttagagaatgagctaagcaatgaagtggattacaactcttactccacctagaattaagtattctatgaataact

SEQ ID NO: 163746 - DNA, 425 bp, Glycine max
agcttctaagttgtttcaaggtttgaagtactggctcctattctactgcaagcactttagctggatcagttgataccccctccttagaaatgaagtggccaaggtactctactttagaaaccccaaaataacacttactcctcttagcaaacaaggaattcgccctcatagtttccaaaactttgtgtaaatgcagcaaattgtcttccaatgaacaactataaaccaaaatgtcatcaaagaacaccagtagaaacttcctcaaagactccttaaaaactgagttcataagcccttgaaatgttgcaggtgcattactgagaccaaagggcatcactaagtattcaaaatgcccagcatgagtcttaaaagcagtcttatacacatcagcaggatccattctctcttgattatatcctgacctc

SEQ ID NO: 163747 - DNA, 339 bp, Glycine max
  unsure (1)..(339): unsure at all n locations
tccatattagtgtaccaaatgaccgcggctccagccaatttatcttgganaaagcgcattaacaacttttcgtccctaaaatgtgcccccatcttgcgacaatacatcttgagatggttcttacgacaagtcgtccctttgtacttcgacaaatcacgtaccttgcattttggggggatgacgacatccggtaccaagcaaagatccgccatgtccgcgaacggatagtcgccaaagcattcaacatatctcaatctctcctcgatgagatcgagtttccttctttcttcaccgccgggggtggtccttctgtggacaagaatattggctgtgctgtga

SEQ ID NO: 163748 - DNA, 235 bp, Glycine max
  unsure (1)..(235): unsure at all n locations
agctttcagtcacacctgaatctgtcttgtgattntggctatttctgacgttccttccggcgcggagttgtttgaaataacggctgacgtatttccctgaattgtgacagacatanatttctccttttaaaaaagcactatcggcctgcacaaaaaaatctttaatcccatttcttgtgtcattaattgtttgatgttcagattgttntcctcgcgggctggcgcgcctcaaaaa

SEQ ID NO: 163749 - DNA, 387 bp, Glycine max
  unsure (1)..(387): unsure at all n locations
tgatgacaacacaagatgacgacgaacagctcatgagaatcacagaacatccatctcaagaaaatctagaacacgtcacagagttcacgaatcaagaagaattccagactcaagaagaaagtctacaaaccagaatcaagattcaagatctcaagagtcaagatcaagattctagactcgcgattcccgaatgaagaaaagactcactcacgatgagtattaaaaagcttttcaaaactttgaatagcacatgagtttttgacagaacctttaccagagagtttttactctctggtaatcgttcaccatattgttgtgatcgattaccagtagcaaaatgagtttgacaatgttttcaaactgaatntacaacgttccaaatatttt

SEQ ID NO: 163750 - DNA, 380 bp, Glycine max
agctttccacgaagaggtccagatatgatttcattggagaaagctccagtgctgcctcgggttttgaccggcatcgatttcggagtgccaagcatcagcaatgcttcgaggtcatcaagggatggtcatttcacagagagaggcacgtccagcatagggaggaccagtaccctaatttccacgaagaagtaactcgcaggcgcttggcaccacttgtcacccccatggctaaattccactcggagatagtcattgaattctatgccaacgcctggcccatcgaggagggggttcaggatatgagctcatgggtgacgggtcactggatccccttctatgcaaatgccctcaaccaattcttggaccaccccgtgatcttg

SEQ ID NO: 163751 - DNA, 462 bp, Glycine max
taccttgaataataattgtatcctttgcaccctctgtgttcttaattacattttcaaaattgaaccctaaacttaaatgattatctccagataccttgttttgattctaggagagcacatagttcaaggcaaattaccccaaatttgggggagttgattgggatgtaaagtaaaaggtaaagcattagcacacataacaaataagttgtgttaaaaaaaaggagaaaaagaaaagaaatcaaaagaaaatgtgtgttgttgtaataaggtcaaatgcaaattaaagtgaaaggatggtgagaaagctaactatattgaaagaaatatttggatgagtctacgatttgtgctctcttataatctaacgcttcgaatcctagaaaaaccaattatttttgtagctacaagcctataaaagtccttctaattctatttatgcatttctgacttgatgacatgaaa

SEQ ID NO: 163752 - DNA, 403 bp, Glycine max
agcttcacgttataattctgagcatctctttttattacgggactcaatcagacgtccaagtaaaaagttattgctgtctgaatttgcactgagattctgttctcaattctgagaatctcgatatattacgagactcaattggccattcgagttaacagctattgctctctgcatttgctacgaacttctgtttcaaatttcacgcatctttatatattacgggactcaaaaaaacattcgagtaaaaaggcattgtcgtttgaatttgctcatagcctatgtttccaattctaagcatctcgatatattactggactcaatcggacatctgagtcaaaacttattgtcgtttaaatttgctctgagcttctcttctcaattgtgagccgctcgatatactacg

SEQ ID NO: 163753 - DNA, 336 bp, Glycine max
  unsure (1)..(336): unsure at all n locations
cggcattggaattgcgaaagccncactccatcattacgattagtacctgacatctcacacaaacaaatcaaacgtaacaagacaattatagttgttgtttgaatacctcacccactcaagtgtatcacacaattatggcttttctctaatgaaacactcttgccttttaccactctaattccccttgagttcttacgcaattcaagagattatggccacaacaaagaacaattcaccaatatgtgtcacgtaaggctagagagacaaggaaaaggttaaccaagacaaaggctaacaatgtattgaataatatttggatgatgtccattacgaaat

SEQ ID NO: 163754 - DNA, 236 bp, Glycine max
  unsure (1)..(236): unsure at all n locations
agctgtggagggccgagatataccantctatagtcgagggcatgatattggaagacaagttgaaggcttgccaaaggtcaaaaaggagtttgtccaagcaattgagcaacacagaagagaacatgtgggccatcattcaccaatacaaagagaagctaactctagctgccacccatgaatgaacgttagaggaccactatgcgaaggtattggtccaaccacccggaaaggaaacc

SEQ ID NO: 163755 - DNA, 445 bp, Glycine max
ctggatgcctttaaaattttaaggctgaagtcgagaatttatgtggaaagcaaattaagatcgtgagatctgattgaggtggagagtactatggtagatacacggagaatggacaagcacctagtctgtttgcgaagtttcttcaggaacatgggattattgcccagtacactatgcttggttctccggatcagaatgatgtggcagaaagaagaaaccgaactttaatggacatgataaaaagtatgagaagtaataaaaaacttcctcaattcttgtggattgaagcattaaagacggttgtatatatattaaaccgggttccaaccaaggctgtcttaaagacacctttctagttattcaaaggttggaaaccgagtttgcgacatatatgcgcttggcgattcccatctgaagtgagagtttataatccacaagagaagaa

SEQ ID NO: 163756 - DNA, 433 bp, Glycine max
  unsure (1)..(433): unsure at all n locations
ctgcagctnttaaggaagttatctcaagaaagcttctcatcgaagctacctagtctataaatagaagcatgtgtaacacttgttgtaactntgatgaatgagagtcttgtgagacacaactcaaagttcaacttctctccctttttcttccttcaatttcgcgctccccccctctctctttctctgcctctttcttttcctccattgaagcatcctctccaagcttcttatccaaggctcatcttggtggtgaagctccttcttctatggcttattccctagtggatggcgcctcctctcacctcttttcctttgtcttncgctgcatctccatggcggaaagtcaccattaaacgacctcattgaagctcanagatccagcctncatagaagccccacaagcaagcttccatcagatactcacgttacaata

SEQ ID NO: 163757 - DNA, 438 bp, Glycine max
cttatccatcgcctcctatggtggtgagctccttctagactacatcttctcttttagcagcatctcctctctctcttccttctccattccactgccatttatcttccaagaagcaaaggaatccattaatgaagaagatcctacgcctacaacgctcaatggagcttacatcagcctatgcgagccagaggctagtttggacgtgccaacgtttagaaacacccctaaaatgacccttttggtatctttctcattcttgatcaaaacattgaatgatcatttgtttcgcactgtaactggcgttcaacaccgtaagtcaactaacaaggatcaaaagatcaaccaatgatactccccaaatgaaattacggtatgacaatacgcccagatgtaattgtgggagaatgagacgcaaggacatcacattcatccatttta

SEQ ID NO: 163758 - DNA, 424 bp, Glycine max
  unsure (1)..(424): unsure at all n locations
agcttcacaagcaagtctacatcatgtggtatctatatcatctccgtctacgtgatgctctcttgcttcctctatctttttgctcgcgcaactgactctaattcnttattctttatcttattctccatgtatatcctncattttcttgtggtttggtgctgtttacagtacattaaaaaaacccactgaataaatcttagatctacactcgttctagcattcctatggttcaaattttatagatctactctcgaatcatgtttttgtgttgattctaggttctatcattttgcagtcataatcttcttgtgctgaacctttagatttaaattttcttccaaaatattgattagaaaaaaaaacacacaccaaaatctaagtgtcaatcacttaatccatgttgtcttagagtcatcgttagtca

SEQ ID NO: 163759 - DNA, 433 bp, Glycine max
  unsure (1)..(433): unsure at all n locations
ctctcttgatgaacacgcaaggacgtgtgcgattatttaactataanncactacgaaacaaaaacaattgctcttgcacgtctactatggggaaaatactatttagccatatcgatcccacgaattatatggcatctcacgttaatctacatgtggtaccaccaaatttaaatatatgaagctgacaataaaattttctccaatttatggctactgtatttattgaataactgcgtaccggcagcatccagggaatttacatgaattttatccacgtttgtctaattgaccccaagtgcaaataagattaaatagctcatcttcaattatgaatatagaattttagactatgaccttatatcttaaattctatcatcaatatataatatgactagcacatttaatgtatcatttttaatcttcttttcatata

SEQ ID NO: 163760 - DNA, 368 bp, Glycine max
atcttaagcactgagatgcagctgacataattctggtggggatatttttattctttggttggctcatatagatgtcttcctctacatcgccatgccaaagtgcaattttaatatttcactgcctaagcgaagattgtatacaactagcggtgctcacattaaccctgatggtagcaatctttaccaacggcgaactgatctttgtgagataagtccttgctttgatgaaaccgtttcatacacgtctctgcttgtatcttcttctaccgtgcgatttcttctttaccctatacacccacttattagtgaatgccttttttccttcctgcgatctacataacagacccgtcttatttttctgaagggat

SEQ ID NO: 163761 - DNA, 431 bp, Glycine max
  unsure (1)..(431): unsure at all n locations
tcatcatgcgttgatgagcctagcgtgatcacccttatacttatatggttctctaacctctgagcaattgcatggaaaacttcctgttcaatacaaaacacacatattacacaaattattatgaaaatattgatgtgaatgacgcaaactattagtattacttaccactgcatgtctacgctcctccacagcgggcctcgcagatgtggggcctaagggacgactcggggctgccgagggtctgatgcgtggnctactgtcatgaaaggatgcgagatgcggatgaaccactccatgtaatcactggcacactgacttggcacaacgcacacctcacctgctggaacgatatcatccgagtagcgcatctacctgtcgggatatcatcatacgacacccatgaatcgacaagcacagcacgaatggcctgt

SEQ ID NO: 163762 - DNA, 398 bp, Glycine max
  unsure (1)..(398): unsure at all n locations
agctctaaaaatntatattagaaatcataatttttcttctaataataattaataattaataattttataaatatttgacatattaaatttaatatatttattttttaccacagaatttaatacatggattaaaatatttaattctaataattatcaattggtttaaatatgttctacatccctaataaatattcaaatttgtatttaatccataataaaattttaatttgcgataaatatctaattaaacaataattttatttttgatctttgacactttttctactccctaataaattaacacactctatatttactgcatgatcaatattttacatttactattagtacatactaaatagaatttgttaattatacgaaataacacaaactttaaa

SEQ ID NO: 163763 - DNA, 423 bp, Glycine max
agattccactcgcctcttctcatgtgcatgttatgaaacacatgttttgtggccccagaatgcgtaaattatgccaacaatggtggcagtggcatgggaaaagaaaagcagaagattaatcatatgattttattttttctgaatagattaatcatatatgatcgatactgcgtgtgtcaactcgttaacttgaatatctaaaaactaaatgcgaataaaataaagttcgcagcagttagttaaaccgtcaaattcaaatttcattcctctaacatattatattagtatttatgatttcttttattagcaagaattggagagagtccctgaaatttacaataactttaactgtctgagttaaactgtatcggttatatttattattaaaaactaactaaacatcacaatgaacgacactgcatt

SEQ ID NO: 163764 - DNA, 393 bp, Glycine max
cgaccttaagtcactgcagctgcagcccgggaagaagagcagcagcgatattttttcggagaggtgggttttatattttatacaagcaaaacgcccattcataaaagtgctggggcaccaacaatattgcgggcgcacctaacatctcccttttttcccccatggcccaatgatctgaacacaatgtaattgcttctttatacacaaaaataatcttcatcaacatattattattatatgcttaatcgatttatacttcaactcttcatttctgataaattaattagatattttacccctaacttataaacaacaattttatcttttattgaatgcccacttgctactaccatacagtgagataaaccccaaaaataaaaatgaaatacattt

SEQ ID NO: 163765 - DNA, 349 bp, Glycine max
  unsure (1)..(349): unsure at all n locations
gcgcgcatgtagctctatttatgttgtgtttactcgcaacacgccgaacaacagcggacctaatttcttttctcggtgagaaaccaccaagaacagtggacctttatttaacgtcacagtagaacgcctcctttccggtttcctgaaaccacgctgatttcagataaattcaagtctttccccgccgcctatcaagctacgcaaaaatttgtacttaacgctaacgcccaactttcatatatctcttattcttaaaactttactcatattttatccatatctatgtctccntcttctaaattacagccatttaagtctaccgtcttgaatcaataatttcttttttaca

SEQ ID NO: 163766 - DNA, 423 bp, Glycine max
  unsure (1)..(423): unsure at all n locations
tgccgaaatactttcncacatgatagtagtgatatctattttatctatggtacgccaatgttgaacaactctatataacgctcatgtcgatacgttaacatcaatctttcataaaattgatgtcgaacgcaaacgcgggcgcatattcatacatacaaggaattcactaccatcacatttccaaaaatcaacgttaacaaactgatgttaacaacagctatgtcgacattacttcttggaaactcgacgctccctcactgatccttacattgattttaacaccaaccacgtcaacatgactcatntaacactccgtctcccacacaccgatgctccatcacttcgccatactcatccttctccaaaccaacctctacaacctacttctaaaatgttccctattctacgtactcttccggtgcc

SEQ ID NO: 163767 - DNA, 416 bp, Glycine max
  unsure (1)..(416): unsure at all n locations
agcttaacactcatcacacccctccattatattgtataagaaaaagagaaacaaatacaaatttagatcatatccttactatctgaaacacaacattcttttttaaaagtctcgaatatccatcattctattcatttcgaaattcgaattattttccaacacaatacaatcatgcgaattggaaagattacaacaaataattctcaatcggaaaatcaaaatttaaagtacctaacattaaaaaaattaaaaatatatttaaacctaaatttttcatttcaagttgagaaatgaaagtatgatgaaaaagatgaaataacatacgggtgtgtattgagatcatacctcccttatgatggaacatactccattgatgggaattatgaactnctatgaccatgtctcatgggatccac

SEQ ID NO: 163768 - DNA, 356 bp, Glycine max
  unsure (1)..(356): unsure at all n locations
ggtaaanagggaagcaagttaacaactctcttgaaagttatataattgtttctactccaaaaccccttgaactacttcacattgatctatttggtccctctagaacaatgagtttgggtggtaattactatggctcacctatagtagacgattactcaaggctcatatggactttgttttaacccaaaatgaagcttttggcgctttttaaaaacttgccaaggtgattcaaaatgaaaaaggtctcaacattgtttcacttagaagtgatcatagaggtgaatttcacaatgagtcttttgaaaacttttgtggagaaaatggaattcaccataatttttctgccccaagaacac

SEQ ID NO: 163769 - DNA, 430 bp, Glycine max
  unsure (1)..(430): unsure at all n locations
acttncttgagaagctagagcttatctattttcatccctctcataactaagctcacctccttgagaagcttccttaagaagatcccttaagaagctagagcttacctacacatacctctctaatagctaagctcacctccttgagatgagaagctagagcttagctacacacccgctataatagctaagctcacccccatgacaaaaaacatgaaaataacaaaaaagagtccttattacaaagacaactcaaaatgccccgaaatacaaggctaaaaccctatactactagaatggccaaaatacaaggcctagacgaaggaataacctattctaatatttacaaagataagcgggctcatacttagcccatgggctcgaaatctaccctaacgctcatgagaaccctatgcgctttcctcggatctct

SEQ ID NO: 163770 - DNA, 435 bp, Glycine max
ggaactatcaaactcaacctgagtcgacactaatctaagcacacactaagttctatgtgtttgtcatctctcagccgagctcgcccacttctacactcttcacttaacggttcatttcttccactttctcgccgttacattttcctctcaaacgcactcgaactactctctttctatctgtactctcgcctgatcaatccataccagcagatgtgaactcccgttcatctatttcattacaacacaattctccacctaccagaacactacactccatttatcaaactaccatcatactttcgcacccataattgcctctttgcctacgctctacctagccccaatttcctttgtgttctcgtcaggcctaatccacttctgtcgacagacaagacaacgacacacgcactatgtcttctcttcacatctatatta

SEQ ID NO: 163771 - DNA, 427 bp, Glycine max
  unsure (1)..(427): unsure at all n locations
agcttgtagaattcaccccaattccagtgtcctatgctgacttgcntccatatctacttgataatttaatggtagccataaccctagccaaggttcatcaacctccatttctccgagaatacgactcgaacgcaacgtgtgcttgtcacggagaagccccggggcgttccattgagcattgtagggctctgaagcgtaaggtgcaaggtctaattgatgcgggctggctgaaatttgaggagaatcgcgtgtaaatcctgacattgacaagagatgccacacatggggcaattttgaaggcggctgctaggtgtctctaatgactcattaagattcccatgtctatgccattattgtaaaccacagttacaatgttaaatgaaactggataaagttgatatctttgtcnctcatcctcttaaaacgc

SEQ ID NO: 163772 - DNA, 418 bp, Glycine max
  unsure (1)..(418): unsure at all n locations
ctgganagtgctattnttcaccttctcgctaagccaatatgttggcttaccgagcatttgctaagcgcaccactcctaggctaagcatgaggaagactctggaagaagatgagcggtacaggttcactaagcgcaccgcttcagttcatccgctaagccaaaaatcactaatgtgcgctaagcggtccatacgtgcgctaagcacacgagcacgaacaaggccacctatttaagcctaaaatcagattttgtgaagagagcttggactacgatttagagcttcccatatctacggtttctagagagagaaagggtcaagttccagagagttttgagagatcttgctgtgtgaagatctgcagagaccagagcatgaagcacgagccgcgttgagagctcgagatgagcttgcgactga

SEQ ID NO: 163773 - DNA, 385 bp, Glycine max
tgcaagctctagctcgttacatgtaaatttattctcaacaaacagcataacagtcgagctccactaaaaaacgcaatacttagaatgataactcatgatgtcggcgaagcctgcgattctcgctacaaagacagactttgaatattcatcaccctaagaaaagcaagttcttcttaaaaccatcatttggaagcttcaaaccaatatcttgaacacgactcatggatcttggtgaaatcgcgaaatattgctaggaagagagctggaatacccatcagcctaaaaaattgaaagcacgtctcgatcttcttaaaaccaacattttggaagcttcaaacaaactttactgaataccccacattatctcaaacttgaacatgagaat

SEQ ID NO: 163774 - DNA, 406 bp, Glycine max
ctatgaaactgaactcgcaaacgctttatgggcgtttcgatgtgaatttttgacaccgctacaactagaggtgacggaagattattgcatgcatccaatatttcattgatatcttttgaagcccttcatagagatctcatacataagcgcggactacaaacctatcttgctgcgccagggataatcaactagtatcgactcccttatatatctatgggcccaacacggatccgacagacacaagcccacacgaactgcgtgtggtgcaacggaaggatttgcaccctgatgaggcatcatgggaagataggccaacctttgtaatcatcatcacactgatgactgcgtgatctattcaagtggtaggattgactcgcctaactgtcataataggagaaaagagtct

SEQ ID NO: 163775 - DNA, 413 bp, Glycine max
agcttagcacaccttatgaatatttgtttgtgggataagcgcgaccaccacgcgcttagcgtgagaactcacaattttttttcttctgcacaatacgcttaacacaacaggcgcgcttagcctaaatccacaattttccaaaaagagggagattttagcttagcgccggaaggcgcccttatctcaacctcataaaaaacatagcacacgcttaccgagcaggctcgctaagccttgttccataaatatgaaaaacaaagatcaacttgtgcttattctagcagccaggcttagcgctgaacaaaattttgaaaaatttctaagcatctgatacacctcccctccttagcgcacaggcatgctcatccagttcaacattgatactcaacacagaagatgaacatgcttaacac

SEQ ID NO: 163776 - DNA, 426 bp, Glycine max
  unsure (1)..(426): unsure at all n locations
cgtacgattatggggtatccaccacatgtggtactaggtggcggccgggcgatggcgcaaaacgattcttcacatccacaaatcacgtataacccaccatcccctgttgcccacctccaactgagctcacgtactcccacgtagcccttatcctcattcctctcaacgtcgggtccctatcaatcctcccaagcttccacaacatccaggtaattccacctccaatcatcatggactaacaaaaccaagcaaaacagggcaaaggcagaaaactctgcccaaaatacaactcacaatcatagtagcttttcacatacaaataccccagtaacatttccttcgttccaattcgttaaccgctggatcgactccaaaattttactggaagtttctagtacataagtctacattntgaccgttgggatc

SEQ ID NO: 163777 - DNA, 462 bp, Glycine max
tcgaccggatctctaagtcacctgaggcatgcaagcttgcatggtgtgctacgcacaagattacagttgtgagcatctcgtggcttgtgataccttcattctcaggttggaaaatgaattcacatgcatttcgtgtcactaattaaaatttacctccatttattaaaatttattttaaaactcaattttcttaatctattgtaattatccctaaacagtattttcttaatatgtcgtatataatattaaaatttaataattaatatttaaatgatagattaaatataaataatacataaacctcttatttttatttaatctatcatttaaatatttatttatcaaataaatttttgcattaatattaattacaatcatgctcatatatgctatcttaattatttatattttttctgatgggatatgaatcacacaaaatattcatcactcaaaataatattt

SEQ ID NO: 163778 - DNA, 360 bp, Glycine max
atctcaatgtctttgctactcaagattgaacgtgagagtaatacagtatctgttcatattgggaagtttagtattgaaaattcactttaaaacttttaatgccgacaacttcagcactacaatttagtgtttgaaaactcaatattttaagtgcctgatgaaattagtttgtgctcaatgtactcagtaacctcttgcatgctgagtgggttcagcagtttttacttacattaattgtaagtacgtgttaaacaaacagtacattattttcagcatagttgagtttggaaatacgccctacatctgagatatttaaggcaacaatattcagtggctcagctctaaattaagttaacactc

SEQ ID NO: 163779 - DNA, 431 bp, Glycine max
  unsure (1)..(431): unsure at all n locations
agcttcttgtacaagcaaacaaacaactactctactgttatttaaatgcgganatttaaagaactgaaacataaaagctgaaatttaaatgacataaatcataaaataactgacaataaattgaagtgttcagaatgcaaaaanttaaacgtcctgctcctcctagggctggtcttcattcaaatccagtgctggagctactgatgaatcttgtacaagctgctcaggctctgcagctggtgcagtatcctcacgtatatatgcaggggctggagatggagtctgatctggaatagtctcctcctcctctgctactactggtgtgaacggctcctcagtatcacgctcctaggctgtagaggccccaccctctccaaaagaagagggatggtctcctggccaggccaactgagcctcaaactccttcatgc

SEQ ID NO: 163780 - DNA, 423 bp, Glycine max
aagcttatcccgccgtctagacacaagcaagcgcctttatttcttgatgactcctccaggagatcggatttggtaccgccatgtcctcctggttttcgactatgaaattggcgagtggaggagcgcccagacgtttacgcgacaagcataatgtaacccgctgtagctttaaaactctacggttgggcctatgctttagagtttccttttgttaaggcattatgtcttttgttcttgaatctataatataaagatctttcttcatctattcctgcgcctctacccattctcattcatttgcatgtttatttctttgcgcttaaaacgccagatccggctacaatcatataaaaatggcggcagaggatatggaacagactaccttcatcaccctgtgcgggacattctgttataaagtgatgt

SEQ ID NO: 163781 - DNA, 385 bp, Glycine max
agctcgacacgggagatgttgattctacatgtctctttttgaattggaagagctcctgctctcgaatgagtcgtatcaaccccattggtcgtcttgttcattgcaccaagttttgtaccattctatttgcgctctatattgcaccccttggataagctatactgccggctttgagtactcacggttggtgaacgacccactctacttgttgactttaaactctcctcggcggatgcaatacatggttcctattggttacatcacagtaacttattcactgaaaactatcatgagtggctcatataattatataagtgacaaagcactgcacaaatcatatacagtgctttcccattacactaacacccacttcagtccctgaaat

SEQ ID NO: 163782 - DNA, 434 bp, Glycine max
  unsure (1)..(434): unsure at all n locations
gaccttacaaactacgcctgcaagataaaagcgatatgatgtgctcacctgtgtttatctttatatcaagacaccatctagacccactgtttctcaagatccacacaaatggcttacagaactaaaacagttggacataaattgngttgagtagctaaaacactataatgaattggatatatgtatatatattggttcaaatataattttatgcttattgcaatacatgtttttcatgcccttgtgtcccaagggactaaaatctaccggcatagaatgaaatctttcttcttttgttccttcattaaaatcttacagacaaagttctacagcccgagtaaaattagcacgccattaagctaatttaccatgatcccacttcaaagtgattataggagagactaactcattcaaagacttgagagaaaataacc

SEQ ID NO: 163783 - DNA, 418 bp, Glycine max
  unsure (1)..(418): unsure at all n locations
agctntacaagctggggtcactcataatttatctctttgatctgtcgagacaactaatggaaaaacgacagtgtgtcatgatttttgttcttggtcttgtatgaacatccttcagtcaaatgaacattcctctctatatgattaactttcgaattctgagtcatacctcatccaaatctagacatacatgactttttatactgcgaaagcttataaattttttttatacgataagtatacgctatgcaatagttttataaattctctatagaagaaacaaacgtacacctgagttctaatataaatttttaatcagataaatatatttatgtataaatttggtttgagttggattacattgaatttccaaatgaaatccaaaatctgatttatccaaaaccacatgggttcattatat

SEQ ID NO: 163784 - DNA, 456 bp, Glycine max
  unsure (1)..(456): unsure at all n locations
ctaagctaatcctttgaaataagggtaggagattcgccctggatttatcttatgactactttccttancacccttatgatcaatatgttggataaataaaaatagttttttttttgctatatgcatgagagtttcaatgctagttgtcacacaaatgtattatacaaaagtacctatcacataaagagtggctatgcaatttagaatgcatcaagaagttttagattgtgcggctacattctttggaaccaaagtcattgcatggaaaaaatactacatacccatatctaacgggaatttctattttcatgtttgacttttttgaggaagatctcaccacacgttatgcaggatggtggaagcagtcaatactgtatcatcatcgtgattttgcaaagaatattactctgtgaaagagcagtctatgcaatgatgctggtgtttccgcctgaaatt

SEQ ID NO: 163785 - DNA, 413 bp, Glycine max
  unsure (1)..(413): unsure at all n locations
agctcattcctcacgtgcgcactgcgctaattatatcttatgagtnaaaacatcagaatgtgcacatctcatacagttaaggaaacaaaacatagaagaagatagtcaatacacaattcacaatatgcacaacaaaagaagattctattagtaccttacaaaccagaaacgccacaaattgggagaaggtaaacaattgtgaatactgactatgggataaacagaatacagaagtcaacagcaaattagagaggtcacaatgcactggtatcagacactcatctcagactaagaatcaagtcacaaacaatacccaaaactttaaccatttccatcagccaagtacagaggtcacaaactcacaatgtactgtcaccacatatattaagctactatcactaaaaagagaaccg

SEQ ID NO: 163786 - DNA, 289 bp, Glycine max
cctctcggagaatctaggaacttctcgggcgatctcccaacgaatattatccttgttgccgctataatcgttacccgcgtgtgatttatactctataataatcccgagcgtcacagtctctgaaagcctatccaacgacgttgagaagtcgctccattttgcgattatggctaactgcttcaaactgttggggacttcttcggattccgaagccaggaaaccgttcacgtcgttggagataacggccacgatgtccgcggagttggaaattaactcggcgagggaaacg

SEQ ID NO: 163787 - DNA, 299 bp, Glycine max
aactactgggggagattctagcttggacctcccatgtcacgtctattttcacatttgctaggttctgagatctgaaatgctcctgctttttttccaaactcgcttgggggcatgcaccacaacattggctgctgatagttttgatccctcccgcgatgactacgtacaatttcattacgacatttcgtatgatgtaccaataaatctgtgcagatgcatggtcagactttgatatacgctatgcttgccgcgttgttattatatttatccgtatcggcctgagatctcttaccttgcat

SEQ ID NO: 163788 - DNA, 412 bp, Glycine max
agcttatcatatctataggtcatcttcatcatgtgtctatcgtctctaaatgatttaattctcttcattgaaggcttgggtctgatgaagtgtctgtcgcattaaatgcatgtcctctccatgctaggaaaccactctctttagctttcttaaaggtagtggtgtctatgtcgtactacacacacaaagtcaaagttagtccacaacaaagtaatgtatcaaatagaaaatcctattaatcgcatctatctcttttacctataatgaggaagtctttcattttcatagtcttgcctaaagaattaaaagtcgtgttgcatgaaagacgaaaacaccacattaacgtgtgtactgcaagataagtaaagaatgacgtcataagagctcccacatgacctctctaaacctgtca

SEQ ID NO: 163789 - DNA, 443 bp, Glycine max
gagagcttaattataagttatcgtgattagcttgttagcttatcaacccaccatatataaatataaagaaaaaaaaagttatacattgatggtgcaaagaattttataccgttattcaatcataattcatcttgtatgataagtttgttgatttttataataattactctaaaagtcatattaaaagtgaattatgattacacaacactataaaagtattttacacttttggtgcataatcattaaactcataaatataaatatataatataagtttaattgttcttctataaaaattaatagtcatacattaatggtgtaaaacaattttatatactcatctaaataaataaataaatcgctgctgatatgacttaaactaattatcataaaagctagtacaattaacacatatggcgagttgtgattctcttattatacaa

SEQ ID NO: 163790 - DNA, 410 bp, Glycine max
gtgacctatagaaacgtacgcttgtaaagcacttccgaaggctacgaagaacctattatttatgcctgttttgacgacgccgaacgtatttacttgataaaagcacacatcgtttcacgtccacaaacaagatcacgaaaatcatacatcacgactcactcacattgttaaaagaatctcatttttattgcaacagtattggtccccaagccttttattaacatttctttatcaagtctaatcacgtcaaaagtaagatatctttgaactggtaatccattaccacgccctataatcgattaccagagagactatgaacatggcctcttgaaattctgaactactggaataaccacccaaacttattcgaattctagcccgtgtgattgattatcagaattctttaatcc

SEQ ID NO: 163791 - DNA, 426 bp, Glycine max
agcttcaccttctggtcctcctatagttgtttttgataaaacatgctctattttcatctcccactccaagcaggcctccggatcattctttcctttaaatggaggaatgttgagtctaataccatcaacttggttttgtctaagaacaccatcattccctcttctcctcctttcttcttcattatgatctctattctccatttgatccaacctctcatggagcgcatcatctcgttgtttcattaacctctccatatgttgcatcaaagcttgcatttggaattgcgaaagccacactccatcattacgattagtacctgacatctcaaacaaacaaatcaaacgtaacacgacaattatagctgtttgaatacctcacccactcaagtgtatcacacaattatggcttttctctaatgacacact

SEQ ID NO: 163792 - DNA, 237 bp, Glycine max
  unsure (1)..(237): unsure at all n locations
agctnttcagtcagcacctgaatntgtcttgttgatttggctatttccgatcgtccttcncgggcggagttgcttgaaataacggttgaggtatctccctgaattgtgacacacatagacttctccttttaaaaaagcactatcggcatgcacaaaaaaatctttaatcgtatttcttgtgtcattaattgtttgatgttcagattgttttcctcgcgggctggcgcgcctcaaaaa

SEQ ID NO: 163793 - DNA, 413 bp, Glycine max
  unsure (1)..(413): unsure at all n locations
agctntgatgatgtggccttgatctacgaattgatcaaagtacgtctaaacagaggcaaatctgatcatcatgctttgatacatgccaaaaaagctagggcaaatgaagagggtgagaatgatggacaaccccatgctgtggctggcattcctatacagccaaggatcccaccaactcaacaatgtcattacttagccaataacaaagctttttcttacccatcgcccagttatccacgaaggcaattcctaaatcaaccacaaagtctgtctaccgcacttccaatgacgacacactcactttagcacacaccaagaacaccactcaagatatgaattttgcagcgagaaagcctgtagaatacaccccaattacagcgtgctatgctaacttgctcccatatctacttgat

SEQ ID NO: 163794 - DNA, 445 bp, Glycine max
tcaagacataagatcaagatttaagactcaagattcactattcatgagaagacttactcaacgcacgtatgaaaaggatttttcaaaaactgagtagcacatggatttttcacaaaacttgtttaccaaagagtttttactctctggtaatcgattactagattgctgtaatcgattaccagtagcaaaatgtttttgaaaaagtcttcaaactgaatctacaacgttccaattaatttcaaaaatttgtaatcgattacaatgttttggtaatcgattaccagtgcctttgaaccttgaaattcaaattcaaatgtgaagagtcacatgctctcacataaaagctttgtgtcatcgattacactgattcggtaatcaattaccagtgcttcgttatgaataaatcacaagatgtcactcttcagatagcttttgactttttcaa

SEQ ID NO: 163795 - DNA, 430 bp, Glycine max
  unsure (1)..(430): unsure at all n locations
agcttgtctgctgacagcctaagtgacttatatgactgaatataaacttatttgaatcctatagaaggttttgtgattgtatattgatttcaatatttccttttaaaggtacttcctttttctatctggactgacaaagaagttgcaagaagaagttgatgagttctcaaatacttactacttggaccttcatgttggagacatgaagcacgaaatagcattctgctactagctagtttctatcttgtcaaattttggactctatctatcttaagtaaatattcacattgaaatgtgaaggaaacaaagcaccatgttaatatgaagcttgnggtatggttctgagttatagcctcaaatgttacttgacaggcagtgttctactaagcatgaaccacaatcagttaatcaaacatccatattcagtact

SEQ ID NO: 163796 - DNA, 457 bp, Glycine max
  unsure (1)..(457): unsure at all n locations
actaagctttgctgccaatttatttctaatggagaaagatgnctttccattaacgttatttatatattaaattatggagaaagaatgaggcgctatgctgtgaattggttttgtaaagttgtgcgactgcatgtacctttctttcaattccaattaattgaaaagctgctgccacgtgtaccttccttgtaggagaattagaaattttggatattgctatttgcaacccattttgctatttcaaatcccacttgtgtttttttcttcttctggaaattattattaaacgtaattgaaggattgaaagtttatatcctgtaattaaattagcgtgaatgctttgaaattattggtagcagtaaatatatgtataagctacatatttgcttgaacgcgtctgaatgccaaaacataaataaatacaaatattattttatggcctgaatcacacttaatt

SEQ ID NO: 163797 - DNA, 454 bp, Glycine max
  unsure (1)..(454): unsure at all n locations
gaccttaagtcacctgaggcatgcaagcttacntnancattgaggggggacgatgttctttttttacccacctgaacggggtttcgaagtgaatgttgtggtaccggtggtgggagaagaatatacgaagaaatgtcacaaggctgcctagtttttatcggtgcacgaggagcagcaccacagtcaccattcatagcacgacccagaacacaagaagcaccactaacaacgtttatatgattactaaaagacatgtaagctcggcgactctcgccatcaccattattatcaaagggtgatgaccatggacggtggtgatgatatgacgcccatcatcctcatcctattatggaataatgcttccgggctctgttgcaccttcacatccaacccaagaacgctactactagaactcgtgccgttgctgctgctgctgctgatgttcctctctttc

SEQ ID NO: 163798 - DNA, 456 bp, Glycine max
  unsure (1)..(456): unsure at all n locations
acctagaaactaagctatagccagctaatcacagcactgcgagccgttattttttgttgagaaacaacactttcacaaagaaaaagaacatacaacatcattaagcacattcaaaattagatacaaattcacatcatatacgccgggcttggaaaatgaaagcataattacacatacaggggtggcctatcactaatcactatctacttcatcaatgaatatgatggcaaattcaaccagcaacaacatatacggtaattatttcgctcatttgaaaactgacagagattgtacgattaaaaaatcagctactaaatcaacttttgtattgcttaactactctttatctgttactactttntactagcaaaataacttaaactatttcttcgccaaagatcctcattagttatctccacagaacagtttactacaacaagatgcttaaacttcaag

SEQ ID NO: 163799 - DNA, 304 bp, Glycine max
gtatgaagcctttcctcactagatgattgagatgatgcatgtgtctgcgtgtagtcctatgacgccacaaccaagaatcatctatcttaattatcagacaactcctctcctgagacgatgaatgctcaatgtctaacatattgatattacctattctcttgccaatatggaccaacctcccggacctagcttcactcataagacaacgattcttactgaattcaatcttgaagccttcgtcacatagttgactaacgctcaggaagctctgcttcagcacctccacatacaacattctctatct

SEQ ID NO: 163800 - DNA, 384 bp, Glycine max
atcagcctcacatgcaggggtgggcgctgagcacttgagactcgcagcttagcgcatgaaccgagatgcgcttaccgcgaggcttgcgcttagcgaaatgactatttttttttcagaaaatatttttctaaagttatctttcagtcctttttccaagaagttgaaacccttatgttaaacatccaaagattggctgatatactcctatgtacgaattatatagtaagttccaaatgatttacatgcataacaaagaaccaagataacagaatttaaaactgggttgcctcccaggaagcgcttctctaacgtcattaacttgacgctcttacctcactgcgcgatcttatgtttgtggtcctactttcagaacctcttgacctc

SEQ ID NO: 163801 - DNA, 434 bp, Glycine max
  unsure (1)..(434): unsure at all n locations
agcttgtcaaanacaaacatactaggaggattaacttaacaattaaagcatgatccattatcatcacatatatgagataccatgtaaaaatcatagataaagcaagtcctagaattctcataatagaacagctaataataataatcaattcattaaccatgtcataaaagctcaatcatcacacactatcatcttcatcagtccatcaatcatcaaataacacaatatttctatgactcaacaagtaacatatcattttcaagtcgcaattatcaatgtacatgtctatctatcacaattaacccaaacacatcccttaacatagcacaattaacccatcttcatcggtccattcctgttagtcaccaccgataacctttagcactatgttgagggcccaccaagcaccctcaacttatgtgtctactcacatg

SEQ ID NO: 163802 - DNA, 412 bp, Glycine max
ttgggtaatctattacactgatttgcgaatcgattaccattgattgtttctgaataaaatcaaaacatgtaactcttcaaatagctcttgactctttcaaatcggtttttaagcttttctaaatgtcataactcttctaatggttgtcttgaccacacatgaagagtctataaaagccacgctctgtttcgcatttcaataatcttgaatacttttccaatcaatctcttacaatcctttacaagccttgaatctctttgaacttcttcttcttctttgtaccagaagctttctaaagttttctggttttctaaaccttgaaaacttgtgctattcatcttttcattctcttctccctccgcccaacagaattcgccaaggactaaccgcctgaattctttttgtgtttctc

SEQ ID NO: 163803 - DNA, 401 bp, Glycine max
  unsure (1)..(401): unsure at all n locations
agctttaccggatgacgccgatcgaacatttcctaatcgatgtcatgcaaatttcgctcacggattgaattgaaaactcgttacgcgacatctgtcgcgaagtagcgaccgatatttttcagccgacattgcacaattctttttagaaaagctcgctggtcgataatggtctttttaccgcagagtaagttttcttgttatggtgtcgcataaaanagttacaatgtacttcggctaggcttttcgtgcgagttcaaccgacatcttgtttccgncaggaaaacattagctcacctctgcaaaaaaaatatttgctaaccgtctctatgcatatcttattcaacgactgaatagaaaactcaatagccgacaaccgtcgcgaaatagtcccgactgatatt

SEQ ID NO: 163804 - DNA, 193 bp, Glycine max
caaactagctttgtgactcacgctcttcagcgagttcttttttttcacattcgcgaaaatctttgccgatggccagtttccggcccataatggaaaggccgttgccaaccaagatgggactcgccaaaaactcccgccagttttaatcttagcaccccaaaaaaacttcggcgtacaaaaaaacattctgcgc

SEQ ID NO: 163805 - DNA, 368 bp, Glycine max
  unsure (1)..(368): unsure at all n locations
taagcttgcccncagctcgcccacgcgagcacggttgtttttctttttaatcaacagccttctggaggaatcttctggagggcgcacctgggcctggttgatatatgcaccctcattcttcacaagtacaccccctgcctcttcttggtgactcttcttttcgcaaagttaccgacacttacgacatttctaacgatacttattctattttcctcatgtcaccgaacgttgcggattacataatcatctccttttttgacttacggaatgctaccgaacctcactaattgtgcaccgatgcttccatttgatttccggcgtgtcacggaaccttacggattgtgcatcaatatcttttcttattttcc

SEQ ID NO: 163806 - DNA, 300 bp, Glycine max
aatgagcttattggaatgaaatcgactcgaactcaccacctactactactgaagattacctatcatactattgtactgatctcttgttaacttctgtccagtatgtaatccgactggtcctaagctccatgttctcaactatggccttcatattaaatatctattacaaccggttcaatcatgaacactaatagctacttaatccaatcgaattaacgcccgctcatactaattcgcatgcacaaccagtcaaataagctacttgcgttaattacttggccaattcacataacatatttt

SEQ ID NO: 163807 - DNA, 387 bp, Glycine max
  unsure (1)..(387): unsure at all n locations
tcttacatacgaccgctctgctcgaccgtctttatgctttgttacataaacattangcatacgcaacagatcaacacgatgtagcgggttaaaaccataaacaacttaacaggagatcactagtggcgctatgaacaactctattgtatgcaaattccacatggagtacacaagcttcccaagttgttaagttcttgctcaacactgtcctaagcaaacatcccaaagtactattaacaactatcgtttgcccatcgaggcgagcgtgacaagtggccgaaaataacacattaccttccaacttgtgtcacagagtcctccaaaatggctgacgaacttatagtccctgtcctaacaatgctcctttgcaaaccatggagtcgcaca

SEQ ID NO: 163808 - DNA, 406 bp, Glycine max
  unsure (1)..(406): unsure at all n locations
agcttggatttccttttagtanggaatctatcattcctaagatgaagccaaacccagtcaccctcattaagaattaactctcttcttcctctattgcctatagttgaacacaccttngtttggttctctatttggctcttaaccctctcatgcaacttctttacaaactctgacctagattccctttctttatgtataaaagaagtgttcactggaaggggaatgaggtctaacgatgttaggggattcaacccatagacaacctcaaaaggggattgcttggtggttctatgataccccctgttgtacgcaaattctacatgacgaagatactcatcccaagacttatggttgcctttcagaagagccctttaaacggtggataaagacctattcactacctatg

SEQ ID NO: 163809 - DNA, 442 bp, Glycine max
ctatcaaactcagcttccaggaagggtcttcaacctgcatctcagagtgtaattagttctgccccacacccgctggatctccgcgaaaggctatcacggacaatggccacacaacctacaaattatgatctgcctaacacaaaagttattaaaccaagcactaaaagtgctggtgtcgaggctcctgcagtgcagatcaaaaggccagctgacccacctcctaaaaagtcatggaaggtatcattgctgtgatacactcttttaattgtcaattagagcttttgttttggcatcacccttagtgcataaaacatcctatcatcacctattcttgcacacatttatatatgctattaaatgtcctgttaaacacggagtattgtgatattcttggacatgcatgttaaaagaaccgatctggaacttgcttgaatttcttctt

SEQ ID NO: 163810 - DNA, 406 bp, Glycine max
agcttctaacgtaacatcaaatcttatttcttgttatagataacacgggaaatccccaaaccgatccaattctagtgtatgttgcactaaatgtggcagaagcagaatatcacaagagaactatactgatgctattctatatgcctgaaatattgcatctcaccctgccacatgacaacaccaccagcattctcgattctctttcgatcatcacttttatttggtttatgatcctcacagagagcatttgctgccaaaataaaaaaaattaattcaacatacccatcttatttccaaaatgtattcaaatggaactgtacgagaaaatttatcatatgaccagactaggactcttgtctgaaatgctgtatcttccacatgatccctgatttaccttataaacagc

SEQ ID NO: 163811 - DNA, 372 bp, Glycine max
  unsure (1)..(372): unsure at all n locations
acctacccatcccctcattaagaactagctcttttcttcctctattgccttcaattgcatacacccttgtatggctctctatttggttactaaccctctnatcgcactcctttacaaactctgacctacattcccctctctttcttgtatacaaaccaagctgtcacaggctacgaggcgcgaattacgtcctaaggcgtgttatgagcgattgaaccncatacacaacctcaaaacgggattgcttcggggttctataaacccccttgttgtccgcaaactttcaataacgaagatatttatccccaaacttatggctggccttcatacaagcccttactagggtggatagagacctattcactacctctg

SEQ ID NO: 163812 - DNA, 333 bp, Glycine max
agcttgccagacaactctgttactctaacttgtttgcctacgcgacaagcaacacgatgtgtggaagaatattctggcagtccccagtgcgcctgaatgctatccataccccgatgtttacttagtactgagctctcggttttttacggtgatcatatcctcgcttagctcccgaaaccttaccactttcataatcatacttgttttcttacccactgttacagcactttgacgatcaaatatttctcccctcacaaaagagacttacgcaaagctttgctcatccatcattgagcaacctgcttttctagataaagactgcgtaacaaacct

SEQ ID NO: 163813 - DNA, 353 bp, Glycine max
agctcgcttctacattaatcacctcttccttttgcctatctatagcaaacaatggcctgtggaacaatggctacctgccctggcgagctaatgcctcattatcaagtcagctgggtcgcttgtgcgagctagtttcttcgcccctaataaatttaggggcccaactgagccacaggctatcttgggcgaaccataggctagtctgggtgagccaccgcccaaaaaactccctgaaatgagccttttgtcccttccttttggtatttctcgcactctcgatcaaaacattgaatgatcaactatcttacactgtaactgacatttaacaccgtcagtccatcagtctggatcaa

SEQ ID NO: 163814 - DNA, 406 bp, Glycine max
  unsure (1)..(406): unsure at all n locations
cggtattctacaaacacactcggcttttcgctttatatattaaagngctccccatatgactatatctccacagaggccagctcacaacgattgtgcccactatatgctcacaacaacctgcaagcttggagatagctgcaaatttgaccattctgtttgggtcccacacggtggaactccggattggaaacaggtgactgctcgctattattatcactattattatcttttatgcctatgaaacttatatgtattgtatactacatttactatcgcgaattgcataaacggaccttcattcttacacatctatatctaatcgaaagtcttacagataatcatatatgaatatatacgggcgtattatataccagcctatccaatctttatctcatattcactgtca

SEQ ID NO: 163815 - DNA, 357 bp, Glycine max
agcttaatactactcacatctgattttcttatttaaaaaacaaaaatcagtccaagtagagctgatgcaaatcaagatactcatctaggaaaaatattttccaaatcacactgattatattttccaaatcacgatacttcaaatctatatttcttaaaaaatacttatattatagtgtcatgtctaattctaaaaattacactatcctcacacaagagataattacatgttaattctgctacttcgcgatggcttgcaggtaatatcatggattttcattacttttaaaagcaatggctagttaatccaccggagtgtctttggctcggacatgactaaattatgcttgctgttaac

SEQ ID NO: 163816 - DNA, 459 bp, Glycine max
cgacactatgaaactcaccttctcaactcatcaccaaccattgtgttgttccactatttgccaacataccacaaacctcgtttctgagtctacagtctgagctctcaattacatcatccttagagcacctgtggctaaagacttatcggttgacatatgctctatttacaagtcaacattatgtcacacggatgtgatggatataatactatatcactataatattatgtagtcgctacaaacttctaaacatgctatgacatggatgtaatggataatataagtcactcataacacaacaatggattttagctttccatatgtgcctattctctatacatattataaacgccatacttctgtttaccaataattcatgacaaacacacaaaattaaattacaacgacgtgtgtgccaactactcaactgactaaactctacatcattcattttattac

SEQ ID NO: 163817 - DNA, 415 bp, Glycine max
  unsure (1)..(415): unsure at all n locations
aagcttgntgtgacagcctagtgattattgactgattaacttattgaaccatagaaggtttggattgatattgacttcaatatttccttttaaaggcacttcctttttctatctggactgacaaagaagttgcaagaagaagttgatgagttctcaaatacttactacttggaccttcatgttggagacatgaagcaggaaatagcatttgctactagctagtttctatcttgtcacattttggactctatctatcttaagtaaatattcacattgaaatgtgaaggaaacaaagcaccatgttaatatgaagcttggggtatgcgtttgagttatagcctaaattgttacttgacaggcagtgttttactaagcatgaaccacaatcagttaatcaaacatccatattcagtac

SEQ ID NO: 163818 - DNA, 428 bp, Glycine max
  unsure (1)..(428): unsure at all n locations
gcttngatatcacctgcgcgctgtatatatatagtcattttggaaacgcattatattctatgctatatatcgacaatccacgcattcgcttcaatagaattcaatgcattaaaatacacacccagtgtaaattttttttacatcctataatcataaaacgcagtgtttgattaactttcacatgcagaactgccgaaaccaacatcaaaagctaaagcactaataaatgatttccattgcaacatctacagaaatgaaaaaattgagattgcagagaatatatatagcaacgattctgatgcatgataaaatctacactcacattaagaagaataccaatacttcgataaaaagcagaaaaccagagccattaacacgcaaaattctctactgcaacaaaattttctagagattcaaacaaagacaaa

SEQ ID NO: 163819 - DNA, 444 bp, Glycine max
  unsure (1)..(444): unsure at all n locations
ccttgatactagctgtccaatgagctagttattctctgtggagctttttttattccnncacaatgcattcaacatcctctgaatctcatcctttanagttcgtggaagcaaatagatactcatgctgtatgaagggattaattgagcacaagaattaattagaactctcttaccagctttggaaagatacttccccaattagtgattgatgcatttccaaattcgatcatctacataattggacaatggtttctttgttctgccaatgatagatgagaggcccaagtattttccagaccctatgattgtagagacacccaaaccaaacatgattgtttgcctcaaagattgccgagtattggtgctaaaaaatatatatgacttgtctaaagtgatcatttggccagaagcccttctataggtatcaacgatttgagtgggtct

SEQ ID NO: 163820 - DNA, 434 bp, Glycine max
agcttgcttgtggggcttctatggaggctgtatctcttagctttaatgaggtcctctaatggcgattttccaccatggaaatgcagcggaagacaaacgagaagaggtgagaggaggcgccatccactatggaaataagccatggaagaaggagcttcaccaccaagatgagccttggataagaagcttggaaggatgcttcaatggacgaaaagaaacacggagagaaagagggagggggagcaccatattgaacgaagaaaaagggagagaagttgaactttgagttgcgtctcacacgacctctcatcatcaacactacaacaagtgttacacatgcttctatttatagactatgtagctcccttgagaagctttcttgagaaaacctccttgacaagcctttttgacaaaacttccttgagaagctagag

SEQ ID NO: 163821 - DNA, 258 bp, Glycine max
tttatctaaccttccttcatcaaaggtacgacacgcgttccatgtgctgctattgctagactacgggcttccttgagaatccttggagagaaaacttccttgagaagcttctttgtgatcacctctttgagagcttgtgcttatctgcacacacccttctaatacctcagctcacctctttgccaccctcactctgtatagacccataggaagctatatctatttacacacgcctctatcatagctctgctcaacttc

SEQ ID NO: 163822 - DNA, 433 bp, Glycine max
agcttctaggatgcctattctagatacaatctaattatgatgcacactccaaacgaggagaaaacaacatttatcactaaatatgccaacttttgctatagggtcatgcccatcaacctccaaattgcaggcgctacatactagagattgatggatcgaattttcaaacaacagaccggagtctatgttgaccacatggtcgttaaatcttagagcattgcccaacatgtggtagacctggaagaggtgttcggagagctctacaaatatgatatgcgcctcaacccaaaaaaatgtactttcgaggtctgtgaaggaaaattcttgggctttatgatcatgcatcggggaatagaagccaaccccgacaaatgcactgctattttggagatgtgtagtcttactaacgtccaggaaatccaacagctgaatg

SEQ ID NO: 163823 - DNA, 457 bp, Glycine max
  unsure (1)..(457): unsure at all n locations
tggattgattcagtctaagtggggattgaggcttagttatttatgctacaacatagaacacaaaagcatgattaattagagaaacatctttatatacatcaactggtttgttagaaagacccaacatctttacctactgttgtcaatcttacttacttgcatttttactgtttttagcctagacttagttttattttgttctaaatcatcaaattatcaatgtttctttcaacaatgccttatttctgaatttaaccatgtctaagactagttccctgagttcgatactcagattcatccgctttaattntaaatacttgacgatccggtgtgctttctgataaaccggatttcccttgaacatatttgtataaagaanaaatggaccacaaagtaactctaggggaaatccaacacaagtctccagtgtttttggcatgtaactctttcactaaat

SEQ ID NO: 163824 - DNA, 406 bp, Glycine max
  unsure (1)..(406): unsure at all n locations
agcttaacaaactntnttttatagtttgttcttgacctttttatctaaaaacgctttntaaaaagcttgagcttggcctttatagcaaacaagccaagccgagccgagccttacatatgccgaaccaaaggcccttgacaagctgctcggctcatttccacccctactcccaacgccttttcgttgacccttaactttgaccaatgtcacccatttcgaagaccgtcacactagtcttctcttcctccatctcaaggtgtccccaatggacctttctgctttttcatgggtgaattgtgcctattgtcattgccgaagaccaccacgacgtccatgtgtgcaaccaactcaaaaaaaagccacacacgaccncacgcagggccctagtgcgtgaagttcatgcaca

SEQ ID NO: 163825 - DNA, 450 bp, Glycine max
  unsure (1)..(450): unsure at all n locations
ttatgcaacaactgtactcagactcaagcctattgcttttgttatccatgccacngaaaaaccaccctgaggcgcttaggagtacataacacgacacaccatacaatgggtatgtcaggtcactctccactaataaaatcataaggtgaccactcacggtcactctatttcgcgagaatgctccaaccatatgagatcaacatagacttaaaggagcactcaaactgagtgtctttacccccaatgcctagaatccaaagaatccgctaggatctcaccttcttgattcaggtccaactcctaaaacaatttttttgcacgcacacattgctcatgaattatatcatacccacaaccttacactcgtgtctcaaacacgtttaacacatcgcgctataacttaacattggttcctaactaggaaacctacacttttcctttaatactacc

SEQ ID NO: 163826 - DNA, 426 bp, Glycine max
agcttgtagaatccagcccagattctcgtgttatatgctaacttgctcccatatctacttgataatgcaatggtagctctaacccctgccagggttcctcaaccttcatttttctgacgataccactcgaacgccacatgtgcatattatggaggagttctgggacatctcattgaacactgcatgaccctcaagcgtaaggtgcaaagtctgattgatacgggctggctgaaatttgagaatcacttgcgaattctatcattgacaagcgacaccatacatggggcaattttgaaagctgttgttagatgtctctaatgactcatcaggattctcacagttatgtcattattgaaacccacactacaatgctaaatgaaataaattcgacatctctgtccatcatcctctccgaattacatattc

SEQ ID NO: 163827 - DNA, 424 bp, Glycine max
tcgcctttcctaactcgcttttgagagcttggtcttctttttcctcttccggcgctacaaaactctctctgctgacgacttttaactcggcgagccaatccaaacctcttgctgaatccttgaccacagttgcaattctgctcaaagaggggagacacccggatgaaagatatggttttcttcccccgagaggacatcctagaatttcctcaaattcttcaatggttggcactaattggaagtctccgaatgtgaagcatctcaaaggctggtcgtagtattgggtgagtgatgcaatggcttctatggatacctctgctaaggtcaattctaagatctttccgtaagtcttgcggaaagcttgcatttggagacgttccatcaaccgccctaattccttgatgctggtggcatctaagctttt

SEQ ID NO: 163828 - DNA, 432 bp, Glycine max
  unsure (1)..(432): unsure at all n locations
tcagccgcggcatgcaagctctacatgtaataataaaatttcgttatatgggatangagaacttcagcacgtgatagaattagttagccgtaacacaattagttgggcagttatcttgccatgtatcattacctataaatactgataagcattgcaatacagggcataaaaaatataagtcgctactggaaggagtctccctccttctcacgaataagggcgtattctctctctcttcacgtgcagattcatcccaagaacacgcaaccccttccccgcctagtctctccaccgcgagccaacgtgcttactttgtccgctccccgcacaacccctaacagactgtggctcgccaccctccacaattcacgatcccacattggttcttgaatacgaagaacaactacaatgatgggaagtatttctacgtgg

SEQ ID NO: 163829 - DNA, 452 bp, Glycine max
ttgcttctacagataggttgggcaattcgcatctttttttatggcatcgaacgatagtctgtaagcgatctttgatttgcttgcaatactcgttcaatttcaagcaacaccagattctgaagagtcctatcatcaagctgtaatgctaacacacaaaacgaaaaaaagtcacattatgtgtcacatcaatattcatttgtgtcatgggaaattaatactaacctggacttgttgatgattttttataatcatagacaatgtcatcaaccatccaatgccaagtttggtcgcacacttgttcacgtttgttcattgttgccagtaaaagtaacaacacaaatagcttccttatataatgtgctgagccctagtcttttgcttctttgattgcctcaatgaattctctatcatcttgcacaagacccatagcacaacatgcctttctatatgta

SEQ ID NO: 163830 - DNA, 399 bp, Glycine max
aagcttaacctatcgtgttcactttctttatatttcggagccaacccaaggcttgcgtccgtgactctacccatctatgcgcagccgcccatgatccccgtaactgctccccctagctctctgtcctttgttcacaccgcatcacctgccttgcgaacttcatggagcacctttgcatcgcggccactgaaaccccgcgtaatgaaacgcgcgatgctttcctctcacggcgctcctctcatggggcagccaagctcgtttatggcgagcgacgggattataattaatacaactccttgttgcatccaaggaacacttggaccttcttcccatgacaacaaaatcctgattgtctcttccttctaccgagggaacccattaacacacgctcttctatgc

SEQ ID NO: 163831 - DNA, 360 bp, Glycine max
tgctcgcattcttagtgaacgaataccgagattgttgtttgttgcacccatttagcctcacattctttctatgcaacaacccaagagtccgatggcatgcggagccaacttacgcttatcccgacctcctcattcggagacctcaagttcgatgacacgcagagaccaatgcgcgaatctgcaccctttctcgagatgtcagcgctttccggtcgagacaattttagtcctacatttttgctatctggcgacctaagagctcggtggcttgcagagaaaccttacggttattagcacctcgtcatttggagaccccgagtctaatgacacgtagagaccaatgtggtcatctgcactctt

SEQ ID NO: 163832 - DNA, 373 bp, Glycine max
agcttgagaaagtggactttagtgtatgtctttccctcatcaaattttcaagtgatgatggtcatttaagctccctactttatctccacctcagtgactgtgaagaactaagggaattctcagcgacagccgagaatgtggctgaactaaattcaaccggcattctcatcagttcattgcccttgtcttttggaagtctacgacagctagaaatgctacatctaatacgtactgacattgaaagcttgccaacatgcatcaataatcttacaagactgcgatatcttgacttgagttgttgcagcaatctctgcattctaccgaagcttcccccattccttgaaactctacatgctgatgagtgtgaatcact

SEQ ID NO: 163833 - DNA, 368 bp, Glycine max
catcatgagaaagatgcgctaacctattatgctcaacattgtattcaccggaacgaacactattgatgttacaagtataggaaaacttacttggtgaggaagacacaatgtatatcgcaactctcaattcagctgctccaaccatcctcaatgaggatgggtcctatatacagcacccaccaggtgaaaacttatggaacaatgtcgattagtcaggaggtttgaaattgaaactaagttcaaagtgaaagaagcgaataacaccacatcagcaacgtaaaactggtcattacaatgtatagtgcctgctaaatcgcgttgaatttgacgtccatcacgtaatctaataccgataggtttgatttgtt

SEQ ID NO: 163834 - DNA, 421 bp, Glycine max
agctataagttcgtcccaaccttttgcttgttggacgctaatacagaatatctgtagttagcagttttttgaatgtttcaatgttagttcctagagttgtgcatgttgtcatttacgtgccatatttgtacgggtagtttcccatacggttacgtcttgcactgtctatatatattgcattgtaaactcacacttgaatatatgagagtttcatttctttatggttctctttttccctatgccacccaaccgccacctatacactctactacaccaccaatttaccttgccacgaccccacatctttttgaacaagccgtaatagttctcactataactactccaccgaccccaccactttcaccctctccctgtactgtacctaacacaccaacacctaccactccttcatacaataacc

SEQ ID NO: 163835 - DNA, 437 bp, Glycine max
  unsure (1)..(437): unsure at all n locations
tgcatgtggtcgggctaacaaaataatcatgcgttcttttgtattcaaagcctacgctntaggagagcattcctttcgtattttcttaacacacnatagctcatatttcaccaccccaaccttattgttttgctacacttaatagcacacaaaatttatttggcacatagttgcttctagcttttattcatcactataaataaacacacataattttattttattttgacaattgaaactcccccaaatttggggaaattgttcctgatccatgagtactctcctataaactaagatagagtgcttacacagtatcattcaactcaagtgtcaacatcaaattcattcacattatgctcaataacgtgcaagggattcattcattcactaatggcacggtggctatttcgctaagtagccaaaacacaataacaaca

SEQ ID NO: 163836 - DNA, 392 bp, Glycine max
tcgacccggatcttaagtcacctgagctgcagctcttgcgtacactatgcattggcttctttaccactcacgctgctctacagctctaatgcagaacctatgagctcaaaatcaagacagtctccatgtgaaatatgtcacaaaccacgagtcgaatcatgaagtcagcaaaactattgctctataactcaactccggaattctaacgagccagcattgaattagtgacacgaatactctaaaggaatgccactgcagatcaactactcgactcccgaatgaaaaagagaactgtctaacaatagacctatgctagatgtacataactgacaagacccacttttctctttgacccacaagcccgtataaacaagaaagacgccaaatatatt

SEQ ID NO: 163837 - DNA, 337 bp, Glycine max
  unsure (1)..(337): unsure at all n locations
tgcttgcgggacttctatggacgtttgttctttgatctctattgaacncgctctatggcgatttttcaccctggagaatcgccctatgacaccggagataatgtgataggagtgcctatccactcaggattacaccatgcgagaatgagcttcaccacatcatgagcctacgataacaagcttgtacacgatgctttattggatgtaaagaaacacggggagattgacagatggggagcacctaattgatgaataagcgacggagagaacgtgaactatgaattgcgtttacaagagtctcattcatacactaccacacgtattacacatgcttcta

SEQ ID NO: 163838 - DNA, 411 bp, Glycine max
  unsure (1)..(411): unsure at all n locations
agctttcctttctgggttgatgacccagtcttggtatgtgacccanaagatgatgcagttgccttcttggttattggctctggtagagccaatanaacatcttttcctttagtactggatcttcctcctttgctggaggagctagacaccttaggaggcatcgggaattttctgtaaaaattcacgagtgaggtagtcaggtagagagtttgaagagcccttgatatattctatgttaaaatcaaaggcgcttaaaattgcttgccatcttgcaaaaatttgttttgaggcaaggttttttacatccttttgtaaaatgtctttggctgatttgcaatcaacccttactaagaattnttgattcaataaatcagattgaaatttggaaatgcacaaaacaattgctaaaac

SEQ ID NO: 163839 - DNA, 413 bp, Glycine max
  unsure (1)..(413): unsure at all n locations
agcttgtgttaacatctgattcaaagaaggtttttttactttccttccaatactattagttgcgctcgctcgatcatacgaggcttgtccatagcatatccttnctccatcatttcaaggattttttttcctctactatgtcaagagctcaaccgacaggctgacatctaacaccaattgaagtacctgaaacacactataacggaggttgtgtaacgacccgcctcgtcgttacggtattcacactctaatattcgataatttcaattttttttctttcataaaaagaactccgttaatttctgcttatgaaaatagatgtgattttgttacaacatagattcatccaacaacacgccattacttaagtgaatatgcataactacatagaaacaataattcggtacatgtca

SEQ ID NO: 163840 - DNA, 411 bp, Glycine max
agcttgacgacgatgtctacgaatagaggtgtttctatgtgtgttgtatgagctgaagggaggagacccaagtgaatacctttggaaaatctatcgacaacgatgaggattactgtcttcccatgatataccaataggttggtaataaaatccagggagagatcctcccatggtcgcgaaggcacgggcaaaggacacaacaatccaacaggcctcttggtctcatacttggcgtattggcattcaatgcaattttctatgaatttggcgacaacttcccggagtcctggccactggaagttctcggagagacgagcaattgtcttcgcaacccctttgtggcctccagtaggcgtagcatgatactgctcaaggagggcaggaattatcagaagattccgcggtaaccaa

SEQ ID NO: 163841 - DNA, 347 bp, Glycine max
  unsure (1)..(347): unsure at all n locations
ttgatattgacaagtaagctacttgtggattacaggcttgagactgtaaccatacacaaatagtcanatcttactgagaatgtttgttaaaacttccatttgaaatccttaacaaatctaaagatctgcacaccagcaaaataatacattgagaagcacctccaactgtgtacattctctcttttcatgtacattctctcttctcatgcaatcctggttgactattgaaatattntgtttgaaatgaaagaacatagaagtntacctgaatatggtactccactgacgcaaattcatataagtgatgatcaatctccaggggcttctcagccctgtcatgacatgga

SEQ ID NO: 163842 - DNA, 364 bp, Glycine max
  unsure (1)..(364): unsure at all n locations
attggactaacacactcgccgctcaagtttcatggtcttgcacgtgaagatcctcataagcatcctaacgagttccatattgcttgttccaccatgaacgcccntgatgtccaagaagatcttatctttctaaaggcttttcctcattctctggagggagtggccaaagattagctctactcaccttgctccaggtctattttcaactgagatgaccttaatagggtgttcttggagaaatttttccctgcatctangaccacagccatcagataagacatttcacgcatcatgcaacttactggagaaagcttgtatgagtactgcgaaagattcaacaaattgtgtgcaagctgccctcacc

SEQ ID NO: 163843 - DNA, 414 bp, Glycine max
agcttattagacatacttaggctttgctaagttaatgctgttatggcttttgaaaatggttccaaaaaggagcttgagaaagttggtctaaaaatctcgaagagctttcctcttactaggactactctggcatctatggagtctttgtccctgccagtggtactgtgaacaccttattgtattttcagttttgagattgatcatgactttgtgtgtgatgcttgggttcttttgctgagaacaggttcaggaaattgttctttctgctgatatgcaatgtgagaagtgccaaaagagggttgctgatattattactaaaatgaatggtaagtaacttgcacatgattgtgaaattcagacattgttcattgattgcttttggagctctatagagaaataagagatctgacttga

SEQ ID NO: 163844 - DNA, 431 bp, Glycine max
gatgatatggtcttcaccgacgaaaggatcaaaatgggtctattaagaggcaaatctgatcatcatgctctgataaatgcaaaaaaaaaaaaaaaactatggcaaatgaagagggtgagaatgagggagaagcccatgttgtgactgccattcctatacagccaagtttcccaccaacccaacaatgtcattactcagccaataaacaaaccttcttcttacccaccacccaattatcgacaaaggccatccctaaatcaaccacaaagtatgtctaccgcacttccaatgacgaacatcacctttagcacaatccaaaaacaccaaccaagaaatgacatttgcagcaagaaagcctgtagaattcaccccaattccagtgtcctatgctgacttgctcccatatctacttgataattcaatggtagccg

SEQ ID NO: 163845 - DNA, 386 bp, Glycine max
  unsure (1)..(386): unsure at all n locations
agactttcttagaatgggtaatggccattagagaatatctcacacaagtcttctcactaagggagccttttgttgtcaaaggaagggtagtagcgcactacaactttataacgagtacgtagaatgaataccgagcattaggatccaaaagacacaaaggctaagttacgacttgcaaaaagtattagaatctagtaaccattaacataacatggttgatggttttccgttcgacacatcccacttctgttgagtgagttttaacacanagaagtttgatgtatgataccagattcatcattaaattgtttcataatgaactctgaaccattatctgagcgaatgatttttacttttgtatcaaatttcctttcaacaaatgcaac

SEQ ID NO: 163846 - DNA, 447 bp, Glycine max
tgagagggtggatcacatggagaatacagatcataatgaagaagaaaggacgagaagagggaataatggtgttcctagacaaaaccgaattgatggtattaaactcaacattcctccctttaaaggaaagaatgatctggaggcctacttggagtgagagatgaaaatagagcatgttttctcatgcaaaaactatgaggaggaccaaaaggtgaagcttgccgccatcgaagtttccgactatgctcttgtgtggtggaacaagctacaaaaggagagaacaagaaatgaagagccaatggttgatacatgggcgaacatgacaaggatcatgaagaagcggtatgtgccggctagttactcaagggaattgaaattcaagctcccaaaactaacccaaggaaacaaacgggttgacgagtatttcacggaaatggatgtgctcat

SEQ ID NO: 163847 - DNA, 411 bp, Glycine max
agcttgtgcaaataatacttagccttattgtatatctctgtagaaagcatgaatttcccacggcacgactaaaaattctccctccaatggaagtgacgacaaacgatgaatgaagaaaaaagtttaagggttaaaaagcatctgactcaaagacaaacaacagggaagggaagggatattgcttgagatcatagacaggacctgcagtatgtatgtaaattcgcgaatcataattacatatgattagtggaaaaagaaacgaaaagaagattagtcaaagatcctttggatgatcacatggggaagaaggcttggtgggccaagtagttgtgacttcaacagagaaaagcttacggtaacaattgaagaagttggaggccgaataagacactactcattcatgaatagacc

SEQ ID NO: 163848 - DNA, 372 bp, Glycine max
  unsure (1)..(372): unsure at all n locations
ccatgaatataagccagactggagtaaataattagagagcttatttctttattcgtgcataagctcaaaaaactcggacaactttggctgcatgccctggcatatctataatgtagcggtgcccaaccccatgcactacaaaaccaaagtcaacaaagaagtataccttntggccaaaatgaattgataattccataaaatttacccaagttacaacaagtttctttaaaatgccaaactcaaccatgtaatttggtacaacatattacaaagaaattcacgcgtgattaacagaacggaacttttgaacccacccatttgattcaataaagcaatgcttttaacttcanaggttaaaatcacataatacat

SEQ ID NO: 163849 - DNA, 410 bp, Glycine max
  unsure (1)..(410): unsure at all n locations
agcttaaagtatgcccgagtcattcatttctatgagatgttgntgaagtattggcgatcagaattgccattccttggattatagggttgaaccaagctcatgcttttacaaaaaggttcatcaagtcaagttgaaatatggaagtaaccgtcttgcaaaattggggcaaaagatgaatcgagtcacatcactgcttcgtctactgccaaacatatttaggattgttgatgtccttgttacttccagtttcaccttgacaaagatgtcatggaccatgttgaaaatctaaattgattcaaccccatatcctgcgtaaaaattcgcaatacttcaactgtacatcattcgcatacatccatgcttttcattggttgcattgctcattgcattctttccttgacaaataaaat

SEQ ID NO: 163850 - DNA, 464 bp, Glycine max
  unsure (1)..(464): unsure at all n locations
tctacttatgtggcanggcgagcctccgttacttatttgtattacacgcgagctttgaccactgctcttgcttaccgcgatgcttcttttcatgtccacctgagtgggcttatagcctaaaccatacttcccactattttcttgggcatttattaggctacctatgccgccgttgtctatgcgtaaacccattccgggttcataaacgttccccaacataactcgggccattattactgatgcatcagacacacaaggctgcccagagaacgagtccacagaggacatgctgaccacctcaaaagactggaaagcggattctaacgattcttatgcggctctcacataaggcatagaggatgggcagcttatcaagatgtcttccgtctctgacacgatgaccaagtgcccctacactacgaatttaacttttggtggagtgaggagggcacaacttccactga

SEQ ID NO: 163851 - DNA, 404 bp, Glycine max
  unsure (1)..(404): unsure at all n locations
agctatanaaattgctggtgagagtgattcttttctattgctagtcaatccacaatcttatatggattgtatcataagaaagaaagcaagtaatactatcacggttgctgcagattgtcctactaatatagataaagaacttctatttgtcctcttgaaaaatagaaatgttgttgctattgaccatttacttacagggatgatggataagaaaatatctttagatcataagggtgtctcaaccattattgaggtaaattgtagtcattgccgacctgaaggtgctttgttggctttcaagtacagtgttacaatgggaataagtatcgagagaacaggatatctctccttaataggctcgttgatcagatcaaatatgttttcaaagctggcggaaattgtcg

SEQ ID NO: 163852 - DNA, 284 bp, Glycine max
atatctgctaatcgaaatcctggcacagctattgatacttacattgtactgttcagtcttcggttttgttgctacaccacggaactctctattaatcgaaatctttattaattgacaaatcgaaacgatgcttaattgtgaattctggcaaagctaagatggtctcccgaacatggacaaattatctattaattaaaattctggcggaggggtaatgggccaagatgctgcctctcgcgtagagcattctgttgctgccttttgagtaaactctattcgatcct

SEQ ID NO: 163853 - DNA, 410 bp, Glycine max
agcttgcatgtccaagtctcttgtgccttatttttgatttcctttgattgatagtagacatgctacattttgatttgatagttcactaagattaatcttataaagattacctttcctattagtagtgaaaagttgggtcttatttttgggttggacgacacatccatctttgctaaaggaaacatcaagtcgattgcacataattgaattatactaagtagatagtgtgtaagccctttaacaaataatacattatcaatgggaggataaggataaatacttatttttccacccctattatcttccccttctgatttgaatgtacatttatcacttatcacaaaaaaaaacatgtaaaaagaataatttataaagacttgaagtcggtaagaaaaaataaatttctcgtc

SEQ ID NO: 163854 - DNA, 353 bp, Glycine max
  unsure (1)..(353): unsure at all n locations
tctcgctagatgaccatcttttctttcttggaacgtaccacaagatatggtacttccacacctttatccatagctttttcacgtctactcttctttgcattattactattcttttcttctttttcatttttctcattttccatttctttttctttgtcttgggccttcaattctttattcttgaccattatgtgttcctctttttcttgattactttcacctctcacctatttttcttgccatcaatacctttcttggtagcagttttcttcttatgcacaacactatccttattctcacgctccacaaaccttttactcctttgtatcacagnctagcattcctccttggga

SEQ ID NO: 163855 - DNA, 329 bp, Glycine max
cttaagtcacgcagctgcagctaatgctgagcggtttttttttattaatcccagggcccatgcctgcaaggaagtaaacatccttgatataaccccacggaaacattgacagttggaaattgcgccgcgagaggacaaacttatgataaaaatcgacaatcatgttattatattaatatccctatgctcgtgttctgctatgataaataatgattctcggtccctgatcaacgaagcattgatatgaccgagcctaagaggcatgctaaatgttagtagttatcaatccagtcataatgtacattccatctttgacatgtgtactgctg

SEQ ID NO: 163856 - DNA, 205 bp, Glycine max
gactcttttgaacaactacacacctaaaggttgtgacttttgaacaaagtcttcataaacaaggcactttaagaattgcgactttcgcgcatttacttctcgaaatcaatcactggtaatcgattgccatcaacgtgtaatcgactacacatcaacagatgtgactcttcatgtgcaaatctgaatatcaacacgcccacaaact

SEQ ID NO: 163857 - DNA, 408 bp, Glycine max
agcttctcaatatcacgcagctatgtcagcaaaattagttattcgtaggaaggagaacattttaagttttgtgtcattatattaattcaaagtaacactcatcaatagtcgttgatatatcttaataaaatcaataacttctcacattgataataatttaaattatttgtaatatttaattttacatattgaattaatatgaaggaaaaattattaaataaaataaatgtaagagtttacactaatttagtatctatgcacaaatttatttatttttataaatagttacattaagatatatttttggaaaaataataaattaaattcatgactctaaagttataatataatataatatgaaaataagcaaaaatttaaaaattatatatatatatatatatatatatg

SEQ ID NO: 163858 - DNA, 455 bp, Glycine max
tattacggaactataaaactaagctttaactgaattacaacgttccaatcaatttcaaaatggtgtaatcaattacaatatattggtaatcgattaccaatgtgttagaacgctgaaattcaaattcaaatgtgaagagtcacatcctttcactaaaatgctttgtgtaattgattacaatgatttggtaatcgattaccagcgataagtcttgaacaaaaatcaaaagatgcaactcttccaatggttttcaagttttttctaaaggttataactcttctagtgactttcttgactagacatgaagagtttatacaagcaagttcttaacttgcatttttaagacattaattacaatcttttacatcctttgaatctctttgaacatactcttgaattcttcttcttttcctttgccaaaagcttctaaagtttctggttttcaaacttgaaac

SEQ ID NO: 163859 - DNA, 412 bp, Glycine max
agcttacctttcttttcgaatcaagacttggggcatttcttctggaagtgtccaaatttcccacataaatgtcaattattgctctttgatgccttcttctgaatttgcacaagaccaccattgatctttattagctctttgcctttatcatgctttttcacaaatttctttctagctccttaattcctttggtgacttacataatggactgagtgacttccttgattcttaagcctcgtttcttcctaaactaacatgatgtgcaattcatgcacactccatttgtcttttatggtattatagctcatttggaatgggccatacttagacggtaatgagttcagaataaattgaataaggaagttctcattcacaaccattcccaaggtcttaagtctttctgtaatgtttg

SEQ ID NO: 163860 - DNA, 477 bp, Glycine max
  unsure (1)..(477): unsure at all n locations
gctcacattgngattgttcatgatgaaatggctttatacagtgaattattgaagggttgtggttattggctactgagtcatctttaaagggctgtttgagaactgcaaataagattcttaccagaagagatgaaaaaggtgttattgtcttcaccggatatctctgtattgcagcttcagtctttagcttctctcgctggttaatggagttttatagtgaagctactcaaaagcaatttccctgcaataacagcacaaaaattaaggccagatgggatcttggatgcctttatattaacattcaccatcactgttctcagcttccattgaatgaattatagtcccaatgcaacagctcttgaggactgngaattgggttgtcaaggatcaacattcaacagcaatctattaattntgtgtttgacttaatggttcagatgtgattctcaaagggtatggctatagctgttacatcct

SEQ ID NO: 163861 - DNA, 415 bp, Glycine max
agcttgctaacccatggaagctcctaatatctttcatttttttggggtgggccattcttggatggccttgattttctcagggtccacttggaccccatttctaccaactacaaaacctaagaaaactatattatctacacaaaaggtacacttctctatatttgcatagagggtgtttttcctaaggactgaaagaacttgtctgagatgtcctaagtgatcatctaggctcctactatacactaaaatatcatcaaaataaacaactacaaatctacctatgaaatcccttaagacatgatgcataagcctcataaaggtgcttggtgcattagtgagcccaaaaggcatcactagccattcatacaaaccaaacttggtcttgaaagcagttttccactcatcaccctttttc

SEQ ID NO: 163862 - DNA, 391 bp, Glycine max
ctcttgaccttgacttgatagaacctctttttaagtgaaggcatttgacttgatcccatgttttactaaagtgaacaaaaattggtgcgaatcaaaactccaacatttatcatgggcggaaatggatgaatgcatgaagaaatgcatatgacacaaatgcaatttacgaatacgggagcccgggaaattgtcttctttttagatacaacatcttgggggtagcaaagtgcccaacgtatgtatttaagaaggtgacacggacccttcgttggtttgttaaagagaggggatctagacagaatccgtgtgtgacacatatgcgaaaggcgcaacatagtatgacaatattcacaaaatataaaaaggtacatgacacttatgcatggcagtg

SEQ ID NO: 163863 - DNA, 411 bp, Glycine max
agctttgaataatgaaaatagcataacagaatgccttgcacgaatcccaaggcagctatttaaaaagagtcactcaaagtcactaggccctattacaatactctgacccaaaacgaaataaacactgaacaacataaaataaaattgcgaaatttcctaattagaaattaactaaggtaagcgctgctttatttgccctcttcaagtccacaactaaaatccggattaagcccaatgtttcattaattcctgaaattagattaaaaacatcaaattagctaaatgagcccaaataataaaactgcctaattaattgacaactaagaccaatcaataattaaaatggtgcaaaaagggtttagaaaatagaagaaaatgatggcacatcagcatgatccgcacccgtctccc

SEQ ID NO: 163864 - DNA, 240 bp, Glycine max
atcaaatggagaatagagatcatcctgaagaacaactgaggagaatatggaatgatggtggtcctacacaaaaccgaatcgatggtattcaactccacatttctctctttaaatgaaaaaatgaaccggaggcctgcctggagtgggagatgacaatagagcatgttttctcatgctacatctatgaagaggatcacaatgtgaagcttgcccccacggagttttaccactatgctcttg

SEQ ID NO: 163865 - DNA, 411 bp, Glycine max
  unsure (1)..(411): unsure at all n locations
agcttctagattcatcctaactaaccctaacttatgttaaacaactaacagaaaggtatcctagccttctaaccccctaatcatgctcgtggcttttctcgacatgcctcacatgttccattctgcatggcttctgacgtanccttctaaatacgttggggtggacctttcccttcgtggtctagcactccttgcttcctgcacctcccttgctattgacaccccttccttcatctttcccgtaacactcccctgcccttcaagcagcaccttatcctcaaggtggtggatgttcttcaagcttgaccagtcctcccatgaggtttcttctggtggtagcccttgccactggactaagaccatatgcttgggtccggtctccgacggaatgactttagatgctacaatggc

SEQ ID NO: 163866 - DNA, 420 bp, Glycine max
agcttatcaaactcgagaaaatatttcaaaattatcttaagtgatcataaacaaattcaaaggaaacatggagtaatagtatatagttctttataattttccactcaagtgtgtgatgcctttgaagctcttaaaatagagaccacaaagctccacattaaaaatgaggaaatttgtaaagaaaaataaatctgacttattagaagatcttcagaagttggaaaaccaactagaagacttacaaattgagctaaaacaactcaatgaccttcatgatcacctaaatgaagaaagatatgatctatggagagaatgctcacaagcttatcatgattaggaaaactaggaagcaagtaaacataatctatggattgaatgtgacaattacaaaaaaaccttaaaattcttgaatgataagct

SEQ ID NO: 163867 - DNA, 333 bp, Glycine max
  unsure (1)..(333): unsure at all n locations
catgtaggcgtgagttgtgagatacatctcgcgatattattctacctgccccagaaacctcgaacccgcttctgcgtgcgtggttccggcattacaataatggccttcactttctcgggatctatctctatccctttctgacttacgataaatcccagcaaccttcccgactctaccccgaaggacacttggttgggtttagcttcaattggtatttccgcaaccttttgaatagcttacgcagattgacgaggtgttcgtcctcagtctgagattnggcaatcatgtcatctacgtagaccactatttccttatgcatcatgtcatggaaca

SEQ ID NO: 163868 - DNA, 409 bp, Glycine max
agcttatgaatgtttatttttgtttgcttatagttatggcctaaatatttatgccataaggaggcagatttctcatttaatttacgccttgcaccattatatttgttgcaatactacgttataggaattatcaacaacaaatatttacaaattatcaattaaaaaacaaaaatcaacactatttaatcatttccaaataaacaagaataaccaaattggtcccaagtagaaataaaaatcaaattttgtataaacaaatgtgcaacatatgtctcgaataattcaagagaaaaaccaatctgtaattgcactttaaaagttcgtataggtcctactacaactttattgtcgttgtctatgtagatacatctttcaacatcacttggtggataattccagagataaccct

SEQ ID NO: 163869 - DNA, 427 bp, Glycine max
  unsure (1)..(427): unsure at all n locations
ggccactaatgaatgcttctacatgtgatgtaagaacaattagatgatgtgttatggatacttcagcatgtctggttaatgataaccaaatattttcccatgaataanaacccactcactggtcagggaaaaaaaatgataaaaagccattattatattcagcaaacaaagaaaagagataaggaaaaaaaatcccagcttagaaatagttaattattcagctaagtaatgatagtaatgatgtctacactccaaaaggttattaataagtaaccatttattattcctaaactattatatacatgagaaaatagtgtatgcagtgattgtgtaaagggaatttacaatgtcatctaattacaaattatcatgtatggtgagtttgttgacttctacaataattacctttacagtcatacccataatg

SEQ ID NO: 163870 - DNA, 407 bp, Glycine max
agcttaggagagccaacggttagaaaaatgcttttaattacttttctgccctcctctctaggtattttccgcattctttaccgaaacatcgaataatctttcgtcttgcgcggcaactgatgtcgaacagctcaattcggctagcgagaatcaaaacgttagcgaatgatagtccctggataaaattaggatctgacataggtaaaaggtgttagctgaaccacattaaattcttgtgtttgttattatttttcctacgatataatatttaatgtgttctcacgatcctttatagatatgaataattttatttaagggactattgattacccaacaatcttaatattatttttgtttcacaacatttggtagactagagaatataatatcattccttgcaactttct

SEQ ID NO: 163871 - DNA, 410 bp, Glycine max
agcttgaccaatcccgacccaacccggtctttgtcagtcagtgagaacctgtgatgtacctaaacaggcgagctcctagcagtcaacagataaaaggaacaaagaccacaaagcaaggaggcttgtgtggtggctggccagctatgaattttgattgatatatgggatatggcctctggtaatcgattaccaagggtgggtaatcgataacaaggcttaaaaatgaagataggaggctaagatggtctctggtaatcgattaccaaggggtgtaatcgattaccaggcttaaaaagggaactggaagattgtggaggcctctggtaatcgattaccagtctgtgtaatcgattacacagaggaataggtcactggtaatcgattaccaggtatgtgtaatcgattacaca

SEQ ID NO: 163872 - DNA, 416 bp, Glycine max
  unsure (1)..(416): unsure at all n locations
gctcggagaggatgcttcantggaagacaagaaagacgatatattattagagggggggcggcgccttaacgaaacgacaaactttcaagcctatgcacaactatagagcttttaaaaccgtagacgttaacatcatgctcgttgcgtaaatgccagcgcgtttctccactcgccaatttcccatctgaaaatcaggagggcatggtccgacaaaatcaaatgtactgggaacatcatcttcgcatatcgcgaccacttgacctttgtctctcacacccgcgcttataaagcttctacttatgtggcggggcgggctnctntcactttcttgtctacaacgcgagctttgaccaccgctcttccttccgcgatgcttctcccatatccgcctgagtgggcttgtagcctaaccatac

SEQ ID NO: 163873 - DNA, 411 bp, Glycine max
agcttgaagaaagagtcatagacgcttgtatatattctataatttatagctggtaattgcagtaggtatatattattgaactcatcacctcacgaacgaattctattaattattttagtacggttaattctttggacataaaacataacatgcatttgaaggatcaaatcactataaagtaaaataaaggaggtaaataaggagaaattgtttgtctttgaaggacataatgagaaattgttaagaaaataatcaaatactactgcccagttagatactttgacttggtgcccaacagcaattagagtgcaacgacaatttctattttgacttagtgcgcatgtgcaacagcaattatatagctttcaacggtcaaggttctcactaccacattaactattgctgcccaag

SEQ ID NO: 163874 - DNA, 471 bp, Glycine max
  unsure (1)..(471): unsure at all n locations
ctaagcttgcagtgtattgactgtctattgacgattctctcttttttatttctttatctttctgccacgggagttccactangtcccatgtcaaccctctaacatggcaactaaaaaatatgagttacgtaacgataggtcattcaagtcttttttctaattgaatccagctagtatcactttcgtacagtatccttcttatcacggtaatgcgaagcgatgaataaatattattattctaatcttgctttgtgagtcgtactttatatatgcaacttaacttttatcataaaaaatagataaattgtatttattaaatacacgctatgtatcttttcttaaaaaataataatagggctaaataattaattctttctttcatttgtactgtctatcaacttatattcttgcaactttagattcgatatataatatctcataactatatatataagcgcgactctggtctat

SEQ ID NO: 163875 - DNA, 414 bp, Glycine max
agcttcaagaaaaagatggcctcagctttttctttatttccagaagggaattctatcaatagacctccaatctttaatggagagggttaccactactggaaaacccgaatgcaaatttttatcgaggcaatagatctaaatatctgggaagccattgaaatagggccttatatacccaccacagtagaaagagtttcaatagatggtagttcatcaagtgaaagcataaccatataaaaacctagagatagatggtctgaagaggatagaaaacgagtacaatacaacctaaaagccaaaaacataataacatctgccctaggaatggatgaatatttcagagtttcaaattgcaagagtgctaaggaaatgtgggacactcttcgattaacacatgaaggaactacagatgtt

SEQ ID NO: 163876 - DNA, 287 bp, Glycine max
  unsure (1)..(287): unsure at all n locations
ggccacggacaacgcacacgtctcttttttaggttctttgactcttgaatatatatcatctgtcaaatcagtagaatcttgggtgctttgtaaatcttgcgaactctctgcttcaaccattttcttttttagtttatcctacataaatacaccttataaattattatcatacatcaatatcctgaatacttcaatatcactaaacaaaactcatctccacattagttactccccctcaacccataaccttctattagaaaatngagccaaacaaagaaaaagtattg

SEQ ID NO: 163877 - DNA, 402 bp, Glycine max
agctttaaccccttttaaatgattgctttattaaaataaataagataagggaagagagaattgcaaactcgatttatactggtttggccacttcccgtgcctacgtccaatcctcaagcaacccacttgagatttttcactatatctgtaaatcctttacagactttgaacaaaccttgggatccctcacccttgtgttcaagattctccaagagacaacccgtttcttgattacaattctcacaatccaagagacaactagtctcttgattacaactgactttttgagatgaacaaaaaaatttttctcctttagagtggatgatacaaatttaagattctagaggaatttctcttttttagagatgataatacaatttgaagttcctagatgaattctca

SEQ ID NO: 163878 - DNA, 257 bp, Glycine max
  unsure (1)..(257): unsure at all n locations
tcaagaataatcaagaatcaagattcaagaatcaagaaaaggctcaatccagatatgtacaaaaaactttttcaaaacattgagtancacatgaagtttgcacaaaagcttttaccaaagagtttttactctctggtaatcgattaccagtttactgtaatcgattaccagtggcaatctttgttttcaaaaaggctttcaactgaatttacaacgtctcaattaattttacaatggtgctatcgattacaatatat

SEQ ID NO: 163879 - DNA, 383 bp, Glycine max
  unsure (1)..(383): unsure at all n locations
taacaatgggctcataagtaaggctgagttgctagataaatctcgcgatataattcaacctgccccacaagccccgaacctgcttctccgtgcgtggatccggcatttcaaggatggccgtcactttcttgggatctatctctatgcctttgtgacttacgataaatcctancaacttccccgaattcaccccacaggtgcactcggctgggtttagtgttaattggtatttccgcaatcttccaaacagcttacgcacattgaccaggcgctcgccctcagtacgagacttggcgatcatgtcatgtacgtatacctctatttccttatgcatcatactatggaacaacgccaccatggcccgctgataggtttgctcaaca

SEQ ID NO: 163880 - DNA, 407 bp, Glycine max
  unsure (1)..(407): unsure at all n locations
gctttctgtacctaaccccccttttttcatgattcattctgaatgctnngaagaacatagtaaagactagcatatgtactatgtatgaacagttttagacagtaggttttctaagctatccttgagtaatatatctgttttccaagattcaagatggaaactgtacaatcatggatggttatgctacgttaaggggttacactcggtgcatgcttggattcacattgaatcatccaaaatcacattgagatatcaaataatgttattttaaataaatatttacatgtttggtctcacttagaaaaattgattatgtattcaaaattaattgagttgaagtaattttaaatagattttgtgttgaataatattaataaaatttatactaagttttattgttaatttat

SEQ ID NO: 163881 - DNA, 464 bp, Glycine max
  unsure (1)..(464): unsure at all n locations
ctatgtatgacacaacttcattactggtgttattttatacaagtgagcctgtaacaaatcttctacacttggagtgatcacctgccagtctcttgaacccttaccacccactctgtcatcatgccgagactcaggaagccccacaggtttagccttctctaagtattatgaacaaaattcaatggcttcttctgcaatgtacctgtcaacaatatatgcttctggacgatatagattctttgtataccctcttaagatcttcatgtaccgctcaaccgggtacatccatcgtagataaacaggaccacaacatttgatttctctgaccagatgcacaatcaagtgaatcatgatgtcaaagaaagcagggggaaaatacatctccaactggcacagtataattgcnggctcattnntcaactcatcanacatgactggatcaatgactttgctacatatagaat

SEQ ID NO: 163882 - DNA, 437 bp, Glycine max
  unsure (1)..(437): unsure at all n locations
cctacagtgacctgcngcatgcaagctagncagcttacatagcttcaaaaggctattaagtagtatatcaaacctgcgccatgcaagttggtatttaactataccagataccaagtcaagtcaagcttgtcagcttccaaatctttaaaaaaaaaaaaaacataaagggcattaggagaatgatccttgaacctctcgcaccctacgcacgactttttggcttatgttttgcttttcttatggaaaaggagaaactggccaaaaatgttttttcattagaataaatctattttactaatatattttattttcataaaagtttttttataagatgagataaatatttttaaacaaaataaaaaaatttgaattgttttgccaaataacttttgagtaaaaaaaaaaggccaaaacacacttgagatggaatgacattg

SEQ ID NO: 163883 - DNA, 409 bp, Glycine max
agcttccatcttcctacaccactttgtcagtctttttatgttatccatcaacacgtcacttattttctaattagtgaacatagtgaataattatttaaatgtcatcatgcccaaattttttacctttccttatgacataggagcaaaggaaaaatcataacagcggagatgaaaatttctgtcactctgcggaccaaatggctttgcatgaacctttttctttactttaacattatcactcatgattttctcttttgaatttaaacttgatagctgaaaattatatattccacatataaatatcctggtgggtcaatggcataaatgtctctttcttgcatatggacaaaggaggaatcaaagttgtaaagtttaagggaccagaaagctttacatgctacatcagaat

SEQ ID NO: 163884 - DNA, 433 bp, Glycine max
gttctctggaaacaaagctagtgagcatctgagtttatgaagttggtgggtattgtataactttgtgagtaagtgggtttgaattccatacctacgtggataagggattcgtggccccagtagcagatgttacaaatggaagatcagcttcaatgaacgaggaacaaagaagggaagctgtaaagactgttgttggtgaatttactgaagtcaaacatgttcggggtattctttccatgggaaggttaggtctctctatacagcaactgatggctgtagctccattatttctgcttaagttcttgatttcatgccattcttgtcactttcttgtttgtcattaagctgcatttatatatgggttaacaacttattagctattagttccaatctgtgctacatttcgtttgagttcacattatattctctatgc

SEQ ID NO: 163885 - DNA, 413 bp, Glycine max
  unsure (1)..(413): unsure at all n locations
agctttgagcaaaatcaaacgacaataacttttgattcggatgtccgaatgaatcccgtaatacatcaagacgcatctaattgataacggaagctttgaccaaattcaaacgacaataactttctactcggatgtctgaatgtgccccgtagatatcaagacgctattaattgaaaaccgatgctcgtagcaaattcaaagaacaataaatttttacttggatgtccgattgtgtcccgtagtatatcaagacgcttgaaatttagaacagaagctctgagcaaaatcaaacgacaataacttttaactcggatgtccgatggaatctcgcaatatatcgagactcacgaaattgaanatagaagctctgagaaaattcaaacgacaataattttttactcatgtctaactgt

SEQ ID NO: 163886 - DNA, 358 bp, Glycine max
  unsure (1)..(358): unsure at all n locations
tgacatctcanacctacacatcagacgtaccctgacacttatggtctgctgtttgaatacctcacccactcaagtgtatcacacaattatggcttttctctaatgaaacactcttgccttttaccactctaattgcgcttgagttattacgtaattcaagagattatggccacaacaaagaacaattcaccaatatgtgtaacgtaaggctatagagacaaggaccaggctaaccaagacaaaggctaacaatgtttttaggcacaaatgaaggaaataaaattcacaacttacgaattccagtgacaatccttcatgcaaccaatatattaccttaacgagatttggtcttaagtct

SEQ ID NO: 163887 - DNA, 412 bp, Glycine max
agcttgtcatcatgagacattaagtgcatgtattctattagatgtgggtagggaaaattcacctaattggtagagaaaaatataaaataatacatcttaggcaaataagacatgctatgtcctaacattcccatctcattgaattccctattatttcctttgtcttctattaatagcaattattttatatcatgttcttttaaactcatcttttatacgtcatctcatcttctatttttatgaattaaaaattatccaacacaaatacaaaacaaagtctctgtggaaatcgacactcagaatttcgagtctttactacttggacatttttggtacactttccaaacggttaacacccacgtaccgcatctccagtacgtgcctactctacgagtgacactcatgcaaaagt

SEQ ID NO: 163888 - DNA, 446 bp, Glycine max
  unsure (1)..(446): unsure at all n locations
cactatgaaactcagcttggacattcttgggttccagacttaaccaaattatttaacttcttcttaaccagaattaccactgacatactaaagtgctccatttgcattntgtatgaatttaccattatggtgcaaaataagagtgacttcatcatccatcctatagataaacataaacatcattatttgtattttcacaaaccctatttatactcaaaattagtaacgaaaaagtaaaaatacaatttcgagaacccaaatataaacctccaaatgaaacatcattaaaaaaaaaggaacacaaagccaaatgagaaacccaaaaaggaacaaacactgcacgaaaggaaaggacttcttctatggccaagcaaaaatgacataaagaatatgcagaanaacaagtgaagaaatgtgtagaanaatgagtgaagaaacgtagaaat

SEQ ID NO: 163889 - DNA, 409 bp, Glycine max
agcttgtagactataccttcgaccgaacactgtcgtgtttctgtctaggcccgggttcaaggcgggctgcagcaccggctccgcttccctaactgtactggaggcggttgcggtggctttatcctctatggttttctgaagttttaacatgaccttcgagatggaagtcatttgatcttttaaggccgatagatcggccttcatctgttcctgcacgccctcttcattatccatttttctggatcgagtgttataggggtgccttgatgttttcttagttatgatgaaattcctaaagaaataaacaacggtgagtatgctaccaaaacatgagtatgcaaatggatgatcggagcacttggatccaccccaagattttagataacgtaatgagtctagaacttctcat

SEQ ID NO: 163890 - DNA, 348 bp, Glycine max
atatgtgaagacgatgcctcagcaccttggatttggtacgaccatgccctcctgtttagcatctgggaaagtggcgggtggaggaacgcccggggctttactgcacgagcataacgtcaaccttcactgttctaaaaggtatataggagggcctaggctgtacagatctcatttagttgaagctttgtgtcttcagactttgaacacattgaacatggatccctcatcatcagttactgagctctaaccattgtcattcatttgcatgtctacttctttttgtgaaacagcagatctcatgacaatgaccccgaatgcactaatacctgtgacccgtctatcaacttg

SEQ ID NO: 163891 - DNA, 411 bp, Glycine max
agcttggagaggattcttcaatggaggatatttatatggagagaaagagagaggggggagcacgaaattgaaggaagaaaaagagagagaagttgaactttgagttgtgtctcacaagactctcattcatcaaagttacaacaagtgttacacgtgcttctatttatagactaggtagcttccttgagaagctttcttgagaaaacttccttgagaagcttctttaagaaaacttccttgagaagctagagcttagctacacacacccctctcataactaagctcacctccttgagaaactttcttaagaagattcctaaagaagctagagcttagctacacatacctctctaatagctaagctcacttccttgagatgagaatctagagcttagctatacacaccctata

SEQ ID NO: 163892 - DNA, 461 bp, Glycine max
tcatctaagaacccacaagaggcacaacttttaaactttcttttgagtgaaattctaatcttattcaaatatgcccaaatgcaataaagtacaaggctatttataggcaataattagtgcccccacttaataaggctgatggctaaacctaactttaaagaagcaaaaacaaagacctaagtaagcttagggcccaaattacatcttaaactaaattcaaaagaaacttattctaatgtttgaaattggactctagtgtcataacaacctatttattaaaattaaaattaacaattcaaaatgcttaaataaaattaaaaataaatcatattgcaagcccatagttggcacattgttattccacttggatcaaatgtatcttggactcttctttttcactcttggtttgagcttgtaggtgttgatcaatttttcaaacatctcttctgctttcttagctc

SEQ ID NO: 163893 - DNA, 414 bp, Glycine max
agcttgcatggattaatagcaacaaatacttatttattgttgaagaggataaattgatcgtaataataaaacctcaaagagagttgtgcttgatcctcaagagaaaacaacgttggatacttagccttccattaatcagtagaaaacgaaattgcagattgaagcagaaaacgaaattttattgctaggtgaatagtaaaaactggaattgcaaaacctaaaattattctttctccccaaaacgaaaagagagctctaaaactaaaaccttggtgctgttatataggttctcagccccaaagcttacaaatctattttaagtccaagcccataaataaaataaaatctgggcaagataagataagatttgatacaataaaatctagatgaaataaaatctagataagataagat

SEQ ID NO: 163894 - DNA, 194 bp, Glycine max
aacccatactgacagcatgagatcaccttgctactgattgcgatgctctagaggtggaggaaacatccacactactcgtatgtcttccaacctgcatgtgttctcttctctctgttgccaaggaagcatcccatatgcaaagagctatcactgttgctctggcgcaagaatctgatgctaatctctacagctct

SEQ ID NO: 163895 - DNA, 330 bp, Glycine max
agcttgaattggaattcaatgtgaaatgttattattattttaatttcccgagagcttccgttgttcattttccagcgtctctatatgtgatgcgccttaatctaacatccgtgcgaaaagttatgaccatttgaatttctcaagagcttccgttgttcaattttgagcatctcgatatgtgatttccctgaatcgcacatccgtgtgaaaagttatgaccatttgaatttctcaagagcttccgttgttcaatttcgagcctctcgaaatattatgcgcccgaatcggacatccgtgtgaaaagccatgaccatgtgaatttcgcgagag

SEQ ID NO: 163896 - DNA, 407 bp, Glycine max
agcttcctcggggccattcctgcgaatgcaatcatttggaaagttagttttaccagtgggacgttactcttaaagcaaaaatggcatataacctcctcccataaatacaaacatcaatgtaaatttagagcaagcttatgcgcatatttccttacaaatgttctcttgcacaagacattctattaaccgaaaaaatgcacccatatacaatcaaggcagctccgttacctagattatttacacgtacttccaaggtgtatttgttacttacatcacacacatctccttggctaaattcacatacatgcatactcaaagcattttggggtaccaaaaaatgcacatgtacacctcttggtatttctaatacctatacatacacaaactttatgatgaatcttgactat

SEQ ID NO: 163897 - DNA, 292 bp, Glycine max
tggatgccaattcttgcttagtgatgggtgagttatactcttatcctcatcttcttcctttgctcttcatcttgaaagctcaagaagctcacttctttaatagatctctataacaattgctcctgtgtattctttgtgaccaccactattacaataaagcattctctagtcagttatttggtccattccacgatgggctttgaaccgacttataatctgaaaatattttttttattttaaatatgtcaaaagaaagtgatgattcgaacatggctgtgcaaataactatttt

SEQ ID NO: 163898 - DNA, 411 bp, Glycine max
agcttgaatctacacatgaaatataagatgatttatttgcacaaaagagaaagtttgctaacaaaaattatcatgcaggtggaccttctcttagtaattctgacttaccgcaggctcttatcccttttccattcccacctagagcaattccaaacaaaaaaatggaagaagcagaaaaggagatcttggagtccttcacgaaagtagaggtgaacatacctgtgctagatgccatcaagcagattccaagatatgccaagtttctaaaggagttgtgcacccacaaaaggaagctcaaaggcagtgaaaggattatcatgagcagaaatgtgtcaccattaataggtaaatctgttcatcacattcctgagaaatgtaaggacccaggtactttctatataccttgcatta

SEQ ID NO: 163899 - DNA, 312 bp, Glycine max
tgtatgtaagctggaccgatggatcatgatcacaagttgtgtattattccacacattacagtttatcccttttatcttagtgagagtgattctcctcagttcttgagtgattcaagaacaccctggctatatcaatgggctttcacaacctttgcgtgttgccttcgccggatagagtgatggtattcttgatttcatggtcgaacttgttctttcgaaccactattccagaaaatccacttctgcccacaattatcttatggtcataactcccgtgttacgcactctaatcatgtgaggcttgagcctata

SEQ ID NO: 163900 - DNA, 412 bp, Glycine max
agcttcaaaattcaatttcgatcgtcttggtataatatatgactcaatcagacatctgagtaaaaaagttattgtcgtttgaatttgctgagagcttcaacattcaatttcgagcgtctcgatgtattacgggactcaatcagacatccgagtaaaaagttattgtcgtttgaattagctctgaggttcagaattcaattttgagcgtcttaatagattacgggactcaatcagacatccgagcaaaaagttattgtcgtttgaattagctcaaagcttcagaattcaatttcgagcatctcgatatattacgggactcaatcagacatctgagtaaaaaagttattgtcgtttgaatttgctgagagcttcaacattcaattccgagcgtctcgatgtattacgggactca

SEQ ID NO: 163901 - DNA, 369 bp, Glycine max
tctattgagacgcttgaaattgaattttgaagctgagagctaattgaaacgacaataactttttactcggatgtctgattgagtcccgcaatacatcgagacgctcgaaattgaatgttgaagctctcagcaaattcaaacgacaataacttttttcctcagatgtctgattgagacccgtaatatatcgagaccatcgaaattgaattctgaagctctgagctaattcaaacgacaataatgatttgctcggatgtctgattgagtcccgtaatacatcgagacgctcgaaattgaatgttgaagctctcagctaattcaaacgacaataacgttttgctcggatggtctgatgaagtccgtaatcta

SEQ ID NO: 163902 - DNA, 413 bp, Glycine max
agcttataacaaatataccttttaaatataatattgttcataccaaacatggatgaaatgattatcatcctagagatctgggtagaatattacattataaagaaagagaattcatcaactcatggttcattgagacaggagaaatcaccattggtgttaaagtattgtctatgctagtcatctcatctgtgctattgtatagtttgtttagctaaagttagttactgctgtaaagttttcattgcaagctagctctagcctctagtatataaactgattactgatctgttctatcagattgtaatgagaagaatcattatcaataacagaaaatagattcagattctattgctgcaatctctctttttcactctagaattcttttaatcgttaagattcattatagggaggct

SEQ ID NO: 163903 - DNA, 462 bp, Glycine max
ttgggtgtgtacgccttgtttcgttcatgactatttcgttgatgaggatcttcctgaaaaggaggttggagatttccatgtggattaggaagatgaacgagagaggcatgattagtgttgaggtgattcgcgtgaacattttcctccctgacagtatgatcttagacgcttctttgtatatgtcaaagaacccaagaaattgcatctcttcttgttctctgtccatgatggcctctgaaaaatttgtttctctctattgaggttttggtttggaaaattgttgacgtggttggctcggtgaagatgagcaacgacgacgttgtgttggaaagaggatccatgaatgtgtcaaggtttatacaaatacatatgacttcgacttgatgcacacattgccttagtctcaatgaattgctttgtgaaagcacacactactcttctttctcttgctcataatatgac

SEQ ID NO: 163904 - DNA, 415 bp, Glycine max
  unsure (1)..(415): unsure at all n locations
agcttgagaaccacaaacacctggncttcggtattattttaatcaactttaaagatgaatctaaaataaatctatatatatatatatatatatatatatgatctttcagggtcaaataataaatcagacagataggagtaatatgatagcaagggaattaatcattatttttacttatttgtaaataaagataactacccatcagattcagacttcagtccactcattaaatgttaagaaaatgttgaaacaaacaatacttgtctcatcaatcctgtgcattaccataggaggttttccattttcggaggattacaagtcaagagaaacacctacctcttgaaggtttgggcagatcagtattgagaacagcaggattgccccgggtagtgtacaaagtgaaggagaggaatgc

SEQ ID NO: 163905 - DNA, 422 bp, Glycine max
  unsure (1)..(422): unsure at all n locations
gaacttcaagtgtctggcttgtctgaattcctatactgccctagttgccaggataaatggctctgcttaatagccaactgtgctcctttccctttgtgcactattccaatagataatgtggtatacactgttgtcagcatgaaggctttccagtttaactganaaagctccatgatatctgattaaagatggtcgcccctttaccttcaccctttctgtccatctctnttatgttcttcgaattcaaatgaattatttaattctttgcttatttgtttattgattcataattttctattcctcatattactcgtgtccttgcagcatgtgcccaatggtcatgtttatgtgtcggcggataatcgtaacaatagttatgactcccatgtgtggtaagtaactactgctacctacatgttact

SEQ ID NO: 163906 - DNA, 413 bp, Glycine max
agcttcaacaatcaatttcgagcgtctcgttatattactggactcaatcagacatccaagtaaaaagttatcatcgtttgaattggctcagagcttcaacattcaatttcgaacgactcgatatatgatgggactcaatcagacatccgagtaaaaagttattgtcctttgaaatggctcagagattccacattcaatttcgagcgtctcaatatattacgggactcaatcagacatccgagaaaaaaattattgtcgtttgcatttgctcaaaggttcaacattcaatttcgagcgtcttgatatattacgggactctatcagacttccgagtaaaaagttattgtcgtttgaatatgcttacagattcaacattcaatttccagcgtctcgatatatgacgagactcaatc

SEQ ID NO: 163907 - DNA, 381 bp, Glycine max
  unsure (1)..(381): unsure at all n locations
gacactcgaaattgaatgttgaagctctgagttaattcaaacgacaataactttttactcggatgtctgattcagtcccgtcatatatcgagacgctcgaatttgaatgttgatgctctgagccaattcaaacgacaataaatttttactcggatgtctgattgagtcccgtaacatatcgagacgctcgaaattgaatgttgaagctctgagacaattgaaacgacaataactgtttactcggatgtctgattgagtcccgtaacatatcgagacgctcgaaattgaatgtggaatctctgagccaattcaaacgacaataactttttactcggatgtctgattgagtcccgtgncatatcgagacgctcgacattgaat

SEQ ID NO: 163908 - DNA, 408 bp, Glycine max
agctttgagcaaattcaaacgacaataactttttactcggatgtctgattgagtcccgtactatatcgacacgctcgaaattgaatgttgatgctctgagcaaattcaaacgacaataacttttaactcggatgtttgattaagtcccgtaatatatcgagaagttcgaaattgaataccgaagctctaagcaatttcaaacaacaataactatttactcggatgtccgattgagtcccagaatatatcgaaacactcgtaattgaatgttgaagctctcagccaattcaaacgtcaataacttttaactaggatgtcggattgagtctcgtaatatatcgacacgctcgaaattgaatgttgatgctctgatcaaattcaaacgataataacttttaactcggatgt

SEQ ID NO: 163909 - DNA, 310 bp, Glycine max
  unsure (1)..(310): unsure at all n locations
ggatcaaatggagaatagagatcataatgaagaagaaaggaggagaagagggaatgatggtgttcctagaccaaaccgaattgatggtattaaactcaacattcctccatttaaaggaaagaatgatccggaggcctacttggagtgggagatgaaaatagagcatgtattctcatgccacaactgaggaggacaaaaaggtgaagcttgccgccacggaattntccgactatgctcttgtgtggtggaacaagctacaaaaggagagagccagaaatgaagagccaatggttgatacatggacggagat

SEQ ID NO: 163910 - DNA, 412 bp, Glycine max
agcttataatatatcgacgcgctcgaaattgttatttgaagctcttgagaaattcaaatggtcataacttttaactcggatgtccaattcatgcgcatcacatatagagacgctaaaaaatgaacaacggaagctctccagaagttaaaatggtcataagttttcacaacgatgtccgattcaggcttgtattatatcgagacgctcaaaattaaacatcgaaagctctcgagaaattcaaatggtcataacttttcactcggatgtccgattcaggcgcatcacatatacagacgctcgagtatgcacaaaggaagctcttgagaaattccaatggtcataactttttacactgaggtccgattcacgcttaaaatatatcgaggcgctcgaaattaaacatcggaagctc

SEQ ID NO: 163911 - DNA, 447 bp, Glycine max
tatgcgcatatttacctacgaacgttcacttgcacattatatgctttaactaagaaacatgcacccatatacaatcaatgtagcctcattacctatattattcacatgtacttccaacgtgtatttgttatttagatcacacacgcctgcttggctaaatttacatacatgcatactcatagcattctggggtaccaaaaattgcacatgcgctcatcttggtatttccaatacctatacatataaaaacttcatgatgaatctcgactacctacgcaataaagtgctacattatatgctttgttttttcaagtttttgctacctaaagccacatgaaaattcaagcatattcttctttgctgacttaaattgtattcagacagaagggatatacttatttgtaatatgtactcttcacataacatgcaacacattcatatatattt

SEQ ID NO: 163912 - DNA, 410 bp, Glycine max
agcttctacattcaatatcgagcgttttgatatattttaggactgaatcagacatccgagtaaaaagttactgtagtttgaagttgctcagagctaaggcattcaagtccgagcgtctcgatatactacgagactcaattagacatccgagtaaaaagttattgtcgtttgaatatgctcagagcttcggtattcaatttcgagcctctcgatatattacaggactccatcagacacacgagtaaaaaagttattgtcgtttgaatttgctcagagcttcggtattcaatttcgagcgtcttcatatattacgggactcagtcggacatccgagcaaaaagttattgtcgtttgaatttgctcaaagctccggtattcaatttcgagcgtcttcatatattacgggactc

SEQ ID NO: 163913 - DNA, 379 bp, Glycine max
cgaccataaattcttactcggatgtctgttgagtctcgcaatatatcgagaagctcgaaatggaatactcaagctctgagcaaattcaaacgacaataactttttactcggatgtcttattgagtcccattatttatcggaacgctcgaaatagaataccgaagctttgagcaaattcaaacgacaataacctttttattcggacagcggattgagtcccgatatatatccagacgctccgaattgaatgctgaagctctgagcaaatccaaacgacactaacccttttactcatatgtcagatagaggtccgtaatatattgagacgcctcaaatggaataccgaacctgtgagcaaatcaaacgaccatacttttac

SEQ ID NO: 163914 - DNA, 407 bp, Glycine max
  unsure (1)..(407): unsure at all n locations
agctntgaaggtgcgtagcccaccattttccatagtttaatactggtaatgtgtctactatcattgtcatcgtttttttgtcattgaggtgccactttgagcttccaggttctccacctttgggcgtattctttgaaagatttgtgccccctttttgcacatgttctgtagttgcatcctatccgaagacattatactgacactgcctaacgaaggaaaccactatgtccttccaagaatggactcgggaaggttccaagttagtgtaccaggtaacagctaccccagtaagacttttttggaagaaatgtattagcagctcctcatctttgtgtatgcccttatcttccgataatacatctttggatggttcttggggccagtagtccccttgtacttgtcaaagt

SEQ ID NO: 163915 - DNA, 441 bp, Glycine max
  unsure (1)..(441): unsure at all n locations
cgtacattcaattacaatgcattctgatagtcaagtttctatatctaaagacactagcccanattctagtgaaaaaagaagacacttaagactgagacataagtctatcagaaatttgagttctcatggtgtcatttctctagactgtctcaggtcacaaataatattgcggatccacttacaaaagggttgatgtgccaacaagtacttgagtcattgatgggaatgggactagagcccattatttacgttacgacaatagacacctatctccgtgtgaatggtaatcatatgaatggagttcacgggtaacaatgaaattgcttgttgactaaacgacaccaaaataaaattctgcggagctggaccatttctcattcctatgacgaggtgtattatatatcgtggcactattaacgctgacgtatctatatatatgta

SEQ ID NO: 163916 - DNA, 410 bp, Glycine max
  unsure (1)..(410): unsure at all n locations
agcttgccccttgtctatctcaannnaatatgtttattacttatctttgccggcataattattaaccaaagaagaaaactataatgcagaacagttcaaatgctcgcagcatatgttcactttgcgtcacagcaggcaggtgttgatggttttccttatgattcatcatggacacagtcacctttcttatgataacgtttgtagattgatagtaattcagagcatagaagaaacagttcatatcctcaattttggaacatctttaactttggtgtgtctacctttaaatcaaagtgattgggtagcctcattacctttgcagaccagaaacttgtgagaacaaaactacactaagagaaatgctagttgcacatctgcattgattcattgaacacttcactcacgtctga

SEQ ID NO: 163917 - DNA, 366 bp, Glycine max
accctcgatgatattaccgattccttataagacatgcacattaatgagaaagggcacaaaggcaaaggaaatggtaatgacaaagactttccaattgatgaacataaaacaaatatagatccttcaagagagtggagaacttcaagatatcattcttttgataatattatcggtgacatctcaaaaggggtaacaactcgacactctctcaaagatgcatgccataatatggctctcgtttctttaattgaaccctaaacattaaatgaatacataattgatgaacatcggattattgctatgcaagaagagttaaatcaatttgaaagaaataaagtctaagaattagttgacaaacctaataat

SEQ ID NO: 163918 - DNA, 404 bp, Glycine max
agcttggttggaggtacttacccgatgaagatttattaacgatgaagatcgaatgaagaacgtcgtataacggtggaaaccttcccgaaattccttacggaaacgtttctgaagcgcctcgggttacattttcttcacggaaacaatctttccaagcaaattcgaaagagagataagtgcctaaggggctgaacccctttcttcttcacttcctcccctatttatagcaaaatacgggagatgcttgccacccagctcgcccaggcgagcagggttgcttcctccagaagcaatagtcttctggagggcccaagtgggcctggttgctattagcacccccatgttgactaagtacaccccctgactttttttggtgattcttttttccgaaagttatggaaact

SEQ ID NO: 163919 - DNA, 503 bp, Glycine max
  unsure (1)..(503): unsure at all n locations
gacctataaaactcagctttctttggggttgatgggttctgtcgcgcagaatggtatgatctctggctgacatactctcaattagctcagttgcgttcttcggggtcttcagctttatttttccccttgcataagcatctatcagttgcttggtttgtggtctcaacccatatatgaacatattcaattgaattggctcacgaaacccatgagtgtgagttcttcttaataaacctctgaacctctccaatgcttcactcagagattcatcacggaattgatgaaatgaaaagattgcagctttctcttccaaagtcttggactctgggaagtatttctttataaactttntaacaacttcttctcaggttttcagactgttacccttaaatgagtgaagccacctcttggcctctcctgcaatgagaatgagaatangctgagtctaatagcttcatcctgcacaccgcgaatcttgacagtggtgcatatttcaatgaact

SEQ ID NO: 163920 - DNA, 405 bp, Glycine max
agcttcttattttcaacagatgatatttaattcttggccacatcatggactcctctaaggacaatagcatcatttcttgcactaaattgttgggagttggaagccatcttctcaatcaaattcctagcctcaacaggagtcatatcaccgagacctccaccactggcagtgtaacaccctgatatatatatctatatattattagtaattatgtttgatgtttgattatttgttgcattattttcacccgtaattatttttaaggaagttaatttagttaatagaggggtgtggatagataaggatctagcttctcaaagaagcctcttgagaaagcttctcaaagaagccacaaggaagcttctagaggaagcctcttaatgaagcttctatagaaagctacat

SEQ ID NO: 163921 - DNA, 320 bp, Glycine max
gggttcgaggtacttacccgttgaagatcgaatatcgattattaacgaatgaagaacgtcgaagaacggttgaaacctttgcgaaattcttcacggaaaacgttacggaaacatttcataagcgcctcggcttacattttcttcacggaaacaatttttccaagcaaattctaaagagagagaagtgccaaaggggctgaacccttttcttcttcacttcctcccctatttatagcaaaataggggagggtgcttgccgccagctcgcccaggcgagccaggttgcttcctccagaagcaacagccttctggaggaatat

SEQ ID NO: 163922 - DNA, 409 bp, Glycine max
agcttgcatgatttacattctctcccttttttttgatgacaaccacctgtaggttaggagcaacaacaacaacaaaaaatatccatttgtatatacttttactccccatttgttttgcaatgattgcttatgtgagacatgaagatttcatacatttcatatataaaaagttgtctcataaagatttcatatttcttttatctatctctccccctttgtcaacatcaaaaacaaatcatcaatagagaagagaaagatgttaccacttgttgcaatgtatgagaatcaagtgataccaaaaggcattaaaacaatgattcaatattaatcaagcaaaaacaagtacaataacacatcaatcaaaaacacaattaatcaaacacacaatcaaaagcaatcaacaaaacac

SEQ ID NO: 163923 - DNA, 438 bp, Glycine max
  unsure (1)..(438): unsure at all n locations
ntgagccanaatcctgactcaccataaaccttgatccatgttgttaatgtcaatccttaccctcggaagcaaacaaaagaaaagaaggaaaatttccaatcaaagagaaagcaaaaagaaaagaaaggaaaattcccaatcaaagagtgggagaaagcaaaaagaaaagaaaggaaattcccaatcaaagaatgggagaaagtaaaaaagggaagaagaagaaggaaagaaagctcctgatcaaggatcgaaagaaaacagaagacatatgcagaaaggtctttggactggacaatatttgagcaatacaggattgtcaccaaatgaacaaaaagaaggaaaggaaaccacgacctacaatggtcttcttccttntattgacaaccaaaatcttgtgcactagcgacttttcgcccgcactanacaaaacagaaaaga

SEQ ID NO: 163924 - DNA, 414 bp, Glycine max
  unsure (1)..(414): unsure at all n locations
agcttatagaatatacaataagagaactatgactattgaagaatctatncatgttncctttgatgagtctaatgctattcctccaagaaaggatattctagatgatattgcagaatctttagaataaatgcatatttatggacaatattctaaaggaaaagggaaaggaagcaatgaagatcctccagaagaagccaaatcaaatgatgaacttccaagagaatggaaagcttcaagagatcatccccttgacaacattattggtgatatctcaaaaggggtaacaactagacattctcttaaagatttatgcaataatatggcttttgtgtctatgattgaacctaaaaatttaaatgaagccataatagatgatcattggatagttgctatgcaagaagaactaaatcagtt

SEQ ID NO: 163925 - DNA, 353 bp, Glycine max
  unsure (1)..(353): unsure at all n locations
cgatgtccactacattggagcatattaagttattattatccataccttatttaaatggtgttggtaattttcttacccattctaaaagggtcctaggtagacatctctctgtgaattttgcatccatttcttaatataatccttacattcaaacagcgaattcctaatttttgtatggacccgtactcaaggaatccatacagagaaccattccctaatcgcatacttaactcattcatatgcctctttntattggaataatggaaattattaatcacattaacacaatcaattaggtaatagactattattaaaatgtacttacataatccacaattttataacacgtgatg

SEQ ID NO: 163926 - DNA, 429 bp, Glycine max
  unsure (1)..(429): unsure at all n locations
ttaagtcacctgcagcatgcagcttgttgtagttgttctccccacacctcatattttgtgccctggagttccattaatggaacaaaaaaccaaaaagggtaaatgagatgaaattcggaacctgcaaatatcaactcattaaaacacattattgcattttcagatgagttccactattttgtcaacaacaaaaattaaccttccattatgtggatttgaaagaaactcacaatcattaattaaaacaaaataaagaggaaggaaaaaaaaaaaaggtagctttggagggaaaagagacctttgctgtgttatttcaagaattgttgaattttccaaatggtcatgcttgcttctcaagtgtaccttanaatgcaaaaaaaaaaaaaaaaaaaaccagatttctttgtcttttttttctcttcctttatc

SEQ ID NO: 163927 - DNA, 466 bp, Glycine max
  unsure (1)..(466): unsure at all n locations
actctgtcataagtcctgctatcacaccttttgttcaaatgcttcttcaaaatggcgattctaatagaagtcagaaatgctcatatatatccatatttgttatttgatggtgaattcattagtcgtttctttcaaggttgtatttatgatcacacgcaatttaccattcactatttgtaacaccttaaatgtatcaatcagttatcttttgaacattaattaatacctggggctttccattgtgataaagtgtgttcggtgccttaattgctcaagttcaaatcatgtgttagaacttacatcaacaccctatcattaattataatcacttttcggttatgctcgacagcaacgttctagacgaaaagagaggaaatgacattgntatacatctcttctcatattattttaaaatgaaaaattcccacatattttacgggatactaggaatcataatttgataaaa

SEQ ID NO: 163928 - DNA, 384 bp, Glycine max
agcttcggtattcaatttcgagcgtctcaatatattactgtgttttattcagacatccgactaaaaagttatcgtcctttgaatttggtaagagcttcaacattcaatttcgagcgtctcgatgtattacgggactcaataggacatccgagtaaaaagttattgtcgtttgaatttgctgagagcttcaacattcaatttcgagcgtctcgatgtattacgggactcaatcatacatccgagcaaaaagttattgtcctttgaattatctcagagcttcacaattcaattccgatccgctcgatgtatcaccggactcaatcagacatctgagtaaaacagttattgtcatttgaattatttgagaagcttcacattcaattt

SEQ ID NO: 163929 - DNA, 365 bp, Glycine max
aaaaaaaaaacttaatggctgagcgtcactgaaattgtggccaccaaaagtcacccctcacagccaacaagtcattcactacttggtcttccaacagggtgatgcctacggttgtaatcgggcccttattacaacttgaactaaacctaaataaagcccttgtagttgattaacccaaaacatatttttggtcagccaactttacaaggattgggccattatttagacaaactaaacactctaacattgagacacagtggcgccatttagtcctcctccatctgggccatgatacaactcacaaccttggacttttctccttgaaacatggacttgtattcaaatactatggacagcacttgttg

SEQ ID NO: 163930 - DNA, 399 bp, Glycine max
agcttaggtgtctgatagatagtatccaaagttttgtgtctgactcatcatctgctgaattttattttaagttgagctcccataccgaacaaatcacagatactatattgaagcactttgaagacgaggaagctcaggtgagaatatgtttatttaaaaagtgacaaagtgctagacctacttggagagtggtgatatataattggctaagctttatttatgcttgttccgtgtttgcctaaatctcaggattcatctactcttttctagaatgtcatatatcacttcaccatatcatttggacatttacattagtgcttaagcatctctttccttgtgagacatctaacaagaacactgtgctggtaggttcttccactggcacgaaaattatttagt

SEQ ID NO: 163931 - DNA, 382 bp, Glycine max
  unsure (1)..(382): unsure at all n locations
ggagagatacgttagatggtcactgaagtgttaaaaaagcctattctttgattgcaagcatggatggccttcctaatattcctctataatgggtgatttggaaggggcgtggtgctaaaagatcttgaccaagtccaacccaaaggtaaaataactaaaaagctaaaaaaaaatatttgctattagtttttataaaataaaagactacatatgttggcaaaaatgcctaactcatagctctcttcttcaaaataaaaattttctctttaaatntcgtttaagactctctcaccattggaccgaccctgctatgaaagattgaaagggagcataacagatgttatgctttgtttaatgtgcatgatggagaatgagttcttga

SEQ ID NO: 163932 - DNA, 405 bp, Glycine max
  unsure (1)..(405): unsure at all n locations
agcttgcccagagaaggaatccacgtaggatttgtcntcttcctctaaagactggaaagcggcttctaatgactcctctgcggcctccacataaggcatagaggatgggcagctcaccaagatgtcttcctcgcctgatacgatgaccagatgcccttccactacgaatttcaacttttggtggagtgtagagggaacaactcccactgagtggatccacggacgccccaacagacagctgtagggggggttaatatccattatttggaaggtaacttggcatgtgtgagggcctatttgtactgggagatcaatctcttccctaacctctcggcgggtgccgtcgaaggcataaaccaccattgaactccgctttaggtgggaggcattgaatggtaatttctc

SEQ ID NO: 163933 - DNA, 311 bp, Glycine max
  unsure (1)..(311): unsure at all n locations
cttcaatccatcagcgggtgttctttgtgtgcccatcttgagatgttaccatcctttgatgacaacgtttcaagttctgttatcgcgtgaatggcggaacgccaccatacttgctcttcactattcataataggatccatccataattggcggtctgtccactggctctgcttctttcttcatgttaatcaaaatatatgtccctaggcctcactaaccgatcttaagtgccccctctgataccaattaagattctgatacccagttctatatgttcaacaggatgctacgacatcacccttanaacatgc

SEQ ID NO: 163934 - DNA, 406 bp, Glycine max
agcttatcctcatctgatgcatggaagtttaatagtattgactgaaggattctcaatttctcatgatgtttaagttaatacagtttattttatattttaaagaaaaaagcttaatgattaaaaattagttaagaaaacaacaaattttttatattataaatttaatatgtgtcactcggattaagtcatctattttaactattatattcactactttaacaggtctcttgctaatcctaccagtgcaggaaaaactcagttacttgcacctacttgctccccaagggtagctgtaagcaaattactaatattagcaaacatataacttgtagtggttaccaaaggtatggggatacaacccatttggctttctatcggttgaactctgctaagcattcctgttgta

SEQ ID NO: 163935 - DNA, 306 bp, Glycine max
gacctcacttaccacttatgagtcgagcctagagtatatgataaaactttctttccaaccacaaagtccttcttagctctaaagctgtcatggaacttcttggtcttctacgtgtagaatctggaattctcataggctactaaacagatctcatctatctcacttacatgcaacctccttttctctctagcctcgctcatatacaagtttcaagtgtgtatagccgagtatgctatgtgctctatctctacaggaagatggcatgccttgcctaagatgcagaaacaagcttcatgatgatgaatc

SEQ ID NO: 163936 - DNA, 409 bp, Glycine max
agcttgctccaaatgaagcacgtgatcctcttttttgttgctataaatcagaatgtcatcaaagaaaacaataatgaattgacgaaggtaagggcgaaagatggtattcatcgtagcttgaaaagacgagggtgcattgcatagcccgaagggcatcaccctgaattcaaagtgcccatggagtgtagggaaggcagttttgtagatgtcttcttcagtcatgagaatctgatgatagccttgtaataaatctaatttagagaaccaggaagcaccacctaattcatccaataactcatctatcgtgggtatcgaaaaatgatccttaatagtgagggcattaagcgctctataatccacgcaaaatctccaggttccatcgtgttttcggacaagaagaaccggagaa

SEQ ID NO: 163937 - DNA, 296 bp, Glycine max
ttttatgtacatactatcctacacacgcgcgatatgagaaatcaagtacgaatcttacttcaccacttgaattacaggcacgaacagacaggagccaccaataaaaatgtctttgattcaacaaaggacaaatactgaatcttcctataaggctccatacaaaaaaccatggacgggccaacaaaacgcgattgaaccgaagacggcgactgggaagagacacatgccaaactctcgacatggctaacacacatgcaaaagcattctcctggctcttactaccaaagactacacga

SEQ ID NO: 163938 - DNA, 398 bp, Glycine max
agctttatgaactcatactatatatgttatgttgtcactgacagacactatattaagacataaaaaaatgtcaaatacataaaggtgaattttagataataaattaaaaataatctattttcttaatataataaacatatttaagcctacaaaataataactataaatacaaatcagatcttatttgattggtcaatattattattatgacttcttttttatagaagattagacttatgacttatgagaaataaaatagtaatttaaaaggaaatatttaaagtgtcctaattttagatagttaaacctcttattatatatatatatatatatatatatatatatatacatatatatatatatagatattccctcctacctcgcgggatgtctttata

SEQ ID NO: 163939 - DNA, 417 bp, Glycine max
tctctgaacgtgggatgcgctaacaaatgtgttcttgaaagatgacgatacaaaatttagtccctgacagtgtaaaaagtgcgacaaatatattcgaccgttaactttcatacaacatagacatttctaattgccggcatagagatgtatttgttatataatatcttattttactttatgtcttcccattatgccgacaaatgtgtccttaaaagatgaaaaatataaaatgtagtacccgaaagtgtaaaaagtgtgacaaatatatcaaaacgttaataagatattatgactcaatattataattgtgagagatttgtaatgattacaacaaaattttgggacgaatatatcacaccggtgaagttctggttcattatataatatttaagattgatcatcgactgagacatgcat

SEQ ID NO: 163940 - DNA, 386 bp, Glycine max
agcttttagacttgaagaactttgtatgtcttaattcctcatcgcaccttaagatacttaggagtgagggaaacacccttgtcaaccccaaagaaatataaaaagggaaaatacataaaaaaataaaaaaggggaaatacataatttggaagtcatgttttgcacactcaattaaaggtttccgtcccttgtgatgggcatgtggggtgctaataccttccctatgcataaacaactcccgaacccttattttcaaaattcacgaacctgcgtctttttgattttttctaacgttttcctggaataaacgttggtggcgactccgctcgttttctcctttggagaaaaatgctttggcctatcaaattttggccttttcgcaccct

SEQ ID NO: 163941 - DNA, 461 bp, Glycine max
  unsure (1)..(461): unsure at all n locations
tgtaggattatggggtacccatcacatgtggtactatgttgttgtcgggcgatggtgcacaacaagttntccacatccacaatgcgcgcataaacccaccatcccctgttgcccacctncatctgagctcacgtattcccacgtagcccatatcctcgtttctctcaacaccgggtccccatcaatcctcccaagcttccacaacatccaatcaaaacaacattcaaacagcacaagctatcacagccaagcaaaacagggcaaaggcagaaaactctgctcaacacaccaaccaaaatcacagcttttctcactcaaagaccccagtaacaattccttcgatccaattcgttaaccgttggatcgactccaaaattgtactggaagtctatagtacataagcctacattgtgaccgttgggatctactagaccacatgcataactcattctgcactactc

SEQ ID NO: 163942 - DNA, 416 bp, Glycine max
agctttgcggattgggttttcaccgcttttatgtatttattgggactaacaaagggcaaatgtgatcataatgattacatgaaaaaaaactggggcaagtaaaaagggtgagaatgacggagaaacccacgccgtgactgccattgctatacaaccaagtttcccaccaacccaacaatgtttttactcaaccaataacaaaccttctccttcctcaccacccaattatccacaaaggccatccctaaatcaatcacaaagcctgtctaccacacaaccaatgctaaacaccacctttagcacgaaccggaacaccaaccaaaaaggaattttgccgccaaaagcctatatgaatcaccccaaattccggtgtcatatgctaaacttgctctcatatctactcgataattaatggt

SEQ ID NO: 163943 - DNA, 374 bp, Glycine max
  unsure (1)..(374): unsure at all n locations
tcctcggggccatntcctgcgaaggcaaacattnggaatgttagttntaccaagaaacgctactcttaaagcaaaaatagcatacaacctcctccaataaacacaaacatcaatgtgaatatactttcctactcatgcacatacttctttacgaacgttcacttgcacaagacattcttataactaagaaaattgcacctatgtgcaatcaaggcaccttcgttacctacactatttatatgtacttncaacgcatatttgttacctacatctcatgcacttccttggctaaatttacatacatgagtactcacagcatttgggataccacaaattgcacatgtgcacattccggtatttctaatatttatgca

SEQ ID NO: 163944 - DNA, 405 bp, Glycine max
  unsure (1)..(405): unsure at all n locations
agctntaccatcagattntacatattttttatttaangaaattacaatccacttaaatttagtaatgatccactaacctagggaatgaaaagaacttaatggctgagtgtaactgaaattgtggcaaccaaaagtcaccccaaaagccatcgagccaatcaccatttggtctcccaaaggctgacgcctaagctgccaattaggcccttattacaacttgaactaaaccaaactaaagcccctttagttgattaacccaaatcatatttttggtcagccaactttacaaggatttggccattatttagacaaactaaacactctaaaattgagatgaagtggcaccatttagtcctcctccatctgggccatgatacaactcacaaccttggacttttctccttg

SEQ ID NO: 163945 - DNA, 314 bp, Glycine max
cctgatgaaatttcgaagacgatgccgactgctacatctttccaatgttccataatttgtagttcatccctccatacttcataccttatgcccatttctaagaccaatttatcttttgcatcccatatagcttcaattatttggagttctctcttgtggcttgactatatgtcggcttttttggatgaggtgcaaagtgattttgcaacataatgcacttctgctcgataagatatcatttcttgactgcaatattgcttgaattatctagcccttaaacattatgctctgactctaatttttttaactccata

SEQ ID NO: 163946 - DNA, 399 bp, Glycine max
  unsure (1)..(399): unsure at all n locations
agcttctatagaagggcgntcctaatttctctataatngcatcacctctcaatgagctggtgaagaagaatgtggcatttacctggggtgaaaaacaagagcaagcctttgctttgctcaaagaaaagcttactaaggcacctgttctagctcttcctgacttttctaaaacttttgagctagaatgtgatgcctctggagtgggagttggagctgtattgttacaaggtgggcaccctattgcttattttagtgaaaaacttcatagtgccaccctcaactaccccacctatgataaagagctttatgccttaataagagccctccaaacttgggaacattaccttgtttccaaggaatttgtcattcatagtgatcatcaatcacttaagtacatta

SEQ ID NO: 163947 - DNA, 483 bp, Glycine max
tccttaagaagaattctaaagaagctagagcttatctacttacacctctctaatagctaagctcacctccttgagatgagaagctagagcttagctacacaccccctataatagttaagttcacccctatgaaaaaatacatgaaaatacaaaaaatttcctaccacaaagactactcaaaatgccttgaaatacaaggctaaaaccctatactactagaatgaccaaaatacaaggcccaaacgaaggaaaaatatattctaatatttacaaagataaataggctcatacttagcccatgggcttgaaatcttccctaaggctcatgagaacactagggccttcccttggatctttgacccaatctacttggagtcttctatccaatgcccttgcgaggtaggattgcatcaattctggtggttttaattgaaatggtagtggctctctcattcatctccttctcttatggtgcgctatata

SEQ ID NO: 163948 - DNA, 409 bp, Glycine max
agcttatatataatacgtaccttctcataaatttctttatttattcatggaaacacacacgaatttaattcctattaactttggaggccatttttatggttcaccccactagacctggcccataaaaacaaaaacaattgcttcctgcaccccatttttatcttcttgcacccataatgttttaaaattcccatgttatccttcttatattctggaacaggtattctgaaagtgtataggtaaatcaaaaatctttaataggtttttggattactgatacacttatggaatacctattccagaatatgaaaatcatattttggaatacatattccacaattgggtgacaagcctcaaaaccaaatctctaactaaaccttcaatcctatgatccacacaatcctgtact

SEQ ID NO: 163949 - DNA, 365 bp, Glycine max
ccttaagacagatcatgttaaaacagctatcggattagtggaagagcgctctcaaacaactgatcagtctctcgctgggacattaatgaataccttgaccaccatgaagtttgatggttcccgtattatgcatgaacatgtcattgagatgacaaatattgcagtaagactaaagacctcgggaatgattatgaatgagaactctcttggttagcttattctaaactcattaccttctgagtatggctcattcaaaatgagttataataccatgaaagataaatggaacgtgcatgaattgcacaatatgttagttcacaaagaaacaagacctaagaatcaacgaaatcacttagtccattatg

SEQ ID NO: 163950 - DNA, 427 bp, Glycine max
actagacctgcacgcgtgccagccagggtctacacatgcctatagcctactttattttatttacctcgggacgcacaaaagtcggtggtctctctataaacatgacaaccttgcaggattaacatacaaattgcacagtaaaaactacagctctaaccttatatactatgtgatccatctattaatcgatccacataacatctcaattctataactattaataaacaagggtttacatgcgttctgcctctccgaaataaaacaaagtcatacccactgaaattcttatgcgtcctactactccctaatagaaattcacaggacatacctccctgataaaactctgcaccattcctagcctctcccacataatggtatgactaatggtgggggggtctccgacctacatctgatattgaaggattta

SEQ ID NO: 163951 - DNA, 371 bp, Glycine max
gagacaaccgcgtcacacaatctgcatcaatagaaactaaacacggacacaacacatgcatagacaattttacgcatgaaacaaagccacattccctgaattgagtataagccccaaattcccgacatttagcaaggcttgtatttctgaactcactacgcacagacatttacatgccagaaatacatatgtgcgcaattcttataagcggaaggacaaatctttccataagaaccacggaacacagaaaatacagctagatatgaccagtaactatgaagcacggacttcaacaccgacaccagacacgacattgacatgctgacacggagacactctaaacataagaacacggaccgagacaacataca

SEQ ID NO: 163952 - DNA, 404 bp, Glycine max
agctatcatagcagtctcccaacttggtgactgtcttttatattccagcagccttaatgaggtccatgatttccttgcaatccaaggcatctcttcccagttctttttcaacagcaagcctccgttgatatacaaatttccacctttcaacattgccaatggagtggaatgagatgttgtccaatggtgcatcaggtacatttccaggcaccttcttgccagatttcttggccctctttgatgtcgagacatctagttcgacatcatcatcagaatcagatgaggaaatttctttcctcttcttggaggggattgcaactttgctccttctggatttggtacgagtgattggaatgctcttcttctgggccatagctttgattcgtccagacctcttgatgggg

SEQ ID NO: 163953 - DNA, 414 bp, Glycine max
cgagctcgcaacaaagctcctacacatggagtgatcacctgcagtcctcttgaacccttaccacccaatctgtcatcacgccgagactcaggaagcccaacaggtttagccttccctaagtattctgaacaaaatccaatggcttcttctgcaatgcacctctcacaatagatgcttctgaatgatatagattctttgtacacccttttaagatcttcatgtatcgctcaaccgggtacatccaccgtacataaacaggaccacaacatttgatttctctcaccagatgcacaatcaagtgaatcatgatgtcaaagaaagcaaggggaaaatacatctacaattggcatagaacaattgcaggctcattttccaactcataaacatgaccggatcaatgacctcgctacatat

SEQ ID NO: 163954 - DNA, 408 bp, Glycine max
  unsure (1)..(408): unsure at all n locations
agctntgtattctgcatgtcatattcttaaaatattttgccttataaaatttttgaataaaccccttatgagctatggagaaaaagagaaccaaaactgaaatatcttaaagtgtgggggtgtctagcaaaggtaaacatccccattaataagaaaaggaaaattggaccaaaaattgttgattgtgtttttgttggatactctatgcatagtactacttatagatttttggtagttaattcagaagtgtctgaaatttctaatggtactattatggaatctagagatgctactttctttgaaaatatttttcctttgaaaaataaattgtctaaatctatgtgtgatacttcttgttctaatttgtcttcttgtagtaatactaataaagacattgtgtttgaacct

SEQ ID NO: 163955 - DNA, 475 bp, Glycine max
cgtgggttggaagtccaagtagttatcgcttacaggcagattcatgattgcaaagtctgttattgaggctttgcctatctactctatggtgacaaataaaattccatggggaattatcaacaatattaagaaggatgagagatcttttatttgggaagatcaagtgggaagaaagaaaatgcatgctataggttggaacttgatggctcggcctaaagcttatggaggggtggctatgtgaaatctcaagcataagaattctgctagtttgatgaagttagggtggtttctcagaaatgatgtgaacaacttatggtgtcaggttcctaaagggaaatatgcgagacaagatttctctgcaaatgttttggtagccaagccacatgattctcccacttggaaagttgtagctgagaattggcctcatcttgtggaaggtgagctatgggccatcggagatggtaggctggtggat

SEQ ID NO: 163956 - DNA, 376 bp, Glycine max
gagctcggcaaatgattagttttgacaacatttatttcttttgttccaagcatgcatcaaataaatcattgtatgattacctggacttgagcaccgtaacagatccccgggttgaccattgatagtgagagcatcagatacgcttggggctgctccactttccatagattgtctgaacacctccttgacatcactcgtccaccattctgctgcatatgcatgaataagtaaataaaatgttacattttttccatgtttttatcaaatatatatgctctagttattctttagcttcgaagatacgtgaggatcctgacgctgtttgttcgttccattgggatcagaattttcttcttcatgctgttcatggatatta

SEQ ID NO: 163957 - DNA, 411 bp, Glycine max
agcttgtcttgagtcatcaagagattataaatttgtgaccatggcatgaatttcaataatataattaacatcatctctcaaacatctttcaatatctttctacaaaattttcagattcatttctcttcatctttctaaaagtttttgatcaacactttatcttcctagaaaagttctttgttcaaaaacttgttctattcatctttttcattctcttctccctttgcaaaaagaacgaaggactaaccacctgaattcttttgtgtctctcttctcccttaaaaaagattcaaaggactaaccacctgagaattcttttgattcttcccttccccttaaacaaaatatttcaaaggactaactgcctgagatatcttttttcccccttacaaagattcaagggactaaccg

SEQ ID NO: 163958 - DNA, 387 bp, Glycine max
aaaaaaaacttaatggctgaccgtcactgaaattgtgggaaccaaaagtgacccccaacagccaacaagtcaaccaccatttggtctcccacaaggctgatgcctacgttgccaaattgggccttattacaacttgaactaaacctaactaaagcccttttaattgatttacccacaacatatttttggtgagccaactatacaaggatagggccattatttatacgaactaaacactctaaaaattgagacaaagtggtgtcatttagccctgctccatgttgccatgatacaactacaaccttgaactttctcttgaaactaggctcgattcaatatatggacagactgttgagacttcgtggtttcttgcttaccttgcatagt

SEQ ID NO: 163959 - DNA, 410 bp, Glycine max
  unsure (1)..(410): unsure at all n locations
agctngactagttgtgatggtatcggttttatttactgcaggttttgccaagaaactacagcaatggctcatattagctttgctgcgaaaaattccttaggagaaacttcaatgttgaagtccatggaaatatccttgtatatataatcgtgattctcagatgatttgatgccttaaaattgtgccaattgaagttaaacttgttcaaatttatataaaaaaaattccataatctaagtttgatattttgggattaatattgcagtgctttaactatgtttcgtgtttccaaagattttgcaagaaatggtgaagtgaaaataataaaatatattattatgtatcatcctaaaatttataataataattgttgttagttttagtttaaaaattattagtataaaaattta

SEQ ID NO: 163960 - DNA, 376 bp, Glycine max
acctgcagcatgaagctttactcgagaggtgctctatgttctttaatatagcctattctggtgtttatcagtggtggtatacaatcggattacgtactaatggggatctttatactggagctctggttctattattacgtactactatctctttaatagcaggtgggatacacctgcaaccaagatggaaaccctatcgtttgatgtttaaaaatgccgaatcccgcactaatcatcatttgtcaagattattcggagtcagttccttggcttggacagggcatttaatccatgtccctatttctggatacacgggggaatacgatccatggaatgatttattaagtatatagcctccttcggaaagattaggtcc

SEQ ID NO: 163961 - DNA, 413 bp, Glycine max
  unsure (1)..(413): unsure at all n locations
agcttanaatttgaacgatatgcattggtgtgttgtgatcaaatccaagtggatcaagaaagattgagaacacatagaatggacacttgaatggtaatgaagagaatcatgacagagagattcgtcttgccttactacgtaagggaaatacataataaactacaaagactctatcaagaaagtaaaagtgttgatgactattacatggagatggaaatttctttgatcagagcaaacattgaagagactaatgaggctacaatggctatacttttgaatggcttgaatacgaacattcaagatgatgtacagcttggaagttgtaataacatggatgaacttatacatatcgatatgaaattggagcaacaattgaatacgagacaaacctaccagaagacttcatacacttg

SEQ ID NO: 163962 - DNA, 347 bp, Glycine max
  unsure (1)..(347): unsure at all n locations
aagcctggaatgctgatgactgacatatgtgaaacattggagaacactgttcgtaagctaatatcagaggatggccttcaagcaggcattgcattccccacaggatgctctttaaattggtaacactttatactatggctttctgcttttccctttgttatgtggcttcttgctttacggtactaaatattaagaatgagcaatgaagggccacaaagagcataagcgttgtgagaatgctatgctggatgagtgattaaaaaacttcgtaccccattgcccagaggctcttcgctatgcgaaggtatgggggaggggatgtgtacgcagccttaccnttacatatg

SEQ ID NO: 163963 - DNA, 415 bp, Glycine max
  unsure (1)..(415): unsure at all n locations
agcttccctgagggaaataggaactgttattctcttattcccgagtataagcaaggcgaacagcaaagttatctgattcgggctatgttcggatatggaaactacgatggaaaaaatcatgcccctacgttcgatctctatctcggggtcaactactggaaaaatgttaacacggcagacagatcctatatttgggccgagattattcatgctcccacaacagacaccatacaagtgtgtctggttaatattgacactggtacacctttcatttcgtcattagagttacgacctttaagcacttccatttaccaaatcatgtcacaatcatatctatacctncatgggcggtttgatgtcggtggccctgttgaaacctattataaaaggtgaactctatcttgnttcaataatc

SEQ ID NO: 163964 - DNA, 370 bp, Glycine max
ccgcccaccttggcatcttttgcccacccgcgtttgttttattttttttgtcccgacaagcgtggctcccagtgggaccttcaacatccacgcttgggcggacctctctttctctcgatactctcgggcatcgcgtgctgggagatatgaagcggcgccttgtgacgtgctctgctgcggatgaacaattgtgaagacatctgctcgaaaacatgttgcaaatgccatgtttggatgagattcacatacccattctggtctaagcggtttgtgatgatgttctcgatgtccatatgctcagaccgctgctggaaatctgtcttacatgaacggcggaactcccccacacgtgtacagtgagaatgtgatg

SEQ ID NO: 163965 - DNA, 321 bp, Glycine max
caaagcttctgttatcctatcaaaaaatccaacaatgcattctaaagctcaacatatggaacatcacaacaactccatcagagattattgttagaaatagacagtggacttacagcttatacccactgatgatcaacttgctgacctgtgtacagaaacatttactaaagacacgtgtcatttcgtaaaaacgcaacttggaatgatctctgttaatgaatggattaatctctatatgatgtccactaatacatccaatgagataatcccaatatttggatgacatatccagcacgcaatactaacatcatcagtagtatg

SEQ ID NO: 163966 - DNA, 406 bp, Glycine max
agcttgtcccaacactagttacttatgtatgttttttatctttcaagcaaaatcagaattggaacaccccctctggttccaattgccactctcaaaagcaaaatcagaattggaacactccgtttggttccaattgccactctcaaatgcaaaatcagaattggaacaccccctttggttccaattgccaccctcaatatcaaaatcagaattggaacatggcttttggttccaattgccaccctcaatagcaaaatcagaattggaacacccctatggttccaattactcatgattgaaaaaaattgtcatctttgctgatatatgctatattgatatatgcttatggtgtaaccttcactgccattaatgccaactgatatatgctatacaaattgccatcatg

SEQ ID NO: 163967 - DNA, 467 bp, Glycine max
  unsure (1)..(467): unsure at all n locations
tatccttatggcctgcctccggacttcacccnccgtaccttttctgaagatataagccaagcccctactttcgaggggcaactcccaccttatgaagactatcccgggcaagacgatggggaaggagatacccatcttggccccttgctccacctcaaagatccatcctcgcatgaactaccccaaccgaacatagtccgccatatcccggcctcacccacacccgtaaaagaatctgttcccttcgcggaagataagggaaagattgaggcgcttgaagagaggttaagagcagtcgaaggcctcggcaattacccattctcggatttagcggatttatgtcttgtgcccaacatcgtcatcccttccaagttcaaagtaccggactctgataagtacaaaggtacgacatgtccgaaggggcatcttcggatgtattgccgaaagatggnggcgtattctgcgga

SEQ ID NO: 163968 - DNA, 281 bp, Glycine max
taaatctttattttaaagaacacacccatctcaagagtcatcattccagccaaaacacattatactttaaatatatttttttattccttaaccagtatccttatgaacaggaggataggcaaaagagtggggttaaagaaatccaagcatgtcatgccagctctgtcctattggatctcttggtcatttcgactgtcgctttgcactagcaccgaatttatattctgaaactgccagatttttgtttgtttgtctgatggcaaataaaaactttataatca

SEQ ID NO: 163969 - DNA, 381 bp, Glycine max
  unsure (1)..(381): unsure at all n locations
tcttcccatgatggaactcttgaagacccccaatagttcaaatggacatagtccaacatggcccttggtgtatgcaccacctttgggaacttcatccaatgttgcattccgtagacacaatgttgataaagctgaagaggttccaccttgtgatttccaagtaattctcgcttgtttagaatatccatacctttntcacttatgtggcctaaacatggatgccactgagaattatcaaatgagccattggacgtatgactctcagattgtgaaacagcagagatagatcctgtcacagtggacccttgaaagatgtacaaattttcttgctttgntccctacattaccacacactctcctcttccttgatatgcataactc

SEQ ID NO: 163970 - DNA, 417 bp, Glycine max
  unsure (1)..(417): unsure at all n locations
agcttctttccccgcatggtatatcacnctcataattgttacttctcttctgcagaaacaatcttctgcagtatggtagccagaaatatttttctaaaaagcagggatattatacaagttggaaataccacccctacaacctttctttgatttgatcctcttactgtgtccttcattcctatgttatggagcagatccccatccaaagaaaaaagaaagaaaagcattcatacaagttttaatagaaaagtcgtagagctagtacatacaagtaaagctaagaatgtaggactttgattcttttgctttttgtctctctttctctctccccattaaacggaaattaaattaaaaaaatattttttttcatttataaaaacaaaaggctgataaagctgaattcatatacacagagca

SEQ ID NO: 163971 - DNA, 416 bp, Glycine max
agcttctttccccgcatggtatatcccctcatattgttttttctcttctgcagtaacaatcttctgcagtaaggtagccagaaatatttttctaaaaagcagggatattatacaagttggaaataccacccctacaacctttctttgatttgatcctcttactgtgtccttcattcctatgttatggagcagatccccatccaaagaaaaaagaaagaaaagcattcatactagttttaatagaaaagtcgtagagctagtacatacaagtaaagctaagaatgtaggactttgattcttttgctttttgtctctctttctctctccccattaaacggaaattaaattaaaaaaatattttttttcatttataaaaacaaaaggctgataaagctgaattcatatacacagagcag

SEQ ID NO: 163972 - DNA, 415 bp, Glycine max
  unsure (1)..(415): unsure at all n locations
agctntaacctcatcgtccctcacagtctttagatttgggatccaatccaatccttgtgttcggactctcagccacttatgatagccgccgatgatcccattactgcttcccctaagctctctgtcctttcttcacgccgcatcccatgccttgcgaactccttggagtaccctcgcgttgtggtcactaaaaccccgtgcgatgaaaggcgtgatgctttcgtctaatggcgctcctctcatggggtagccaagctgtcttatggtgagaacgggattataattaatacaaccccttgttcccatcaagggaacatttggacatccttcgcatgaagatagaatcctgattcttccttccttctagcgagggaaccaattaacagacgcccccccatgctagccaagagttggt

SEQ ID NO: 163973 - DNA, 467 bp, Glycine max
  unsure (1)..(467): unsure at all n locations
gatgaccaaagatgntaattggaaaatctctatggttaaaacatgaagacataagttatgcacctgcaattcaagtttgaaggcgatccaacgattaatgaattcgagatgatggtttcaccaaaacaggttttttaggtcaaacttgaaatctcacatttccaacataggtcaatcaaactccacataacctaacattcacaccaagcaatcacacacagataattccccaggtctttagactctcccaaaatctagaggtgaatctaggatctctatcatacattataccagatggcacaccatgtaattngacaatctcactaatacatagggaggtcaactcttttaaagaaaacctaatattgatggngataaagtgagctgatttagtcaatctgttaactataacctagatagaatcgaaaccttttggggtcctacgtagtcctacaatgaaatcaatg

SEQ ID NO: 163974 - DNA, 435 bp, Glycine max
  unsure (1)..(435): unsure at all n locations
gtagagctgcacgcgtgcaagctctgctaatttagttntcgttggcgaatttatttattttgtctgagaagaggcaaatttgattatcctgctttaatgaataggaagcctgcggcaaatggagagaatgagaaggagggaggaacccatgttgtgactgctgtcccaacacgaccaaatttcctactagctcaacaatatcaatacttatccaatatcagcccttctcattacccaccaccctatcaaccaagaacactcaatgattcacaaaggtcatacctaaattatccataaagccctgctatcgcatatncaataccaaacaccacccttaacacaaaccaaaataccatccggggaaggatgtttctagaaaagaagcctgtagaattcaacccaattctgnggttgatgctaacttactcccatata

SEQ ID NO: 163975 - DNA, 348 bp, Glycine max
gagtacctgagctcatatggaggtgggccacaagggatggtgggtttatgcgcgctttgtggatgtggaaaacttgttgtgcaccatcgcccgatcgccacctagtaccacatgtgatgggtaccccataatcctacaagcttgagatgaggaagtgttgaagggtgaaacttcatgcttttattgttgaccacagagtggtacctggagatatgtcgcgggggtcaggagaccttggcgacgtcatgtggggtgctattgcccaaaaccaagcttgaccaatcccgacccaatctcggcatagtcgatcagtgagaacctgtgatgtacctaaacaggcgagctcct

SEQ ID NO: 163976 - DNA, 407 bp, Glycine max
  unsure (1)..(407): unsure at all n locations
agcttcagaccaaagcaactcanaatctatggattatatacccctcaatttagtggtttttcaaggtttgagaagtgaaaatgagaatggggtaaatttggagcaaactctcacctcacacaagtctataaccttaatctaaacttgctcaaactggttttacgcctaaaattccaccggatcaaaatttgactcctcaacacccaatttaccctagaaatggctcttgccttcactttggtcattcatttttctcctttgcacagcccaagctttcccacagtcctaaatgaaatttcaaactaggattaactccctttaacctccaattaccaccaaatccagatttaacctttcaaactctcaaagcatcactcttttccactcatagcactacattctcactt

SEQ ID NO: 163977 - DNA, 382 bp, Glycine max
aagagaagttcaagtccatagccatcaaagtctgaagagagtatgatgaactaagggacgtcaatatggccaccactgaaaccttggaacgagaaaccaagaatgcctgaaaggaagaagacgaccaaagcaaagttttgaggggctttatagggcagcaatagtgagctcaagctccgaagaggtgaaaggaatcatcacgggtcaaaggcatgatcttgaaggacgagctaaaggcttgccttacgtcgaaaagaaatttgtcccaacagttaagcgagactgaagggaatatgtgggccatcatcgatgagtgcaaagagaagctaaatctatcggcgactcacgagcaaacgctagaggatgagtacgccaagatatc

SEQ ID NO: 163978 - DNA, 409 bp, Glycine max
  unsure (1)..(409): unsure at all n locations
agcttcagttgtgcataagctaaatntcatatgtatccaaacaattgccactcaaaaaaatggaatcatcaatcattacataacaaaacttattaaagattaaagagctagaaagtgaagtgcttacctcaatcattccacttctaaatgcagttatggaaacatcaatgaggaagaaatatactggaggcataggaggccgcaccatataatctattggggcaacatattctacagtaccctttgtaagctcaggtcgttgattcaaatcaattcttctgccagtggcatctaattgtgcataatattcactaggaactgtacataaggtacaatatattagcatcttaagtaagaaatattaaaccaattacatgtgcaagttacagtcaaggcaaacacacaactt

SEQ ID NO: 163979 - DNA, 361 bp, Glycine max
atatttgagttttaatttagaatttctaaatatatattaattatattaggtctattttataaaacaaaatatttattttccattctcttaagattttgttttactgagtcaactagtttgttacgtctgttgtgacaattgtacgttggtttcccacgatcatatttccaatggtcatattttcttgttgcaaaaatgcctatatatatctctctcctcttttctaacaatggtacagagcaatgtctagtttcttcctcccagacaattgtctatttctttacctataagaaacttatttttgtgagagcaatagcattggtgttcacaaggttcggggatcctttcgttgcacacgatc

SEQ ID NO: 163980 - DNA, 408 bp, Glycine max
agcttttcaaggaagcttttcaaggaagctttctatgctataaatagaagcatgtgtaacacttgttggaactttgatgaatgagagtcttgtgagacaaacttcaaagttcaacttctctccctcttttcttccttcaatttcatgctccccctctctctttctctctctctttcttttcctccattgaagcattctctccaagcttcttatccaaggcactctcttggtggcaaagctccttcttctatggcttatttcctagtggatggcgtctcctctctcctcttctcctttgtcttccactgcatctccatggtggaaaatcaccattgaaggacctcggtgaagctcatagatccagcctccatagaagcttcacaagcaagcttccatcaagtggtaatc

SEQ ID NO: 163981 - DNA, 470 bp, Glycine max
gcttccgttaccgagagctattcatatttaagcacttcatcctttgcttttgtgcagcttacgacaaacgtcgtttcttcttctttctttgttccaaagccatagctaaagtaccaagcactgttttaatcactcggaggcaccattagccaccacaaaccatcgttgttcttcattgaaaccgcacaccgagaggaacgcttcaaccgaagcggaatctttcaacttggcttgtggtttcagtagagaacgaaaccctaatctgaccttttgttttctttcgagggaaccatggatgtacacttggtgggttgttagtatcatcttggctttgcatctatactgactctggaatcgccattgcatgtctgatgcttcctctggaagaccatagagaaagagactctgtaaacgtcatcctttcatgaaatgcatggtatattcataacctacactgaactgccgtcaca

SEQ ID NO: 163982 - DNA, 383 bp, Glycine max
agcttgctaggtgagcatcaaaggacgttttttgcttattataacatggaggtacttccaaggctgattcatcaccatggaaattcgccctaaaagaggcgaaaacaggttataccaggcgcactccactgaggcattttatatgcaagaaagattgtaactcacctgacgacacgagaacaacaaccttgtactgaagcttctacggatgataacatatatggggataatgatacacggaggagacccattgttgccgaaataaaaaaggtgaataatggaacctcttcttatgtctcaaaagacttccattggtactgttcgagaaaagtgatcacatgacctgacaaagacactaggctgcaatcttgatacctcacatg

SEQ ID NO: 163983 - DNA, 83 bp, Glycine max
gcctacacctttgactggatgcacacctggttactaaccggcacatgccactttcttacagacccagacctatatacccttct

SEQ ID NO: 163984 - DNA, 399 bp, Glycine max
gaagcttcctgatggaaacaggttttgttattttttgaagcccgagtataagcaaggtgaacagcaaagttatctgatctcggctatgttcggatatggaaactacgatggaaaaaatcatgccccctacgttcgatctctatctcggggtcaactactggaaaaatgttaacacgggaaacagattctatatttgggccgagattattcatgctcccacaacagacaccatacaagtgtgtctggttaatatcgacactggtacacctttcatttcgtcattagagttacgacctttaagcactctcatttaccaaatcatgtcacaatcatatctatacctccatgggcggttcgatgtcggcggccctgttgaaacctattataaaaggtgaactc

SEQ ID NO: 163985 - DNA, 474 bp, Glycine max
  unsure (1)..(474): unsure at all n locations
nntctttggatctgattggaacttctgacttgaaagaatttcttgtgttttttgacacacaacactcaatacatgactgtttttctatctcaatttcagggagatcatgaaccattttcttgcttttcaattcacttaaactcctgaaagttagatgaccaaacctgtgataccacatccagctttcatcacttatagaagcagccaagcattgaaattctccaatctgaattccaatcttgaatgttctgttcctttaaaaaggggcctttagaatcaacctcatattgctatcaaacatcttcagttgattgtcctccatctgcattgagcagcctttttctaacaagtgtcccaaactcaacaaattattcttcatatcggaacatatagcacatcatcgataaatgagtgttgtcatctttccttaaatcatacctttcaatgtcttcgtagtacaaactgtatttgaac

SEQ ID NO: 163986 - DNA, 383 bp, Glycine max
  unsure (1)..(383): unsure at all n locations
agcttagaccttgggccatttatattatgttatcgnttctaaacccagatttgttgccttttgatcttcatttttgtttggcttggtttggtatgttcggatttttcacatctatatcggagtatgcgtttttgttatggtatatgacttttcgcaggccaagaagacaaaagcttggacctttgttgatcttgaatgtgcatcttttagtacttttttttggtgttgtcatttattttgtcaaccctcttttattatttcaatcctctttaatttggtttcctattggccaagaataaccaagaagccgaagactatacctactggtttgctcttcaattgtcttatattttcttaagaactgtgtataatgtgtttgacat

SEQ ID NO: 163987 - DNA, 253 bp, Glycine max
  unsure (1)..(253): unsure at all n locations
tctgcacttcttgcataatagcgctgttgaaatgtgcagcatactttngtgctagtgcagaaaaatgcttatgtatcgccggttgcgaaaagggtagctcatatgggggactggacattttctatcagatcccaacggtcagaatgtacacttatgtactagaaacctcttgacaattgtctagtcgatccaactgttaacgaattgtaacgaaggagatgttactgcggtatttgtatgtgagaagctactc

SEQ ID NO: 163988 - DNA, 398 bp, Glycine max
agctttgcccacaaaaaggtctattttatactgtttcaagatccaacgtcttaaacggtccttttacttttattggttaaaatgaaccgtttaaaagtataaaatcaacacttcgtgtaattttcttgctttctcaaagaactacgtaggtctaagttcctcatcacaattgaggatacgtaggagcaaaagccccgcttttgtcgaccccaaaagataaaaaaacataaaaaagggaaaataaaataaattaaaagtcatgattttgcacagttgattaaaggtttccgtcccttgtgacgaacgcgtggggtgctaatacctttcccgtgcgtaaaaacaacttttgaaccttttattcttaaagttcgtagacccgcttttggtttttcctaacg

SEQ ID NO: 163989 - DNA, 455 bp, Glycine max
  unsure (1)..(455): unsure at all n locations
tgttcttgactcatcttctccttgaagtggcgactccaatcatctttcttccttctccattccgctgccattgaacttgaagaagcaaaggactccattgatgaagaagatccaaggcctacaagctccacatggagctacatcatgtggtatcaagagcatcttcgtccaggtgatgttcttttgcttcctctatctttntgttcgatgaattcactttaattccttgttcttcatcttattctccatgtataccctccattgtcttgtggtttggtgctgtttagagtagattcaaaaaaataaagcgattaaatcttagatctacacttgttcttgcatttctatggttcaaattttatagatctactcttgaatcactgttttgtgttgaatttaggttctatcatttttcagtcataatcttcttgtgctgaatcttagatctaaatttc

SEQ ID NO: 163990 - DNA, 311 bp, Glycine max
atgcaagcttcgcacgccattcctggatgcgcatgttattcatagtttctctcactggagccagcaagccgtgccgaactgttcatcaactctaaaccatgcgctgaaccattcgaggtgaaacagacttatcttgggtgggacacctctattcgaagagctacatcttctcacactctaacaaaagagcggctctcttgtcgtcctctaaaatcaattgtgcacactttaatttgcgggcggccattaattcgaccgcccttagctaatgaatgaccatccagtaacaagggttcacgaggggccaaatt

SEQ ID NO: 163991 - DNA, 380 bp, Glycine max
  unsure (1)..(380): unsure at all n locations
gcaccaaatgatacaggttacccttggcacgcttagttagtgtgctactttggctgaatggaagaggagatgagtacaaaaactttttgggattggtaaccaacattgatctgtcaagtaacaaattactacgagaaatacctanagaaatcacacatctaaatgcattgaactttttgaacttgtcacacaaccaattgattggtcatattccacaaggtattggtaatatgggatcattacagtccattgattcttataggaatcaacttctggtgaaatccctcaaccattcaaattgagcttctgagtattctagattgtctataatattgaatgggaaatccataggactcattgaaacttaatgctcnacttat

SEQ ID NO: 163992 - DNA, 410 bp, Glycine max
agcttccatcaagtggtaatcagagcacaagtattttaatgttgtgctccttaaacctccattaattttttttgctttaccttctcttccattgttttttttttcttcatttttctccatgtatctcctcacatgtcttgttctaaatgttgttaacatgattctttagagtttacaccgattaaacttgctatagaagttagatttgattttctatggttcaaatttcttgttcttgttcttgaaccatgaattgtgttgagtttaggttcctttgagttttgtcttgttattttttgtggctgaaacctaaaccataaaattcttacaaaagtagtaaagtagaagacaacctcaaaaatctagagttacttgttcacctattgtagttttgtcataaaagtcatgtc

SEQ ID NO: 163993 - DNA, 328 bp, Glycine max
tccacttggaccccatttctaccaactaccaaaactcagaaaactatattatctatacaaaaggtacacttctctatatttgcataaagggtgattttcctaatgactgaaagaacttgtctgacatgtcctaactgaaaatctaggctcctactatacactaaaatatcatcaaaataaacaactaccaatctactctatgaaatcccttaagacatgatgcataagcctcataaacgtgcttggtgcattatagagcccaacatgcatcactagccattcatacaaaccaaacttggtcttgaaagcagctgtgcactcatcaccc

SEQ ID NO: 163994 - DNA, 415 bp, Glycine max
agcttcctcggggccattcctgcgaaggcaatattttgtaaagttaattttaccagtgggacactattcttaaagcaaaaatggcatataacctcctctcataaatacaaacatcaatgtaaatttagagcaagcttatgcgcatatttccttacgaacgttctcttgcacaagacattctattaactaagaaaaatgcacccatatacaatcaagacagcttcgttacctagattatttacacgtacttccaaggtgtatttgttacttacatcacacacatctccttggctaaatttacatacatgcatactcaaagcattttggggtaccaaaaattgcacatgtgcacatcttggtatttctaatgcctatacatacacaaacttcatgatgaatcttgactatctacaca

SEQ ID NO: 163995 - DNA, 181 bp, Glycine max
tcagaacacttggaattgggattatacatggagaaggaaccttctttatcacatgactgagcaagcaatacccttcatggacgatatatccgctatatctattcatcaacagctgcaggactcaatgctgtggaaagcagaccctactgcgagctactcctactagtcagcatatacgctc

SEQ ID NO: 163996 - DNA, 412 bp, Glycine max
  unsure (1)..(412): unsure at all n locations
agctntttggagtagaaacatgggaccaacttattttatttcaaaaaggaagtcatatctagtcaaggtctgagagaccatacaagtttcctaacgatttctaattatgtgggccattaagtctatcatatgctgacaatagccgagaagcccatgaatctcttcgggggcggagtaggtgtctgccatcgccttggccttggctaacaatcggggaagttcttgactcccgttcaaggtaagagcaaaccgatccatccacatggttgcctcttggtgtaaagagtcgatcacccttcctctagcctctttttccgcgtatacttgggcatactcatccgcgattctatgctcgtgggccgtggctagacctaactcttcttggtacttggcgatgatagctaacatgttg

SEQ ID NO: 163997 - DNA, 410 bp, Glycine max
  unsure (1)..(410): unsure at all n locations
agcttgtgttttagccngggatgaatgtttttttntttgtaaccttcgatttcatattgaggttgtgtggttggcatgtanggtaccatcaaccatagatgctgttttgctttcacatgcggatacacttcaccttggtgcccttccatatgccatgaagcggcttggactttctgccccggtttattcaacggagcctgtctacagattgggccttctcactatgtatgaccagtacctctcaagaaaggtgaaattccatgctggtttgtttgattttttgttgctaggaggaagattttttgtgcttgttggtttgtacgatgttgaatatctcatcctcttctgtgtgtgtgattgcctctttaatgactagatagaatttggaaaatgtgtgttatataactgga

SEQ ID NO: 163998 - DNA, 328 bp, Glycine max
attatgaaattgagcacgtagaggcgccaaagaagtgatgtccacaatgaccatgaaacggtttgagtagagagcaatggaagacatcatgaatcttcgtatccgggggaagctgcagtcgataagccactttgccgatggcttcagtaatcttgaatgggccataataccttcttgctagtttccctgcagagctctgaggacctttagctgatgtttgtctgtggggtcgcaatttaagccaaacccagtcacccaaattgtagcatacttcgcgccgatgacggtcacgctgttccttcatgcgactttgggctttaaaagcttc

SEQ ID NO: 163999 - DNA, 408 bp, Glycine max
agctttataagtgcgggttcgggagactttagtatttgttcgcgatatgcgaagatgatattccgagtactttggatttggtacgaccatgctctcctgatttccagctgggaaattggcgaatggaggaacgccccggcatttacgcaacaagcataatgtaaacctttacggttttaaaagctctatagttgggcctaggctttagagttttcattttgttaaggctttgtgtcttttgtttttgaatttataatacaaggatctttcttcatctgttcctggtctctacccattctcattcatttgcatgtttacttctttttctaaaacggcagattcgatgacgagtcccccgaagatactaatacctgggacccgtctatcaacttcgagcaagaaatgaat

SEQ ID NO: 164000 - DNA, 404 bp, Glycine max
cgagtctatattgttaaatgtaaaaaacaaagattcgtgaatcgcaaactgattcctaaagtatacttaagtaaatatatatcacatatagaattacaatctaaaatgagttgttgcagccacatccctatatacattaataaatttatactacaagtcaggatcttatctatacattgaaaacatgtatgaatatacactaattatattgaaaatgcaaactacaagaaattcaaagcacaatttaattcaatatttataccacaatacaccaaaattcaaccaagaattactgcataataatttcaataatctagaccaaaattagagtgaagcacttaaagtttcgaacccattctctatggcatgcatattcatttaactcaacgagccaaatacaaaaa

SEQ ID NO: 164001 - DNA, 410 bp, Glycine max
agcttgtagaattcaccccaagaagcggttgtttatgctaacttgctcccatatctacttgataatgcaatggtagtcataacccctgccagggttcctcaacctccatttttctgaggatacgactcgaacgcaacatgtgcatatcatggaggagttctgggacattccattgaacactgtatgacctcgaagcgtaaggtgcaaagtctgattgatacgggctggctgaaatttgagaatcacttgtgaatcctagcattgacaagcgacaccatacatggggcaattttgaaagctggtgttagatgtctctaatgactcatcaggattttcaagtttatgtcattattgtaaaccacagttacaatgctaaatgaaataaatttgacatctttgtccatcatcct

SEQ ID NO: 164002 - DNA, 451 bp, Glycine max
tcgcctttcctaactcgcttttgagagcttggacttcttttgtctcttccggtgcttcaaaactctctttgctgacgacttttaacttggcgagcccatccaaacctcttgctgaatccttgaccacagttgcaattctgctcaaagaggggagacacccggatgaaagatatggttttcttcccccgagaggacatcctagaatttcctcaaattcttcaatggttggtactaattggaagtctcccaatgtgaagcatctcaaaggctggtcgtagtattgggtgagtgatgcaatggcttctatggatacctctgctaaggtcaattctaagatctttccgtaagtcttgcggatagcttgcatttggagaggttccatcaaccgccctaacttcttgatgctggtggtatctaagcttttaaccttgacttggcagaacctcttgcc

SEQ ID NO: 164003 - DNA, 404 bp, Glycine max
  unsure (1)..(404): unsure at all n locations
agcttgcctcaaagaggtccaggaatgtttttgttgtcgaaggaactagttccgctccggagtatgacagtcaccgctttaggagcgctgtacaccagcagagcttcgaggccatcaagggatggtcgtttctccgggagcgacgcgtccagctcagggacgacgagtatactgatttccaggaggaaatagggcgccggcgatggacatcactggttactcccatggccaagttcgatccagaaatagtccttgagttttatgccaatgcttggccaacagaggagggcgtgcgtgacatgagatcctgngtaaggggtcagtggatcccgtttgatgccgacgctatcggctagctcctgngatatccgttggtgttggaagagggccaggaatgtgagtat

SEQ ID NO: 164004 - DNA, 399 bp, Glycine max
  unsure (1)..(399): unsure at all n locations
atccaacttgggaaaaatcggatgagggcaagagtgatttcgcctatgtgcactattatgcctaattttgccgctaaagtgtgcattatgaattgtgcgcttgtgcacaagatgcttatgcattgctggatgtggaaagggatgtcatgatgggttctggacaatttctaccatgatcccacggcctaaatgtagacttatgtgctacggacctccatgaaaactatacagtcgatcctacggtgaacaaattggaacgaagagaatgttactgtagtatctgagtacgaaagctgtngattggcttgtgtttggcagagatttctgctcagcctatctgatgggctgataccatgacgtcggacgcgaatccttggtgttgtgaagctggcggatgat

SEQ ID NO: 164005 - DNA, 389 bp, Glycine max
agctttgaccatttgaattgctcaaatgtttttattgtttctttttgaacgtctcgatatattatgcgcctgaatctgacttccaagtgaaatgttatgatcattagaatttctcgactgcttgcgctaatagaattcgagcgtatcgatatattatgcgcctgaatctgacatcctagtgaaaagttatgatcatttgaattgcacaagagcttccattgttgaatatcgctcgtctcgatatattatgcgcctgaatctgacatccgagtgaaaagttatgatcatttaaatcgctcaagaacttccgttgttcaatgtctaacgtctcgatatattatgcgcctcaatcggaccttctatagaagagggatgaccttaggaattgc

SEQ ID NO: 164006 - DNA, 385 bp, Glycine max
  unsure (1)..(385): unsure at all n locations
agcttgagagactggaccctagtggatgcttttttctcatcaaatnttcaagagatgatggtcattcaagctccctactttatctcaaccttagtgactgtgaagaactaatggaattctcagtgacagccgagaatgtggttgaactagatttaaccggccttctcatcaattcattgccctagtcttttggaagtgtacgagaagtagaaatgctacatctaatacgtactgacattgaaagcttgccaacatgcatcaataatcttacaagactgcgatatcttgacttgagtagttgagcagtctctgcattctaccgaagctctccccatcccttgagactctacatgctgatgagtgagaatcactggagactgtatcg

SEQ ID NO: 164007 - DNA, 338 bp, Glycine max
  unsure (1)..(338): unsure at all n locations
tatcatgaaaaacatgtcccaacccattatgccattcattttatctaatggaacgcaatagcccgaggctacaagtataggagaacctacgcggtgaggaagacaagatgaatagcccttctctccattcagctgatccaaccatactcaatgaggatgggtgctatatacaccacccagtaaggtgaaaattcatggaacaccgtagattactacgagtcttgacactganatcaagttctaagtgaaagaaggaataaacgagacatccgtaacgtaaaactggtcattacaatgtatagcgcctgctaaactcggtcgaatttgaggcccatcac

SEQ ID NO: 164008 - DNA, 406 bp, Glycine max
  unsure (1)..(406): unsure at all n locations
agcttgttaattaggactgcactgctgaactttttgagaataggggntgaaaatgaaaagttagcttcctgtttactctatgaaggaatggcatgctacatgcatgatcacaaaattgaatgtaagtatgctccggaaatgcaatcaagagctcatgcttattacaaatcagaatgaatcaaaactgcaacaactcttgaaccaaatacattgaaaacaaaaagccaactagagattaagtccaaacaacttgaagatgtacaaaggcacagggaccaagcttacctcgaacccaaacagtgacaatggcagtgagatctaaaacaatggcgcggagtcttgaagctttcctcctacctcgattaggtcaccacgaaatgtacctagggttaaccaaaacaacaca

SEQ ID NO: 164009 - DNA, 220 bp, Glycine max
  unsure (1)..(220): unsure at all n locations
cctgacttcctataggacagctctcttgaatcgtgagaggtgaccatgcttcttcatactcacagctntaatagagacatcaccttattgtgtgtgatcaacaccatggctaagaatgcatcctgcagtccggggaatatggtaacaagctacatatggctctagtctcattcgaagacacgcgactaacccaggagcacgacatggttgtctgcgttgt

SEQ ID NO: 164010 - DNA, 392 bp, Glycine max
agcttgccagaactggctaaggaactatggttttctattagaaggtaagcttcggggcgtaccatggatcttgccgaccataaccataaaaagaacggcgactgtgtgcaaagatggtgtgttggcgacatgcctatatgaatacccttcgagaactggtctaccaccataagtataattgtgtgtccgtggaaatcatgaaacccaattatgaaatcgagggagagatccttccatggccgaaatggtactgggagaggacagagcaagcccaccaccctcttagtctcatattgggcatgctgacaattaacacaagaggcgacacatttgtcaacatcatttcacattccagaccacatgaagctctcgcgaatacgcgtaacattttt

SEQ ID NO: 164011 - DNA, 412 bp, Glycine max
  unsure (1)..(412): unsure at all n locations
tgtccgcacaacatcactagaaaccgttgtaatgtctgactccttaaacggtcctctctgcttttatcagttagcatggaccgttcaaacgcataaaatcaacacatgactttactgccttctacgacaactacgtaattctgatttcctctttgatggaggatacgtacgagcaaaagccccgcttttgtcgacctcgtgagatggttagaggtccaatgccttacctcttctcaccaagtaaaatggatcattttaaggtccaacgccttacatgaccaccttccaagtaaaaagaatcacttgattccgccattctgaaagaactacgtaggtctgatttccttatcacaatngaggaatacgtacgagcaagggaaacacccttgctgaccacaacagataaaaatac

SEQ ID NO: 164012 - DNA, 379 bp, Glycine max
cccttttgagccttggttccctttccttggtttgaagctcactacaagccttaagtgaaaaaccatgatattaccatatccttaaggaattttggaactttggaattggtttgggaataaatgtgggggggttttgtttcattggaactacttgtttgatgactatgcttcatgatgtatttagggccatacttgatggacattgtatattggtttaatgttggacatgctgaatgaaatgttgttctcaaaggtaaaaaataaagatttgtaaaagaaaattcgaaaaaaaaaaagagaaaagaataaagtggagtgaataagacttaaatggcccagaatgatgaaactcctggtatactcttcatgttaatattta

SEQ ID NO: 164013 - DNA, 455 bp, Glycine max
  unsure (1)..(455): unsure at all n locations
taacttaactaagctctaaggtttgcaaatgagcagataactatattagctataaattcataccgccttggcctccttgtactcattcactgccttgtgggaagcataagtgaaattcacatcacgtcccaattcggggacaataaagtggctggatcaatgcacatacacatcaggtcagtaatgaaatctttaccaccatggcatcacaagtacaatcaatacaacaaaaacctgagctgccacttactagttggtgtcaaaccacttcgtcatctccatggcaggcacagaggcattacctctggccatggagaagtaggtatcgaattctatctccccattgttcaacccatatctgggtggaacagcaccaagcatggcggtagtatcaagcatttgatcatagtacgagaaagtgtngctggggatatacttgattccagcatcagtca

SEQ ID NO: 164014 - DNA, 351 bp, Glycine max
ttcatcatgtcctcatttatacatttcattctaaaattcagagattcatgcaaagattattactcacagctagtcgttcactcacagtgtaagaacacactttcaccggttttggttcaagcttttctttttcaatcaatctgtctactgactaacaattctaacacaaactccatcacaatcctgccttccattcaaaataaaagcatacaaccatttttcacaaatcaataaaagtgcttcactgccatatcatttaaaaccaaggtaaactgttccaaatgcttcacgatgagcaaaacaaattccccttaataaaactagcagtgtatataaacattaaagagatac

SEQ ID NO: 164015 - DNA, 453 bp, Glycine max
  unsure (1)..(453): unsure at all n locations
nntgcggattggtcttcaccggccaaaggatcaaaatgggtctggaaaaagacaaatttgattgtcataccctaatttcgtccgggaccattgtttgatggcatgcaacctttgcttgaccacttcgaggtacttggcacccattgttgcacaatacttaaagttccataacgtgcccgaagtcaaaagagagcattgttgcacgatccgtgaaattccgtaacatgccggaaatcaaaaggaagcattgttacgcaatccgtgaggttccataacattccgaaagccaaaaaagggatgattacgttatctgtgaggttccgtaacattacagaaggaaaacaagtatcgttacggaattcataaatttccgtaacgttacggaaaaagaatcagcanaaaaagcagggggtgtatttagtaaatagggggtgaaaatagcaacaaggccca

SEQ ID NO: 164016 - DNA, 458 bp, Glycine max
  unsure (1)..(458): unsure at all n locations
ctaagcttaatgcgtgaagattaaataattgcgtcggtataaacatatgtataacgtgcttcttgtcccgtttaaacttcatgtatattcttctttcacaaatatatctccataaaaaataaaaacatcaaattaagccaatattgagtcagattcacataacaatttcctgtagcctttgtctgaagcaagttgcagcccatgaaggcaataaatccagctgtccaaattcccaaagatcaaatcaccaactaatccgccaaagccacaatttggtgattaagctgtgaatgaggataataagttccaagttgttaatagatttaatacctgttaagacattactaaatgattttagttcaaacccttaattgtatctgtgaaataaatctctcttctaatgtatntaaagttgacacattacacgtgatatttcctatataacctcccaaatatta

SEQ ID NO: 164017 - DNA, 405 bp, Glycine max
  unsure (1)..(405): unsure at all n locations
agcttntaactgaatatgcaatgttccaaatgttttttttttgtgtcattgattacaatatattggtaatcgattaccaatgtatctgaatgttgtaattcaaattcaattgtgaagagtcacatcttttcataaaatgctttgtgtaatcgattacatgggtatgggaatcgattactaatgacaagttctgaataaaaagtcaagagatgtaactcttccaatggttttctcaagattttcttaaggttataactcttccaatggttttcttgaccagacatgaccagtctataaaagcaagaccttgacttgcattcaaacaacttttacaactcttaagaacttcttgaacaacttttgagatttcttgaactctttcttctcatccttcttcttcttcct

SEQ ID NO: 164018 - DNA, 472 bp, Glycine max
gacctataaaactaagcttcatgcgaaatttttcaagggcatctagcaacctcttactttattgttaactggcatgtattctgcttaggctcgcaaacctcttcgcacaaaatactgaaccaatatatcgtgtgtgaccttaaccaaagcaatcacgggcatattttgtgcacctttgaagatcttattaattgtctctgacaaattggttgtcatatagccatacctacgaccaccttggtcatgtgtcaagctccatttttcttttgaaatgcccccaatctaacgctcaatttcctcatcaatctccttgaatttttcaagtttctgttcaaaccggtgcaaagcatgttgtataacctgtagaagagtggaatcaaatgtgttgaccagtaattagatgtaaatataatgatgaagaagtacctaatttgattagctctgtcatataactctgaattcctgaatttgt

SEQ ID NO: 164019 - DNA, 306 bp, Glycine max
tcttttccgcacatcttaacacgcagcacacttaacactatttttcctttgaacacaaaccaagggggcaccaccaaaaattactaaggtcataatatatagtccaccaaattaccatatcatagtaaaacaattaatcagctaatagtataacaaatatccacataaaactaagctattatcaaatacaaagttaaaagatactaaagctaccaatacacgtatataaaatatacatctaaacaagacgggtgaagcaagcccacaaataggaatctttcactaggagcggatcagcttaaacac

SEQ ID NO: 164020 - DNA, 434 bp, Glycine max
tcatgattgaatcaagagtgattcatgatgatgaatcattattgattcatggagttttgatgataacaaagatgatgacaaaaagcccaagagaatgacttccagattgagtcaagaacaattcaagaatcaagaatcaagtttcaagtttcaagaatcgagaatcaagaaccaagaataatcaagatcaagattcaagactcaagattcaagaatcaagaaaagactcaatcaagataagtactaatatttttttcaaaacattgagtagcacatgaagttttcacaaaagctgttaccacagagtttttactctctggtaatcgattgccagtttactgtaatcaattaccagtagcagagtttggtttcaaaagctttcaaactgaatttacaacatttcaattaatttcaaaatggtctaatcgattaca

SEQ ID NO: 164021 - DNA, 279 bp, Glycine max
cttgtttggtgtcacccaaatgtagtaaagttatgcaatgcatgtcatctggtggtttttatagacagtacctacaaaacaaacaagtacagactcccactacttgactttggtggagtgacaccaacggtgatgacattctttgctggggttgcatatctggaggctgagcgtgttaataatattgtatgggctttagaacgatttcgaggcctatttttaagacacgaatgccctcctcttgttattgtcactgacagagacctagcattgatgaat

SEQ ID NO: 164022 - DNA, 362 bp, Glycine max
  unsure (1)..(362): unsure at all n locations
ggagttgagcaggtaaaaaagattcgtcttcaaactcttagaggtgactntgagcgtttgtttatggaggagtccgagtcaatttctgattatttttctcgagtattggccgtagtcaatcaacttaaaagaaatggtgaagatgttgatgaggtgaaggtcattgaaaaaatacttcgaactttaaatccaagttttgacttcattgttaccaacattgaagaaaacaacgatttaaagaccatgactattgagcaactcatgggttccttacaagcatacgaagaanaaccaaaagagaaaaattaaacaaaaggaggctacggagcaactactancactcaacgtaagggagcaaacta

SEQ ID NO: 164023 - DNA, 340 bp, Glycine max
  unsure (1)..(340): unsure at all n locations
gaaacgaaaaagggttcaaccccttatgcacttctctctctttcgaatttgcttggaaaaaatggttccgtaaaaaaaaatcaagccgaggcgcttccgaaatggtttccgaacatttccctgaggaatttcgcgaaggtttcgaccggtcttcgacgttcttcattcgttcttcatcgntcttcgaacttcaaaagggtaagtacctcgaaccaagcttttcgattcattctatgtatccgtggtggtccacattgtgtttcgtgtatttttattctcttttcatttactttntatacccccttttgacgtgcttaagccattttatttaaatcatttc

SEQ ID NO: 164024 - DNA, 464 bp, Glycine max
  unsure (1)..(464): unsure at all n locations
ngcttctacaaaatcaacattaacggctaattaacgattaatggatgacaaaaatttgtatcgcataataaaatatgtgttcgtaattaaggcaccaaaattataaacctaccaaatgttactgcccatacataaatgtatgaaataaataaattatcaaaaaaatacaaatgacatgtataaggcaaataaaaaaacagcttcaatgatcgttcgtacgccacatactcctcgatttgtgacctacaactggttggcaaatgaatcttcttgtgatccccacacattcttcagcaacaatataggcttttgttccttcgatcgggatcctcaggttcaataacctctccaacttatccgcaattgccacaaaagcatcctagcacctttcacctacgttgttgggaatcccaacaaaactgttgggtgcccaaagcaacaccctattatcaattgagagcgtg

SEQ ID NO: 164025 - DNA, 458 bp, Glycine max
  unsure (1)..(458): unsure at all n locations
tggaatggcatttgggcacctattgtgaatctcctatgttgtacctacatataagaaacagtcccactctcccaattttacaaaatcatattcatacatcattggggcatttcaccgagcacttggtgagcgcatgtttggacataaattgcaagaggatggggacaatgtggcatgccccattgcttcagaatacagcataggcctaaggccttctcattcaaatcctcaactcaagaaaacaagcataaaaacaaaccaaaactgccccacaaatataagcacattctcacaatttggagcaccaaaagatgaagaaaatataccaatgggaagctaaaaacatcaaggattgaatacttacttgttggagtgaataataacaccaaaaatgaaagcaaaaggcaaccganagtggcttgagggagcaagaaccgcaagccttcgtgttctttctt

SEQ ID NO: 164026 - DNA, 93 bp, Glycine max
  unsure (1)..(93): unsure at all n locations
ccgagctgcactcaaaacttcctggcccaggtttttttttctccagccacggcncaccctctcctccaagccaaaataactcctgggggtgac

SEQ ID NO: 164027 - DNA, 174 bp, Glycine max
ccgctgaggaggagacctttttttttaaggcacagaagctacctgctgtgggatcacgccatcgtggattgcacacacacaccgctggcaaaaaccaagctactgtgaagtaagtgaaaatataatgacttaggtgaaagtgagtatagcatggggatcccactaacacttatt

SEQ ID NO: 164028 - DNA, 296 bp, Glycine max
acaaagtacttttggcacctactatatggtgatttgaccaacgctgttatccgtatgttgcggcaatccttcaataccttatttatacattctgagaggatcgttgtcatgtggtcatatcgacctccttctttatcataagccatggtccacttttcctttgaaatgcgatcaatccatgttgctatggctggactcaaatgacagaatttatctaaaattctgatcaaaaatatgtttgcaaggagtataccctgcatgaaattagttagcaacaataaattgaagtatacatg

SEQ ID NO: 164029 - DNA, 366 bp, Glycine max
atctaattgattactaaatgtagaattgtgatctcagcccaaagacttccttctgctgaaactggcttatgtaataaattattgaaaatagtaatcgattaatttgataatcctttccaaatttcaagagaagtgagttttgttgctggttctaacactttataattcattactacacttggtaatcgattactctgtgttgaactcattgcttcttagaaactctgagatcaatacattgatcttatcacttttgatttctactaagcatggataatacatttaccttgatgatcaatacaatttttctcctttctaccattacttgtcaacattgacaagtaaaaaccaaaagaaatgttactc

SEQ ID NO: 164030 - DNA, 143 bp, Glycine max
gtctctggaagggtttctagtataagatatcaaccgaattgccctggatgatgaggaccctggacaccatgaaattcactatgatgatggaaacaaccatggggtcatcttggttgacgggattgatgcccttggagtcccta

SEQ ID NO: 164031 - DNA, 498 bp, Glycine max
acactatgatactaagcttgctgattacatctcctatttctaagcaaattcttcttgatatcatcaaaatcttcatgatttacattctccccctttttgatgatgacaaccacctgtaggttaggagcaacaacaaagaaaatatctatttgcatatagtttactcccccttggttttacaatgattgcttatatgagacaattgaagatttcatatttttcatatataaaaagttgtctcataaaacaatagataatttttcttactattttatcttttatctttctctccccctttgtcaacatcaaaaacaaatcatgaatagaaaggagaaagatgttaccacttgttgcaatgtatgagaatcaagtgataccaaaaggcattaaaacaatcattcaatattaatcaagcaaaaacaagtacaataacacatcaatcaaacacaatcaatcatcaaatatttcaaatcaaattaattaaattaacaatcaact

SEQ ID NO: 164032 - DNA, 372 bp, Glycine max
tcaataatacttcctcagtatatcatattctaagaaaatgaaattttaaccattgaaacttgaaaatatcaaaaagtcatctatcattgacaacacgtgaattactacttgtacctcaatatattgcttatcatctacatatggatatttgattaactaatgaaccttcctaatccatgaatgaattaaggggtgcattataattaccttctcatgctaggatgctcctttgtttgacttttgtcatataatgaaatatcagatattgtaacaatttcactgtttgggaataataaaaaaggtgctctactattatatataagaaacctagagctatttacactgattaataagatgaaatatttaatatag

SEQ ID NO: 164033 - DNA, 482 bp, Glycine max
  unsure (1)..(482): unsure at all n locations
gggctgggcttggctcatttccacccctacttctaagatgtatttatttcatgctgtgttgtcatgaaaaagaaacaacgatcacgttgtatcgtgaagcaatgacgtatcccatatccgtaatattcatccacttattcatcgtaacctacatgtaacagacaacaaatagtggttacttaaaatgttattttaacaaaaaaaaatgacataataataaaattacgcaccttagataactcgtcaacaagtagataacgctntaattcttcaaatctctctatgccaccaaccaggttcatatactcttcggaccagttgctcagttctttatgcaaatggttcctcaccaatgaccacaattcttcactcatacccaataatgcagctattgcacgataaccataattaccatctgctntgacatcaataatggtatcaatagaatcctggatgcaaggatgaaattgattcaacattgg

SEQ ID NO: 164034 - DNA, 360 bp, Glycine max
agatgcagtgtatctgaccttctctgaaaagaagagtcctctgctcttttcacatcttccaactggtcttcagacagcacttcattgagttcagcagaagaattgagaacatttctcttactacctgccatagattccccttctaatgatgcatccattacagtgctattgccagaaccagaacagtcatcagaggagtcaagccacttgatctgcccaaaaccaataataattactaccaaaacataagcagcttcagcacaaaaattgttgtgaactgcacacctctattacattaaaaatcctattacgtggacgccctacatacatgggtaggttcccgtcaaacatgctgtcctc

SEQ ID NO: 164035 - DNA, 462 bp, Glycine max
  unsure (1)..(462): unsure at all n locations
tggccttgtggataaancacagttgaagatacggtattgtttcttgtatcaattnttgctgccgacaatttttactctgaaaatgggatgaaatttagtggttctttatccattcttgactttgatccatcacctcggcatttgatttttttttttttaccaaataaagcaccaattgagctcaaaatgatcgacagcaaatttagtcgcaaaattttttttcaaacaagaatgatcacttcaaataaaatttaccattttcattcaattttttgttaatttgtccaagctcaactaagatctattgtatctgttaattaaaaaataaggatagttgatggcgattatttcacaagtttagtgcactttttcataatctggcccgttaaatatgcactatctttcctttattgaaactacattattgccatccatgaatacactggtcaataaaatatgaaa

SEQ ID NO: 164036 - DNA, 368 bp, Glycine max
accatttttttacacaaattttgcggcttctctattggtgatgaccatggagggcttaacaatgaatccatccaaggatccactaccagccaagctaaatttgaatcccaaattgagaattctactctttgcgaatggtcttccttctcttcaatcatattttcgtctttcatgaatgtgattacatttaagaatgaaaatggattaaggtatggattcatttcataatttctaaaattaatcacaaattggttggaagaatgtccactctaatatgccgcttctaaccatctagagatttaatttcgatgaactttctctaatgcatttgagcgaactctcacattgaacattatttgtagtgacta

SEQ ID NO: 164037 - DNA, 465 bp, Glycine max
  unsure (1)..(465): unsure at all n locations
tataagaacaaaattgcctcaatcatttccaaatatgcatgttatttatgacgcatcaacaagaatcaagccaaggctattgtgcaagcaatcaatggggcaaaacacaccaaatgattatgatgatggatggctcaaattctcacaaaggtaaaatcatcactttcaaattgagctttcaaaactatcatgacatgtagagaagaatcaaggatttcaagtcacaaaatgtcaagaacttttattttcaaaacaattacccatttcttgaacatatcctataattcaaagaanaacatgcaaagtcgtacgtgcacacaaaattgacccaaaatattaaactaaaaatccgacgaaactaacaacattaacaaattaacacaactaacaaattaacaaaaccaacaaaactagcaaaaccaaagaacactccccccccccccccatacttaaacaacacattgt

SEQ ID NO: 164038 - DNA, 258 bp, Glycine max
  unsure (1)..(258): unsure at all n locations
taagctcacttcccatgacttcaaaacaaaatgatgttggcacttagcacatcctttctcgctaaacccaacttgatagctcatcttacataatgaatctggggcttaatgcangatggtgcgcttancgcagctataataacttttcacacagaagaagtggcgcttagcgcatcattcacactaagcccactgcttaaggtgcaacttataatgaagatgttgggctaagcgcatcaatgtgcgcttaactgaacc

SEQ ID NO: 164039 - DNA, 479 bp, Glycine max
  unsure (1)..(479): unsure at all n locations
tataagaacaaaaatgcctcaatcatttccaaatattcttgtgaattangacgcatcaacaagaatcaagccaaggctattgtgcatgcaatcaatggggcaaaacacaccaaatgattatgatgatggatggctcaaattctcacaaaggtaaaatcatcactttcaaattgagctttcaaaactatcatgacatgtagagaagaatcaaggatttcaagtcccaaaatgtcaagaacttttattttcaaaacaattacccatttcttgaacatatcctataattcaaagaaaaacatgcaaagtcgtacatgtacacaaaattgacccanaatattaaactaaaaatccgacgaaactaacaacattaacaaattaacacatctaacataataacaaaaccaacaaaactagcaaaaccaaagaacacttcccccncatacttaaacaacacattgtcctcaatgtagcacaattaa

SEQ ID NO: 164040 - DNA, 161 bp, Glycine max
ttaaaccattaagggtcactcttagggtcaacaaagacattaggctgattctaagacttttaacgaaaagtcagaaaaaccttttgatagcttgaaaaagctttattccatacttggccctgttaaacctttacacaaaatttttggatcccgacaatatt

SEQ ID NO: 164041 - DNA, 462 bp, Glycine max
  unsure (1)..(462): unsure at all n locations
ctcagctaagatccgcctcctagaagcccacaagcagcttttatataaatggatcaccaaaggcttaggcttactcgggtttctgtcactccactgcatgcatacctccccttcctccttctttgcattgtagatttcaatttgccccttgtttatcattccctgcagtagctcctcagctattgggcatgtttccacatcgtgcaacgcccctggatgcattaagcacggatctcctttgtcatcatttttagtcgatgaatacgactaacttttgtgtataaaacctatgtaaattgtatcaaacttcctccaattaatggttattttgtagtattgtaattactttttgttaaagataggtaataaatacttagtatttccattntgtgtgtttaataatcatttcctctcaattcaggttagttaggcacgtttgtaaagtgctaattttattctctc

SEQ ID NO: 164042 - DNA, 407 bp, Glycine max
  unsure (1)..(407): unsure at all n locations
gctttgtggcaagccagtgggtggatgttttgctggatggtgaagttgatttgtgggattcataatcatgaatttgccaagtcattagttggacatccatatgtcgagcgattgagtaaagctgaaaagacacttattgctgatatgacgaagtcaatggtcaaaccaagaaacattttgctgactctgaaggagcacaatgacaatagttgtacgaccatcaaacaaatatacaatgcaagaagtgcataccgtttttccataagaggaagggatactgaaatgcaacacctaatgaagcttcttgaacgggatcagtatattcattggcacagattaaatgatgaagacgtggctcatgatattnttggtgtcatcctaatgcagtgaagttagtaaacgcatgt

SEQ ID NO: 164043 - DNA, 452 bp, Glycine max
  unsure (1)..(452): unsure at all n locations
ntgcttccacagaaatacattgctatggatgaacacactcatcaactggaatgagatgatgctaaaagattgttggttagaatatcgacaccaaaggagataaggtatcattcaaaaattagaattaatggcaatgtgtatcaagtgaggattgtcaaggaagtggcacaaggagaaaacaagtgtcaatgcatattgtggagatactccaaatcgtcataggaggcgagctcaaatgatagtgtttatggcatggagtgtaactcatctttctctaaatttgacagagagttgagtttgttggagaagcgtgaggtggtgaaggtcacgtaaacgaaggatatgatgatcagaatacccagaaggaagaagagtcaatgggttacccaacaggccatgaacaanaagaaattctaataaagttagtgactttgacctctnttcagtcatat

SEQ ID NO: 164044 - DNA, 462 bp, Glycine max
  unsure (1)..(462): unsure at all n locations
ntgtccctganaccctctatgtaaatgtgacagccttatgtcttccttcctaaaaacccactaaaaactgcctaacccccctactgttactccataatttattctgcaataactacttaaggcagttacatatggtcctaaatcattacacattcagttacgattaaccctttgtgcctaactagggtttcgaaacatcacaacagagacagaccattgaacaatggattttcatcattaacatacaacagagacataccttcgatggaagcgcagacacgaactccacaaacgcgaactcgacaatgtggttgcagtcacggaagtgcaacccaatttgtgacaaacacgaactcatgcagaaggagaaacaacaataaagccctgtgttaaaacgaagaacgcctaatgttaaaataacgaacgcctaatgttaaaacgatgaatggcctaatttaaaat

SEQ ID NO: 164045 - DNA, 297 bp, Glycine max
ttttttccaacacccaaccaggaaaaaataaacatttctcggaactcctttgaaaaaaatattatactaattgtaactgaaaaacgtaaaacccccccccttctcttttttcaagatttcttatttaccgccaaacaaggggaaaacctacaataatggaaacttaacggttttctactttacactatttttctaaaaagaagaggttactgattaataaacttatattaaaaatgtcctaagaggtactcataaagaaaaaaattttgtaatagataaaaaaaaacccattattta

SEQ ID NO: 164046 - DNA, 465 bp, Glycine max
  unsure (1)..(465): unsure at all n locations
ntataagcgcgggtctgggagacgaaggtcaagtgtgtttctatatacggagatgatgttctgagtacattggatttggtacgaccatgccctcctgatttccaactgggaaattggcgagtggaggaacgccccggcatttacgcaacgagcataatgtaaacctttacggttttaaaagctctatagttgggcctaggctttagagtttttcttttgttaaggctttgtgtcttttgtttttgaatttataatacaaggatctttcttcatctgttcctatgtctctacccattctaatccatttgcatgtttacttctttatttctgaaacggcagatccgatgacgagtcccccgaaggtactaatacctgggacccgtctatcgacttcgagcaagaaatgaatcanacggaagatgaaggaacgaggatatgggacttcccccagaattagaaagaatg

SEQ ID NO: 164047 - DNA, 387 bp, Glycine max
cttaagcattaaccatagctcatgacctggtttgctaatgatttacaacttgtctttttggttgggcatgaagcaaaaatacactatgttgtctatgatgatttcaggtccaagacaaccaagaaataacattgatgattatctaagtcccttggttgaagacttaaaaaagttgcgggaggacaaagttggcgttttggatgggtaccaccaacagaccatcaagttgcatgcaatggtattttataccattaacgaatttccagcatatgaaaatttgaagtgatataatgttaaaaggcattgcccatgcccaatttgtgaaaacatataagctttgtgcaactgaagcatgggaagaagacattctatgctaggcattattga

SEQ ID NO: 164048 - DNA, 452 bp, Glycine max
  unsure (1)..(452): unsure at all n locations
tgccacccagctcgcccaggcgagcagggttgctttttttatattcaacaaccttctggagggcccaagtgggcctggttgctatttgcacccccatttttactaaacacacccctctgcctttttttggtgattcttttttcgtaaagttacgaaaacttacgaatttcgtaacgatacttgttttctttccgtaatgttacggaaccttgcggattacataatcatcccctttttgacttacggaatgttacggaacctcactaattgtgcaacgatgcttccttttgatttccggtgtgtcatggaaccttacagattgtgcatcaatattttcttttgacttccggcacgtcacagaatttcaccaatggcctaatgatgggtgccaagcacctcacaatgaccaaacacaagttgcatgccaccaagcaaagatccncggacgaaat

SEQ ID NO: 164049 - DNA, 362 bp, Glycine max
ctttaccagcaaatggaattctttatactatggtatgcccccatacacctgctcaaaatggcagggccgaacgcaagcattggcatattactgagacaggttttgcaatgctttttcattcccacatgcccactacgtattggcttgatgctttctggtgggttggttatattataaatcggctacctacttccttattaaaaggtatttctccttttgagctcttatatgatgtttctccaaattatgctcactttcatccatttgggtgtcagggttatccctacttgcatgattatgctcctcataaaatatcaccacgaagtattccatgtatctttcttggatatagcagcatgcac

SEQ ID NO: 164050 - DNA, 423 bp, Glycine max
ccacggctgcgaatggaaaattctgattattttagcaccgagtttactgactttgccaaattagtggtcatgtgtccccacacgtttctgtcatcccatgccaaggtccattgcttccttggtatgtgatcaaaccatgttgtgtcgcgcgggttgtcatattgtaacttccggtaatggtgaagaaactctggttgagacatggcatacccggtacgttgaaaaaaatgcaaatctgaatgacagctcaatgtcaaataaataaatattgtgtgttataatatgaacgaaacatcttacccatacttcagacatgttctctttcgtcctcatccttgaaatgcttttttcttgagattatgcatatgtgccaaatacagaacacatgtgacgagttgtctgctgtacacccaatgacaggtc

SEQ ID NO: 164051 - DNA, 322 bp, Glycine max
taacaatcccaacaaattccctgacaattcgatgacggaaacatatatttcccccatatataacaaatcgataaatggtgtgtgaatcaacgaaagtgccaatccatgaacaataactgttaaaaactaagttactaccaatggcatcatagagatagaacgcattacctgcgagattttcctgcagccatttcgaatttttggggcttatgtggctgtcccaccaccatgaatacatactcctggaattgcttcgagactcagtccacaaggctccggcgaatggacaacagcactatctcttacgatgttatacgaactt

SEQ ID NO: 164052 - DNA, 261 bp, Glycine max
tttacggatatataaaacgccttactaacgggataaacgatgaaaagagaggttgcggggtctaatcctcttccacttatatttataataaaactagccataacgcacttgaacaactaattaacttgacattgcgaatgaataatgcgtttatctagtatatgaatctctgaatttcattactcaattacatgtgcgtatggctaatcgcgttacggctttcattaacttgatgcccgcaaactttaattggtagccttt

SEQ ID NO: 164053 - DNA, 469 bp, Glycine max
ctaagctttgggccctcttgtaatagaacattcatataagcgatcatttgttttattgtgatacacttaaattattccatggggcccttggaaactctgaaaatacccacccacctaaccttacattagtcaatgcaaatggaaaataataaatgggccacattaattataatgttgattatgcaatgtgacttcaagttgatgaaattttttggtctgattatattgagggacgtctttaatcactaaacaaaaaatatcaaaacaagctttttggtcacctccaaatttatgaaattatgcaccttttctatggtggttgctagggcaagagcaacaatgtgacatcatataatattaaaaggtaatgcatctggaaaaaaatattaaaaaggcgacttgatctcaacgcttctctgacatgatgtttctttaattatttgtacacatacccatgttgactacagaa

SEQ ID NO: 164054 - DNA, 303 bp, Glycine max
cgctgcagctcggatgtctacagccaccaacatttttatctttttgaacggaagaaaacatgggaagtgctcttgtggcatacaccaaaggccaagcgcaaagccggggccgtcctaataaaaaatcatatggtggaaaagaaaaggaagaagaagccgccacaaaggaggaggttggttaaagtcctcaccctgttcttattaccagaagaaccatcataatgaaaacttttgttggttcacgcctagagttaaacgtaaagcctgtcatcaacttggccatgtggagaaagcatgcaaaaa

SEQ ID NO: 164055 - DNA, 466 bp, Glycine max
  unsure (1)..(466): unsure at all n locations
nntttggagtagaaacatgggaccaactcattntatttcaatatgtcgtatctagtcaaggtctgagagaccatacaagtttcctagcgatttctaattatgtgggtcattaagtctatcatatgctgacaatagccgagaagcccatgaatttcttcgggggcggagtaagtgtccgccatcgccttggccttggctaacaatcggggaagttcttgactcccgttcaaggtaagagcaaaccgatccatccacatggttgcctcttggtgtaaagagtcgatcacccttcctctagcctctttttccgcgtatacttgggcatactcgtccgcgatcctatgctcgtgggccgtggctagacctaactcttcttggtacttggcgatgatagctagcatgtaggtctccgtctcgcataaacactgagacaagctccttttggaccttgaacaggcaactaact

SEQ ID NO: 164056 - DNA, 432 bp, Glycine max
  unsure (1)..(432): unsure at all n locations
gcttggtatgaaaagttaagtcttctcttaactgtttatggttttataagaggaaaggtagatactgctcaatgtctcaaaaattatggaagtcaatttctaatcgtccagatatatgtggatgatatcatattcggtgctactaatgactcttcgtgcaaggatttttccaagcttatgcaggctgagttcaaaatgagtatgatggaagaattaaagttcttccttggacttcaaattatgcaaatatatgaaggcatatacatacatcaaaccaagtacgtgaaggaactcttgaagaagtttaagatggacgatgcaaagcaaatgaaaacccctatgcatccaaccattgtactcgaacttgacaaagaatcanagaagatggatgaaccgacacacaaaggaatgatatgatctcttctatatctc

SEQ ID NO: 164057 - DNA, 472 bp, Glycine max
  unsure (1)..(472): unsure at all n locations
tctggactggatgatgtgtgctgtatcaagagcaaattgttatgaatcaaggaagtacatataaaatataaattatgaataagttgtgaatgtaattgccatgcttgaaacaagaaaattagtttaagacaatcaaacaatacaagaaatttgaacaataaagaaactagtcaaattcaatccctttttgctttacttgattatgctacctttccttctaatcaagatatggaattcagaacctggattcttctggtatttttcaaattttcatgcaaatcttcaatttctcatttattttcctacaagggaaagctctccctagataagtcaatttggaaatccaaagcttcttctaaggtcaattnnttctggctagagatgaatatggcctagttggttggattgggttcttcatgcccactttcaagggtatgggaataataattaagatganaatcagaacaatatt

SEQ ID NO: 164058 - DNA, 344 bp, Glycine max
cacgaaaacaagctttgctcatctttgtactcgcaatcaccacgttaggtttggctgtgctaattttgttaactgttcttagttataacttcccttaaactgagcttttaacttcccttagttggtcgcaacctacatttgctctatataggaaagctatagtttgactgtttgaagcttcaaataccctgagactacgctcaggccttttgatttgcactatatcacatgtgagttaacctattggcagttacccctttgttcttagtgattattatttgtgttgctggtgatgaagcttcgttgatgtagctttacgagttgaacttgctatttctttcatc

SEQ ID NO: 164059 - DNA, 463 bp, Glycine max
  unsure (1)..(463): unsure at all n locations
tgactntggtttaaacatgatagatacatgatttgtgactcgtatgatttgatttgggcaagattggatgaggggaagtgtggttttcgaaatctgcactttatgcagaattttgctgtgaaattgtgcagcagaattttgcataagtgcagaaaaatgctatgtatttgctggttgtggaaagagtaatgcagaatgagttctggatgtttgctagtagatcccaacggtcaaaatgtatatttatgtactagagacttccagtaaaagtttcgagtcgatccaacggttaacgaattggaacaaagganatgttactgtggtctttaagtgagaaaaagctgtgatttttgttggtgtattgggcagagttatctgcctttgccctgtnttcttggctgtgatagtttgtgctgtttgaatgttaattacttggatgttgcggaagcttgcgaggattgat

SEQ ID NO: 164060 - DNA, 359 bp, Glycine max
  unsure (1)..(359): unsure at all n locations
tacgaagatgatgttccgagtacattagatttggtacgaccatgcccttctgattttcagctgggaaattggcaagtggaggaacgccccggcatttacgcaacgagcataatgtaaacctttacggttttaaaagctctatagttgggcctaagctttagagtttttttttctttttggtaaggctttgtgtcttttggtggtgattntataatacaaggatctttcttcatctgttcctacgtctttacccattctcattcatttgcatgtttacttctttttctgaaacggcagatccgatgacgagtccttctaaggtactaatacctgggacaccgctatcgacttcgagcaag

SEQ ID NO: 164061 - DNA, 472 bp, Glycine max
  unsure (1)..(472): unsure at all n locations
ngagatgaggaagtgttgaagggtgaaacttcctgcttttatttgttgaccacagagtggtacctggagatatgtcgcgggggtcaggagaccttgnggacgtcaggtggggtgctattgcccaaaaccaagcttgaccaatcccgacccaacccgggcatagtcggtcagtgagaacctgtgatgtacctaagcaggcgagctcctgacagtcaacagataaaaggaacaaagaccacaaagcaaggaggcttgtggtggctggctagctgtgaactttgattgatatgtgggttatggcctctggtaatcgattaccaagggtgggtaatcgattacaaggcttaaaaatgaagacaggaggctaagatggtctctagtaatcgattaccacggcgtgtaatcgattaccaagcttganaacgaggtcaggaagccatgagggctnttggtaatcgattaccactggatg

SEQ ID NO: 164062 - DNA, 291 bp, Glycine max
acttttgtgtttgtaatttcaaaccgttaaatatgtaactaatctttgctggggttttgcatttggtctattcttataggcttttaaaattatggattgaggttagatcacgtttgacgcctattggacaagggagttcacaagtttcagggtcatctcaattatcatcaaaagatgcgtttctgtccaaggcagaagcaaaaaatatctctcaaattaatgtcatttccaaggggatgttcttattcatttgtagcttctctttgtagaaaatctaatgcccggtttttc

SEQ ID NO: 164063 - DNA, 459 bp, Glycine max
tcctcaatttttgtggattgatgctcttaagacggctgtttatatattaaaccgagttccaaccaaggctgtctcaaagacaccttttgagttattcaagggttggaaaccaagtttacaacatatacacgtttagggatgcccgtctgaagtaagaatttataatccacaagagaagaaactagaccctaggattattactgggtatttcattggatatgctgaaaggtctaaagggtataggttctattatccatcccacaacactaggattgtggaatcaaggaatgcaaagtttcttgaaaatgacttgatcagtgggagtgatcaatttcagaacatttcttctgaaagggatcactatgaagcagaaccttatgggacaaataatgggttggtagtcattcccacccctcaagttaaaaatgggtgttagactaccagtgattgaagttccac

SEQ ID NO: 164064 - DNA, 308 bp, Glycine max
ttaaaaaacgatgtacaaactaagcttgttaacttccgcggcgtatttctaactaagatttctacatccgccaataatattgccccggattagaaaaaaaggaaaacagctactcccaccttcggttatggaccggtggtgaaatctttaaatttccacatcattataatcaaaaacggccaaccactgttggtgaatcgcgattctgaccgatgtagaatacgcgttctctagtagtgacttcgttcgagaaaaagttgggcttggccaagatcatgttctgcatgtgcctacacgataccagtatg

SEQ ID NO: 164065 - DNA, 448 bp, Glycine max
  unsure (1)..(448): unsure at all n locations
ctaagcttttatccaagcatatctgggggaagctctttttatagcttattccctagtggatggtgtctcctctctcctcttctcctttaattttcactgcatctccatggtggaaaatcaccattgaaaggacctcattgaagctcaaagatccaacctctatagaagctccacaagcaagcttgcatcatatactaccactgcagacacacctacacaaacatgtgcgcatccaccaccaatttctgccaactctttgaatttggaggggttatataaatacctcgatgaagcaatgaaccttgaatcgagttttaagaaccccccccccccaccccattatattntatngctattttattatttaatgattcgtagtcatcatgtgtgtctttcaattggtgtatttttgagttatcatcatgtgtgtcttaatgccaaaagtttg

SEQ ID NO: 164066 - DNA, 448 bp, Glycine max
gcttctgggcctcttcttatatgtggatggctggcgttattgccctgactatatcctatgctagaatcttctgtcaatacaacaaattcatccccgagcctgagaagaccgacaacgaaatgcaaccagtcaggtctagacgtcctagcataactcgtagcctcaagaagttgatggtattcgtagatagaagagaagcagatatcacagagatacttagggaaaacaaaaaaaggagacacagcattggataagcattctgtttcatcagccacctagttaaccaacccctctacattctctttgttggtgcatcttttttgttttgatccttctggcaaccttagtgatatagtgttggcacaattgcacaaattagtccacactagtgaaggttaaattccttccttcttagcaaggaaactgtgacagcaagaatgtcccacaa

SEQ ID NO: 164067 - DNA, 231 bp, Glycine max
tgctcctaatcagaatgtcaacatctccaacaacagaatggacagaatgctctaaatactgagaatgctcagaatactccaaatgatcaggatgcacactatgcctcactaatctatgaaaggtgatgtgccatcactctcccttatatcgtaacccttgttgcagcattataaggactgactaagcttgaatgacaaaaaaattaagcaattttattattagggcccaat

SEQ ID NO: 164068 - DNA, 466 bp, Glycine max
  unsure (1)..(466): unsure at all n locations
ntagcctttaggttgttcatcatgtatgttgcttctctatctctaacacgatgttcacaagtaatcatctaaaatgatggaagcaaattattagatattgatgatcatggcatcttatgaatgagaattcactacttgcattgttccttacattcaaatgtttcactaaaggcaagatttgccaaggttatcacttcctctcattcacacattgaagttccctgactcaactttttttttcataaaaaataacacataaaagcataaatcactaaggacttttacgtttgtaacttggctagacttgatacaatgttttttcctagacaatcaaaattatccaatgagagtaatttagatgttcatggtttgacatangcactcatctatccttgtacttgtatnttctcaaccaagtgtctcttttttgagtgtgaatcggacatctcttatctctatcttctat

SEQ ID NO: 164069 - DNA, 308 bp, Glycine max
aaagctctttttatattctttaaaaaattgtaaagctctccaaacacctagaacaccttgagagaaaaaaagattaagtggattatatatctatctgtaagacaattaagagttagttagtgagcaatcaaaccacaaatcttttgatttgtatagaaccagtggcttggtaggaaaaagaatattggtttattttaagcttggtgtagagcttgaaatggtaagccagaagtgacagcgacataatacttataactttgaaaagttaatggaacttgatggtttaacaagaactggatgtagtcttg

SEQ ID NO: 164070 - DNA, 438 bp, Glycine max
  unsure (1)..(438): unsure at all n locations
gaaatgatttctatacagaagttagtcgtataatgtgactaacaaactcccctaaatttacagttttgcttgtcctcaagcaaagaaagaatagttcacttgtcctcaaatgacaaagacaatggccaatcaaaagaaaatggtgtttgattcattacagatatcaaccatatgaactgaatatcatggaatgattaaatcaatcacttatcacaagcatgcagcttttcaaagataggagcactagtattagactcacagctgaaataagctagtaagcatgacaaaaattaaggaaggatcatcaaccaaaacctcacagtcattgtttcactcaaactcaagtctttaggcttattccatcataaacaaccaacacaagttccaacctttgcatttcatctcctatcatacagcaatgaacacacaanaatgaat

SEQ ID NO: 164071 - DNA, 371 bp, Glycine max
tgcagatactccttgctgcacaaagctttccattaatacattgttacgtgtctaagctacttaataggaaatgaaagtaaaattgaaatagcaatcatgtctccctttctcatttcaagtatcaaatctataaagaactacatataacataattgttgggaggcacaaataataaaatttgctggctattgaatataacagaatacgtatatgttatagtggaagtaacaaaatttgtatgagtcaagggagggatatgttgtttctgcatcactatcctgagtgaggatgacacaaaatccctaatagtgcgtttggatgaagacattataattctgacacatttaaattctaagaatgctaaatacttc

SEQ ID NO: 164072 - DNA, 317 bp, Glycine max
tgacaggttcaggtgcaggtactgctactggtggaggcacttgtaattggttgctagacctcaaggtgatggcactcatatttttcggattctgcacagtttgtgaaggcagtttgtcagaattttgggactaagtttggttcaactgagtagccatttgccccatctgatttgtcagactctgaatggaggctcttgtctcttgctgaaattgcatattctggattgtcatttgcctcactaactcttctaagtaaggttgaggaggagcctcagttgcttgttgtctttgttgtgactgctggtggtggtgctgc

SEQ ID NO: 164073 - DNA, 387 bp, Glycine max
  unsure (1)..(387): unsure at all n locations
tgagctgcagctggctcatgaagcccaagatccttttttttattcntaggaacctccgcgatacccgtgacctttggaagctcgaaggaactcgccaagagagagaaaacgccagttcacagagagaaactagaagaagaaaacgactccagaagaaggaagaaaagcttctggatttttctatattccttcaaggattgttacaacttatttatatgcgcgagggtccacaacttaccgcaagtggttagctactgctgctagccctaactaactaaacaacatctaactacccttccccgcaacgaatcacaagaacagtctttacccacgccctcttattctaactggtagatatcccagcgcttacgtagttgcttcgctcgt

SEQ ID NO: 164074 - DNA, 476 bp, Glycine max
  unsure (1)..(476): unsure at all n locations
gacctataaatctaagctgatcagaagctgttggtaataaaagaatgtgcatgagaccctatgttaagctttatgggcatattgaaactcttctaaagatgccataggtcaacacctcttaaatnggtatatggtcatgaagtagtgttaccagtagtggttaatttacagtctgttcgaatagaaaggcaaagtgagttgccaactcatgattattggaatatgatgtttgatgacttaattaactgagataaagaatgtttgattgctttggaaaatatgatacgataaaaggaaagaatatcccttntctataatcgaaaggtgaaatagaaaaccttcaatcaacgggatctggtttggaaagtaattctacctatagataaaaaatcaaaacgtttgggcaaatggtcacctaattgaatgggtccatttgcaananaaaggcttttacgaatatgcttattcattataga

SEQ ID NO: 164075 - DNA, 300 bp, Glycine max
ccatcattgggataaactctttctctggtattgggggcgctacttgtactggcagatccctccaactctgggcatatttcttgaaagattcatgctcttttttgcacatgttctatagttgcatcctatccgaaaccatataagaatttggactgattctgctttaacgaaggcaaccattaagtcccttcaacaatggactccggaaggttccaagttatcgtaccaaataacagctaccccaataagactttcttggaagaaatggatcaataacttcctatcttttgatatgccccc

SEQ ID NO: 164076 - DNA, 452 bp, Glycine max
  unsure (1)..(452): unsure at all n locations
ntatctacttggatggttgctagttattggttgtagttttcatatacaatttttaaagcaaaatctatttaaataaaatgaagctaaattgatttttaacttaatttaaacattttttaatttgttctcaaaattaagaaaagaattatttgtgaaattgatttagttttaaaaatacacattgtgattatagtagatggtctcttctagccgttgtcatccctcccacgggcacagccatgatcactagctgtataactattaccatcatcattattattgttgccaccatataaatacacccttaaactaatttaaaacaaaagagaactttcaaattgagtttatttccaaactttgaaaaaaacaaaagctaannttttaaaacttaaaacagttgaaaattttgaaacttactactaaaaatcgctccanatatgtttntaaaatgg

SEQ ID NO: 164077 - DNA, 384 bp, Glycine max
ctcagctgcctgtccatgcagaagtatgatggcccgagttatgttggggaacggttactaacccggaatgggtttaggcaaagacaacggtggcataactagcctgataaatgccaaaggaaatcgtgggaagtatggtttaagctataagcccactcaggcatatgtaaagagaagcatcgcgggaaggaagggcggtggtcaaagctcgcggttgagacaagaaagtgaaggacgcccgccctgccacataagtagaagctttataagcgcgggtctgggagacgaaggtcaagtggtcgcaatatacgaagatgatgttccgagtacattggatgtggtacgaccttgccctcctgagtaccagttggggaattggcgagt

SEQ ID NO: 164078 - DNA, 310 bp, Glycine max
ctaccccaaacactatacctacgaattcttcggaccactgcccaccaatgcttaaacctcaaaaaagatggggcccgaaaccattcagaattctagaacgctgggcgtcacatgccccatacaaagaaacagtccataactgctgggcttctatccaacaaacacgtgggggtgcgtttgctctccaacaaaaaattaagagactcaaaccacggctgaaaacttggaatagggagagtaaccgaaacactttgaagaagggtaagaagaacgaagatgagataaataaactagaggctgacacaattca

SEQ ID NO: 164079 - DNA, 438 bp, Glycine max
  unsure (1)..(438): unsure at all n locations
cgggggccccactatctctataggccggcgccgttactttttcatatatattctctatatcaaagcaacgatatataacaactttatccaaccaaactnttgcagatttcaattgcctgtatgcatcatcatatgtttaaatgtgtggaagggtgggaagaactataaaataaaaacgaactgttcctccttcatgtcaatattttactataatgtgtactatcgaaagcagaagtcgtagttctgcttcttagttgaatactaaaatttcattttgtctacaaatactattatcagctttatgtgggtggtggttgtctcagatgggaacttggctccgctgcttcacataatatatattgtacacattntgttcaacttctaaccttatggagacattgcaccacaatattgatcgaacgtatctaatgcttctat

SEQ ID NO: 164080 - DNA, 299 bp, Glycine max
gatgcttgagaatgcccttgtatatcgacctgctttttgtagtcttgcctttgatgaaaagaactattctagttgtccttcttatgaataacgggagagaggacaaaaaatgtgtgagttttcgtgtccttttttttaaataataaagttgatatctggttcctcttatccaacgtctaatttgcatttcatgcaagtgtggaacattgaatgtttatttgcttaaaaattgaataataaagatgagttgattacaaccatggcgattgatatgaaaaccaaggttgattaaaattcca

SEQ ID NO: 164081 - DNA, 469 bp, Glycine max
tgaagatgttcgcgataagatcttcagatcacaagagaatcatctgagacaaaatgaacaaagtgttgtaaccctatcagttttgttggatgaaagaaatttgagtgaattgagtgaatcttagctctactaagttagtaagtttcactatattcgagcttattctataaacactctttgaatgattaaaatacattatctatcaaacatttatcatttgtgaaagtcaggagtggcttagtgacaaagaatacacaggtcttaatcttaaggggagattaagggtagtgccagtagtggcctagagagtactcgtagtagccaggagtggcatagagaatacttggttgcaatcaaagatttgattagtggaacccttcaagttttgagaaagaactggatgtagcccaagagttggtgtgaaccagtataaaacctttgtggtttcttattacttatatataactag

SEQ ID NO: 164082 - DNA, 409 bp, Glycine max
  unsure (1)..(409): unsure at all n locations
ggattttttttttataaaaagaatggaaagcttttattaaaaaatgtatcatttgaaggttcaaatgcctttctattgtgatattggataaaaaaacaactacgtggtttatcccatgccatacataagataaatttttactttataaaaataaatttataataaataaatactttttaatatataaaggatattataattaaaatttataataaataaatctttttttgaacttcataaataagtatactttaaaatataaatcatattttaatatcaagttagtcatcttgatgataaatcaccttactatatattttatatctggaagaatggaaaataatgttagacagatttatnataatttactcatcatgttcaataaactaaactagatctcttgatatat

SEQ ID NO: 164083 - DNA, 424 bp, Glycine max
  unsure (1)..(424): unsure at all n locations
atgaatcaatcttgttacttatgtagtctgcccgctcacgccgtttgcccgagacatgtgatgtgcatggacttgatgtgccaagccctgcgtggggccgcgtgcggtggtgtttcgagtaggctgcgcacgtggatgacttgatggtcctccgccatatgccatgccggttgaaggcgagctctgactataaagtgtctgtaagcctgccatacgagggctgatcatcagtgctatcctgtgctccgcgaagacgggatgatccctcctacgccgcgacacatgataccatattctgtatactggattactacgtcgtgcggcacatactgcctggcaaaagatcgcctgaaggtggttgggcattgtgcgccttactttanggagcctggcactggtcatggcggctggtaatatggctgga

SEQ ID NO: 164084 - DNA, 463 bp, Glycine max
  unsure (1)..(463): unsure at all n locations
tcttagactntaatgatgacccaggatacaatgccatttgtattatctgtaaaaaaaaggggcctatactcgacatgaccgattggagaaaatggtcttaatgatttgtggtgcattttgagcttgccattcacattgtatatgacaccgatactaccctatagctaagaaacacggatgtgacacttcaccggcatgtcccgcgtcggactcgcaccagacacgcatgcgggtacgactccggtgcgacgcgttgtccgatgcttccattgtcaccagacatgattgaacagtatgacacgcgcgacgcgacccaacaagccttaggtattattattatttatttaaaaaatgcttaccataagaacaactcttctacgtcttctccttgctgtacccgcatgtgcctccattgctacacgcgtcgtctccattaacttctccgtgcaggtaggcccttgct

SEQ ID NO: 164085 - DNA, 313 bp, Glycine max
tgagactgacaatggaccattactttgagatgttgaaaactgatttgcattggctccaatagattggggtgtttgactgccaagagaagaacttattggtattttgtaaggttcagaaagtagtttgtcaaactcaaccaacttggattttagtatatttctctctttctcaacctgcaccatcatattataaggttaaacacagaatacatggttgagcacaactgtaacctataagttgaaatttcattaaagaaaaatgaagtaattacaattagatcgagaatagggtcacttccagaggggggagggg

SEQ ID NO: 164086 - DNA, 333 bp, Glycine max
atatcttcagactgatcaacacatgcacagtggccaaagatgcatgggagatcctgaaaaccactcatgaaggaacctccaaagtaaagatgtccagattgcaactcttggctacaaaattcgaaaatctgaagatgaagggggaagaatgtattcatgacttccacatgaacattcttgaaattgccaatgcttgcactgccttgggagagagaatgacagatgaaaagctggtgagaaagatcctcagatcgttgcctaagagatttgacatgaaagtcactgcaatagaggaggcccaagacatttgccacatgagagtagatgaactca

SEQ ID NO: 164087 - DNA, 458 bp, Glycine max
  unsure (1)..(458): unsure at all n locations
tatgaaagcctatttgcaatgttatcccccanatttcagtagcatgtctactacaataccagttatgaaaacaatgcacgaattctaaactgcaacacttagcagaagagtcaatttgtaaagttcatatagcaattcaattataatccaaacataatgtattttatatatattaatattccccaagagtctacttttcaaatataattttattttcatcaaacggaatgtgaatcaaacaaagtaaaaaactgtgtgaagtatgtcaaagctaaaatttgtaaaacagcatgtgtgcacaaactttcaacaccaaataatatagaaatgactctaagagcccatactcatggaggataacctcccaaaccaaaattgacattaaagaanatagaaactctcaataccttgagagatttgagtcttctagagttcaagaaaatgcataacaaaatgga

SEQ ID NO: 164088 - DNA, 330 bp, Glycine max
  unsure (1)..(330): unsure at all n locations
atttaaattccttttatcatgaaccactaggtgtgtcctactatgacttgagaaacaaagggtgatccaataacaagccaaaattaaaaaggtactangttgcctcctagtaacgcttctttaacgtcttgagctggacgcatgatgacttgtccgccacggctagtaccttgcttacctttggctttggacttggtcgcctgctggtcggccacgaatcgtaggcaacgctctaacctttttgtggatgaactgaagtgaactctataggttgtggcagtgcgtctgttgcccgctgcccgccatccacaagctactgtggtgtttccc

SEQ ID NO: 164089 - DNA, 460 bp, Glycine max
  unsure (1)..(460): unsure at all n locations
tcacgatgatgaatcaagttgattcaagaanatttgattatgacaaagatgatgacaaaaatcccaaagaatgatttcaagattaagttcaagatcaagattaatttcaagtttcatcaagaagattcaagattcaagattcaagaataatcaagatcaagattcaagactcaaagattcaagaatcaagagaagacttaatcaagataagtattaaaaagtttttcaaaacattgagtagcacaatttttttttcacaaaatcattaccaaagagttttactctctggtcatcgattaccagattatagtaatcgattaccaatgttttaaaacgttaagattttcaaaattcaaaatgaagagtcacatctgttgatgtgtaatcgattacacctttatggtaatcgattaccagtgactggttttgaaaaattcatttccaaaagtcacaattcttc

SEQ ID NO: 164090 - DNA, 388 bp, Glycine max
caatttgggcaagccaagtatgggctttaagtgctcagcttggcttgactcatttacaccgctacttaatagtatgctattgccaaaaagcaaatcatctacgataaacaagtaatacgctttcctagttttcaaatttcttgacggaagataatcatatcacgggttgtgtgttgaattcaatacaaaaccaaccagtttacagtatgaagacttgaagtatagtctgaggagtcaagaatttatgcttggacggctgacgtattcctatagaagaaaacttgcaagtcttacagaggatgacttttttcaataagatatttggcattacagattgcaattgcatgatctctgaatagagcagccgtactatgaaaatacatgtggt

SEQ ID NO: 164091 - DNA, 466 bp, Glycine max
ctgagggctgaaaaaactatataacagcaccagggttctagtttatggggctccctctctccctcgcgggagactctctctctcctctctctcttcgattattcgtttttagttttagtctctcttctctttctctttattttcgttttttttacaattccagttcagacttttagttttatcaataaaatttcattctctatttgattaatggaaggctaagtccgcagcgttgttttcccttgaggatcaagcacagttctctttgaggttctattattactgttaaattctgtttagtttttcctcttcactaattacttcggaattgttgcttttaattcatgcatgcttagtgcttgattaattgtctctgcgcttaatttacgttcatgcttaatgatcgtttatgagtaatcggtgtatgtgatgcttaatcacataatgaatgccttatgttgaattt

SEQ ID NO: 164092 - DNA, 390 bp, Glycine max
  unsure (1)..(390): unsure at all n locations
tgcaagcttggaaagagtggggccaccttctcgtaactctttttgccggcncaacgagcgcccgctaagcgcaacactcctgggctaagtgccaggaagactctggaagaagaagagatgttccggttcgctaagcgcactgcttcatctctctaaccgcccgcttaattcactacactgcttcaatctctctaagcgcaccgcttcattcctctaagcgcgctaagccaaaaatcacttccgtgtactaagcggtccatacctgcgctaagcgcacgagcacgaacaaggccacctattaagcctgaaatcagactttgtgaaaagaagttggactgggattcagagctttgcatgtctaaggttcttagagagagaaaggtccaagtt

SEQ ID NO: 164093 - DNA, 432 bp, Glycine max
tcctcaacatccaagtgattcaacattcagacagaacatactatctcttttccagaaaacagggcaaaggcagaaaactctgtccaaagcaccaaccaaaatcacaacttttctcacttaaagacccctgtaacaattcctttgttccagttcgttaaccgttggatcgactcgaaaattttactggaagtctctagtacataagcctacattttgaccgttgggatctactagaaaacatccacaactcattatgcactactctttccacaaccagcaaatgcatagcatttttctgcacaaagccaaaattctgttgtacctatatgacagcaaaattctgcataagtgcagatttcgaaaaccacacttcccctcatccaatcttgcccacatccaatcctacaagttccaaatcatgtatcaatcacg

SEQ ID NO: 164094 - DNA, 457 bp, Glycine max
  unsure (1)..(457): unsure at all n locations
ngcttctacatccctgactctatgccacacttaattaggtgtttatctaggtggccaaccatcacgctctatttccccctttatgaaggttttttttgctgtccctaagtggatgattgtttggtaagagcccatgacatgagtcaaaccaacaaattttcctcacataatgtaatgtaaatgacttcttatgtttcatgcaatgtgaacagacaaatctaccatgagtccctcaaccagacaatatgccataagcaagaaagttattaataatccacatcaaagttgccttcatcataagattttgcttccttgacacatcatatgccaaaacgccactccataacttcttcagattgtcaatcaaaagctctagataaacattaatgtcaaccctcgaattagatgggcccaatataatgcaactaanaaatatataagctttaaacatgcacat

SEQ ID NO: 164095 - DNA, 418 bp, Glycine max
  unsure (1)..(418): unsure at all n locations
tgcaagctnttngattcattttatgtacccgttgtggttcatantgtgcttcacgnannnntattctcgnttcatttactttttatacccccttttgacatgcttaagccattttatttaaatcatttcttgcttaaactaaaaataaaataaatttccaccgatcgtttgaattgtattatccattaacttcggttaaaatgagttccgaccgttcggtcgtgccgtaaccacgttggaaatcaaaaagaggtaaaataatagtataataacaaaaatataccttttagtaaaataaagcggaaaatcaatcggaccgtttccctttgggatttctcattcttaattgaattgactaataactaaagtgaaattaaggctaanatcaactcgcctagtcaagctcgtccataaaaat

SEQ ID NO: 164096 - DNA, 476 bp, Glycine max
  unsure (1)..(476): unsure at all n locations
aaaaactcagctggatttctttagtaaagaatccatccttgctaagatggatcctaacccagtccccatcattaagaactagcttcattcttcctctattgccattagttgaatacacctttgtttggttctctatttggttcttaaccctctcatgcaacttctttacaaactctgacctagattcccctcctttatgtataaaagaagtgtcaagtgggaagggaatgaggtctaagggtgttaggggattaaacccatagacaacctcaaaaggggattactcggtggttctatgcacccccctattttaggcaaattctacatgaggaagatacttaacacaagacttatggttgcctttcagaagagcccttataaggatggataaagactcattaactacctctanttgcccatcagtttgtggatgacaagtggtagagaaaagaagtttggttcttatcttagcccat

SEQ ID NO: 164097 - DNA, 467 bp, Glycine max
  unsure (1)..(467): unsure at all n locations
tgaaaggtcaanataagactcagagtgtgattggatgattatatanacttcaagctatgagaagtaattagcaactaatggacacgaaaaatgttgcaggcatgaagaattgcataatgaacatgacatgaagaacaacattgctgcaacacactcaacttttatgaacacgttgtggtctgaaacaacctatatcatggacaaaattaagcttgaagttgcaaatgctaatatgcctagatagcttaatatgtgtgtagtaatttgaagactacttgagccacataagtgaatatgagatgatctcagtggttgtggaaagttaagagaaatatatacatctttcatgaagaagttgtgggctaataaggttaggatcttggaagaaactgattatgacaattgagatttcattttattgtagtagtccaaatgacatgagattagtgtctaaatctcaaggatag

SEQ ID NO: 164098 - DNA, 458 bp, Glycine max
  unsure (1)..(458): unsure at all n locations
cgtcatataagacgatacttacttaaacaccgtccttgatagttatctttntaagacagtacctacgtaagcatcgtccttgaaataaagattatttttaactattgatattttttctgaacgatatttcatcagaaaaaatatgaataattaaaaataatatttattagcatgattgtaattaatattaatattaaaatttatttaaaaaataaatattaaaatgatatattaaataaaaataagaggttgacaaattaaaaattccaaagtcaatttcatagaaaaaaaaagttatcaaagttcttttattataaagtagctcataaattaaataattattntttcacaaaaatttagaggaccaattaaaactttgacagcctccaagatattatctccaacagcagacacaaagagaagttgaaaaaaaaaaaaagactacatgaaagtaatat

SEQ ID NO: 164099 - DNA, 465 bp, Glycine max
  unsure (1)..(465): unsure at all n locations
tnacattataagttggattatgcaagaggataatagtatttgtttaagttnattaattggtggaatgctcgagctaacaaccttgaatgatttgttgatgcctcttcgtaagaattttattcttttgtatctgaaaattaaataaccttattattacaaagtgattttaactgaatgatctaattaaaaaaaacgacataatagtgtctcacatactataaaagaaaaacaaccatttgaaaagagttaaaattttccattttggttcctccttcacataattatatttttttattatgagctctgtcattatcataccatgttacatgtgtcatgtgcaattaatcaataaaccacaagaagaatataagtcctatttaatttctggacacatgaattttactttttatataaaggtactataaaagagtcatgagtaagttgagaacatattctttaattcta

SEQ ID NO: 164100 - DNA, 462 bp, Glycine max
  unsure (1)..(462): unsure at all n locations
ntgtctatnttagttcttttctttattatgggtggtttctttctgcagatgcgcagcgcaaagtgtgttacacaactaaaatattctttacagctattttttcctttactttttgctttcatttattataacagaagtttgtggttgcaggcatccttctcactggggcaaggtttgtttcctcactaccccagatggtgaaaattgtggactagtaaaaaatttgtctgtcacacgattagtaagtactgatgtaactgacgtaactgaatctatactgctaaaattggtggattgtggaatgcaagaacttgttgatgatacttccactcatcttggcagcatggacaaagtcctcctaaatggtgattgggtnggagtgtgtcacgattccagttcgtttgtggcagagctacgatgtataagacgcataaatgagctgcctcatcaggtctactttta

SEQ ID NO: 164101 - DNA, 421 bp, Glycine max
  unsure (1)..(421): unsure at all n locations
agtacctgcgctgcagcttatgggatttacatggggagaatctcttctcgcgaattcccgtgagtttagaatgagttgctctacaacaacctaatgattgcatgcttggataacggtgtcataaaactttcacttgagtacatgaagaaaatgagggaattggggtttctcatctcacacttggttttcaaccgcctcattattctgcattcctcgcccggtcgcaggaagatgatacccaaattgctcacccagatgaaggctgataaagtcaccccacatgtgtccacctacaatattttgatgaaaatagaggcttatgaacataatcttgagaatttggtgaagttcttcagtcgtatgaaaagtgcacaggttgcaccgaatgaaatatcttactgcattttanctattggtcatg

SEQ ID NO: 164102 - DNA, 476 bp, Glycine max
  unsure (1)..(476): unsure at all n locations
tcgaccctatcgacagaagtccgtagctcctgcctactttatanctctccaagcgctactacgggccttatcaagtgatcgaacgcatcggctccgtcgcttatagactccagcttcctccgtcgtctcgcatccatccggtgttccatgtctccctgctgaaacgtcaccagggccctctttcccttacctccgctgccctaccaccgtccagcgtggaacatcatcccctcgtcactcctttggcgttcttagattggcaatgggacacctcggttaccccggcggctcgcaaggtgttggttcagtgggcgggtcttcctccagagaacgcctcatgggagtcttggtccgatgtgaagcacacttttaacctcgaggacgaggttccttttgaaggggagggcgatgatagcaacatccaaataacagaacacatagagactgcagcagtcccaaactacacaacagacaac

SEQ ID NO: 164103 - DNA, 450 bp, Glycine max
  unsure (1)..(450): unsure at all n locations
tcgcctccgtagattccctccctaggtggccctgcctgtccaatgcagcaatgatggtggctcgggtgatgctggggcacggttacgagcccggaatgggtttgggcaagaacaacggtggcaggaccaacctggtgagtaccagaggaaaccgcaggaagtttgggttaggctataaaccaacgcatgctgacataatgaaaaacatctcagaaaggaagaacaaaggtcaaggcccgcggtcgggacaacgagccaaagaggctccgctgtgcaacatcagtagcagcttcgtaagtgcgggtttaagacatgaaggacaagtcgccacgatatgcaatgatgactccccgaggagatcggatntggtacagccatgcgctcccggtttccaactaggaaattggcaggtggaggaatgctcanatgttacgtgacaagcataatgta

SEQ ID NO: 164104 - DNA, 352 bp, Glycine max
atgaactcattcttatcgaactggagcatgagccgacctttcacaaattaagaaacaccatgcatttaatggctctcttgcttcttcttttcttggttcggttttctttcactggtttttctttccaatctatggcattggttaaaatgtgtttcgttctctttctttaattggcatcacttaaaaaagctttttattctttttctttcttttgcattacgaattgagaattaattttatatattattactggtaaaattaaattgtccaattaataaaaaaatcattgttaatacgacttttaaagtgatattaattataaaaattaacaaattcattatatatatgtcga

SEQ ID NO: 164105 - DNA, 463 bp, Glycine max
  unsure (1)..(463): unsure at all n locations
ntanaagtgtagatgtaggaatctgatggatccataaatgattaagtgacccttatgtccagaaagttcaaaaagatgatgaagaagaaaggaaagttccaacactcctctagacatacagattcaagatttataaagaanaacgaggaaagcaaagagattatccaatttgattgtcgaaagcttggacatattaaggcttaatgtcccagttgaaaaaaaaaaaagatactctggggacaagaaaaagaaaagtttgatggtcacctgtgatgacttagatagtgagaagagtagcagttcagatgatgaataagccaacatttatctcatggcagatatagatgataaggttaaggtaaaaacttgttctgaatctaatatttcttcagaaatgtcatataatttccctttagtgcacaaaattaaagacaattcaatgttttactctaaaacattggct

SEQ ID NO: 164106 - DNA, 446 bp, Glycine max
cggacctatgaatctaagcttacaagcaagcttccatcaagtggtatcagagcataagagcttcatgttgtgctccttaaacctccattaatgttttgctttaccttctcttctattgttgtttcttcatttttctccatgtatctcctcacatgtcttgtgctaaatgtttttaacatgattctttagagtttccaccgattaaacttgctatagaagctagatttgattttctatggttcaaatttcttgttcttgttcttgaaccatgaattgtgttgagtttacgttcctttgagttttgtcttgttattttttgtggctgaaacctaaaccataaaattcttacaaaaatattaaagtagaagaaaacctcacaaaatctatagtctttgattgtcgaaccttttcttgaacctttacgtttacttatgagtgcgtctatt

SEQ ID NO: 164107 - DNA, 230 bp, Glycine max
taggattttaattcggtgggaatttttatccccgtgcggcttaacatttactaaaaattttgcttaactaaaaaaaaaaattttccccaacgttgaattgtttatcatttactccgtaaaattattccaccggtgggatgccgaacaactggaaattaaaaaggcaagtgttaaatattaaaaacatctttagaaaataagccggaaaataatcgggcggtttctttttg

SEQ ID NO: 164108 - DNA, 465 bp, Glycine max
  unsure (1)..(465): unsure at all n locations
taaagtatgcccgagtcattcatccctatgagatgttgttgttgtattggcgatcagaattgccattccttggattatacggttgaatcaagctcatgcttttacanaaaggttcatcaagtcaagttgaaatatggaagtaaccgtcttgcaaaattggggcaaaagatgaatcgagtcacatcactgcttcgtctactgccaaacatatttaggattattgatgtccttgttacttccagtttcaccttgacaaagatgtcatggaccatgttgaaaatctaaattgattcaaccccatatcttgcgtaaaaaatcgcaatacttcaattgtacatcattcgcatgcatccatgcttttcattggttgcattgctcgttgcattctttccttgnaaaaaaaataaaatgaacttaatcattgttatganaaagaaagggacacgctttatgacgcccttaccg

SEQ ID NO: 164109 - DNA, 387 bp, Glycine max
  unsure (1)..(387): unsure at all n locations
gcttttagtctaagatgatgcaggtgagtttgttttttcctcatgcactcctctaatgactatagcatcatttctggcgctaaactgctgggagttggaagccatcttctcaattaaattcctggcttcaataagagtcatgtctccaaaggctccaccactggcaacatctatcatacttctctccatattactgagtccttcataaaaatattggagaagaagctgctctgaaatctgatggtgggggaaactggcacatagtttcttaaatctctctcagtactcatacaagctctctccactgagttgtctaatacctgagatatcccttctgatggctgtggtccttgaagcanggaaaaatttttctaagaatactctctt

SEQ ID NO: 164110 - DNA, 430 bp, Glycine max
  unsure (1)..(430): unsure at all n locations
ntgnngaaattatgatntaacattggaattgagattgcttgaatttcaaggagctcttttgttcattgaaactacttggcaaataggttggattagaatttggcttgacacagactcatcaataataggttttcaatcttcctctaaacatgctcttctcccctagaagctcaagaattgctggctcaattgcctntttttttntttacctctgatatgcaatttgtgtttctcatatttatagggaaggtaatctctgtactaacaaattagttatccatgatctcacaataaattggttcacttggtgggactttgttccgtcgttcagtatagctaaatgctatgaggcaatttcccccataaacaaatttttttacttaagcttcttaaccaaaaattaagtttgctcttacaanataatagttgt

SEQ ID NO: 164111 - DNA, 303 bp, Glycine max
  unsure (1)..(303): unsure at all n locations
agacacaactctgagtgggaaaataccctttttatactcagctggaggattgctgtgtatatggaatgacagcatgttcaatgtatagaggagagtcacatgcacgggcttcattatactagaggggatgtggactcaagagatgcataanacatttattgtgaacgtatactcaccatgtgaagttgttggcagaagaacactattggcctttatataggcgcttaaaccaactccaaacaggtggaatctggtgtatcttgcgggattttaacagcattaggcatctggcagagagaatga

SEQ ID NO: 164112 - DNA, 351 bp, Glycine max
  unsure (1)..(351): unsure at all n locations
tttttttaagcnattatccttccggcaggggagtttcactaagtcccatggcaaccctctaacatggcaactaaaaaatatgagttacgtaaggaataggcattcaaatcctttttctaattgaatccaactagtatcactttcgtaccgtatacttcttatcaccgttatgccaagcgatgaatacattaaaaggtttttgttttcttacaaaggtgattaaattgaataaagctataataaaaaaaaaattatcattttaattttgctttgcgagttgtacttcatatatgcaacctaacttttatcataaaaaatagattaattgagttattcaatacagcttatgct

SEQ ID NO: 164113 - DNA, 466 bp, Glycine max
tgaagaaagagtcatagatgcttgtataaaatctataatttatagtttgtaattgcaatacgtattattgagctcatcacctcacgaacgaattctattaattattttaatacggttaattctttggacataaaacataataacttgcattttacatgcatttgaaggatcaaatcagtataaagtaaaataaaggaggtaaataaggagaaattgtttatctttgaaggacataatgagaaattgttaagaaaataatcaaatactactgcccagttagatactttgacttggtgcccaacagcaattagagtgcatcaacaatttctattttgacttagtgtgcatgtgcaacagcaattatagctttcaacggtcaaggttctcactgccacattaactatcgttgcccaagtggcacttatatatctacaatagtattacacaatataaaggagtaacgatg

SEQ ID NO: 164114 - DNA, 247 bp, Glycine max
acagataaaaacataaatgttaggggaagaaactagaaatttagaataaatctttcataaaaaaaacggatttttttatgggttattatgtcccaaattagttcttctattcaccattattaattatattatactataattttgtgtgtttggtgcatgtgaagacctgctcgggttatgatgttgctggagtggtggctaaagtgggaaaggaagtgaacaaatttaacggtggggatgaagttta

SEQ ID NO: 164115 - DNA, 469 bp, Glycine max
acctatgaaactaagcttaattggtatgcctcgaagataggagcatagatcagtgttcttgatcatggatgaagataagattagccaaagcctttgtaaatgagctgaaatcaataatatcgcagttacatagtggcctaacgtggacaagcatgatcttaagacaataatttcatatcttttgtataagtgtgcctgaaaaaatgtttagaaaaaacaatcaaaccaatcaatcaatacaattatctattttcagctattgttcttctaatttactttgtttctatcttgctattttcaaattcatttatcttttagtcccatatctttttaaatcttgttacaattcactttcaaccaactactttgtggtgtaacttaggaacccattacatttgagagacaaattttctcttttagctcacaaatcactcgatcacagatttaaagtttagaatcgtgttgaagc

SEQ ID NO: 164116 - DNA, 483 bp, Glycine max
gacctataaaactaagctttgcgcgtatctccttacgacgttctcttgcacaagatattctattaattaagaaaaatgcacccatatacaatcaaggcagcttcgttacctatattatttacacgtacttccaaggagtatttgttacttacatcacacacatctccttggctaaattcacatacatgcacactcaaagcaattatggggtaccaaaaactgcacatgtgcacatctcggtatttctaatacctatacatacacaaacttcatgatgaatcgtgactatcttcacaaagaggtgctacacttcatccctatcttcaagttgttgctacctaaagccgcatgcaaattcaagcatattttcctttgctgactaaaattgtattcaattaaaaggatatatctttttgtaatatgaatcttacataacatcaacatattatatatatatttgtgaacatcttgctatcacaaata

SEQ ID NO: 164117 - DNA, 305 bp, Glycine max
  unsure (1)..(305): unsure at all n locations
gacctatttattcacctcttcctttctttgtttggagatatatttgtgaacgggaacagaagccactggaagcatttgaaaaataaacgcaccatgaggcaatatatgtatatacatcaagcatggccgaaatacatcatcaagcatgggcaacaaaaacatatcatccaatgaaacataccccccnccttacacttattcccatacaagtgcaagctccaaaaaacttagggagggtgaaacatgggtttactaaggcttgaatgagctcaaaaccaaaaaggggacataggctaaagggcttc

SEQ ID NO: 164118 - DNA, 213 bp, Glycine max
ttatgtgggcttttcttaccggtcgtcagaacgactgggcccatttgggtcggtacccaatgcataaagcattaccggccaatgcacatcttccttatccacatttgattactctgtttttgcgtcattttcaaaatccgcttgaagatgaaccctctcttcaatcaaagcgttctttgcaaatggagctggtgcaatgacatcctttgggta

SEQ ID NO: 164119 - DNA, 243 bp, Glycine max
  unsure (1)..(243): unsure at all n locations
tgacttggctaatgagtataatggaagtgccactttcaatggggctgatctatctctttttgatgcaaattggagggccttggattttaagacaaattcttttcaaaaaccaggagtgatgaagacataaccaatgtcaatgaccattaancacttgaaaggcccatgaacagaggcagacttaaacaagcccaacacgttatagagacaaggctagtcatttgtatagctggcattgatgat

SEQ ID NO: 164120 - DNA, 464 bp, Glycine max
tgtgtgaatgattcaagctattattgtgttactgctcatctcactgacccttatcgcatctcgaggccatgtgctacatagactcaaatgccatttaccagtgcatgtgactgcacaatgaacatatgcacgcaactgaaaaattctataaataccactaccagctaaagacatttgtataactttcaaatattcatctaaacacctaccactatgtgtcacccaaatgcatatgtttgtgtttactacaacagccaaatttccaacactaatgagggcaccaccttcattagtaacaatacaaaaactttcatggccaacaaggccataacccttacacaaattggttggatttgttcaacaaaaaataaacattgaaccgcaccatcatatccaacatctccactttcaatgtcccatatttgagtcaggacaaccacatatgtacacatgttttaatctgg

SEQ ID NO: 164121 - DNA, 164 bp, Glycine max
agacggatgtcgggagcaggcgcagaatataccgacacgctcgaaattgaacaacggaagctctcgagaaattcaaacgggaataacaattcacacggatgtacaattcaaggacataatatatcgagacgcctcgaaatgaacaacagaagctctcgagaaaa

SEQ ID NO: 164122 - DNA, 321 bp, Glycine max
atcccttgccttggcttccaagtatttccgggggaggcccactacgccatttcgagtttgcttcatacgatccaactctttcgccgaatcttcgaccacagctgcaatcttgcttaaggaaagaagaaaccccgagaaaagaaacgggtttcttcccccaagagggcatcctagaatctccccaaattcttcaacagtcggtactatttggaagtccccaaaagtgaagcatctcaacagctggtcatagtattgggcgagggatacagcggctttcgtaaataccctcgctgtggtcaaatctaaaatctttccgtacac

SEQ ID NO: 164123 - DNA, 391 bp, Glycine max
  unsure (1)..(391): unsure at all n locations
aaccttnngcctagaattgttttatggatcaacgactttcttcatgacgtttaacccaaaaaaactagtttgactttggcgtgcccctcattaatatagtaacattctaaagtagaatagagatcattcacgaggcacggcttccactttaacgtggcttaggctgttcgccaacctaattaatcaagatatgtttgcatagtagtttcatctgcatgtacttaacccaaattctttaatgtaaacatacagcattgactgtgtatcatattgacttccaacaattccgcttgcgggacttaggttttttttaaacaaaatatcataagttatctaaataaattatatttaacacatttcatgttattctaaatttgtacacatggtatag

SEQ ID NO: 164124 - DNA, 201 bp, Glycine max
  unsure (1)..(201): unsure at all n locations
acattagtgcctatgttacaccaaagtaatacacttgacattgatcgaaccttattgtggttaatcaaactaagggcttgttcactaaagacatatatgggcctagattagggtgtaaaaaaccattaccacatgttacattaaagagaaagtggggcttccttggaccttattgggttntaaccaatcattaccgcatat

SEQ ID NO: 164125 - DNA, 362 bp, Glycine max
acatataaactattcatggctaattgtttttttttcgatattcttgcagtgtgcactactcctaaaggacaatgaccaaatactatattctctaacatggcttctaacccttgatgaaatggaaaactccatggtcataaaatcacatgcggttcaagtgctacaaaataatcatcaacatggatgacacatgtagtgatagcgtaaactaagctaaaggacactaacaattataagataagtaatttatcttcctttattcattatcaaagctacatctatagatgattgtattcgatagtaactacccatcaatggtcagttagtgctgaaatggaattatctacattttggtaataatc

SEQ ID NO: 164126 - DNA, 343 bp, Glycine max
accatatacctactcgagggcccattgttttgccaaccatgctttacgatatgtgatggtgtatcccaactcttgtcttaccaattcaatgaatgtaggaatgggtagttgctcattttcttcaaccatcgcaacgatatttttgcctaccaggttcaaatccatcttattgggatcttgtgaaatggttggcatgacacatgtgtgagggccttctatcattctaatttcccacacttttagattttttcttttggacgctttaagtttccattggcaccattcagttgggcaacataagaaccatgtatccttcacacacctctttgctttgaaagtacat

SEQ ID NO: 164127 - DNA, 471 bp, Glycine max
  unsure (1)..(471): unsure at all n locations
ntagaanaccgtgcccaggccagaatgtggtgagtatgtttgtggtatatggattgttattttctaacttatggataagtaaaatagatatgattttagggttagtttggataaactccttaatagatacttatagaagaagaaaataggaggtaaaatgaatgaaaccttctaccataagttaaaagcaacttatgtgcctcatcttttggagaagttagatggaagaatttgtaaaaaaaattttaaattcacaatttgattttaatttataggagaagtttcattcattttatctttttatttgtttgttcttgtaaatacttattgagaactttatttaccctgcgccttattatntttcagcatttattactacgaagaagtataattatttgctgcttgtgtgaagagttacacaaagtatgatctctgcctatntgattaaaaaagactcactttctttgctgg

SEQ ID NO: 164128 - DNA, 320 bp, Glycine max
  unsure (1)..(320): unsure at all n locations
cgcacacacacaggggncctaggggacactacataattccccccttcgttttgaatttatgcttatcttagaaataagatgattactcatgtgaattcttgatttaatcccatttcttttcccctttggcattaacaagaagccaaagtgcgtatcaaacttaaggtatacaaatataacttaaacattcatacaatgttcattgaaaaaaatatcaaccaaatcatgaagcaagaagcaagaaccatgataaccatgaagcaacaaccatgaatagattaattataaactccacatagtcaaattacatacttaatatt

SEQ ID NO: 164129 - DNA, 291 bp, Glycine max
  unsure (1)..(291): unsure at all n locations
tgcagcttgtagaaatggggacctttttatgtgttctatgtgncgaacgggcaatggtgcgaagtcgactctccacatccacaaatcacacataaattcaccatccctaggtgcccacctttaactgagcttacgtactcccacgtagcccttattctcgttcctcttaacaccgggtccggatcaattcatccaagcttncaaaacatccaagcaatttaacatccaaacatcatgaactattcaaaccacaaaaataggggcgaggcagaaaactctgcccaaaacaca

SEQ ID NO: 164130 - DNA, 469 bp, Glycine max
gacctatgaatctcagctgctctaattacatgagatgatgtatggatgatttgtatgccatttttgctttaagagtagcatcccttggtaaaactaactttccaaatgtttgccttcgcaggaaatggccccgaggaagcttgcctcaaagaggtccaggaaggacaagacggccgaaggaactagtttcgctccggagtatgatagtcaccgcattaggagcgctgtacaccagcagcgcttcgaggccatcaagggatggttgtttctccgggagcgacgcgtccagctcacggacgacgagtatactaatttccaggaggaaatagggcgccgacggtggacatcactggttactcccttggtcaagttcgatccagaaatagtccttgagtttacagaggagggcgtgcgtgacatgagatcctgggtaatgcgtcagtggatcccgtttgatgctgacgctatc

SEQ ID NO: 164131 - DNA, 275 bp, Glycine max
cttcatcgtaggtcacactgcagagccggtcggattgtctatatcatgagggaatacctcgccgtatctcccggtaataccatatatgaagatactgctacataccactacactcatctgtaaatgctaggattgtgatactacaactaatcatgcacatgccactaacgggatgggatcttcccaaatgaatctctgtctttctaaatcattacatagagaaatagcgactggtgattatggtcgggactggagttcaaatgatgaagcatatc

SEQ ID NO: 164132 - DNA, 463 bp, Glycine max
  unsure (1)..(463): unsure at all n locations
tctgtcggactttgaacanactgctctgtcagaaccatgtcttgtgctcgcgactggtccctatcttcccttcgcaacttgagttcattattgctaccccatagagctccgcgaaatttgttccggccgtactcttccttgcgagccctcttggtctcttgttcaagggcttctgcggtaattgcattctcttcccgtaacccggcgcactccttccgaatgtgtgtagcagccaacttgaacttctccttggcgagttttgcctttcctaactcgctattgagagcttggacttcctcgtcctcttccggcgcttcaaaattctcttcgctgacgacttttaacttggcgagccaatctaaacctcgtatgcgaacttatagccattcgtggtacccaccaatgatgccattacgaatgcctctaagctcttgatctttccttaacggggtttcccatgcct

SEQ ID NO: 164133 - DNA, 428 bp, Glycine max
  unsure (1)..(428): unsure at all n locations
aactataaaactaagctatgcattgctgcacttgcgttggcttcttatcnatttgaatgggggtgacccattntgccacaatggtgacaaggtgggtaatttttatttttacccttacttttactttggtcatttacagtacttccacctttatattgcttggctggtaaagcaccatcaaccacacaatcttgtctcataagccttcgctgctcctgngcttgcaaggcatgtaacactcttgccaaagtgatcttggacagatcctttgtgttctccaacgtggttattgatgcttcatatttctaaggcattgcaaccataattttttctataattctagaatcaaccaatttagtgcccattaatctaaccttattagcaatgccaagcaatctgcccaagtattctttaattgtctaagactc

SEQ ID NO: 164134 - DNA, 404 bp, Glycine max
cagcttataagtcaaatctaacggcgatttttctttttacaaatccaggaatgtgggtttagtgaaacaggcttaggtaaaaacttgaaatctcataatttcaacctaaatcaataaaagttgacataactcaacatccacatcaagcaaatcacacatggcttattcacacaataaattaactcattcaaattaatcaagtaatctaataacacaagaaaaacatccaacatctatttttaattatcaaaatttcacgatgttacaactactacaaaaaacaagttttaacgacgctcattcaatgaaaattttatcaaaatcatcgttggtaaaaatatggtgacatttttgtaaatataaggtacatttcaatgacggttttcatgaaaacgtcattgaaa

SEQ ID NO: 164135 - DNA, 459 bp, Glycine max
  unsure (1)..(459): unsure at all n locations
tgcatcaataaagaggtcttattggtacaaatttatgtttatgatataatctttggatctactaatgaatctttgtgcaaggagttttctattgacatgcaaaatgagtttgagatgtccatgatgggtgagttaaactactttcttatattacaaatcatacaaacaaatgatgggatctttgtcaaccaagcaaaatattacaaggaactcatcatgaaattcggaatgaagaactcaaaacacttggctactcctatgagcactggttgctaccttgacaaagatgagtccggtcaattcgttgatgaaaagcaatatagaggtatgattggatctctactttacttatatgncagtaggccagagattatgtttagtgtgtgcttgtgtgcaagatttcaatcaaatccaaagtgttcacatctaactacagtaacaaggatcataagatatctt

SEQ ID NO: 164136 - DNA, 379 bp, Glycine max
caaaactaaatcaactaggtataaattgacacactaatttcacccaaaaaataagataacaaaatagacacactcccacatactgacatacatgacttataatatatatacttaaatattaattatatgataaatcgctataatgatatttctcaagtgtataatataacgcttgtctatcatttaaaactttacccaataataattagtaatttttttttaatccattggagtgaaagatgtggttgttacttacacacttctcacacctcataatttattattgctacgcagtcattgtatctatacaatttctctgacaatacaatataaataaagagaagtgaaatataacgaaaggaagaaatatatacgaaag

SEQ ID NO: 164137 - DNA, 404 bp, Glycine max
atttctttttctccacataaattggccctctaagtagaagctttagggtgggcccgaaagttgtcaaaccctggttcatcacgtctttttgtttagggccgaatcaagctgcacgctttatagattccaactggttgggttggtagggaaaaagaaccaacggaaaacaagaaccttacaattctaaatgggcactggtcaggctaagatatcaatctcttacataactactgacactgttctaaatctaaaatataggaaggtgcatttaagaacaatgcattctacctgcatgaaccattgagtctaataagcatgggttctccctctataaacaccaatctgacttgacaacttgaaaagaagtactatatatcacagttgatgaacttacgaatactcct

SEQ ID NO: 164138 - DNA, 419 bp, Glycine max
  unsure (1)..(419): unsure at all n locations
taaaactaagctattacatanataatgtgccagtgtggtgatctcattctcctgtcagatatcctctaatgcacggtagagaaaagaaccaggtgcaatgctacgctcatactgacacttaaagcatgatccttcttcacagtagataaccttttccatacttgatgggggcagatacttttgtagatcttgaacaacaaaaatactgaatccatcatgtgacatatccataatgaagctgtgacagatgttcaccgcctctaaatgttccaaggaagtgagcacactcctcanagccttcatgctcactaccgtggaccgaatgctgaacaccttcaagttatgggtagattcaatcaaagcttctgcgtgctattcttcaattcgcaatggaatatgatcccactgacgctcttaca

SEQ ID NO: 164139 - DNA, 285 bp, Glycine max
atgctagttctatttagatatataaccacaataacaatgctagttctatttaacttaattctcaaacttcatatatctctaaaatcacacacaacaaaaagtgctgcaacctgcttaccaaaacaaagttaaagaatccgccagaccgcttatttggggaaccaaacttcaccttattgtccagcatcctttcataaagtgctctgtcttgactacttggagatgactgatggccctattagttgctggaaagttcatacaaaataatattaattatgtctccct

SEQ ID NO: 164140 - DNA, 461 bp, Glycine max
tgtataatgtatagttactgaaaaattattggcatgacatggtaatcttaagtatccaattggtcacgcatacatatatatatatatatatatatatacacaatgtgtcaatgtgaagactacaccaccacattcttggtgcaaaaatagtatatacactgttaaccaaggacccttttgttttttccttttgcctttaattaagtgggcgtgccctcccaaatttaaaaagataaagttagcatatggtagcaaaatacccttacaaggcaaaaaagcagcaaggaaacaaccatataaaagagaagcatgccgacggcaaaatcaacgtggacagaatcaagagagtgacacattattatgaagtcaaaaaagatcagccagccatgcataagaagaatggagggcattgcaatgtgtacggcttcatcaaagagagagtttggaaaagttttaagaga

SEQ ID NO: 164141 - DNA, 317 bp, Glycine max
tccttacccttcgaagccaaaaaagaatagaggggaaattttccatctaagaaaaagagaaggaaaattttctatgaaagccaaaaaagaaaagaagggaaattcctccctcaaagagtgggagaaagccaaaaaagaaaagaaggaaaattccccaatcaaagagtgggagaaagcaaaaagaaaagaaaggaaaattccccatccaagaatgggagaaagttaaaaacgaagaagaagatcgaaagaaagcttcttgtcagggatcgaaggataaacaaaacaaatgtgctgagaggtctttggacccgacaata

SEQ ID NO: 164142 - DNA, 455 bp, Glycine max
gccctccaattgggtatttcctgcattccttatcgaaacgtcgaataatctttcgccttgcgccgcaattggtgttgaacaactcaattcagctagcgaggatcaaaacgttagcgaatgatagtccccaaacgaaattagggtctgacaggagttaagttatcattaagtatgattctatctatttcttctaatggtctattcttcctctcaaccacgtcatctcgttggggtgttctaggagttgaaaaattatgaagaataccattttcctaaaaaaagagataaaaattttcattctcaaaactcaattccattgcaagatcaaataaaattctgatttctttgccatgtgtgtctcagtgagaaaaatatacttcaattgttttcaaattacgtgctatatataaaaaaacgtagcataagcatcactttctaaattgagacaaaatacc

SEQ ID NO: 164143 - DNA, 409 bp, Glycine max
cgagatgaggaaatgttgaagggtgaaactttctgcttttattgttgaccacatagtggtacctggagatatgtcacgggggtcaggagaccttgtggacgtcatgtggggtgctattgcccaaaaccaaacttgaccaatcccgacccaccccgagcatagtcggtcagtgagaacctgtgatgtacctaaacaggcgagctcctggcagtctacagataataggaacaaagaccacaaagcaaggaggtttgtggtggctggccatctctgaaacttgattgatatgtgagatatggtctctggtaatcgattaccaatggtgggtgatcgattacaaggcttaataatgaagataggaggctaagatggtctctggtaatcgattaccacggtgtgtaatccatta

SEQ ID NO: 164144 - DNA, 362 bp, Glycine max
atcaacatcagacattggcctacggacaattagagtatctctaagatctgcctcaatgatatcctcgttcgcttccaccaaaaatgcctcaatgattgactgaagcatggcttcttcaaaagctttcctttcagcaaggtccatgtctttaagagtagtggcaacttttatttttggctgtctttaagccagatctaaaaaaaagattcgtgttgctagttttgcttcaaattgagctcactctaattcttccatctcagcattcttcatctcttgcttaaattatgcatgtattgattcaaccatgacgaattctgcaataccttcatatataagacatccgctgggaggctacaagggat

SEQ ID NO: 164145 - DNA, 448 bp, Glycine max
tgtatattgtcttattcaaaacaggacgactttcatattcttcccttgcattggcataatgttcaattactgtcaaggcttttggagcatctataacttgttcaactatattttgtgcaacatttcggttgataagctgcatcaaatctctctttttcctctgtattctttcagcacgaaagtattttttggttttcaattgctcggcaactttagtttgtatctctcctttgacaatcttcttccgtatcgcatccagagaagcccccttctcaagctcttctaacaattcttttcttgcttcctcaaattccatctaattcaattaagcagtgagtgccaaaaagtattgttagagaaaatgaaatatgaatgacaatctaagtaattaatatttaatactcagccgaaaaaagaagaaatcatacaagatgttttaagttacaag

SEQ ID NO: 164146 - DNA, 272 bp, Glycine max
ataaaccacaaagtctggcgataggtgtagattttttattcatggccagctgggttaccaagttgtcgcaacctacccttccgcgggaaggcgacgccaaggctcaccggtgcgtctttcaagaaaggaaaatgccaggagtcgccaccaaccgttattccaggaaaacgtcggaaaaaccggaaaagacgtggtctaccaactttaaatgtgaaacgtttaagagttgtttttacgcaccgggaagggtatagcaccccacacatctgtca

SEQ ID NO: 164147 - DNA, 442 bp, Glycine max
  unsure (1)..(442): unsure at all n locations
taataccaccaattattaatttttgttaatagattgtatgtattttatatgaaagataatcttatttaaactggataaataagataattataagtgataaaactctgtctccaaatatttaacgtaattatatatgtaagactaattaatctaaaataactttgcatgattaacatactcagtgctataacactaatagtttggtaataactaattcattgataaatattataaaatcatcaatatttgagagtattagaataaattctacttcgtattagaataaaattaattagatgcaaacctattaacgaaatgctttaacttcaccaaatatgtgattatgaaagcaaagggtagatggcagaagaaagagcaggataaataccatgggacggtggcattngagagtgatttggaaaggaagcacgggcacttgtgc

SEQ ID NO: 164148 - DNA, 467 bp, Glycine max
atggctttgaggactcgctccaatggctcatcatgtcttctattgaacctttcttcataggcttgaagagaacccatcaattgatctacggtcattgagtctaaatccttagactcttcaatagcacaaaccacataatcaaatttagcgattaaggagcgaaggatctttatcaccacacgaacatcttccatattttctccataacgcttcatttggttcacaataaccaacaccttgttgccaaaatctaagatagattcggattccttcatatgcaatgattcaaactctctacgtagagtttgtaggcgcaccttttttaccttatcaacaccttcaagggaggttttcaaaatctcccatgcttctttggatgtggttgcatttgacaccaactcgaacatagcttcatccaaaccttgatgaatgaaagtaagtgcttgttgatccttcttcttcgactt

SEQ ID NO: 164149 - DNA, 275 bp, Glycine max
tgatagaagtctccacagaggccattttcttcctcgcccagtattatgatcagccggtgagatgctttacctttggggacttccagcttgtacccatggtggaagaatttgaagagatcctatgatgtcctctagggggaaggagaccgtacctcttctcagggttctatccctcattagctagaatttcaaagatactccaaatctccgcgcacgaattagaccatggaaagcaagtcataaatggggtggttggaataccgagtaaatgtttg

SEQ ID NO: 164150 - DNA, 444 bp, Glycine max
  unsure (1)..(444): unsure at all n locations
tattcagaggacaacttattatcatgcacagcttgcgatagttggctcataacacgctaatcatacctatggagcatcttcttgagcaagtagcctagcctgaagctcaacttccattggtgagacccaatgaggctgcttctcctgagcccgcaccagcacgggttgaaccaatgccagctgagtcacgatctccagtggtgaatacacctccttctcctgagcttcaagtagttcccccatctccacctctgattatcatctccgatgcatcatcggatgaaactgctacccctcctgattcaccagctggagaaacaactgatccccctgattcccagatgaaggaatngccaatctttctgattcgtcatctggagaagatgttgctctcactgattccacaatttagacactattgacactgttgattcctgatgatgc

SEQ ID NO: 164151 - DNA, 379 bp, Glycine max
  unsure (1)..(379): unsure at all n locations
aagaggcaaatctgatcatcatgctttgataaatgcaaaaaatactggggcaaatgaataggatgagaatgagggagaaacccatgttgtggctgccattcctatatggacaagtgttccaccaacctaacaatgtcattactcagcaaataacaacacatctccttacccaccacccagttatccacaaaggccatccctaaattaaaccacaaaacccacctaccacacgaccaatgctaaacaccacctttagcacaaaccaaaacaccaaccaaaaagggattntgcagcagacagcctgtatgattcaccccaaaattctggtgtcatatgctaactcgctcccatatctactcgacaattcaatggttgccat

SEQ ID NO: 164152 - DNA, 433 bp, Glycine max
  unsure (1)..(433): unsure at all n locations
tccatcaagtggtaatcagagcacaggagcttcatgtggtgctccttaaacctccattaattatttgctntaccttctcttccattgttgtttcttcattttttctccatgtatctcctcacatgtcttgtgctaaatgttgttaacatgattttttagattttccaccaattaaacttgctatagaagctagatttgattttctatggttcaaatttcttgttcttgttcttgaaccatgaattgtgttgagtttaggttcctttgatttttgtcttgttattttttgtggctgaaacctataccataaaattcttacaaaaatattaaagtagaagataacctcacaaatctagagtgacttgttcacctattgtagttatgtcatagaagtcatgtctagtcatgaaacttgtcacataagaattcttat

SEQ ID NO: 164153 - DNA, 438 bp, Glycine max
  unsure (1)..(438): unsure at all n locations
ngacaactacgtccaccgaatggtgaacatgtctgtattcatttggcacacatctactgtatccttagcacttgactcctaatattttgatcgatatcgtacaatatacatgcatgcttctctaaactggagctttgaagcgattcatggataaacacaaaagtgaaatcagaggacaatgctaaatggattccagttagggaaacgcaaattagacaatgattgatctcttcaaaatgacattttatcacttggtacactaatgttgggataaatgcaaatattgttgaattgagtgtaataagcaacgaggaaacactaagtgcgactattacgacatgcattggaagtaactatatcctaagaggtcaatgataattggaaatgataatgttactgccaagtaaatcacttgttgagggctatattcacactgac

SEQ ID NO: 164154 - DNA, 312 bp, Glycine max
  unsure (1)..(312): unsure at all n locations
attaattgaaaatataaccttggcgcagaattttttttttgctcaagctatgtttctggctgaagctaaaattcnttancattgaatctgctcgaatttagattaaactatgatctttagcttaaactaaattctggttgattaagtatgcatgaattaacaatagccatgatttttagctcaaactaaattctgaagaactgcaatctacacaaatttagctcgagctaaatttctagctaagctaatcgaggaaagtgctcttttttagagtttcaatccaattcaagtgccaaatattttttttttact

SEQ ID NO: 164155 - DNA, 184 bp, Glycine max
attattacattgaaacacgtataatgagaccatacactttattaacattttttaaaaaatattgtggaattaacttacatacaaacgcaacatattagcttattaagtaataaatctattttttattcatgaggcaaaaacgatttttaaccaaattatcgtgacggacataaacttataaccc

SEQ ID NO: 164156 - DNA, 422 bp, Glycine max
  unsure (1)..(422): unsure at all n locations
tgatgcagctgggtttgtatctacctcatgcacntctcttatgactatggcatcatttctggcgctaaactgctgggagttggaagccatcttctcaattaaattcctgccttcagcaggagtcatgtctccaagggctccaccactggcagcatctaccatacttctctccatattactgagtccttcataaaaatattggagaagaagctgcttcgaaatctgatggtgagggcaactggcacatagttttttaaatcgctcccagtactcatataggctctctccactgagttgtctaatacctgagatatctttcttgatggctgtggtcctggaagcagggaaaattttttctaagaatactctcttaaggtcatcccagctcatgatggaccttggagcaaggtaatacaaccagt

SEQ ID NO: 164157 - DNA, 369 bp, Glycine max
tgttctcagtatgaaaattagtagtggaatgttcaaaatcagaatattcggaatcaccctcaacagaatgcttagaatgctcacaatgcacagaatgaccacgattcacactatgcctaactaatctatgaaaggttctatctatctcaagatcaaagggttgtaaatcacctggattgcccctagtcatgcactatatgaagcaaatagtgtgtttctcaacaagcacctaacaagggggtaaaactacagctatactcagacgatatcaaaatgaggtgaaatttcgtgaagaacacgctgaaatcatgaaaagatatcacaaaaaatttcaaacaaaaaatcacagtctaactatgaaaactacct

SEQ ID NO: 164158 - DNA, 479 bp, Glycine max
  unsure (1)..(479): unsure at all n locations
ggatccttgagtcacctgcggcatgcaagcttagacaaccttgttgtagtcgagaattctttattatnntattggacaagtttgaatatgatgtagaagaaaatgaatgtgagcctttttcccctttgaaagacttgtaaaaaaaaatgttttaaaaataattttaactaatatttgaattttttttccttattagtatattatgtgaggggtagagggtgtcacacgttgagttctgaaagttaaaggtatattttaattataggactagcaataaaacaaaacgttagaaatacaaaataggcatttctatcaataggtacttaacaattaattttaaatattctgtttggatatggaaataatcatcacttacaaattaattatcatattttgttgaaacatggaaattatcatcatttagacattgggttatttctaattatgtgggtcttaacaatncgattttaaatatcatc

SEQ ID NO: 164159 - DNA, 446 bp, Glycine max
cacatattttacatcgagggtcctcattgatatgttctacaagtcgatttgcataaatttctaattgtcataacatatgattcgtggatatgatttaagctttctttctttgtttacattttaagccattggccaaacaactatcccaatgtatattattttaccatttgcaagccctttgagccaaaacacttgatattttgttggaacactaacctaggataaaagtttcctacctaatcttaggtcaagagaacaaaggtattttgatggggatttctatcatttggtggctaatgtgatgtaaatactctatttttaatatgggtatcaagggaaaacagaaaagaaaagaaaagagaaaagaacaaacaagttctttatggataaataaaaagttcgaatcatgtacattgtattagaagtgtcgaaatatctgaatagaa

SEQ ID NO: 164160 - DNA, 355 bp, Glycine max
  unsure (1)..(355): unsure at all n locations
gccattaactatacgtacacgtcaacaagctacatgtaatgtcacgtccaattaaatgtgacacgtaagctgaccacgtatcatctaacatgacatcatattntaattaaattaaaagggaaaaaggtataagattaaggttccttataatgaaaaccatgttgtttgagaatagaaggagggttgtgttttccttccttcacgttcggtatctcatacagaagaagagtttgacggtctaagattcatggtggttcacctccatatagcgctggattgactctgttgaggggtgctggcgccagttgaatcttctccgaccgaaaaaaaagaatgacatccatgagacgttttt

SEQ ID NO: 164161 - DNA, 393 bp, Glycine max
gcaaaagtcaagtttgacaaaatctcataacatccataaaaaaactgtccaacacaaggaaaacaccactcgtaaagcactggttgaataacaaaaatgataaatacttcaaggggaagatggcccataatagatgtagaaacctcactgaaggttcagcaaacttgtactataattatgttaaaacttgaaactggaacaagtatttatgttgttaatttgtaagtataggattttatttacgcaatccggatcctgagtagacaagcaatgcagatttaatcaatactgacctgattaaagatgacaagaaatggagcataagaagaaacagatataacagcttactaccaggtactctataaagcatagtatttatatcacatatgtaaa

SEQ ID NO: 164162 - DNA, 296 bp, Glycine max
gctccggagtacgacagtcaccgctttatgagcgctgtacaccagcagcgcttcgaggccatcaagggatggtcgtttctccgggagcgacgcgtccagctcaaggacgacgagtatactgatttccaggaggaaatatggcgccgacgatgggcatcactggttactcccatggccaagttcgatccagaaatagtccttgagttttatgccaatgcttggccaacagaggagggcgtgcgtgacatgagatcctgcgtaaggggtcagtggatcccgtttgatgccgacactat

SEQ ID NO: 164163 - DNA, 352 bp, Glycine max
ctagaattaaaataacttaatgccattaacctagggaattaaaaaaacttaatggctgagtgtaactgaaattgtggcaaccaaaagtcacccccaacagccaacaagtcagccaccatttggtctcccaaaaggctgacgcctaggttgccaattgggcccttattacaacttgaactaaacctaactaaaacccttttagttgattaacccaaaacatatttttggtcagacaactttacaaggattgggccattatttatacaaactaaacactctaaaattgaaacaaagtggtgtcatttagtcctccttcatttgggccatgatacaactcacaaccttggacttt

SEQ ID NO: 164164 - DNA, 268 bp, Glycine max
  unsure (1)..(268): unsure at all n locations
ggcccatttcaagaatctcatcanaagtcgactggcatttttttcgatccatttccgggaataatatatttttgctgatatgggcaaatggtttcctaacccaattaatgggaaaatgccaagttcgggcgaaacaaaacgtcgattgagctcgcacaaaaaaacctaaccgaccctacattgtaattttttatgccacaccaaaacaagaaaacttgccgcgcctgaaaaataacattatctgccagcgagggtttttaaataaaaa

SEQ ID NO: 164165 - DNA, 366 bp, Glycine max
  unsure (1)..(366): unsure at all n locations
cgacccgggaactctaagtcacctgcggcatgcaagctttcttatggatgacatctttataaatccatgtccacttcagtttgatggtcccggcgcagatgccaaggttataactctttctgttgaagaccaggactacatgggccgcattaagaaacttcaggagtaccttgaacaggtcttgccaattaaccttgttattttaacagcactagagtttagggcatattnttcttattcaatggtgagtgagaaattcaaatttaatgcaatgtctcttgtgcaagacttcaaatccagtgactggtccgcctcattgtgtgctaaataattaagttttatattaatgaacattggcaccttttc

SEQ ID NO: 164166 - DNA, 426 bp, Glycine max
ttgacacaaaatgaaagctaaaatatctatttgcaaatgaagtcaagtttaaccaggcataatgctattttcgcataagtattaataataaatatgaaatataataaaaaattgttattttttattattaaatattgaatatatgtattaatatacttattataagtgtttatgatagctgtgacatttaagttaatttgatagttaattttgactaaaaatgattataatttttttactttatttttttaatgaaataaaaaaaattaataactttatagttttttattaacaaactttaaaagaagaagaatttaagtgctttagaggaaagacacatcgagtctgagaagaaggccaggaagcataataaaaagacatatcgagtctgagagctctctaatgaagaaaaatcaagtctgagtc

SEQ ID NO: 164167 - DNA, 403 bp, Glycine max
  unsure (1)..(403): unsure at all n locations
agctngaaggcaaactggatgctttggttatctnggtaacccagctggccttgaatcagaaatatgtacctgtcgcaagggttcgtggtttgtgctcctctgctgaccaccatacagacctttgcccttccatgcagcaacctggagcaattgagcagcctgaagcttatgctgcaaatatttacaatagacctcctcaacctcagcagcaaaatcaaccacagtagagcaattatgacctttccagcaacagatacaaccctggatggaggaatcaccctaacctcagatggtctagccctcagcaacaacaacaacagcctgctccttccttccaaaatgcttgtggcccaagcagaccatacattccttcaccaatccaacaacagcaacaaccccagaa

SEQ ID NO: 164168 - DNA, 456 bp, Glycine max
  unsure (1)..(456): unsure at all n locations
gtgaaaagtttgtttttcaccttctcgctaaaccaatctgctggcttancgagcgtccgctaagcgcaacacccatgggctaagcacgaggaagactctgaagaagatgagttgtacaggttcgctaagcgcaccgcttcatctcgctaagcgcaccgcttcattccatccgctaagtgagaaaggcacgtgctaagccaaaattcattaatctgcgctaagcggtccataattgcgctaagtgcacgagcacgaacaaggccacctatttaagcctgaaatcagattttgtgaaaggagtttgggctgagagctgaagctttgcatgtctagtgattctagagagagaaaggtccaagttccatagagttttgagagatcttgctgtgtgaagatctgtggagactagagctggaatcaggagctagttcgagagcttgagatgagtttatgagt

SEQ ID NO: 164169 - DNA, 448 bp, Glycine max
agcttataagaatgaaattgcctatatcatttccaaatatgcatgtgaattaggaagcatcaacaagaatcaagccaaggctattgtgcaaccaatcaatggggcaaaacacactaaaagattatgatgatggattgctctaattctcacaaaggtaaaattatcactttcaaattgagctttcaaaactatcatgacatgtaaaggaaaaacaaggatttcaagtcacaaaatgtcaagagacttttattttcagaacaattacccattacttgaacatatcctataattcaaagacaaacatgcaaatttaacacaacaaaactaacaaaattaaactagaacccaacaaaaataacaaaattaaactaatttaacacaacttacaaaacccaaaccaaagaacacactccccccataatgaacaacacattgtctaatctataca

SEQ ID NO: 164170 - DNA, 457 bp, Glycine max
  unsure (1)..(457): unsure at all n locations
ctattatgcactctccactcagcggggatttcttcttctgtgaatgcaagatagttattatcagtgatattattgaccagccctccgaaaccttctaccgagatgtcttgggccacatgggcctcgttcagaacttttactatcagagcccgatgaggctcggagctcatgatcaactccaacagcgagaccctggccggcgttctgttgagctgttcgataaccttgaattcactctgctgaattatacggaggaactcgctggcgttctctagtggtacctactttttaccatgctttttctccggaagaccttttgccggaatatctttattcgaagcgtggggtgcttcgccatcttgttactccaccacttatgcttttcccttgacgttcgcaggttggactggtatgtccggaagcgcgaacacactaccgctacnggtcacaccactca

SEQ ID NO: 164171 - DNA, 266 bp, Glycine max
cagcttttaatctcagaagatgataatgtttttgttattaatcaagccccatatcatgactatgggatcatatatggcgactaactgatgagagtttgaagccaaaattaaattgagtttgtggctatattcatgagtgagattacaaggggacctccaatggggtgagttattaaacgccccatgataatactgagtccttaataaaaataatggagacaaaactactccgtaatctaaaggtgagggcgactggcacaaattca

SEQ ID NO: 164172 - DNA, 211 bp, Glycine max
aggacactgcggcatgacccactgcttaagaatacagcagatgcctatggccctctcattcaaatcctgaactcaagaacacaagcatataaacaaaccaaaactgccccacaaatataagcacattctcacaatctggagcaccacaagatgaagaacatataccaacgggaagctaaatacatcacggactgaatacttacttgttgga

SEQ ID NO: 164173 - DNA, 322 bp, Glycine max
gacattcatcaataaattaagtaacaggaacctacaagggagctagattttcttctgacaatgcagcttgcctcttaacagcatccatagaacttacaggtgcctcaatttcagcattgtttttgcagccaaagccttaaccatatttgattcaactctggtcacttcccttgtactctcatacaaatacctctgtagctattttatgttagcttgatatgatttactcacctctctctgtggatttacaattaatttaagtgatacgagtatcaatatgctttcatttgaagcatataatgagaccttttattcctttaac

SEQ ID NO: 164174 - DNA, 344 bp, Glycine max
gcttatatgtctatttttaaattcaatgcgaattctttgcgaccatgtgctatatatgctattcgtcgatgcatataggtggggtcactgtagtctaaatcaaaattctactttggatcaaaaggttagggaactatcaattgtgtacttaataacactatcagacaatcccgagatcctacttaaaatatataattgtgtttaaagatatacactatgcatattaaaaagcattaatcttgcacatatcttattataactaccagcatttgaataaacccatgtctgatatgcacaagttctatacttacaacttaaacagtttaaccaaagtgtcaagttaa

SEQ ID NO: 164175 - DNA, 387 bp, Glycine max
  unsure (1)..(387): unsure at all n locations
ttattanncaattgatccaaggaaacttgcaaagaaaaatgtcccatcgactctgttttattattttattcaaagatattctgattattttattatttttttcaagatattttgattattttattattttttttcaagatatttcgattattttattattattctcctatttttggtttaaccgagattatagcgtgaatgatccgctagatttctgtttaacatttattacgtgagaaaacagcttaaataaatggttaaagcacgttaaaaatggaagaaaagacaactgaaagtgagcgaaattaaagtgaaagtacacacaacaagtatggaccactaanggtgcatagaatgaatcgaaagattcgattctcggaacttacc

SEQ ID NO: 164176 - DNA, 316 bp, Glycine max
  unsure (1)..(316): unsure at all n locations
gcacccccatttttactaagtacaccccctgcctttgttttggtgaatctttttttcgaaaggtacggaaacttacgaatttcggaacgatacttggtttctttccgtaatgttacggaaccttgcggattacataatcatccccttttttgacttacggaatgttacggaacctcactaattgtgcaacgatgcttccatttgatttctggtgtgtcacggaaccttacggattgtgcatcaatattttcttttgatttccggcatggtccggaacttcacaaatngcctaatgatgggtgccaagcacctcaca

SEQ ID NO: 164177 - DNA, 425 bp, Glycine max
ctatacgatctaggactgtggtttgtgactaaattcaatttatacacaagtcttgcactttccatattggtacaactctctccatcaatgatcaccatgaaaactttgccattgatcaaacatctagtgtggaaatttttttctcattgactttcctccataaacttcaattgatggccaagtaaccgccaaatcatcaacaattctccctccagtgttttctccacttactcctcatcatcctcactctcttctcccttttcaacttcagactcactaatgtactctccatctctaagaattatggctttcttgttagggcactcatatgcataatgtcctaagccttggcaccgaaaacacttcacataccagctctctttttaggatcgttcttgaaatcttggaggagtttttgatggtat

SEQ ID NO: 164178 - DNA, 404 bp, Glycine max
aatgcttggaaaaattattgttaagatagaaactcacttggccaatcatttgtgcttttcaaaatcttttctaagagtctatctaaaacttttcttaattcttatcttgagatctttgctcttgcttgacatcgtgctttcttcatccttcaaattcatcttgaatgatctttgaaattccttggcatcatcaaaataattcttgaagccttgcttctacacgtcgcccttggggcgcttagtggccatcgctcgctaagcacacgaacaataactattggggaagtttttgaaactacccaagccctcacgttgcctccatctttctttttaaatttctatccaaaatcatttttcgggtttcctctcttttgcccctctcatttctctttgcactcttcttc

SEQ ID NO: 164179 - DNA, 428 bp, Glycine max
  unsure (1)..(428): unsure at all n locations
acttctaaggaggtgaccttagttattagaggggtgtgggtttctaagctcttgcttctcaangaagttttctcaaagaagcttctcaaggaagttttctcaagaaagcttttcaaggaagctacctagtctataaatagaagaatgtgtaacacttgttgtaactttgatgaatgagagtcttgtgagacacaactcanagttcaacttctctctctttttcttctttcaattttgtgctcccccctctctctttctctccctctttcttttcctccattgaagcatcctctccaagcttcttatccaaggctcatcatggtggtgaagctccttctctcatggcttattccctagtggatggcgcctnctctcacctcttcttctttgtcttccgctgcatctncatggtgganaatcaccattaa

SEQ ID NO: 164180 - DNA, 401 bp, Glycine max
agcttgaagggaaactagatgccttggcttatctattaacccaactggccatgaataagaaatttgtccctgtcgccagactctgtggattatgctcctctaccgaccaccacacaaacccttgtccttctgtgcaacaatctgtagcaattgaacaacctaaagttcatgctgcaaacatctacaatagaacttctcaacctcagcagcaaaatcagccacaacacaacaattatgacctctcaactacaggtacaatcccgggtggagaaaacatcccaaccttaaatggttaaatccttcacaacagcagcaacaacaacaacaaccttcatttcagaatgttgttggccaaagcagaacatacatttcctcatcaattcagtcagcacaaccacaac

SEQ ID NO: 164181 - DNA, 388 bp, Glycine max
taaatctgatctgactacgaaatgggcacttgaaggcaacaaggacggtgtggacaacacctgtgaaaaaatggcattatcaaggagaaatgggcccaattttgtcagacccgtaaagatcccttgtgggaggtatgtactttgtaatatgaattgttttccactaaaaattcagttcttataatagattgtagcaatcattttcattaatgttcgatttttgcaggatgtgcggaaaaaagcacaggccatcatgaagcataacatctccccccacgtgctgtctcgtgggggttatgaatatctacaacaaaagctgatggctgagaagacaaagaataaactagagaaagctactaagtctggaagcactgatggcgtcattaac

SEQ ID NO: 164182 - DNA, 350 bp, Glycine max
acaagaaagcagaacctggaattttgtgggttatagctcaacttcaaaggcctacagaatctacctaccacagagcaacaaagtaatcgtcagcagggatgtcaaatttctggagtcagatagttgggactggaaaaatgataagaggtctgagtttcaggaggagaatgaagatgttgatgaagaacccatcagaggaaccagatcactttcagacatctaccaaaggtgtaatgttgctgtaatggagcctgagggatatgaagaagctacagctgatcagaaatggagaaatgcaatgaaagaggagcttataatgattgaaaaaaataaaacatgggagctggtgg

SEQ ID NO: 164183 - DNA, 463 bp, Glycine max
  unsure (1)..(463): unsure at all n locations
tgagatgaggaagtgttgaagggtgaaacttnccgcttttattgttgatctcatagnnggacccggagatatgtcgcgggggtcaggagaccttggggacgtcaggtggggtgctattgcccaaaaccaagcttgaccaatcccgacccaacccgggcatagtcggtcagtgagaacctgcgatgtacctaagcaggcgagctcctggcagtcaacaaataaaaggaaaacaagaccacaaagcaaggaggcttgtggtggctggccacctgtgaattttgtgtaatatgtggattgtggcctctggtaatcgattaccaaaggtgagtaatcgattaccaggcttaaaattgaggacaggaggctaagatggtctctggtaatcgattaccaaggggtgtaatcgattaccacgctcgtaaacgaagtcaggaaacttanggagcctctggtaatcgattac

SEQ ID NO: 164184 - DNA, 400 bp, Glycine max
  unsure (1)..(400): unsure at all n locations
acctgaggcatgcaagcttggttatatgcataatataggtgttgtttatgttctgacatctgagttatggggtatccgttttgcgcaatatcattatagaataaagttgccgttcagttggtccagaatctgaaaagtacccatcaaccctattggaatatgatttccagtatttgttccctgcttaatcgtgagtgcttgttagtattgttcccatctttaaagaggctaatgttgtanctgactgactggcttgccaattggggccatgctcactccttggggagttagtctccttattctgcatgatgttgatggagttgcaactccaagatggcgcttacccctttgcttttattccacataataaataaacatagagcacattaagctataaaat

SEQ ID NO: 164185 - DNA, 375 bp, Glycine max
  unsure (1)..(375): unsure at all n locations
tatntaaacgtaatttgttctctactctgctgcagttggaacaccttccatccatggttacaggtgttttcaccgatgacaataacatgcagttagaggccacaactcaatttcggaagttgctttcaattggttagatatttgtctatggcgttttcgttgtttcttttatggttctgaatttgaaatgatgtttgatgaactccgtttatgccctgccagaacgtagcccaccaattgaggaagttattcaagctggtgtagttccacgctctgttgatttcttgatgagggaagattttccacagctgcaggtttgttatccgccttgttttactttatgtaatcaatatatttatctttgcttatttatag

SEQ ID NO: 164186 - DNA, 383 bp, Glycine max
  unsure (1)..(383): unsure at all n locations
agctttctcttcctgaacctgttgttnagtatataaatcctttataatatggggtgtaacagcatgcattgtgaataatgtttttttatatctaccataagcttttacaatattcaaataactagtgattttgtgttagattgtattaacttatggaagaagttatatgtacacacttctttcatcatattatgattcttctgaaatcttgcaagcaacttgatcagcaatgttcaccttagcttgtcgcgaaatggccaaaatgtatatatggcatctgatagatcatctaagcatggaatatcaactntgggaaaggaatttatggctggaattctacatcatctaccttcaatttggcatttatagcaccactccctaac

SEQ ID NO: 164187 - DNA, 375 bp, Glycine max
atcagggcatataatgaatctatgaccaagaagatagtgtctaaatctggcaatagcttcagatatggcatacaattctcgaacatatgctgattggtgctacattctgacagtaagccgcttagaaaaatatgcaataggatgagaaccttggctgagtatagctcctatgcctgaaccggatgcatccgtctcaagggtaaaaggttgagtgaagtcagggagagccaacacaggagcatgggtgatggcttgtttcaactgctggaaagccaaatcagcctgtgcatcccacttaaaactatctttcttgagcaaagatgtcaatggtagagcaatagaggcatacccctgtataaaccgacgataataccc

SEQ ID NO: 164188 - DNA, 393 bp, Glycine max
  unsure (1)..(393): unsure at all n locations
tcataacggggtgatttaacattttcattctgatcgctatcaaacacccaaagttaaaacaattacagcatgtctgggtagctactaacgagtttggattaaattcatggtgagaaatgatcaattaagtgaaggcaaagcaacaatagtcgcttctatttgtggggggggggggggcacccctcctcctctgactctacancttccctactatacacataaatttgaaacctgttttctccacnctcctcgggccgtattggccttccttccttaccaccaacccaactcatggaagcttctatacctccccaccctactctctcacacttcctttcaactcatcacaaccattcggactccctctttcacccctcctctttctttcctcct

SEQ ID NO: 164189 - DNA, 407 bp, Glycine max
tataagtttatattataaccgaaacagaaattttcatactgttcataacaactacctagtagcatgacaaaacagccatatgcaacatcaccaacaatattaaactaggcaacaaacaaaaaaaagcagaagcagattgtttgagttgatagtttgaaccttttatgacttctcaaaagtccaccccaaagcgtttctgaacaacccttagcacactggtgaccctccacagttaagcccaccagtgaaatccctgcacaaaaacccagggtgcttaccttgagcccttcttttgacttgagcccgggggtcggatgggccatgaagcctcatacatatgggaatgaagaagatcattgatcaaaacaaagaacacccaagtgaatgccccaccccaaaaagtatga

SEQ ID NO: 164190 - DNA, 408 bp, Glycine max
  unsure (1)..(408): unsure at all n locations
agctgtaggattatggngtacttatcacatgtggtactaggtggcggncgggcgatggtgcacaacaagttttccacattcacaatgcgcgcataaacccaccatcccctgttgcccacctccatctgagctcacgtactcccatgtagcccatatcctcgtttctctcaacaccgggtccccatcaatcctcccaagcttccacaacatccaagcaaaacaacattcaaacagcacaagctatcacagccaagcaaaacagggcaaagccagaaaactctgctcaacacaccaacaaaatcacagcttttctcacttaaagaccccagtaacaattccttcgatccaattgttaacccgtggatcgactccaaacttttactggaagtctataatacataagcctac

SEQ ID NO: 164191 - DNA, 433 bp, Glycine max
tctcttatatccgcctgagtgggcttatagcctaaaccttacttcccacgatttcctttggcatttatcaggctaattatgccgccgttgtctttgcctaaacccattccgggttcataaccgttccccaacataactcgggccatcattactgctgcatcggacaggcaaggctgcccagaaaatgagtccacggaggaaatgctgaccacctcaaaagactggaaagcggtttctaacgattcttctgcggcttccacataaggcatagaggatgggcagctcaccaagatgtcttgctcgcctgacatgatgaccaagtgcccctccactacgaatttcaacttttggtggagtgtagagggcacaactctcactgagtggatccacggacgccccaacagacaactgtacgggggggtaatatccatta

SEQ ID NO: 164192 - DNA, 435 bp, Glycine max
  unsure (1)..(435): unsure at all n locations
agcttgatttatactgggnncggtctctttttatgcttcgtccagncctcaagcaacccacttgagaattcccactctctttgtaaaactccttttacaaagtctgaaccacacagggacaacccttcccttgtgttcaagaatcctctacaacaagagacccacggtctcttaatcccttttcagaaataagaaggagagaagaagatatctctcttaaaagagatagattgtacaatgaagatcaatcaaaattccttattgaatatacaagtggttgaccaaggaatctttttgagaggaaaagagatttcagttcaggaaaaatcttaatcttttgagaggataaaactggntgggcaatgaaaactctctttaaaaccattgaatggccattcattaaacatttgaatagatgtgtctcttggaaaattt

SEQ ID NO: 164193 - DNA, 434 bp, Glycine max
  unsure (1)..(434): unsure at all n locations
tgcttctacagtttaatcgattaccatatatccataatgtattacccagttctttttcagaccatgtttgttttcctgggactttagtttaatcaattacaaggatattgtaatcaattacatcatccttgaaagtgttcctagaagtgatcaagaacactttagtcgattaaatcaagattgtaatcgattacattgttcttgaatgttttccatgtttggggaagaacacgttaattgattagaaagagagtctaatcgattactctctcaagataatcgattatattgacaatttaatcgattatagacggttataactattttctccatatatacccaccttgtgttctcactttcaagcaattcgaanaatacatttttgaacaagcttttacaactgaagactgtagttttcatttcttgaagctttc

SEQ ID NO: 164194 - DNA, 450 bp, Glycine max
  unsure (1)..(450): unsure at all n locations
gatctctaagtcacctgcggcagcaagctaagttaattagctattcttcttttgttgagggttacacttaggctccaccatagaacacatgaacatgattaattagagaaatatcctcatatgcatcaacttgtttgttagaaagacccaatgcttcttacctattgttgtcaacttttacttacttgcatttactcggtttaccatagaattagtttatttatgtttttaaccatcaattatcaatgtttattccaacaatgccttacttctgaataaaactgtctaataaacaagttccctgagatcgatactccgatcaccacattttaattgtaaatacttaacgacccggngcactttccgatatttattttccttgaatataattggtaaaaatcgagaaacatgaccatatttgaaatgaacaagacctaattcttttgaatt

SEQ ID NO: 164195 - DNA, 415 bp, Glycine max
tcttatccaaggctcatcttaggggtgatgtctcttcttccatggcttattccctagtggatggcgcctcctctcacctcttctcctttgtcttccgctgcatctccatggtggaaaatcaccattaaaggacctcattgaagctcaaagatccagcctccatagaagccccacaagcaagcttccatctccacaaaaggaccaatccactttgacctcaacttaccactcatgagtccgagcctagagttatacaataaaactttctgtccaaccacgaagtccttcttagcaatcaagctgtcatggaacttcttggtcttctccttgtagaatttggaattctcataagcttctaaacggatctcatctagctcacttagttgcaacttcctttcgtctcagcctgatcaat

SEQ ID NO: 164196 - DNA, 439 bp, Glycine max
  unsure (1)..(439): unsure at all n locations
agcnttctccctatnttgtcttaaatatggtgagaagngaagaagaaaagggttcagccttcttggcacttctctctctctcgaaattgctgaggaaaattatttccgtgaagaaaatccaagccgaggcgcttccgtaatgtttccgtgagtaattacgcgaagattctcgaccgttcttcaacattcatcgttcgttcttcgttttcttcagtcttcaacgggtaagtacttcaaaccgagcttttcaattcattctatgtacccgtggtggtccacatnttgtttcatgtatttttaattctcgtttcatttactttttatacccccttttgtcatgcttaagccatttatttaagtcatttctcgcctaatctaaaaataaaataaatttccaccgatcgtttgaattgtatcatccgttaatttcggttaaatg

SEQ ID NO: 164197 - DNA, 449 bp, Glycine max
  unsure (1)..(449): unsure at all n locations
tactcaactttccactcggggatcttgtctgacctcacctctaactcgccatacgaggtcactatgttgaaaggctcatggttgaacctttgtattgtatctccttattgctaagagtttggcagcttcttccttaattctggccatgtcttggacttcatctattgtctcgagttctacccttatgttttcttgattctgttgttgctagaacaatagtctccttatcgatggttccccaacttcaacggagatcatggcgtctatgccatatgtgagtcaataaggagtttccttggttgttgtttggggtgagtagtgataggcccacagtatattgggagctcctctctccatagacccttagacttgttgactctagtacactgngctctaaggatgactctattggttgccttcgcatgtcccgtggtctgaggatgttcaat

SEQ ID NO: 164198 - DNA, 334 bp, Glycine max
  unsure (1)..(334): unsure at all n locations
agctntataagcgcgggttcgggagacaatttgtaagcgttcgcgatatgcgaagatgatattccgagtactttggatttggtacgaccatgccctcctgatttccagctgggaaattggcgagtggaggaacgccccggcatttacgcaacaagcataatgtaaacctttacggttttaaaagctctatagttgggcctaggctttagagtttttccttttgttaaggctttgcgtcttttgtttttgaatttataatacaaggatctttcttcatctgttcctgggctctacccattctcattcatttgcatgtttacttctttttctgaaa

SEQ ID NO: 164199 - DNA, 359 bp, Glycine max
  unsure (1)..(359): unsure at all n locations
gcaccgggctcagctggcntagatgcngcccattttttttttatcagaagcaggcaaaatggtaccattctaaatgttacctcatttaactcttttgtcaataatattctaacaacatatctagcaaccattacctctttaaaataaatacgatttattgttcctaaacttctaaaacatgaatgaccatgaatatcattgaagctaaataaacaacgctattttattaaatatattatacatntcaatcatattaattttagttctcattaaataagttctagaccattacaattatactatgtaagtatttatggtaactattattaatatcatcacgcactctttctctcctatat

SEQ ID NO: 164200 - DNA, 347 bp, Glycine max
  unsure (1)..(347): unsure at all n locations
atggagatgcagcggatgacaaacgacatgacgggataggatgcgccatgcactatggaataagccatggaagaacgagctttaccaccaagatgagccttggataagaagcttggaaggatgcttcaatggaggaaaataaagacggagataaatatagacgggggagcatgaaattgaacgaataaaagatgtatagaagtggaactctgaagtatgtntcacaagactctcatccatccaagttacaacaagtgttacacatgctctctattatagactacgtaacctccctgagaagcttccttgagaccacttcctcgagaagcttctttgagaaaacttct

SEQ ID NO: 164201 - DNA, 411 bp, Glycine max
  unsure (1)..(411): unsure at all n locations
atctcagagtcacctgcggcatgcaagcttcggaagaggatgaagaagttcgagctctgatattcttactangaaaagcgagacttgccaaagaaaaattcaagttggtcgctacagacgtccggaaagagtgtgccgggttactagaagaaaatgcagctaccgcaaaagcccttgaacaagaaaccaagagggctcgcaaggaagagcatggccgtgacaaattccgtggagcactgtggggcagcaacagtgagctcaagcttcgaagggaagagagagaccgatcacgagcacatagcatggttttaaaagaagagttagccgtttgctcaaggtccaaaagaaacttgtctcagcgtttatgcgagacagagaccaacatgttagccatcatcaccaagtaccaag

SEQ ID NO: 164202 - DNA, 476 bp, Glycine max
  unsure (1)..(476): unsure at all n locations
agcttagccctagaggggatggaccttntcaggtcttggagaggatcaatatctttgcctataggttggacctcccacaagagtatgaagttagtaccacttctaacatttctgatttaattccttttgcaagtggagttgatattgatgaggaggaactaacagatttgaggtcaaatcctcttcaaaggggaggggatgatgcaatcctccctacgaagggaccagtcactatagccatgagcaatacgctctaagaagattgggctagaggtgctgaagaagaccctatggttctcatgaacctcacggtagatttctgagcccatgggccaaggttgggtccaattatctttctacatattatattaagatgtcattatatttgatccttgtatttacggctccataatgtaggtanggtaccctacaaatatancgattttatcccttgtattttanggcacctacactaa

SEQ ID NO: 164203 - DNA, 347 bp, Glycine max
  unsure (1)..(347): unsure at all n locations
agctngtacgcacatcgntcgcgnngangatatccagttcacattgttngaagtagaggagagcttcaaccctataaagcaacgtggcggacaaaagtggacagtaaacttgaatggtcgtcattgtcaatgcggaaggtattctgcgcttcactatccatgtttacacattattgcagcttgtggttacgtgagcatgaactactaccaatatatagatgttgtttatacaaacgagcacatcttataagcttactccgcacaatggtggcctcttgggaatgaagcagctattcctccttctgatgacgcatggacacttatccctgacccaactacaattcgtg

SEQ ID NO: 164204 - DNA, 443 bp, Glycine max
  unsure (1)..(443): unsure at all n locations
tcctggcanacaagatgctactctctattgctgatggtattgctttaaccgctaaatcgacaagtggatccattttcaaacagtcagaaatggcatgatcaatggttgtgggattccataaagcacacacatcatctagtatgccacaaatggcctctataaagaagtgagttgaacttgaggtagtggacttgatccgaagagatttgcctaaagacgagtcattagcatgacaatctagtgctttggtcgatttcggatgtatgggcacaaacattggaaaatgcataataattcaaagttgcaaaaaccatangggactatangcactgcatatgttcggcttaactttcattctttctaaaagtggaaagataaatctataaaaggatagaacttgtttgacaccaagacgtaatgggaagacgataactatcatgatg

SEQ ID NO: 164205 - DNA, 368 bp, Glycine max
tgactggcatttttatatgttagtccgaatgtgaggagtaatccactcgccagtcatggaggcttgacgatcaaagcagatgcgggacattcaacctctagaaggttaattttggaagcatcaagcgaagttggtatgatttgccttgatggtgacaaaggacatttcaatttaatgcatctaggggcatcgctcgatgtggagacgtgcccaatggcggaagagttgctacagggagtgatgaataggggccatattgaagtctacagtgcgaagagaggggagagggatgtatgcatgcagtcatatgataaaaacccgagtaagcctaaacctttggtgatccacttcaccagggacgtcaccac

SEQ ID NO: 164206 - DNA, 464 bp, Glycine max
tgtatgagtactgagaaagattcaagaaattgtgtgcaatctgccctcatcaccatatttctgagcaactgcttcttcaatatttctatgagggacttatctacatcgagaggagtatgattgatgctgccaatggtggagctcttggtgatatgacccctactgaatctaggaatttgattgagaagatggcttccaactcccaacaattcagtgcaagaaatgatgttattgttctgagatgagtccatgacgtggccacgaattcatcttcatctactaaaaataaaaagcttgaaggaaaacttgatgccttggtcaacctattaacccaccttgccatgaatcacatatctacacctgttgcaagagtctgtggtctatgctgctctgatgaccaccacacatacctttgaccttttgtgctacaatctgaagcaattgaacaaccagaagcttatgct

SEQ ID NO: 164207 - DNA, 320 bp, Glycine max
  unsure (1)..(320): unsure at all n locations
agctntgcggatntggtcttcgccagngaattgttgtattttgtccgaaaagaggcaaatttgatcatcctactaggacgactgagaaaactggggcaaatgaagagggtgagaaagagggagaaacccatgctgtgactgccattcctatacggccaagtttcccaccaaacccaacaatgtcattactcagtcaataacaaacctcctccttacccaccacccagttatacacaaaggccatccctaaatcaaccacaaagcctgtctaccgcacttccaatggcgaagaccacctttagcacaaaccaaataaacac

SEQ ID NO: 164208 - DNA, 420 bp, Glycine max
  unsure (1)..(420): unsure at all n locations
agcttgactcgtttataccctattttatatgatacatattngnttnaagggagagaatgccaataataaaaaaagagttggaaattttgaccggttattggactaacatttacttaaatgataagtatactacaaagatatgagatgatgttggtggttataacattccttatatattaagttaatattattttattgttatgtgttgcctataaaaggcagcatgatgtaccatactccaagatcaattcgaattaaaaaaaactttagtgatatatcttgagtctttttcttctctttnttgctgtgagaaaaatattaagagatcatattaacccatatcatgtattgataattctctntaagagaacttcatgtaagtatttaaaaattcaaatggaaatgaatataaaagaatac

SEQ ID NO: 164209 - DNA, 458 bp, Glycine max
  unsure (1)..(458): unsure at all n locations
tactcaacttgtgcaccacgtcaccgcgccttgcctcttgagagcatttacaacttncattgcggtaatagtcttcctcctcttgtgctcgaggtacacgactgcgccgatgaaaaagtcccttatgacgccatggaggaacttgtccttttgtgtacaacaaagctgctgtaagtaccccagctgtgcctcaagctgtacccaacccaccaaacactctccttgataccaagtggttgattgttaagcgctctggtgatgctcaaacctaaaaaaagatgaaaatggttccattcaacattgttaagcctctaaatggcgatgtgtgggtggaagctaatgggcaacagtatttccctaccacattagtgcctttattctcaccaagatgaacgaaattgcagaagcatatctatggaagactgatgaaccatgtgagcttatctgaaacaacactg

SEQ ID NO: 164210 - DNA, 390 bp, Glycine max
  unsure (1)..(390): unsure at all n locations
agctntcattatttatcctttgctaagcatttgttcacaacctacccttcggcgggagggcgacgcatgactcgcgggtgtgtgttccaagaaaggaatacgcgcggagtcgccaccaacgtttatttgagaaaaacgtcagaaaaaccggaaaagacgtggtctacaaactttaagtgaaaggttcaggagttgtatttatgcacggngaaggtaacaccccacacgttcgtcacaagggacgacagcctttaatcaaattgtgcaaacatgacttcaattnttatattccctttctacatctttatttctttttgcgctttntatanttttggctttttgcgttcgaggagggtgtttcccttgcctctacgtattccttaattatga

SEQ ID NO: 164211 - DNA, 433 bp, Glycine max
tttgctactccatccatatctggccgtcacattaacctgttttaacaccaccgacaacagcgttaaggaattcttgcaccccagatacaaaggcttctttgaatcagtttgcaatgtatcatacataggggcatgtgcttgatgaaaagactcttatccaaggtcacaaatcatatcattcaagtgatctcccatttctacatcaaacggttcagattgggacccactctgcatgtctgtcaatttaccatgtcatatccacgttatataattcttcttaatcccatcatacaacagatgctcctgtatgtcgtcaagttttttccatctcccgttcaaacaatttatgcacggacaaaaaaatttcccgttttcaaccggtcaacttcttttcaaagcaaattgcaagaactgttccacgccttcctcatac

SEQ ID NO: 164212 - DNA, 388 bp, Glycine max
  unsure (1)..(388): unsure at all n locations
agcttgngaggattgatggngtttctgtgtttatagaaacgaggatatgggctacgtgggagtacgtgagctcagttggaggtgggcaacaggggatggtgggtttatgcgcgcattgtggatgtggaaaacttgttgtgcaccatcgcccgaccgccacctagtaccacatgtgatgggtaccccataatcctacaagcttgagatgaggaagtgttgaagggtgaaacttcctgcttttattgttgaccacagagtggtacctggagatatgtcacgggggtcaggagaccttggggacgtcaggtggggtgctattgcccaaaaccaagcttgaccaatcccgacccaacccgggcatagtcggtcagtgagaacctgtgatgta

SEQ ID NO: 164213 - DNA, 391 bp, Glycine max
cgaaatcatctattcagatgttcgtggccctatacaagtatagtcccttggaggaaataggtactttataacctttatagatgatttcactagaaagacctggatttatataatcaaaagaaagagtgatgtgtttaatatctttaagaaatacaaagcttatattgaaaatcaaagttctaggaagattaaagtgttgagaactgatggaggtggtgaatacacctcaaaaaaattcctagaattttgtgatgaagcaggaattgtacatgagttcacaccaccctacactccacaacacaatggggcagcagaaaggaagaatagaacaattatgaacatggtcaggagcatgctcaaatgcaaggatcaaccacaaaactcatggagt

SEQ ID NO: 164214 - DNA, 422 bp, Glycine max
  unsure (1)..(422): unsure at all n locations
agcttgaacaaaagtaaaggcgttatcaattatgtcttaagattaaattatactctntttaaatatttattattctagaataataaaaaaaaagaaaaaaagttatacacatgtgtaccgtgtaaaactttttacagcatccacacatgacattcaactcataaaaataattcaaatcgatgataaaaatattttttagtcttaattctttggttaaagaattttttttttaattaatgtaaagttcattaaaaaataaataaagtattatcaatacgaaaaattgaattcaggtaatatttaaattgattcaaccttaatgctaatatattaatcacgtggtttatcacttacttggaaataaaaacatttaaaaattcattttatttttgactggcttagaataattattacacttcaaa

SEQ ID NO: 164215 - DNA, 392 bp, Glycine max
tattctatgtgatttactaagcacacaatgatcacaaaattcaagtttatctagtttatcaccacctaacagattgtgtttctcaagttcatgtaatcctctttcactaacatgacctaatctcaaatgccaaagttttgttttatcaatcaatgtattactagctaccgatgcatgcccaataatcgtggaaccttcaagaataaacaagccattacttttattcttgttacccttagctatgattaaagatccatttgaaatcttaagaacaccatttaaaattctagttgagtatcctagatcatcaaacatgtttatggaaataagatttcttttgagttttggaatgtaccttacatttttcagtagatactctctgttatcaaaca

SEQ ID NO: 164216 - DNA, 303 bp, Glycine max
  unsure (1)..(303): unsure at all n locations
tgaggcatcaagcttgaagtgtgaaccactattttttttttttaatactcggaacgggnctactatcattgtcatcatttatttcgtcattgaggtgccacttgagctgccaagactctccacctttaggcgtattctttgaaagatctgtgcccctttntgcgcatgttctgtagttgcatcctatccggaaccatatcaaaattgtactgatactgtctaacaaaggcaaccattatgtccttccaagaatggactcaggaaggctccaagttagcataccaggtaacagctaccccagta

SEQ ID NO: 164217 - DNA, 423 bp, Glycine max
  unsure (1)..(423): unsure at all n locations
cgcattaggaattgcgaaagccncactccatcattatgtttagtacctgacatctcaaacaaacaaatcaaacgtaacacgacaattatagttgctgtttgaatacctcacccactcaagtgtatcacacaattatggcttttctctaatgaaacactcttgccttttaccactctaattccccttgagttcttaggtaattcaagagattatggccacaacaaagaacaattcaccaatatgtgttaggtaaggctagagagacaaggaaaaggttaaccaagaaaaaggctaacaatgtttttaggcacaaatgaaggaaataaaattcagaatttaggaatgtaagtaacaatccttcatgcaaccaatatattaccttatagagatgttgtttttaatagttcttcaagcatgaaccat

SEQ ID NO: 164218 - DNA, 377 bp, Glycine max
agcttgaatgagaagtttgattttgttatcttctgctcttattgttgaccacagagtggtacctggagatatgtcacggcggtcaggagaccttggggacgtcaggtggggtgctattgcccaaaaccaagcttgaccaatcccgacccaacccgggcatagtcggtcagtgagaacctgtgatgtacctaagcaagcgagctcctgtcagtccacagataaaaggaacaaagaccacaaagcaaggaggcttatggtggctggccagctgtgaaacttgattgatatgtgagatatggtctctggtaatcgattaccaagggtgggtaatcgattacaaggcttataaatgaagacaggaggctaagatggtctct

SEQ ID NO: 164219 - DNA, 461 bp, Glycine max
  unsure (1)..(461): unsure at all n locations
agcttaagccaacaacgttgaatgtatgttctattgtttgtattnngaaatttttgttgtattaattcaaatttaaatattttacttcaattgaatttgtttttatatttttaatcttcttttgattgtttgctacatgcttcttttctttttattatcatttatatttttttcacttatttttaataagttaaatgtttttatcaaactaaaattttaaaatcaaataaaattaattttatcattaacttcattattttttctaattttaaaagtgacttttaaatttttattcaatgttacactcttcttagtaattcaaaacattttatatgtataaatatcataagtgatatcatttcatagaanaaatatttgatgaacattcacaatgttattatcaaatatctagggagaaagaaaanaataattataaaaatataactttgatatgatttatg

SEQ ID NO: 164220 - DNA, 445 bp, Glycine max
  unsure (1)..(445): unsure at all n locations
tcagctataggtcttacagtgtgtcgtacatgggcatttattgatggtggcaatcaatctctacaaatatcgcctggtctctacaatgaggctatgtttcangtttagtccatgcccgcatgcatttatctacatcaataattgttttatccctaataatcgaatataggatttacaccaacccaataaactagactctctggttatctacatcaatgattatttttttctattccattaaatttgtagtacaattaatatgacataacacaatttatttggtttaggttagaattaatacaagtgatacatcatcatacatgttagttgcgacatatatatatatatatatatatatatatatatatagataataagttgttttggcggcatatatgtcagtaattgcatggtaatctatgtgattttataaagtgttacatgt

SEQ ID NO: 164221 - DNA, 416 bp, Glycine max
  unsure (1)..(416): unsure at all n locations
tatatctattagaggctnntttctttgtctagcctaaccttnttaaaagtctaggatgacctattagcttatttaaaagctcattttatattctttccaaaagaaaactcacaccacatattagtttttcaggcaaataagaaactaacaatcaacaacatatttgcatatttgatccattgatcacgtctttcaattggataaaattatctatgcatacatgctatgttcctttttagtattttgattcttcatctattaattaagtttatgtcaagatcaaaaagaagaaaaataaaacaacatttatcccanaaacttaacctgcaataataaaattaacatgagacattataatcctcacattacatacttatgaatcatgaacttgaaattatgaattacgttggtaaaat

SEQ ID NO: 164222 - DNA, 417 bp, Glycine max
  unsure (1)..(417): unsure at all n locations
cagcatatttaaaaccaaagcttaatccgcaaatccctcatttatgactaagtttcaattctgcttcattcaagttctaaggcaacaatacatttcccaatgctaaagtcacctaaccaagcacacaaatggttgattagaccaagagcatacaaaatttaagcactgaaagaagcattgatcacaagaaacacaatcaattagatattaaagtaattacatcagttgttctttagaaatccccaacaaggatgtttagccagccattacagaaaaacccctaacaataatgagattacaaaacctatgtatctctgcaaaagttactcctcttgctgcctacagaactcttttctcgaaatagacattgtggtgtgccctggaatttnggcaaatcatctcgttgtgggtgtaaaa

SEQ ID NO: 164223 - DNA, 469 bp, Glycine max
  unsure (1)..(469): unsure at all n locations
gcttgttgatctcttaggatgagaactttatttgtatttgctgcttcaattntgggctgcagatttcataagcaatgcatttagtatgtttacttggtaggtttaaattttcaataaaagtaattaatttttttagaatttaattttttatgcaaggtcaatgtgagttcttgttacacaaatgtaattcattttattaccatattacccaattcattaatatgatgcagtgaatttgtattaaaaaaatatacttttaattatatataatatagaagttttagcatttagcaactcactctttaacacatttttatataagaaattttattatacgttcaaatgtattaaaaaatataaaagaaaaaagactcacaacaaatatgaaattttaattaatttaaccaatcttacctaatgcattcaanagaatgttttagaaaggatctttgttaatatttctcataat

SEQ ID NO: 164224 - DNA, 413 bp, Glycine max
  unsure (1)..(413): unsure at all n locations
tctgatatatattcacttcctttaatatatgaaatgatgccaggagtcttctgacatanaaaaccagcaaactgttaaccgactctaacagttagtccctgtactgagtaaagttgcaaattcacaaaaactagtggaatgaagtcatacttgaaacagtgaaagcaaatggacatattgtggccaaatttatgctacacctgaacactgaacatacattctgccaccacgggctatggaatgccctgcaatgtggccactacagcctctatggaaacctccacgactaccaaaaggctggtagccgagatttgatgaccctgagtgaagtgattacgcaaaatgtgcatgaggaggattgtaagacgataatacaccggctgataacgaagattctgaatgaaataccaatg

SEQ ID NO: 164225 - DNA, 371 bp, Glycine max
  unsure (1)..(371): unsure at all n locations
agcttgataagccggcctatatatananatatatatatatacttatatnannncnnggagataattaatgttatttttgaaactagctgactttgattacacattagtgctccataatttatattcctataattaagtaagactttaattacaattaagatgcgagtcatgtgcctctttatatttctcattacttttattttttagttttcttattcctgttaatattttcttttcctttaactttcttattttctactacgttcctcctattcgaaagtattaaagatttaatgggaagaaaacttttaaaaagactatcaggtaagtgcaaaccagactcttaaacgaccagatcgagttaaaataaa

SEQ ID NO: 164226 - DNA, 400 bp, Glycine max
  unsure (1)..(400): unsure at all n locations
gatgtgagttattatgaatctctgtaggataaaaaaattccttaagaaattgaatttactcaatggtgcatatgttgccattttggttcttgcatgaaatctgtctctatgttttacgactgcagcctgtaaagcaactacgtcctccaatgtccgaagttgtggagtctcttgaagctttataccaaaagttcaacattgaaaagagcgatgtagcagatggcactgaagtggatccatttgagaggtctttccattcgaccaacatatgctttatgggttctccaccggcagtgagccatgcatcagcctgatgatgcacaagcacagcatcagtgtgagtgtgacagagaanaactatacatactttcaattccaatagggtgacattaacgtgcta

SEQ ID NO: 164227 - DNA, 363 bp, Glycine max
gacttacttgaaatcaagaaacgcatacaagctctatcttttgatcgatcactcacataattctccccctttggttttgagtttaagcttcacttgaaattaagttatttaattatatgagttcttgatttaatcccaactttctctccccttttggcatcaacaaaaagccaaagtgcatatagagacataaaatcatacattcactcataatcatccaaacaaggaatacaataatgcatacataaactaagcaagtatgatattaattcattcataaactataatataaagttagataatttagagagtcatccaagataaccaaattaaaacaactaaattagtaagtaacatactaat

SEQ ID NO: 164228 - DNA, 441 bp, Glycine max
tttaatatataatgggacctttttttcaattattctctcataaataggtgatatagtaattagatatatgttttttagttaagtatcaataactttaatttttgcaagatacttatagcactgttagaaaatacactttcaacatcggttatttagaacattctacatcggttctaaaaccgatgttgaaagtgacgatgttgaatgtatgaatgttaacatcggttttggagaaccgatgttaacatacatataacaacatcggttctctaaatacccgatgttaaacacaatgaacaacagtaaaaaaagtgtacgcatgatgaacgttgacatcggttttccagtaaaaccgatgttaatatattagtttaacattggttgtctaaaaaaactgatgttaatatatgcccttaacatcggttgtgctagaaaaccgat

SEQ ID NO: 164229 - DNA, 314 bp, Glycine max
acacctctatgttggctatttccctgagaagacctcaccttatgacttgaagtggtacaacaaaccaccgagaaggtcaagttgatccaagaaaggatgaggactgctcaaagtaggtagaaaagttatcaggataagaggaggaaagacttggaattcgaggttggtgatcatgtattcttgagagtcactctgtggactggggttggtcgagcattgaaattccaaaaactaacacctcgcctcatcggtcctttccaaattcttaaaagagtccgtcctgtggcatacccaattgcattacccccatcaca

SEQ ID NO: 164230 - DNA, 438 bp, Glycine max
taaaaaataatacattctaagacggtcatggagacaaccatcttagaatgttcgcacattctataagatggtcgttaaaaattatcgtcgtagatgcgttttttataaattaagaaaaataagtatttcaagaaaataatatttattagggaataattatattaaaatatttttattctttttttaattataataaatctattattaagtttttaaatacaacaatttttattagaccgtaaaaatggaataaatatttgaatatctaattgaaaaatcagaacatcaatcaatttgaatttttttcaaagactaaagctgtaatctttttgcaacagaagagtatatttttggactcattcaaactaaatttaactatggtgacccgattaatgatgtcatttccaaaaatatgctctcattatctatgaatatagt

SEQ ID NO: 164231 - DNA, 332 bp, Glycine max
agctgaatgattttgtcaataattgaaccctgaacctgaatgattatctctagataccttgtttagattctaggagagaatatggttaaaggcaaaatataccccaaatttgggggagtaaagtcagttagaatgcaaagaaaaaggtaaagcatcagcacacacaacaaataagttgtatgttaaaaaaaagagaaaagaaaaaaaaattgtgctgttacaataaggtcaaaagcaaattaagagaaaaagatagtgagaaagctacttgtatgacacaagatcatttggataagtctaggatttgtgctctcttacaatctaagcctttg

SEQ ID NO: 164232 - DNA, 424 bp, Glycine max
  unsure (1)..(424): unsure at all n locations
nctcatattcaccaagaacaactcaattgtatttttagtacttcagatacaatgtctagaattaactcatcatgttgatgaaatttcatgtcgagtgtgttgcagtaatgttgttctccatgttatgttcattgtgcagatcttcatgtcaacaacattcttcttgcccttcagttgttgattacttctcatggcttgaaatttttctcttcatccaataaggatgttgacttcttcattgtagtatacaaccaaggacactttgagtgttcttttgagctttcaagcttatcatccttcctgagtactcatgacaaacttgagtttacttcaattgttgttctttacaaaacttgtctttgtttaatatgtttcagcaaaatcatcagtaagcataaacttataaggattatgattcgtgttc

SEQ ID NO: 164233 - DNA, 263 bp, Glycine max
atggccgactccctagtggatggcgcctcttctcacctcttctcctttgtcttccgctgcatctccatggtggaaaatcaccatttaaggacctcattgaagctcaaagatccagcctccatagaagccccacaagccagctttcatcatgagatatgaagtagaaccactccatgtagtccaatacacactgtccaggagcaatacaaatctgacccaccggtgcaaggtatttagaaaactaaatctatctatcatcaata

SEQ ID NO: 164234 - DNA, 448 bp, Glycine max
  unsure (1)..(448): unsure at all n locations
tactagcttccaagacttaaaggataatgcttactagacttccgcttgtcgaanaattctattgattcctttgcaatttgtctttcagagaacaataatgacgagtagaccatatcacttggcagtaatgacacttgctaacattcgacaggacaaggatgaatctctaagggactttatgaaaatattttcatcaatatcttctgaatcaaggacctaaacccccaggtagcactcacatcaatgatcatggcccttaagtctagcctcttcttagacaacctgtgccaaaaaccattggcaaccatggacatgtttagagcaagggctaccaaattcaatcaaatggaggagaaaaccaaattcaaagagcaagtgcgtagagagacatcaaggaaaccaaccgaatgagagcctaagactgagagcagccgcaatagaggaaaac

SEQ ID NO: 164235 - DNA, 268 bp, Glycine max
  unsure (1)..(268): unsure at all n locations
accaacgccgggcaataattgcattaataccatcaaaccaattttccttgttgatttcgctcaataataagtttaccatcgaggtcgcttgtggtatttcgtgggaactcaaccgccgttgtgtttcggtcgacattggcctgctctggtaaaagaggcaaagaanaatatagccgaccttggcagcaaaaaaaaaatcctcgacaacttcgataaaaacaattctagccgacatcgggcaaaaagataccggtncgtgatcccaaaa

SEQ ID NO: 164236 - DNA, 443 bp, Glycine max
tggacttcctgtgttttgggaccctctcctttctcatgtgtacccaaacccaatcacctggttcaagcacgactttctttctgcttttgttggcttgccttgcataactcgcatttttcttttcaatttgaaccttcacttgctcatgcaacttcttcacatactcagctttagcctgtgcatccttatgcttaaacatagcaatgttaggcataggcaacaaatcaagaggagtcaaaggattaaatccatacactatctcaaatggtgaacaattagttgtgctatggacagcccgattataagcaaactcaacatgaggcaaacaggcttcccaagatttaagattgttctttaaaacagtcctaagcagtgtgcctaaagtcctattgactacctcagtttgacccatcagttgtgggtgacaagtagtagaaaacaac

SEQ ID NO: 164237 - DNA, 336 bp, Glycine max
  unsure (1)..(336): unsure at all n locations
agtcacctgaggcatgcagcttataaaaaaaanagcctttatcatttctttatgcatgcgaanacgaagcatcaacaagaatcaagccaaggctattgtgcaagcaatcaatggggcaaaacacaccaaaagattatgatgatggatggctcaaattctcacaaaggtaatcactttcaaattgaggaacaattacccatttcttgaacatatcctataattaaagaaaaatatgcaaagttgtacatgcaaacagaattgacctaaaatattaaactagaaacgcaacataactacacaaatttacaaaactacaaaactagccaaaccaaacca

SEQ ID NO: 164238 - DNA, 438 bp, Glycine max
tcaagaaaaatggcctcagcaaacttcttattttcatatagaaattcaatcaatagacctccaatctttaatggagagggttaccactactggaaaacccgaatgtaaatctttattgaggcaatagacttaaatatttgggaagccatagaaatagggccttatatacccaccacagtagaaagaattacaatcgatggaagcacatcaagtgaaagcataacaatagaaaacctagagatagatggtctgaagaggatagaagacgagtacaatacaatttaaaagccaaaaacataattacatttgccctgcgaatggatgaatatttcacggtttcaaattgtaagagtgctaaggaaatgtgggacactctacaattaacacatgaaggaacaacaaatgttaaaagatctaggataaacacattaactcatg

SEQ ID NO: 164239 - DNA, 398 bp, Glycine max
  unsure (1)..(398): unsure at all n locations
tgcggctgcagctgtccttccgtctctcttgaggtttttttttggattaccattatgattgaggaaacattttgtctgctccagataaacaaaatgtgtttgatatgcacttttaaatctgcaatagtatacgtggtttgagttgccaaaatgcaaatttgttattgttttgtaaaagtgtaaattgtcattgtgatgcttgggtgctttactcctgtcatcatcttttatagattcaaaatcttgacttgaagtaattgattgatattatcggcatgaaatgtttaaatccacccttccctcccttctgattntaaactatatattaataagatgcctgatcacagcaaatcctatatttgtagacattaggagactgcactattgatatacttaat

SEQ ID NO: 164240 - DNA, 448 bp, Glycine max
tactaagctttacgaaatgggtcaacccgttagaaattacttatttttaattgattaagatgtttttccttcaatattacactaaatccgtcttcctgatcatcatgttttaaaccgttttttttttatctaacattaacatggtataatcattatgcattaaatttacaactttatcccatgccaatacaatttagcctcaattttatatattttgaatcgaattaataattcttttttatttttatttttatatcatcgtgaaattacaaacataaatctatattttaacgtttagtttcacatagatgtaactactaaaaatcaggaagtaaaattttggttcttactttcgtttaacaatacttctaggtaccaacattaaattagtgtataatttaatgcactaacttttatatgattaattactctttaatacagtaactac

SEQ ID NO: 164241 - DNA, 462 bp, Glycine max
  unsure (1)..(462): unsure at all n locations
agcttaaggactaattntattatcaaatgttantttggntatgcnaagaanaattagatgaaaagttaacttgaaacttataaaatcaattaaaaattgaaaagttaacggaaagttaatagttaaaaaattaatttattacattataagtattttataaaattaactgttgaaatagttgaaatagtttaaaagtatgaaataaatgaaaaataataaaatcataatttattttaaaagataatcaaaaaatttgttaaatatattaagggtaaaaagagaaaaatattattaaaaaaattataagttaatgctttaaaaaatattatttcaattaaagtttcaaaaaatattaaaaaaatatttaccccaccatcaaatgagttntttnttgtagtaaaaaagctacaagttaattgaaatatttttgtgacataatttttatatataaatatttaataa

SEQ ID NO: 164242 - DNA, 422 bp, Glycine max
  unsure (1)..(422): unsure at all n locations
tataaggtctaaatggctagcatgcttctcttcagcattctgaatgcaagaccaatcttgattgcagtgcttatagtcaacctgtaacgcacaagttaagcattatacacacaaaatgtaacaaatgcgcaccttgtttcatcacacatggttcccttgaaatccttactctgtttatggttaagcaagtgtgcttattggagacttgtctttattggcaagagtggtggttaatagcttaaggcatgcttggataaactctntcatcaacatttttagaagaaaataataaaataagcatcttcctagactaaaattaacacaacttataaaataagcatgtagaanaatgtatatganaaanatcttacagaanaaaattatgtcattgttcttctcttaaaaatacaaatactatgttc

SEQ ID NO: 164243 - DNA, 287 bp, Glycine max
  unsure (1)..(287): unsure at all n locations
agcttataaatatgtntacatatggcaacttatttcatcgaaattcatcattggngaaaaggggaaaatgttacgaacatcataacaaaaaatttgtcacaaaataaaattaaacttatttggaatttttcaactcgttcaaatcaagggaaaattataccatagaaggaatagagagctcactccccttattattattattattattattattttaattaaaacaagccacaccaaatatttaataaccaataatatatatttataaataaattgggatgttacat

SEQ ID NO: 164244 - DNA, 444 bp, Glycine max
tccaaatctctaatgttgtccttctaaaactttcatgacgttgtccattcaacgacaaattttggatttggttctgatgagaaaactatcaagctagtttttgaacaaatgaaggtgatgtataacaaagcttgtatactttattgcttataatttattctatcataacttatctgaacaatattaaagttattttattccatttcatctcagtttcatttcattcttcctatcattaaagatccacacaatgttaggtatcatcatgtcatgtcatgtgtgctcaaaaacaaactttatgccgcaggttcataagtacatataggaaatttcaatccatcacaaattattcttgctagggagaaactataatgtttctatgatacaaaactaggcttgcaatcccttcgagatctttccttcgagaatatttcactaatgttg

SEQ ID NO: 164245 - DNA, 392 bp, Glycine max
  unsure (1)..(392): unsure at all n locations
ccgcgctcatattcgccccataacataacccgagccaccatcaaagcggcaccagataagcgtggctgcatcagaggagattaaacaacacatgcataaagttgggcaacaaggaaaagaaaacacaatccgccaaaggcgagtgaagaaaaaaaagagacaaagatctccagattttacaagaaaggcacaaaagtgcaacgaaagattaatgtataagacaaaaggagtagagcccaacccaagagttgaaaggaacaaaagtactagcaagcctctgaaggttcttactcaatataaccctcaaacactctntgagcctctctaatcctttctttcatagcccttttacccctgaccacattacanacccaataaagcccatgtggatc

SEQ ID NO: 164246 - DNA, 435 bp, Glycine max
  unsure (1)..(435): unsure at all n locations
tacgtgaatattatactaagcttctttggactntgaacaagccatcaacctctctttcataaccatgctatgtgctcgcgactggtccctttcttcccttcgcaacttgagttcattattgctaccccatagagctccgcgaaatttgtccggccgtactcttccttgcgagccctcttggtctcttgttcaagggcttttgcggtaattgcattctcttcccgtaacccggcgcactccttccgaacgtgtgtagcagccaacttgaacttctccttggcgagttttgcctttcctaactcgcttttgaaagcttggacttcttcgtcctcttccggtgcttcaaaattctcttcgctgacgacttttaacttggcgagccaatctaaacctcgtatgcgaaccttcagccattcgtggtacccacaaatgatg

SEQ ID NO: 164247 - DNA, 471 bp, Glycine max
caagctttcaaaatggtaaaaggcttacatttatttttctaacaccataataaaacttgttcaaataattaataaattattttggctcacaacaaggtaatgtcacatcctatcagagcattgtgtcccgacattcttcagcacaaggttccttaaagtaattcacctagtcatctgctcctccgaacacaaagttcaagatcattacaggatccaaacacagacagcagagggagtgacttatcacattcctaactaatagagaaaaataagacaacatataggtataaatattatataacaaatacaatttacttgagcataactcacgttattccaccacacgtctcattcattttcacaacattcgcatactcaatagtcaaaacatcatatcatcaaatcaatcaatatagaacaatacacaagcattatgtagcagatacactaagactcaatcctatatgtaat

SEQ ID NO: 164248 - DNA, 363 bp, Glycine max
  unsure (1)..(363): unsure at all n locations
ttttcttanaatagcttatgaacttagcagctntatcagacacaatagtcttatgcaaaccatgaagcctgacaacttctctaaagtaaagtcttgagatatgactagcatcatctaccttgtggcatggtatgaaatgtgtcatcttgctaaacctatccaccaccacaaagatagagtctacacccatctagatcctaggaagcccaaggacaaagtccatactaatatctacccnaggtgcagatggaatgggtaagggtatgtatagcccataaggcatcnacctagacttggggtgtaaacagctatacacctaatgcaatacaaaggacatttttttcataggggcaaaataatttt

SEQ ID NO: 164249 - DNA, 345 bp, Glycine max
  unsure (1)..(345): unsure at all n locations
acctgaggcatgcaagcttcagcctaatcgctaagcaacagcttatccttggttattctttatctatcgncgccaagctaaattccttacggccataattgaggtccatgaagctaagcgccagtcatggcagctaagcgagattccttgcggcaatgtaagtgctaagcgagtccttatcaactaagcgcatactcctatgtacttaagatgcatcattntagctaagctggccagagtctggcttagcgagagttgcaacttttcagatctccggaccaaaaaacttgaatttcaaaagtttggctaagcgcacggtaccgctaagcgagcatcttcgaaaaa

SEQ ID NO: 164250 - DNA, 405 bp, Glycine max
cataacaagtttagcatgctttcgtcttatctcttcacaaataactatcacaaagcattaaccaagcaaaaatgcccatcatatctcccaaagccccatacccacgaaaatcaagtgagaaagaagtctacccaaacctgaaattgtgaggtcccacacgtagagatgcgcttcacgactccgaaaaggccttcctttctcgatttggagcagaaatggctaccaaaggttgaagctttgttggagcttcaatggtggaggaagaagaagcaatggcaacatgagagagagaggaaaaggcttctgaaattttggggctgagtgaggagagagaatacaactttctagtttaaaagaaaggctttgtctctcttcttattatcttaatttaagccatgccacatg

SEQ ID NO: 164251 - DNA, 339 bp, Glycine max
tcaccattcatctctttcctttttaaaaaattaaaatcaaaatattaagagagtgaatgacacctcagtttaagataataaagaaaatttctgaactcagagaaatattttatttatcttaaataacaaattacagtaaagaaaagatcgataaactattaggtagagtttttttttctcttcaagaaagaaaaagtccaacccctttctcaatttataaagaaatattaggtataaaatgtttaagtcggttctggatttagattaatgctgatggccttatctcttattactttctattcatatgaaactttttcattatattatagactattatac

SEQ ID NO: 164252 - DNA, 445 bp, Glycine max
  unsure (1)..(445): unsure at all n locations
tcgcaacacatntccgatatctttcaggattagaataatgctccatctgattgggtagcaatttttgatttggatccatgggatcatcaattggtctacaatctaacatactggtttctttaagtatgtctaacgcatacttcctttgtgagatgataatcccatcttttgactgagcaacttcaattccaagaaaatatttaagttttcccaaatccttagtttgaaaatgactaaataaatgttccttcagttgaacaattttttcttggtcatttcctataatgactatatcatctgcatagaccaccaagtaaacacatctactcgatgagttatgacaataaaaaattgaatggtctgcttcacttcgtttcatcccaaaagcctgaacaactgagctgaattttcaaaccaagctcgtggggattgtttgagtccataa

SEQ ID NO: 164253 - DNA, 394 bp, Glycine max
  unsure (1)..(394): unsure at all n locations
gcttgagatgaagaagtgttgaagggtgaaacttcccgcttttattgctgtcttcttatcggtacctggagatatgtcgcgggggtcaggagaccttggggacgtcacgtggggtgctattgcccaaaaccaagcttgaccaatcccgacccaacccgggcatagtcggtcagtgagaacctgtgatgtacctaagcaggcgagctcctggcagtcaacagataaaaggaaaacaataccactaancaaggaggcttgtggtggctggccaactgcgaatattgtgtaatatgtggattgtggcctctggtaatcgattaccaagggtgggtaatcgattacaacgctcaaaattgaggacaggaggctcagatggtctctggtaatcgattac

SEQ ID NO: 164254 - DNA, 459 bp, Glycine max
  unsure (1)..(459): unsure at all n locations
tatcttactctatttaataatctcttaatgttaaaataacttatatttgatacatattaaggaatgatttaatatattatttgaaataataaatctaaaaaagaatttaagtttcatacataaaataaaaattattatattactaattaattataaataattgtaagaatgacttataaaataattcttatagaagttaatactgttatcttaaaggactgtttttatgattcaatgatagcataaaatgaactttagattgtatatttaagttaaattatttaaaatattaattctttaaagtaatttataccttgttttgttaaaggttactttaaataaaaaaacttcaaaaattaaaataaaaatagtttgataattctaagagaatgtaattataaaatattcaatcacactctgacttaagataatgattgtaaaaataatanatttatcata

SEQ ID NO: 164255 - DNA, 385 bp, Glycine max
  unsure (1)..(385): unsure at all n locations
ttttgctctgttccatttctaacgaaatatttttgcattgttttaccannaaaaaaggctagttcagatttatgctggttcactcttccctgcatcagtatttcaaactcacgtttgttaacaaattgacatttgggaaaatttcatgggaaccaattctttgctgccttantttggtaataatgttttcctttggtagcatggtgccttcgtgggactgtgtacacatgacttgaatggctgcggtagagaactgcattgtggttttctaaaattgggatgttatttgtgtttatattacaaattattctggcactttataaaagttggatcaaatatggtctatatagaatacacgaattatttcctcaaaaaaaaagaaaaa

SEQ ID NO: 164256 - DNA, 340 bp, Glycine max
  unsure (1)..(340): unsure at all n locations
agcttcttatccaaggctcatcttggtggttattctccttcttccatggcttattccctagtggatggcgcctcctctcacttcttctcctttgtcttccgctgcatctccatggtggaaaatcaccattaaaggacctcattgaagctcaaagatccagcctccatagaagctcaacaagcaagcttccatcaagtggtatcagagcacaagagcttcaagtaggtgctcctaaacctccattaatttttttgctttaccttctcttccattggtggttcttcatttttctccatgtatctnctcacatgtcttgtgataaatggtgctaacatgattc

SEQ ID NO: 164257 - DNA, 455 bp, Glycine max
  unsure (1)..(455): unsure at all n locations
tcttgcggaagacaatgganatcttccggaagaagcttcttccgggaacattccggatgacgttcttccggaagttgtctgtgagtacttccggaagacacaaattcttcttccggaaataatttttccggaaagtttccggaagaatcttctttcggaagaataattgctaaagggcagtttcgccacttcactgtttgctgggtgccccagcaataatgctgggtgcacgtagcaactcccctattaattgttgctgaaggcccaaactaatttgaaggcccaagttaaataagtttttagttataatttatttttattgtaattgtggcccaaactgtttaaaaggcccatgtctattcttatcttgttgttcagctacactataagtatgggttgttgttgtgaataaaaaaaacttctgggcattntgataaaattgggtgagagtttct

SEQ ID NO: 164258 - DNA, 386 bp, Glycine max
gctgaaccaacaaccgggagagcggtgttgtgtattttttctcctatacctaacacttttgtcaccatcttactcactgattagccttaattgttaaattacttatgcacgtttatctcttacggcctactcgactaactctgcgcttctaacttaactcaacgagaattatcaccaattgggctttgatctagaattggccttggacttgaacataacagacaattctattctatcaaatcttatcttatccagatcttatttcatctagactttatttcatccaaatcttattctatgcaatcttatcttatcttgtccacatctcattgtatttcgactatgggcttggattacaatacattgtactcttggggtgagaccta

SEQ ID NO: 164259 - DNA, 369 bp, Glycine max
agcttggagaggatgcttcaatggaggaattgatatagggagagaaagagagtggggggagcacgaaattgaaggaagaaaaagggagagaagttgaactttgagttgtgtctcacaagactctcattcatcaaagttacaacaagtgttacacatgcttctatttatagactaggtagcttccttgagaagctttcttaagaaaacttccttgagaagcttctttgagaaaacttccttgagaagctagagcatagctacacacacccatctaaaaaactaagctcacctccttgagaagctttcttgagaagctagagcttagctacagacacccatctaaaaactaagctcaccttcttgaaaaaa

SEQ ID NO: 164260 - DNA, 419 bp, Glycine max
ctatgatactaagcttatatacagtcggggtgtatatctattacctcgatttatttaatgataggaatgatatgtacgttcgtgtttatgggcatttgaaaagctttcaaggagtgaaacaacttgatgccttctctgtcaagcatgtgcactaaacccattcccattttgtgttatatcatatcaactgtgctgtggctattcatttactaattctagtctattagtttgtcgctagagaaacgtgattttcttgaatcttcaacgagatacattaataaataagcacatgttcaattcagttatgaaggagtgataatcactgtttatttcattagtcattaccctagttatctaatgttaacttgaaatgaagttctagaatgtgtctggagattttggagaagtcatgtgtgttc

SEQ ID NO: 164261 - DNA, 415 bp, Glycine max
  unsure (1)..(415): unsure at all n locations
agcttatgtntgtgattaatccgagactttgtttcctcaaattagatgagagcaacactaaagggtatatcaagacattttcccatagcaatcgtgaccagaaggtgcagagacaaggtacattttcttcaaagaaaaataagtacaaaaagtgacatggaagtgattaaatgattctttatttttcttctcttgagagatttaattggagttctttctgatttatttttttcaggtatataactttgtaaaattggcagaacttggcatggacatcactggtccaacaaaaagtccaaaagcaagtgagagagagtttctgaaactaatcagtgtgttgaagattctatctttntgtttctttctggttttgccatttgttgctttctttcanggtaataataataataaagca

SEQ ID NO: 164262 - DNA, 455 bp, Glycine max
tcgacctgagtcatcaagagattataaatatgtgaccatggcatgagtcttaaaaataattatcattatctctctcaatcaatctttcaatatccttcatctctttcaacagaactttctggtttcatttctcttcatctttctaaaagttttttatcaacactttctcttccaagaaaagttctttattcaaaaacttgtgctattcatctttttcattctcttctctcttttccaaaaagaattcaagaaggactaatcgcctaaattctttgtgtgtctctcttctcccttttccaaaagaacaaaggactaaccgccagaattcttttgtgtctcccttttccctttccaagagaattcaaaaggacatagtttgaaaattcttttgattctctccttctccttaaacaaaagaatttaaaggactaaccgcctgagatatctcttgtttc

SEQ ID NO: 164263 - DNA, 265 bp, Glycine max
gtactcattgatacatattatcctaaaattgagacatagacgcgaacatcagtacctatcagtagtccgtcattgacactcgaagatcacactctcaccggtcgtggtttaagcttttctttcacaatcaatttgttaactgactaacaattctacatgcaagctccacattcttgctattcctttgtctgacatacacactagctcatactcatgagatgacaaacaaactcgctgacaattatgccttcaatctaaaaataaa

SEQ ID NO: 164264 - DNA, 454 bp, Glycine max
  unsure (1)..(454): unsure at all n locations
agcttgagatggtgaccgntcactttgaaatctttgtcggttacttcatttttaatctcaaatacaccatgggggaaaacattagtaataaccaaaggtctatcccatctagatcgaagtttacaggaaataagcttgaggcaagagttaaacgagagcactttttggccgatatggaaatccttcctaaggatcctagagtcatgaaatctcttcattttctcgttgtaaatattagagttctcataggcttctaagcatatctcctcaagttcttgaaattgaagcttcctttccatacccgtttcatcaaatgccatgttaaaacccttcatcacctaataagcacagtgttcaatcttcaccggaaggtggcatgccttaccaaaaaccatcctatanggagacatccccaaaagaattcggtaagcgggtctgatggaatcctacccct

SEQ ID NO: 164265 - DNA, 465 bp, Glycine max
ctaagcttcccagattcgatcatggaaggacttggcaactgccttcattaggcagtttcattacaatattgatatggctcccgatcggaaccagcttcagagtatgactaagcgagagcatgagtgcattaaggaatatgcccaaagatggagagatctcgtagcccaagtcgtaccgcccatgacggagagagagatgatcacgattatggtagatacgttacccacgttctactatgaaaagctgataggctacatgccagctaactctgcggatctcgtcttcgccggaaaaagaattgaatctggattaacgaaaggcaagttcgaatatgcctccaatgcggcccccaacaacaacagaagagcccctatagtgggcgcgaggaataatgaaggagatgcccacgcggtcaccaccgccccgacatggatgaaagcaccccaaaatatccaaagctcata

SEQ ID NO: 164266 - DNA, 466 bp, Glycine max
  unsure (1)..(466): unsure at all n locations
agcttgtgcctcttcacgtctggagtatgtatgtatcatatagatccaaagacccttaggtgctttgctgatggcttcttcccgttccaagcttcaattggagtctgtcttttatagacttagttggacatctgttgagtatgtaaacagtagtgtagactgcttcagcccagaatgtgttaggtagtcccttttccttgagcatcgatctagccatctctataactgtgggattctttctcttggacactccattttgttgaggagaatatgcgactgtaagttgtcgctcaatgccttcatcctctcaaaatctttcaaactcgcgagaggtgtactctntgccgcaatcacttcttagtacttntatccattttccactttgattttcagcaagggccttgaactttttgaatactccaaagacttatgattnttcttttagaatatatacccatgtcattct

SEQ ID NO: 164267 - DNA, 437 bp, Glycine max
  unsure (1)..(437): unsure at all n locations
atactaagcnttgttatgtgggctggatgtgcganggatgagtcaccatgatacatgatgatnaccctcaagagcaaccaaattgggtgcggccatgtcctccggaatttgaattgtggaactggcgaatcgtcaaacaacccgaaatttccatggcgaacttaatgtaattcgttattcctaaccctattattgggcctacgctttatgttttttctccctgtttgggcatgtatttttgctgtgattaaatgatacaaattcaacaatgagtcctgtgaaggtaatgataccgaggacccagacgttaattttaagcagctggtaaatcaagctgaggaaggggaagatgatgattgggggcttcccccacagctaaaaataatggtcgaacaagaagatagggaagtgaagccacaccaacaagaaacggagat

SEQ ID NO: 164268 - DNA, 98 bp, Glycine max
gaaatatggaactaaccacctcagaactcgtagaaagatatctctaccaatcaaccgtgcaacactatattttaacataaacctatcaatctctacat

SEQ ID NO: 164269 - DNA, 368 bp, Glycine max
tgaatctgatgtgctcaataaagtggtcgacaccccgtgccacatttgggtaccatttgcctactccacactgtagctcaagcactagctctaactgcatttgatcctaataaaacgtaacggtgattcttttgacctcatcaaccaagcacaaaaagccctatcgcaagttaaaccacacaacactatcaaccactttgtagtggtgatatactagatttcacacgcaacctaatgcttcccatctcattatactcaacatacataacacattgactaactaccattagaactctcagaactcactggctttacaacattgtgtagaaacaagctgtatgatgatgaaccaagcatatttgatgatg

SEQ ID NO: 164270 - DNA, 409 bp, Glycine max
aactaaggtagttcctaaacatttattttataggaaacttcgccaagaatccccattgaaaaacctttattcaaacctttcaaagttagtgagaaggctaaaagaaaaattagggaacttagaaaaactaaatccttaattgaaggcgtatgtgacaaccatagtgaattactaaacaagattggtagtttacttaaagtcattccagataccccccaagcctcggaaaatacttccaaaatggtaacaagaagtacctgcaaattaatcaatgttattaatgaagatagtgaccaaaactcacataacacaactgagataggatcagtgtcagaaaagaatataaatccaattaattccaaacactggaaaaaccctgcaaattatattataacgtcaactgccctga

SEQ ID NO: 164271 - DNA, 401 bp, Glycine max
  unsure (1)..(401): unsure at all n locations
ttcttcaacttatgttcaagagctcgctgcctttctactgcggttaaaaaatggagacaatatctcctgggccaccatttcaccattcttaccgatcactggagcctcaaggaattgatgacacaggctgtccagactcagaagcaatgatgtatttggtaagattgatcggctatgactattcaatctagtattgatccgggaaatccaatacagcagcaaatgctttatctcgaattccagaaactcccatcagaaaattacttattctgaccttgctaaacttcacattcttacaagaattgaaacaagaattggctcttcatccggactttgtttcattctaacaagctattgtgagcaatccgctagatcacccagatngtgtcattgtgcaagat

SEQ ID NO: 164272 - DNA, 453 bp, Glycine max
  unsure (1)..(453): unsure at all n locations
tgattcaaatntaattgccacttgtgttgtttgtacgtatcctatgtacatattatgctacttttgtgttaattgtcatttaaattttgttattctattgacatatatgatcagagaagatccatcaataaaagtttctttgattcaagagaggattaacagtgaatttgcctacaaggtgtcatacaaaaaagcttggttggcgaaacaaaaagccattgtaatagaatatggcgattgggaagagtcatatgtgaaactgttgtcgtggctaacacacatgcaaaatcattctcttggatcatattttcaaatactacatgacgatttattgggaatacggttagtcgcgaacaccgtcagtttcatagagtgttttggacttttggtcaatgtaaagaggctttcaagtattgtaagccaatcatacaagttgacggcatacatttgtac

SEQ ID NO: 164273 - DNA, 292 bp, Glycine max
agctttgatctttcaccaccaccgccaccattatcttagatatctatattattagtacttcgactctcaaacttgtatattggctatcttattatggtattcgaacaatttactatttccttatttgcatgcgctgcttgaacaaatattaagtatgtcatttgactatgcggatcttatagctaacccattcatgattattgctctatggttctctgctcattaattggttgatagtttctccatgaatgtcgtatggatgttaatcatatgcgaataccttaaatatgac

SEQ ID NO: 164274 - DNA, 458 bp, Glycine max
tctagagaaagctacatgtagctgcctctgtaaaaacactgcctatttcttctttaaccgttggatcttctcgcaatttggtctgcaacttcacaagacacttttccatgatctgaccgttgggatctctaagaagatgtctggagtatactaaaagcttccattcccgagagcatctcttatttaagcactccagccttatctcttgtgtagcttaagaaaaacgtcatttcttcttctttctttcttccaaagccattcttaaagttccaagcactttctccatcacccacagccaccattagccaccacaaaccatcattgttctccattgaaaacccacaccgagaggaacccttcaaccgatgcggaatcttccaacttgacttgcggttccggtagagaacgataaccctaatctgacctctcgcgtaaccatggttctatgtctgtttctc

SEQ ID NO: 164275 - DNA, 294 bp, Glycine max
  unsure (1)..(294): unsure at all n locations
agctngccacttactagtagaaatggagcattaagtattctgggctctgaagntnttaaattttgatgagactctatcgagggagaaaaggaagctgtaactcttggagctggaagagataagattgaatgcatacgagccttccagactgtacaaagaaaaggtgaaggcttatcatgacaagaagttgctaaagaaagacttccgaccaggccaacaagttctattattcaactcaagattaaagttgtttctagacaagttaaaattcaaacggtctggaccattcaccat

SEQ ID NO: 164276 - DNA, 381 bp, Glycine max
  unsure (1)..(381): unsure at all n locations
gccgngctaacaaagaaattatcatttttcttggattcaaagcttaggttctacgagagcattcattccccattttcttgacgaaccataactcattttttcacagccccaaccttattgttttgctacacttaataacacacatacttttctttgcacatggatgcttctagctctcattccacaaaataaacaaacacttttttttacaagaatgaacaatcaacaataatactggactggagcaatttactgtatactacaactcacattancttgtgttgttattaatgtttcagcaacaaaagtttatcgaaaacactcccccanatctgggacaaatgtgtcttgatccatgagtgctctcctacaacctaagat

SEQ ID NO: 164277 - DNA, 297 bp, Glycine max
  unsure (1)..(297): unsure at all n locations
tttgtctttcgatgcatctgcatggtggaaaatcaccatttaaggacctcgtcgtaactcatagatccagcctacataaaaaccccacgagcgagcttccatcatacgggatggtcgtacgcctattgtgaattctgagatgaatgagcatgtcacattgccactatggctttatgttcatgtctaaacatgtgccgcaccagtgttcggtcaaatgccgtanaggcattgtcgagtgattgtgtgaaattgtactagcggaacagatcgaagcatgtatggatgccattgtgagtt

SEQ ID NO: 164278 - DNA, 434 bp, Glycine max
  unsure (1)..(434): unsure at all n locations
tgggtagtcctcaccttacaagtcagnttgtgtggtcttattactcctcaagcacaaattttaagatggtatcaaagccttcctaaatccatcgttgggccgnctgcatttgccatgctccangctgatagcactgggcgtgaggggggagcattggaaagccaccgtaattgctcgtattaataacgagtataacctcgaacctttaaagcaagtgctatggagattgcgaatgctagcattagcctagccatccacattgcaagagctctgggtgttctttccattgaagtttcacagaggtggtctactagctgcctaacttctgcagaagaacatgttggttccctacctctaacatggcttaactgcagcatctttggggattgccttaattgcaacctccaaggtggtggttactggttagtcccaca

SEQ ID NO: 164279 - DNA, 458 bp, Glycine max
ggatcttaagcactgagctgcagctgttaaaataagcaaagttgttgtcaaacatacacaatatacttgagcataaggagctatccctggtcaaatcaagaggtgacttttccatataaatcaagaacataagaacttgaaattattcggtcttgaacatcttttgatatgacaaaaggtctggatctggacagtttcatataaatagcaaaaatgcacataacacctcaagtttcaactctgggcaacattgaaacgtctctataactacttgttcatgattatattttgaagaattttgtttcaagaaggaatctcttctcatgcaaatccttaagttggtctgccaaaaatgaacatgtcactatattggtcctttgaaagttgttgtcaccaaattatttacttaaaaatctaacaagtatctacttttatacgaactgttatgtatgtttgaa

SEQ ID NO: 164280 - DNA, 462 bp, Glycine max
  unsure (1)..(462): unsure at all n locations
acactataagctaagacaaatattatgccactactgatctttgcaattaaatgcaaaaaatccagccaggttgaatgggctcactctctcaccatcttctcacagacagtaacatcgcccaagctacccactatcccnctccaaaaaaattaaaaaaagatcaccaatatcatgaaaaaatttacaatcttacatcataacccaactggaagtggatggcagggccaaaaaaatacatcataataggcagtgtgtccaaatttgaagatgttacaattcacaaatagtgcttccgaattaccttggccatattcaagagggcacaaaataagaaaatgctgagacaaatgttacctgccatccatcaggattcaggttcaatggagaagatgatattcctgtctgcaagtcagtacaactaatggttccatctgaggatgcagaatagaccatacaatcatt

SEQ ID NO: 164281 - DNA, 452 bp, Glycine max
  unsure (1)..(452): unsure at all n locations
gcaagcttacattactgcaacttcttagctattttgttcttatatcttataagnnnntnngcatcaataagaggtaaaatattagaataagatcatgttcaatttagaataccaaattcagaatttcattcttaaatattgggaaaattattgatttcctagtatctgatattcgctcttgacaatattctttatcttacatccttactataattgacacaatttattcancatgcaaagctcactcactgaagatttcaaaaaaagaaagcaaacagctagttggatcaaattgtattggattgagaattttttttaaactcgtaccaaccctaatngactatagtcagacctttaagtaggacaatcataataactgtcttttaagaatatagtctaatacaacatcattctatatttaaaattgacagaggaaaatggtagttatattt

SEQ ID NO: 164282 - DNA, 481 bp, Glycine max
  unsure (1)..(481): unsure at all n locations
actatacaatactaagcttctgtctactagctctggataatgttcaagcacaagctttatgtctatctttgaaccaaactgcatgattgggacactttaaactctaataccaaaaaaaataacaaatacagttctattttctcacgtagggcacataaaatgtcccaatgtggttctgaataattttcctgaccaacttgtacaaaccttgttagggaattatacgtaaaatgaactgaaggttgatcttcatcaactgtaatccgagctcttttagcacctgatacagctagcatgacttattaaggaaacagagtatattatggattgcatactaacaggatatttcaaaagtattcatcagtgcccatgatataaacatataataactacgaaaaagatagactgcacagaacttatgcaagcaagtaaaaatcgattatgaaccaatangggtatagcagaatctgaaaattaagat

SEQ ID NO: 164283 - DNA, 337 bp, Glycine max
gtataatacatgtgaatgcagcttgacaatcataaaaatcaactgattctggtataaagctttgaaggcagctgttttctccttatgaggttatgtcactactacaaaaagcagttttaacatcggcttattaacatcggttttgtacaaaaccgatgttaagttaaacgcggtggcatatttgtaaataaagtatccttcttaacatcggttttccaaaaaaccgatgttaatgcatacacgttaacatcggtttttcaaacacccatgtttactaatgatacttacacctcgtttttacaaaccgctgtttacacttaatatcgtaacatccggt

SEQ ID NO: 164284 - DNA, 206 bp, Glycine max
ctatgcaaaaaaaccacgggataaactatttttctaacaccacaagagtactttctcttccttttatgcaggtcctatttctgggtggcatgaacaagaacacaaatcacagacactcgcatattttcctctggaataaaatggaacgtgtcatttcatcgcaagcctataacgatgtgaaagccttacgaataccaatattcata

SEQ ID NO: 164285 - DNA, 348 bp, Glycine max
gtgaactagtataaaccatgtgtttctatcgtttctcttaagcgggtttattaaatattctcttagcttactttgcacttcttctcaccaagtgtttatctaaaaaccttttgaaatattggcttacattgattgaacgatcaacctcaatttttcatcaaacttggttttccttatcagtggaagactctagtgcgtatatctttttgaacttgtgatacaattatttacttattaaaaagctcttatctttgattaacacactattcaatctccattctagtgtgatttgtgatatttcaattggcattagagctcgaccttacaagttgagtatttaacaatact

SEQ ID NO: 164286 - DNA, 356 bp, Glycine max
ttcttaactcagagaggacatcaaggtggaatatcacacttgcctacaaatgactgctatgagttatgtaatgcactttaatgtgttgatctatcttttttgatgcagatggagggcttggattgaggacaatcttttaagaaggaggagtgataggactaaccaaggcaggacatgaacacttgaaggccatgacagagtaacttaaacaacccaacacgtattagacaagtggcattgatactgcatgatgagatgaagccagggaaaaataagcctaagcaagcctacaaatctatgtgtgagccaatattgagccagtaaagttagatatatttatgattgcaatgtaaagc

SEQ ID NO: 164287 - DNA, 347 bp, Glycine max
cattagctccataggcctttgcatgcagctgcacattatcttaatcttcgtctgcattatgaacctactttcagagatgatgacccttaagtgaaagaagggttgcacatgtgtatgagaagattggtcaaggatgttgcacaaaggaaaaaaattaatttgccacttgttgagtttcattttgctagagggcttttctctatggaagaggcaaaggacagtagataagccatgcaacctgtagaatggtgggaaatgtttgatgatggaactccaaagttgaggagatctactattcgtgttttgagcttgacttgcagcttctctgggtgtgagcgtattggaac

SEQ ID NO: 164288 - DNA, 341 bp, Glycine max
  unsure (1)..(341): unsure at all n locations
cccccccccaacaaatttattaaaaaataaagccgcggcttaacttgacctccanacgacctcaaaccactgccccaccccaacacatttgttcttaaacacaccccgaggccagggcccgcgcattacaccccctaacaagcaccccccccaattccgaacccctcccccacccacaacctacaactgaacacaccaccccctccacgtacaacccacgacagattacccctcgcttcaaaagacgaaaccacgtgccaaaaacccttcgaccccccacaccattcagatagcaccgcccctcgatccgaaccccggaccacatgcagcacaacaaaccc

SEQ ID NO: 164289 - DNA, 395 bp, Glycine max
  unsure (1)..(395): unsure at all n locations
agcttatgcttagagagagctcttacctcttctttggttnttgactgaaaaccaaattaattcttatcaaggaagatattcctttatggagaatacttctttggcttatcgattctccgcgaatcatggagtcattctattcatcttctccatcttttttgtttttttttttgttcttgtgttcttataagggcattgatggtgatcttgaatttgcatctagaacattccaaaccaagcattcatgtcttgaaatgcatcaaccatcatcattattattggtattatcatcttcctcctcatcctcatgatccatgccatgcatttgaaaaggtaatgatggacgataacaagagctccatgggtgtgggttgtatgcggatggtggagtgttg

SEQ ID NO: 164290 - DNA, 409 bp, Glycine max
  unsure (1)..(409): unsure at all n locations
tgttatattaagcagagtgggggataacatcacgtttcttatccctatannaagtagtgcttttcgtaggggttaatcttgaatactggcatggagtggttgaccccaaaatgggatagcggataatgagatgaccactattcttatatgtgtaaaacacagtcaattaatatagaagtaaaatagtacatgaaagaaagaataaaaagcaacatagacctctttgacatgaatactgaatagaaatacaaaggatgtgaacagagggaggagaccagggaacaatgttttagagttccaatgtgcaagttagctggaaactccaccagagtgatgggttggtcagaaattccgttggccactctaccagaatgcaatgggtttgcctgaaactccattatagtgccat

SEQ ID NO: 164291 - DNA, 300 bp, Glycine max
  unsure (1)..(300): unsure at all n locations
ttatctgcttncttcttcctacattatctgatttgggggtgagttattaacatctaagaagaaaacaaagaaaaaaccgcaaggatttatcttttgattgccccaatttgtctgttgcagttaccaatgactatgattatgtattttctgagaatggtcttgtggctcacaaggaaggaaagctcattggaactcaagtacaacacataaacctcaatccctgaaagaagcaaatttccatgaccagagatgtatcttagtagaattttgctgctccgtttgagttattaaacaaaacac

SEQ ID NO: 164292 - DNA, 401 bp, Glycine max
  unsure (1)..(401): unsure at all n locations
ntaggcccagtccttactgattacacagcacttacgattgtttttatctacaatggccagntgattgagttagtgggagatcgcgacttgtcttttcagatgatatcaccttcccagttacgtaggttggtggacacacgtaacaccagtaccttcttccacattaaaatggaaccttccttggagacgccaatgactataactcacccaataccgacagtccagaaactctgttccaaacacgctttcctcttccaacctctatcaactctacccccatctcgagccacagaccacagcattaccctccttcctaactcagccccagtcaatgtaaaaccttaccgttaccctcacttgcaaaaacaagagatagaaacccaagtcgccgcaatgctccg

SEQ ID NO: 164293 - DNA, 328 bp, Glycine max
agcttcttgaacgatactagtatattatggttttatattgaaggatgaagatgttagacatgacatattttggttttttttatagacagtacctacaaaacaaacaaatgcaggttttcgttacttgatattgttggtgtgacaccaaaaatgatgacattctctgctatttatggctatttggagagagaacgtctaaataatgttgtttgggctctataacggttttgagatcttttcctcacacgtgatgcactccctacaattattgttactgacagagatctatcattgataaatgcagtgaaaactgtattccctgaaacta

SEQ ID NO: 164294 - DNA, 458 bp, Glycine max
  unsure (1)..(458): unsure at all n locations
actaagctgtctaacctttctagaacanaaaattccttaatttggtttttcaagctcttatctctcaacaatctaagctgaaaaatttactccatatgactcccagtacatcttcatacaatgattcaccttgcaactccagtggtgctgctcataagggaaagaaaaacaaaaccagtgaacaagttgtgttgtattctagcaattttgatatttctacagacaatgagaaactcgaaacacatttacaaggaatgcagcggagggtcatggaattagagaaattctgtaggaaaatgcaaatccaaatggcaaagatcacaaaatcaaaagcatcaggccatagttatgcaaaatctttgcccaagctatgctcatgacactttattttgtggattctgtttattttccattcgtaattttcatatatgtacagcacacgaatgagttgtgtgtct

SEQ ID NO: 164295 - DNA, 305 bp, Glycine max
agcttgccacccagctctcccaggtttctttgttgcttcctccagaagcaacagccttctggaggaatcttctggagggcccaagtgggcctggttgctatttgcacccccatttttactaagtactcccccctgccttttttttggtgattcttttttcgtaaagttaccgaaacttacgaatttcgtaacgatacttgttttctttccgtaatgttacggaaccttgaggattacataatcatccccttacgaattgtgacttacggaatgttactgaacctcactaattgtgcaaccatgct

SEQ ID NO: 164296 - DNA, 342 bp, Glycine max
tgacgagagtgacacgccgagtaaagtttcttccgttccggtgatggttttcacaacttgaaggtaaatgtttatttattggtttgggtttgattgggatgattatgcttaattatttggtgttgactttgggaacatttctacgagattaagactgcggaactcatgaatgcaactgggtgggtttatctatccttgtctggagctcattctacgtaagtacagtgtactttctgtatccagtgcttgctggtttaagtttgtatccaatttctcgtgtttggaggcctggattcttgttttcaacgaaattttgtgtgcatgttttggtagatctctacc

SEQ ID NO: 164297 - DNA, 416 bp, Glycine max
  unsure (1)..(416): unsure at all n locations
agcttgccaaaggtcgaaaaggagcttgttctaacaatngagcaagaccaaagaaaacatgtgggccatcatcgaccaatacaaggaaaagttaagcctagcggtaactcacaaacaaaggctagaggacgagtacgtgaaggtataagtcctgcaagtggaaagggaagcaagggaaagggtgatcgattcattacacagagaagcaatgatgtggatggataggttctcctttactgaaattctgatactgcggacagatgtcgtacaggatgtcacgacatcgcgccttagaacatgcagcttgtatatgaccgtatgaacagattaaacaagntaataacacaagagaattgtaacccagttcgtgcaacgcacctacatttggggctccaagccaggagaaatcactaaat

SEQ ID NO: 164298 - DNA, 446 bp, Glycine max
tggcacataatcgccattcctttgtcaaaattccaacctatttctgaattgcttatattcatatctcaaatctgttgtcttattgaacttttctgcaatatttgcccaaccaaacttagtgaagtggttgtgaggtttatttccaacattcacctcttctatgcacactttcaacataatcttagtatgtttatcacaccattctgctttctttcttttcacaggaacttgattgagagacatttcacaagcttaacgaaacaaacaaaagcatacaaaggaagaagaataagtgacgaaggaagaagaaaaaaacctgtgatgctaacaaaggaagaagaataaatgacgaacgatgatcggaagagatgaccaaggatgatcggaagagatgacgaaggagatcggaagcatgggagaaaaatttcgaggaacgcacagcacga

SEQ ID NO: 164299 - DNA, 352 bp, Glycine max
agcttgtgagaggtatatatatattgtggttcctacgatactactaccacagaggaatgtgatagtttattacactgagtccgacaagttcaaggaggaacttgatagaagagactacgacgaggagttgactgattttaatgacagcagcctatacattggcatctgtgaaggaatattacaccaacctctactacctctatgataaattacctaagcatgtgagggtgagatgtcacttattgcaatttgatgagaatactttgaacagcattctgaagacccctataatttttgaagagggggaaaatttgtgtgcttattccacggttgcactccttatggcttattc

SEQ ID NO: 164300 - DNA, 402 bp, Glycine max
  unsure (1)..(402): unsure at all n locations
ntgtggagcaganacatgggaccaactcattttatttcatgaaagaagtcatgtctagtcaatgtcttagagaccatacaagtctactaacgatttctaactatgtgggccattaagtctatcatatgctgacaatagccgagaagcccatgaatctcttgcggggcggagtaagtgtataccatcgccttggccttgtgtaacaatcggggaagttcttgactcccgttaaggtgagagcaaaccgatccatccacatggttgcctattggtgtaaagagtcgatgacccttcctcttacctgtttttgcgcgtatacttgggcatattcgtccgcaatcctatgctcgtggggcgcggctagacctaactcttctggtacttggcgatgataactagcat

SEQ ID NO: 164301 - DNA, 369 bp, Glycine max
  unsure (1)..(369): unsure at all n locations
agcttgctcaagattccttattgaatttgctagttnttttacctacgaatattctgaaagttataagacaattcggttttgagaggataagacaatgttgttcagaaaaactctaaggaatttcgtgtcccaagtcacctatttataggcctttgatggtcattcaaaagctttctgaacagttgtgactctcgggagttatttttgaaaattccttactggtaatcgattacataactgttgtaatcgattacacagttagtttttgaagagttgtgactcttcaaacttgaaatttgaatttttatgtctggtaatcgattacacaaatggtgtaatcgattacaggcctctaaaatttaaaattaa

SEQ ID NO: 164302 - DNA, 465 bp, Glycine max
tcatgaaaaaattattaaaataaaatattcttagcttatttcgataagcttcatttcaagcactaagcttttgaataaattctgatttagccagcttggataaacttttgaataattacttatagtagaagaaaataaaatgaattgaacttcacttctctttgtagttaaaatcaactgaagcacttctacttctatacaagttctctcatctgacttctctaaaaagctgagatatattatgttttctcttacatgctacaagggcttattaagaactttatctaaattgttccatagtatgtaattaagttgtttactcaaacacacctgtagtatcagtatgtcgaatagataataaaattgattgtcctaaatcatgttacaaaagaagaaaactctccacaaatgcatgataatggatgctagtaaaattacaaccaggataatgtagaaatatctaac

SEQ ID NO: 164303 - DNA, 365 bp, Glycine max
  unsure (1)..(365): unsure at all n locations
taagtcctaaaagacattnttatctattattaactcactctaacctccaaataccacagaatccagatttaaccttccaaccctcaaggtctcactctttttccactcacaacaccatactctcaccttctaaccctaggttaactctacccttcatctctaacagttttccataagcaatctcagcacatacacatcacaagcatcatcataaaaaccctaaaacagaatgggtatgtttaactcatccaaacatggcaagttcaacatgctttccacaaatttcttcattaataatcatcataaagcagaaacctagcaagactacccatcatatctcccaaaaccccatacccacgaaaatc

SEQ ID NO: 164304 - DNA, 439 bp, Glycine max
atatgcatgtgaattacttctcatcaacaagaatcaagccaaggctattgtgcaagcaatcaatggggcaaaacacaccaaatgattataatgatggatggctcaaattctcacaaaggtaaaatcatcactttcaaattgagctttcaaaactatcatgacatgtagagaagaatcaaggatttcaagtcacaaaatgtcaagaacttatattttcaaaacaattacccatttcttgaacatatcctataattcaaagaaaaacatgcaaagtcgtacgtgcacacaaaattgacccaaaatattaaactgaaaatccgacgaaactaacaacattaacaaattaacacaactaacaaattaacaaaaccaacaaaactagcaaaaccaaagaacactcccgccccccatacttaaacaacacattgtcctcaatgta

SEQ ID NO: 164305 - DNA, 407 bp, Glycine max
  unsure (1)..(407): unsure at all n locations
cttttatgagtagccaaggcttatttgattnttatagcttcatgcccagcaacaggaaccaaggtttcattgaaatctatacattcttgccagttatagccttgagctactaacctagctgcgtttcttaccaccttaccttgttcatctagtctatttatgaaaacccaccttgtaccaataatgcttcgaaatatgtttcatattgacatgcccaagttttttgtgtgtcaaatccatctctcatcttctctagaaagcacacatgttcaatnttgtttacttagatctattaaatcaatcttatacaaattgttgtgtcgtccaccagtaaagaaggactttccatcttctatcttgactatacattgatctttggcgaaagatacatattacccctatcgcaa

SEQ ID NO: 164306 - DNA, 262 bp, Glycine max
  unsure (1)..(262): unsure at all n locations
ttgggcttggcgaccacgatcaacaaaatactttcggcacctactatatgttgacttgaccaacgctgttattggaatgctgcgacaatctttcaacaccttattcacacattctgataagttggctgtcatgtgaccatatcgtcgtccagatgtatcgcaagccatgccccatttttcctttgaaatgcgagcaatccatcttgctatggctggactcaatngacgaaatttttttcaagtttgatcaaacacatgcttg

SEQ ID NO: 164307 - DNA, 356 bp, Glycine max
tcaacaaagtactttcggcacctactacatgttgacttgaccaatgttgttattggaatgctgcgacaatctttcaacaccttattcacacattctgataagttggttgtcatgtgaccatatcgtcgtccagatgtatcgtaagccatgctccattttttctttgaaatgcgatcaatccatcttgctatggctggactcaattcatatattttttctaagttttgatcaaacacatgcttgcaaggagtatatgctgcatcaaatttgttatcatcaaaagttgtacgtagacatgaaactcaaattaaattaatgtataaaataaaccttacccaatttcttgaacatctctt

SEQ ID NO: 164308 - DNA, 290 bp, Glycine max
  unsure (1)..(290): unsure at all n locations
agcttccattcaatgcattgttagaaaatcttgtttatttgccaactagtggtgtagctgtctaggaacatgtctttgttggaagaattggacatgaagtttgtgttatttttggtgttgttaatcttggagctgcaagagccttccatctcataagctttgggggcaaatgatgatggtctctgctcatangaccctttatcagtagcattgtccctggggctgcaacctccctaccacccaaatcactgaattgatgcccccgacaatgaaacagcagcattgcccct

SEQ ID NO: 164309 - DNA, 398 bp, Glycine max
  unsure (1)..(398): unsure at all n locations
cacgttgactaattcctttatgtgagacaatggttctttcaagataatggcacaaaccccacaacagatacctcactgaagcctataaaaggatgcctcccacaatgaaacaacttgacgaanaatgagaaaaagatagaacaagagcgcacgataaatacttgaagtgaaactctgatataaacactacaagttctacactgttattgttccttgcaaagaaaagtaatttgtatctgtgcttaactgtatatacactctctgagtgttaagaatacttgtattcaatcaaacatttttttatgaaagccaagagtggcttagtgttaaaaaatacttgggttcttagattcatgacgagtctaaaaagatatcacaagtggtgtaagaatacttga

SEQ ID NO: 164310 - DNA, 313 bp, Glycine max
  unsure (1)..(313): unsure at all n locations
aatccatcttgggccttnttcccacaactctcataaatgggagagaaatgtttatctaaagcatacaagtccctaatattatcaaatcctaaaatttgagctcctatggagcaaaacaatgtgtgtctcctatagagggcatcagctaccacatttgcttttccctttctgtatttgataacatatggaaatagctctaggtactctacccattgtgcatgcctcttgcttaacttgctttgccctctaatgtacttaagtgattgatgatcactatgaatgacaaaatcctctgaaacaaggtaatgttccc

SEQ ID NO: 164311 - DNA, 364 bp, Glycine max
  unsure (1)..(364): unsure at all n locations
tgctctaaattacattgatgtgtgatttatgggatgttgttantatgccattttgcgttaagaagtatggcccactaaaactaactttccaaatgtttgccttcgcatgaatggcaccgaagaagcttgcctcaaacatgtccacgaatgacaatgcggccgaaggaactatttccgccccggagtacgacagtcaccgctgtatgagcgttgtacaccagcaacgtttcgaatccatcacaggatggtcgcctctccgggagccacgcgtccatcttaaggacgacgagtatactgatttccacgacgaaatatggcgccggcggtgggcaccactggttactaccatggccaagcttgatcc

SEQ ID NO: 164312 - DNA, 349 bp, Glycine max
agcttctcgtatccgtacttggaatgatcttattaccgccttcctaaggcaggatcagtacaattctgatatggctcctgaccgtactcaactgcagaatatgttcaagaaagagggtgaaacctttaaagaatatgcccaccgatggagggatttggcggcacaagtagctcctaccatggttgagagagagatgatcaccatgatggtagacactctgccagtgttctactatgagaagctagtgggttacatgccatccagctttgcggatctggtgtttgccggggaaagaatcgaggttggattgaagagaggaaagtttgattacctttccttcacaaacgtg

SEQ ID NO: 164313 - DNA, 375 bp, Glycine max
tatacggcctaggatgtgagtttgtgactaaattcaatttagacataaagcctgcacctgccacattggtacaacctcctccatcaatgatcatcatgcaaactttgccattgatcaaacatctagtgtggaaaatgttttctctttgactctcctccatagacttcaattgatggccaagtaaccgcctaatcatcaacaattctccctccgatgttttctacacttactcctcgtcatcctcactctcttctcccttttcaacttaggaatcactaatgcactcttcgtctctaagaatcatggctttcttgttaaggcactcatatgcataatgtcccaagccttggcaccgaatacactctacatcttgac

SEQ ID NO: 164314 - DNA, 344 bp, Glycine max
  unsure (1)..(344): unsure at all n locations
agcttcttcattntccagagatattattaattcttgtcaacaaatataccttaacattcatatgaccagtgaatgattgaattggtgagtctataactcgagaagcacacaaggacaaatcccaaagcttcaaagtgttatctgtggatgcagagactangctcatggtgtctacaaacttgatgtagctcactgtcttatcgtgtccaaccaatgtacaaagaggcactttcaggttgcgaagatcatagtaatatatccgatgatctgccgaaccaaatgcaagggaatgagcaaattcaaggggaaactgaacacaacacacatttgcctttggtttgatg

SEQ ID NO: 164315 - DNA, 402 bp, Glycine max
ctgcaacacgttatcccttagtcgtgtggggatgttaacttgcctcttgggctctgctgattgcaaccacttcctgctatcctcactactgggtgtatcattcccgctgccttcgaagagcaccttgtcctcaaagtgatgaaggctcttaaggtcattccaatcttcccacgaagcttcgtcggtgtgtaagtctttccattgtaccaacaccagctcctttgggcctgcttacgtcagaactgtcttgtggcccaaaatggctagtggaacgaggactggttggttatccacggccgagggtggcaagggtgtagcttgtgttgaagctagaggtcctctgaagggttgtaaaagggaacaatgaaagaatgggtgtatgcgtgaatctctccgtagcgt

SEQ ID NO: 164316 - DNA, 312 bp, Glycine max
ttaagtcacctgagctgcaacttaatgagcacatatttgtcttttttattggagatggcaacgtacatcttcataaaagaccacaatgactcgtcattaccctcgtaaaggttgaccacagtgatggatgtggtatggtaaaggaggctacttgcatattacgctttgaagcattaattgcgataatgcgaagaaagagtcaatggatcatgggggaaggcgtctgtaccacgtcagtgccaaccctgtgagggaggtgggaaagaccttgcacattaccgtgtcatcattaaagtactaattgacttgcat

SEQ ID NO: 164317 - DNA, 454 bp, Glycine max
cgaagcccttactcttagttccggtgtgctacttgatggttttaaactaagcatgttgtgtgatatagatgaattctttctacacgcttaacaaggatcaaatgtgaaacaattagattgatctctaagtcttctaacagcaagcatcatatcttacttctacttgataattggctagcactatcgaattaatctattaattgactatagaagccaaattcacaacaatgaaggcattgtagctgaagataatcgattactccagcagataattaattatcttgcttctggaaacttaaagagctctctgtgggatgaaataatcgattgccccaactagtaattgattattacatatagcacaaaagcatgaatagttctctgtctaagatgacgtaatcgactaccaagtttgtgaaaatgcagaacaaagagaacttctgactattaatcg

SEQ ID NO: 164318 - DNA, 312 bp, Glycine max
  unsure (1)..(312): unsure at all n locations
tcgtacccgcgatcctctgagtcacctgcggcatcgcagcttaagaaagnccttttggttatgtttatacattnttgactctatggcatgagatgaagtgcaacgattggaccttttgctagttgttattaatgaataacttaaacacttgtgcgtgagtgaaacagcggccgtgaaactgaggtttaagctactttccttgatatctgtcttatgcctaacttcatctaattgtttagggtacattttattcttctctttggataactgcatgccttgtgaaagacaagtgatgagggaattttgcttcat

SEQ ID NO: 164319 - DNA, 388 bp, Glycine max
tgtgataatgacactacctgtgagatctacttatattttgctcaagaaacaatcaatcgacaaatgtgagacagaatcccttgatactacgatatatcattgaccatttgaattaaactaacatcacccaatgtcaactacatgttgatgacacagtcactaacactaaacactcaaaggagaagcacttctcttaaaaaattaaagcaaattcttctcaaagaaacatcaacctaaaaaacttcagtcgattaattatcaatgatcgaaaacttgtcaatcttaacacaaatctcaaatcaaccacaacattgtcaaagacctgttgactgagtttggatgtgcctcatatatccacattttcaaatgaaattgcatcaaactgtga

SEQ ID NO: 164320 - DNA, 359 bp, Glycine max
gcttcaactgtaatttccaagctgctcatgacagctggactactaacttccgcactctaactcacataactgagtacaatactcacatacccccccggctccaaacttaaggtgggtgagcttgagagagctccaacaccttcagtttgtccctaataaactgaaaactactacgagagagaggtttagtgaggaggtccgcccactggtcctgagctggtatatgaaccacatagagtttgttgctgagaactttctcccttacaaagaaaagatcaatctccatatgttttgttcttgaatgaagaattgggttgtgtgcctgggccaccactgcactttgattatcacagaaaatg

SEQ ID NO: 164321 - DNA, 428 bp, Glycine max
  unsure (1)..(428): unsure at all n locations
ctcatggagttttttatatnaanatcgcagctttaatgtgtctttccaccttctctgcatacaaaatgccaaaaaatatattgaaccattacacaaccaaaaaaggacgaatacacaaaaagcatggcatangaagcaatgagcacattggagaaggctcatgaacacacaaaaaatgtaaactcttgtatcgcgagaagccagaaaacaaaataaaggcaaaacacccaaaaaaaattaagcttttgtgtttacaaacatgtactcttggattctttgagataaaaatcgcaactctaatgtgttcttccaccttctttgcataaataaacacatgtcttctaccattgtagttcaagaagganaaagagaagaacatacgaagaagaagaagaagaagaagtgagagaaggtgtcagtgcacaaat

SEQ ID NO: 164322 - DNA, 275 bp, Glycine max
  unsure (1)..(275): unsure at all n locations
agctntccacattgaatttatcacctaatgttatattagatgggaatcgggtatcttaacataagagatttcagatggactttaatcctaatcccacagccgaccttttcacgagatctctacttaaccctttggttaaatgatcggccaaattatgctgagttctcacaaactccactgatatcacaccatgcatgattaactcccgaaccatgttgtgtctaacacccaagtgtctagacttcccattatacacttgactatatgccttaacc

SEQ ID NO: 164323 - DNA, 451 bp, Glycine max
tgactctgttataatacgtgctatgttaatgttcaacgaaagcataaaagacttgacaaacaaaatacacattcggccaaaatcacaactgtagtagctacacagtaaatcaatggataccttattccagaattaggcatggttggtaagcttggattcaataatatgttgctgacattagccatagttccaacatacatttcacctatttcattgacatgcatttagttaatcgacacttacaaatgtatgttgtatcatcaaccaataacgactctcaaaattaatattaatgcctaccatgagtcaatgcaccacttccttgcagtcttctatgttgaattgccaaaaaaggagcagaaacattactatctcttaataactctatgtcaacttgacatattcatcacagaaaacacacttaacaatgttactctataataatacatac

SEQ ID NO: 164324 - DNA, 351 bp, Glycine max
ccatatctacttgataattcaatgggagccataaccctagccaaagttcattaacctccatctttcccagaatacgactcaaacgcaacgtgtgcttgacacagataagcctaggagcgttccattgagcattgaacggctccgaaacgcaacgggcaaggcctaattgatgcgggctggctgaaatctgaggagaactgcctgtaaatcctgacattgacaaaagatgccacacatggggcaaatttgaaagctgccgtacgtgtcccaatgactcaccagggtctcacctcatgccatacaggaaccacaacccactgctaatgaatggaaaagaaataactgggcccg

SEQ ID NO: 164325 - DNA, 359 bp, Glycine max
cgcaacattagagttcatatattgcgtacccacatatgaagcgtccgcgaaatattgttcgcgggccatacgtcttcacttggcgagcccctcgttggtcatcttgtgtcaaggggctctttgcggtagattgcattctcgttcccgtaacccggcgcactccttccgaacgtgtgtagcaaccaacttgaacttctccttggcgagttttgcctttcctaactcgctttagagagcttggacttcctcgtcctcttacggtgcttcaaaattctcttcgctgacgacttttaacttggcaagccaatctaaacctcgtatgcgaactttcagccattcgtggtacccaccaatgatgc

SEQ ID NO: 164326 - DNA, 307 bp, Glycine max
  unsure (1)..(307): unsure at all n locations
gatataaaccctgcgactcacgatcccttcttaaacatcgacatacactaatttccctttaatcataccatgtactaatgaattaatatatgaacttttgaacgaatactatattaaaatatccagactacacggaacccacatatgaagcattaaaagactataaaatacaaaaaataatgaaacatcgtaaacagggcagatgaatngcatatgatacaccaagccaaccaactaataataaacccttttctcattcatcaataatgcaggggacccctagattgtgcggacatactcaaaatca

SEQ ID NO: 164327 - DNA, 430 bp, Glycine max
  unsure (1)..(430): unsure at all n locations
agctnttaagggcagaggaccttaaattatcttaatgtgtggatatggggcccactgagagtgagaacgcgtagccctctaatggtgagggcgtgcagccctttgaaggcgagggcgaggacatgttgtcctctgaaggcgaggacgtgtagtcctctgaaggtgagttcatgtagtcctcagaaggtgaggacatgtagtcctcggaaggcgagggcgcgtaaccctctgaaggtgaggacatgtactcctctgaagatgaggacatgtagtcctcggaaggtgagggcgtgtagccctatgaacgcgagggcgcgtaaccctctgaaggtgaggacatgtattcctctgaagataaggacgtatagtcctcggagccgagggcgtgtagcactctaaaggtgaggacatgtagtcctctgaagatgat

SEQ ID NO: 164328 - DNA, 404 bp, Glycine max
  unsure (1)..(404): unsure at all n locations
tgtgcacatcaagtcactcccgcatagtatctctagcatgctttgtatgnnggtctccgcctttggcacgggaagccggaaggtccatatcaccttcttaattgtacacatggggcactgcgcccccaaatgcgcaagtaagaagagataattttccgggctctcgtgtccgtaaaatgcattcatatcatgcatcgcataagcatctctttataacatcataatggacatatcctgcatttgtccgctatcatattccggcctcacattttgcatgagtcatggcatcatcatgcatatgcattcaacaaactttttgatctgcataatagcataccaatatgtgttatgtttgctcatccttgcgcttcgctctacaaaacaaaaacacaaaaagggggaag

SEQ ID NO: 164329 - DNA, 391 bp, Glycine max
  unsure (1)..(391): unsure at all n locations
tgtatgtaatcctgcaaccgcttatacatgtgatcgtattattatttcngcaanaatccatcgatggagacattcaattataagaataattcctgacacaactaacaatatcagataagaagcataaaacatattgaattcagagtacgagactgtgttgatattaaaccttctgatttgcacttaggagctcgcgtggtgcccgtgcaagatcctcctgcaaagtgctctgtgacatctnacagataagcctagtctctctctctttaagaagagattctgctggcacctagcggtttcaaagataatacagatatctttaatttcaagaattaacctttccctcgcattatgaaccgaacaatcacccttgaaatctcactaacttgac

SEQ ID NO: 164330 - DNA, 422 bp, Glycine max
agcttgcaaaatctataattgtaatgatctgctattattatatgtattgtaagacatttttcgaaggatttactgatccttgttttgtttttaactaatggagcaggttaaagagttccatataagagatggttttgaggtagcaagtgctgacaagatggctaagtcatgcatggtttattttgaaatgcatctatccctaaggaaaaaaataattacaaaagcttttaatggtagttatagtatctacaaggaaactttttgtaaccaggtctattgcctttttgttgagtaactggacatgcacgtacaataattgttgttgaagatgactagggacctgaaagaggaatgccgagcttcaattctgagttacccaattccaattcatggtaaattttgtctttgcaataattcttgga

SEQ ID NO: 164331 - DNA, 339 bp, Glycine max
agtcagctctcactcattcgtgattatatggagaagattttaatcttcgtcacttaaaaacaattcaattgacaccagcgcaataaagtaacttaacttcatttttctataagaagcttcctgcacgattatagaggtttagaagattctccaagaacaaataggacgcatagtgtaaatcatgaactccttcaccttgtgcaaacgggttagacatctctttattattgtcgtctacaccatgactagtgcaacactagccttatacatatattagacagcctttaatggaactacattcttatggacctgattaattaacaccacctaggctagaac

SEQ ID NO: 164332 - DNA, 420 bp, Glycine max
agcttaaaacctggtggcaattatccatatttgtcctttaacattgcacacataattggtgacaatgaagatgatgatggaagaaaaatccttagagagggaccacaattggtacgtctaatatcagccgttaaatttgttgaaaattttatttaggataagatcaatggtggccaacaaggacaggttacctacggggtttgtcaaatttggtcaatattatattcatgagcttaaaattttcttttcttggtaatgggaccaaagggggagagaaaatggatgagattatagataaaattggggctagagatataactcacccattctcctactctctagtagaacaaatttatgctaaaccaactgataagataattgtaaagtgagatgaattggatctgggaattaactttatgc

SEQ ID NO: 164333 - DNA, 382 bp, Glycine max
gtacaaacgaataacacttggacccttacagacttattagctaataagaaagctattaggtgtcgttgggtttataagattaagtatcatgctaatggctccgttgaacgatataaggctcaacttgtagccaaggggtatactcaaatggaaggattggatttccttgatactttttctccagttgcgaagctcacaacagtctgattattgctagcattggttgctattcatggttggcaccttcctcaactcgatgttagcaatgcattccttcatggagaattaaatgaagaagtctatatgtagctgcctccacgaatgcaagtctcacaccctaatcaagtttgtcgattacaacgatcactctatggtttgaaat

SEQ ID NO: 164334 - DNA, 425 bp, Glycine max
  unsure (1)..(425): unsure at all n locations
agctnggaattaaaaagctttctatcttttattattcctacagatagagtaaaatctattgatgcattcaaacatcaaaacagcagcacgtaatggcttaagggatctttggtagtaactaactcaagcaaatcaagacagacagctaaggtcatctttgagataaagataaaatatttgtgagggtgtggcagctaaaagaaacagaaagagaagaacctttgccaagaccaaatagtaacatacaattctttactatatttttttttctctgttaaatatcttgaatcagagtacaccacaaagccccaggaggaaaagggaatgaaaaggatgaattttcttcctttaattccttaccacaactcgtctgctgcaccaagtgcacttcaatatgcttttctaatttcctcaaagcaacatta

SEQ ID NO: 164335 - DNA, 465 bp, Glycine max
acctatgaaactccgcttgatatttcggcaagtctacgtagcatttaccttttattgataactcaagaaacttatctgctgaattctgaacgtggaaaacttaacaaatagaactatcaaggcacttcttaatattcgaggctcgaatgctccctactacttgattacataagggcgcattatgagatttttctatcaatttaaaagcgaaataacaggttgacagcatgaacatagcctctcctttaagtcgtgttatcagacatgctacctctcaaataacttttccaacatgatgccgagggaatgggtgatttaacccatttctaacgagcattacgaactagatcaactagaaactgttccacaatgattataaacagaacttacatcaatggcggccactctaagtgaagcaactactgttttagcagaacaaaatatttgaactggaataatgaacat

SEQ ID NO: 164336 - DNA, 416 bp, Glycine max
  unsure (1)..(416): unsure at all n locations
agcttaaggggagattaaaaaaatatatttatatttttttatataaatgtgttcaaatatatttttcatcttccaaaaatattttttgttagtttaaattttgaaatattgaaatttaaaaaaaaaatttatcatgatttattaataacatcacatacattttaacattttgttacatgttagcttaaaatgatgatcgaaaccatttttaaattttaaagatttgttcagatcatgtattcttatttcatttttttttgttttaaatataaatgaagagagaacataacatacaatataaaatatataaaatatctagacaaaattttaaatgagtatcaaaatccttttagttacagctaaattatgctttcttcctgaccaaattttgcttgcttcatgctncaagcattcag

SEQ ID NO: 164337 - DNA, 460 bp, Glycine max
  unsure (1)..(460): unsure at all n locations
ncactaaaactntaatncaaacatgcattgngttcctctactgccctaccctaaacaatggtaactctcgcaaacaaagaaactctagcaataaataaccattgtcaaagcgtattttgatgctcctgatacctaagaatcattagcaactctagaccatggagcaatatgatggctctagggacctaatggaaaacatggatgtttttaagtctatgctcttttacaaaggtgctaaagcctctactatgtcagtccttcccctaattttaaagaagacaacattaaggtggtttcaagaactcatatttgagttaataaacacaacgtgaaatgtctgagacaaaagtttgccaaccactcttcaataagccgagttcaacccaagtctaaagccaccttaattgtcttcaaacacaaacctcatgagccactccaataatatattgactacttcaac

SEQ ID NO: 164338 - DNA, 414 bp, Glycine max
agcttttcaagaatgaggatgatgttcttgctttcacatacgagtgccccattatatatgcaaccccagcttccttggcttgaattaaatccaaaagctcttccctaacatcgggatccataccaggattttctggtagctgaaatcttactcgtcgccttctaacttgtggagtatcatcattgtaaaccgattgcaaactttgcagggttgcagatctgctgctatgaacggacatgtcaacgccaatatcctcgtgctcagaaactactaaacttgaagcataatcatagtttctagaacttataacagccatcctcccatcaagggaagatgaagctttagaactcgagaactggggttgcactgcctccatctggataaattcttgtatactctgtatagatggttctc

SEQ ID NO: 164339 - DNA, 423 bp, Glycine max
  unsure (1)..(423): unsure at all n locations
tgaagataaagactncccaagctatatatcttctctttttataggctntccctcactctaagaaatggattcactcttgcttggatggataagaatgaatgctcctacccttatttatactactccacctccacaatgaatggtggagattacctgtatcctacggtggagactaattctctagaatgctccacacattctacgagtctctacactcttctactctcttccatactttttcataaagctccagaaagtttcacacatctctagaatatttcaaaggtattcacattcttccacaagattctagagagttctacactactctagagttcaccacaacgttctataaaattctacacttttccagaaagcttcagaatattctagaacctctncaattaaggagggatcccaaca

SEQ ID NO: 164340 - DNA, 413 bp, Glycine max
  unsure (1)..(413): unsure at all n locations
agcttgagcaaattcaacgactatatttttactcggatttctgatatagncccgtaatataacgagacgctcgaagttgaatgttgaagctctgagcaaattcaaacgacaataacattttactcggatgtctgattgagtcccgtaatatatggacatgctcgaaattgaatgttgaagctctgagccaattcaaacgacaataactttttactcggatgtctgattgagtcccgtaatatatcgagacgctcgaaattgaatgttgaagctctcagccaattcaaacgacaataactttttactcggatgtctgatcgagtcccgtcatatatcgagacgcttgaaattgaatgttgaagctctgagccaatctaaacgacaataactttttactccgatgtctgattgag

SEQ ID NO: 164341 - DNA, 420 bp, Glycine max
  unsure (1)..(420): unsure at all n locations
agcttgaaattgaacaacttttatctttcgtgattattgaatnntcataaccttttctcacggatgtccaattcggggacataactgatgtagacgctcgaaattgaacaacggaagctctcgacaaattcgaatggtcataacttttcaaacggatgtccgattctgggacataacacatcgagacgctcgaaattgaacaacggaagctctagagaaattcgaatggtcataacattttacacaaatatccgatttgggaaaataatatatcgagatgctcaaaaataaacaacggaatctctagagaaattcgaatggtcataacttttcacacagatgtccgattcggggacagaatatgttgagacgctcgaaattgaacaacggaagctgtccagaaattcgaatggtcacaac

SEQ ID NO: 164342 - DNA, 428 bp, Glycine max
tcgccggatgatgccgatcgaacatttcccaatctattattaccaatatttattcagggattgaatagaataaacaatggccggtgtcggttgctatatggccccgactgatatccttcggccgacattgcgcaatttcttttagaaaagctggccgataatgtttttttaccgtagaggaagttttttgttttgatgttgcctacaaaatttacaatgtaggtcggctaggtttttccgtgcgagctcaaccgaggttgtgtttcggccgacactggcatgttctcatttagttggccaagacaacattagcccaccccggcacacaaaaaattatcattcacggaaattgatcgaacaacatgatatctgacgtcggcgtggagagatgaccgatcgaggtctaaaaggaagcatcaccggatgac

SEQ ID NO: 164343 - DNA, 423 bp, Glycine max
  unsure (1)..(423): unsure at all n locations
agctntgttctcagatccctcttgttttttatacttagaccaaacaacattattgtaacaacatatttaaaaccaaaacttaatccgcagatccctcatttaagactaagtttcaattctgcttcattcaagttctaaggcaacaatacatttcccaatgctaaagtcacctaaccaggcacacaaatggttgatcagaccaagagcatatagaatttaagcactgaaagaagcattgaacacaagaaacaccatcaattagatattaaagtaattacatcagctgttctttagaaatcttcaacaagggtgtttagccagccaatacagaaaaacccctagcaataatgagattacaaaacctatgtatctctacaatgttgctcatcttgctgcctccagagcccttttcccgaaatatgc

SEQ ID NO: 164344 - DNA, 460 bp, Glycine max
tgtatgagtactgagaaagatcaagaaattgtgttttatctgtcctcgccaccagatttttgagcaactcattcttcaatatttctataagggacttagcaacatggaaaggaatttgattgagaagatggtctccaactcccaacaatttagtgcaagaaatgatgctattgtccttagaggagtccatgaggtggccacagatgcatcttcatctactgaaaataaaaagcttgagggaaaacttgatgcattggtcaacctagtaactcagctttccatgaatcagaaatttgcatctacgcctgttgcaagagtatgtggtctatgttcttctgcagatcaccatacagatctctgtccttctttgtagcaatctggagtcaatgagcaacctgaagcttatgctgcaaacatttataatagaccctctcagtagcaaaaccaacaacagtagaat

SEQ ID NO: 164345 - DNA, 427 bp, Glycine max
  unsure (1)..(427): unsure at all n locations
agctttntcttgattcttgaatagacttttcttgattcttaaatcttgagncttaaaccttgatctcttgaatcttgattcttgattcttgaattcaacttttctcttgaatcttgaagtgttcttgattctatcttgaacatcttgaactcattctttgattgacttttgagctttttgtcatcacctttgtcatcatcttttgttatcatctttgttatcatcaaaacatctttgaatcactcttgattcaccatgaagttttgcttctacaaagagaagtcattcacaaatccaaataacaatgccaacaaaagcaaaatacacccgaatttaaatcaaatatccaatttaccaacaattaatatgtattgttccaaaaaaaatggggttcatataaccaaagcaatccaggtataattaaaat

SEQ ID NO: 164346 - DNA, 426 bp, Glycine max
  unsure (1)..(426): unsure at all n locations
ntattagtgtcatcgaaagaaaaacaaactgctgtatattatcatgtttagatatttaattgaattattcgtgagaaaaagaaactaatctcataattgagacacatttcattgctattgttaaaaaaaaaaaaaaaaaaacaactttcaaactaagtgattaccatgtgccaggcaaaattctaagatcattagtgtcaataatttggacgaaacacaccaataatccttagaaagttaacaacacctaataagaaaacagcaattcctacaatagttgaactgaatctccaagggtcacggaagtacacagatatcagcatacccatgtagtgtttccaacatcacctgtagtgttcattgagttcctttgtggtttgccactaaatttgaatcaccaaaacatgcttgaaaggccattattat

SEQ ID NO: 164347 - DNA, 430 bp, Glycine max
  unsure (1)..(430): unsure at all n locations
agctttcactntgtaatatcataggtccatataatttttctggtatatctttcaatttccttcaacaaggatctaggtcacacacaaatattaaacaaatataacaacatgtcattaagaactaatttaactagttggattctacccatgaccgaaagcatgcactactaaaaaatcatttttttacgacgcgtattctaagacggttatatataaccgtcttagaatgttacacggtggcaattttgtaattaggaagaatgaattttttttataacacacattttaagacgggttcacgaaaccgccttaaaatgtcctagggggaacacaaacaacgtcgggcttttatacaaaaacgtcattgtttttgtgtgcgtgtgctttaatttgaaatccctagcctcgactcttcgtttctccctcgctt

SEQ ID NO: 164348 - DNA, 472 bp, Glycine max
  unsure (1)..(472): unsure at all n locations
aactcaagctnaaactctctcacagcgctaccaaggtggaaacagagttatattctgaagaaggaaatgggtgagagattgaaaacacgtaataatagtgcacttcgttcttggtttttgatgtcgcgaagagtattgttgttcacagagaaaaggtgaaagaaagaaagagcaccattgaagagtaagaacgagaaaagagaggaagaagggcttaccttaacaagccacgccacggaggaagacgctgcagatgcgtcacagagagtcacgaggggtaacaagaataaaaacataaattaataaagggtattgctaggtgcacccagcattattgctggtgcacccagcaaattttctaaatggccaaagtaccccttcctctgctgtccctgcattccgtcttgttgatgaacagtgcctccatgaacagtgctctgcaccacgcaccacgcgtntttaaacggcacaa

SEQ ID NO: 164349 - DNA, 424 bp, Glycine max
  unsure (1)..(424): unsure at all n locations
agcttgaagctcaaagaaaagctcgaagatgttttctcttttacatgcctaaatcccttgagtggcatttgtattggttgttatcttggttgttgcatcttantacatttgatatttgtattgcatcatgcatcatcatgattagtgtgaagaaaagtttctaagttagaaaagtttcttcaagaggcaaaactctctgttttaatcgattacagggttgtcgtaatcgattacaacaagctatctaaagcttgtagagttgagtctcgtatcagtttaatcaattatagtagtctcataatcaattacactattgtttgagacaatgactgatttattcaggagtctctgctttaatcgattaccaagtggattaatcgattacttctctctcatttagttgttcagaggtgaacaagaacac

SEQ ID NO: 164350 - DNA, 475 bp, Glycine max
  unsure (1)..(475): unsure at all n locations
ctcaagctnttccacattctctggagggagtggcgaaagataggcttgtctatcttgctcccaggtccattatcagttgtgatgaccttaagagggtgttcttggagaaattcttccttgcatctatgaccactgccaccagaaaaagacatttcaggcatcagacaacttattggagagagcttgtctgactactgggaaagattcaagagactgtgtgcaagctgtcctcaccaccagatttctgagcgactgcttctgcaatatctctatgagggacttancaacatggagaggagtaccattgatgctgccagtggcggagctcttcgtgatatgactcttgttgaggctacgaatttgattgagaagatggctttcaactccaaaacaactcagtgcaagaaatgatgctattgtccttagaggagtccatgaggtggccacggactcatcttcatctgtagacaataaa

SEQ ID NO: 164351 - DNA, 428 bp, Glycine max
  unsure (1)..(428): unsure at all n locations
agcttctgaatcgatacagccttggtgttctaatgtaatcgantatagggaatggtaatccattaccagaccttatacgaggctttttcaactaaaactaactattcctaagttcaatactcactttactatgataataaagcacaatcaaatgcattcaatcaacaagcacaatcaaacacattcaatcaataattatctaacacaaacaaatcaaatcaatctaacaatcaatttactatacacaataacttatattactattaataattcctacaaaggtaatcaacgacaattattaaaagacaagcaacaattaatatgactattaataacactgactactacactcaaagacgatctattgaacataatgaggattaagcccaatgagttacctacttgtctagatcattgacatctaaaag

SEQ ID NO: 164352 - DNA, 339 bp, Glycine max
tctcctatccgcacctggaaagatccgatcactggctttctattgttatatcagaacaattctgatatggctcccgaccgcactcaattgcacaatatgttcaagaaagacggtgaaacctttaaagaatatgcgcagcggtggagacatctggcggcacaagaagctcctcccatggttgagagagagatgatcaccatgatggtagacactctaccacggttctactatgagaagctagtaggttacatgccatccagtttcgcggaccctagattctgccgggaaagaatctaggcatgattgaaaagacgaaagcttgattacgtttccttcacg

SEQ ID NO: 164353 - DNA, 422 bp, Glycine max
  unsure (1)..(422): unsure at all n locations
agcttctagccaaagggacttactttgatttaattccttngatagcccttttgagccttgtttccctttccttgttttgaagctcactacaagccttaagtgaaaaaccatgatatcaccatatccttaaggaattttggagctttggaattgttttgggaataagtatggggggtttttgtttcattggacaacttgttttgttggctatgcttcatgatgtattttgggccatacttgatatacattgtatattggttaaatgttggacatgctgaatgaaatgttgtttctcaaaggctataaagtaaaaaaaaaattcgaaaaaagaaaaagataagcaataaagttgagcgaataagatcttaaatggcacaagaatgatgaaactcttggttctactcttcatgtgtaattcttat

SEQ ID NO: 164354 - DNA, 301 bp, Glycine max
cgaatcttgcgctaagcacttgatcaccgctatactcgcctagcccagaatgcccgcttaaagcgaactcgcatgaatcttaagctaccttaggcttataaaaggagtggcaagctcaggagaaagacactgagactcagagctctctaacgaatacatccaaagtacgagcatctctcataggggaaaccctctccctctaaccactctcccctcctccttaatccatccttcttcttcttccatccacagcttgtccccaaagcgtaaagcctttcatgacgatgagaggctaaacccc

SEQ ID NO: 164355 - DNA, 425 bp, Glycine max
  unsure (1)..(425): unsure at all n locations
agcttgcagaggtcggtggcagactcaataattatggaatgtgtagnggctttgtctcatacctccattacacttcagttgtacctcagcttgcttccctatttttattaattttgttcatgtttatgtgtgagttgaatcttccccgtgaggaccaaaagataaaaaaaattgtaaatataggaaccaaaataaatgtcttaaactatagggactaaaagaaaaattatcacaactataaggactaaaaaggtagttaaatcaaaataaaacaaactagtgcaaaataatggtggtgtggttagacacttttattcttaaatgtctcgttgtagacatatatacctctacatatgtgtgcattttgcaaccaccaccattagtggaataaaattttaaatgcanactcttctatggtatatatc

SEQ ID NO: 164356 - DNA, 406 bp, Glycine max
  unsure (1)..(406): unsure at all n locations
tnctggcctctaggctttctagacggtgaaattctttttatatggaacacccacatatctcgttgtcttaaaaagagtcatttgtagggcacgtacttgttcagacacttcctttgcatttttccccttcatgccaaaacttgttattgcaataatatctccggccgtttctacaacctctctttccacatcgatctcggggtttccggagttgatttgtgcaatccacctatctatcatccgatttgtagactcaatcatcatgcttgccattgcctatatcatattacacaataaaaatatacgcgtgtcagaagaataaaaagataactaattctcttttcttgacaatcggtgacactccacataatatcacgaaaacaaattcgcccttaaaatttttgac

SEQ ID NO: 164357 - DNA, 420 bp, Glycine max
  unsure (1)..(420): unsure at all n locations
agcttatttaaagacataatagtttgnttttatccatttcttgagagttttttttggaaaatgattttttttgaagtatctttttcaaaacatctattaatattcataatttggggcaactagatccatagaaaaagcttctacaaatttttaccaactttaataatccgccaatttctttttctttacccaataatcaatttagctcctaattcgtgaggcatctgtacattgaatttttgtggatatcactttcgtttgtataattgaatctctcacttatgaaaataaattggtaaactaaggtggacttttattcactgcttggattcgattctgggtattatattcacttcaatgaacgtaaatggtttcccgccttaactggctacacctcaatagtattagttatggaataaa

SEQ ID NO: 164358 - DNA, 461 bp, Glycine max
  unsure (1)..(461): unsure at all n locations
ntataaataaatagtgtatatagtaataacgtatattttttactttntatattactagaattaagtcttagttaattatgtaattagtacaaaacatttaatgattttgttatgagaaacgaatgcaagtaaatatggagtaaagtcttttctttcgagcatattttttggatgtataaagcttgatggaagaccttacttaaaaataatatacttttaacatattctgttaaatattttttttcatttggtaaaatttatcgtaaacttcaaaatttattgtagactccaaattcattgggcactcatcttatttaatttatataatgaatcgttgtcatgaattatataattttcaattaattcaggttattaactcttggaataattatctttaagaaaattacactctctataaatatctattggctaatggcatataactctttatatttgacact

SEQ ID NO: 164359 - DNA, 403 bp, Glycine max
  unsure (1)..(403): unsure at all n locations
agctctntcaagaatgaggatgattttcttgctttcacatacgagtgccccattatatatgcaaccccagcttccttggcttgaattaaatccaaaagctcttccctaacatcgggatccataccaggattttctggtagctgaaatcttactcgtcgccttctaacttgtggagcatcatcattggaaaccgattgcaaactttgcagggttgcagatctgctgctaagaacggacatgtcaacgccaatatcctcgtgctcagaaactactaaacttgaagcataatcatagtttctagaacttataacagccatcctcccatcaagggaagatgaagcttcacaacttgagaactgtggttgcactgcttccatctggataaattctgctatactctgta

SEQ ID NO: 164360 - DNA, 383 bp, Glycine max
  unsure (1)..(383): unsure at all n locations
cactatagatactcagcctgaagatcaagactcccacgccaggtatcatctatattagtgacgctctcncacactctaagaaacgcgaccactcttgctggacggaacgactgaaagctcctacccttatttatactactccacctccacaatgaacggtggagactacttgcatcctagggtggataccaagtcttcagaatgctccacacattctaggacgccctaccctcttctaccgctttccatacttttctataacgctccacaacgtttcacacatctctagaatatctcatacgtgcccacactcctccacaatattctacagagtcctacactactctatagtccatcacacacgtctacacaattctacactt

SEQ ID NO: 164361 - DNA, 403 bp, Glycine max
  unsure (1)..(403): unsure at all n locations
agcttatagttgtaaggcttttgagcctgatagattgtctattcctctttgaagttacctcaggagggttttttgaatttgacggggacctagggggtgttgccattagcctgcgaaaaaaaaattaacttagcacaaagtcaataatgtatggagaaatatgttgttaattgaattataaagtaatgcattattgttaaaacacatggaagaactatatatcatactttaacctgaagcaattacaaaggaaagttctcccataaaccctcctcatgatcagtacgatttgcatatacattgtctttnggtttttcatcagtaatgaaaggcatgtctttcaagaaaggcggtatgtcactgacatcaactgttgaactgtcgatatggtcaccgataaaaa

SEQ ID NO: 164362 - DNA, 385 bp, Glycine max
  unsure (1)..(385): unsure at all n locations
tgagaagataaatatcataaacacaaattgattgttcttgaaaagctaaagntagttgattatcattattcaacggctcttctagtgactaactaatcctattcaccacttaaaatcataatgggttaagaagaaaaaaatacttacaactaatgagaaaaaaatatctaaaagatatgaagctattctaaatatgaaaaaactatgttgaaaataagaaaatggaattaattaaatattaagccccaaaaccacagtaacccacccaaaaaaaattccacccacaaatgcatattgagtgttggattcattgtgcaataatattttgtctttcaagtagctgaaattatcttcaaaatatataaatgtaacaattcttggattg

SEQ ID NO: 164363 - DNA, 412 bp, Glycine max
agcttgtgctgaggttgctttcctccgatatctcttaaaggcaggtttctatgacacatccataggacaaggcccagacaaagtgtacggacaatcactttgcagaggggacatctccaactccacagcttgcaaagaatgcattgagaaagcaagccgagatatcatgaataggtgcaagagtgagaatgcaatgatatggtataacctttgccaagtacgttactcctttcagagctttaaggtcgtggcttatactggaaagtatccgcagcagaataatgaggagaagaaagtatcggatcctataagatttagggaatacttgacatatttaatgagcaatctctcagacgaggctgctttcaatcctgataagaacatgtttgcagctggggaagttgactatcct

SEQ ID NO: 164364 - DNA, 433 bp, Glycine max
  unsure (1)..(433): unsure at all n locations
actagcttggcatancttgtgggtatggttttaatttacaaatttttaagatataatgattatagtaggtcatttaaattaaccaaaatcttatactcaagtcttaaaataaaaaatataatttaaaataaaaatatattaaagatgatcaattaaattcttcaacaattntaataattagcaaaatcattttaataattagcaaaatcaacatatgtctgaataaatggtaataaaaaattcattcaaaattttgcaaatcttctgcttttttttatcttttaattctttatttgcgtgtgatgcactttatttgctttctatttacatttcattgcactttatttacttttgaaattacaacttggccatttattgcttcattgagatatcttggttcttttcatttttgtatttcatgagttatttaact

SEQ ID NO: 164365 - DNA, 305 bp, Glycine max
agcttctatggagttggggtctttgagcttcaataagggccttcaatggtgattttcggccatggagttgcagcgaaagataaaggataagaggtgagatgaggcgccatctactaaaggataagccatgaaaggagaagcttcaccaccaaaagagtgtcttggataagaagcttacagaggaagcttcaatgaaggaagagaatgagagagatagagtgatgcaatcctaccccttaagggcattggatagaatacccacgaagattgggtctctaatgcaagaaaaggccctcccgctctca

SEQ ID NO: 164366 - DNA, 458 bp, Glycine max
  unsure (1)..(458): unsure at all n locations
tatgagcatgaaacctttctccaccaaccgagaaagttacatcaaatgattcctcatcctctaacaacatcccaaaatgttcaccaatatcagattcaggaacctgtattgtgtttaactgagaagaatctatggacgacactaaaaccgcaatagtgcaatttatcttcaagcaatcatccttgagaaaatttgacgtctcaaggtgtctccgtttgaaaaaccgcgtatagcccctattacacaacaagtgcatcattgatcactacgtaatgtacaccacaaaaaatggatacaagagctaataaatcatgatgatatccaaatcatatcaccaaaatcacaaggttctctagttcctttgaaaatttaattntatgtcttatattctaataaaagagctatctctctaacccctgacaatagtgaaaaaagattaacagagaaatcaataacac

SEQ ID NO: 164367 - DNA, 386 bp, Glycine max
cgcagctgcagcttattgctattattcaataattatactatgtttggctaagatagatcgaaaatttatgctcattataactaaatatcgttaaataaaaatcgttttctaaagttattaaaagaaatcaatttatgaccatggaaagcacccgataaagaatctaataaatattatattgacaaattactagactattcaagtttacggactaattaattagaaaataaattaaaaatcacaaaagatattattatgtcaaaaatataatgcttcacatttattttttagcaatgcaaacattatatttagttaatattctctaacctgtccttaacctgtattgatgactgatcttaataatatgacatattcatcaaacaaat

SEQ ID NO: 164368 - DNA, 464 bp, Glycine max
  unsure (1)..(464): unsure at all n locations
cattacatggaaatgaaaaggatagaataagcaatattagtattttcttttgagctcgtactagctntttgactttgataactacgcctgtgacactgaaaaggattgagaaaacatgcttcttatttaaatctaatagatagtattactgttgagacatccaatacttgctcatctcaaagccattcctgccatagtgatagtcttcaattgtcttctcaatctcagactgtgtgttcatcacaaaaggcccatactgaacaactggctcgttcagtggttggcctccaatcagaacaaacctcanaggcttggaagagttattccatacgctaaggccatcaccttgactcaaaacaaggacatggtgtgccactgttggggatgaacttggacacccgaatactccttccncttcaattgtataaacaaaggcattccacgactctggaatcctctgatgc

SEQ ID NO: 164369 - DNA, 401 bp, Glycine max
agcttgtaacaccttgaacaatatagctcatattgacagaggaaactatgttgtgtcctttgcgcatttatgaatctaatttcagtagctatatgtttttaatcatagaattttgcgctatatatatgtatgtgattgattcagtaaagtttgacatacaaatagaaactgtttgagctagattttccttgagttttttatgccaaaagtgagttctttgcatgttataacatagacataaccttaaaattctcccaaatcacagttctctagcaaaagctacaaatcaaataagtttaaggacctttactaaaatgaaaagtctgtcacgaatttggactaagagttacaaaagtatgggttggttttattaaattttctaccttaaaatgagtttttac

SEQ ID NO: 164370 - DNA, 446 bp, Glycine max
tcattagttgtcgcatttcagtatcactacctcttatggtataacgatatgcacttcttgcatcgcatatttgtttgattgtataactattgacattgtgctcctttagcattagcaaaatatttcttggtttcaccattgactttgtcatattatcaataattatcttttcatccttagtcaatgaccagcgtatgaatgcccaactaatgactctgccatttcatgattgtgactcccacacattaacttcaacatctatcattggcctccaaccactagtttcccacatagcttaaagggacacccacattttgtacctaccagtatctcttcttacaaaatctgtcttcctgcacctatactgaccactcctttcacaaccaattaagacaaatgaagtccttcctctcatacaatgtttgtgtctgacctcataatgactg

SEQ ID NO: 164371 - DNA, 416 bp, Glycine max
agcttgaatgggtaatgatctttacacattttcttccactatatataggggcatgatcaacttgggttgttaaattaaatgccaagggtgtgaactaagtttgaagttttggacattgctttatatgcaattacatgagtcatatgaatgcttaaagttgtttgaattgaattggcataattgtttggttaaacttgctacaccaaggtgggtacattgtgcataaattgctgtagaatatcaaattctttccttcaaaataatacacactgagtagtgatctttatcagttgtatagtaacacctacaattaataaagactacacaaaaattggttgacttcttggttgctatacttgggataactaaaataatatggttattgttgcaacctaccctacgatgggagtacgagc

SEQ ID NO: 164372 - DNA, 413 bp, Glycine max
  unsure (1)..(413): unsure at all n locations
gacaccatataatactcacgctntatctatgtagaaacctattgtcatctaactctgcttgtttatgtctaatttcacaacataactatcagatcaggtagttttgactctaggcatttgtctaaggaagtattccggcttgggaattctttcttgattgtctcttctaaagctaattctctcaaagtttcttccaactagatatttggtacttggaaatccatttctatatgcctcactacgtgtaactcacattactttctcttacatgagatcactcaagttacttctatgttgaaacttgaaaatgtctttattgatcttaatttaaacacactcaaggggttacatgatttgctgctcactaactcatgtagacaacactctcttataagaattaagcacctataatc

SEQ ID NO: 164373 - DNA, 425 bp, Glycine max
agcttgtaagtctccagacgacgagagtataaacctgcaaaatttttgaaaataatcagaatcggacgaccaacatcatccagataccgtcgaatttgttcacctcgattgatgaaaggagcggatgatcataaggtatctctgcctgccacctaacttgctgtccctggatgacaaaaggtgcggaagacgatgttattctctgtatgtcaacgggctcgtttgcccctggttaacgaaaggtgcggataaccatacagtatccccgcatgtcacctgacttcatgggtcaggatgacaaaaggtgcagaacacgatgttagtctctgcgcgtcaacgagctcgtttgcccctggttgacgaaaggtgtggataaccatgcggtacccccgcatgtcattggacttggcatctctagatgacat

SEQ ID NO: 164374 - DNA, 408 bp, Glycine max
  unsure (1)..(408): unsure at all n locations
atactcaagcttnctccacgtttttctccatacctagaagtggaaaccttcttttcttactcaattcttcaccacatcacgtgccgtagagcccaatcttcctctttttcactcctctttcacttccaccgatcaaaatccagaaaaacttcatcaaatggcagagccctctaagaagagaaagggatcatcctccaccgctaccgctgctgcccatcgccgtcacggcccatccggagcacccacagcacctattcctccttctttgacatctccaagatcatcaacactgttttcatccgatgatcaatgtatacgggaccctttctcagttatcttctagaataatcttagaccctaagaacatagatgtagagatccttaatgatgaaacgcttgaatgctatc

SEQ ID NO: 164375 - DNA, 426 bp, Glycine max
  unsure (1)..(426): unsure at all n locations
agcttagacagtgtgtcattggtcattttatcctctctaattttcttatttttttcccctctattattgatacaaatagtacaacgaattgcaaaaattgtagatcactcctttgctttgatgtgctctccctcgagatattaagcaaaaaaaagacaacaccatggttcaccaatgcttcaacaaccctaaattgtgtaaagagaagtgccagcagtggcaacaatttatcaatttatagctccaaaatttccaattgtgtttgtctgaattaagagctgacattgagaaaatagcctcagttgcattgatatttgcctatatttatttctatccacctctttttaacaaatgtttccatcagtattataacgccgcttatccattgattcatcgaagntcaagtatatccaatgcattaataat

SEQ ID NO: 164376 - DNA, 319 bp, Glycine max
  unsure (1)..(319): unsure at all n locations
caacctgctgaaactgtgcatggaaagccaattatgaatgctacatcgccagggcatatgcaatctattggcaccccaaggcgatcttcaggaatgaagggtagatatagtcaactcttatctcttgacactgaagaaccgagataacaacctactgaacaacaacttgctgctcatcagcgcaccctacacaccatacggaactgtcatattgacagctcattcacagagagtcaatttctgctagctgagcctctattgccggaaccggagcactcattcgggctgnatggagaccaccaaaaggaaacaccacacc

SEQ ID NO: 164377 - DNA, 446 bp, Glycine max
taataaatctcgaaactaagtatattcaatgcttctattgttatatatcaatatattcttcatatactatgattatcaactttctaaaatattcgaatgtactaacaattcttttatatatattttctgagttcttcaataaataatataagagtacccaagttatacaagaaaaaattatttacgctagtaatataaattattgttcaccttaagaaatcgattatccaggaactaatttcttaacatgaacatttttttcttttactttagtttagaaatcacctattgtcataaagtgtgtttctattttgtttattaatcaacgctatgttcataacatggaccaatctcataaagtggctttttttttgtatctcttagctattacttaaacaacgtcttactttttttaattatctatttcacgttcagatgttaaactg

SEQ ID NO: 164378 - DNA, 411 bp, Glycine max
  unsure (1)..(411): unsure at all n locations
ctatacacaagagntagtcgtattgaccggctatcatttcctccacattacagctntgcttggcctcaagcaaaaagagaacagctcacttgtcctcaagtgacaataacatgcagtgactatgcacaatggtgcatgaaacaaatgttactgattgcatgacaatacaatgaagcattctgtactcatcactcgtctttcacacaatatgcaactattcacagagaataataaaatgcaagctgtactatcagatgaagctaatcataagacagatattaaggaaagtagctcacaccacagtttcccgactactgtgtcactcaagcagacgtgttcaagctattcattaataacaactagcaagagatccaatcttggcacttcatctcatgccatacagctcaaatg

SEQ ID NO: 164379 - DNA, 183 bp, Glycine max
  unsure (1)..(183): unsure at all n locations
agcttctagccaaatggacttaccttgaattaattcctttgatagcccttttgagccttgtttccctttccttgttttgaagctcactacaagccttaaatgaaaaaccatgatatcaccatatccttaaggaatnttggagctttggaattgttttgggaataagtgtgggggggggggggg

SEQ ID NO: 164380 - DNA, 420 bp, Glycine max
agcttacatatatcccgcttatattcccaagtagcacccttagctttaattgcttcccattgaatcaacaattgagacatggtagcttctaaatgtttgacaactcgaacattcaacaccttccatgggcaaagtgttggtcccagttcactagaagtgagtggaaaaggaagatatggtggaggacttttgccatgaaatggtttcagaagagcaatatgaaatacaagatgtattttagcagactcgggtagttgtactttatatgcaacagtaccaattctttcaatcactggaaatagaccaaaatagtgcatgcctagcttccgatgcttcctcaaagccactgaatgttgcctataaggttgtagcttaactaaaaccaaatcaccaaccttaaattgcaaatctcttcttttc

SEQ ID NO: 164381 - DNA, 440 bp, Glycine max
  unsure (1)..(440): unsure at all n locations
tggagaggatgcttcaatggaggaaaagatagatggttataatgagagaggggggagcacgaaattgaaggaataaaagaggtatagaagtggaactttgaagtatgtctcacaagactctcattcatcaaagttaccacaagtgttacacatgcttctatttatagactaggtagcttccttgagaagctttcttgagaaaacttccttgagaagcttctttgagaaaacttccttgagaagctagagcttagctacacacacccctctcataactaagctcacctccttgagaagcttctataagaagaatcctaaagaagctagagcttagctacacatacctctctaatagctaagctcacctccttgagatgagaagctagagcttagctacacacnctctataatagctaagctcacccgcatgacaaaaaaaa

SEQ ID NO: 164382 - DNA, 410 bp, Glycine max
agcttagccctagaggggatggaccttttttgttttggagaggatcaataacaatgcttataggttgaaccttccagaagagtatggagtcagcaccacttttaacatttctgatttaattccttttgcaggtggagctgatattgaggaggaggaactaatagatttgaggtcaaatcctcttcaaggggaaggggatgatgcaatcctccctatgaaaggaccagtcactagagccatgagcaagaggctccaagaggattgggctagagctgctgaagaaggccctagggttctcatgaacctgagggtagatttctaagcccatgggccaaggttgggtccaattatctttgtacatattagactaggatgtcattatatttggtccttgtatttagggctccata

SEQ ID NO: 164383 - DNA, 438 bp, Glycine max
aactacgcttataacgcggttgggaacaaagtaagtggttcgatatacaaatgatgttccgaggcattaatttgtacaaccatgccctcctgatttccagctgggaaattggcgagtggaggaacgccccggcatttacgcaacgagcataatgtaaacctttacggttttaaaagctctatagttgggcctaagctttagagtttttccttttgttaaggctttgtgtcttttgtttttgaatttataatacaaggatctttcttcatctgttcctacgtctctacccattctcattcatttgcatgtgtacttctttttctgaaacgacagatccgatgacgagtcccccgaaggtactaatacctgggacccgcctatcgacttcgagcaagagatgaatcaaacggaagatgaatgacacgaggatgtgggact

SEQ ID NO: 164384 - DNA, 414 bp, Glycine max
  unsure (1)..(414): unsure at all n locations
agcttngttggntccgcatctttcctcttatattctcatttatgacgaaaaatttggaagctacaaagagtaggtttgcagcggacacccaatatataaaattgacacaacattcaaaattttaaccaaacacccaatagaaggatctaatttttttcaatcctgtaatccatataaagaagagggttgtgttgtgtcctgctggtgtatggtaaattttcagtacagatttatgaactgtaaaaatctgtcttactcgcatcatacgataactttataaataagatcaaaactttatattttttgagaaaaaataagatcaaaacttgataatagtactaccattttacattntacattttcaaatgaaaatgaatctatgaatatggctgatacatttgtcttattcatcca

SEQ ID NO: 164385 - DNA, 278 bp, Glycine max
tatcgggcgaattggatctgattgtacgcaacgaactgcacggcattagctataactaaaccaatcctactattcctgactgaagcagcaggggcttaacccagtctgggggatacagcctttataagacaaactcactgacatggcctcaatttataaacgaatagaagcctcctccatcgagatgctaaaccacaccacggatcatggatttgtaccgtcatcccacatacacaagtgtaccttggtcatgtgacatacagaactgctgtacattc

SEQ ID NO: 164386 - DNA, 421 bp, Glycine max
agctttgaagaaacaagatacaaagaatctatgctaattattctttcattctttcttgtaaagttttctgtaaattcttgtaaagatataaagctctcaaaacaccttgtatacattgagagaaaaaactaaaagtgttgagtgatatatacatctgtaagacggtcatatattatagttagtgtgtaaacttccaacaaatgttattgatttgtttagagccaacaatggcttggtaggacaaagaatatttggtttaagtcaagcttagggtagaacttgcaagtgtaagagccaatagtggcaataaacaatacttgtaactttgatgagttagtggaaacttgatggttgccaagaactagacgtagtctcaggtttgagacgaaccagtataatactttgtgtgcttctctttttt

SEQ ID NO: 164387 - DNA, 268 bp, Glycine max
ttgacgacaatcagtaatttatgtcagtgacgtcagatatttattgcggatagttaaggctgatcaatggtgatctacattacataaaattacaaaaggggtaattaagtcataagagttcaaagtggagggcatctcttgaaatgactgatgtagctccatgtggagctcgcaagccttggatcttcttcatcactgcagtcctttgcttattcaatgtcattcgtctcccaatgcacaaagacacaagatcattggagatccccct

SEQ ID NO: 164388 - DNA, 139 bp, Glycine max
agctttaactcggatgtgcgagttaggcgtttaatatattttgacactcgaaacagaattacacaagcctctagagaaaatccaatggcagtaacattttgataccgatcaccctttacagtgcccgtcaatatgtccc

SEQ ID NO: 164389 - DNA, 425 bp, Glycine max
  unsure (1)..(425): unsure at all n locations
agcttgcactgtcatggatcttctcatggcaatatcgntacagcaagactgaaaagacaaaccaatatccatcactacaaagacacacatttgtaaaatggtggacacaatttgactcatccaaagcagatcaagaacaagtaaaactctggttccaatcccatccaaaattcctcaaagcagctgatccagaaacttctgtgtttttgaaccaaaagtctcatctggcagcatttttagcaggatcaaaatcaaaggaggtcctaactaaaaatctaaaggaagttctgcaaatgttacagcaggaagaagaaggttcatcctcaaagaaggaagaaacaagttcttcttcttctgaagaagaagaccccttttaccaaaacgaagatgattgttttggtatctggttagattaaatttaattt

SEQ ID NO: 164390 - DNA, 413 bp, Glycine max
tgcacttgaggacggaacgatatttgcaactaatgaataactttcttgactatcggagataacggtggtggatgatgaaactgaccacaaacatcagctggatgaagtcctaaggatactatctaaaacaaaaaaccgatgcctcaatcaaagaaaaatgtcattgtcacttacttgctctggtgacctctgtctctgcagaaaattacattagaccatgctcatcaattctccttcatcatgatcatttccattagcatgaacagtcgcagcttcttcgtgtccgacaacgttaccaatgatttgatcggtcaaaggactaacataagtgtccatgtatgaaacatcctctttcacattaacacccactgtttgtcctgcagaaccacccccacctttatcacaaaggtctt

SEQ ID NO: 164391 - DNA, 420 bp, Glycine max
  unsure (1)..(420): unsure at all n locations
agcttgcttgtggggcttctatggaggctggatctttgagcttcaatgaggtcctttaatggtgattttccaccatggagatgcagtggaagacaaaggagaagaggtgagaggaggcgccatccactatggaataagccatggaagaaggagcttcaccaccgagatgagccttggataagaagcttggagaggatgcttcaatggaggaaaagaagaagggagggaaagagagaggggggagcacgaaattgaaggaagaaaaaaagggagagaagttgaactttgagttgtgtctcacaagactctcattcatcaaagttacaacaagtgttacacatgcttctatttatagactangtagcttccttgagaagctttcttaagaaaacttccttgagaagcttctttgagaaaact

SEQ ID NO: 164392 - DNA, 409 bp, Glycine max
  unsure (1)..(409): unsure at all n locations
tgtacaaatataacaaacatcttctacgaccttggtgattcttgactccatctcattaaatcgcatgtgcacttgtgactccaaagtatcaaacctttcaccaacaaaggtttgaagaccatcgaacctatccaaaatcttttgaagaagagaggaatcttctccaccatgtgcttctttatcaacaagtcgagcaccctttttcacccaagagccatcatgctcttttttataaccaaaggatgcaatgacagcagcacctattagaaaggatctcttgattggaacataaggttcagaatcaagagggacgttaaagcgttgaatgaagagggtgactanatgtggatatggcaatgaagcatataatcgccatgccttatgcgtgcgatatcggactaagtgtgcc

SEQ ID NO: 164393 - DNA, 261 bp, Glycine max
  unsure (1)..(261): unsure at all n locations
atcttacatgttagcanaaatggtactgtttcttctgtaataagcaatacactgaatgctactgccttctagtcttgactacgctatcatcataatgaacgctcgccaaaaaattacagattaaggaatcacttccacaactctaataagaatggcatgcctgacaattacacatacggtttttttaacaccagggaaaaaggttttccctctcttattatcatctccagctaagtatatactccacgctaaaattcatca

SEQ ID NO: 164394 - DNA, 425 bp, Glycine max
  unsure (1)..(425): unsure at all n locations
agctntacagcagattttagtaatgacccactaacctagaattaaaataacttaatgccattaacctagggaattaaaaaaacttaatggctagtgtaactgaaattgtggcaaccaaaagtcacccccaacagccaacaagtcagccaccatttggtctcccaaaaggctgatgcctaagttgccaattgggcccttattacaacttgaactaaacctaactaaagcccttttagttgattaacccaaaacatatttttggtcagccaactttacaaggattgggccattatttagacaaactaaacactctaaaattgaaacaaagtggtgtcatttagtcctcctccatttgggccatgatacaactcacaaccttggacttttctccttgaaacttgggcttgtattcaaacagtatggac

SEQ ID NO: 164395 - DNA, 421 bp, Glycine max
  unsure (1)..(421): unsure at all n locations
aggagacggaccattccaagtgttggataatatcaacgacaatgcctacaagattgacttgcctagtgagtataatgtaagtgccactttcaatgtgtctgatctatctctttttgatgcagatggaggagccttggatttgaggacaaatccttttcaagaaggagggagtgatgaggacataaccaaggaccatgaagcacttgaaggtcccatgaccagaggcagacttaaacaagcccaacacgtcatagagacaaggctggtcatttgtatagctgccattgatgatgattgaaggcccaagtggagaaagatgaaggcccataggcataggcactaccaagactactaattgttgctgaaggcccaaactaacttgaaggcccaagttaaataaagtntttagttataatctatt

SEQ ID NO: 164396 - DNA, 427 bp, Glycine max
agcttattctgattgtagggtcgtaggatatgataacaagcacatccaaacacttttaggaacttataatttaggattctgttgaacaatttttgataaggcacctcttgatcagaggatgatggaagacaattgataagatacacaacagaagtaacaacatggtcccaatactcaagagacataaaggcttgagataacatagtgagggcaatttcaactacatgtttgtgcttcctttccacaactccattctgatgatgagtgtggggacaaatcaatttgtgttgcacactaagttctacaagaaatttagtaaagggtatgtactcccccctcctagttagactcaatagcttttataggtaaattaaattgagttttaactaaagtgtgaaactgtttgaatagatcaagagtctcaaat

SEQ ID NO: 164397 - DNA, 432 bp, Glycine max
  unsure (1)..(432): unsure at all n locations
cttcttgtgttggatctagtggtggtcattgaaatgtttcttaatgaaatggtgaattgagtgatggatatgaaacaaaagagctttacagtgctggtttcgaatttgatgaagaagacaatcataagtttgtcagatacaagaaagatgagttgagtagagattttgagttcaagattggcatggatatttgcagcctacataagttcaaagaagctattgttgaccattctataatgaatgggatagaggttgtgtttcaaccaaatgaaaaagtcagggcaagggccaagtgcaaagagaaatgtgggtatgagatgttttgcagcaagatcgagaggagtcacacatacaggattaagacctgctaaacaaaacatcaccgtggaaggttntttagcaacaagaatgctaactctaaatggatgtcga

SEQ ID NO: 164398 - DNA, 423 bp, Glycine max
  unsure (1)..(423): unsure at all n locations
agcttatggtgattgggaagcacgttattctgttgttttccagatcggttccttcaccaagtatgtgtatatgtgtatatgtgtattaatttcgctgttctggttgttgttcgtattttgttttgtgccgaagaaaaagaagaagtagagatgagagtcgtcatcacggaaggggcaggacggacgaaatcagtgtcctatctttgctttcctcttatcttcgatgagaggtaagtaaagaggggcaactgtcataccctaatttcgtccggggaatattacttgatgacatgcaatgaatgaagtcccgagacgtctcanacattgaaaggaagcaggcttgcgtggttcgtgaaattccgtaatgtggcgaaaatcgaaaagatgtgttcttgcgcaatccgtgaatttccgttacttctt

SEQ ID NO: 164399 - DNA, 255 bp, Glycine max
  unsure (1)..(255): unsure at all n locations
agcttangctaaacatgtaaataaccttgtttattaacatttgggtgcgctggttgcaaaaacaaatagaatatttgagtatggttctgacctacaaaagaataatcacccccatcgctataaatcctttaataataacttatcacagggttaatttgtcactgataatcaccctatatatacggaatattctttaaaaccaagtttctaaaaaataaggtgaagtcctatctatatactgggggcgcattgcta

SEQ ID NO: 164400 - DNA, 325 bp, Glycine max
  unsure (1)..(325): unsure at all n locations
tanccctagangggatggaccttttaggtgttgatttattatcttaacgacgcctatatgttggacctcccataagagtatggagtcagcaccacttttaacagttctgatataattcctttttcaggtggagctgatatagacgaggaggaactaacacatttgaggtctcatcctcttccaagggaacgcgatgatgcaatcttgccaaggaagagaccactctctatagctatgagcacgcggctccaagaggattggactattactgcttaagaacgccctacgattctcatgaacctcatggtagatatctgagcccatg

SEQ ID NO: 164401 - DNA, 386 bp, Glycine max
agcttgctgcacggttatatggccttttttatattataactcacgtgggggaagttgcctataagttacagttaccaaaacggtctaagatacatcctgtttttcatgtctctttattgaaaaaagctattgggaattattctgtgttaggagaacttcccaaggaattagacgttggtcctgttgatgacatatatccagagaaggttattggctcaaggctgatcacacaggggggtgtctcaattcctgaaagccttattcaatggaagaataagtctagcgacgatgttacttgggaagaccatgttgtcataccaggacaatttctatattttagccttgtggacaaggctggatttaaggaaggtggtattgatagaaac

SEQ ID NO: 164402 - DNA, 317 bp, Glycine max
  unsure (1)..(317): unsure at all n locations
tccaagtggagtggaggacaactgaacagcacctcaataacggggataatttacttaaattattataatgtattccaccctcttaataaacaaagatcttttactagtgtcatatcaactaatatctttttattggtactaaccgggggattttacaaataattcagagattctactcaatcaactcaactataattggcattaggccaatgaaaggatggacttggnggtctgattacaactactttaattctctgagaaaaaactgaatagggggatcatcatcacgacattatgtagacttacatgccgtgtgc

SEQ ID NO: 164403 - DNA, 421 bp, Glycine max
agcttatgttgcccagggctagtctatctcatcatagaactcttgttcgaattacaacaactataatggtggaaatcaatttttcaactcaagtcgtggtgatggctgaaatttcttctatggtcgtcgtggaagtggccacaacaaagctcgctactccaatatgtagtgtcagattttccataaatatggacatgaagcttatttctattactacagacatgatgatgattatgttcccactcaacctatggattacccccaataaatctcaatctcagtcttcacccaaccccaatcagtatccaaatcagaaccctaattcttatctcaattagaattctaatcaaccacaacacaatcaacataattagtattctacttagtctatttacaacaattagtcagcacttgctcaaca

SEQ ID NO: 164404 - DNA, 447 bp, Glycine max
  unsure (1)..(447): unsure at all n locations
nttgatgcaacatttggagaggttaatgaaacaacgatatgatgcgctccatgagaggttggatcaaatggagaatagagatcataatgaagaagaaagaaggagaagagggaatgatggtgttcctagacaaaaccgaattgatggtattaaactcaacattcctccatttaaaggaaagaatgatccagagtcctacttggagtgggagatgaaaatagagcatgttttctcatgcaacaactatgaggaggaccaaaaggtgaagcttgccaccacggagttttccaactatgctcttgtgtggtggaacaagctacaaaaggagagagcaagaaatgaagagccaatggttgatacatggacagagatgaaaaagatcatgaggaagcgatatgtgccggctagttactcaagggacttgaaattcaagctccaaaaactaac

SEQ ID NO: 164405 - DNA, 430 bp, Glycine max
  unsure (1)..(430): unsure at all n locations
agcttcgacnatttggatcattcttttcatattagagattgttcttcttccttcaatcaagcaaaatagaatgggtttccgtttacctgctgttcgacgggcattgttcacggctagccaagcagcttcaaaatctgtacaagttccaaagggctatcttgcagtgtatgttggggagaaacaaaagcggtttgtggttcccgtatcatacttgaatcagccttcattccaagatcttttgtatcaagctgaggaagagtttggatatgatcatccctcgggtggcctcacaattccttgcagtgaagatgttttccaacatataacttctcacttgaatagagaccacaaatctcactgtgggagactcacatagattagtagacattttacactataggcatcttctcaacttgtaaagattaccaat

SEQ ID NO: 164406 - DNA, 313 bp, Glycine max
  unsure (1)..(313): unsure at all n locations
caccatctaanactcaagcntgaggaatgcatagcgcngtgntagggggtagtacctgaatacctataatagtggctatatagcgtcgtatgactctcaggaaacacaattcctaaagaaagtgactgacaatggatggacggcatacgcatgatgattnacacggagttgtcttacattccactatcacggataaatttggaagatttgngaaacgccaccttatcaaacaccaagtcgcccgcataaagccttcacatgtaacccaatctcgatatggcttaacagatatcacctagtatcattgtcaaat

SEQ ID NO: 164407 - DNA, 419 bp, Glycine max
  unsure (1)..(419): unsure at all n locations
agcttgcttctagtgttcttgagtcattgatccatcaagcttaggtaaataagttccattcttcatcccagacttaatttctcttcattttcttattttatcttctccagtaacttaaaagtgtcatttttactcatgaagggaaatctttgaaaattgaacattcttcattcttccttcaaatttttttcattttcatcaataggtaaggaggtctctccaactcttgaaccctatgcttgttgttaaacttccttaaacatgttgtcttgaaatttttgtgcttactgccatgttctagattcgtgaactgagctatttcccttgagtgttttatgccaaaaatgagttctttggttactaatacataggattagccttaaatttcacttanatcggagtttcctagtaaaatctac

SEQ ID NO: 164408 - DNA, 458 bp, Glycine max
  unsure (1)..(458): unsure at all n locations
cttaagcntgacatgacctgagggctgcacaagactgatcaaactctatttcttcatgaatcagcaaatccgtactaattgagttacagatgtccttattccaaacagcttgcccacaaattcaggaaaaaccttgagcttttaagccactcattattccaaaagaaaacttatattgggctccaagttgaaccatggatcaagcatcatgaactatgtgcacatgaaatgctcctggcctataacgatttaatgcctagaggcaagaggtgccaaaaagcacacacctcattaaggaaaaaagtgttatcactacaaaaaagacagcaccttgccatgtttgttaactacacatgattaacatccagagaaaaataacacttaggtgcaaatatatatatagacctttcaccctacagttaccatgcattggggtgttagttactactttattatgg

SEQ ID NO: 164409 - DNA, 395 bp, Glycine max
  unsure (1)..(395): unsure at all n locations
agcttgacacaggcgagagcnggcagatgtgtttacacatccccanangcgacaccgagtctgactatgctaggtgatcttaccgtccacaacacgagacttgatggtgcggtagtctatcatggcatcaataggcaccttgtaaagattggacaccaaacgccatataaggctgagagggataccagtgttattgtactataggtgggagtatgaacataggcgaacacaattgagggagggcgtgaaaagggcaatctatttctggccccgcatatctggaccgacattcaatagatcacattcctttaaattcattacactgccttagtgacggaccataaagtgaatgatcgaaagactttgttgcttgtttcaaacgacctccagccctt

SEQ ID NO: 164410 - DNA, 429 bp, Glycine max
  unsure (1)..(429): unsure at all n locations
agcnttgaacaatatactgggccgtgatttaactgtctctgggctcggcggccacgctcaacaaagttctttcgacacctactgtacgttgatttgaccaaggctgttatgggaatgttgcgacaatccttcaaaaccttattgatacattctgagaggttggttgacatgtggccatatcgacgtccttctctatcataagccatcgtccatttttcctttgaaatgcgatcaatccatgttgctatggctggacttagtttacgaaattcttctataatttgatcaaaaatgtgcttgctaggagtgtacgctgcataaaattagttatcaataacaacttctagtatatatggaagttaaataaacgcgaccattatatatgatatcttactcaacctctttacacatttctttatgtttggcgct

SEQ ID NO: 164411 - DNA, 332 bp, Glycine max
  unsure (1)..(332): unsure at all n locations
tcacctgaggcatgcaggcttatttgaggcgcctgcttcgcgctgttataangttctatttccgcatncgggagacgcacacgctgggaagattggccactctctgtcaccaaaagtgtccaaacaacagagcccacgtnacattacgcttcctattttcctattcttaattagaccctgtggctgtggctgtccgatcccaacacatcaaagtctgattatatgacagaaagaagaccccttttgctcatggagaagaacgagcccattgatttttcttctcattattacatgaagcctctggctgactctgaagaacctgattttgattc

SEQ ID NO: 164412 - DNA, 421 bp, Glycine max
  unsure (1)..(421): unsure at all n locations
agcttngggtaggaggtgtggtatattgtgttatataccaacctcgccaagcacatgagcatttatcggcatgtttgagtatttgcatactttcatatgctaatgagtaagtgatgatgtgcatgtgcacttgatagattttaagttatgcaacagcattatggtttgctctggcaaatatccctatgcagacggttcaaataaataaattaactgaaagatgccatgcaagacatacctttaggagatcaaagactttctcacatatgtatttgtgttgaatacttgctccacgttgctgcaacttgtcaggatggacacaaagggtggcctttctgtaagttttctttacagcggcagaagtaatgacgttcgtgagtgggattggctgccagccactatcacgcccaagaatctgaca

SEQ ID NO: 164413 - DNA, 373 bp, Glycine max
agtccgtatcggctttgtctcttactaaaaatacacctttgcatactgagcacaaaaagtgtttataaaatactattgggcttaacttctaagcgaaataagactttatatttaccggaacaactgggattatggaatatgttattagcaaaagaggaacatgctgaaaccaaaatgagctctctataagccccatatagtaatgccaacctgcgtggaattacttattttgggctgattataccaactcatctttattataaaaaaaaaatgatttctgaatatttgccagcagacatttactcagatatcataaaaaaagtggcgcagtacctgtgctgctcaacacaatgccttaattactgttataatt

SEQ ID NO: 164414 - DNA, 420 bp, Glycine max
  unsure (1)..(420): unsure at all n locations
agcttagttggtgtgttgattntagccttattttcactttgattattagtcaattcattcaaggaaactttcaaagaaaaacgtccgattgatttttttgattattttattattatttttttctagatattttgattattttattattatttggctttttttaatttaaccgaagttacaacgtgaacgatcggttggattttattttaatagtgattaaacaagattacaacacaaatgatcgattgaaattcattttatcaattattaggcgagataacgacttaaataaacagtaaaaagctttttaaaagcaaaagaaaagaaaatcgaaagtgaatgagatgaagaatgaaagcaaacaaaacaagaaatgaattgaaagtctctaattcgaacacttaccggttgaagaccgaa

SEQ ID NO: 164415 - DNA, 332 bp, Glycine max
gcctaggattttgtgaacctttgaggatcaccaagcgtagatcttggggttgatgagtcttatttgcaatgcatgtgttgcgctcttgcacacatggcacttgccgtgggtggcatgtattggagacgaattggcatgctcttgcatacgcgttacttacaaagtggcacataatggagatatggtggtgtgctcctttatatatgtcactcgccgcgggtggcatatactggagacgtattgtcgcgaattacaaagactcagcaagggaggacctcgagttttcgtcacgttcgaagaacaacagggaattgaagacctaattttggggt

SEQ ID NO: 164416 - DNA, 382 bp, Glycine max
agcttatccggagccccatgaattgcttgtcattcatgcatcctccaccatcgagtctggagccgaggcacttccgtaacgtttccgtgggtgatttcccaaagattttcaaccgttctttctccttcgatgttcattcttcatcgttcttcggtcttcaaccggttagttcccggaatcaaacttttcaattcattctatgtacccttggtggtccccatttgtttcacgtacttttattctcgcttcatattactttcggtaccccctttttgacgcgctctactcatttacttaactcattttctaccctaatcaaaaaattatattaatttccaccgaccatctgaattgtattatccgttactttctgtcaaattga

SEQ ID NO: 164417 - DNA, 425 bp, Glycine max
  unsure (1)..(425): unsure at all n locations
actgccattggcagttctattttatattatcatttntgcttggcgcgcttagcgcatagctgcgcttagcgtgtcaacgtgacgtttgagtttaaagcccatgcgcttagcctaacctcgcgctaagcccaacttgaagtttcaaattccagagaggatctagtgcttatcgctttatgcaacacataatntttctacaaaatgcacttaacctgagatgtaaggctctgtgcgtaaccaagcttcaacttacagagagtatgtcatgcttatcgcaacaagcgtgctaatcgcactttcaagcatttcaaaaacagtaagggattggcgcttagcgcatcctgcccctaatcccaactcgtaaaagtacaattctacaatggatatggngcttaactcacgacagcgtgcttagcgctgctaca

SEQ ID NO: 164418 - DNA, 400 bp, Glycine max
  unsure (1)..(400): unsure at all n locations
agctngtagggttaaagtctcacgattgttacgtgctcatgcaacaattgttagtcgtggttatatgagacatcttgccaaacaaagtcaggttagccataactcgcctgtgctttttcttctatgctatatgtagcaaagccattgattctgtcaagtttgatgagctggaaaatgaggtcgcaattatactatgccagttagagatgtattttccccctgctttctttgacatcatgattcacttgattgtgcatgtggttagagaaatcaaatgttgtggtcctgtttatctatggtagatgtacccggctgagtgatacattaagatcttaaaagggtatacaaagaatctaaagaagcatctatttttgagaggtacattgcagaagaagtcatt

SEQ ID NO: 164419 - DNA, 427 bp, Glycine max
agcttgtggctcaggtcaatggaacatggttgtacgataagcacaaggggaccctttttgtgacaattgcaaaagatggcaaaaataaagcctttgctatttcgagagtgatacagcgaaaacatgactcttcttcctccaaaatttaaaaaggcatgaaaccccacaacatggtttgtgtttgatttcagataggcgcgagtcaataaaaagtgcatacttaagacgtgatagaggataaatgacataaaattttgtgcatgtgttcaaaattcaacacattgcacaaaaattacatgaggaagttcaacaataatgtcatcaaaaaacttttttcttcatactaaatatcacttcattttgaattcacaatattgaaattgtatgtttataactacttagcatatgtaaggatagaacctatgtt

SEQ ID NO: 164420 - DNA, 461 bp, Glycine max
  unsure (1)..(461): unsure at all n locations
tgtagaatggctagacatgatacatgtcggngtttgtttttgctcaaagataaaaagggatgccccacattatttccatgacacaaatgcaaaaatgatgatttggaaattttatgcgaaactggtcatgcatgcacctatgcggacactcaagtgtcaaatttttatggccatgtgatgctatggctcaagattcatttcctctattttaatcaacccaatgtgtccaaaatatgttcttttatcaatttgtacattcatccgagtccatttcgggcgtccggggaaatttcacagcattcacccttcaggtgtagacacattntccaaaaattggttatgatcaatgaattttttcaaagaaaagttggaaatcgtctcttttcaaaagcatgttggtgtttcaacttgacaatttatatgttcctctttctacactcttcctacttgcccttttcttt

SEQ ID NO: 164421 - DNA, 420 bp, Glycine max
  unsure (1)..(420): unsure at all n locations
agcttattaattaatccactagggttgctttcagnggcggngatttagatcatttgtataagatctaagtttaaattttggtgaatcattaggtttggtctagtagtaataaacataaggtggtaggttttaatttcaacacaaccagtacaaaaaaataaagtttaaattttggtattgtcgttctatataaaaaattgtgcttatttaattttacttgtatgagagagaaatttttttttttaaagaagatcaaatgacttaagttattttataattttaaactcaatctatataaatttttataaaacttatctatttatttatttattaaaattgaaatgtataagttaattttaacttatgagataaatttaattcaatctacttttttttatttcatgatatatttcctttgta

SEQ ID NO: 164422 - DNA, 441 bp, Glycine max
  unsure (1)..(441): unsure at all n locations
taacagtgaaaagttaactgtaagatcaccttgtccatttttttaacatttagatctaaattntaattnttatctttctcgaaatgtcagtccttgaaatttactttcaagctgaaatagatattaatccaatttgatgaaagtatcgactatagagtcatagagtcctgcgcattaatttaaactagagatcgcagtgaatttaaattaaatgctgagatgtggcaaactgtgagtctcattgaacttgttggacctagtgttcatagattcatagttccgtcgatgattgagaaagtgaacatggtctgtagcaagaacaacagaacagaaccaaccatacatacataacatagctggtctattacttaaagacaaaaggcactaacacaagggcttcatctttctgtttgtgtggttgtaaagtcaacgtcaccaact

SEQ ID NO: 164423 - DNA, 379 bp, Glycine max
  unsure (1)..(379): unsure at all n locations
agcttgatgtcactagatatgatggctcttaccccntaggatggatattcaaaattacacaatttttttaatatcatcacacccctgaccatgaatggctcactatcgtctccttctacatggatggttgtgccttggtctggtaccaatggatggccgacaatggccaactctcttcctgggcaggttgcctccatgccctacaaacgatgttcgcgtcctcacaatatgaggatcccaccggcaccctgtttaaattgacacagtgaaccacagttcaagctattctttcagattttgcggatgttgcaaatcgcaaggtgggccatcctccacattttcttcttagctgcttcatttcgaggttgaatcccgacat

SEQ ID NO: 164424 - DNA, 393 bp, Glycine max
aaatctaaataggacggcaatgcggaaactatctgagaagacctataaagccagaaaaagagaaaatacatcgatcaatatcccactcggaatgtctccttacttcaattcaacaattcatgctaataagaaaaatactcgaattatagggtgcacactcgacacaatagcatatcaatatcacaacaattgaatctcaacgatgaaggcgagcacaattgaatttcaaacgacataggaaattttcacgacaatccaacggctaatgaaaccgggatcgtaatttcaccgacatagctctagggttttgcgggaaacgaaaagactatgatgcgaagggtattactctcagctcagacatgatatcgaaattccagaggcgagaatgctcat

SEQ ID NO: 164425 - DNA, 430 bp, Glycine max
  unsure (1)..(430): unsure at all n locations
agcttgtctcagcgtttatgcgagacggagaccaacatgctagctatcatcgccaagtaccaagaagagttaggtctagccgcggcccacgagcataggattgcggacgaatatgcccaagtatacgcggaaaaagaggctagaggaagggtgatcgactctttacaccaagaggcaaccatgtggatggatcggtttgctcttaccttgaacgggagtcaagaacttccccgattgttagccaaggccaaagcgatggcagacacctactccgcccccgaagagattcacgggcttctcggctattgtcagcatatgatagacttaatggcccacataattagaaatcgttaggaaacttgtatggtctctcagaccttgactagatatgacttcctttntgaaataaaatgagttggtcccatgtttc

SEQ ID NO: 164426 - DNA, 446 bp, Glycine max
  unsure (1)..(446): unsure at all n locations
ctaagctntttatccaaggctcatcttggtggtgaagctccttcttccattgtttattccttaatggatggcgcctcctctcacctatnttcctttgtcttccgctgcatctccatggtggaaaatcaccattaaaggaccccattgaagctctaagatccagcctccatagaagccccacaagcaagcttccatcaataacttttcactcggatgtccgatcaggcgaataatatatcgagacacccgaaattgactaaaggaagttgtcgagaaattcaaatggtcacaacttttcactcggatttccgattcaggcgcataatatatcgacacgctcgaaattgaaccacggaagctctcaagagatctaaatggtgataactttctactctgatgtccaattccggcatataattattctagacgcttgaaattgaaaactg

SEQ ID NO: 164427 - DNA, 428 bp, Glycine max
agcttaaacattcaacttcgagcgtctctatatattacgagtctcaatcaaacatccgagaaaaaagttattgtcgtttgaatttgctcagaggttcaacattcaatttcgagcgtctcgttatattacaggactcaatcagacattcgagtaaaaagttattgtcgtttgaattggcttagagcttcaacattcaatttcgagcgtctcaatatatgacgggactcaatcagacatccgagtaaaaagttattggcgtttgaattggctcagagcttccacattcaatttcgagcgtctcgatatattacgggactcaatcagacatccgagtaaaaagttattgtcgtttgaattggctcagagcttcaacattcaatatcgagccgttcgatatattacgggactcaatcagacatccgagtaaa

SEQ ID NO: 164428 - DNA, 275 bp, Glycine max
  unsure (1)..(275): unsure at all n locations
accgtctaaggcaatacatgctgagccatactacctggttggagtccaagatggagccatttaagtatatggctgaaaagcctgcccttacgggatagatcgctcaacggcacgtgttgctatacgaatttgacatcgtctatgtcaccctcaatgcgataaaaggaaacaccttggcataatatatgggcccagcaactccctcaatgaatatcaacccatgcatcctatgnttccagatgaagacatcttggccctatctcatcgaacagctg

SEQ ID NO: 164429 - DNA, 428 bp, Glycine max
  unsure (1)..(428): unsure at all n locations
agcttatccagcgcaagttgttgcagccctgatacttacactgctatataaacatgaaggctgcacgggtttttcaccaagtcagagattaaagagttattttgtgagttttgtgacttgagtgttttgtgagccaccttgatgttaccctaacatcaagtgttggacctgagtgtgcagagttgatctctattgttcagagagcaatctctggtgtgtctttgatttgtttgtaaacacgggtgagtgattgaaagggagtgagaggggttctcatatctaagagtggctcttangtagaagttgcatgggtagtgattaggtgagaaggttgtatacagtggctggtagatcttcgaactaatactattttagtggatctcctccctggcttggtagcccncagatgtaggtgacgttgcaccgaa

SEQ ID NO: 164430 - DNA, 355 bp, Glycine max
aaaaactaagcccgccatcacctccggatataatatagcattttgtataccataaatcatgcttataatgacaatttagcattagttccaatagaatcaatgcttaaaatacacacccactataaattttttacatcctatatctaaaatgcactgttgataaatttccatgcataactgccgaaaccaaatcaaaagcttgagcataaaaatgattcaattgcacatctcagaaatgaaaaactgaattcaaaaatataatccaacactctgatgcatgacaaatctacactccattagaaaaaaccactctttgaaaaaagagaaaaccaaaccattaacacccaaattttta

SEQ ID NO: 164431 - DNA, 429 bp, Glycine max
agcttgaagaataactacccactaatagcatgttcctaaaaataagccatgaacgcaaacagagataacaaagaacctaaaacttcctaactgacaccttaagactaggaaaacaataacaaataaaaataacataatcagaatgtggacatgttttagtcctaaagcatgttcttaacatgtttcaatctcgccttctctctgtatgtgccagataggttgaattctgttaaaaaacgagactttgttattgttggttttgtggaggaaattataaaaaacagaggagagaagagagacaatgcgtatgcagaggaaatagaattattctattctgattcaaattgttctcagcagcgatacaataaataacaaaagataaactaattagataacaagatattagcaaaacagaatattataactaac

SEQ ID NO: 164432 - DNA, 426 bp, Glycine max
  unsure (1)..(426): unsure at all n locations
agcttcctttataacaaagagaagagaattatgaaggattgaagaaatacaagtagtggggatgtctcctccacctttagaacctcacaatcactcacagactcatctcatgctctcaggatggcttcctcttcatgcttcattctcttccagtcttcgcacaacaaaagctctcaaaactctctagaacttggacctttctctctctagaaatctctaaacatgcaaaagcttcgatacaaaatgggagtactaagtacttattacctatatttaacaaaaagtaattacaacactacaaaataaccataaagggaaggagttagatacaattntcacagatttcttacacaaaagttagtcgtattcatcgactaacatatacttgggagggtgagctccatgccaaaaccctgcctcactaaa

SEQ ID NO: 164433 - DNA, 421 bp, Glycine max
tgtcaaggaagctatctattctataatagaatcatgtgtttctactgttgtaactatgatgaatgagagtcttgtgagacacaactcacagttcaacttctctccctttttctttcttcaattccgtgccccccctctctctttctctccctctttcttttcctccattgaagcatcctctccaaactccttctttcatgacttatttcttaatggatggcgcctcctctcacctctattcctttgtcttccgctgcatctccatggtggaaaatcaccattaaaggaccgccatgaagctcaaagatccagcctccatagaagccccacaagcaaagctccatcaagtggtaatcagagcacaagagctctaagtaggtgctgcttacacctccattaatatttttgccttaccttctct

SEQ ID NO: 164434 - DNA, 422 bp, Glycine max
agcttgtaaccactctagtcataccaaagccttatccaatctactcatagcaccacctccatatcactatctcccttagcttctctaatgtagtgattgagccaagcctattatgagtacccctagtcacgttatcatttgcactcccctttgtatggctacatgttgcctcctgttcgtcattttcacatttcctcatctccacatggtttgggccccttttagtcttacacgacccattttgtaaactatcccaatctcctttaccgtgaatatacacaatataatggttccgaagtccgagtggcgtcctacacctactgtgagctctggaattggaaatggtgggtagtagttcatgttaactacacacccaagattaatttttgagtcatctagtgacaccccaagcttacttatca

SEQ ID NO: 164435 - DNA, 391 bp, Glycine max
tatagcttccttcctctcatgtaaccctcgtcagacttgttaacatatatatatatatatatatatatatatatatatatatgggtttgctaatgcactcacaccattttatctagtatgagtacaatatcgatcaacaacacaattttcaactaaaatatcaatcacctcttttattttcaaaattagatgcatggatataataccaattaaatctctaactttctaagaaaataaaaaactcatttctctctcctcccccactcctttgactcttctctcatgtctcacactctcctttctaagaaaccttctatctgatcaccaagataggctctgtcatttcttactgtccatggcagctatgcaccagtgcgccctctatcacata

SEQ ID NO: 164436 - DNA, 424 bp, Glycine max
agcttaaacaaaatatttacaatttttcttgtgacacggcagccctgggcaaccacaggatttagggagaaacatctctatgtggatgctgcttgagagagtgagatttaccttagatggtcttgaatgtaacaaaattggtgtcagctatgaagcttttaatcaacaaccaaacttttgctcttctcccttttggacctgcttgcataatcaattgtggaattatcgggaggttggtacttcaacaataatatttttcttctttaatacttattctcatcttacttttttggtttcatttttgtcattatcttttcacttctatttttgccagatggattgcgagaataacttcattgatagccattgagaatttgaaagaaactttcttgttcttaacaggctgacctgaatcgaataagta

SEQ ID NO: 164437 - DNA, 425 bp, Glycine max
  unsure (1)..(425): unsure at all n locations
agcttaagctccttcaactgcacaaggctcttaatatttgaagagtatccttgtggaaccttcacccgacgaagacactgacaaaaacttatattcttcttcttggacaaagtatggcaggctgggggcaagtaaattttcttcccatcaaaccttggatgcaactgtgatcatatacccatatcagctagatcttgacagatattcaagccatccttcgtcttgccttgaatgttaaggagcgttccaatcacactgtcacaaacatttttctccacatgcataacatcaatacaatgtctaacctcaagatcacaccagtaaggaagatcaaagaaaatgaacctccncttccatatgncactctgactattatccttcttttgggtcttcccaaatacaatattcacgtgttgaacccgttg

SEQ ID NO: 164438 - DNA, 372 bp, Glycine max
agcttctcaagcaagcttccatgaagtggtatcagagcaaaagagcttcaagtaggtgctccttaaacctccattaagtttcagctttaccttctcctccattggtgcttcttcatttttctctatgtatctcctcacatgtcttgtgctgaatgttgttaagattaatttttagaaattccaccgattaaacttgctatagaagctagatttgattttctatggttcaaatttcttgtttttgttcttgaaccatgaattgtgttgagtttacgtccctttaaatttggctactatttttgggctgaaacctaaccacaaattatacataacattaagtagaagaaacctcaaaaccatagtgacctgtcc

SEQ ID NO: 164439 - DNA, 419 bp, Glycine max
agcttattttctggaaaattccttccctagttggtgttttgattggtattaagggtggtgtttggtcttggatgtgcatcgagtggattttgtggccgatttggggatggcctttgtggatgattgggtgttcttggctggtagggtggtgggtaatgagaatgattgatattggttgagtattgacattattgggctaatgggaaatttggccatgtaggaatgccagccagagcatgggtttctcactccttcttattctctccatttgccctaggcttcctattcatcaaagcaggataatcaaatttttctcttctcaaacccacttcgatcctttcattggtgaaaactaaatcgacaaagcttgaaggcatgtaacccaccatcttctcatagtacaacaccggtaacgtgtc

SEQ ID NO: 164440 - DNA, 430 bp, Glycine max
tatgcatggaaaatgtaattatgaaagtgagatgccctaagaaacaccatttcctagttaaccatgcattaggtaccatgttcaattattttgtttttaagtgaaatgggtttatgatcccaacatggttggctcgtggtgcctaacacatgaaactaagaatgtagtgtgaagtttcacgcttccccctttttttgtttttgttttgtagaggaaaacgcaaggatgagcaaacatgaaaacaaatggtatgcaattttgcagatcaaaaagtttgttgaacgcatatgcatgatgatgccatgactcatgcaaaatgtgatgccggaatatgataacggacaaatgcaggatatgtccattatgatgttatgaagagatgcttatgcgatgcatgatatgaatgcattttacggacacgagagccccg

SEQ ID NO: 164441 - DNA, 423 bp, Glycine max
agcttcattgcctaacaggtcaacttctatcagcaagccccaagagactcagcataaggatgcacaaaccaaagttgcgtatgtaaaaaaattgtatgaccaagtgaaggtgcaaattgcaaagaagaatgaaagctatgccaagcaagcccacaagaaaaggaaggaagtggtacttgaacccggtgatgatcttggacatttgaggacaaatgttttccaagaaggagggaatgatgagaatcctgaaattggccatatacaggctaaaggcccaagtggagaagggcgaaggcccaagtggagaaggattaagcccccgagtggagaatgatgaatgtctctatgtagaatgatgaaggtccagacgcagacacactatcaagactattaattgatgctgaacgcccataataaatatgt

SEQ ID NO: 164442 - DNA, 425 bp, Glycine max
  unsure (1)..(425): unsure at all n locations
agcttgggagtggtcattgacttaggtccacaggttatttcaaaatatcaattgcaaacttgagtcttgatgaccacattgggatctatttgttcacagccacaattgtgtcggcaatgtactaggggtttggttttggagtcacaatggctacattgcgaccatttgtccacaaccacaattattttaggttgttgttctgggagtaatctatgcttgttgatatttgatgcaaacctttgctatgcatttcattgaggtgatacgatacgatacaataaccccgattggagaacaatactaaagtacctgnggaaatgcatccgtgttttgtcctgttttttaatatcaaagatcgtgaaaaagcctcaagtgttaccaccactccagttcanaaccttgcaaattacatttaacaatgctat

SEQ ID NO: 164443 - DNA, 410 bp, Glycine max
  unsure (1)..(410): unsure at all n locations
tgtttcacaccatagatggatntatttagttggcaaatcatatactttgagtcacctgatacaaagttctctagttacatcatataaattgtttcttcaatgtcaccatttagaaatgcagtcttaacatcgatctgatatagctctaaatcataatgagctaccaatgtcattattgttctaaaagaatcctttgaagatactggagaaaaggtttcttcatagtcaatgccttcctttngtgaatgtatgaatacatgacttttgatgatgccaaagaagaatcaaacaatgccgcttcaaaggataatcatttgcttcaagattaattcaagaatgtttcaacaaacaaagccttgtgtcaagattcactaaagatcaagccttgcctcaaaacacagagtttcaaa

SEQ ID NO: 164444 - DNA, 427 bp, Glycine max
  unsure (1)..(427): unsure at all n locations
agcttgnncctccatgtactaaggacttggttactgtgacaacagccacagtttgtggcacaggaaccagcttgatcttccaccacagaataactccaaagctgcctccaccacctcctcttatagcccaaaatagatcctctcccatggcttttctatcaagaaccctccctttagcatcaacaattctagcatctagaacattgtcagcaccaaggccatactttctgatcatggaaccatatgcacctactgtgatgtgccctccaatccccaaggttgtgcaaaggcctgtagggaagccatgaactgcacttctctctgatattctgtagtaaacttaaccaatagcggcaccggcttggatccaagccgtgtatcgcgcaatatcaacattcactgcacgaagtttggccaagtctaggat

SEQ ID NO: 164445 - DNA, 422 bp, Glycine max
  unsure (1)..(422): unsure at all n locations
agctngctggtatggatagcttctctagataataccatgaggttaaagttactgatgattatgtatttgttatgtcaccaacattgcaaatccaagttagtatatatactttttgtctttcatagacatataaagaaaattcctttgtatctatgacttgacagccagatgtttaatgatattaattctacttgttctactaacgggaaaaggtgaagaattctggtcattttggggttcatgctctcagtgaagttgcttcacacttagctccagattatgttgagcatcatggacttaaatctattcctaaatcagtggctcatggttatactgcttcaggatatggatttattcaacacatgccttatgcttacattcatgaatttaccagaacttccatggctggaaaaatttgacaa

SEQ ID NO: 164446 - DNA, 431 bp, Glycine max
  unsure (1)..(431): unsure at all n locations
agctttcttcctatttatatctattgttgtttatattaatggtaataagacttgaatttagaatctcataaattattcaaatattttattactagattaatcttgggtaatgtatctacatttatatagacatgtacaaattatgcctttcaatattttttaatgtgataaacaattataataagcaaacaagttgattattttgttgcaaactggagtttaaaagtagtcattctttcaaacttcaaattttgaactgcaaaaaacataatcatgtccttctggttatcattttgtgaatagtgattcttataagaaatttatttagaaaaatggcattgaaatcgggaatataattataaaaaaaaatatttggatttttatctttttgttgattntaatatattttaccttatttaaaacaaaaatga

SEQ ID NO: 164447 - DNA, 462 bp, Glycine max
tccaacttcttggcagaaccttcctgcaccaaccaagttctgtccacacccacaagatattaccgtatcacaaatatttaagaaaaaaaatctttcaaatcctcctctaatagtgaattctctgtagcactttatgcaaatacatcttccaagttctaagtcagattctagaagaaatgccatgatattgttcacagtaataaatatccagagtgagaagaccacttatcaagcatctttgaatgctaataatactgctactgtttaccaaaaaacacgaagagcaaatccatactcatcctttgtatatgagtatttccttatgtaagggtcttatgtgtcaggaaacaaacctgagttgatcactcgacttccaatcatattgaatgactaaacttgaccaaaccacgatattatattgtcctggaatctgttggtgtcttaattagtgctatcagatgc

SEQ ID NO: 164448 - DNA, 301 bp, Glycine max
agcttcttttatttattgctatgtatcttttgctttaaagaagttaatttggaatggcctttgagataatcatggtaagggtgcattggtaatcccaaaaagagagagtgaaagtttaattggggaatagtctttgtatcttaattcaacccccccccccttcttaagttaactgaggccatttttccaacatcctattcttgataacgcacttcactctaaaaagacaaactttccggaatgataaaatgaggtcgcatgaacgtcttgaaacacaaccaatcaacagctgttttttttt

SEQ ID NO: 164449 - DNA, 425 bp, Glycine max
agcttcttatccaaggctcatcttggtggtgaagctccttcttccatggcttattccctaatggatggcgcctcctctcacctcttctcgtttgtcttccgctgcatctccatggtggaaaatcaccattaaaggacctcattgaagctcaaagatccagcctccatagaagccccacaagcaagcttccatcaagtggtaatcagagcacaagagcttcaagtaggtgctccttaaacctccattaatttttttctttaccttctcttccattgttgtttattcattttttctccatgtatctcctcacatgtcttgtgctaaatgtttttaacatgattctttagagtttccaccgattaaacttgctatagaagctagaattgattttctatggttcaaaattcttgttcttgttcttgaac

SEQ ID NO: 164450 - DNA, 439 bp, Glycine max
tgctaagcctaattccacatatttgataaatagagatattattgcgcttagcattacagggcacgcttagcgcacaacaaaaccaaaaaattctaagtgtctaagaacacattactcccttaacgcacagacgtgcttagcgagttcataagcaattgaactttcaaccaaagaagatgaacgcgcttatcgggacatggtcacgcttagcgagttcatctggaaatccagatgttcaacgaaaatgatgaactcgcttagcgcagcaagacgcttaacgcgctcatcgcgatttccagaaaaagcaggggcttctcatccctccacttacgcccctattaggccatttaaccctaatcaaaacaagcacattgtatccacaatagatccctgattcaagtctactaacaaataacctaatagaactaagtattaacag

SEQ ID NO: 164451 - DNA, 424 bp, Glycine max
agcttgcaccatattactagctgtgtgcatgatatcattaaaaagaccaaatctcgttcaagaaaatagctctatttcgcctccaccagacaagatccaacaacacactcaagagagctctccattgatgtccctagaccaaaggagaatcagataaatttatctccaaccaccttctccaatccgagaatgtatagaaggcatcactatattatcttccaatataacaattccacacctacttacactcaatgcagtctcagaacaaatgcaaaagtgtctcaactttagtttgaccaaccaaccttgtaatgccctgaaatattactaattataaatcaatatttacttgaatttatcgtgttatttgactatatgggtgactttaatgagttgaggtatgacttcaattagtcatgtgtga

SEQ ID NO: 164452 - DNA, 444 bp, Glycine max
tctaggactctaacacctgctcagcagctgtattggctgttatgtataatacaggttttaatacatgctttacacatatacatgtatatataagatgatgagaatcctgaaactggtcaaatacaggctaaaggcccaagtggagaacgacgaaagcccaagtggagaacgataaagctcccgagtggagaaggatgaacgcctataggcagagacactatcaagactattaattgttactgaaggcccaaactaatttaaaggcccaaactaaatatgtttttagttataatttttatttattgtaattttggtccaaactgtttataaggtccatgtctaattttatcttttcgttacaaacactataaatattggtttctattttcaataaatagaattctgcatttgataaatttgcgagagttctctctgagtccttgt

SEQ ID NO: 164453 - DNA, 500 bp, Glycine max
  unsure (1)..(500): unsure at all n locations
ggcatgcannagcttcatggggtgaagtcagagaagtgtattcatatgtatnngttttgatcgatacacacaagcatggatatnaaaaaaggatcgaatggacaacgatatggaacttcatagaatatgaaatcacagaaaccactctcatagaattcatagagggaaangggttgaattcacagaaatcaacgaaatcacagaattcatagaagatcatagggttccaagacctcaacgattcacagaatcaacgaaataggcttattcatagaatcaaagaaaanaacctaatcaacgataagtatgaaaaggtttttttcaaaaacctgagtagcacatgtgatttttctcaaaacatgtttaccaaagagtttttactctttggtaatcgattatcagattattgtaatcgattaccagtagcaaaacggatttgaaaaagttttcaaactgaatctacaacgttccaattaatttcanaaagctgttatcgatta

SEQ ID NO: 164454 - DNA, 418 bp, Glycine max
  unsure (1)..(418): unsure at all n locations
agcttnataagtgagagcaggttttttttctccctaagagtcctctcacgaggcggaggtcgagccatgttttcagtataaaaattagtagtggaatgctgaaaatcacaatattcactatcatcctcaagagaatgctcactctgcacataatgactaggatgcacagtattcctaattaaactatgaaaggatttatttatctcaagagcaatgggtagtaaatcacctatatagcccctagttttgcactatattcagcatataatgtgtttcttatcacgcacctaacaagggggtaaaactacaactatacttaaaccatatcaaaatgagcgtaaatgttgtgaggaacaccctaaaatcatgataggatatcgcaaagatttcttacataattccagtctacctatggaac

SEQ ID NO: 164455 - DNA, 406 bp, Glycine max
  unsure (1)..(406): unsure at all n locations
agctatctagctattcattggtgtattttgatatacctttggtgctctaaaatgtgggaatgtgctcaaatatgtggggcaattttggtttgttttcttgcttgattgggttgaattgggggtttgtatgggatggccctacgcctataaagcattctgaagcaatgggacatgccacattgtccccgttctcttgctattgatacctaaacgcgcgcccaccaagtgttcggtgaaatgcctcaatggcattagcgcgtgacttttgtaaggaaacaacccatggnngcattttgtgttgcacatattttctattttttgggacatgcattcattcccaaaaaggctagaataattgccccacatatatcctacgcctcggaaccaagtttttatgcaaagacac

SEQ ID NO: 164456 - DNA, 459 bp, Glycine max
  unsure (1)..(459): unsure at all n locations
tctcccncaattntctataaatagggggagaagtgttttgataaagggttcagccccttatgcacttctctcgctttcgaatttgcttggaaaaattgtttccgtgaagaaaatccaagccgaggcgcttccgaaacgtttccgtaacgtttccgtgaggaatttcgtgaaggtttcgaccgttcttcgacgctcttcattcgttcttcatcgttcttcgatcttcaacgggtaagtacctcgaaccaagcttttcgattcattctatgtactcgtggtggtccacattgtgttttgtgtatatttattctcgtttcattcactttttatacccccttttgacgtgcttaagtcattttatttaagtcatttctcgcttaacctacaaataaaactaaattccatcgatcgtttgaattgtattatccgttaactttcggtaaaatgaatttcgaccgt

SEQ ID NO: 164457 - DNA, 404 bp, Glycine max
agcttgaagatagagaatactaaaaaggaattatattgaaaaattgactatgagcatatacagttatgctctatttattgagcttattaacaaattctaacaaagtaactgatcctaacggaatggaaagtaacacttaactaattacttctctcttaactaccaataacatcctgtaatggagcacgttcaataaggttggtagctctaaaatactaggttacacctcctacccctcacatatatactaataataaaaaaaataaaaaatcaaaattaattaaaagtttttaaaacacatttaaataaaaacctttcaaaaggataaaagactcacatttatttttttaacatcataataaaactcgcctaaataaataataaaccatctcgtctaaaataag

SEQ ID NO: 164458 - DNA, 424 bp, Glycine max
  unsure (1)..(424): unsure at all n locations
gctacactatanaatactcacagctgctctccaagaacaatgtctgagaggtagcacatcttcaatagcttctangacacggcacataaaatgaatacatgaactagtaatcctccacagccttaacctcaatgtgtgtcccatgattattcttcaacttaaacatcacttgcattgctccaaggttcatcttatctgccacaacatgaaacacatgcttccacggctcctttgcattccttgtcgctgaattgaccacaacagatgcggcaacaacattatcagagaacacggcatactggtacaaggtaggatctctaacttctggaggaaccggcttctccctaaatgaatacttcttaggaagggcaatcctctcttccatcaacctcattgagagacaatgcaagctcttcggaatcga

SEQ ID NO: 164459 - DNA, 362 bp, Glycine max
tcaagcttgcacgtatcagtcaagtgttttgaccatgtcggagccaaagcgctcatcgataatgggtcctgtttaaacgtgatgcccaagagcactttggagaaattaccattcaatgcttcccacttaaagccgagttcaatggtggttcgtgccttcgacggcacccgtcgagaggttaggggagagatcgatctccccgtacagataggccctcacacctgtcaagtcaccttccaaataatggatattaaccccccctacagctgtctgttggggcgcccgtggatccactcagtgggagttgttccctctacactccaccaacaagtgaaattcctattggaggggcatttggtcat

SEQ ID NO: 164460 - DNA, 395 bp, Glycine max
ctataaaactcagctttatcgaagttctgtctattactctacattgcttcatctctcaacgagctggcgaagaagaatgaggcattcacctgcggtgaataacaagagcatgcctttgctttgctcaaagaaaagcctactaaggcacctggtctagctcttcctgacttttctaaaacttttgagctctaatgtgatgcctctggagtgggagttggagctgtattgttacaaggcgggcaccctatcgcttattttagtgaaaaacttcatagtgcctccctcaactaccccacctatgataaagagctttatgccttaataagagccctcccaacttgggaacattaccttgtttccaaggaatgtggcattcatagcgatcatcaatcact

SEQ ID NO: 164461 - DNA, 428 bp, Glycine max
  unsure (1)..(428): unsure at all n locations
agcttggaatcntttgattcttgaccaagggagtgaacttgtatggcgatgatgtcaatgatgaggctccaatggacaagatacctgatagggaagaagagtttggtgcagaaaaagaagaggggaggcaataggagaaggcattgccatattttttggacaattgaccaagcatggagattttgtcattggctagacctatgatacctgatgaccttccaaacaagccttgattgtcttgaccacaaccatacacaaaacctgatgatggtgcctctgaaggggttaaggttagcacatcttgactcaaatatccaattgagaaagaagtgtcaccatagcttgctttgtagacacaagcaccagttgcatttgagcaacctggagcattcagtgtggagcttttgagagaggaacactgagatgat

SEQ ID NO: 164462 - DNA, 463 bp, Glycine max
tataacagaaacttagtacccatatttcttgttaaggcttgttgcacgagctgtggcagcctttccaccaccatattgtgacacaaattcatctttgacacgctctagaaaagccatgggtaactgtcttccaattgattcatctgcaacaacactatatgctgcaaatttccaaaagttcgatattttagaacactaccaaactcaaaaaaaatttacggttcacctctacaaaaacagtatcatgtgataaaattattacttaaaagaaaaccaataaatacttagttatcaatcttagatagcagcactttgcagcaagccccataacagctatagctagatgatgaatagttgaatgaccaccattctgaagattctagatacaaaataaatatctttactacatatatgcatgttcaattaacgaacttatctaactttcatatattcaattgatatt

SEQ ID NO: 164463 - DNA, 370 bp, Glycine max
agcttggctaagaaaataaagaggaaccataatgttgagaagcatacagacagcaacagaaaaacaagagagaacagatgggagagtaaactaatattcaaggttttaaaaactatctgcaaccacaattgcagctacaacatcaagatttttggagtctccccaccagtatggtgaccgcatcaacatatttgtctgcaatataaaaatcgcaacaaaactacaactgcaacctcgagtgcaatctaaaaacattgcgaatattgattcaacatgtgaaatttgagttttcacactgtgtcacaactctcaaagtaaccaagaatggctcttcaccacttatagcactttggtttttaacttcaaacac

SEQ ID NO: 164464 - DNA, 432 bp, Glycine max
agcttgttggatatggggtacccgtcatatgttgttctatgtggcgatcgggcgatggtgcaaatcaactctcccacatccacaaatcaaacatgaacccaccatccccagttgcccaccttcaactgagctcatgtactcctacatagcccttatccttgttcctctcagcacctggtccccatcaacccctccaagcttccacaatatccaagcaatttaattcccactatcataaactaccctaaaccaagaaaacagggcaaaggcagaaaactctgcccaaaacacattcacatattaccactttccttactcaaatatcccagtaacattctctttgttccgattcgttaaccgctggatcaacttgaaaattttactggagattactagtacataagtctacattctgaccgctgggatctgcta

SEQ ID NO: 164465 - DNA, 295 bp, Glycine max
acattactgctctgcttctaccatgtgctaaaagttttatttcttcgtcctgccacaccattctgatccggagaaccacgcatagcgccttgggcaacaaccccatgttcttgaagaaatctcccaaacgaacctggagcttgtccactctctgtgtatccaccatagcactccccacctctatgtgatatcacgaacttaatcttgtttccacattgtgtttcaacttcaactctcaaaactataaaggcttctacagctccattcctagaatgaaccaatgtcacacacattt

SEQ ID NO: 164466 - DNA, 427 bp, Glycine max
agcttcttcaaggatggttgctcgattcgtcgtttatgttgtataatgctcatacctaggtccctttggaaaaggctcacacttgtcgtgtttgtgtcgcttgttcgacctatgcgagttggtccttgtgctaccttcccttttgtcacatttatgttcaacctatcgaacttcatttcaaaacctcaacatttcttccatctgaatgtaccattggctcgctctcgtaactcatccatgttgttagaaggtttcttgcatagactgtcgacaaacttgctaggtcatagggccagcaacatggaatgtagcgccacctcaagattgagattcctgatttcgaaaatagccaatcgaacctgcccataaatttttagagtgactcatcatgtgtcagtcataaactagccaaagtagcaaaagtcag

SEQ ID NO: 164467 - DNA, 238 bp, Glycine max
  unsure (1)..(238): unsure at all n locations
agcttgtgttgaatgtatattgttgtgattgaannccanaacaccattggtcccggtttttcggccattcttaccctcaccttggaattttgagcctaattcatgcgtgtgatctagcccataacatgttctaaatcaatatcgagaagcagtctcgctgtcgaactctcttttttgttttctaagttccctatttgatggctatgatgaacttgagttgtggtgcggagttgtgaat

SEQ ID NO: 164468 - DNA, 339 bp, Glycine max
agcttgcataagacactagagatggatacatgatgatgatgaaagacactataggaagatgctacgcgctgattacctatacttgacggatcatacttattccatgaccttataaccattagttgaaagagttagatacattttactcgagtttgatactctgatagagagaattatgactgaataacgccttacacaaattgcatgggaagattgttctgaacgcccttaaaataattgaatgtgactaattgacgtgagatgctaaactatttacaaagtgttgctccaaggactgatgcagatttaaatggaacatatccctcttgattgattcaa

SEQ ID NO: 164469 - DNA, 425 bp, Glycine max
agcttggactcaaagagaaacttagaatgactctagagtagagtaaaaaaactaaaaaaaaaaaagactcataaaaaaaaagttatggcatttgttatcacactaattttcaactgaaatttcggaactaagattgatataaaataggcagtacttatagaataaattttgagccaaaacaataagcacacttccctttcaccttttttttctggatactgatttttctgccaacttgtgtgatatttcgtattttttccttttatccaaatcacttttttttctaacctttttccagatgtctataaaattcagtaaaaagttcagctcaaaatgtgcagtgaccaactctagtaattgttacaagttcgtacgtctcatcgtctagcactagcgatgtcagactttgaatttatttcagcatg

SEQ ID NO: 164470 - DNA, 312 bp, Glycine max
agcttataataccaaatatacgataatgttaccgggccaaaggcaagcggtccagtcttgcgccaatttgatcatattgttccattaggtgcctcggatttgctaaaaaggtagcaattgcggcaaattcacttgccgcatctttatcatcattttatttcaaggcgcaggaacaaataatattgacaacgtgtgcttaaattaccacaccagctggatattattgtctttgcaaaatgctatccactctgcacccggtgatttatcagttattatgtaattaatatgactaaaatcagctaactggacaaa

SEQ ID NO: 164471 - DNA, 417 bp, Glycine max
agcttgagagcatgcagtgcatgctaatctttttcaaccatatatgctagaagatgaaagttttgacaatgaaagtccttgtctaattgtgcaacgctctgagagagggaggaatcatctatggagacaataagacgggctcaaacaaatattaaagtcacttatgacttccaaagtgagataccactcacctcgagtgttattattgcataacaaaacgtcctattcacatattgtgtcttgaaatgcactatgactttgaaacattgacagatttgtataccaatgatacctagtctcatgctacttgacgcgcacataaactttagtgtgttttctcgtaaaactccaaccccaccctgtcgttagaatttctctcgccccaaatttgtattcatcataccaaccacaccttta

SEQ ID NO: 164472 - DNA, 437 bp, Glycine max
  unsure (1)..(437): unsure at all n locations
tatcatggtcatcataatcacaggctatatgaatgtttactacagaagccacccctcaatcagtcactgctctatattctaacatcctcccatcacattggncagaattctgactgaaattactaaactgaacattatgaggaaaacccctatggagaaaccacgaacaatctggatatggcctacaaaagagaacaaccatattcgttccacagtcaaccactccaacaccgtctgtgagtaatgcattgagaaatgcagaagctccggtcaaaatcctactccctaatccactaaatgagatccacagaacatatttacactctgaggactcattaaattcagcaccagacctaagccgttccactgcttttgtatacgaatcaccgttaggtccacatcgtttgtgctgagcttcatantatcttaacctacaa

SEQ ID NO: 164473 - DNA, 409 bp, Glycine max
agcttgtatctagccaagattatacatttgtgtcacaacagaacctcacggttactaattatatgggccatcaaatctatcatgtgttgacagtagttgattaacccataaatttcctcaggggctgtacacactatagcgatggcctttgctttggctaatagtaccgggaggtcttgacttccatttaatgtcaaggcgaacctatccatccacatggttgtttcttgatgcaatgcatcaattccctacctcttgcttccttctcggcgtacgcttgcgcgaaatcctctactagctgttgttcatgggtcaaagactggttgaactgttccttgtattgacctatgatagctagcatgctctgctcctgggctcccaggtgttgaacccaacatccctttggatc

SEQ ID NO: 164474 - DNA, 366 bp, Glycine max
tgaatgttcagcaacaatccctgtcaacctatgagttatagttactagctgaggcggttgctgtacaaaaatggatgcattacatattacctaagcagtttgtaatcaaaactgatcacagaagtctcaagtatattcttgaccagagactttccacagctttccaacaaaaatggttggtaaaacttatggaatttgatttcattattgaatataagcacggaaatgagaaccaagctgctgatgcattttcaagagttgaatgtgctactatgttcattcaccaacccgattctgatctactagagagaatcaaagcatcttggcaaggtgatgatgccttacaaaaactgactgctgaaagta

SEQ ID NO: 164475 - DNA, 400 bp, Glycine max
  unsure (1)..(400): unsure at all n locations
agcttgtagccaaaggttactcataaccagatggnatcgattatactaaaatttttggtcctattggtcgtacaaaggaaatacgcattttattgtcctttgttgcccatcacggtatgatgttgcattaaatggacgtaaaaagtgtgttcctaaattaactaatcaaggaagaggtgtatgtggaacaacccctaagtttgagagttctatctacgcttatcatgtttacaaaattaacaaatgcttttatggtttaaaacaagctcctcgagcttggtatgaaaagttaaattcatttttaactataaatggatttataagaggaaatgcccatactcttttgtttcacaaagattattgtagtcaatctctaattcacacatatatatggacaata

SEQ ID NO: 164476 - DNA, 461 bp, Glycine max
  unsure (1)..(461): unsure at all n locations
tcatcctcaccatnttaattataatcttcaccaccctataagccctttcattaaaaaggcaaaaacatcatcaataatgaaacaaaaacattcatgaatattaactttaaccaaccatcatcaaggaaatgattttctttgagagcaccataaccttacaatccaatatctcaggaacaaaaaaaaaaaatcttttaacaaactaacaaactcccaagatttttgtacatccttttgtctatatgccaattattttgtcactaattgatttattagttgcatgtgatattttctaggtagaataagcacctggtatattcttgcatattactacaagtgtatgtaaaacgtgttcaagaatntatggttatctgtcattacgcactttgattattcaaacacaattgatgaccaagtttgtggcttgtgtcaattgatataccacaacaatctttagcagt

SEQ ID NO: 164477 - DNA, 367 bp, Glycine max
agcttgcaatgaaagaattgtgttttatgactctggtggcaatctaaacacacaaaccaaggccatgatggaaaataggtaaggtagaaatgatcatagttattggcggaaatattgacttctgtaactgctactaagcttgcaatggaagacattgtatatatgttgatgaattttccattcactaatacaaatttgtttaatttgtacgctcaaatctattagctcatgtgttcaatttgaaatatgaaatttctattttacatcttttatttggcattatgtaaccttgtccagcacatcacaaatttttctttgatttctcttcgccatagattagacctcgtttaatatagtctactttgct

SEQ ID NO: 164478 - DNA, 395 bp, Glycine max
  unsure (1)..(395): unsure at all n locations
tctgcctctgtatgatgagatgattaaaatacttatgaaggaatgtgttcatcctcctcctcctcccgaagatccaacattgattacatggcctcctcttgcaagaagcaaacaagttaatagatgtgtgcatcatgttttctctcaaggaagaatatccagcccttgaaagaaagatagaccttgtaaacaaaggtacagtccaaaccttttcacacacacacacacacacaattgaaaagtggtggacttgaccacgatcattatcgtcactgacggactgcctgcgccgtggtcaattgaccattgttatagtactagcaaaccaattatcttataaactaaattatatatgcaatacaacatanatggatacaagtcatgggttgcatcct

SEQ ID NO: 164479 - DNA, 314 bp, Glycine max
ctctagaactcccaaagcgcgagaaatgacatcccacgacctcttcattcgaaaacctttcgcattaccaaaaagggctatgttgggcttaaacttcacatcttcccaacagccagcatacgacaacagacgaattgggccaaaagctagggttttgaggaacacaacggagaaagcgaacgccctgaaataatgggaagcgggaaatggcgtcataattgaaatggcggtcgttcggttcgagattgaatgacagaatgaatcttgctggcatgcgaccctaaggctggtgggctgatcccatttgcatcaaa

SEQ ID NO: 164480 - DNA, 162 bp, Glycine max
ctcatctctacacccttccttatccactcgcaaaacaagactactgccgacaaaacctagtgcacctatgtttcacaactacactataaatggtttgggcataatataaacgatcctcgtattccactcttcctatctatgctactaaggtgacctgacatt

SEQ ID NO: 164481 - DNA, 374 bp, Glycine max
tattcatcgaccacagagcggtacctgtagatatgtcgcggcggtcaagagaccttggggaccacaggtggggtgctattgccaaaaccaagcttgaccaatctcgacccaacccgggcatagtcagtcagtgagaacctgtgatgtacctaaacaggcgagctcctggcagtcaaccgataaaagaacaaacaccacaaagcaaggaggtttgtgtggtggctggccagctatggatcttgagtgatatttgggatatggcctctggtaatcgattaccaagggtgggtaatcgattacaacgcttaaaagtgaagacacgaagttaagatggtctttggtaatcgattacataggatgtgtaatcgattacc

SEQ ID NO: 164482 - DNA, 440 bp, Glycine max
tcaactttgtatgcagtgtgttgttttgtatgaaatgagcgcttgaaaacgacttgattgagaaaatgtatgaattgaatggattgggatgatcacatgattgttttgatcacgtttgcagtcattagaagagaatgagcaagtgattggaagtatgtctgaaaatgttagctggctgtccaactaattgtgaaggaatgccttaaccgtatcccggtgagagtgcgatctttacaatttgagagaaacaactatcatttagtacagatttttgcatgaatttgtgagtatggatcggatgcatgaatttgacgatgatgaacgccatgtttgattatgaatagccacttagccaaaaagatgaccatatgtttgaatgaattatcccttgtacccagtctgagctgaatgactctatcgattgattgaacctgcagcct

SEQ ID NO: 164483 - DNA, 384 bp, Glycine max
caacaatccagagaagaactaatcctgatcacgttgaacaagccttcttcaaaactgaccaccacatggatttttctcaaaacctgcctaccaaagagtttttactctctggtaatcgaccaccacatcgctgtactcgattaccagcaccaaaatgttcttgaaaaagtttttaactgaattcacaccgtcccaattgatctcaaaaagctgcaatcgatcaccatgttgtgcgaatcgattaccactgcacttgaaagtcgaaattcaaatccacatgcgaccagccccattctttcacaaaaaagctttgtgtaatcaactacactgatgtggtcatcgactactagcactagtttctgcacccctcacaagatgtctccc

SEQ ID NO: 164484 - DNA, 378 bp, Glycine max
agaagatgagtggagggagagggagactttgtttctttattatgcctccaacgaggtatgaactttgaatcataactcccaccacgatcaaagtcgaaaaaaatgcacacacaagatctctatttgtagcctaagtgtcacacaaaattggaaggaaacttgaatttttattccaatttcacttgaatttgaattagaattggtggagccaaaatttcactaattatgattagcgaattttaagtacagttcatcccactaattcaagatcaagtctaagattctctactaagtgtgcttaggtatcatgaggcatgtaaagcatgaacgagatgcacaatgtgtgactatatgatgtgacaatggggtgtatcaagc

SEQ ID NO: 164485 - DNA, 294 bp, Glycine max
cccaacgcactacgccgtacaaacaacagcacccaaccggatacctaacggcaaggaagaacccaccgggccaacccccccggaacaaaccggcgccaaaaccagagatcaacccacacggtgaccaccgaccccaaaggaaaaccgccagcccccggcacgaagaatacaacaaagaccgccatgaccacaacccaacccccgcacaacaagacgcgaccaaacccaaagcggcacacgcaccgaccacacacgccggcgataacacaaacacacagacgaaccgcacaccaa

SEQ ID NO: 164486 - DNA, 356 bp, Glycine max
  unsure (1)..(356): unsure at all n locations
tttgtgagttgacaatctacacattcgatgagacaattcataatgagcgtcttcagacaagaaacatgaccaaatgttcgacatctctttctacgtaaaatacnctgacagccaattccctttctacatcaaactnaacctggttctttaataagtccaattgttactgatatgcctaaagtacgatccctactaatttatgtcaacacgacttatttgactactgtatataggtccattctggttaacactgccaacaagaaatatggtattctgcagggcaatgctgattgatcatagacatcatgcctgcaataattatcaccttggttacaagatggtggaataacgcttga

SEQ ID NO: 164487 - DNA, 370 bp, Glycine max
ggatcttaagtcaccgcagctgcagctttaccttcttgctataatttttatataaggcacaaccaacatgttcaaccttcctggtatctgagaatcacttacaactagcgagaaaaattgtctccgtgaagaaaatccaaaccgagacgcttccgtaacgctctcgagacatttccgtgggtgatttcgcgaagattttccaccgttcttcgccattcttcgttcgttctttgtcgctcttcggtctccaaccggtaagttcccgaaatcgaacttttcaattcattttatgtacccttagtggtcctcattcgcttcgcgtgcttttatttctatctcattttacttttccgacccccttttgacgtgc

SEQ ID NO: 164488 - DNA, 432 bp, Glycine max
  unsure (1)..(432): unsure at all n locations
tttctttcacaatcaatctgtctactgacttatattctttatgcacgntcacattcttgcttcttctttgttcgacatgcacatttgctcaacttcatgaaatgaaacacaaattccatcaaaatcatgcattcaatataaaacaaagtcatacacccatttttcacaaaaagataaaagtgtttcattgacatgtcatctaaaataagttaaattgttcaaaatgcttcaggataagcatactaactattcatatatagaactagcagtatatatagacataaaggaaatattatacgaaaaccaaaattataataataataaatcaaaaagtgaacagtgtcatcaggaattaaaactcctgtgactggtcctgattgtctcgtatctgaacattcctctcatctgttatatgccatactggagtagcta

SEQ ID NO: 164489 - DNA, 424 bp, Glycine max
  unsure (1)..(424): unsure at all n locations
gatgatgccgatcgaacattatctaatnntatttaattaatacccacccacggattgaatggagaaaacaagtggccggcgccngctgctataatggcccctactgatattctccggccgacattgcgcaatttcttttacaaaagctggccgataatgtttttttacagtagaggaagttttttgctntgatgatgcctacaaaaactacaatgtaggtccgctatgtttttccgtgcgagctcaaccgatgttgtgtttcggccgacactggcatgttctcattcaatggccaagaaaacattancccaccccggcacaccaaatattatcattcacggaaattgatcgaaaaaatgatagctgcacgtcgcgtggacagatgaccgatcgacgtcttaaaaggaagcatatccggatgacg

SEQ ID NO: 164490 - DNA, 436 bp, Glycine max
tggatgagcaccgacaaagatccaagatattgtgttctttctgtcctccccaccagatttttgagcacctcattcttcactatttctataagggactcagccacatggaaaggaatttgattgagaagatggtctccaacctccaacaatttagcgcaacaaatgatgctattgtccttacaggactccatgaggtggccacagatgcatcttcatctactgaaaataaaaagctcgagggaaaactcgatgcattggtcaacctagtaactcagctttccatgaatcacaaatttgcatctacgcctgttgcaagagtatgtggtctatgttcttctgcagatcaccatacagatctctgtccttctctgtacaatctggagtcaatgagcaacctgaagcttatgctgtaaccattataatagaccctctcagt

SEQ ID NO: 164491 - DNA, 417 bp, Glycine max
gcttacttttacaatattcagacgagtgttcttgtctatcatgtgcatacattaattagacaacacaagtagatggaacacttttaattgaaaaatatcgtgatactttgttgactgccatcggacaagatggtagtacgaataattttccatttgcttttgcaattgttgcgagaccaaagaatcttgaatgtggttcttgcattatttgagtagatatgttacaccgcaaccaaatttgtgtattatatcacacaggagaaccggcttgctagtaactttacaatcaaacacaattgggtgtaatggacctgatgtttcatctatgtattgcgctcaccaaattgcatcaaatttcaaaaaatagtctaaaaatgttcacttaaaacaacaagtcatcaatatgggtatgcttct

SEQ ID NO: 164492 - DNA, 406 bp, Glycine max
  unsure (1)..(406): unsure at all n locations
ctgttngggcctcgcaaatgggcttacatggatgtaataataaacggtgttactttggtcacagcaattttgctgggacacccaccctaggcgaaagggctaaaatgcccttcaccctattaatataaatatggctacatgggcatccgtacgattccgccatagtgcttcttcttccttcgtgtagcgcttcttccctctcatggtggtctccttcattcttattctgctcctttgttctccttcacacacgttgtggtctccttcattctactcgtgatctccttcattctcttggtagctcgtggttctttctcgttgtggttcttcttcttcctccacttcctgcgccattacggctcttcttctttctctatcctgtgtccgctcactcccgtagtgcttc

SEQ ID NO: 164493 - DNA, 420 bp, Glycine max
  unsure (1)..(420): unsure at all n locations
atgcaagctngagctcttcaccgagagcgtctatataatagtattgtccaataccacccccagccactatcgctttagcaatcatcctggctttcacagcacaaccaaacttatgccaacaccatactcaaaccatataacatacattatttgtgttagtcttatatcatgattgcactttaacttctctatagcaactctcaacacccatttagagctggcattcttgttgctaaaaacccttccacaatgatgttctggcttgtaggtcttaatcctataagtggaactcctcctaaccttgttacaaaaaatcttatacccatatttgtctttgcacttggccctatacctcactttttcatttgagcaaaacacagctcgtctcccattcattatacaatgctcaacaattgcttc

SEQ ID NO: 164494 - DNA, 458 bp, Glycine max
atctctatgctaatcacactatgctatctcaaccagtgattatctacagcgccgattctcaatcatgtacaaaatgacagttgtagacaaaacttctatcacaaccttgtaaatatagtaaatatttaagcagcaactggaccaaagcccaagaaacagtacacattaaagacccaatatgttttcaaaaaaatttacaaactgctcaaaaaactacatacccaatatatattttaacggtaaatttggatagagaacgtcccttgtttgggagtggttcgagaaaagaggaagatagtgaaggaatatcatgtaattatccaagacttctgctctatgcatttccacggatactttttgaacatcaacttggaagattcgaagtaatgacaaacaatctaacacatcaaagtaatgttactgctaattccccatcccattctctactcttcctttca

SEQ ID NO: 164495 - DNA, 335 bp, Glycine max
gtatactatattgggaaccccaatcacaccccaacatacaaaaataatatatgagccgagaacacgcctatgtaagtcgagcacaactaactagaaaaaatacaaacgaattaacagaacatgaatacctcccatgtgagcttagagtcagacgtacttatcaaagcttctctccaagaaacatgtagacttctcacctatgctctgtcctgaaagaaaatgaagcacacattctatgtgaaacatcaaacttcatatatcaaccgaaaatgggataaccctttaaagcacaccaaacgactcttcactctcacctctcttttggccctctaaaa

SEQ ID NO: 164496 - DNA, 453 bp, Glycine max
ctttaccaaaagcctggtcataccttactgaaatactactgatgtgtatttttgactaccccacctaattggcatcatctaatctctgtcttttcaattacataatgataatctccaacgctctgtcagacgttcaattctttgccacttaattatgcgacatctaatctatatcatgcagactcctctccaaacactctttgctctgcctgcaaagggacttggtacctttgctccattgacgtttttctgctgctctactctgcattttcttttgctcagggagatcaattatccttcatattcctcatctccttgtacttttctttccatcatgatgaattctgttactcctctgaaatctgatactgaacaggaatggaaagaacgaaatcaatatacaactgataatgcagcactaaatgccgaaagaatagataacccttctaattc

SEQ ID NO: 164497 - DNA, 356 bp, Glycine max
ctgcctgagatgacgaagtgctgaacggcgttttttttgcttttatcgctgaccacagaggggtacctggagatattgtgcgcgggtcacgagaccctggtgacgttacgtggggtgctattgcccaaaacctaacttgaccaatccccacccaacccgggcatattccgtcagcgaaaacctgtgatgtacctaagcaggcgagctcctgccagtcaccagatcaaatgataacaagaccacaaagcaaggaggcttgtggtggctggccagctgtgaatcttgtgtaatatgcggattgtggcctctggtaatcgattaccaacggtgggtaatctattaccccgcttaaaaat

SEQ ID NO: 164498 - DNA, 433 bp, Glycine max
ctaaagaagctagagcttagccactcatactctctctaatagctaagctcacctccttgagacgagaagctagagctcagctacacaccccctataatagctaagctcacccccatgacaaaaaacatgaaaataataaaaaaaaagtccttattacaaagacaactcaaaatgccccgaaatacaaggctaaaaccctatactactagaatggccaaaatacaaggcctagacgaaggaaaaacctattctaatatttacaaagataagcgggctcatacttagcccatgggctcgaaatctaccctaaggctcatgagaaccctacggccttctcctggatctctagcccaatctacttggagtcctctagccaatgcccttgcgggggaggattgcatcattccctccaccctggaaaggattcgacctc

SEQ ID NO: 164499 - DNA, 321 bp, Glycine max
  unsure (1)..(321): unsure at all n locations
ccacncacaagctgcaggggggatcccaacatccctattttcaaccaaaaggaaggtatttgaccatctctctcggtatgcatattcaaaaggctctcaaataagcttctttcaaagaaaacaatgggccctatgtctacaaattgcttgttctaacacataagagtcaagggcatttgggccacaacttaaaatacagacattcatggctatatgaaaagatggccaatctgacatgctgctgaaaagcaagccagtacctacatgatctccgtgcatccgcatctcgatgatacccgatcgttgggcgccaaacaaccc

SEQ ID NO: 164500 - DNA, 375 bp, Glycine max
tcgtcaatcacaaataacaacgccatttaagcgttcctttctctcataaatgtccaatctggcgcctctgaaaactagcacgggaaacacatgattaacgctgcagttcaactatgtatgatatactctagtatacaagaacgttgattataaagcccataagcccaccatcctcgtgatatagccctaatccaacaccgaaatctacaaaaatttcgagactgacatttacaaaaaacatcatttactgttaatagtaaacaatgtgcgtgaaagaaacaaacgaatcacaatttgtaaaactagatgctcaacaataatctttataaagtcacgaatagaaatgactctaaaaccttattgaattattaattg

SEQ ID NO: 164501 - DNA, 322 bp, Glycine max
cacacacacctctaccagagctaagctccgctcccctgacatgagacaacagagctcaccctcccaccctgtatattagctaagcacacctccatcacaaaatacatgaaacaacaaaaaaaaatcctactacaaagagcactcacaacgccaccaacaacaacgctaaaacctcatactaactacaacggtcacaataccatgctccaacgaacgaacaatccattctaacactcacaaagataaacacgctcatactcagcccatacgccccaaaactacactaaggctcatgagaaccccacggccctcccttggatct

SEQ ID NO: 164502 - DNA, 389 bp, Glycine max
agcttgtcattgacacaagtagcaatcttttcttgagctcgccgcgttcgtgggtgggactcgcggcttccaacagaaccaggcaaccaccgcatcgcattgctgtgtcgtgtgtcgtctagtctcgcgtcatctggtctcggctcgcactctcgcatcgtctgagcagctccaactcgccatgaatgaagaacagggaccaacacaaaatgaacgacacaaaattcctacactaaagtggagcactggacacaaagcgacgccatattatggaaattttttttttcaactgaactcgtgtgactcgggccacactcacgagtctacacaagtctatcgtgagtccaccaagcttgcataaaacctgtttgcttctgagttgactcaca

SEQ ID NO: 164503 - DNA, 449 bp, Glycine max
  unsure (1)..(449): unsure at all n locations
ntacaagatttcggctttgcaattagatntacttcatttatgaactcagnccttccttgacccgagaagcctgaaagtctcttcacagctatttgttatccatcagcaaattttccctgtatctattggttactaaatgctatgcagaatattattacttgtcttgttgcttttctcttgtaataataatactcaaatagtaatgaattacccaatatacttcgcagcaaaaggtaaacgtagaaagacaaaactaactacctaatatacaggtccaaaaccaccttctccaagctaatgtcctctgagaagtcatttgaggcaatatcaattgcttgcagattacacaacgagagatccagatcttccacttctggtgttctctctaccaaaatggagaanatccataagcaatatgattctatattattcattctaagttaaaatat

SEQ ID NO: 164504 - DNA, 388 bp, Glycine max
agagtcacctgacgcatgctagctcgaagaaaagacgcggacgcatgataatatttatcatcatacgtcgtcattgcaataggtattattgagctcatcacctcacgaacgaattctattcattattttaataccgctaattctttggacataaaacataataacttgcattctacatgcatttgaaggatcaaatcagtataaagtaaaataaacgaggtaaataaggagaaattgtttatctttgaatgacataacgacaaattgttaacaaaataatcaaatactactgcccagatatatactttgacttggtgcccaacagccattatagtgcatcaacaatctctattttgacttactgcgcatgtgcaacagcaattatacc

SEQ ID NO: 164505 - DNA, 459 bp, Glycine max
  unsure (1)..(459): unsure at all n locations
aaaactaagctatgctgatacattataatagacacactctgcagcaatctcttacaacaaactaatcatgatcggtcaagcagctgatacaatccacgttggaggaatcattcaaatctgagatggacaagtcctccacaacaacaacagcttgccccttccttccagaatgctgttggtccaagcaagccatatgttccttctccaatgcagcaacaacaaagacaacaagcaattgaggccnctgctcaactcctcttanaagagttactgaggaaaatgaccatccagaatatgcaattttagcaagagacaagagcctccattcagagtctgacaaactagatggggcagatggctactcagttaaaccaagctcagtctcaaaattctgacaaatttccttcacaaactgtgcagaatctatgaaatgtgagtgccatcaccttgacgtctggc

SEQ ID NO: 164506 - DNA, 306 bp, Glycine max
tattccccaccacaaaacctccgaagcaaatcttcgaatctacttccctcaataaaccatgtcctaccttcagccactaaatcaaatagaaggggtgccaacgggtccccttgtctcaaccctccttgacgcctgaatttacaacgtgggcttccattaacaagaatggactatggaagctgaagtgaggcaacccctactccacccaatacatcttttatgaaaccccattcttctcagcatgtagaatagaacatgcccagacacacaatcatacgccttttctaaatccactttaaagaccat

SEQ ID NO: 164507 - DNA, 304 bp, Glycine max
  unsure (1)..(304): unsure at all n locations
cgtccgctaagcgtaacactcatgggctaagcgcgaggaagactctggtcgaagatgagatgcacaggtttgctaaccgcaccgcttcatctcactaagcgcactgcttcagtccatccattaagtgagaaaggcgcgcgctaagccaaaattcactacagtgcgctaagtggtccataattgcgctaancgcacgancccgaacaaggccacctatttaagccaaaaatcaaattttgtgaaacgagtctgggctgggattcagagctttgcatgtctacagattctatagagagaaaggtcc

SEQ ID NO: 164508 - DNA, 321 bp, Glycine max
cgcttctagccaaatggacttattttgaattatattctttgatagcccttttgagccttgtttcccttgtcttgttttgaagctcactacaacccttaaatgaaaaaaaccatgatatcaccatatccttaacgaattctggagctttggaattgttttggaaataagtgtggggggtttttgtttcattggataactcgtttcgttggctatacttcatgatgtattttgggccatacttgatgtacattgtatattggttaaatgttggacatgctgaatgaaatgttgcttctcaaacgctatagagcaaaaaaaaat

SEQ ID NO: 164509 - DNA, 446 bp, Glycine max
cggagaggatgcttcaatggacgaaaagaaagagggagttaaagagagaggggggagcacgaaattgaaggaagaaaaagggagagaagttgaactttgagttgtgtctcacaagactctcattcatcaaagttacaacaagcgttacactcatgagccttgagaagctttcttgagaaaactctcttgagaagcttctttgagaaaacttccttgagaagctagagcttagctacacacacccctctcataactaagctcacctccttgagaagcttccttaagaagattcctaaagaagctagagcttagctacacatacctctctaatagctaagctcacctccttgagatgagaagctagagcttagctacacagcccctataatatctaagctcacccccatgacatacaacatgacaatacaaaacacaagtccttatta

SEQ ID NO: 164510 - DNA, 369 bp, Glycine max
atgcaagcttcacgacgaatcaacaatgatcgacatgtgtttctatgataaccatgatgaccaccaaagatgatcgccaacgcgatcaacccaaagctcataacatcacacaacaactcaagtgaatcaaagaacctctcaagtcaatcaacaacaacgtcagagttcaagaaataaggagaatttccgactcaagaagaacgattaccactgtcattgaacgttgaaattcaaatctacaagtgaagagtcacattgctctactcacaatctttgtgtaatcgattacacttatttggcaatcgattaccactgcttgtttctgaaaaacctaaagatgtaactcttttacaaggttctgactctttc

SEQ ID NO: 164511 - DNA, 343 bp, Glycine max
gacatttctatctttcatacaaacaccccgaatctgcaaaaagaccggactgaacatcaacagacataaaacctaccataacccgaaagtgaaagacaatctacagacccaccaaaactacagaacatagatctaacctctcaagcggaaaacaacatacaagcagaagtatgcaaatgatgaagaatcaccaaatgaactcagtaatagcaactttacctgaaagagtaaactgctaatgcagcaccccatccgcctaaacaaagggaccatgaccctctggaacctctaccacgctaactacctccaagagtacctccagctcacccagaaacatcacctc

SEQ ID NO: 164512 - DNA, 150 bp, Glycine max
aaccccccaaacccaagccacccagccagccgaaccgaacacgccaaacaaacccgaagccatcgataaacgcaccaccagacacacaaaaatcaaccacgattaccctgcttcaccccactaacccaaaagaaacaccaccccgaaaga

SEQ ID NO: 164513 - DNA, 444 bp, Glycine max
cggctattctgcatccgacgagcgacttattgactctatattatcgccgcaatcataaacaatcgcccttcattataaagagttcctatctgtcatttaagtaacacctctaatcataaagtcaatagtacatactcccaaaaatggcggaaacaaaactaactatgatcgacatggcaattactggacttatacatatataacagcatagtgacaaaaggattaacacaacaattgattcgggggaaaataaagagataaaattaacttgcgtgaaagacatggatctatctttatctcgacagacatacactttgataaagggaatctaaattcgttcacaaaagatcacgaatccatattcgtctttgttggagttatggccagagcaacatgcacataactcttactctgaatttgatctccttcacacaagacaaatgc

SEQ ID NO: 164514 - DNA, 415 bp, Glycine max
  unsure (1)..(415): unsure at all n locations
agctntagatctttctccatatacagacagagtattgactacgtttgcctcaatgactaggtgaagaaaaccaagataaagacgaaaattaacaacgccaacaaacccaatatcatcatgatttgaccctttgcatcagccttcttcatgaatagcaaaactcatgaccccacttgaaatgaagacaagagagtagaaaactattagaaaagcttaagctataacctaataaacaacatgtcatcatgtccttccttgcaacgcttttttccttttcattcttattactctagaaacaagtgtctaaatcaatgcgacacctcatgttatagccatgaaactcaacccaaacctttagactattccacaatatatcatatcatccttaacctccacatacaccatactatacatc

SEQ ID NO: 164515 - DNA, 393 bp, Glycine max
gcgacactatacacaacttaagcttaaataaatcgtcgctcgataacataatatatcacaatctgttgttatattaaatcatgctcaatgcataataaaagtctaaatctctgctcctgtgtctctgagagtgcaatcgttcattttactcgccttggctaacaagcctaaaattgctgctttttacagtccataaaagtgaagaacaatgaacaatctggacgacaccgatgagctaacccagataccactatttggaataaccaataacctctgatcactgtttttactcggcgacatacatttcacaccacacgggtacactaattcgcattaccgctccaccacaacaagaatggccaaaccataccttgtcataccccgccaatctgc

SEQ ID NO: 164516 - DNA, 336 bp, Glycine max
  unsure (1)..(336): unsure at all n locations
cccccctaagacaatagcatcacttcaggcactaaatcgccgggagctcgaaccctcctntcaattaaatttttggcttcagcaggcgtcacgtctccaagggctccacccccggcagcatctatcatacttctctccatgctaccgacgccttgataaaaacatcggacgagaagctgctcagaaatctggcggcgaggacaactggcacacacttccctacatctctcccagtcactatataagctctctccactgagtcgccctaactccgaaatactccttctgatagccccggccccggaagcacggaaagtctctaccaagaataccctc

SEQ ID NO: 164517 - DNA, 320 bp, Glycine max
  unsure (1)..(320): unsure at all n locations
ccaccactggaaaacccgaacgcaaatttccattgacgcaacaaacctaaatactcgtgaagccatagaaataacgcctcacatacccaccacagtacaaagagccaccatacacggcagctcatcaagcgaaagcataacaccacaacaacccacagacagacggcctgaagaggatagaaaacgagtacaatacaatttaaaagccaaaaacataataacacatgccccgngaatggatgaatacttcacggtctcaaatacgcagagcgctaccgaaacgcgggacactcttcgactaacacatgacggaactacag

SEQ ID NO: 164518 - DNA, 397 bp, Glycine max
  unsure (1)..(397): unsure at all n locations
agcttgcaacacgcgcgccaagccagcgattctatatattaacgcactaagcctgcaacacgcgcactaagcccgcgatccacaccccctaagcgagggcgcgtcacgccgagcgcgcctacgaaggcccaaagcccacttcagcagctataaatagagagccagcccaaagggaagaacacaccaccacagaancccctctcctaggggcctcatttattccccttctttctttcacccctcctctcattggaaagccctcatgaccatgagtggctaaacccttacttagggcctggcacgcctagaagccaacgcgatgcatgatgtattctccactatttatgaatgcaacaccagggttttctttcctatatcctttcctatttttatctcg

SEQ ID NO: 164519 - DNA, 444 bp, Glycine max
  unsure (1)..(444): unsure at all n locations
aaactcaagcttgcgcctcttcacgcntggaatatgaatgtagcatacatatccaaagtcctttangcgctccgctgatggctgcttcccgttccaagcttcaattggagtctctgcttttacagacttacttggacatctgttgagtatgtaaactgccgtgtagactgcttcaccccagaatgtgttaggtagtccctttctcttgagcatcgatctagccatctccataactgtgcgattctttctctcggacactccattttgttgactagaatatgcgactataagttgtcgctcaatgccttcatcctcacaaaatctttcaaactcgcgagaggtgtactctttgccgcgatcacttcttagtacctttatctgtttctcactctgattttcagcaagggccttgaactctttgaatactccaaagacttcctgatt

SEQ ID NO: 164520 - DNA, 279 bp, Glycine max
ggccctcaagaccgccgacatcaataaacaatcgcacgctctcctcgcctctacccagacaggaatgaagcacatcatcatccacttggaaactccacatatcaaaacattggacaacgctggaaacaacggtgctattgtcaaggcaaagcaaacttcaatatgcagccctcatccatgatgacgcaccttgcactctgcatactatgtgtagttcgcatcgcaacaaaacggccacctattatgataaaccaataccgccttctaacacggcgactc

SEQ ID NO: 164521 - DNA, 361 bp, Glycine max
aacaacatgaacgcgatccgctaaccacctatacccacgcccagcgtactgcgcctcatacccaccacacaactggcaggaccatgaaggaaccacccacaaccaccgcgacatccgcaccccttccactaccaacgacaacaaagcccgcacggaaaggacaatgctgcacggcgaccagaacatctactaccatgccataaggcctccgaatagaacgacctgccaactgcaacgcgccaaccccctcggcaaacctccacctccctaaccctccagcacaaggagagaggcaccaaacatatgctggccgctaagtcacgacggcgctaccaaccgacactggaccacagagcaaacg

SEQ ID NO: 164522 - DNA, 412 bp, Glycine max
  unsure (1)..(412): unsure at all n locations
actcataaccatcacaggcgcctgctcattagagaacaatagtttctataccttcgaccgcactcaatacaatgaaatctcatacctagcgacagactaatcatggcacattcatgtgcactagctcgtggaaacagcactaccacgacaataattgaacgtctttacgcctctcacaaaccgagactggaacaaggtcctggcacaccctggttaccttaccacagattactttggaaaacaaancatctgcgcgcggcctgaatatgactcacaaaacaccacgtgtgactcgggccagtcgggctctagctagaatatgccttaagtggctcgacatgtacagtaaccgatgcctctgggtattgccatgatagccttactctcctcctctctttcttacaatcaaaca

SEQ ID NO: 164523 - DNA, 348 bp, Glycine max
  unsure (1)..(348): unsure at all n locations
catctacagttaaaatcaatatttttagttaccaatcaactctccgtattggatatatgttcattccagcatatataaaaccatatctctaaaatctcaaaagtgtttttttcttcttctaaaatatcattctttggcgaaataaaatgcccattcaaatatatgctacattataaaacaaggaaaaccaatcaagatcaagtctttattcatttggctggatgtactactaaatctagtatcatattccatcgcaactcatgtttgtgaacanattgattcctactgtttttctataataatccgctatcatttttgaccattattgcattactattaatttcctat

SEQ ID NO: 164524 - DNA, 257 bp, Glycine max
aagaatcaagaacacgacccaatcaagaccagcaccaaaagcttcccaaaacatcgagtagcacacgaatcttccacaaacaccccaaccacagagtgccactctctgggaatcgaccaccagcacgccaacattggctctcaaaactgatctacacagctgccaccgaccaccatgagcacgtaatcgaccaccacacgtctaaaatgtcacatggcaaacttcaagaggcacaactagcgaccacaacatttcaa

SEQ ID NO: 164525 - DNA, 450 bp, Glycine max
  unsure (1)..(450): unsure at all n locations
tcccatcaagtgtgaaccacgagcacacgagcctctcagttttgcttcttatacccccaccaactnccagcggtaccttgtcctccattgttgtatctccacttttctccctgcatttcctcacatgtcttgtgccgaacgtcggtcacatggttctttaaaatttacaccgattcaactttctatagaagctagattcgattctctatggtccaaatttcttattctcgctcttgaaccatgaagcgtgttaaccctaaggtccctttgagcattgccttgctatattttttgtgggtgacacctaaaccataaaactcttacaaaaccattcaagtcgaagaaaacctcaaacatattctacagtgacctgttcacctattgtagttctctcatagaagtcatgtctactcatgagacctgtcacataacatccctatgttctgccga

SEQ ID NO: 164526 - DNA, 398 bp, Glycine max
  unsure (1)..(398): unsure at all n locations
ctataaaantaagctcctctgatgtgtcaccaggcaatccacactttgcctattattctttatcgacaaaaatatggcgtgtgttcttgggggacaattctacatttactatcttctttcttcaaccagatgtgattgctcagcttgctgacatatagcaagaacgctatgataatccatagatggtcattcatctgaaagacccaccggtaaatataccatggctcataccactactttgtcttacaaaaattacattgccttcctatctgtgctaatactttttactctgactttcttttcacatgtgttcgccttactactatttatatcttaggagcaacatccttacttgcctttcatgggatgcatgcgccacgcaattatcacattttatg

SEQ ID NO: 164527 - DNA, 394 bp, Glycine max
agcttcctttacacagtgagaagagttttgtagtttttttaccaccagcgggacgcggctccaccgttgaaacctcacacctctcaaaatctcatccaagttctgaggatggcttcctcttcaagttcacctttctctcagttgcttcacagcccacaactttcaaaaaacttaactcctcccctcagaaatcgtgatttcaccttatataggcaatcctgctggcggactcactcctaacggaagatgaactcgcttaccgcgcatacgcgacttctagcttagcgccagtcacactcgcccaatccgaaggtgaagaccgcgcgcttcacgagttggcctttgctcaacgcctctatacagcgtatttttgctctcaaatcgcccctgcgct

SEQ ID NO: 164528 - DNA, 441 bp, Glycine max
  unsure (1)..(441): unsure at all n locations
tcagnttgattgctaagtgacaacctatccttggctaagtccatttattatcgcccagcgcacacgcttactgccgatattgaggtccatgaagctaagcgccagtcatggcagctaagcgagattcattgtggcagtgtgagcactatgcgagtacttatcagctaagctcatgctcctttgtacttaagatgcatcattttagctaagccagccagagtctggcttaacgagagatgcaacttttcggatctacaaacctcgctaagcgggctgatccttcactgagccaagcctgtgttaaaaaaaaagattttgaatctgaaacttcggctaacgcgcttatccactaagcgagccttgttgagaaaccaaacgtctttctggctcgcttagcacagctttccgctaagtgaaagtgtcgaacatgcctaagtgagt

SEQ ID NO: 164529 - DNA, 276 bp, Glycine max
cttagacctcataatcactcaaaactcttttaagctcttaagacggcttccttttcaagctttggctctgcagatccttcacacaacaaattctctcaaacctctctggaaacttggacctttctctctctagaactctccaattatgcagaagcttcaagaacaggcccatctcctctcacaaatctgattttacgcctaaataggtggccttgttcgtactcatgcgcttagcgcaattatgaaccgcttagcgagcactaatgaatttccgct

SEQ ID NO: 164530 - DNA, 449 bp, Glycine max
  unsure (1)..(449): unsure at all n locations
tgaaggcaaactggatgcatnggntaactnggtaacccttctggccttgaatcggaaatctatacctatcgcaagggtttgtggtttgtgctcctctgctgaccaccatacagacctttgcccttccatgcagcaacctggagcaattgagtagcctaaacctcagcagcaaaatcaaccacagcagaacaattatgacctctccagtaacagatacaaccctggatggaggaatcaccctaatctcagatggtccagcccttagcaacaacaacagcagcctgctccttccttccaaaatgctactggcccaagcagacaatacattcctccaccaatccaacaacagcaacaaccccagaaacagccaacagctgaggccgctccacaacctctccttgaagaacttgtgaggcaaatgactatgcagaacatgcagtttcagcaag

SEQ ID NO: 164531 - DNA, 365 bp, Glycine max
  unsure (1)..(365): unsure at all n locations
agctctcgcaccgccaagggtatttactctttctgtggccttccgatgcgcagtttcaccattcacgcccccaccattttcttccctcctgggataagaacancttaggtttttcatactttttgcgccgaataatccatatgaaaatgcacaaacaggtatgtttcattgcgctacttttcttaatttcttaaatactgatcaaggggttcccatgaaccctaacagaataaaagtcattcctgagtgtcccgctccaccaagtaaataaaatttggggctctcatgacttaacacacttttaccaaaggcttgtcccatattttcctatacttgtagcaccactcattgagttggtgaagaac

SEQ ID NO: 164532 - DNA, 425 bp, Glycine max
ctaagaaatcagatcaagattcaagcattaacgttcattatctcaagagaagacttaatcaagataagtatgaaaaggttctttcaaacactgagtagcacatggatttttcacaaaacatgtttaccaaagagttcttactctctggtaatcgattaccagattgctgtaatcgattaccactagcacaatgttctcgaaaatttttcaaatcgaatttacaacgttccaactaatctcaaaaagttgtcatcgatcacaatgttctggtaatcgaactaccagcgcctctgaacgttgcaatccacactcaaatgcgaagaggcaaatctctccactacacccttgtgcaactattacagtgatttggcaatcgatcaccagtgactgctcctaataaagtacaagaaggccctctccaatag

SEQ ID NO: 164533 - DNA, 392 bp, Glycine max
agcttatccattttaaacttgacagtcgtcttgttattctcacattcaacccatatattatgtctacttatttctacgttgccataatcatggcgtgcttgtgaacactctttccataggtcatgccattcttctttaaaataatcatgaagcttatctaattgttttagctctgattatagagactgaattttcttttctaagatcttaaactttttcatcaatgtatcactttcttttgagaccttctcattttttaattgaagttgtgatcccttttcttcaacgtatcatagactttactgccttaattacgtttagctaagagactaatatcttgatgagcctttttaagctcgatattatctctagaaaggtttctgaaatccctc

SEQ ID NO: 164534 - DNA, 449 bp, Glycine max
  unsure (1)..(449): unsure at all n locations
ccgagctctgcataataactaagnacaatgtttgtatctcttcacaaagagcgcaaaaacagattggaaattgacagctgacaaaatatggatacttttaattcaaataatcatgacacatgtacctatagatatggattggtaacatcgataagaaacttgatatcaagtatgttgtgaggaacagaagtagcattcattcattgataaaacatttagtctccccttctttaaagtcatatcttgtgtaattttaaaaaagtgtacgaaattacatgatgaatacatgagagctatttttgtttcttcctgcatatatgtggaactacataccagattttgcttcatacatattataaattaacttgaattaaattaaactcagtctattaagctcgacacaggcgttgaccacatctgttaataaagacatctactcaattataaac

SEQ ID NO: 164535 - DNA, 415 bp, Glycine max
agcttgacaagcaagcttacatgacacggagtccttttcagacggcgcacacacccatgtgggccttatggggtcataggactcgatgcgctctggatcgacacttggagactaaagttgtcgtggacgataggcattgagtctgcgacaaagagcgcacacgaccatgttggtctgtatgatgtaactccattggagcttgtatgccgtggatctttttcatcaatggagtgcattgctgcttgaattttaatggcagaggtctggagaagaataagagttgagaggacacgcctcttcatgaagaacatgagtctagaacaacctcactaacataggaagccatggataagagcttggacgtaggagacaatgatcggacggagatggatagaatgggcaccacattctgtgc

SEQ ID NO: 164536 - DNA, 396 bp, Glycine max
  unsure (1)..(396): unsure at all n locations
atnggaggaccttgttaaagcatgtgtcttacaccaaaaaggaagcttggagaattttctttcattgatagaggccacttataataacagttttcactctaccattggcatgactccctatgaagctttgtatggtagaacgagtaggacacccctctgttggatagagcccggagaacgcctcaccttacgaccagaactggtacagcataccactaagaaagttaagctaattcaagaaacgatgataactgctcagactccgcgcattagttatcacgatatgaggaacaaagatctggagttccaggttggtgatcatgtattcttgagagacactccatggactggggtttgacgaccattgtaatcacgagaactcacacctcgcttaat

SEQ ID NO: 164537 - DNA, 358 bp, Glycine max
cccgcgacatatcttcaggtaccactctggggtcaacaataaaagcacgaagtttcccccttcaacacttcctcatctcaagcttgtacgattatggggtacccatcacatgtggtactaagtggcggtcgggccatggtgcacaacaagttttccacatccacaatgcgcgcataaacccaccattccctgttgcccacctccaactgagctcacgtactcccacgtagcccatatcctcgtttctctcaacaccgggtccccatcaatcctcccaagctttcccaacatcaaagtaatacaacatttaaacagcacatactatcacagccaagacaacagagcaaacgcagaaaac

SEQ ID NO: 164538 - DNA, 290 bp, Glycine max
atctcaaccgctttaccgtacactgtcctggcaactactcatcctttgcaatacctctagaacataattaagcacatactgctgggggggacgataaaaaagctaatcccgaacaaaaaagaaaaaccaaaacgcctttctcctcacatacctcatatcatagacataggaactcttgacaacctccttcaaaatgcggactatcattctccaatctatctcgacccacgatatctctcatagcctacaccaacacactctatgccgaggaggataagtcatcaacatct

SEQ ID NO: 164539 - DNA, 420 bp, Glycine max
agcttgcttgtgaagctggtatgaatgctttatcttttatcttcaatgaggtccttcaatggcgattctccatcatggagatgcagcggaagataaaggagaacaggtgagaggaggcatcatccactacggaataagccatggaagaaaaagcttcaccaccaagagagtgccttgaataagaagcttaaaaaggaagcttcaatggaggaaaagaaagacagagagaaagagaaaggggggcaacataaaattgaacgaggaaaagagggagagaagttgaactttgaagcgtgtctcacaagactctcattcatcaaagttacaacaagtgttacacatgcttctattcatagcctacgtagcttccttgagaaacttccttcacaagcttccttgagaagctagagcttaactaca

SEQ ID NO: 164540 - DNA, 370 bp, Glycine max
  unsure (1)..(370): unsure at all n locations
attaagtacctttctttaccttccctctcattgaagatccttcacctttcatacatgtactctgcctcacatgcaccgctataaatgttgctaacatgattctttacagcctccaccgcttaaacttgctatacaagccagatttgattgtctatggctcaaatatctcgcccttgttcttgaaccatcaattgcgctgagtttaggtgtctttgagttctgacctgctatttttctgtgggtgaaacctaaaccctaacactnttacaaaaatcttaaagcataagaagacctcacacatctagagcgactcgttcacctatcgtacttctgtcatacaagccatgcctagtcatgaaactcgccacat

SEQ ID NO: 164541 - DNA, 358 bp, Glycine max
tataacctgaagcaactggagcgtggtaacttgttaccctctgtgtttgaatacaaattgtacctgcccaacggtctggggtagcgccctctgtgagcacatacagaactttggccttccctgccagaacctggagcaattgaacactctgacacttatgctgcatatatttacaacaacacctcctcaagcttagcagcagaatcaaccacagcagaacaattatgaccttttcagcgacagatacaaccctggatggaggaatcaccctaaccttagatgttccagccctcatcaacaacagcagcctactccttccttccaaaatgctggtcggccacagagagcatacattcct

SEQ ID NO: 164542 - DNA, 398 bp, Glycine max
  unsure (1)..(398): unsure at all n locations
tgagaagaatttcttctgcaacatcctattacagttacttattaaaccnagcactagacagttttcttgagcttatatcatagccagcaactgctacgtaggatccactgtgatcaaactccactgcaagatacagaaaattacatgaagggcttttgagatgagagtaaactatctttttagtccctacagctatcagaatttctgcttttagtaccttatcttttttttcatccttacttttaatcctttaacttttttccatctctacttttaatccttttaagtgactaaaattaagggactaacagtaacgacggaacaaagttaagagactaatagtcaggaaaaacaaaagttacaggactaaaaacaaatggaaaaaagttcatgtccta

SEQ ID NO: 164543 - DNA, 195 bp, Glycine max
caatcccctttacaatacactagagttttgacatgctcagagctgcccgagttccattgtgtatactcagcacaacacagatcttcacgttacacggataactcatggatgataaaactcataacatatgcttgactgcgcataacaacatataagcttaaagactgaccatggacatgtctaatacgataaata

SEQ ID NO: 164544 - DNA, 425 bp, Glycine max
actgcagatgcagcttgaaagcgtggactgaatatgttttgtattgttttggccagcggctcagggataaaggaatgtcccacattatttccatgacacgcgtgcaacaatgatgatttacaaatttatgcaaagctagtcatgcatgcacctatgcggacactcaagcatcaagctttggggtcgtgtgacactatggctcaggactcaagcatcaatctatgcattcgtccgagtccattttgggtgttcggaaaattccacagcattcacccttcaaagtaattttgctacctaaacatatgcatattttgtgtgtggcatctttgctacctaaacatatacatacatattcaaagcatttttgctacctaaacatatacatatatatttttgtgaggtgttactaccttcctagtttgtgc

SEQ ID NO: 164545 - DNA, 359 bp, Glycine max
gtacataacgtcacggtttacgacgcagccatcatgttttgttacttcatcgaacaataaaaagagatcctgattctctgccttctgatcaattcacatcgcttataatactttgcacacccaataacaagcaatacctttctacttcatgcaataggttgataatatcaattgataacaattctacctttaatgttttccgatcataagagcttatagaatagtcatccgttatcataaaccactgcgctagagtaagtctacaacataaacaaatttacaaacactattttattaaaacaaacaacactttatggtgatcctgcctctaacattgccaattgtgaggatttgatgac

SEQ ID NO: 164546 - DNA, 394 bp, Glycine max
agctcaaacattcaacttcgagcgtctcgttatattactactctccatcaaacatccgagagaaacagttttgctatttgcatttgctcaaacgttcaccttcaattccgagcgtctcgttatattacaggactcacatacacattccagcaaaaagttattgtcgcttgaatcggcttataccttcaacattcaatttccagcgctttcatatatgatgggactcaatcacacatccgcgtaaaaagttattgtcctttgaattggctcagagcttccacattcaatttccagcgtctctgatatattacgggcctcaatcacacatccgagtaaaaagttatcgccgcttgaatcggctcccagcttcaacattcaatttggagcgcttcca

SEQ ID NO: 164547 - DNA, 326 bp, Glycine max
cgtgcattactattctcgtttcgcttaccttttataccccctgctgacgtgcttaacccattttacttaagtcatttctccgcttcacttaaaaataaaataaattttcaccgcacgttcgaattgtattatccattaccttcggttaaaataaattccgaccgttcggtcgtgccgtaaccacgttggaaatcaacaagaggccacacataatatcataatcaaaacgacatcttttagtaaaataacagcggaaaactaatcggacgttttctctctgggatttctcatctttaatcgaattgaataataactcaagtgaaact

SEQ ID NO: 164548 - DNA, 444 bp, Glycine max
ctaagctatgctgcaacatctaaatagaccagcgctttctcattatgtcttacaccccaaccgaacaattatgagcctctcgaacaacagcgtatatttccggcggaggacatcatcccaacacgatcaacaacaatcctatttctaaaatgctattgccccaagcacaacatatcattccttcgacacatccagcaacaacaacagcgacagccccagatacagcaaacagctgaggctccttcgccaccttctcttgaagaatttgtgaggcaaatgactatgcataacactgcagcttcaaaagagaccagagcctccattcaaagcttaactaatcagatggtacaattggctacacagctaaatcaacaccagtcccacaaatctaatagactaccttctcaatctgcccacacatccgaaaatgtgagtgccattaca

SEQ ID NO: 164549 - DNA, 347 bp, Glycine max
ctgcattaggcagcaccaatacacacacgaatatggctcctgatcggaaccagcttcagagcatgaccaagccagaacatgagtttattaaagaatacgcccaaaggtggagagatctcgcagcccaagttgttccgcccatgaccgagagggagatgatcacaattatggtagatacgttgcctacgctctactatgacaagctgataggatacatggcagctaaccttgcggacctcgtcttcaccggagaaagaatcgagtccggactgagaaaagggcacgttgaatatgcctcaatgtggcccccaacaacaacagaagagccccactggtgggcacgacga

SEQ ID NO: 164550 - DNA, 434 bp, Glycine max
ccttcggagagaggagagggaccaatcacgaggcttacacttttatcttgaaggacgagtagaaggtctgcctaatgtccaagagaagcttgtctcagcgtttatgcgagacatagaccaacatatttgcccttgtctgcaagtacccagatgaactaaattctagccacagcctatgagcacaaagtggtggacgagtatgccccagtgtaccctgaaaaataagctataggaagggtgatcaactcgttacatcaagaggcaaccatgtggatggaccgatttgctcttactctgaacgggatgtaagaactctccccattgctagccaatgctaacggaatggtggacacctacttccgccctgaggagatgcacagacttctcggctattgtagcatatgatacacttatgggccatattattagacacc

SEQ ID NO: 164551 - DNA, 429 bp, Glycine max
atccttgagtcgacctgccgcatgaagcttacatgaaataacttttgattattaagaatggaataagatactcctagctatatgtgcttggaagaatgagttgaagactcctttgaaagaatggaagtagagagaatcgaagagtcatttgaccgcatagaagaaaaattatttttcttgtaaaaaagttctgtattacaaaaaaaatattcacattaaaaaaagattcatatttataatatcctacaaaatatttttatattaaaaattaaggatccatatttctaatataaaattagttgtgatattttagaaagttaataattactatactaatatcttaagacaagtgagaaatgttgtggagaaaaaaaaaaccaaacaattagtgtgattaatttactatatattgtgggaagtgaaaaatta

SEQ ID NO: 164552 - DNA, 62 bp, Glycine max
acttcaattctagctcgcatataaagggggttagaagtccacttatatatatattaattggg

SEQ ID NO: 164553 - DNA, 403 bp, Glycine max
  unsure (1)..(403): unsure at all n locations
ctgcagctgcagctggtagcctagccttattttattttggcacctatnctagatagcaaaagtcttccctaaactcacaaatggcaaccacctttgcaccagctagtcccaaaaacaaaacttacaaaattatgctcacatgccattgacgcatttcaccgagcacttggtgggcgcatctctaggcatgaatagtaacggaatgtgggcaatgtggcatgtccaatcacttcacgcatcatcagaggcctaaggcccttccacacaaccctccaattcgaaaaacaaacaccaattccaacatacattgcttctccgattgaagcaaatacatgcaacttacagcaccacaactcatcaatggaaagctagacagcccaaaatcgacgtacttacttgttgc

SEQ ID NO: 164554 - DNA, 431 bp, Glycine max
  unsure (1)..(431): unsure at all n locations
tctntgagacaacgtccttgagaagctttatcttatctattcacacccctctcataactaagctcacctccttgagaagcttccttaacaagatccctaaagatgcttgagcttagctacacatacctctctaatagctaagctcacctccttgagatgagaagctagagcttagctacacaccccctataatagctaagctcacccctatgacaaaaaacatgaaaatacaaaaaaaaaaaagtccttactacaaagactactcaaaatgccccgaaatacaaggctaaaaccctatactactagaatggccaaaatacaaggcccagacgaaggagataactattctaatatctacaaagataagcgggctcatacttagtccatgggctcgaaatctaccctaaggctcatggagaacctagggcctt

SEQ ID NO: 164555 - DNA, 416 bp, Glycine max
  unsure (1)..(416): unsure at all n locations
agctcgcataactgatggaagcccgctngttttatcttttggacgctggatctttgagcttcaatgaggctcttcaaaggtgattttccaccatggagatgcaggcggagataaaggagaagaggtgagaggaggccccatccactacggaataagccctggaagaaggagcttcacgaccaagagagtgccttggataagaagtttacagaggaaacttcactggaggaaaagaaagaaagagagaaagagagagaggggagcactaaattgaaggacgaaaagagggagagaagttgaactttgaagcgtctcacaagactctcattcatcaaagctacaataagcattacacatgcttctattatagcctaggtagcttccttgagaagctacagcttatctacacacacctc

SEQ ID NO: 164556 - DNA, 292 bp, Glycine max
  unsure (1)..(292): unsure at all n locations
aacgacgcccaacgaaattatagatacaaatattctctccctcatcccccgagccagcggccgggcgggagccangcccctcacactatacaccctcacacggcaccagagccagactccgttcccgcgacctcgcactcgctcccgctatgacgaacacccaccacgcgttggccacgcaccaagcccacaaagtgacgggcgcgaacggggcgcattggaaaaaacccaagccccacaacggccgcctcaaccccgggagcatagcccacatacccatcagacaacccca

SEQ ID NO: 164557 - DNA, 372 bp, Glycine max
aagactcgaatttagaatctcatcaattattcaaatactctattactacattaatcctgggtaatgtatctacatttatatagacatgtacaaattatgcctttcaatattttttaatgcgataaacaattataataagcaaacacgttgattattttgttgcaaactggagtttaaaagtagtcattctttcaaacttcaaattctgaactgcaaaaaacataatcatgtccttctggctatcattttgtgaatagcgattcttataagaaatttatttagaaaaatggcattgaaatcgggaatataattataaaaaaaaatatttggatttttatcttcttgctgattttaatatatcctaccttatct

SEQ ID NO: 164558 - DNA, 383 bp, Glycine max
acaagatattaccgggtcacaaatatgtaagatataacaactttttatatcctccctctcatagtggaatttctgtagcactttatgcaaatacatgtttcacgatctaagtcagattctagaagaaatgccctgatattgttcacagtgctatatatccacagtgagaagaccacttatcaagcatctctgaatgctaataatactgctactggttaccaaaaaacacgaagagcaaatccatactcatcctttgtatatgattatctccttatgtaaggctcttttgtgtcacgaaacaaacctgagttgatcactcgacttccaatcatattgaatgagtaaatctgaccaaaccacgaaactatattgtcctggaatct

SEQ ID NO: 164559 - DNA, 297 bp, Glycine max
tataaaattcttgtcgaaacaccctgtcaccttggtgggaaaaaaatgatagataccatagcaacggggttcaaatatgcacacccatagaagcggaatacccctgcggagcactgacccatgctgggaaactgaagacctctatccccttggaacatcaacctctaatacagaaagacaacgcccgcagatgtccaaaaaagactgaatgtgatgctatcaacatctataaatctttgttataggcgcctactttccagccacattaaaaccaccacagtacatcactaaacatac

SEQ ID NO: 164560 - DNA, 292 bp, Glycine max
cctatgcgatctgctctactccccactacacatctcatgatctcctgcataacatacaagctccgatgatttcttaaatcacgagttctacaaaaaccgtatcaacttaggactaaccactgttcatttgctacgtgatgcctttaacgaccttgccatctgtccactacttattgagggattgggatcccatctaccatcttatgtgttactacattcaattcgaattcattctatgtcacctgccacactggctaaagagaaagagaacacatccgaacacacaacctgg

SEQ ID NO: 164561 - DNA, 333 bp, Glycine max
  unsure (1)..(333): unsure at all n locations
aaatagctctatttcgcctccaccagacaagatcccacaacacactcaagagagctctccattgatgttcctacaccacaggacaatcagataaatttatctccaaccaccttctccaatcccagaatgtatagaaggcctcactatattatcttccaatataacaattccacacctacttacactcaatgcantctcacaacaaacgcaaaagtgtatcaactctagcttgaccaaccaaccttgtaatgccctgaaatactactcattatacatccatattcacctgaatttatcgtgtaatccgactatatggccgaccttaatgacgtg

SEQ ID NO: 164562 - DNA, 386 bp, Glycine max
  unsure (1)..(386): unsure at all n locations
ctcaggactntaacacctgctcacgcagcagtatttggttgtattgtaccaatacacgccttaatacatgccttacacatatacatgtatatataatacgatgagaatcctgaaactggcccaatacacgctaaaggcccaagtggagaatgaccaacgctcaagtggacaacgataaacactctccactggataacgacgaaggcctacatgcacacacactatcaagactatcaattgctactgaacgcccaaactaatttaaaggcccaaactaaatatgtccttagttctaacttttattcatcgcaattcttcgcccaaacctgtcacatagctcatgcctatttctatcttttcgttcacatacactataactattggct

SEQ ID NO: 164563 - DNA, 393 bp, Glycine max
  unsure (1)..(393): unsure at all n locations
agctctgccacagcacgatccacaatcanatcctctcttagnnnnagatccagncctttctcccttggagttcagtactcgccaattcaacgttttaaacccactacacagttcattagagagcaaggtaattaaattaagaatttattttggctgatatcttttggtgaatctgaatttcaattaagatttgtccagctaagatacatacgttatgatattcatcctattaaataatgattgatatgctttgagttttcttaaaaattttattggcaggtggggtatttgcaacactgatgccaaaagaagagtattttcatgaaactttatacacatttgatatacgccaaaatgatcttacagctggcttttttggtaacatgaccctac

SEQ ID NO: 164564 - DNA, 165 bp, Glycine max
ggcagcatcacttatactcctctacatgctgctaaccccctctataaatattgaacaagcggtcgctataattctcgggtcagggcatctctgacacaattcttgaccatctaccagtactcatccaagctttcttcactaccatgcttgacgctttaaatgtcc

SEQ ID NO: 164565 - DNA, 301 bp, Glycine max
atactttatacaaagcttcatacattgctccctatatttggatagattgttcctcaacaactcacgggaactagcaaacctgatcctcagccatatatggtgagccacaaacgacacaatccggggatgtaagagaataccccactactgaactttctacacaatatatttcgttatattccatctgatcatcacatcccatgagacacttcaaccccccataacttaacaacaccacgaacaccgcctatccattaattgagggtggctacatggatttcacacgatgtatttcggttta

SEQ ID NO: 164566 - DNA, 326 bp, Glycine max
aaataagctactggatttcaagcataaacatagggcgagtcaagcttaagcgtgggtcaagtcaagcttatagcgtacgtcaacgcaggcttaagtatggaaccctacaaaatgtgtatgaatgacccctaaatgaattctaataggaagatccttactgcatgggaatcataagatgcacaaatacgctttaatgttacgttacgagaacctactttcactaaatatctatgaatcgaaaagctatgtgtacactatacccgactgaacaaggcgatgattaagaataagtaccatttgcctaagatagatgactgatgggccaa

SEQ ID NO: 164567 - DNA, 358 bp, Glycine max
aaatccgaacatgagaactcttgttccaaaaatgtctaactaccttacgctaactcttttttcttttgccaaattaacaataatcacgtttccggggttgaagttagcaatgttatataccaagatatttatggaacctcagcaacagagattgccgttaaaatcaattgtactccaaagtatccatgcattggaataagtttggaagatgtgatgcttacatatgaaagcaagcaagccgtggcttcatgcaatcatgcccgaggaatcacatctggtgtagttcaacacaacaactgcttctagtattgtaactaccactgactgaacactgattaaacccttatgttattccttg

SEQ ID NO: 164568 - DNA, 246 bp, Glycine max
  unsure (1)..(246): unsure at all n locations
acgagcatccaacggcgaccacaagccacattccaaatattccaaggcncccgcgccgaccgaggccaacgcagaacacgaccaccacacacaccctatatatgaaccgcacaaaacacacacctcctcaatcgcccccaaacatcgttaacaccaccccctctcagggggccaaccaccaaccccccgctcccaacacgacttacgcacacacccccctcccacaaggcacacaccactcactcg

SEQ ID NO: 164569 - DNA, 304 bp, Glycine max
  unsure (1)..(304): unsure at all n locations
tacctatccttaacagaacatactcataacattccaaaataaccatcatttgggagagtttgatacaatctatactacttttattcacaaaagttagctcttctcaccgactaacaactcccccaaatttacagttttgcttgtcctccagcaaaaagagaacaacttactattgctcgagtgacaatgacatgcagtgactatgtacaaaggtgtatgctacaaagtgactgattgcctgataagacaatggagtaaaatggcctaatctactttnctttacaaggtctgcacttattccaac

SEQ ID NO: 164570 - DNA, 411 bp, Glycine max
  unsure (1)..(411): unsure at all n locations
agcctatcgtaatagagcacagagttgttcttctctactatgacctnatctattcaagagtgctctatatgatatcgactaccatgtgatactaaccgatcacttctctttctataagcacgtacacaagtgaacaagaacactttaatcaactactttgagtatctaatcgattacaacgctcttgagctgtctctacgcgtccggaagagcactttaatcgattaaaaagataactaaaccattactttattgaatcaatcgattattggcagttataactgttttctatataaataatcagcttgcgttctcttctaaacaatctcactatctcgaaaataacacaataagccttcgaatgagctaagatcatgtgctgctattacgctaagacagaagagaatcaca

SEQ ID NO: 164571 - DNA, 449 bp, Glycine max
ttatatagaccaactcatagaagacacgacatctctaatctctttcacatcaacaagccaggtgagcaaagcataaaggctgcctctaatcccaaaaataactcgaagctaagctgacgggaccacacccgatattacccgatgagccctctcatataaaaaacattgagcttccctgctctgagcgaccgcaccataacaccaagtgtcattaacgaaaaagatataacatcttcatcttatgcatcctacaaattacgtgtatggaaaactctggtatttctattcctaaatttaatccaaccgtctctcgactctcggaacaaaagcatacccccttaggtacacactctatcatactggcatgggagcaatctctcaacgcgaatcatgctacacaaaaaaaaatgcgtctacaagtaatgatggacacttctaactcctgcttc

SEQ ID NO: 164572 - DNA, 254 bp, Glycine max
tgctccaatttgatcatatcgttccattacgcgcctccgatttgctaaaaaagtaccaattgcggcaaattcacttgccgcatctttatcatcattttatttcaaggcgcaggaacaaataatattgacaacgtgtgcttaaattaccacaccagctggatattattgtctttgcaaaatgctatccactctgcacccggtgatttatcatgtattatgtaattaatatgactaaaatcagctaactggacaaa

SEQ ID NO: 164573 - DNA, 374 bp, Glycine max
acactatgaatactaagcttatattctagaagatgaagacgaatctgtggtctccttatggactcctctaaggacaacagcatcatttcttgcactgaattgctgggagctggaagccatcttctcaatcaaattcctagcctcaacacgggtcatatcaccaagagcttcaccactggcagcatcaagcatactcctctccatgttgctaagtccctcatagaaatattgaagaacgagtcgctcacaaatctggtggtgagcgacagcttgcacacaatttctcgaatctttcccagtactcatacaagctttctccactaagtttcctgacgactgaaatgtcttttctgaatcagtggccctagatgcac

SEQ ID NO: 164574 - DNA, 443 bp, Glycine max
  unsure (1)..(443): unsure at all n locations
cttttaatntaatgagggtgaatgacacatccgctggtatctatagcaagaaatatgttgatgcaccttcaatacttcattcttatccatagactctcttatcttcatttgcctcaacatctccttttttctccgattgattgtattctctgaattcttacaaaacttgtccattggtccttctttagtcccacactatgtctttgcacttgcagtagcattacaagagttcgcaaactcatcatcttcacttccatcacatccaattggttcaccaaattcaaaatctcttatatttgccatattaccactgcagaagtactgtaagtggtcccactttttttggtagtcatatattccttcaactcttcgactacatctggtggagttntcttgcaagctgcaatgttacccgacttcccaatcacgtgttgtttggctct

SEQ ID NO: 164575 - DNA, 390 bp, Glycine max
  unsure (1)..(390): unsure at all n locations
agctntgctgagcttagagatgtttctatttatttaccttnccttcctctttatccaccccatataaaattcttgggttctaaatttcattttgcattattaattggcaccgaaatcttttacagattttgaagaatctgcatatgaagatggggtttatagaccatcccctagctcccgagagaggcgtgccagaagacaagctaacaaaaataacaaaacatgacttcattcaatcatcgatctatgcttttgtcaaaggtgtggtttggtttacccgattcaacagtgagatgttcagccgatgaaaagcgatgttatgccattatgtgtgtagtgagaatgatctaatttgtttttaaataccactatttttctttttttctttta

SEQ ID NO: 164576 - DNA, 444 bp, Glycine max
ctgtcatttttagcactaccacatcacttatctattttttagtatgaagcacatgcgcgtataagacggtataattgtttcaatcttttggatgtaacgctgatacatggaatatgatagaatatgcctatggtagcaattttattatgtagagactgattcttgtacaaaatcttaacattgaaagacgatgaacgaaacctaaatttgacggaaatcgctcctaagacgggcgaatgagttttttcaccgtgggacccttgcccttcaaatcagaatcgaaaatgtttacaatcgagatcaaggacaatgatgaaccgtctttgtcttctgcttttgtttggtgtgtgtctttttgtggtaagatcgtttatcctgccactaagcgtgtcattaatatttttggtattgtattagcgataacaatcaatgataattataatt

SEQ ID NO: 164577 - DNA, 437 bp, Glycine max
  unsure (1)..(437): unsure at all n locations
tcacacacactntcattccgttgttcatgcgaaaaagagacagcttcgtaatgacttaacgcaatatttttctaaacaatagttctatttatgactatttgtttcgcattcaaaccattattgattctctttcaatgattggagagcgtgtgtctgaatccgatcatgttgacatagttcttaacggtttaccgaatgaatttgagttgctcgtcacttttgtgagtggcaagtttgagtcgctctctattgatgaagtctcgactcttctattggctcatgagactcgtatgactcgcaagaaatcacttgcctcattcgttacttcgattaatctcgttgaagaagcaaaacctaattccaaccctaatttggtgcaccaggattctcatcctcgggcttatgttgctcaaggttttggctcatccttgcactct

SEQ ID NO: 164578 - DNA, 435 bp, Glycine max
  unsure (1)..(435): unsure at all n locations
tactaagctagcaagtattgagaagtgaatatcctttctgattatttattatttgnttgggatctctttataaagaaataaagtgcttacatcgattcaacttattacttttttgagaggttcattatcataagaaaaatgtaaaggcttaacaagttgttttgagaaggtgaatatacaatcttgattctcagcttagatcttttgtcatgatgtaaaaatttactttcgtttgactctctttctctcgctcacacatgcataatgtcccaatgtcgaattgtttgtgttttgtctagcgtccttgttcttcatctttgcctaacaacatgattctgaggttgttagcatccaattactaggtatagtcccatattggaagtatgtgattctagtgcgggttttatagggccttgagcgttcttcattattctc

SEQ ID NO: 164579 - DNA, 303 bp, Glycine max
  unsure (1)..(303): unsure at all n locations
aagcttgcatatcagttcttatgaattctataaaactaatatcctatattgattatcacccaattagttgttgtcttgcatagcattttgcatcacatcatcctctggaagcttttttctgactgtttctcccttgtgaatcattcatcccatattttgaatggcttgtcaatgtcaaataatactggacctgtgtcttgagaatgcaagttttttatattttcaagatatttacttttttttttattttcaaataatactggaattgngtcatttaattatttgttttgggggggggggggg

SEQ ID NO: 164580 - DNA, 386 bp, Glycine max
atcctgcccatggatagtaaggatcgagctttgggcaaatggtccccaaattgggaaggaccgtttaaaataattcagatctattcgaatggtgcttatgaattagaggaattaacccctcagaaacgtactttgagtataaatggtaaatatttgaaaaaatataaaccaacattgctcgaagttaaaataagtatagaatagacagaaataatggaaacataaaaatggcgataacagtaaaattgccacaaaagggcatgtgtcaatattacatcaaaagtagaatcgaaatacagaattcgaaataaagaaattataagttctactaatgcatgactaagtcctcatatagtttcttcaaggtggccatctctttgctcaaa

SEQ ID NO: 164581 - DNA, 425 bp, Glycine max
tcatgatagttcgggcagcactgaccctaatggcgggcattatatttactcctcttcttgctcttcggcatcgctgtcgcagccgttgtcgccaccttcgattttttaccataattgggcgaacgatttgttctcgccggcctccgtttccacggagtgtcaatcaatggaaacagaggagttgttcgaaggttgttctctggctagattgccttccttcgatcccgagttgatttgggaggttctggccgcttaattcattaatactgtctttctgtctttaattaattaggttacttacagcgaccaccgctgatgtcatgtgtatatatattattattagcgtggtcttgtttttgtttgtcggaatgatgagaggtcctttaccgttttgagtacgattggtatggctgtgggtcttttgc

SEQ ID NO: 164582 - DNA, 426 bp, Glycine max
cttgcctgagaggaacgtggaggtctattatacagttttttatgagttcaaggaggaactcgagagacgccattgggatgaggagttgactgactttggtgacgacaacatcgatgttgccattgtgaaggaattctatgccaacctctatgaccccgaggacaaatcacctaagcaggtaagggtgagaggtcatctgattaagtttgatgaggacatccttaacactttcttgaagacccctgttattgttgaagagggggaatcactctgtgcttattctagatttgcactcctgaggcctgatccttatgagttggctgctaagctctgtatcccagggtggggattcgagcttcatgctgatgggcaacccttgaagattttaaggaagaacatgaccaccctagctcagacatggagccg

SEQ ID NO: 164583 - DNA, 430 bp, Glycine max
tgtgttgcaacctcggacactgtcggtgagcaatgtatgttattatgtggtgaagcctaaaggagttaatctgtttggagaggtgagaccgacggatgttgaattttcgtagagtaccgtatgctgacttttgttttctccctcatcatcctttgaaagaaggtgtggtttgtcatttattggtttggttttgtggatgttgcagtgtcagcaatgagattgatgtggattgagcttggcggtgcttttgctgaccttctcaacgagaaaaggaaatgttctgttgaaaacgagatgggatatgttcaaagaacgcttggctttcccactttctcctatttgaccagactttgtaaagtccacaatataatcactcctaattaggctgaaaatttgaagcattttaacttttaaactccctttcatgttt

SEQ ID NO: 164584 - DNA, 410 bp, Glycine max
cacactaacgtcaacctaccatcctcggactgatggcctttctgtacagaccattcggccattggagagaccttttgatggcgtgtgtcttacagcataaaggacgctgggagagttatgttccattgatgcagttcacttataacaacaggtttcactctaccattggcatggctccttatgaaactttgtgtggtggaaggtgtaagacacccctatgttggctataacccggccaaagcctgaccttatgatctaaagcggtacaacaaaccaccgtgaaagtcatgtttatccagcagaggatgaggactactctaagttggctcaaaatctatcatgatcagaggaggaaagcatccgaattccaggttggcgatcatgtattattgagagtcactccgtggact

SEQ ID NO: 164585 - DNA, 428 bp, Glycine max
tcgccggatgatgccgatcgaacatttctcaatctacatttaccaatattcattcagggattgaatagaataaacaatggccggtgtcggttgctatatggccccgactgatatccttcggccgacattgcgcaatttcttttagaaaagctggccgataatgtttttttacggtagaggaagttttttgttttgatgttgcctacaaaatttacaatgtacgtcggctaggtttttccgtgcgagctcaaccgaggttgtgtttcggccgacactggcatgttctcatttagttggccaagaaaacattagcccaccccggcacaaaaaaaattatcattcacggaaattgatcgaaaaaaatgatagctgacgtccgcgtggagagatgaccgatcgaggtctaaaaaggaagcatcaccggatga

SEQ ID NO: 164586 - DNA, 425 bp, Glycine max
tgtatgagtactgagaaagattcaagagattgtgtgcatgttgttctcgccaccagatttttgagcaactcattcttcaatatttctataagggacttagcaacatggaaaggaatttgattgagaagatggtctccaactcccaacaatttagtgcaagaaatgatgctattgtccttagaggagtccatgaggtggccacagatgcatcttcatctactgaaaataaaaagcttgagggaaaacttgatgcattggtcaacctagtaactcagctttccatgaatcagaaatttgcatctacgcctgttgcaagagtatgtggtctatgttcttctgcagatcaccatacagatctctgtccttctttgtagcaatctggagtcaatgagcaacctgaagcttatgctgcaaacatttataat

SEQ ID NO: 164587 - DNA, 352 bp, Glycine max
atatgcggctcgactgattacataacacgacacatagttgatagtcaagcttctcccattcaggacttttatcaactgaaacaaaatccgatgttttctccaagaggtcatggtgtccttgaccaacgaaacacaactacacggaagcataccacgaaagatagttattccagttcagctttgcagcggagatagttggagtcccacaatacgaaaaaacaggtccagaggaggccatttaagagccaaacagccgaccctaacacacacgagaggaagacacctcagagctgacctaactgctcgccagaagcgggatgtgaagcctgaaatacacccccgaagtgatgac

SEQ ID NO: 164588 - DNA, 373 bp, Glycine max
gcttggcggccacgctcaacacagtactttcgacacctactgtacgttgatatgaccaatgctgctatgggaatgtttcgacaatccttcaaaaccttattgatacattctgaaaggttggttgtcatgtggccatatcgacgtccttctctatcataagccatcgtccatttttcctttgaaattcgatcaacccatgtggctatggctggactcagttcacgaaatttttgtaaattctgataaaaaatgtgcttgcaaggagtgtacgctgcataaaaatagttatgaataacaattttaagtatatatgaaacttaaataaacgtcaccatcaaataggaaatcttacccaattctttcaacatttctt

SEQ ID NO: 164589 - DNA, 412 bp, Glycine max
  unsure (1)..(412): unsure at all n locations
acatgtcgatgacgatgactctatattttctgattggttgtggaaacagagagtgggaggctacttctgcttctagtctgcgaagactattaactcacactcattgggagatggaaacgtcaattactggaacatgcccataactcataaatataatcctagaatggcaaagctcaatctacagccagcagattaattgcagcactaactctcatatattttctactttcgaagtctttgaaatcagcgaacaaaattgaaatcatatatttaattctaaaataaccggcacaatgcgctacgctaaatatctcaagtgacattatcaatcctgatgcgccccattcattgacttatgttcattttgacgacagacaaactccctcctacctngacagcgccccctctctct

SEQ ID NO: 164590 - DNA, 423 bp, Glycine max
  unsure (1)..(423): unsure at all n locations
ttaagttcttaagttgctgtttaaaaaaaagcgatttatgtttttttgattgaaattacgatagttgaaagtactcttaacatgaacatgcttcctccaaagtgatactcgtgtttgtttgttttaactaatacattattacttcttgtaaaatgacacttcgaaattcataaaacctaactataacgggttcacaacacatgttcttcgnatttttattttatttttactccaatgcacttttagaggtatttgaacgatttttcagacagactaaaatatttctttctcaatttatacattaaaatgcatattttttgtattgaaattctgtaaaaatatttttgtaacattaaaccaaacatagcattaagaaatccactttgcaaatttttggtagaatatatataagaatttgatgac

SEQ ID NO: 164591 - DNA, 245 bp, Glycine max
ctacctgataccttgggtgataatgaacaccgtttgcctctctaaactagtggttatacgagaaatccaactcgacaatcatcctttctcacacacagagtcgtaacatcattaatacgtaactctctcatgtggtaaccaaaaaccaacatgactgatactccatacacactctaagcttgcatggctctagctatgatgcgaggctcacatgaaccagactcacatgggcatcatatatactt

SEQ ID NO: 164592 - DNA, 459 bp, Glycine max
acatagaaactaagctttcttgagaaaactctcttgagaagcttcttcgagttaatttcttgttaagctagagcttagctacacacacccctctcataactaagctcacctccttgagaagcttccttaagaagattcctaaagaagcttgagcttagctacacatacctctctaatagctaagctcacctccttgagatgagaagctagagcttagctacacaccccctataatagctaagctcacccccatgacaaaaaaacatgaaaatacaaaaaaaaagtccttactacaaagactactcaaaatgccccgaaatacaaggctaaaaccctatactactagaatggccaaaatacaaggcccagacgaaggaaatacctattctaatatttacaaagataagcgggctcatacttagcccatgggctcgaaatctaccctaaggctcatgagaa

SEQ ID NO: 164593 - DNA, 426 bp, Glycine max
  unsure (1)..(426): unsure at all n locations
acctataaatctaagctctcagcccttaacatgcgcaccccatttgtgtttttggttatgaaggcngatcgncgcgggattggcgtaattttcgtgtgcgtcacgaaaaggggtgagaataatttggcgagtggaaaaaagacggatttctcatgacttggcaatgccaataacaaatttggtactgtcaatagtagtgcctaatgatgtttgacttaagtctagtgatcatgtgatgcttgacccaacctcaatgaatccatgtgatctagtgatgtctaaccaaccccaataaagcccaagtggcaagcttactatttatattagactaatacacacattacaaaattatcggacaatgttcatcattaatgctacactttcagccttacacgagctagtacgtcattagttttacactcgcgc

SEQ ID NO: 164594 - DNA, 55 bp, Glycine max
acccccccaccccaaccacacaataaacaacgcccacccccccacccccaccccc

SEQ ID NO: 164595 - DNA, 439 bp, Glycine max
gaccatagaaactaagctcaaagacatcttattcatacatcaatatatatattgtttccacaatattcaaataaaacatatatgaattattaaaatatacataaaacacaataccaaatgtaagtacataccactagtcatatatcattaaagtaatcaagtttaaaacacataatcataaacaaccaagagcaagtcaatataatcatcatgttcagtcatactaagcaagtattaaaagaaatactaagtaatcaaatgtcataaaaacatagccaaatacaaggcttaaaaacaaaatataattataatctaaatctattatcagagaatcaaaacttaattctaagtaacaaaaattagttatgaacacatacatggtaactgtaacgacccgcctcgtcgctatggtatccacactctaatattcgatgatttc

SEQ ID NO: 164596 - DNA, 434 bp, Glycine max
  unsure (1)..(434): unsure at all n locations
ntgaanagtgtgggtnttaccttctcgttaagttaacattctatctgctggcttagcgagcgtccgctaagcgtaacactcatgggctaagcgcgaggaagactctggtagaagatgagatgtacaggtttgctaagcgcaccgcttcatctcactaagcgcactgcttcagtccatccattaagtgagaaaggcgcgcgctaagccaaaattcactaaagtgcgctaagtggtccataattgcgctaagcgcacgagcacgaacaaggccacctatttaagccagaaatcagattttgtgaaaggagtttgggctgggattcagagctttgcatgtctagagattctagagagagaaaggtccaagttctagagagttttgagagattctgttgtgtgaagatctgcagagactagagcttgaagcaggagcc

SEQ ID NO: 164597 - DNA, 421 bp, Glycine max
  unsure (1)..(421): unsure at all n locations
tggagaggatgcttgcatggatgaaacaaattatgtnatttttatagaggggggagcacgaaattgaacgaatatcaagggagagaagtcgaacttagagttgcgtgtgacaagactctcatccatcaaagttacgacgagagtcacactcatgagccttgagaagctttctcgagaaaacttacttgagaagcttctttgagaaaactgccttgagaagctagagcttatctactcgcacccgtcgaataactaagctcacctgcttgagaagcttccttgagaagattcctcctgaaactagagcttagctacacatacctctctcatagctaagctcacctccttgagatgagaagctagagcttagctacacaccacctataatatctgagctcacccccatgaccaaaacactgat

SEQ ID NO: 164598 - DNA, 442 bp, Glycine max
  unsure (1)..(442): unsure at all n locations
ntagcctcatcaacacgaccatgtacatttcccaattggttcantcaactgttttaacaacaaaagcatctgtcatgtcctcagaaaaattattcacagttgaacaagttagaaggctaacgttctcaaaccagcatcctccattcatttacgaataagattgattgccctcatggatgcaggactcaagaatgtcctctccaaataaccactagcattatatccaaaaagcaacattaacttccaagaacaataaacaattcatggtccaccagccactgaatgagaataataagcacagtgaattttgactatgaagttatgtgcattttcctggaaggatttggatcattcaggtcaagaacagagattcattcgaactattttgactatgaatagaaatattattataaataaaaaattatcagacaaaagtaaagct

SEQ ID NO: 164599 - DNA, 322 bp, Glycine max
tataagacacttttccacgatttgaccgttgggatctttgccaagatgtgcgggagtgggccgcgaagctttcgttcccgaaagcatttctcacttgagcgtttcagcccttgctttcgtgtaccttacgagaaacatcatttcttctcctttctttcttccaaagccagttttaacatcccaagcactttcttcatcacccataaccaccattagcaacccacaactgtcattgttctccgttgaaaccccacatcgagaggaacccttcaaccgaagcggaatcttccaacttaccttgcggtttccgtagagaacgaaa

SEQ ID NO: 164600 - DNA, 430 bp, Glycine max
ctcaagcttgagatgaggaagtgttgaacggtgaaacttcctgctcttattgtttaccttttattggacctgcagatatgtcgcgggggtcatgagatcttggggacgtcacgtggggtgctattgcccaaaaccaagcttgaccaatcccgacccaacccgggcatagtcggtcagtgagaacctgtgatgtacctaaacaagcgagctcctggcagtcaacagataaaaggaacaaagaccacaaagcaaggaggcttgtggtggctggccagctgtgaactttgattgatatgtgggttatggcctctggtaatcgattaccaagggagggtaatcgattacaacgcttaaaaatgaagacacgaggctaacatggtctctggtaatcgattaccacggggtgtaatcgattaccacgcttgaaaac

SEQ ID NO: 164601 - DNA, 408 bp, Glycine max
cctgtggtactaagtgttggtcgggcgatggtgcacaacacgttttgcacattcacaaacaacattcagacagcacatgctattacagccaagccaaacagggcaaaggcggaaaactctgctcaaacaccaaccaaaatcctatctttttctcacttaaagaccccaatgacaatttcttcgatccaattcgttaaccgttggatcgacttcaaaattttactggaagcctatagcacataagcctacattctgaccgttgggatctactataaaacatccagaactgattctgcactagactttgcacacgcaaccacacacaagcaatgtttttgacaaagccaaagatctgctgcacctattttggacagaaaatattgcataagtgcataattccaaaatcac

SEQ ID NO: 164602 - DNA, 372 bp, Glycine max
ggactactttccttagcacccttatgttcaatatgttggataaataaaaatacttctttctttgctatatgcatgagagtttcaatgctagttgtcacacaaatgtatcacgcaaaagtacctatcacataaagagcggctatcgcatctagaatgcatcaagaagttttcgattgtgtggctacattctttgggtccaaaggcattacatggaaaaattactacatacccatatctaacgggaatttctatttaagggagatgtcaccacacgttatgcatgatggtggaagcagccaatactgtatcatcatcatgattttgcacagaatattagccggtgaaagagcactctatgcaatgatgctggtg

SEQ ID NO: 164603 - DNA, 437 bp, Glycine max
  unsure (1)..(437): unsure at all n locations
ntatagatcaacttgatctgtatggtttactaactcacttatttttacagatcaacatgatccgtaggactcatggattaacttgatccatatgactcatatgaatcaatttgagtgaaagatatttttgactcatatggatcacccattaaaaaattatgtaaaaaatttgatccaatccaatccattatataaaaatttatttgatctattcattaacattattttcatggatatatataatccatctaccaaaataaaatattttaaaacttaattatctttaatttaaaaataatatattttaaaaattttataatactttataaaataataacctcggccaaaaatggcctacacgattattagccgaccttgacccgaggttaatttttggttgaaatcgatttcaattattcttcagttgacgttggtca

SEQ ID NO: 164604 - DNA, 428 bp, Glycine max
  unsure (1)..(428): unsure at all n locations
tgtagcaaatgcaaacggcaantaacgtttactcggatgttctattgagtcacgtaatacatcgaaacgctcgaaattgaaaacagaagctctgtgcaaattcaaacgacaatacattttaactcggatgtccgattgagtcccgtaatatatcaagacactcgaaattgagaataaaagctctgaacaaattcaaacgacaataactttttactcggatgtccgattgagtccagtaatatatctagacactcgaaattgagaatagaagagctgagcaaattcaaacgacaataactttttactcggatgtccgatggagtcccgagcgtctcgatatattatgcgcctaaatcggacatccgagttaaaagttatgacaattttaattgctcaaaagcttccattgttcaatttcgagcgtctcg

SEQ ID NO: 164605 - DNA, 429 bp, Glycine max
ttataagcgcgggtctgggagacaaaggtcaagtggtctttatatgctaagatgatgttccgagtacattggatttggtacgaccatgccctcctgatttccagctgggaaattggcgagtggaggaacgccccggcatttacgcaacgagcataatgtaaacctttacggttttaaaagctttatagttgggcctaggctttagagtttttccttttgttaaggctttgtgtcttttgtttttgaatttataataaaaggatctttcttcatctgttcctacgtctctacccattctcattcatttgcatgttcacttctttttctgaaacgacagatccgatgacgagtcccccgaaggtactaatacctgcgacccgcttatcgacttcgagcaagaaatgaatcaaacggaagatgaaggaaatg

SEQ ID NO: 164606 - DNA, 447 bp, Glycine max
  unsure (1)..(447): unsure at all n locations
aactatgaaactaagcttggttattaatgcgttgcaaaggcggaattttttttttatccctgtttcatctgaataaaaccatgacttttgatactcaagaaagtgatatatataactcctacacgtttattagaaattatgtcttttaatttcaaagtcgtctatgactctatatacagaattggtctacatgcatgacagagcaactgcaagggttgatatatagttcattggagaaaccttcngngatttttgctataaaataagaacgctgacttttccttcataacacttaatttccacgaaattgcatggatatttgatataaaaaaaacaaataaaataaaataagcggatgaaaatgccaaacacaaaaaaaaagaagagaaataggatagatcaaatacgtgagaaatgaaatacactttacggatattttctacctac

SEQ ID NO: 164607 - DNA, 432 bp, Glycine max
  unsure (1)..(432): unsure at all n locations
ttagcaactctctctttgtgtttagccaaaacttctaatgtctcttaatctctcctcatctaaatcaaccaactcatctgacatcattttccaataatggtcgattggaatgtccatttgtttttgtaccctggctgattgcaaatgtatctcgaccggaagtacaacatcatgcccataagtcagtcgaaatggggtagtattagttgattccttaggagaatttctacatgcccatagaacttgatctaacgttttattccaatttcttggcttttgggcaatgtgttttttaatcaagttaattacaatcttattggctgcttcgacctgaccatttgcttgcgcgtaatatggtgttgaggttaataatcgaaagccagttttttgggcaaattcttgcattnttcgtccagtaaaaactgaaccttg

SEQ ID NO: 164608 - DNA, 420 bp, Glycine max
tggctaatatgcatatgagaagcgccttatcttctcgttaattagcaggggatatgcatgcctgctcgacattataatgaggaatttgccgatatgaccgcaacccctgacattatacacatcctcgtctatactcctgcataggatggaaacaaaatcatctaggaaagactggggcgttactggactaatacatctcttacatcaggccgacgaatggagctactgtgcactctattccggggactcataatggatattgatacctagcggaatacacttggccatttcatgctttatcccaacgtacacagcgatcataggcatcttgttagtaatgctatccatcagcgaaacagattcatctctgctggagtattggctggagtatcatggcattaacaattactataaatctga

SEQ ID NO: 164609 - DNA, 408 bp, Glycine max
ccccccccccacccatccaccccatccattcccccccccgccgccctatctgttaccccctaacacaacctccagaacaacacagcaccaggccctttttttctttcacacgcagccagcccccgaatgaaagaccacctatcaatccgcacaacatcaaccagcacaaaccaacccaacctgaacaaccaaacgccaaaccgcaaaagggcctcgaccctctaaaatgagaagcgccacaccaagacaaagcgaaaatcacaatacacgcgtaaaacaccacacaataaaattatactaaaaatacatatataacaaaccataatggcccgccatacacatatatacacacatatatatatacacatacacacatatatatatatatacaagccatcacacatgcta

SEQ ID NO: 164610 - DNA, 431 bp, Glycine max
  unsure (1)..(431): unsure at all n locations
tatctatgatatattatgcatgccatcatatgtcatatttatttatccgagattcataaattaatgttaatatcccaatattgacataccctagctaactctaggtaacggtagatcaatcctatatcagacatgaaattgattaacaaaaattcttcacaagattttcgagcagtattgctcctgcataacatattccactatatcccccggcgttaataagaaaagttaaataatattatcaaaaataaattgcggtgaatcacatttgataacaatttaattacgtccacgttaagatgcatgctctttgaattnttgacacaaagaactgaaccacctttggcacatacaagcatcattgaattctctgcaccacgggcttatataagtggataaacatgcacgatccatggaattaagataccata

SEQ ID NO: 164611 - DNA, 428 bp, Glycine max
  unsure (1)..(428): unsure at all n locations
atcttgaagaaggatagcacataaatgggtcaggttgtttatattgtattaatgagggctattctaccccccattgatagatttctttgcttccattttgtaagtttagcctcgcatttgctaataatgggctgccacacagacctatttttagagctgacccctacaggaattccaaggtaagagaatggaatatccatttaactacaattgagagaagatgctgcctccctacaccagtcctcggatttgcccaaacacccaaattttctcttattgtagcttatcttaagaccagagaccaattcaaagcttttcaggatacactttagaattttccncatatcttctccatatgcaatggccaccttcacgatttgaaatcaaataaagattggttggtggtgctttctctcgtgtccagcaat

SEQ ID NO: 164612 - DNA, 437 bp, Glycine max
  unsure (1)..(437): unsure at all n locations
cttctaagacattnttccacagtctggccggttgggatttgagaataataacttttggtctcttgctaagcaagaatggagcgctaagtgcaattccaaccaaagagggaatcgcgttgagcgcccagaggtgcgctaagccagactccaacagagagggaattgcgcttagcgactagaggtgcgctaagcgagccctagtgcagagggggctgcactaagcctaaattcttatgctaagcgcaagaagtggacttcggcttagcgcgacaggctcgctaagcgaaatctgcaacttataaatgcgttctcagtgtgaaaaacatgatttttcactctcttcttctccaaaacaccacccaaaccctaaaacctcatttttccaccacccaagaccataggtggccgctgtaagccaccgttgcttgccattgaac

SEQ ID NO: 164613 - DNA, 446 bp, Glycine max
  unsure (1)..(446): unsure at all n locations
tactaagcttctatccaaagctcatcttggtggctaagctacttctttctttgcttattaccttgaggatggggcctcctctctcctcttcttcctttacttccgctgcatctccatggtggaaaatcaccattgaaggatctcattgaaccttttcttgaactttacgtttccttttgattgtgtctattgcgaatttgagttttggtgattgaattgctggctgaaatgctgatcctaaatgaatattgaactcctaaaactgtggtaaacaatcctagtgagttcaacatacataggaaggttgaaagtaagcccaaggcaatcaatataccatgcttaaaaaaaatatcgcttgtgctggcagcttggacatacaaacttgtaaaaattactgagaattggttactttaaattntgagctgaaagttttactgaattttcta

SEQ ID NO: 164614 - DNA, 438 bp, Glycine max
  unsure (1)..(438): unsure at all n locations
agcatttggagaggttccatcaaccgccctaatttcttttgctggtgggatctaagctnttaaccttgacttggtagaacctcttgccggtttgatttgttcccatgcttgctaaagtgagacaaaagctggtgcaaatcaaaactccgatatatcatgggtggaatggatgaatgcatgaaggaatgcatataacacagatgtaatctacgaatgcgggggtccggggaattcgtcctcttcttagacacaatgtctaggggtagcaaagtgccccaacgtacgtttttaagaaggcgacacggaccctccgttggtttgtatacagaagggatcaagacagaacccatatgcgatgcctatgcaaaagacacaatgcgggaatgtacacagtatgataatattcactgaacataagcaaaacggtatatgatactt

SEQ ID NO: 164615 - DNA, 351 bp, Glycine max
  unsure (1)..(351): unsure at all n locations
tgtaatttcactgacaaaagtgtccacatttccatcatcattgattatgtgctctgttggatccagcggcctcataataattaagaaagggggggggttgaattaattatccctaaacctttactaattaaaaaattactcttttaaggcttttacttttgtcgctcagacaatatcaagtccaacacaaccttaaccgaaagtaaaaccggaaattaaatgcacagcggacagctaaacactacggaagaaagacaccaacacacaacagtntttatactggtctcgcaaccacccgtgcctacattcagtccccaaatgacctcgccgtccttgagatttctttcaacc

SEQ ID NO: 164616 - DNA, 386 bp, Glycine max
gttgaacaagcataacaagactttgtgtgattggtttatagatacaatctttgcagatgagaatgcttcagaaacattaagaaatctatcatatgggcctaaaaaaaatgttataacctgtccaggatacgacataaacaggtattcattttacaccatagcccaagatgacaaaagttccatgcagaacagcggggtcaccctaagggctgaatctcaacactttgcaagtgtcaatgacgccaatccctgtgtagcttccatcccttactttgggttcattgatgaaatttgggagcttaattatgtgaaatttacagtatgtgttatcaaatgttaatgggttgacagcaacaccggtgtgtgcaccgatgatatacgattta

SEQ ID NO: 164617 - DNA, 53 bp, Glycine max
ccccccaccaacacacaacacacccgccccccccaaccaccaacccccttgac

SEQ ID NO: 164618 - DNA, 447 bp, Glycine max
  unsure (1)..(447): unsure at all n locations
cggaactataaaactaagcttctatccaaggcattcttggtggtgaagctcctttttctttggcttattccctaggggatggcgccctccctatcctcttctcctttgcctttcgctgcatctccgtggcgaaaaatcaccattgaaggacctcattgaagcttaaagatccaacctccatagaagctccacaagcaagcttccatcaagtggtaatcaaagcacaagagcttcaagtcggtgctccttaaacctccattaattctttatctttaccttctcttccattcttgtttcttcatttttctccatgtatctcctcacatgtcttgttctaaatgttgttaacatgattctttatagcttccaccaattaaacttgctatagaagctagatctgattntctatgggtcaaaattcttgttcttgtccttgaaccatgaatt

SEQ ID NO: 164619 - DNA, 433 bp, Glycine max
tataactatagcttctacatccgacacgtgaatcttctattctattttatgctatcaaaaaattgcgtcaaacgcagttaaaggatgcagaagctacaaactgtagcttcaagttgacgcgcctaagtgaggtttcaaatgcggaagcagacataataaaactggagagaagtgcgattcaacttcaaaaataacactgagattgtcgccaaaacagatttaattggcgatttctaaagatgccttcaataacaagtccgtcacagaaattcggacacagatttcattcataaagtacagtaacaagcaattaacatcaagatctagttctctatgttcaacaatcgattccagcacaatgcctgataccaaacacgctcgcaattgcaaaagacgcatagtactatgagttcactgaaatagcttggggaaa

SEQ ID NO: 164620 - DNA, 427 bp, Glycine max
tcatatcttagtaattcgtggaatgctacttctgaatactaattggtatgcatggcaatatttccttgccccataaattaaatttcaggataataagtaaatagtttcattttgtcttttttaacaaaactcacttgacaaaataggaagttcacctatcggatctacttatcatttttatgtattcaactaatatattaacctagtaatccacataattatccatacattgtggtggatttaaggtgagtctatcaatatatttttttaaaacattttcattctccaaatttcaagttttcttttttggtatacaatggttattagaaaccttagatcttgtgtatactctctaattaaggggtttgatagaggataaatttttagttttccaaaaattataagttgggaaccttaattcttcata

SEQ ID NO: 164621 - DNA, 422 bp, Glycine max
tcaacatcagaccacttccagggtgctggaactacttcacatggatttgatggggcctatgcaagttgaaagccttggaggaaagaggtatgcctatgttgttgtggatgatttctccagatttacctgcgtaaactttatcagagagaaatcagaaacctttgaagtattcaaagagttgagtctaagacttcaaagagagaaagactgtgtcatcaagagaatcaggagtgaccatggcagagaatttgaaaacagcaggttcactgaattctgcacatctgaaggcatcactcatgagttctctgcagccattacacctcaacagaatgggatagttgagaggaaaaacaggaccttgcaagaggctgctcgggtcatgcttcatgccaaagaacttccctataatctctgggctgaag

SEQ ID NO: 164622 - DNA, 353 bp, Glycine max
agtctgaaaagagtttgatgaacttagggacgtcaatatggccaccgctgaagccttggaacgagaaaccaataaggccccaaaggaagaatacgaccaaagaaaagttttgaggggctttatagggcagcaatagtgagctcaagctccgaagaggtgaaaggaatcatcacgggtcaaaggcatgatcttgaaggatgagctaaaggtttgccttacgtcgaaaagaaatttgtcccaacagttaagcgagactgaagggaatatgtgggccatcatcgataagtgcaaagagaagctaaatctatcggcgactcacgagcaaaggctagacgatgagtacgcccagatat

SEQ ID NO: 164623 - DNA, 437 bp, Glycine max
  unsure (1)..(437): unsure at all n locations
tactaagctnttggcttcttattgtgtgtgtaacccaatccagccttctcgattcacatntttggggacaagtaatgcttcccaattgtctctccccatacagaagttggataaagctttcaacaagtattctaccttgagtccttgacttctaaaactttacatccttcacacggggaagtgacattagtggtgttagcgcaattgcaagaagagtcgttcttttctatttctaaaatatcattttttgctatttcttccaacgactctttctaaatatcgactagcttatctacatgccaccttagttctccttttagaagattatttgcaatggataacttttgtgcttcttgatgcatttcattgaaagcatctagtaactgatcatagctatcatcaactcttgaatcaaaaatgcactcttagcttcattg

SEQ ID NO: 164624 - DNA, 434 bp, Glycine max
tccatcaagtggtaatcagagcataagagcttcacagtaggtgctttttttatctccattaacctccattgttgtttcttcatttttctccatgtatttcctcacatgtcttgtgttgaatgtttttaacatgattctttacaattttcaccggctaaacttgttataaaagttagatttgatttcctatggttcaaatttcttgttcttgttcttgaaccatgaattgcgttaactttacgttcctttgagttttgtcttgctatttttttgtggctgaaacttaaaccataaaattcttacaacaacattaaagtataagaaaacctcacaaatctacagtgacgtgttcacctattgtagtttcgtcatagaagccatgtctagttatgacacttgtcatataagaattcttatgttatgctcgaatttat

SEQ ID NO: 164625 - DNA, 440 bp, Glycine max
tgaaatgctctgtcttgtgttctcctaaggaagaataccccaaagtctcacaacttcggaagtgctaagcatatgtgggacacactggccataacatatgaagggacatcataggtaaagagaaacaagttaactctcctcatgtgagaatgaattatttactatggtagaaggtgaaaatatataatgtatgtttggatgcttccaaatcatattaaatgaactaaatctttaggaaaaagatataataattatgatcacattgacaaaattttgagaagtctatctagaaagttgagaccacaggttacaaccttgagagctctaaagaatcttgataccatatccctctaagaacttgttggaaccttaaaggtccatgaacaagaacttcaacaatatgaaggaatcaagaacgacaaatctcttgctctcaacgc

SEQ ID NO: 164626 - DNA, 431 bp, Glycine max
cttagaaaataaatgagggagataatatgcactttgtttatagtgaaactccccttaaaagcgtaatcatggaataaatagagagaatatttgactctgccagttactactaagtggttatgcacctatgctctaggtcaattattccttttgccctgcccggactctgaacttttgcggtagcttctattctagacaaaggttcaccaaaattcctactcgataaaagttaaatttatcatctccgtccaataactgttttaagtgttattgaaaggagaggataacgaaagaaaatgagtaataactaataagtaagacgatcttttaagctgtttgatacgagaaacacatcaataaaaaataaggtttatttttatttttatttacttctggtgaaccttgacaatattaaatataaaatgatgatc

SEQ ID NO: 164627 - DNA, 365 bp, Glycine max
aatctcatcatcatgcgttgatctatgccgcctaagacactctgtagaacgaatagggtgataatgatggacaaacccatgctgtgactcgtattgctatacagctcaacttgccaccaacccaactatgtaattactcggcctataaccaaccttctccttaaccaccgcccatctatccacaatagccatacctctaacaaccacaaagtctgactacccgcctatcaatgatgaacataagctttagcacagtccccaaacaccaacctagaaatgaattttgctttgagaaatgctgttgaattcaccccaactcctgttgtctatgctgacttggtgccatatctacttgatcattcaat

SEQ ID NO: 164628 - DNA, 425 bp, Glycine max
  unsure (1)..(425): unsure at all n locations
taaggcatgtntccatgttcaaatcaaatcagagtttcgatagttgttcttttatcaagtccatgcaaaaacatctaaattcatttggtatttacgaaagccattcattgttttcattcttaatgtttccataaatccttttgttgtgttctgatccaatcaaaagtaagtttcaaaaatactagttgctgattctttccaaagcatgttatgctcaagatttttttttaactcctaaaaagagttatatataatctataactacactaacaaaacaaaatatatcaaagcatgcataaattggttaaaaacacacaatcgcgtaagtttctaagcaagaattcaaaatagtaaataacgtaataaagtactaaaatttaatacaaagcgataagtgaacataaagacaagtcaccaatttttta

SEQ ID NO: 164629 - DNA, 433 bp, Glycine max
  unsure (1)..(433): unsure at all n locations
tgcttctancaatctcccctttttgatgatgacaacttctgttatcaagaaacacacacacattttttcctagtcgatcactcacataaatttccattctccccctttgtttttgaatttatgattcacttaaaattaagtttattactcatgtgagttcttgatttaatccctatttctctccccctttggcatcaacaaaaagccaaagtgcgtaacaagtatgaaacatacaaatacaactaatcattcacacaacaatcatggagaaatataaactaatcatgaagcaagaaacatgactagatcaaatatatagaaaaatcacatagtcatataacataattcataattgttcaaacacaccatgcaaataaagagttactaaatcgttcaaatgtcataataatatagcgaaatacacggctggaaa

SEQ ID NO: 164630 - DNA, 421 bp, Glycine max
  unsure (1)..(421): unsure at all n locations
ntacattactcctcatgcttctcaccatgtctaataatgttctatttcttcgnntcgccacaccattttgatccggagaaccaggcatagtgtattgggcaacaatcccatgttcttgaagaaattccgcaaatgaacctgatgcttgtccatcctttgtgtatctaccatagtactccccacctctatctgatctcacgattttaatttgttttccacattgtttctcaacttcatccttaaaaactttaaaggcatctaaagcttcattcttagaatgaagtaagtagagatacatatatcgtgaataatcatctataaaggttatgaagtatttcagactatttgcatccatgtctggataacatatgtctgtatgtatgatttctaataaattagaactcctctttgcacccttttt

SEQ ID NO: 164631 - DNA, 343 bp, Glycine max
aaactggcgcaaacgaagatggtgacaatgaatgacaaacccatgctgcgactgtcgttcctaaatagaaaaatccttaccagctcaacaaacatcattactcagccaatatcgaaccttctcattccccaccacccaattatccataaaggccatccctaaatcaaccacaaagcctgtctaccacacaaccaatgctaaacaccacctttagcacgaaccaaaacaccaaccaaaaaggaattttgcaccaaaaagcctgtacgattcatcccaaattctggtgtcatatgctaaacttgctcccatatctacttgataattcaatggtagccataaccct

SEQ ID NO: 164632 - DNA, 370 bp, Glycine max
ggctattagcttaattcgccaaatttatgaaatatatgaattccatctttaataacattaaaaagcaagatgaacttcttgaaatgacatactaaatttacaagttttttaaagtctaaggaacaaattcagtgatacaaaaacagagggaccaaatttataagagaattttttaaaaaaatatatattacttgggttaagaaaagggacaatctacagaagagaagatcagtcatcagagtaattaaggtgctatattataacgaatcataaaacaaatagaatggtctgtgccatacacaattcatgcagtattgtatctgcgtatttacacaagagccaaattgtataccagttacggacatgcctt

SEQ ID NO: 164633 - DNA, 63 bp, Glycine max
cccccaccaaaacaacaccccccccaccacaccccccttgctgaactgaacccaaccaccccc

SEQ ID NO: 164634 - DNA, 379 bp, Glycine max
  unsure (1)..(379): unsure at all n locations
tccagcatgtcatcgagcccgtcgcctttagatgacaaaagacgtatanagacgacgttagcttctgcgtgctatcatgctctgagtcttataaatacgaaaatggtttgggcccacatggatcccgcatgtcaatcggccaggcgcctctggatgaaaaaaggtgcacaagacgaagttaatctctacgttctatcatgctttgagtcttatagaatgccatagaaagtgtgggacctaatggtttccgcatgtcatctagcctcccgcctttggatgacaaaaggcggataagacgacgttaatctctgcgtgctattatgctttgagtcttatagatagcgcatagggatgggaccatactgctcccacatgtcat

SEQ ID NO: 164635 - DNA, 430 bp, Glycine max
  unsure (1)..(430): unsure at all n locations
tactcaagctnggccctataggaagatgcacatcatataataatcactatgtgaatttatttctaatagggctcctgtagaccttgtctatgcacgaagtaatataatccacattcacattcaatagtacctgaatgttcggaagctttaatgtatgtttctgtggtcaactaatgcgtacaactgttgctttggataaatctgatgaaaaatttaattatgatcaggggcccacatcctgttgccatcttctaattgcatccatttgttcgtttttggatagtgtcggttgctaaataaaataaaataaacttgtgtgatttactacgcacgaataatgataatgaaaatctgaaaatgggttggctagaactacaacacgggccttgatcctatacctcactatatcatctctagcactctttaactt

SEQ ID NO: 164636 - DNA, 363 bp, Glycine max
cgctattatctttcatacatcatatactcttcttacattagtcgatcaatcatgtccaataatactatctcaacttatcataatatacttaatcagccatatcattcaatccactaatattaaaaaaacacataaataactatcatgacattgtttccacaaccaatacgaattctattttggctgacgaaataaacatatgatgaaattattcgatgagcatttgaccaaggagcatttcacgaaaatcatatttgtgaaaaagcttatgaaataacttatactgcatgtcaaaaaaattaactcaatttcatgcattattaatcaaattctttcgaccctattaattgacttacttaacat

SEQ ID NO: 164637 - DNA, 434 bp, Glycine max
  unsure (1)..(434): unsure at all n locations
tgttcgaagatcctcgagatgttataagaggagccaatctttcatattaaactttcaagaagtttttgaagatttctctagatgaaaactataacctgcatccttttgagttcaaccattcccacttctgcaccatagggtttgttacctggtgggagaaatattattcgggccgttcagttggagacactactatcatgatctccagacttgagagtggttttacacaaccaacggtcgagaatatccgctcaaaccttcaagctcgaggtattaacttacttttgactttctaaattgatatgtattcttgccttttctaatattcttactttcaggcaaaacaatcatgacgaagaaaatngctgaaacgtctcgagctgatgtgagacccaagaaacccactggggtgaagatccaagaatggaaacaag

SEQ ID NO: 164638 - DNA, 423 bp, Glycine max
tcagtaacgaagaacaagagataatggtgaacatgtagatgctattcgcggcacggagggagagagacgagaatgaaccattttttttaaatcattaagctaggggtacaaatggcttttgtccttaagtgctgggtgcacctaacggcactcttgatggtggcgctttgagcccaacgtgaagattcactttgggaaggccaaactacaagcacaactcttgacattttatttataattattgttctacttttacgctgaattttctgatgactttttattttctcttagccttactaaatgctctctataagtgctccaaatcatttaatggctagcgggaataaatgttcatgcttattgccattctcctatgtagtgcgcatgcaattatgaatgcatgttaacgggaatttatttaac

SEQ ID NO: 164639 - DNA, 416 bp, Glycine max
  unsure (1)..(416): unsure at all n locations
aaaactaagctttgttacctgttgttttatgatgatgacattttttgatcatttactatangcgacatcaagacaccacatttctgtttcttactgcgttgctttctaacaggcaaatgtttatcatgcaactaaatctgatggtcaagaacttgccattaaagtataccaaacatctgttttggtattcaagtaagtacaacaactgtagcttgtttcagcctcttctgttgctctaaattgtattgaacgctgaagtgtctaaaaagaattatatacgcagccataaattcttttctttttaaagaacaaaactgggacatgtattcaagcataattcttttattggctttggtttatcatgcaaagcttttgtccatgtgctggatattggtatctttctcttctgttctact

SEQ ID NO: 164640 - DNA, 94 bp, Glycine max
acaccaacaccaacccccaccacaacacccccccaccctgatgactccaaccaccacaaacccgccaacaaaaacgaccagaaagcccccccca

SEQ ID NO: 164641 - DNA, 420 bp, Glycine max
tagcttagcccataaggttatccatatgtggttttgtacttaccatctttatctaacacaatggtcctaggcaaatcatgaagtctcacaacttccctgaaaaagggttttgagatgtgagaaacatcatctaccttgtggcatgtgtaccatcttgctaaacctatccaccaccacaaaaatagagtctacacctttttgggttctaggaagcccaaggacaaagtctatactaatgtctacccaaggtgcagaggggataggtaagtgtcgcaacctaccctttggcgggagggcgacgcggggctcaccggtgtgtcatccaaggaaggaagccacgcgaagtcgccaccaacgtttatttgaggaaaacatcggaaaaaccggaatgtgtggggtctacgaactttaatcgcgaaa

SEQ ID NO: 164642 - DNA, 431 bp, Glycine max
  unsure (1)..(431): unsure at all n locations
actcagcttttntttgttattttagctctcgaagtttatgtcttttcaattctagnccctttaagattccaattttttcattttcagctcttcgaagtttatgttgggaccaaaattgaaaaaacgtaaatttacagagactaaaaatgaataaaatatcttcaaagaccaaaattaaaaaaagtgcatacttactaggaccaaaattgaaaaaatacgaacttacacggaccaaaaacatatttgagtctttttgctttggttttttacaacactatcactcatgcaacaagcaatacattcaatctagagtttctggtaaagttaatatgaagtatgctatatggatatttctacaatgttaattagtcctacagcatccacacgtagccgcttcacttgtattctctgctctccacaaaagttaaaaa

SEQ ID NO: 164643 - DNA, 79 bp, Glycine max
ccgcgagacaaaaaaagaaacgggcccacaaaaaacacgcctgactgacctgaaaccaaccccagggacacagaaaaaa

SEQ ID NO: 164644 - DNA, 423 bp, Glycine max
  unsure (1)..(423): unsure at all n locations
tctntgagaaaacttccttgagaagctagagcttatctattcacacccctctcataactaagctcacctccttgagaagcttccttaagaagattcctaaagatgcttgagcttagctacacatacctctctaatagctaagctcacctccttgagatgagaagctagagcttagctacacacccnctataatagctaagctcacccctatgacaaaaaacatgaaaatacaaaaaaaaaaaagtccttactacaaagactactcaaaatgccccgaaatacaaggctaaaaccctatactactagaatggccaaaatacaaggcccagacgaaggaaataactattctaatatttacaaagataagcgggctcatacttagtccatgggctcgaaatctaccctaaggctcatgagaaccct

SEQ ID NO: 164645 - DNA, 439 bp, Glycine max
tgcggatcaattcttagggttcaatagctcctgacatcacaactgttccttcttccgcgtctttctaatttccatttgacattacaacagaatgtacttggctttgaaacttagctagccatcgtgattttctaataaattttctcgtgcattttactaagcttatgcgagagtatttgaaaatcttgctctgatgtgtttatggtcccttccaacttaagagtgctaactagcaaaggtataattttcgacatttaagtcattgaaaataagtcactaatttgagcatgacccataaatgaaacactcacactcacgattatttgggtataccataccctcggattagtgaagtatattctttaaatggaccgaaatatattaataagtgttaaaatgaatgataaaataacattaaatattttcaatcgcgttctta

SEQ ID NO: 164646 - DNA, 273 bp, Glycine max
ctaccttcgtgcgccgtgatgaggggagccatgttaatttgtttccagcacatcacctcctcctcttacgactatgctatacacatcttatcacaaccaaagcgcaccagggaggaagttgcatcaaaaacctagaaataaccccaatgtgaggtctatgcaacatgaagatctgcagggggccataactctgtgggttgctaaccatcattttcaaggatacacagaaaacagtgcgcacaaatggagagcccgtgcttcatcgtcaatgat

SEQ ID NO: 164647 - DNA, 317 bp, Glycine max
catagagaggtaagcactgctgtttcctccctggaatcacattatcattcttctcccagagcaatcgtaagagctcatgaaaaagcgatattctggggagcggttctatttgcgataaatcttcggggatgatgctgggatgggcctcgtgatggaatggaagaaagagcgttcccttgacgccaaagatcattcctttctactccttcacaaagctcgtatttggttctatagagataatgggagctgtaatccggttgaactaatgctcagattgtgacatcgatacttggaatgatgatggtttgctttttatg

SEQ ID NO: 164648 - DNA, 234 bp, Glycine max
  unsure (1)..(234): unsure at all n locations
ccctntaaccgccccaaactatgcgccttttatttgagacgaaccgagcgggcaaccacccgccaatacagcaccaaaaaacaaaccaaccacccccgcccccaaagcacaaagcacccgattgaccactttacgtcacaattaaatccttgaaaccatagacttcctgaatattactcatcctagactttcctaaacctaatacttcaactaaaaccgcacctcataatatgc

SEQ ID NO: 164649 - DNA, 429 bp, Glycine max
ccccgtggtatcagagctaagagctcacgcattttgtttttttacctccattaacctccattgccgtctcttcatttttctccatgtatttccccacatgtcttgtgttgaatgtttgtaacatgaaaatctacaactttcaccgggtaaacttgttataaaagttagatttgatctcctatggttcaaatttcttgttcttgttcttgaaccatgaattgcgttaactttacgttcctttgagttttgccttgctatttttttgtggctgaaacttaaaccataaaattcttacaaaaacattaaagtataagacaacctcaaaaatctagaatgacgcgttcacctatcgtagtttttgtctacaagtcatgtctagtcatgaaacttgccatataagattccttactgtatgctcgaatttatttt

SEQ ID NO: 164650 - DNA, 438 bp, Glycine max
actcagcttttatccacgcaattcttggtggtgaagctccttttttttgtgtttattccctagtggatggcgccgtccctctcctcttctcctttaccttccgctgcatctccatggtgtaaaatcaccattaaagaacctcattgaagctcaaagatctagcctccatagaagctccacaagcaagcttccatcatggaccttggagcaaggtaatatagctagtcctttgccactccctctaaagaatgaggaaaggccttcaaaaatatgtgatcctcctggacatctggtggtttcatggtggagtagacaatatggaattctttcacgtgtttgtgtgggtcttcacctgcaaggccatgaaactttggaagcaaatggatcagtccagttttaagaacatatgggacatcctcatcagggtattggatgcac

SEQ ID NO: 164651 - DNA, 434 bp, Glycine max
  unsure (1)..(434): unsure at all n locations
tcacgctcaanatcaaggacagaaactgggctngaatctttttgattggntncaacttctatcttgttttttttctgacaaattgttttcttctttttcctcctcctcttctgcttttcaccaactgcaacttccttgcccttcatgttctgtgacaatttccctgcttcagaatcatcaaaacacttcttttcagatgaagccttggaatgatgcaaagtgttggtgatttcttgaagcttaccaccacttccaacactcccactagacacatgagagacccttttctttccaagtttccccttctcaatcaaaaccttctcatcacacactttttctctcttgttttccctcaattcacctctctctgatcgcacgttctgcttcaattctgcacaaacaggctccctctttctcctgttggatctgaattc

SEQ ID NO: 164652 - DNA, 435 bp, Glycine max
  unsure (1)..(435): unsure at all n locations
actcagcttttatccaggctcatcttggtggtgaagctccttctttcatgtcttattccctagtggatgacgcctnctctcacctcttctcctttgtcttccgctgcatcttcatggtggaaaatcaccattaaaggaagttagtcgtattcatcgactaacactgatgacattatttcctatttttcttgatttgattctttttgcccctttttttcttttgtggaaaacatagattgattgtctttttctagaagacccgataatttgtgcaacctcattctcttttttttttttgcaaatctccttgggaactccatcagagtgtatgttttgtttaatcacttgaaaatttgagtgatggcaatggagccgtttgacattcaatcaatcaaaatattgatgctagggttttcccttttccttttaaaactt

SEQ ID NO: 164653 - DNA, 419 bp, Glycine max
taaggttccaattgctggaacacagagctaccactctctttattattatgatgtagaatctataaccaaagactcagaaaaaagaggtcattttgaaacatctcttgtggttcttcaagaaggtgagaaatcagaagattccagtgcaaatgagtctcatttggctgctgaagctgatccttcacagctcaattctggaatcaatcagagaccaaaaagggtcactaaacctcctgaaagatatggttttgaatacatggctgcctatgcattacatgtagcggaataaatagattcaaatgaatcagccacttaccaagaagctatcaatcatcccgaagctgacaattggttgttagctatgaaagagaaaattgaatctttatataagaatcatacctggaaacttgttgaactac

SEQ ID NO: 164654 - DNA, 323 bp, Glycine max
cccagctacggccaggtattctgcttcagctgatgcaagaacaacaaccgattattgattcgctgttcaactgattgttgtaccaaacaaagtgaacatatatccacttaaggactttcttgtatgtacatctcctgcgaaatgtgcatctacataccctatcatcgctacctcatctgctgacttcttgaaccttaatccagctgtcaaagaaccatctatataccttactgtgcacttcacagcttgccagtgtgcactgccaagatctcccatgaatctgcttataatacttacaccctaagccacgacaggtctgctac

SEQ ID NO: 164655 - DNA, 454 bp, Glycine max
  unsure (1)..(454): unsure at all n locations
ttacgtgaactatgaaactcaagctntctcactaagttgcctgaaatgtctttctttatggttttggtcctacatgcacggaagaatttcttcaagaacaccctcttatggtcatcccagctgaaaatggacctgggagcaaggtagtgtagccaatattttgccactccctccagagaatgaggaaaagcctttagaaagatatgatcttcttggacatcacggggcttcatggtggaacaaacaatatggaactccttaagatgcttataaggatcttcacctacaagaccatgaaacttgggcagcaaatgtattagtccagtcttgagaacatatggaacaccctcatcaggatattgaatgcacaagctttcataagtgaaatcaagtgcaaccatctccctaagagtcctctcacgaggtggaggttgagccatgttctcagtatgaa

SEQ ID NO: 164656 - DNA, 422 bp, Glycine max
  unsure (1)..(422): unsure at all n locations
ntgagccaaaatcctgactcaccataaacctttatcccattttataatgtcaatccttaccctcggaagcaaaaaaagaatagaggggaaatttccaatccaagaaaaagagaaggaaaatttccaatgaaagcaaaaaaagaaaagaaggaaaattccccaatcaaagagtgggagaaagcaaaaaaagaaaagaaggaaaattccccaatcaaagagtgggagaaagcaaaaagaaaagaaaggaaaattcccaatcaaagaatgggagaaagtaaaaaaggaagaagaagaacgaaagaaagctcctgatcaaggatcgaaagaaaacagaagaaatgtgcagagaggtctttggaccggacaatatctgaacaatacagaattgccaccaaatgaacgaaaaaagaaggaaagggaac

SEQ ID NO: 164657 - DNA, 384 bp, Glycine max
aaaggactgcccacattatttccatgacacaaatgcacaaatgatgattcggaaactttatgcaaaactggtcatgcatgcacctatgcggacactcaagtgtcaaatttttatggtcatgtgatgctaaggctcaggatccatttcctctattttaatcaacccaatgtttccaacatatgttcttttatcaatttgtgcattcatccgagtccatttcgggcgtacggggaaattttacagcattcacccttcatgtgtagacacattttccaaaaattggttatgatcaatgaactttttcaaagaaaagttggaaatcgtcctttttcaaaagcatgctgttttgtagctatacaacctatttgttccttttgctacctt

SEQ ID NO: 164658 - DNA, 438 bp, Glycine max
  unsure (1)..(438): unsure at all n locations
tccgttgtccaattctgagcgtctcgatatgtgacnngcttgaattgtatatccatgcgaaaagttatgaccatttgaatttctcaagagcttccgctgttcaattttgagcctctcgacatattatgcgcccgaatcggacatccgtgtgaaaagttatgaccatttgaatttcccgagagtttccgacgtttaatttcgagcgtatcgatatattataagcctgaatcggacctcagtgtgaaatgttatgaccatttgaatttctcaagagcttccgttgttcaatttcgagcctctcgacatattatgcgcccgaatcggacatccgcgtgaaaagttatggccatttgaatttctcgagagcttccgacgtttaatttcgagcgtctcgatatattataagcctgaatcggacatccgtgtgaatagttatga

SEQ ID NO: 164659 - DNA, 411 bp, Glycine max
gcttcacaaagcacagctagctggcgagccgggatttctttttttccgcacaaacaggggagggaggatgattatgacagcgttaacaccttgggtattcagaagtcacttaaaattattgagagaagaaagaaggagaaaatccacaccatggcggtttcgtgacgtatctgtgatcaataccatgaacgttcttcaccgttcttcgttcgatctttgtcgcatgtcaatattcaaccggctagttttcgattatcaagctttgaattcattctatgcaccctgtagggcccattctatctttgcatgtgttcatcttcatctcgcctaatttccgtattatttctcttcgtgctaagcaaattgtgaccgatcgtgtagttataacctcacttaattcacgctaaaacg

SEQ ID NO: 164660 - DNA, 377 bp, Glycine max
  unsure (1)..(377): unsure at all n locations
cctcatttagggaattaaagaatacacagacaaatctcatcacgttttattacaaatctcaagcttagctatttcttaatcaaatgcgaattatgtgactcgaaataagttttacaatgaatataaagtttctcatatgtctctgtcgatgatggaatagtctccgttaagtgtcagataattggatccaacttatattgcagnccgggttctcacactctgttggataacctttgatacacaagtgtgactaaatcactttaacatcacttgaatctaattataattaaatctaactcattacaagtcaattatgaagcttaagctgtatctgccatctatctcacaacatatttctaaactaccagtagtgaaac

SEQ ID NO: 164661 - DNA, 387 bp, Glycine max
ttgacacgcgcgcgacacgccaggaccatttgaatttctcgagggcttttattgctcaatttcacgcgtctcgatatattatacgcctgaatcgcacatccgtgtgaaaagttatgaccttttcgatttctcgagagcttccgttgttcaatttcgagcgtctagatatattatgcgccagaatcggacatccgtgtgaaaagttatgaccatgtggatttatcaagagcttctgttgtcaaatttcgagcgcgtcgatatattatgcgcttgaatccgacatccgagtgaaaagtcatgaccatttggatctctcaagagcttcctgtgctcaatttcgagcatctctatatattatgcacctgaatcggacatgcctgcgaaatg

SEQ ID NO: 164662 - DNA, 456 bp, Glycine max
  unsure (1)..(456): unsure at all n locations
gacactcatagaaactcaagctntatatagattaattcatagaaaacattacacctctaattttttttcttattaacaagtttggtgagcaaatcataaaggttgtctttaatcctaaaaattacttgaagctaagttgaggggaccacacttgatattacttgatgagttttttcatataaaaaagattgagcttcaatgttttgagtgaccgcactagaacactaagtgtcattaacgaaaaagatatgatatcttattcttatgtatcctaataattatgtgtatggaaaattttggtatttttattcctaaatttaatccaattgtctctcgacttttggaacaaaagcataccttcttaggtaaacactttatcatattgtcatgggagtaattcttcaagttgaatcatgttagataaaaaaaaatggttttaaagttaatgatggacac

SEQ ID NO: 164663 - DNA, 418 bp, Glycine max
tgatgataaaagtgagaagtacgtcgttatgggtttcgattcatttccaacgcgtacaagctttataatccaaatagtggaaagatcgtcataagtcgcgacgtggagttcgacgaagaagattgttgggattggagtgttccagaagataagtatgattttcttccttattttgaagaagatgatgaaattgaacaacccatcataaaggaacatattacaccacctgcctcaccgacaccaaggctggatgaaacaagttccagtgagaggacaccgcgactaatgagcattgaagagatttatgaggtaacccaaaacctaaacgacattaacctcttttgtctttttggtgattgtgagcctcttagctatcaagaagcggcggaaaacataaagtggaaagatgccctggacc

SEQ ID NO: 164664 - DNA, 416 bp, Glycine max
  unsure (1)..(416): unsure at all n locations
agaaactaagcttctcacatctgactctctaattaccatgtggcatgttnttctgatgtctttccccaaaacatctcgaccaatgaaatccccttccctcttaagtgctttgttcgcctatcctcgacccttaaagacaatatttcatatatcaaggtctccttcacttgtacgtcatctaattcgatcacatgagatggatcatggatatgtttatggaattgagacacatgaaatacattgtgaaggttacaaatagacgacggtatgcacacttgagaatttggaaacgacccataaaacgagatatgagttttccggatttcaatgcttgaccaacgctaattcttggagtgactctcaacaatacataatcaccaatcttgaattctggcgcttgcctcatcttgatctga

SEQ ID NO: 164665 - DNA, 300 bp, Glycine max
cttccggtgtctaaatatgagaggctccatatatgatcattctgaatcggacatccgagcgaaaagatatgaccatagctatcgctggagagctccgggcgttcaattacgagcctcgccagatatgaagctcccgaagaggacatccgagcgaaaagatatgaccataacaatctgtggagaacttccggcgttcaaatatgagctgctccatatatgaacatcccgaataggacatctgagcgaaaagatatgaccataggaatttatcgagagcttccggcgtttaattctcagcct

SEQ ID NO: 164666 - DNA, 427 bp, Glycine max
  unsure (1)..(427): unsure at all n locations
tttaaagatnnggctaagatttgnnaaaacatattcactttgattatgaangaaagctggagttgctgcacatgatgtccaacgttatgtcaaagaataagatcgggctgcacaatgcacaaggcaagataaagtgtcaaatgaagaattgaagctgcaggattcacgatgtcggatacaatgtccaggacatcctgcctgaaaatactggaattgctaaaagcattgaagctgcaggatccacgatgtcggatacaatgtccaggacatcctgcctgaaaatactggaattgctaaaagcattgaagctgcaggatccacgatgtcggatacaatgtccaggacatcctgcccgaaaatactggagttgctaaaagcattgaagttgcaggatccacgatgtcggatacgatgtccaggacatctt

SEQ ID NO: 164667 - DNA, 417 bp, Glycine max
  unsure (1)..(417): unsure at all n locations
tctnctctgaaggatatcatgagcaagtatgacttcctatctattgaaggactcgccaaatagtctagtggtagttctgtttgctaaacttacaccctagacagtggtcgacctagttatgagtgctcataacaaggggataccttgcgtttcgtaagagcgtgtatcaagggtgaaccttgagacttgtaagagtgtataccaccggcagaccttgggattttttatattcctgccaaagtaaaagctatgaatataaaatattgtcaagggtacaccttgcataccttgacatgcttgcggaccttgacatccttgcgtaccttgggttttgcgagagtgtgtaccaagggtgaaccttaggtataacgagccttggatcgacgatgtatttgtcataggttatgacaaacctgt

SEQ ID NO: 164668 - DNA, 362 bp, Glycine max
  unsure (1)..(362): unsure at all n locations
tgcttaaggaaccaacttgtttctcgagcacatcattcaaaatacttgaagcctgtgatgcagtgtttccttcaaaagctagaagacctatgtataacattggcagcttgaatcagaagaacatagcatagaaaaaggaaaatacaagtggcaaaaacagcagtatcaataaaattaatcaagtatttaataacacaaatcccccaaaataaaatcattaactaaatagaaaataaccttcaaatgctgcatggaagctatcaaaagacaaattaagcaggtgttaaacaaaagatcactttcagaacaatgttcccaatgaaacaattagcctataattntatcattaaccagatacaagt

SEQ ID NO: 164669 - DNA, 402 bp, Glycine max
aaatatatcttcaaataggctgtcatgagtgttatggtaaacattcaaaagagacttacattatttgaagaagtttgactagagagaaagagagatagagagacccactcagaaattagaaggttcatgttaccctccaacacctcttttatcagacctaataaacctcttttattttatttaaacatgaactaaagacaactatgtaattcttttaaaaaaaaaaaaatgcaactaacacacgatagttttctcttttatgtttagacgtgtatcccttttcgcacattgtagctcctttttgtcatagcatatggagaacatcacatagcattatgagaaaatcatcgctaactacaaaattgaaatttgcttgtttcgaaattggatgacaaaatggag

SEQ ID NO: 164670 - DNA, 399 bp, Glycine max
cttaatggcgactttccaccatggagatgcagcagaagacaaaggaaaagaggtgagaggaggcgccatccattaaagaataagccattgaataaggagcatgaccacctacatgtgccctggataagaaacttctagatgatgcttcaatggaggaaaagaaagagagaacgggggagcacgaaattgaaggaataaaagagggagagaagaggaactttgaagtgtgtctcatcagactttcattcatcaaagttacaacaagtgttacacatgtttctatttatagactatgtagcttccttgagaagctttcttgagaaaacttccctgagaatcttgtctgagataacttccttgagaagctagagcttatctacacacacccctctcataact

SEQ ID NO: 164671 - DNA, 362 bp, Glycine max
agcttggttcgaggtacttattgttgaagatcgaagaacgatgaagaacgaatgaggaacgtcgaagaacggttgaaacctttgcgagattcctcacggaaaacgttacggaaacgtttcggaagtgcctcggcttagattttcttcacggaaacaatttttccaagcaaattcgaaagagagagaagtgccaacctggcttgcctgggcgagctcagctcgcccaggcgagccaggttgcttcctccagaagcaacagccttctggaggaatattctagagggcccaagtgggcctgggtgctatttgcacccccatttttactaagtacacccccctctgctttttttggtgattctttt

SEQ ID NO: 164672 - DNA, 466 bp, Glycine max
  unsure (1)..(466): unsure at all n locations
taggttcaattagtctaaacttacgatggatcgaggtttattatcttatgctacagcatagaacacanaagcatgattgattagagaaacatcttcatatggatcagcttgtttgttagaaagacccaatgcttttacctattgttgtcaacttatacttacttgcatctattgtttttaccatagaagtagtttatttttgttttaaccatccattatcagtgttattcaaacaatgccttatttctgaataaaactttgtctaataagcatgttccctgagttcgatactcggattactccgttttaatcttaaatacttgacgacctggtgggcttttcggtgtttcatttcccttgaatataattgttgaaaattggagaaaaaggaaccatatgggaaaatgaacaaagtatttatggcgcctgtgccggcgaacttaattcattagaagagttcaggtca

SEQ ID NO: 164673 - DNA, 361 bp, Glycine max
agcttcctttacacattttttgagaaaaatgaaggattgcagaaatacaagtagtggggatgtctcctccacctctagaacctcccaatcactcgtagattcatctcatgctctcagaatggcttcctcttcaagctcagttctctgccaatcttcgcacaacaaaatgtagacaaaggatcaagccgatgttttgatgatgccaaaagatcacatgcgtctcaaagctttattcaagacaaagcaattaaagatattcaagatagatgatcaagacagtctatagagtcttagaaagggtatattaaataagaagggaattccaattgaagtagcaaaaggtttggccaagaaaattaaa

SEQ ID NO: 164674 - DNA, 455 bp, Glycine max
  unsure (1)..(455): unsure at all n locations
aagctcgctggaaatctatggggctggtctttggctcctttgtgtccttcaatggngatttttcaccatggagatgcatcggaagacaaaggaaaggaggtgagatgaggcgccatccattaaggaataagccatggaagaaagagcttcaccaccaagatgagccttggataagacagctggagaggattcttcaatggaggaaaagaaagagggagagaaagagggaggggggagcacgaaatcgaaggaagaaaaatggagagaagttgaactttgagttgtgtctcacaagactctcattcattaaagttacaacaagtgttacacatgcttatatttatagactaggtagcttccttgagaagctctcttgagaaaacttccttgagaagcttctttgagaaaacttccttgagaagctagagcttagctacacacacccctctcataac

SEQ ID NO: 164675 - DNA, 361 bp, Glycine max
agcttgtttatcgatttttgtttcgtaagaaaggtaagcaagtttcgcacggtgcaaaagtttctacaagtaatttttcatcgtcagatcccttagatttttaatcaatggctaaaattcatttattttttctttttttcttcactttcccaatttgaccctcaacctctcctcagtcacgcaaccaaaccttcccttcctctctcagcctcccatgttgtcgtcgtcgccgccaacaccaactgtagtggtcttcgtcccaatgcgaccaaaccttcactctcttaacgcgccgacacgggaaatggcagcgtaagctcaaatttatcaacaataagcattctggcaaggcttctctttc

SEQ ID NO: 164676 - DNA, 396 bp, Glycine max
  unsure (1)..(396): unsure at all n locations
aatgtgcttggattctcagattatgttatgcattgctcttgctgccgtttgtgtatgttcgtcaattaaggaggatcttggatgttcctgtggcctttctaaaacgtcacccattcccacggcctggtcttgcagtgagagtcctgngtgatgtgactgaaggaaatgctttatatattctccgactggtacatggctcttttgtgcttttgtatgtctgtaccgctgattgatgattaccctctattatttatgtctaacaatcggttcttgcaggctgatgaaatattcattcagtcaatcaatgatgctgggctctatgattcaatatgtcaagcttttgcagtatcttgctgttcgatgcgtggagtcaacgtgatcaaaacacactccatg

SEQ ID NO: 164677 - DNA, 311 bp, Glycine max
agcgacgccaacagtttttttcgaaagagacaaaggcgaagagaaaactccgcatcatttgcgacgaccctgaggctactgatacatccgaagatgagtccgagagggttcacaagccgagaagagtaaaaagaagcgtgttggagatgtctcttccccctctccctcaaacattcaccaccactactcctgatactagctcctgtgaggtgaatagcagcaaaaatgcaacattgaaggttcgcactgaaggtcaaccccaaagcaagaagaagggtttgactcacactccaacaacgagaaggagcact

SEQ ID NO: 164678 - DNA, 412 bp, Glycine max
  unsure (1)..(412): unsure at all n locations
tttttttgaccaggagaactaccctattggacctgggcagaaacttttcgcggaacgggaatggtgatgatacaccttccgcaacttattcggggaccgagactatgctncctgccctgcacgggtcctgtattcccgcgtatatggaattttacttatatatcctcataacttataatatgtataacataaatataagggtcaatataatattttactagtaaaaaaaatacaaaataaaattatcatatatataagtaatatttcacaagttaaaaagacacaaacattacctgaaccctaatacgccgcatcaaacattgatacttctttccttgacttncttcttcacttttgtacttcttactatttcccttcgtccttctcacccgttgttcacccttcacactgt

SEQ ID NO: 164679 - DNA, 360 bp, Glycine max
  unsure (1)..(360): unsure at all n locations
agcttttgaatcgcctttttttgcagcacctgatcataggcgcgttgcaggaaagtggagtaaatcgcgacaatgggtttgtacccaccaatcgccagacccgcagcaaaggtcaccgcgtgttgctcggcaattgccacgtcgaagtagcgatccgggaatttacgtgaaaactcgaccatgccggaaccttcacgcatcgccggagtaatcgccatcagcttgttgtctttcgctgccgtttcgcacaaccagtcgccaaagatttttgaatagctcggcaaaccgccgctacttttcggcaaacaaccgctggagggatcaaatntaggcacggcgtggaaagtgatcgggtctttt

SEQ ID NO: 164680 - DNA, 473 bp, Glycine max
ctactcttcactgcgcgaaggcgggagagaagttttctctggcgtgccgccaattaaagagctgctcaaacgcaccgaagaacatattaaaggcatggtagtgcctggcacgttgtttgaagagctgggctttaactacatcggcccggtggacggtcacgatgtgctggggcttatcaccacgctaaagaacatgcgcgacctgaaaggcccgcagttcctgcatatcatgaccaaaaaaggtcgtggttatgaaccggcagaaaaagacccgatcactttccacgccgtgcctaaatatgatccctccagcggttgtttgccgaaaagtagcggcggtttgccgagctattcaaaaatctttggcgactggttgtgcgacacggcagcgaaagacaacaagctgatggcgaatactccggcgatgcgtgaaggctcccgcatggacgagtcttcacgtaaattcccggatc

SEQ ID NO: 164681 - DNA, 360 bp, Glycine max
agctttttgattcatttatgtacccgtagtggtccacattgggtttcgtgcatttttattctcgttttgtttactttttataccccctgttgacgtgcttaagccattttacttaagtcatttctcgcttaacttaaaaataaaataaatttccaccgaacgtttgaattgtattatccattaacttcggttaaaataaattccgaccgttcggtcgtgccgtaaccacgttggaaatcaaaaagaggtaaaaaataatataaataatcgaaaaacatcttttagtaaaataaagcggaaaatcaatcggacgttttctctttgggatttctcattcttaatcgaattgattaataacta

SEQ ID NO: 164682 - DNA, 482 bp, Glycine max
  unsure (1)..(482): unsure at all n locations
actcaagctttggtcaaaggcttgtgtatgtacaatcatggccttcatcatgtcctcatttatacatntcattctaaaatntagagatggatgcaaagattattactcacaactagtcgttcactcacagtttaagttcacactctcaccggttttggttcgagcttttctttctcaattaatttgtctactgactaacaattctaattgcaagttcacattcttgttctttctttgtctaacatacacacttgttcaaactcatgataaggaacacaactctatcacaatcatgcattcaattcaaaataaaagcatacaaccattttcacaaatcaataaaagtggttcactgccatatcattaaaaactaagttaaactattcaaaatgcttcagaataagttaatcaactaatcataaataaaactagcagtgtatataaacataaaggaanaactggtttaaaaccatcattaaaat

SEQ ID NO: 164683 - DNA, 360 bp, Glycine max
  unsure (1)..(360): unsure at all n locations
agcttggaacacgatgttatttttcacaatcctntaaaacgctagtgagagaccaataaggtatgattggcgaagagcaccaaggactgagttctatgtgatcaaatcgattctttgaaataatatctgggtagggctgctgttcagactatatgttgttgtacaaaatgacaattcctaattgagctttaaagagtagaatattgcttcatctatctttttgacaaaagttattgcacctagatgataataaacttacatgttgtccaaagtcaatcttctagctcgctgaatttctttataacagccagatttttgtataatgtataactgatggaaacatgagtatccatcatagga

SEQ ID NO: 164684 - DNA, 448 bp, Glycine max
  unsure (1)..(448): unsure at all n locations
ctacgctcgtaaagaacttaganataatcaagaacgagcttgttattcatcggncgcgtggatgacatccactccacaaagtctgaagtataggagaccttcaatcctattacgcaacgtggcggacaaaagtgggcagttaacttgaacggtcattattgtcaatgcggaaggtatactgcgctccactatccatgttcacatattattgcaacttgtggttacatgagcctgaactactaccaatatatagatgttgtttatacaaatgagaacatcttanaagcttactccgcacaatggtggcctcttgggaatgaagcagctattcctccttctaatgacgcatggacacttatccctgaccgaattacaattcgtgcgaaaggtccgtcaatatcaacgaggataatgaatgagatggattgcgtccaaccatctgagcacc

SEQ ID NO: 164685 - DNA, 362 bp, Glycine max
agcttgcggactattctttctaccgaacacggccgtgtttctgtctaggcccggattcaaggcgggctgcaacaccggctccgcttccctaactgtactggaggcggttgcggtggctttatcctctatggttttctggagttttaacatgacctccgagatggaagccatttgatcttttaaggccgatagatcggccttcatctgttcctgcacgccctcttcattatccatttttctggatcgagtgttataggggtgccttggtgttttcttagttatgatgaaattcctaaagaaataaacaacggtgagtatgccaccaaaacatgagtatgcaaatggatgatcggagcacttgg

SEQ ID NO: 164686 - DNA, 379 bp, Glycine max
actatcaatgacatcgctgttttgtcattgagtggcactttgagctgcacgttctccacctctgggcgtattctttgaaagacttatggcccctctttgcacatgttctgtagctgcatcctattccgagacattatactgacactgcctaccgaaggcaaccactatgtccttccaagaatggactctcgaaggatccaatctagtgttccatagtacagctacccattaagactttcttggaaggaatgtatcaataatttcttatctcttgcgcatgcccccatcttcgataatacatcttagatgcttcttggggcaagtagtcactttgacttgcaatctccaccaccttaactcggatggcgatgaattgggt

SEQ ID NO: 164687 - DNA, 357 bp, Glycine max
agcttatatgtttgatttctgaagcgaattcctccacatcaaactattatattaattttccactacaaaagacaatactactaatactcaaataaaaataaaaacatacagctgcatgcggcgcactttcaaaccttgttacctgattttgtgctgatttatcgcatgcaatattttgatgtgtcattttgctgatttcatataatttttaaaagaaaccaagggggttggatagtggtcaccaagctgatccataaggtgcaagtgtggtaatactccaatcaaaggtctctctgtcttgaatctttgaaaaaaaaaataaatcttagaatgggagtgataaaaacaaataattat

SEQ ID NO: 164688 - DNA, 394 bp, Glycine max
  unsure (1)..(394): unsure at all n locations
gaactaagaaactacgcttgtagatgagagacaagagtgtgagattattgttttttcaacacanagcctccctcaagagactccaactgagattgctctcanaaatgaccacgagcaactcgaagctgaagtgcaacctgtagaagaagttggtatgtgtcctttttctctaaaattatgtgtttcaatgtgcaaaatcaattcttacattttaatctaaatgtcattgactaatgtgtttgttatttatgaccttgctattcatctattgcttctttcgtttcaatattcagacttagatcaaagttattctatgagtgagggggacaaggatgacgatcgggatgatgatggggatcaacatgatgatgacgaatagtatgttattcgatct

SEQ ID NO: 164689 - DNA, 357 bp, Glycine max
agctttaactgattcatttagtaagtttccaactcaattgcatgctagtcaacctttaccttcatctgttttgcaggttacaggttgcacactttatggtggagctcatgggttaggcttgtatattcccactaaagaaacaaatcatgaagttaattacatgggaaactagcctagaaaaaatttgaatgcaagtggattttctggatttcaacatggccaaccttaccagcagcataatcaatggagaactcaccctggtaataacttcaacaaagaccagggtggaccatctactaggccgccgcagcaacaagagcctagcttatatcagagaacaacaaagctggaagaaac

SEQ ID NO: 164690 - DNA, 293 bp, Glycine max
tagctctcttggtatgggaccaactatctacttaactatattatcatccaaataaaacaagtcagaggaattatggaaggcaatcatcacatgggaatggtggattactgcacttatccccttgcccccctttctctctatataacactaaccatgatcttctgttattgcgtgtgtatgtgacttgtcttttgatcttgtatgctatacttgattcaacaggttccttaactacattttcctgtgaagtggatataatagagcaggtgctcgacatccttgttacatgataa

SEQ ID NO: 164691 - DNA, 362 bp, Glycine max
agcttgatactgctcatttgattaacgaaccaaatcatgagactcttgtcgttgcatttgatcactcgtaacttttccttctacaatgttatttactactttgctgttgccaaacttgtatcctggagggtagtcgtgcttcttataacacacatcaatggtgtgtcctattttcccacaatgggtacacgttttcccgtttctgttgtaggttttgcttcttccttcatagcttgtggatacaccatgtttcttgtaacaaacgctttcggtgtgaccaattcgtccgcagaattcacaagtaatcttgacggcattaatggaaacgttttcttttgattcaagattgagatttgaaaagg

SEQ ID NO: 164692 - DNA, 463 bp, Glycine max
  unsure (1)..(463): unsure at all n locations
aaagatacatgagaggttgtatattatatttctatcaaactgnnttgggatcctttagtaactctaattgaaactctctattgcaattcttccatgtgcatanntttttaaataaaatttaatgatcatctatctgcttatttctaagttggattttaaattaatgaacaggtcatttgaccccaaggagtgatgtatatagagaaaaaattgagtaggcttggccccttgatttgagtctctttttttaatcctgtgatgtttatggattgagactactcttatttcatcttttagtctatgagcaccttcaggccatgaaatgttttacatgatgtattgttagcctcctagttatgctctttttttatcttctacattgtctatgacactactttatccttttttgggcatttgattcactactctgcttaaatatgctgatgtgtgaagcctttcagta

SEQ ID NO: 164693 - DNA, 420 bp, Glycine max
  unsure (1)..(420): unsure at all n locations
actatcgccattaccggctggaattaactttatctaacatatttcctaaagatgcactttaccctaaaccacaattagtttaaaacctttcttaacatagccagcatttggtgttgcctcaccaagcaattccaaaacagagttagcctcatcaccacaaggtggaggatcatagccaaggctaccactaattaattaataaatttgtttcagttacatatgtataattatggtgacatattattatatatagtggctagtcgaatccattattataggatgcatgtatattagtactctgagtttatgtatgctactaatttggaataataacaaggctacttaactntattgataaaggagtcatttgcaattagaaagtttataaccttcagaatagcattaaccaattctcataac

SEQ ID NO: 164694 - DNA, 364 bp, Glycine max
catgaagcttaagcaccatttatttacaaaacatgctgataccttactcaagcaatcataaacaagttgaaacctagctatatgcaatgatttgagaaaataaataaaaagagctaggttgcctccaagtaagtgcttctttaacgtcactagcttgacgcatattacctcatgggctggagcaagcttggctctggccaccagaaccatctcattcttaagctcatccatcttagaacagatgttcctgtcatgtaagtgcttttctgcatcaaacaaatcaaatttgatcttctgatcatttacacccattttcattttacctttccccatatccaccacacaattggcgattaacatgaat

SEQ ID NO: 164695 - DNA, 469 bp, Glycine max
  unsure (1)..(469): unsure at all n locations
tgttagtgganaactaattcacccgtcataaggtgtttgtgtcacaatgtctaacatctagaatcttagatgatgtgagttcactcaagttatggaaagaaaaactagaaagaaaagaaataggaaaagagagggtagaatataatcaagatgagagagaacaaataagagaggaagaaagaagaaaaataatgaaagagttaagacaagaaaaatattcctactatagtagtcatgactcttgcaagagcctaagtgaagaacttagtgactattatggaggaaggcataggtcacatcctagacctcacttccataggagagaaaaggaaaaaaagtctcaagaggctaacattaacctcccatacttccacggaaaggacaatgtagagggcttattagattgagaaatgaaggtgagaaactatnttcttgctatcatacaagtgagaaaaggaagattcctttg

SEQ ID NO: 164696 - DNA, 361 bp, Glycine max
agcttcctctggtgtgctttttagttgaacatgaaattcggtggattagctctgtgaatgaacgaccaatatgcataatgcatgagttcctagtttttaagaccatagaatggtagagtagcattagaagtgatcaccagaaacaattaaaagaatgaaaggaataagttcagttgattagtgaattttgatctcgcacatagactggctgctggtaccgaactcttcttcatccgcctctgaaacaatgtcctcaatagtgagaagcagaggcaggtcagaagagaaggtgagtgttggcttcactttcagcacaacaagtggtgcagccacattgttgagaatctgcagcactcttctc

SEQ ID NO: 164697 - DNA, 484 bp, Glycine max
  unsure (1)..(484): unsure at all n locations
ctaagctgtagatgtatatatcatcatgtaatattgataatgtgtgtttattttgcaaaatatgtntgggtcataagctgtgcttgtaaggctattgacagagaaggatgcaagtaatgcaagaaatatatgtcaccttattatcagtagttacatggtcagattaatacctgatacaagatgctgattgctatcacaggtataaagacaatgaaaacctgccatgcagcttgagacatcactcctataattcccagaagctggatcaaaatgaaggcaaacgatgcaatttgataaggaatgtctgtatccaatgcactttgatcagctgaagcctgcaagagaacaacaggaagagacacaagtgacaatattatataatntatagttgctgaanaccattaacataatcagggaactattaatctagagggaaaatgctatttaagacacaaaaatcatatctctaaaaattatgacaaaa

SEQ ID NO: 164698 - DNA, 365 bp, Glycine max
agcttttgttggtaatttttttttagtcctgatgtaaatattctttactatctatttaatgttggtttgatgtgttcattacttctatctgcacttaattcttgcatgcttgtggtctgatcacccatttgtgtgttgttcgcggccagcaagtgaactggatcgcacaagtagtataaaacagtaagaaccgagtatcgaactctcggggaacttgtgttacctggcaagctatttcggtaaataggtgtcgggtatgaaaagattattgtggttatgaacaggtatgtaaactatctatgcaaaaagaaagaaaatcacgcaagagaaatgttgtgtaaaaacaagtatagaacacattggtc

SEQ ID NO: 164699 - DNA, 393 bp, Glycine max
  unsure (1)..(393): unsure at all n locations
agctgaagtttattggtataattgcctgttccatgattctctttatttctttagaggcnacttcctcgntgacatcttttgttttgaatggaattgccatgacacgtttattactactgtctttgatatttggtagctgatattgcgttgtgggaggtaattccgattagattaactcaccatctctcacttgccagtttggtatgacatttgttgttggatcacctatgatttcttgtttccaagggtaatctatattctntctgatggcataagcatgacacctatcaaagaaaaggacattaattttgactctttcgacaaattcatagaacttgtcttggatttgttctctgttgttcccttgtgatggtggacaaaccatctcctttg

SEQ ID NO: 164700 - DNA, 358 bp, Glycine max
agcttctataggattttattttaaaaactaaaggggcgtgggcattccagcactatcttcacaaggaagtcttcgctgagaagcttcctaaggatgctcgctcataaatacttgcgccgctgtttgccaaacttgagtagcagcgcgaataaccttagtcgtaactgtgacgactgaacgccatctgagacaccctctaaacgtgaacgacattcactcgctgattacattgctctccggccccccccttctctctttccctcgctacacaagagcaaatacctaaacctctagaatgggggcccttgctggagagaaaaacgactcccccgatggcttatacactagcggaaggggc

SEQ ID NO: 164701 - DNA, 356 bp, Glycine max
tagcttcaaaccacatatctttttttctgggtgtccaaaacccctcaattcaatggcttttctaggtttgaaaggtggaatttagaatgaggtaaatttggagcaaactctcacctcacacaagtctataacatcaatctaaacttgctcaaactggatttacacctaaatttccaccgaatcaaaatttgactcctcaacacccaattttgccctagaaatggctcttggttcactttggtcatttgtttttctctctagctcagcctaacctttctcacatgtcctaaatgacatttcaagctagtattaactcactttaacctccatttaccacagaatttagacttagcctt

SEQ ID NO: 164702 - DNA, 341 bp, Glycine max
tcaaccctcaaaaatacaactagcgtcgtggatattgttctcatgcaatgcgaaatgtaaatccgacggagctgtcctgtttaactacgccactgaagtatctagcatgctgttgtctgcccttaattctggaaagctacgagttgaacaaccaagtgggagacggcgaggggaaagaaacactccatgccttcgaaagatctagccaaacattttttgggagtattaactgccagagaatcaaatcatcacactatccacaaagtatgacacatgtcattatcactgagcattgcattatcgtttaaagggacaccgaagtagaagacttataacatcta

SEQ ID NO: 164703 - DNA, 361 bp, Glycine max
agcttatcaaaattttttttatatgatcatacttatcataagttctatctatggatcttagttcattaagaatggtttgaaagcatccgagcatacattgtatgtcttcattttctttcatagagaagagttcatacttatgagtgaggagattgagtttgttcctctttacttgtgacgttccttcatatgttacatccagagtgtctcacatttgtttggcacttctaaagttgtgtaccttggtgtattcttcttttgaaagatcacacaacatcacattctaagccttggagtttagcataaatctgagtctttgttcctccatccattgacctctaggaatttcattcagttcatc

SEQ ID NO: 164704 - DNA, 445 bp, Glycine max
  unsure (1)..(445): unsure at all n locations
tngtaaactacagtagaatatctggcagngaattatatatctcatctcatcgcccagttggtgctgtacgttgcagtgagcaatctttgattcaatctttgttgacaaaactacctagtcttgggcaccacagccttaaatccacagctgctaaccttaattaatatccacacttaccactgttttgttgggaattccaaaagatcatacacatgaagacattctaaattagtgttacctatgagctgccatattcgatattatcccagcttctaaagctgtttgttccatgcctcctctgtgattgtttagcatgatgagaatctgcaaggcttgttgattcatgaccacactncgaattaatctccattatccttctaacggcttccgccatgtctaaccgccgctganggttgctttcagtgcaagcagcaccaatgtggag

SEQ ID NO: 164705 - DNA, 362 bp, Glycine max
agcgttccatagcgtattgtttctgagaagagcaagattttccggatcatcatggtctacctgcagtgagattacacacacttcaccagatttcacccaagcattattccaaaaacatatcaaaattatgatgtctaccattgtgaaatcaagatcggacactatcattagattggcagaaccattgagtcggtccataagttcttttcttttacaccactggaaatccccaaaacttaacctggtaagaatcttcacgagtaggcacctgcaaattctccactagcttaggttcaacataatgtagttcaggcttcagagtcctaagctttgttgttctagaatccggaacatacccagtt

SEQ ID NO: 164706 - DNA, 475 bp, Glycine max
  unsure (1)..(475): unsure at all n locations
cttaaacaattatntatataagaacatgatactacgttatcttataaanatgcaaacaatgacattggtctaaggaaaaacttaagataacgatacattatgacaattatttctgctatgaccatgttgccggcaaagtccttatatttttctacttgctcggtcattatcgtcttcgtccatcttaataggaatgcgagttgaaacgggacgaccctttgcagacctctttctccttggatcaggaccccatcgatctccttcatattcttgccacattgattcgtgtggcaataaaccaaaggagttgtcgtagatgtgcaaaatatgttgtaaagtgaatatcatcggcacatatgtcataggatcaacattgacagatttacatgcagccatgacgtgagaacacggtaaatgtttagcctgatattcaccacaatcacactnttgggattataacattactctatacctt

SEQ ID NO: 164707 - DNA, 366 bp, Glycine max
agcttatcaaaatttatgtttttgactttaaaagtctttcaaaagattacaaacaagttcaaggaaaacatgaagaaaagatagataattcttctaaaatttccactcaaccatgttatgactttgaaagtctaaagtaaaagacaacatagcttcaccttgaaaatgaggaaatttgtaaagacagatctaatctattggaagaccttctaaagttgaaaaatcaattggaaggcttacaaaatgagtataccacactcaataaacttcatgattgcctaaagaaggagaagcgtaatctattgaaagaatgttcacaaatccataagaattatgaaaacttagaggcaagtaaacataacttat

SEQ ID NO: 164708 - DNA, 453 bp, Glycine max
  unsure (1)..(453): unsure at all n locations
tccactccagttcccattcgagtagctaacgggttgttttntatacgttcaaaaccagaatacacaatacccttaagctaaccgacaagtaatttttggataaaatttactaccggcagcctttcacgtatgcaggtaatcaattttggtttcaatgtatgcaactaaaagatgatgctgatgttaacacaactgtaatgtgtaatcatgaattttcgtttattggtccgattgagttattatgtaacattgctagaaccccatatggtattttaaacttacttgaaactactatgacccctactcatgatgccctgctatattacaataagaagtggaacatgtcatgccaaaataagtttgttggttactcgttcacaggaaaaaatcccaaatactttgacatttccaccggatgtaccatggatgaactgaatgatntgatcaaacaag

SEQ ID NO: 164709 - DNA, 356 bp, Glycine max
agcttctccattttttttattaaatgggttccggggcttccatggcttccgtaatgcttttgtaaaatttccgaaaaccttgggtaagcatattccacttaacattggtgaaagggaagagaaaaaaagatgaaagttaagtcatatatgcttccgtaaggcttccgtaactttttcgtaaattatgaaagaaggtggggtcaacttatcaagataggggtctaaatagaaatttgagtctaggcccttctggaacattttggaagttgggttgcttaaggaggaagcaactgggcggcaagctcctccacgtttttgaaaaatggtttctggggcttttgtggcttccgtaatgc

SEQ ID NO: 164710 - DNA, 483 bp, Glycine max
  unsure (1)..(483): unsure at all n locations
tactaagcttctnacttatacaagaatgaagctctgataccactttttttacaagtggcctcatatatcttaagaacgggggttgaattaagatatcacaaactcttcctaattaaaaattcaagtttgattttaaccaaaatcccaagattactttcaaaatgaactcctaaataattatgcaataaacaatgaaagagtttaagggaagaacgattgcaaactcagatttatactggttcggccacacccttgtgcctatgttcagtccccaagcaactcgcttgagagttccactatcttgcaaaagccctgtacaagctttgaaccacacaaggacaacccttcctttgtgttcagattgctttacaacaagagaccctctgtctcttaatccctntttagaaataagatgaagagaagaagaaatctctcttgaaagagatagatcgaacaattgagcactcaaataatctcttattg

SEQ ID NO: 164711 - DNA, 360 bp, Glycine max
agctttcataagtgattttatgtgcaaccatctccctaagagtcctctctcaaggtggaggttgagccatgttctcagtatgaaaattaacagccgaatgctcaaaatcaaaatattcagaatcaccagcaataggatactcagaatgctcaaaatgctcaaaatgcatagaatgatcaggatgcacactatgcctaactaatctatgaaagattctatctatttcaggatcaaagggttgtaaatcacctggattgcccctagtcatgcactatatgcagcaaatcatgtatctctcaacaagcacctaacaaggggggtaaaactacagctatactcaaacgatatccaaatgagctg

SEQ ID NO: 164712 - DNA, 463 bp, Glycine max
tagatacacaaaagaaatgccaatgatggttgctagattataaaaaggaaatgaaaatggaagaacaaagggaagaattctagtgaatgatcaagcaattattcgaatcataactagaataaagaaaaacaacaaaaggaatggtggaagcaataagggtgccaagaagaaattcaacaataaagggatccaatgctataactataaaaaatagggtcattttgctaacaagtgatggggtaagaaagtgccaagaaaggaggatgaagctcaaatggcacaagatgagtgttatagttctaacgatgtattgttgatggcaactaccaattcaaaagactaaaattttgatctttggtatttggacataagatgctccaatcacatgactggccatagagagtggttcacgagtcttgatgaaaagtgaagagcaagatacaattatcgacaatagcaaagt

SEQ ID NO: 164713 - DNA, 359 bp, Glycine max
  unsure (1)..(359): unsure at all n locations
agcttgtaatgtggctgttttattaaagaaatcatggnttttcttggaattcaaagcacttaagggtattatgagagcactcactatatccctttttacttatgaggcaaccaatctttcatagatttcccaaatttttatttacgataaaagaacaacaacacaaaggatctttttgtgggttctcattctatttccactttcattttcaattgttttttccaacaattttcaactgtgtgctgcttgtttttacaagaaatccctgcataagatatttacaaacatttctctcccccaaatttggaaaaaaatttccttaaaccgcaagtaacgctcttctattccctaaggtaaag

SEQ ID NO: 164714 - DNA, 420 bp, Glycine max
tcttttcaatccaagaaagaggagaaatttctcttagccccaaatgctatgaatgtgatcaacctgagcacttgagattcaattgtcctgtctttaaaagaagaatgaaaaatctaacaagatgaaattcaaagaaaagaaagaaaagaaaacatacatcacttgagaagataatgacatggattctttaagtgagtcagaaaatgaaatcataaatctgggtctcatggccaaagactatgaaagtggagaagaggtaatgccttctaactatgacttatctatttcttttgatgaactccaagatttgcataaagaatctgtaaaacttgccaaattagtttcatattctaagaaaactatttcacagttagaaaataaaattttaaaattaaatatatgtagaaaatcgtaaatctg

SEQ ID NO: 164715 - DNA, 357 bp, Glycine max
agctgataatattcaagtcgttcgaaattgaataacggaagctctcgtgaaattcaaatagtcataacatttcatacggatgtctgattcaggcgcagaatatatcgatacgctcgaaattgaacaacggaagctctcgagaaattcaaatggtaataacttttcacacggatgtacaattcaaggacataatatatcgagacgctcgtaattgaacaatagaagctctcgagaaattcaaatggttataacttttcacccggatgaccgattcggggacataatatattgagacacttgaaattgaacagcggaagctctcgacaaattcaaatgggcatcactttccacaagaat

SEQ ID NO: 164716 - DNA, 325 bp, Glycine max
  unsure (1)..(325): unsure at all n locations
caaccgaacgaactagtttcgctccggagtatgacagtcacccctctaagagcgccgtacaccagcagcgcttcgaggccatcaagggatggtcgtttctccgggagcgacgcgtccagcttaagacgttaaagaagcgctactaggaggcaacctagtaccttttaaatttctgcctgcttattgatcactttntatagtaggacgcacctagttgctcatgatcctgggaatttaaataaaacaagcgcaagctcggaaggtagtcataccttacaaaacatatatatgtatgtttaagtagtgaaaataccttagatataca

SEQ ID NO: 164717 - DNA, 362 bp, Glycine max
cagcttattctcgcattatgttttttaaattattcggaacgtaaatagatggaagcaattttgtatgtgttagttgttgaaattattatgtatgctcgggtctgtactcaaccagacgtaagatttgtagctagaatgttagaatgatatcaaataaccctagaattaaactttggaaagatgcaaagaaagttctaagatacttaattatgaggaacaaaggaccacatctttacatatagaacttttgatcattatggtagttgaattagtagtatgttttgatgctacaattcaggctaattggttgcaaaatttattttgaggcttggaatctttgacaatattgctaggttgctgaa

SEQ ID NO: 164718 - DNA, 459 bp, Glycine max
  unsure (1)..(459): unsure at all n locations
actacgcttaacctanggtgctcatgttgtgcttccctatctctttaattaagccatctggcttggtgtttatagcccncactttgtatgccacttccttagccttgataagatatatagacaaaatgagctctgaaataattattatacttccattgttatatcatcacatcttcacatggaagcattcttttgtagccatcaataactaaattcnttttcttttgtagcgctatttaaattacgataaaggggaatagttgcaattcttttcttttgaaatttttattctttctttatttgtgttgaatgtcgaccttgatcttggacatattnttcatatattcatggaagctactgatgaagcatacttctatttatatgggaagggtggtatggatatgggaatacgatgaggaggacaaaatcgtatggcgacatgagtgaatcgattgggag

SEQ ID NO: 164719 - DNA, 363 bp, Glycine max
agcttatgcgcatacttttttataaacgttcacttgcacaagacattcttataactaagaaaaaatgcacccatatacaatcaaggcaccttcgttacctagattatttacatgtagttccaaggtgtatttgttacctacatcacacacatttcctttgctaaattcacatacatgcatactctaagcactttggctatcaaaaattgcattcgtgcacatcttggtatttctaatacctatacatacacaaacttcatgacgaatcttgactatctacacaataaggtgctacatttcatgccctttttttttcaagtgtttttttttttttactacctaaagccgcatgcaaattcaagt

SEQ ID NO: 164720 - DNA, 469 bp, Glycine max
  unsure (1)..(469): unsure at all n locations
nntacagcagatttagtaatgacccactaacctataatttattttacttaatgccattaacctagggaattaaaaaaaacttaatggctgagtgtaactgaaattgtggcaaccaaaagtcacccccaacagccaacaagacagccaacaagtcagccacaatttggtctcccaaaaggctgatgcctaggttgccagaattatctcgtggccataactcccattttacgcactcaaattaagtgattcctgagcctaaattgaatttcaaaacgagacctttcaccacgttgtggaatcacctcatttggagccttgtagcttgagttattgccatttctatatttctgtccagccaccacttaacctacgttttaccatcccattaatccattttatgccaagaaccaccttattaagacccacgaaattaaccaccttatttttcatccttaagtcatttccgcat

SEQ ID NO: 164721 - DNA, 313 bp, Glycine max
agcttgtattgcaaatttgtattatctcatacccatccatgtcctaccctaaattcctccacgaacaacaatttgacaatatacaagcggtgattggcccccacgacatacgtggcaccctttctggcactcattgcgaaacctccgaccacgtgccggagatcaaatggaagaaagctaaccctatccgcgaaaacgccgatacgtgacggatatagaaaggaggcgctttgagcgaacccgcagtatgcgatacttcctcttccgctgagagagagctaatacatatgtccgcaggaatcgtacccttgcg

SEQ ID NO: 164722 - DNA, 359 bp, Glycine max
tagcttctcatggaggatcatcttagatatgaaaggggtgagcgtcgctcagctctaccttctctaggaacatctcccagagaagcttctcaaggaagctatctcttgaaagcttcccacggaagctacctagtctataaatacatgcaagtgtaacacttgtcgtaacttcgatgactgaaagtcttatgagacacactttaaagctctacttctctccctcttttattccatcaatttcgcgctccccccttctctctatcttttgctccattaaagcatcctcttcaagctccttatcgaacgcacatccttggcggtgaagcgacttcctccatggcttattcactaggggaagg

SEQ ID NO: 164723 - DNA, 386 bp, Glycine max
  unsure (1)..(386): unsure at all n locations
tggtcacacncacagatgggtgcgcaatgnccttcattttctacttcaaaatggaatgatctngacctggtgactcagacaacacactctcccaatcctccattcccagcccacatattgcctgtccaacctctaaccctgcttgatgtgagttgttctccttctcaacctccgtcgccaaggacgagccagtcgtgctatccgaggagccgctgctgacgcgtgaggaagatagagtccaggaggatgtgggagggctgcttgatttccttttgcggaccaaaccagaagatggctcaatgcccacatatcacaagttgcccctttgggggttccaccttcgcagaaatagctctagctgtggaagtaacaacgaatctgaaaca

SEQ ID NO: 164724 - DNA, 439 bp, Glycine max
  unsure (1)..(439): unsure at all n locations
taagctcgctaaagaactnaaaaaatatcaagaacgagcttggttgcatttctttcgcgngnatgaaaaccactccacaccgttcgaagtacacaaaaccttcaatgctataatgcaacgcggtggacaaaagttggcaantcacttgaatggtcatcattgtcaatgtggaaggtattctgcactttactatccatgttcacacattatcgcatcttgtggctatgcgatcattaactactaccaatatatacatgttgtttacacaaacgagcacatcttacaagcttactccgcaccacggcggcctcttgggaatgaaacagcaattcctcctcctgatgacgcatggacacttatccctgacctaactacaattcgtgcgataggtcggccaaaatcaacaaggattaggaacgagatggactggctctaacca

SEQ ID NO: 164725 - DNA, 297 bp, Glycine max
ccccgcgaacacaacaccatgcgccacacaacacggacagaccccaggccccacgaaagcaacccacacccgcagaaacccaacgagcagcacccaggcgtcaaaagaacggacacacgaccaatatccccctcacacaaaccaaggcgacgaacggaagccgcaacaactcatccaaacggaacaagaacaacgaaccgatttcacacaaacacaaccacgcacagagcgcggaccctatctccacacaaacaaacaaagcggaagggaagaaacaagagacaacaacaagtagaa

SEQ ID NO: 164726 - DNA, 360 bp, Glycine max
agcttattacaatgtttttttcttaattatcaacttcctcattcaaacagaaattctcaaaatcttgcttcatttttccctacttgtcaccaccaccaccaatgaattttatgaaaaataatgaaatcccttccatcgaaaattctcaaaatcctcctccgtttttttcctacttgccaccaccaccaccaatgatttttatacaaaataatcaaatccctcccactgaaaattctcaaatgtagaagcaagcttcatgatgatgaatcaggtggttttgatgatgacaaaaatcccaaaagaatgatttcaagattaagtcaacaagttcaagatcaagattaatttcaagattcatta

SEQ ID NO: 164727 - DNA, 433 bp, Glycine max
aagctgagtctgtcccattatgttaccgggattatttaatctctgtggcgggaattcctatcctgcgcgaaggaacacagaaccatccattgtagaccaatggataattatgtccaacatgctcctactgtaggaacacacgctgttggtagaagatggaaaatctggtggctggcagccacaaactcaatctggaaagtcaggaatgatataattcttcaaaatcaatcctttgatatctctaaattggtagacaccactcttttccttatgtggacctggctaaaggggtgggaaaaggacttcactgtctcttttacatagtggtcctcagcaatgtctttagtatttatttaacactattaggaagggctggttttatatgctgtattctggtgggtgcctatatggctattttctgatgtaatgtctc

SEQ ID NO: 164728 - DNA, 355 bp, Glycine max
agcttatcattcttattgttattgaaaaaagcttttaatggaaattaagagcatgaaagtgtgttgataccattaactagtcaataggttcttgagcagcttgaggacatcaatactatatttggaaagacccaaaaaaaggaaaaaaagtgaaacttggatatggaagaagaggttgatattgtttgatcttccatacttgtccgatctagatgtcagacattgtattgatattatgcgtgtggagaaaaatgtgtaatagtgtcattggcacaattcttaacattctaagcaagacaaaggatggttgatgggtcattattttctcctatttcttaacccttcttgtcaccat

SEQ ID NO: 164729 - DNA, 486 bp, Glycine max
  unsure (1)..(486): unsure at all n locations
ggacactatgaaactaagctntaacaagagtcttcacagataactatcttgatgctgtgtactaacaaaactatccatcatatctgccataaccccatacccacgaaaatcaaaggagaaagaagtccagccaaacctgaaatttcgaagtcccactcgtagacacgcatttcacgactccggaaatgccctcctttcgcgagttggagcagaaatgatggctaaaggttggagctttgttgggcaacaatggtggaggaagaagagaagaagaatgctgcgtgagagagagggagagcttctgaatntttctgctttggctgagtgacgagagagaaaagctttttggttttaaataaaagggatatctctcttttttttctattatactatttaagcaatgccacatgtctccattcgagtggagcaagaagggcccactttctctcttgattgtgacccatactcagccacaaaaagtgagaa

SEQ ID NO: 164730 - DNA, 358 bp, Glycine max
agcttgaggtgttatgttttccgaccagctccggaaagaggacgttaagaataacggacaccaccttacggttggataagctcaacttctagctacttacacctgttattactgaaggcaccctcacacctctcatataccatgattcttagggaagtacacccatttcgctttgaaagatgactttccaaaagtatgtatacgtatttcaagaaggtagcgcccaaactatgattcatggtcttagaaacatacttccagaatgagtatatattgccaataaaatatgactgaagaattagggtggttggtgagaaatagaaaaagagatgataaacggttatgttatactcatgtt

SEQ ID NO: 164731 - DNA, 358 bp, Glycine max
agcttgtccctcttttttctatttatgggagaggagggaagaacaaaaacatttaaccctcctggtatctgaggatcacttgaaattagtgaaaaaatcgtttccgtgaagaaaatccaagccgaggcgcttccgtaacgtgtccgaaacatttccgtgggtgattttgtgaacattttcctccgtctttcgttcgttcttcggtcttcaaccggtaagttcccagaatggaacttttcaattcattctatgcacccttggtggtccccacttgtttcgtgtacttttattttcatttcatttacttttcgtaccccttgttgacgtgctttagtcatttatttaagtcattttctcg

SEQ ID NO: 164732 - DNA, 468 bp, Glycine max
  unsure (1)..(468): unsure at all n locations
atctaatcattccaatccactcattttattcaattgctcattcaaatcattctcaaacactcatttcatacaaaacaatccactgcatatcattttcaaccaattcactgttcaaacaagctttttgtacaagcaaacaactcatagtactgaaatttaaataacttggaatctaaagaactgaaacataaaaactaaaatttaaatgattgaacataaatcataaaataactgaaaataaactaaaatgttcaaaatagaagggctcaggaggagtgagctcatcctccccctttactgctactgctggctcctctggttcaagctcctgngctgcagaagccccaccccttccagaaggagaaggctgggctcttggccaggccacctgcgcatcanactcatccatgctcatgatggatggcaagcccaagccttgaaggctctgcatgataatggactgccccc

SEQ ID NO: 164733 - DNA, 382 bp, Glycine max
  unsure (1)..(382): unsure at all n locations
ctaagctctactaaatncatgcagggacctctttattttctgactaccgacctttatgctttaattccacctagagcattcaacaaaaaatggaaagcaaaaagaattggaaccttaaaaagtaagtgaaataccttgtagatgccatcagcagattcaagatatccaagttttaaggagctgtgcaccccaaaagaagctcaaagcatgaaagatagcatgggcgaaatgtgtcacattgatggaaatttgtctacattctgaaaatgaaggacccaggacttttgtataccttgattatggaacaataattgaaatgaatgtaatctagagcatattaggcatgctcttcatttcattttattctggacttgcatctaca

SEQ ID NO: 164734 - DNA, 352 bp, Glycine max
agcttagcattatgattttttgtgcacttctccccacccagtatggaggaatataaaacgtgaaccttgctccattatattgggttacatacaagctacactatccaactaaaggatctagccaagttagctatacgcatgattaaaactatgcgaacagagagtgtcatgagcaccactaaacgagatgagattgtactatgcagaagcttacgagactcactttttatacaaatatcacgcgggatacgactatctctgctctcagaggataggaggctgtactcgtttccatgcaagagtatacagtgagacatacgacgcgtcctaaagtagtaacccctatgctcaa

SEQ ID NO: 164735 - DNA, 403 bp, Glycine max
actttatgagagatctacctgctccacctagtccagatgataacacgaagtgttctattgatatgacttcagaacaatgtacctgatgcttgtgccttccagattctctactcttggtcacaacattttctacttttaatattgacatctttatcatgcccgtgaggcacgaattcttactatacatgcaatatctcatcttgttatatcaaccatttaaagttcatatagaataatgtcgcctagatcacacgctcactgataacagagcactaaaactggcttatgatgccattagagagctctgaatggaatactatgaatgtgtctttgcatacaatcttttgcctgtacttgagttgagcagatcacccaatctatgatgctattacaaccactcatg

SEQ ID NO: 164736 - DNA, 362 bp, Glycine max
  unsure (1)..(362): unsure at all n locations
agctttataattntgttgtatgctttcttgctgcaacagttcccttggctttctgcatccattagagcaaatattttttgtgcagaattttccgtgtgtcaaaattcaaatgcttcaagtacttgtacaatttacttactgcgtgcctatactcaagtaaatcataaaacatgcaagcaaagaaggtaaatgctcgctcgggctttaaaagatgttttattccctaccctaattaaaatagtagaattatagcaatcaaaaaccatttgagagcttaatttagccaggacaaaagaaatttaatattgataatactcagttcacttccttatagagtaaaagctcattttttgcccttcaaa

SEQ ID NO: 164737 - DNA, 430 bp, Glycine max
taagctgctggatcaatccatgggacttgagtgaccgtatctatttaaacttatacaatgctcgagtttggactataactaaactaagtaacactctggcccttttgttttagtccttttacatgtgaaaagaggaggaaaaactgaaaagcatagcagtcctaataagtgataatgaaaagttttgttataacatataaaggtattgttcataattttcctaaatgggttatgagtgtacttggttgagttttaaggttatattggcaagttcctgcttttgtttgtgaaaatgctagcatatatgaactaactgttttcctcttctcgctgcatcacgaatttcaaaaactagtccttcatctgttccttccaacttatctattctgccatatagtgaagcaagtgatttcttaaatcttccacacca

SEQ ID NO: 164738 - DNA, 361 bp, Glycine max
agctgctttgagaaaatttttttttaagctagagcttaactacatacacccctctaataactaagctcacctccttgagaagattcctaaagaagctagagcttagctacacacacctctctaatagctaagctcacctccttgagatgagaagctagagcttagctacacaccccctataatagctaagctcacccccattccaaaaatacatgaaaatacaaaaaaaaaagtccctactacaaagactactcaaaatgccctgaaatacaaggctaaaaccctatactactagaatggccaaaattcaatgcccaaaagaaggaaaaacctattctaatatttacaaagaagagtggat

SEQ ID NO: 164739 - DNA, 322 bp, Glycine max
gggcgccataccctaatttcgtccggggaccatctgaatggcgggacgcgaccttcgcttgaccacttcgaggtactagacacccatcgttaggcaatccgtgaagttccgcgacatgtccggagtcgaaaggaagcgtaaatgcgcaatccgtaaagtttcgtaacattccagaagccaaagaggggacgaaagcgtaacccgcaaggccttgcgacaccccggaaagaaaacaagtatccgcacgtaattcgaaaaggtccataacactacagaaaaagaataagcaacaaagggcagaggggggtgtattcaataaaca

SEQ ID NO: 164740 - DNA, 374 bp, Glycine max
ccaccaactctgcatagactgcggctcgacgaatccatacacatcggccgtaccctctcgcatacccgactcagtcatacgccaatcattgttaacacaaacgaaatcatgcccgaatttaaaacaataaggcagtccagaaacaataatggaaggcgactcacacaacccacacttgtataaaagagatgctcagacattgaccaccgcgcgctatctcagaaagatcctcaagctccatgtacaacggaagctctcattactgcaccccacacacaatagcatcccacataacttcgaacggccgacgatcaacgcgcgcgacggtccatgtcaatagacatacgggagcaacatcacgagccaacttatct

SEQ ID NO: 164741 - DNA, 338 bp, Glycine max
aattttgtcaagcccggccacaggtgggcccacgacccggcaaccatacgatcatcccagagccaactcagcacgagtacacgcaaatgcccaaacagcagggccagcccgcgacacccagaaaacgaaggcatcccgcctaacgccaacacagtacaagagaggcgacacgcccaaaaacaaagaaccggaaacaggtagaaaatcacgacccaacccagaaaaccgccgccagaaaacaacccggagatccaagagccacagcagccgcaaaagcccacaggccgacaagacagacggccaaaaacaacgacggggtgacaaccgcccacaggaac

SEQ ID NO: 164742 - DNA, 375 bp, Glycine max
agtcacctgcagctgctgcttgcggatttgttttatttaagcacttggggcatccccatggaccgagcgaaaaggctcgggtcatctaagagactacgcatcttataaggcacaaatcgaggatcggaacaatgaatcaccaatcctatcttctttaaaagattgcgacgaaaaaatacagaggacaggaatccctgggggaaaccacaaaagcgaaagaaaaacatgcagcgacttcttaaattgccccaagtcttaagcgtagtatcgcttgatgacgtcagagtttacaggtgaaggtagttccttgtcatccatgttggtgagcacaagggcccctccgaagaaggccttctttatgatgaacggcccttc

SEQ ID NO: 164743 - DNA, 434 bp, Glycine max
ttactctctgggaatcgagtaccagaggatgttatttattatcagcggccaaatacgttgtataacagctataataaattgaattcgaaattttaaaagctgtaatcgattacacaattgtggtaatcgattaccagcagttagtaaacgttttaattcaaattttaaaagctgtaatcgattacacaatcgctgtaatcgattaccagacaggaatttcagaaaaataatttcaggagtcacaacttttcaaaggctttactcatgaccaccaatggtctatatatatgtgacttacacacgaaattgctaagagagattttcagaacaacaaagtgtttatcctctcaaaaagcaatctcattttatcctcttaaagaattccttggccaattcaattacaattcattaatgaattaatcgagtgctcaatc

SEQ ID NO: 164744 - DNA, 359 bp, Glycine max
agctttcaatcgttcttctattttcttcattcgttcttcatcgttcttcgatcttcaacgggtaagtacctcgaaccaagcttttcgattcattctatgtacccgtagtggtccacattgtgtttcgtgcatttttattctcgttttgtttactttttataccccctgttgacgtgcttaagccattttacttaagtcatttctcgcttaacttaaaaataaaataaatttccaccgaacgtttgaattgtattatcccttaacttcggttaaaataaattccgaccgttcggtcgtgccgtaaccacgttggaaatcaaaaaaaggtaaaaaataatataataatcaaaaagacatct

SEQ ID NO: 164745 - DNA, 386 bp, Glycine max
  unsure (1)..(386): unsure at all n locations
tcttgcaatnccaagatacaagagatcttcctattagattttatgttccactnctgctcttcctatctagtttgcaccctgcaaaatcagaatctgaaaagccaattagatttaaggagatacctctgggataccacaagccaacattggttgggcccttaaggaacttaatgatccttttaacagctgtcaagtgagattcattaagattagcctgataccttgcacaatggcaaacactaagcataatatttggtcaactcgcagtttagtaaagaaatgaaccaatcatacctctatatcttgactcatcaactgatttacattcttcatcttagtcaaaataggttgatgatgccattggagttgatgtctctttgcacttt

SEQ ID NO: 164746 - DNA, 359 bp, Glycine max
agctttctcataagtcttttatgacatttcaagctaggattaacccactttaacctctatttaccactgaatccagatttagccttccaactctcaaatactcactctttttccactcataacaccatgttctcaccttctaactctaggttaactctacccttcatctctaacagttttccataagcaatttcagcacacaaacatcaaaagcatcatcataaaaaccctaaaacagaatgggtaagcttgactcacccaaacatggcaagttcaacatgctttcaacaaatttcttcacaattaattatcatgaagcataaacctagcaaaactacccatcatatcttccaaaaccc

SEQ ID NO: 164747 - DNA, 360 bp, Glycine max
tgaagctcactacaagccttaagtgaaaaaccatgatattaccatatccttaatgaattttggagctttggaattgttttgggaataagtgtggggggtttttgtttcattggacaacttgttttgttggctatgcttcatgatgtattttgggccatactcgatgtacattgtatattggttaaatgttggacatgctgaatgaaatgttgtttctcaaaggctaaagagtaaaaaaaatataaaaaacattcaaaaaaaaaaaaaagaatagcaataaagttgagtgaataagatcttatatggcacaagaatgatgaaactctctggtctactcttcatgttgaaattttatcttta

SEQ ID NO: 164748 - DNA, 353 bp, Glycine max
agcttctaaagtatttttatgaagcttctggaggaagcctgttaatgaagcttctagagaaagctacatgcaactgcctcggtaaaaacgctgtccagccttcattaaccgttggatcttctcgaaatttggtcttaaacttcacaagatacttgtccatgatctgaccgttgggatatttaagaagatgtctggagtgtgctagaagcctcttaatgaagcttctcgaggaagcctcttaatgaagcttctagagaaaactacatgaagctgcctcggtaaaaatgcttcccagccttcattaaccgttggatcttctcgaaatttggtcttaaacttcacaagacaatttt

SEQ ID NO: 164749 - DNA, 374 bp, Glycine max
  unsure (1)..(374): unsure at all n locations
ttatncttcttggaaggtaccacacgatatggtactttcgtatcctcatttggagctttttctttattcttctatcttgctttctcacttctactcttttctttcccttctttactttttcaactttttctttttcttcattttctttttctttttctacctctatttctttttcttggtcatttatttctttctcctcgaccattattggtttttcactctcctgacttgtcacatctgttacctcctatntctttntctcagtgccatcctttacaacaatttttttctccaaagccaccatatnctcatcctcaactaccaaatgcttcttgtttcttgtcatcacaacattgcattcctccttgggattc

SEQ ID NO: 164750 - DNA, 358 bp, Glycine max
agcttggtaatgatggttttaccctgcctcataattttgggaaaaggtacttaagaggcagaaaggctagctttgatcctttgatttgtattctaactccagctttgatcctttgatttgtacaaagcattttcttgatcttgcattagggacttgaagtcatcatctctatctaatacaaaaaaccttttcagttttgagaactcaccatcagaagtggtctagagttctaatttcagctcaaacaatgtaagtctcaagcacaaatttgttttgcttcctacaaaaatatctaatttctatcaagtcaaaaatatctaatttttctgaatagatttttgtttagcgacgagtctaa

SEQ ID NO: 164751 - DNA, 464 bp, Glycine max
  unsure (1)..(464): unsure at all n locations
aactacgcttaatgggattattgtcagcaacactacaaaagtgcttttatngaccatcaacactgaccctgcaattctgcacactacttntatcatcctgngactttgtgtagaaagaatactgattgatatcatatcccttccaagttggaacattcatatttggacctacaactagcaatcttaatgtgtctgaagcactgtcattggcgaagattgtttgtctaaaccacgatatgaaagttctattgtgctcttgcaacaacctcatcatgttcatttttgggtgaatacgacacagatgttgtttgtgagcatctatgtaagggattacctcagctgtgttgtgtaatacatatagatgagcttgtgccagctgttggcgatccatggttacaacatttgaaccccgtgtgcccctaccttccatggtggagccatgacgactntgaggaagtctcact

SEQ ID NO: 164752 - DNA, 388 bp, Glycine max
  unsure (1)..(388): unsure at all n locations
tgcacaggtcagagttgagtatgtgaataagattgtatgaccacagtgaaggtgcaaaattgcaagaagaatgaaagttatactaagcaagccaacaagataaggaaggaagtggtacttgaacccggtgatgatcctggacatttgaggacaaatgtttcccaagaatgagggaatgatgagaatcatgaaacacgccaaatacagtctataggcccaagtggagaatgacgaacgcccaagtggagaatgacaaagccctcgagtggagaatgatgaacgcccaagtggacaatgatgaatgcccacaggcatagacactatcaagactattaattgttgctgaaggcccaagttaaatatatnttttagttataatttctattta

SEQ ID NO: 164753 - DNA, 360 bp, Glycine max
  unsure (1)..(360): unsure at all n locations
agcttgtacttaagnggttttttcttcttccttcactttcttgtctccaacgcgagctttaaccactgttcttccttcccgcaatgcttcttttcatgtccgcctgagtgggcttatagcctaaaccatacttcccacgatttccttgggtatttatcaggctagttatgccaccgttgtctttgcctaaacccatttcgggttcataaccgttccccaacataactcgggccatcattactgctgcatcggacagacaaggttgcccagagagggagtccacggaggaaatgctgaccacctcaaaagactggaaagcggtttctaacgattcttttgcggcttccacataaggcatag

SEQ ID NO: 164754 - DNA, 457 bp, Glycine max
  unsure (1)..(457): unsure at all n locations
actacgctcgactcggctgagaganaataatgaccgagtgtcattgatttttttagggcaaattcgggtgttgaagagtcaaattttgatttggcggaattttaggcgtaaattcagtttgagcaagtctagattgatgttatggacttgtgtgaggtgagagcttgcttcaaatttacctcattctaaatttcacttttctaacctagaaaacccattgaatggatgggtgttggacacctagattctgtgttgctgtgctctaaagcttgattttggtctacacatgattgatacatgatttgggacttgtaggatttgatttggacaagactggataacaggaagtgggattctcaatatctgcacttatgcagaattttgctgtcaaaataggtgcagcatgattttatcttggtgcacaccatgcttgtgtgtggttggctgtggaaagagt

SEQ ID NO: 164755 - DNA, 362 bp, Glycine max
  unsure (1)..(362): unsure at all n locations
agtctataaaatnnactatatattttaaactgaaacataaaactaaaactaaaagcgtaaactgaacataaaatatatcaaaagcagaaaaataaataaagatcctgccatggctcctcctgtgctactgaaggctcgtcctgaggtgaggaggaagcatcctgggctggctgaggggtgtcctgagttgttgtgggccatggatcctaggtgctatgtgctgctgccatgtctgctgcataatctgtgtctgcagcgccatcctcctcctctgagacctccaagaccggtgtattgactggtgaaccgtggagtagtctctggagtggcctccggctgtggctgaggctcttgagctgcgg

SEQ ID NO: 164756 - DNA, 410 bp, Glycine max
cgcctcttcggtactaaatagcatggagtgtgatgctcatgattacaatcggaaacaaccttcattcgaagtgattgctacattgcaacctctatcgtgacaaacttatgagtttcatgagttatatgtctaaatatacactaaaagtgtttattactcaccagtaatccttacaagaacatttctcattttcaaaatggtggaatctattgcgatctctaaccacaatctttcgcctagaaatctttgctatgagcttgatcattgcgtggcaatcatcgcatatccttaaatttttcccaactctaagtgttgtgtaagcttcagttgagactagtccgctacatattgcaagtctttcactatgcacagccaaagccaattccttttgttcatcatcaatatcatgt

SEQ ID NO: 164757 - DNA, 226 bp, Glycine max
cccctcaaataccaaaacccaacggcaagcgaaaaagccgaacctacaggggaaagaagcccaggaaccgcacaagatgacgcaaacaagagccaaccgaggccatacaagacaaagagccgaacaaaaccagggcagccaaaacccgccagagcccaaacttcaaggccaaggggaacaaaggccccgaccccggcaagtcggacgaccaggaaaacaacggcac

SEQ ID NO: 164758 - DNA, 357 bp, Glycine max
tagctttgtgaactgtttttttatgcacaacgtgattttgaaccttttggacgaaacccattgtccattgatatttgtttgagaaaaattttcataagttttttagagactaaccttttatccatcacaccattccaaccctcttttagtatgtttcaagtactttagttgttattagagcttggcctctaggttgagctcttaacaaagtaaaagaaagaaaattcctgaaatgatggaagaaggatatgttatgagcaagcctctcatgttcaagggagccaactatgactactggaaggaaaaaaacaattgcctttgttgaatccactcacattgatatgtgggatatcgtag

SEQ ID NO: 164759 - DNA, 423 bp, Glycine max
gctatcggggttacctatggacgtgttaaagtgccactgttgtatccaaccatttatctatgtgctagagttactactgttagttttaagaagagacaaaatgattttaattgtggacctacttttcaactacggcctaaatttatgaaagagaatggacttaagcatgtcacattctcaactgctgatggagcacaggaggcagctcctgcggtgagagatagtgtttggtttattagaagttgctcatttaaaatttgtaattatcaagcatataattgaccattctgtgttatgacaagatctctctctttctgctgccacaatggcttgggtttgggatgatcttgttgctatagtatctatagatatatatctttgcttatagcctcatatactagcatagttaacaccgtttgatcc

SEQ ID NO: 164760 - DNA, 356 bp, Glycine max
agcgtggcaagtacctttttttttggtaaacaatataaaaaaagtcttccagaaaatacggctaattaatttgagaatatggattatgtaaattattagttcccctgcagaagtcaaaacatactcaatgcttcacaattcaactatttttctacaagggttccaattgtctttctcccttgtgttaaaaagaatgtgactatgagtgaccataaaacattcctttttttttatcccccaatacataaataaataaaaaccaaactcaaccttaaacaaataaaagttccaataattattaagacgcaatttgtatatatagcagtccaaggacatgacacaaaacaattaacaag

SEQ ID NO: 164761 - DNA, 425 bp, Glycine max
  unsure (1)..(425): unsure at all n locations
ttacatacaagngagcgtggaacaaatcttttacacttggagtgatcacatgcagcctcttgaacccttaccacccactctatcatcatgccgacactcatgaagcccaacaggtttagccttctgtaagtattatagaacaccaatcatatggcttcctcttggaatgtacctctcaacaatcgatgcttctggacgatatagattctttgtataccctttttagatcttcatgtatcgctcaactgggtacatacaccgtagataaacaggaccaccacttttgatttctctgaccacatgcataatcaagtgaatcatgatgtcaaacaaagcggcgggggaaatacatctcctactggctcagtataattggcggcttattttccagctcatcaaactcgactagatcaaggactttgcta

SEQ ID NO: 164762 - DNA, 372 bp, Glycine max
cacctgaggctgctgcttaattgaaaattttttatctttcaaacaagcttctaaatcaaacaataatacataaattgagtttgaatcatagggattcatttatattgaatatctgtgaagaagtttgtcctgtataataattttagttcgttagagcataatggcttcccataaagaatatttatgagtatgtcaaaagaaaaaaaaaatcatgtaaatattttttctaaaattttacaatatgttcttaataaaaagatacttaatgttgaaaaaagcacacgtgtgaccttatgcacaacacatgggtagcactaacatcgagtgcaaagatttagttaacagaagagaaaactaaatactttttttttt

SEQ ID NO: 164763 - DNA, 429 bp, Glycine max
acctaaagttcacccttggtgagccctttctgtttctaagtttcatcttcaaaggaactcgaggtacacaaggtctgtccttgacgatcttctttattcctagttcttatctgtctaggaatacgagtatatataaaacccaaggtctgtccttggtacagattcctccaaaacccaaggtccacccttggtacgtactcctgtaaaacccaaggcatcccctaggtccactcactctcagcaaccatgacgaccacaatcaaaggtgtaagttcaacaacacatactaccaccaaactatttggcaaggtctttcaatcaggtggaagtcatacttgctcctcaaaccatcagagaagaagcttcgcaagtcaaaacgacccatcaccacaatgagtgacaagacctttaatcaagtgcaactcatac

SEQ ID NO: 164764 - DNA, 330 bp, Glycine max
  unsure (1)..(330): unsure at all n locations
acgaaggncaagcgtccgcgatatgtgaagatgatgttccaagtacttcggatttggtccgaccatgccctcctgatttccagctgggaaattggcgagtggaggaacgccccggcatttacgcaacgagcataatgtaaacctttacggtttttaaaagctctatagatgggcctaggctttagagttttctttttgttaaggctttgtgtcttttgtttttgaatttataatacaaggatctttcttcatctgttcctggtctctacccattctcattcattagcatgtttacttctttttctgaaacggcagattcgatgacgactc

SEQ ID NO: 164765 - DNA, 359 bp, Glycine max
  unsure (1)..(359): unsure at all n locations
agcttgttgcttgcttttgtgtcttttgnattgnngcatgataatcattaattttgttaatgctttataacttgtttgcgtgatcaacaattattgttatattcaagttatgcattaaaaaagtgaactttttttttttttagacttgatcaatacaatgactaatacggacagtttgaattaatcgttaaattaaatattaaattgttggtttaaaaaaagagtcattttttatatttgattcatatgtagaggttaaatttcttttgtaaatttgataaaattttggtttaatattctttgttttattctcttagaacatacttgattggggtggaattaatgttactactttcatg

SEQ ID NO: 164766 - DNA, 422 bp, Glycine max
cccaaataaaagttacactaatggaacgttttgtttcttttatatcacgttgaggcttttcaagaacaagttgaggtttttcaaaagttgctattagcattatcaagtcgctggttgagattgttaacagggttggatagaaactgactgagacaagatctattgaatctcatctttatctggcgctatatatcaatagataaaactattgaacaatatacaacatcttatgtgaagaatatctttatttgattattttaagcatgctaataatttattcaacaaaaaatattttcattatttataacatataataaaaatattaataaagataattcttatcctaaagctattaacacacaaatagcctcactatttcttgtttccgtgtactgtgagaaaagatgatgagagaaaggtgt

SEQ ID NO: 164767 - DNA, 353 bp, Glycine max
  unsure (1)..(353): unsure at all n locations
agcttggngtttcacctatggagattctgaattaagggggtgtgttagttgtaattcagaatattagttataaagtttggtagtttgtttagttagttgagtgtgataaggaagtgattgaggctaaacttgagctgtataaatagcctctgtgtaattcaattaataacacaatttcatctcattttagtatatgctttttggctggctttctctttttctccccaacaataacacactttttaacatacttcttgtatcacattctttattattaattaaaattagttataaattatgaaattatgagatctcacctcctacataatgaatctggttcattagcaagggag

SEQ ID NO: 164768 - DNA, 486 bp, Glycine max
  unsure (1)..(486): unsure at all n locations
acactataaaactcacgctgaagtattnggtggtataattagcctgttccattattctcttaatgtctttagaggctatttcctcgttgacatcttttgttttgaatggtattgccatgacaggtttattgctactgtctttgatgtttggtagttgatattgtgttgcgggaggtaattccgattggattaactcaccatccttcacttgccaatttgttatgacatttgttgttggatcacctatgatgtcttgtttccaagggtaatctatatcctttctgatggcataagcatgaaaccaatcaaagaaaaggacattgattctgactctttcgacaaattcgtagaacttgtcttggatttgttttctgttcgcaccctcgtaatgttggaaaaaccatctnctttgaggttcattctcctgagaatagaaatccttcctaatggtttccttatcaatgcttaagcttgtcaaatacatca

SEQ ID NO: 164769 - DNA, 359 bp, Glycine max
  unsure (1)..(359): unsure at all n locations
agcttgngacttttgtttatttctttaaaactattcacttaaaaagttgtgacttttgaaaaaatcttcagaaacaagtcactagaaaaattgtgacttttggaaatttattttttgaaatcagtcactggtaatcaattaccattaaggtgtaatcgattacacatcaacagatgtgactcttcattttaaattttgaaaatcaaaacgtttagaagttctggtaatcgattacaagtattgtgtaatcgattacacaagtttaaaatgatttgaaaatgtttaaacacaagttgtaactcttgaaatttgaaatcttaacattttaaaacactggtaatcgattactaccttctggt

SEQ ID NO: 164770 - DNA, 466 bp, Glycine max
cgctctcatattttcaagcattggacaattctcatgaagatttatacatgacagacaataaagtgttttaggactaacaatggcttggaattatgttctaccgaattcaatcaattctattgagatgaagacacaacaaggcagcgtattgtacgctatactctacaataaggtaagtccatatttctcgatcatctcacatatctttaaaaatgcaggatttttaatagcattgaatggaatgacacttttgtaaaaaaattcagcaacttgagcatcaactaaagggttatcatttttcatcaactgattcaaagttacttgaacaacgacactcccactacttgcactaccttcttttccttttgaaccaaaacccttttgtccctacaagttagtttgcctcaccccatcaacactttcttcatcttcatcaatactcatcaatctccttttctgcaacaat

SEQ ID NO: 164771 - DNA, 357 bp, Glycine max
agcttggccccaactgtttaatttcatttagggtcacaaccaacctcaaaaatggagtgtactgactacaagaactggagggcaaagcagtcccacgaacatggaatgccacccgcttgaagttctacttcagttgacctacacgctaaactcaatgttgtactcttttccctactcaagtcttttgtctcaaaaatacaagatctaaggttttggcttgaagggtttttaacgaggcacatctagggtaacgaagggaatttgtactctattacatacattgaatgaaattctacatcccttctctttaaatttcttttaccgagaaaagagtatttacaatcgtacctccatggc

SEQ ID NO: 164772 - DNA, 349 bp, Glycine max
aacaagaaggaaataatttgaatggtggagataaagttccttttgatcagccttataatggggaagccgagggagacacaacgcgcgtaaaaccccattcagatctgcatcctgtgcagtctcaagaagatgttgggccaagccacaacatgggcccactatggaaaaataatgggtgtaataaggaagaactctttcctgtaacccaatcctctaaagagaccccagataaatattccaaagtctatgttagacaaagacaccttcaatataaagcccgacttcttcaacctgtggaagatcaatctcaactacaagaaggagataatgacatggctgccatgattga

SEQ ID NO: 164773 - DNA, 475 bp, Glycine max
  unsure (1)..(475): unsure at all n locations
aagtggaatcatgcaacagagtgtgaattatttctacaagatgcctatattacctttcacttacccttnntctaaaattggtgtggtatttggcccatcacttcaaaatgactctttattcatcttccgattcgcacgatcccaaatgacaagatgtgaatgcatgcatgcttatgattggaagttaagtgcaacaattaaacaagtgttatcatgttcaattttacttaaacgcttacgacaccccattaattgagccaaatggctccggattcagtgggcaagatcgagagtgtatgttcttaagaagtaaaagacacaacacaggaggttaagatgcaaatcattaatccacatttattaatgctgtgatcatggtttataaaagattttaagattttggagatcccaatgagtccttggagaacagttatacgttcgaccttctagctgccctacgcattatgataatatc

SEQ ID NO: 164774 - DNA, 360 bp, Glycine max
  unsure (1)..(360): unsure at all n locations
agcttgcgggaggaattttgattgcagctgggntcctagaaaacccgtgaaattttgatttggttcttttttttatatcaggttttgattttgattttctacaattaggattcaaaagaggttgtttaagtaaagtagtttagttttgtgatagttgtatccccttctgctttttattgtaagggatgatgggttttttactttttactaatatgaatatgaatgaatgaataaagttaaggtgaaatgtattggtagctatttgtattttttgtaaggctgtgatgagaagaaactgattctttatgttatgtgataatattgtggattgcttttcttttttgcttggcttgaagggaa

SEQ ID NO: 164775 - DNA, 458 bp, Glycine max
  unsure (1)..(458): unsure at all n locations
tcttactctcggctgatgaagatgaatccgtggctacttcatgcactcctctaatgacaatagcatcacttctggcactaaattgatgggagtttgaagccatcttctcaattaaatttctggcttcagcaagggtcatgtctccaagggctccactattggcagcatctatcatacttctctccatgttactgagtccttcataaaaatattggagaagaagctgctctgaaatctggtggtaagggcaactgacacataattttttaaatctctcccagtattcatataggctctctccactgagttntctaatacctgaaatatcctttatgatggtcgtggtcctggaagcacggaatttttttctaagaatattctcttgaggtcatcccaactcgtgatggaccatggagcaaggtaataaagccagtcctttgccactccctctaaagaat

SEQ ID NO: 164776 - DNA, 358 bp, Glycine max
  unsure (1)..(358): unsure at all n locations
agctagggcagcaanctgtttccattccaaaattatctaaaaaggatttattaaaaggactacctaagatttgttggaaaactatcttctctgtgaagcatgtcaacaagggaaacaaatcaaaacctcttttaaatctaaagatgcgatttccacctccagaccattacaattgttgtacatggatctatttgaaccaactagaactttgagtctaggaggaaagaaatatggctttgtcatagtcgatgactattcaagatatacacgagtatacttatttgcacacaaacatgagtcttttaaagtctttgaaatatttgttaaaaaaatacaaaatgaaaaggggttttatatc

SEQ ID NO: 164777 - DNA, 449 bp, Glycine max
  unsure (1)..(449): unsure at all n locations
agatacaagtaactactgttctagtgtgagagattatatgtattanacacacagcatcttagctgctgtatgaatgaattatactcgcacttcatctctctcgagtgcattcttctgatttctgggtatgcgaatctcttgtgccaacaattggtatctagagttgacttgatcatgatggactgtgagagatccttgagtgtccagagaaattggaaatcaaaaacagagttcgagagaacccaacccttttttacaatacccacctttttaaatggctttcaacaatgttccattagtatcacctcctgtattcacaggaaagaacgacgaaatctgggttgcgaagatgagaacgcagttgaaagccttttgatcttggaaagcaacgggaataaccgaaccaccagctttggaagagaatccaactgttgctcagatcagatttc

SEQ ID NO: 164778 - DNA, 347 bp, Glycine max
agctttggtaagaaactttttttcttttcttttctactcatttcttcatcatttttgtgtaaaacccttatgtttggttccaaaatttgtttttcatcctttgaagcttaagacttcaagatctgaacctttcttccttgacaatttcttgaaagcttcatttaaggtaagggaagtctttttcacttcttaaaccctaacattgttgtctttggaagctaggcttcattacatgttgtgatgtttaaaatttcgtatatgctgccatgactggaactggatgatatgttgttttttggaagttctaaagctaaatgtgttttctttgagtgttaaacatatattta

SEQ ID NO: 164779 - DNA, 482 bp, Glycine max
  unsure (1)..(482): unsure at all n locations
taagctccgacggtgcgtagcccaccatctttgcgtagtagagtttcttttatgtgnctaccatcacgatcatcgcctccctttccatcattgggggtaccacctgggccgccagatccctccaccttgtgggcgtgttctttgaaagatctcgccccctttttgcaaatgttctgtagttgcatcctatccggaaccatatcaaaattgtactgatactgcctaacaaaggcaaccattaggtccttccaagaatggactcgggaagattccaagttaatgtaccacgtaacagctaccccagtaagactttcttggaaggaatgtattagcaattcctcatctgttgcgtattcccccatcttctgacaatacatctttagatggttcttgggacaagtagtccccttgtacttgtcaaagtccagcaccttgaacttgcgaggggtgatgatattgcgttctaggaacaactcttttat

SEQ ID NO: 164780 - DNA, 363 bp, Glycine max
cgcggcatgcttgggggaggattctctttgattgacctattcgatattgcataaacttgctatttcacattttgctagttttagatattaatactgtgacagcgtgtccgtcacatttaggaacgaaattgtctattcaatatagaaaaaaaaagcatgtgattatgaggtaaatgcgacatgaaatttttcataactcatttcattctatccattttcatacaagattaaatttgaactattaaattaagtgagcaatataaacttatcttattaagccataaaatatatatatcaaaatcagaaaaaagatatgactttccttactcttcagttaaattaacatttgaatcattaagaatt

SEQ ID NO: 164781 - DNA, 401 bp, Glycine max
tgcaataatcaaaacgcaatttacttggctaagaaatcaacatttctatcccgcacaaagcacattgacatacggcattattggacccgagacgctctctatgaaaagaaagtacatctcgacaatgttcacacagaccataactggttagacatgatgaccaaagtactaccgacaaagaagtttgaagattgctgtcaaggcgtcagtctgctactacccccccaattaactcgggagggggagatttgtcgggatcctttcttaattggagaggttctatagaattctacagcttcctacgaaagtgtagaattttctagaccgtcctagagaactctacagtacgcgtagatctccgtatacgctcggtgaagaatgcggaccactctgaatattct

SEQ ID NO: 164782 - DNA, 366 bp, Glycine max
ccgcagcatcaagcgggagagaaaattttttttggccgacgcgggacatagaaaccaacaagaagcccaccggtgatgttgcaagaagaatgcacgaagagctagacaagaagaagtatgcattgatcctggatgaagtggaggatgccatcaaaccggagcagtcgggaaatcctactcacgccaacgatggcggtaaggtaataattgccactcgactccctctagttataagtcgaataaggtgcacagggtcatcaaaatcatggagtcaactcccgaggaagcatggaagatgctcacagacactgtccatgcctttaaccctaacacagactccattgacattcaaccgatagccaaact

SEQ ID NO: 164783 - DNA, 222 bp, Glycine max
  unsure (1)..(222): unsure at all n locations
gagccatacctgcaacacatgagtcactaaccatgccgaacaatgaacagacttccctaataagcatacaacatcctactttgagctaatatgaaccatgaaataccttgatgctcaaacactagccaagctaacaattaatctaaacacaaacagaaaatgcataccttccctgcacgtgtggccctcgacaaattattcacctanncaattttttttttt

SEQ ID NO: 164784 - DNA, 360 bp, Glycine max
  unsure (1)..(360): unsure at all n locations
ttattgtctaaacttnatcattattgaagctctaataccacttgtttgacaagtggcctcaaatatcttaagaagggggggggattgaattaagatattacaacttatttccccaattaaaaattctatttaactttctattcaagttataaattcccttactaatgaatttcttaaataatgattcaaaagaacaatttgaatatgaatataaaacaataataaataaaggagttcaagggaagagaaagtgcaaactcagatttatactggttcggccacacccttgtgcctacgtccagtccccaagcaacccgcttgagagttccactatcttgtaaattccttttacaagttcta

SEQ ID NO: 164785 - DNA, 310 bp, Glycine max
atcgggctggcttatattgaaaaacaataacacaaactacccaacctctatatgaacatatcttaattgggttggattgagttaaactcaaacacttataaaaccaatccaatacgattgggttggattatgggttgacccagacctataaatactcctacatttaattcgtattcaaaatttccagccaatatcctaccttctatcaagtgaaatcaaactaactccactagatttattcttcttgtcacctctaattataagacttacgtcttctacttaatatttactctctcatatgatgtccaaa

SEQ ID NO: 164786 - DNA, 359 bp, Glycine max
  unsure (1)..(359): unsure at all n locations
agctgggaaaancancttgattgagccaccaaacccacaatccaaatttcgatcatcctttaaacacagataatcaatactactattctgaaagcattggctgagtcatcggctaattccccacaccattcgtctgttaaccatataatataaactgagaaatactaactaatatctttagacattaattaattaaagaattaacatgacaaacgtttttactaaaacatattgacgagacgaatccttatgatattaatatgacggggcctgtctatctctctctctacaactgcttgacaaataacaatcatgaagcagaaacctagcataagtacccatcatatgtcgcaaaaccc

SEQ ID NO: 164787 - DNA, 325 bp, Glycine max
ctgtggtcaacgaataatacgccgatagtgcgcccttccacaacttctcatgtgaagctcgtacgagtatcgggtctccataacatgtggtactaggtggcggcccggcgatggagcacgtcagctctgcccatgcacatatcacacatatacttaccatcccaagatgcccatcttcactgcgcttacgtgctcccacgtaggccttatcctcgttcctctcaacactgcggccccagtaatctctccacgcattgccaacatccaagctatacgacatccaatcctcctgaagctatcaagccaagaatacaaggcataggca

SEQ ID NO: 164788 - DNA, 356 bp, Glycine max
agcttttctctactctcttaacctcttatggcatttctcacatactcatttgtccctacactcatcatcaaaatggtgtggttgaaagaaaacacaaacatatagttgatttcggccttacattattgcatcatgcttctttacccatacagttttaggattatgcctttactactgttatctatttgattaatagacttcccactgcttccctcaatttttttattccttttgttacccttttcaacaaggatctggattttcatttccttaaacttttggttgttcctattttcccttgttgaggccttaccatacacacaaactaaattttcaatctcaggaatgtctacttt

SEQ ID NO: 164789 - DNA, 481 bp, Glycine max
  unsure (1)..(481): unsure at all n locations
agaaactacgcttaagctgctcaattgctacaggtggctgtatgtatgttcanagggctgcatggtgggcagcagaggagcacanaccacaaacccttgcgacaggtacagatttctgattcaaggccagctgggttaccaagttgaccaacgcatccagtttgccttcaagcttcttagtttcagatgatgcagatgggtttgtagctacctcatgcactcctctaatgactatggcatcatttctggcactaaactactgggagttggaggccatcttctcaattaaatttctggcttcagcaggagtcatgtctccaagggctccaccactggcagcatctatcatacttctctccatattactgagtccttcataaaaatattggagaagaagctgttctgaaatctgatggtgagggcaactggcacatagtttcttaaatctctcccagtactcatacaggctctcttcactgag

SEQ ID NO: 164790 - DNA, 359 bp, Glycine max
  unsure (1)..(359): unsure at all n locations
agcttcagcacatttttctttggtgctcacacgtgcagctaatacttgtatatccggngcctcaaaagggggtgagtgttgtgatgcaatttgtatatccggtgccatctcgtgaggcctgtccaaagtattggttgattgtgacaccaatccccgcgactcgtactcaacctggatgcttgggtcggccaatagcaatgttcaatatgtcatgacaaccatgcagaacaaatgaaccctacatcatttgttcttctaaagagtcctgtgagcaacaaaacatggatggagggtccatggtcattgatgaattttcagtaaactcaacttggtgttcccgtgtcaagaagatcataacc

SEQ ID NO: 164791 - DNA, 458 bp, Glycine max
  unsure (1)..(458): unsure at all n locations
gtctcacgattgacatgtgctcatgctacaattgntagccgnggctatacgagacatcttgccaaacaaagtcaggttcacaataactcgtctgtgctatttcttccatgctatatgtagcaaagtgattgatccaataatgtttgatgagttggaaaatgatgccgcaattatactgtgccagttggagatgtattttccccctgctttctttgacatcatgattcacttgattgtgcatctggtcagagaaatcaaatgttgtggtcctgtttatctacggtggatgtacccgattgagcgatacatgaagatcttaaaatggtatacaaagaatctatatcgtccggaagcatctattgttgagaggtacattgcagaagaagccattgaattttgttcagaatacttagagaatgctaaagctgttgggcttcctgagtgtccgcatgatgata

SEQ ID NO: 164792 - DNA, 479 bp, Glycine max
  unsure (1)..(479): unsure at all n locations
gcttctcgaacacatagttattcaatcacaatcctgtgtttcatttgcttncacgaccacccttcagtcgacgcctacnaacaccggatttncaccttcaaatctttcatcttctttaaccaccttcctcatatcaccccaaccatcacctaaccaccgtgagcttcgctgcgaacggcttcgactttatcaaacgaaacactttcaacgtagccaccaccctcacccaaatctctaaatccaccaccaccataaaagccttcgtgatcgacctcttctgcaccacggcgatggaagcagcttcttcgttgggaatcccagtcttttacttcttcactttcggtgcggcggttctcgcactacactcgtactttccgaaacttcacgaggaaaccaacatgtcgtttaggatatggtcgcggtggaactgcgcgtgacgggaaacgcgccgctgaaggcggtgaacatgctgcaaccca

SEQ ID NO: 164793 - DNA, 309 bp, Glycine max
atttttgacttctaaattgcccaaacatgcaagttgatttttgactttggctcccttcatatggtgtaagcacatggcctttaaaggagtgttcttacgattggtcatagattgagtactttactatcaggagtctatgttcctcattccctctaatatttttctgctcaataaaccttttatataacactaggctaggtttattgactaaatgccttgatttagatataggaacgcaattcaacctgtatattttacttcatcaagaagtggactacatgcaatgttatgtcagctgattcacttcag

SEQ ID NO: 164794 - DNA, 300 bp, Glycine max
agcttaagttattaagtggtatctttataacaattttatatctacaagatggctcacacaaggtaagcgaaggcttgaagtgtggatagtgcataagtccaccatacctagtgaaaatagttaggatcatactctcgatcacttgttcatagtggctcaaatactatgtcaaggatatcctaaaaacttttgtcaagtggagggtcaagaatagtttttcatctccagcacagggagaataaactgggaaaggggggggggggggtatcttctccatcctattcatatcataatgtgttc

SEQ ID NO: 164795 - DNA, 469 bp, Glycine max
  unsure (1)..(469): unsure at all n locations
agatagntgggtcatgaccactagcaaccagcttctttctaatgtatttagagcccatttgtttaatgttgagtggaattgatcttgataaaattaatttgaatcaatgaacataattaggatgtgtgtccaaattaatctgtcataaatttacattgggacatgtgtttttcattgaaaagtgcaagaattaatttttcacaccaaaacaagtgggcttcatgaaacgcaaattttcaactccgcaattcatcattgcacaatcaaagttggacttaaaaaaaataataaatcaaaatttaaaaacattaaactctaagaatacttgtgcacaactgaaaatttctttttggtcacatccttcaaatatagaaaacgtgtcaacaaatatcggtaatgaataacatacctgtgccacaaattactgttcgacgcctcttgctgcagcagcttcttgctcttgctgcac

SEQ ID NO: 164796 - DNA, 312 bp, Glycine max
  unsure (1)..(312): unsure at all n locations
agtttgtagcaaatgcaatgnttaataacgttttactctgatgttcgattgagtcacgtaatacatcgaaacgctcgaaattgaaaacagaagctctgtgcaaattcaaacgacaatacatttttactcggatgtccgattgagtctcgtaatatatcgagacactcgaaattgagaataaaagctctgaacaaattcaaacgacaataactttttactcggatgtccgattgagtccactaatatacttagacactccgaattgagaacagaagagctgtgcaaaatccaaacgacaaaattttattactt

SEQ ID NO: 164797 - DNA, 446 bp, Glycine max
  unsure (1)..(446): unsure at all n locations
actaagcttaactcggatggccgantcaagcgcataagagagcgttactcnttatatngaacaacagaagctctcgagaaattcgaatggtcataacttttcacacggatgtccgattagggcgcataatatgtcgagacgctcgaaattgaacaacggaagctctcgagaaattctaatggtcataacttttcactcggaggaccgattcacgcgcataatatatcgagacgctcgaaattgaaaaacggaagctcccgagaaattcaaatggtcataacttttaactcagaggtccgattcaggcgcataatatatcgagacgctcgaaattgaacatcgaaagctctctagaaattcaaatggtcataactgttcacttggaggtccgattcacgcacataatatatcgagacgcttgatatcgaacaacagaagctctcgag

SEQ ID NO: 164798 - DNA, 365 bp, Glycine max
agcttcacacggttcccatattcttatcacaatatctcgctgccttttcacgccacttgtgactcttccattcccaccaaaatcaccttccctatcttttagccactgctaaaacttgtccttttcctttccccccgcaaaaaataaaataaaataaaatccaacacatttaacagatttcacgccaccaacggtgtcttcgtaacggatatagcataaccttttgatcattcggtatgaaaatccaatctccaacctcggatccatcttttacattcttcagatcataggatctaatattgtatgcagttttgaaagaaaaaaaaaaaaggagaaaattttgatctttgtgtgattgtgctatt

SEQ ID NO: 164799 - DNA, 307 bp, Glycine max
agatcacgggacttattcggacatccgacatagaagttatcgggcgacacacttgctacgagaactcgtcatcaatccgacattcgaattaaaacgtattgcctttagaataagctaagagcttatgtacagaatgacaagggtctcagtatactacgggacacaagaggacacccgagtaaaaatgtattgtgaatggaaatagataagagcctcggttcagaaattcgagcggaaagaaatacgacgggacgcaatcggacatccaagaaaaagtaaaatgggatgaaatacaacagagctagcg

SEQ ID NO: 164800 - DNA, 360 bp, Glycine max
agctagtttgagaagctttatgaaggttgcatctttgagctttactaaagtctttcaatggtgattttccaccatgaagatgcagcggaagataaaggagaagaagcgagagcagacgtcatctattagggaataagtcatgaaaggagaagtttcaccaccaagaaagtgtcttggataagaagcttagagaggaagcttcaatggaggaaaagaatgagagaaaaagtggaatgaaaaattgaaggaagaaagggagaaaagtttaactttaaagtatgtctcacaagactctcattcatcaaagttgcaagtgttacacatgtttctatttatagcctaggtcactaacttgtgaat

SEQ ID NO: 164801 - DNA, 478 bp, Glycine max
  unsure (1)..(478): unsure at all n locations
cgctttgatcaagtaaccccattgactaaggtgagatatgtttgtgattagtgattacaccctanataacttaattgtntattagtttaatttattcccaggcaataatgcatttntagaactacgatgttggggtcttattttctaaagtggcctagtcttaaataactggaatttagagccttgctcatatatcattaattcattactgtttaaagttcatatgactttatctatctcaatttgatatttatgctactcttagattttatattgttgaatggttgattaagacattatatatcatgattcctggttgactggctgcaacaattctagactcatgtagacttattntaaacgaatccatattcttaatagctctaggatgtattggaatctaatctaatgtacattaatccaatatatgaattctgtaaaacttataacaacataagaggctgncgagttactactt

SEQ ID NO: 164802 - DNA, 362 bp, Glycine max
  unsure (1)..(362): unsure at all n locations
agctttagactttatgttgttcatgttgntcccatatctctaatatttgtcaggattatgcattcagtttgtgttcttcctaatcttaagcatagtggatgactaactagcttttgaggtaaacatagaacttgtagataattgtcttagctttaaaacaagataaaatgcaacttgataagattagcgtaactacaaatatagtggttacacctcagagagttcataaacacacaatcgaaaatgataaaagtaatgctcaaaacttaaaggatgttataccaatcataatacaaagtaagaagatgctaaaattgatgtgtggcctagagttaagatgcacatgacttgattgaataatg

SEQ ID NO: 164803 - DNA, 433 bp, Glycine max
cagactacacacgtgagcctgcttagaggtaaatgatgagtctatcatacttggggttagaatgaacatgtgtacggatccttataaggtcaaattggggtttattttgtgatatttattgtattgtaattcttcatgtatgattataattatgagattgctgtgtttgatggaccaattggtgccttgatgcgaatcggttcataaaattgagcgctcttggtattttcgtatttttgacctacgattctgatatgattatgtgaaactgtctgaggggctttactctctatgttgtgagaaacattttcgtataatctgtttgcgttctggataagatttactagattagcgggataaattgttatattgcaatcatgaaattgtgtcgtcaatgataaaccgaatatctgatgaattgcgagataacatc

SEQ ID NO: 164804 - DNA, 362 bp, Glycine max
tagcttgtaatcaattttttttattctgtaatcgattaccagaggagattttcagaaaatattctcaacagtcacatctttttatttggttcttgaatggctatcaaaggcctatatatatgtgacttgagacacgaatttgcgaagactttttgagaacaaaaaggtcttatcctcttaaagagcaaaattgttttatcctcttacaaattccttggccaaaacacttgtgattcaataaggaattatttgagtgctcaaattgttcaatctatctctttaaagagagatttcttcttctcttcttctttattttgaaaagggattaagagaccgagggtctcttgttgtaaagaaatctg

SEQ ID NO: 164805 - DNA, 412 bp, Glycine max
  unsure (1)..(412): unsure at all n locations
cttctcccgtatttgctatatatagggggagaagtgatttgattatggttcaaccncttaggcacttctctctctctctcaatagctgaggaaaattaattccgtgaagaaaatccaagccgaggcgcttccgtaacgtttccgagtaattacgcgaagattctcgaccattcttcaagattcatcgntcgttcttcgttttcttcagtcttcaacgggtaagtacctcaaaccaagcttttcaattcattctatgtacccgtggtggtccacattttgtttcatgtatttttgttctcattttcattcactttttatacccncttttgacgtgcttaagccatttatttaagtcatttctcgcctaatctaaaaataaaataaatttccactgatcatttgaattgtatca

SEQ ID NO: 164806 - DNA, 342 bp, Glycine max
agcttctccactttttttttgagcctaaattcaaatagcatggttaacacttgttgaagagcttccttggccttctttgttctagccgttgccataagtcctccaagtccttctaaaggttccttgcccttattccttgccttgtcctcattaacaagggagggtacatcctttgtggctctttgcttgtaaaggattttacaagtgtggaagcaatgacttccatgattattttgatgatgccaaagaatcaagagttaagcaagttccaaagaatcagaagtcaaaaagcttcaagaatcaagattcaagaacaatcaagaacaagattcaagactcaag

SEQ ID NO: 164807 - DNA, 447 bp, Glycine max
tgaagaagaggctctaatagaggaaaagatatatagatgtgtggagcacgaaattgaaggaataaaagagggagagaagtggaactttgaagtgtgtctcataagactttcattcatcaaagttacaacaagtgttacacatgcttctatgtatagactaggtagcttccttgagaagctctcttgagaaaacttccttgagaagcttctttgagaaaacttccttgagaagcttccttaaaaagattcctaaaaaagctagagcttagctacacacacctctataatagctaagctcacctccatgagatgagaagctagagctcagctacacacccgctataatagctaagctcacccccatgacaaaatacatgaaaatacaaaagatgccctactacaaagactactcaaaatgcctcgaaatacaacgctaaaaccctatac

SEQ ID NO: 164808 - DNA, 355 bp, Glycine max
agctttagtcattttatgttacccaaaaatgaccgagaatagggtgttgagaaagcataacaagactttcctaaattggtttaaagatacaatctttgatgacaataatgcttctaaaacattaaggaagttaacaaatgggcctaaaagaaatgttataacttggcaaggatacgatatcaacaagtatttgttcttcacaaaatcacaagacgacaatagttaaatgcaaaacagtggggttagtctagcttccatgccttactttgaagtcattgaagaaatatgggagcataattatgtaaaattcattgtctgtgttttcaagtgtaagtgggttgatagtaatattagt

SEQ ID NO: 164809 - DNA, 345 bp, Glycine max
aaaaggatgccccacattatgtttatgacacaaatgcacaaatgatcgattggaaattttatgcaaaactggtcatgcatgcacctatgtggacgctcaagtgtcaaatatttatggtcatgtgatgctagggctcatgattcatttcctctatcttaaatcaacccaatgtttccaaaatatgttcttttatcaattcgtgcatccatccgagtccattttgggcgtctgggaaaatcttcacagcattcacccttcaggtgtatacacattctttcataaactagttatgatcagtgaatttttccaaagaaaagttggaagtcatctctcttcaaaagcatg

SEQ ID NO: 164810 - DNA, 337 bp, Glycine max
agcttacaaccttttatgtatgacagaatgacgataaacaaatgataaactgaatttctaccgaacatatgtgctgcaatctcgatatatcactgattagatacacatgatccggacgctccctgccgagcccttgttgtatcgaaccaatgcccatcaacttttatttatcggagcatattggaactagtgtatttaagtaatctttatatctttgaacaaaataatcacgtgtgtcatgctgacgattgtctttgacagtttgcttgagtgaattgactaatggccaaagtggactaatacttaaatccactcacgaatacagctttgttcgcaa

SEQ ID NO: 164811 - DNA, 235 bp, Glycine max
cggaacgcttgacacatgctacagagttccggatgatgcctgttccccagaaggatgatccaccagggctaacacccccaggaataccctgatcacactgatactgggtgatcggagaaccgagcgcggagctatcaccgactatgatgaaaatgccgaaagggtcgacccttgaaagcaaacacccaggcttactgtggcccataacaaaagataaaaaaccacataggccttc

SEQ ID NO: 164812 - DNA, 361 bp, Glycine max
  unsure (1)..(361): unsure at all n locations
agcttcttatccaaggtctttcttggtggngaagctccttcttccatggcttattccctagtggatggcgcctcctctcacctattctcctttgtcttccgctgcatctccatggtggaaaatcaccattaaaggacctcattgaagctcaaagatccagcctccatagaaggcccacaagcaagcttccatcaagtggtaatcagagcacaagagcttcaagtaggtgctccttaaacctccattaattttttttctttaccttctcttccatttttgtttcttcatttttctccatgtatctcctcacatgtcttgttctaaatgtttttaacatgattctntagagtttccaccgatt

SEQ ID NO: 164813 - DNA, 168 bp, Glycine max
aactagctgggagtgccgactgtggtacatgaggtttttctgtgtttgacccatgccggtggggaagagactgcatgggcatctcccttccttcttattgcccctcgtgccccgactcttttggcggtcacgtcttgtggaggagaacgtaatctacaactttccctc

SEQ ID NO: 164814 - DNA, 360 bp, Glycine max
agctttcgagatatactttggttataacttttcactcggatatccgattcacgtgcaccaaatatcgacaccctcgaaattgaacacggaaggtctcgataaattgaaacggccataacttttgactcgaatgtatgatcgacgcccatgatatatcgagacactcaaaattgaacaacgaaagctcttagaaattcaaatggccataacttttgactcgaatgtatgatcgaagcccatgatataacgagacggtcaaaactgaaaaaggaaatctttcggaaaattcaaacggccataacttttgactctaatgtatgatcgacgcccatgatatatcgagacgctcaaaattgaaca

SEQ ID NO: 164815 - DNA, 431 bp, Glycine max
  unsure (1)..(431): unsure at all n locations
tccctaccctcggaagcgaaaagaatagaagggaaatttcccatccaagaaaagggaaagaaggtctcctctccctttcaaaagaaagcaaaaagaaaagaagggaaaatccccaatcaaagagtgggagaaagcaaacagaaaagaaagaaaattcccaatcaaagaatgggagaaagttaaaaaggaagaagaagaaggaaagaaagctcctgatcaaggatcgaaggaaaacagaagaaatgtgcagaaaggtctttggaccggacaatatctgaacaatacagaattgtcaccaaatgaaaaaaaagaaggaaaggaaaccacgacctaaaatggtcttctccctctgattaccaaccaanatcccgtgcgctagcgactttttcgccccgcagaataagaaaaagccaacatnaaaaatcataagc

SEQ ID NO: 164816 - DNA, 361 bp, Glycine max
agcttgtagataacacttttttgcagcattcaatgctgaccttttccaacctccgtcacccttgttgcccaaattcctttgatctctaagtacatcaaccaatacacgttccatttccaaattccatgtaaaataacttcttgtttcctcattattttttcctaaaacttttcttttgtcagtcattttttcattagatgactccattgaagttaatgtcacttattcaacctacacataacaaatagtagatatgacctactttattcatttgactagttcactgcacaatcatagaaaatatttcaagcaaagtttttatgcaatagcaaagtacataaaagtctatcttcaatagaaa

SEQ ID NO: 164817 - DNA, 429 bp, Glycine max
  unsure (1)..(429): unsure at all n locations
ataatgcttattntaacacaaaaatgatatgctaatctttccgaattagaacgaactcatgggcacattttatgtaacacatttatgaacatgcgtatgtgtaaaatatcctactatttatgtcaacatacaaggacatccaatacattctagttaccacatatatatacatctttgaaaagaacacacattcttgtgctcaaggcattgtgtcaaaatttacacctaatcacatcctaaatatttttgctatgacaaactacctacacatatttgaagtatntatatgcacattggaaagataattacgtcatgcacatacttgcatttgaaaaggaaattccatgccatcatatattcatttaggaagcatcctcaggcccttnttgacatgggtacattttctaaaaggatcctaatgctacctat

SEQ ID NO: 164818 - DNA, 347 bp, Glycine max
agcttcttaacttttttttttccataagaatcgaacacaggtaccaggagatttccaacaactcaggcacactgttcaatcaattgagctggacaagtagcttctcataaattttggagtttgcactttgcacattgcatagtgtttacattactgcttaagaacaatgtagtaatcactgtgagacgcttaccgattgataaagttgcaaatctctgccagaggcttcaatagcaatgcttacgggttgatgagcgacagctttcttcaaggcattctcatcatacggtggaacatcctcgaacccatcaatgttcacaacctttgcatttttctgcagaagtatt

SEQ ID NO: 164819 - DNA, 476 bp, Glycine max
  unsure (1)..(476): unsure at all n locations
gggtttgtgagttgatntcagccttagtttcactttggttatttatcaattcattcaaggaaactttcaaattaaaaacgtccgaatgattttttggataatttattattattttttcaaaagatattttaattattttattattatttttcctttttttgatttaaccaaggttacaacatgaacgatcggttggatttttttttacagtaattaaacaagattacaacacaaatgatcggctgaaattcattttatcaattattaaacgagataacatccgaccaaccaaatagctacaacagtgactatgacgtctgtcatgctatcgggctttgatcgttatggatggcagaatgggttctttgtgcgtcaccttacttgattgtccctggatgacaaanagtatctacagagacagtcttaaaaaatgattagaaacaggtgactatcattancccagatatcactggacg

SEQ ID NO: 164820 - DNA, 362 bp, Glycine max
agcttgcttgagatgttatatcttagctgcacacacccatgtaaaaactaagctcaccctccttgaaaaaatacatgaaaatacaaaaaaaaagtccctattacaaagactactcaaaatgtcctgaattacaaggctacaaccctatactactagaatggccaaaatacaaggcccaaaagaaggaaaaacctattcaaatatttacaaagaagagtggatccaaccttgacccatgggctgaaaaatctaccctaaggatcatgagaaccctagggctttctttaagagctctagcccaagcctcttggagtcttctatccaataccctaaaaggaagccagagcttagctacacacacc

SEQ ID NO: 164821 - DNA, 253 bp, Glycine max
acaccatatacatgtgatgtgtgaactaatggacaaaatataaaatggacccaagtttcccatgtgatttatttttaaaaaaatcataggtttcccaaaattatttgatatcccataatatgtggcatatactaatgcttacaagctctcactcgttgctttggaggtaaactcattccaaacatgcacacttgggaaatggcgagatggggtgtgcattttcttatatttatctgtggggcacacttttttc

SEQ ID NO: 164822 - DNA, 363 bp, Glycine max
  unsure (1)..(363): unsure at all n locations
tgccagctttaggagaaacctttttaactaagatagttcctaaacaaaaatcaattggggaaacttcgccaagtgtccccattgaaaaacctttattcaaacctgtcaaagtcagtgataaggctaaacgaaaaattagggaacttagaaaaactaaatccataattgaaggcgtaggtgacaatcatagcgaattactaaacaagattggtagtttgcttaaggtcattccagacactccccaagcctcggaaaatacttccaaaatggtaacaagaagtacctccaaattaattaattntattaatgaagatagtgaccaaaactcagataacacaactaagataggatcagtgtcagaaa

SEQ ID NO: 164823 - DNA, 472 bp, Glycine max
  unsure (1)..(472): unsure at all n locations
ggccacccagctcgccttctggaggaatcttctggatgttcttttgggcatggntggctattgcacccncatttttactaagtacacccgccctgcctttntttggtgattcttttttcgtaaagttacggaaacttacgaatttcgtaacgatacttgttttctttccgtaatgttacggaaccttgtggattacataatcatcccctttttgacttacggaatgttacggaacctcactaattgtgcaacgatgcttccatttgatttccggtgtgtcacggaaccttacggattgtgcatcaatattttcttttgctttccggcatgtcccggaatttcacaaattgcctaatgatgggtgacaagcacctcacaaggaccaaacaaaagttgcatgtcatcaagcaaanggtccccggacgatattagggtatgacaccagttaacccanattcgtgacattaatcag

SEQ ID NO: 164824 - DNA, 359 bp, Glycine max
agctttgttgaatttattattttataggaaactttgttgaataaattagtttatctaaaaatatgattatggaaatctgattgagttttgaattggttttgtttcactcccaatatatataaaaagttaaaagttgtgcagccatatgccatgtgttgggtagacagtattacaatataatttttttacttgttttttaactctttctctatctattttttattattttgactgttttttttttatttatcgtgcaaagcacgggcactgcacgctaggattctaatatttcttgcaacttcataactactgatggatagtctaaagtttcatagccttatccaccctcatattatcac

SEQ ID NO: 164825 - DNA, 430 bp, Glycine max
  unsure (1)..(430): unsure at all n locations
aacggnaggggatactcttgatataatatgtaggcacattaatcataggtgacagacggaacatcttcccttctattcgacgacgacagacgacaatgacatccccccggagatccggtgatgacaacaacataaccacggagatctagtgacaatgacaacttctatggcttaagcaactctaacatcacattgtttagccagagtttaagggtgaagcttgtgccatcgtggaggtgatagaggaagacgtggttgatattgtgtgtaacatcctgaaattttcttcttaatttatttcgttacactntgcaaagtgacactatgatgagctagacaatgaaaatccggattgtgtaacttaatgttgtgcctctgcgatntaaccattctctatataatttaagtgcatatttgtcgtgctatatat

SEQ ID NO: 164826 - DNA, 356 bp, Glycine max
agctttaggcatattttcttttttttttctctcaatagttcttcattcttcttcctcttttcacttctgatcttccattttcttgcaaaaaaatttatggcttttccattggggatcaccatgaaaggctaaattgatgaaagcttgcttgtggagcttctatggaggctggatctttgagcttcaatgaggtccttcaatggtgattatacaccatggagatgtagcggaacacataggagaataggtgagaggaggcgccatccactatggaataagccatggaagaaggagcttcaccaccaagatgagccttggataacaagcttggaaacgatgcttcaatggaggaaaag

SEQ ID NO: 164827 - DNA, 454 bp, Glycine max
  unsure (1)..(454): unsure at all n locations
caagctccttcaactgcacaaggctgttaatatttgtttattattcttgtggaaccttcacctgacaaagacactgaacaaaacttatcttctccttcttggacaaagtatggcatgctgggggcaagtaaattgtctttccatcagaccttggatgcaactgtgatcgtatacccatatcagctagatcttgacgtattcaagtcatcctttgtcatgccttgaatgttaaggagcatcccaatcacactgtcacaaacatttttctccacatgcataacatcaatacaatgtctaacgtcaagatcacaccagtgcggaagatcaaagaanatggacctcttcttccatatgcaactctgactctcatccttcgtttgtgtcgttccaaatatagcattcaagtgctcaacccactgatatacctgctcaccagtcaacggtatcagcggaa

SEQ ID NO: 164828 - DNA, 473 bp, Glycine max
  unsure (1)..(473): unsure at all n locations
ccttgagaagctagagcttagctacacactccatctttattttagctcacctccctgagaagcatccttgagaagctagagcttatctacacacacccctctaacagttaagctcaccccatgccaaaatacatgaaaatgcttagctacacacacccctttaatagctaagctcacccccatgcctaaatacatgaaaatacaaaaaagtcccaactacaaagactactcataatgccctgaaatacaaggctaaaatcctatactactagaatgaccaaaatacaaggccaaaaagaaggagaacctattctaatatttagaaagaagagtggacccaaccttggcccatgggctcagaaatctaccctgagggtcatggagaaccttggtgatggtcttttgctctctctatctntntattctgtgaactctctnntaatccttgttcttcatcgtattctctatgtata

SEQ ID NO: 164829 - DNA, 359 bp, Glycine max
gagcttagcgtgtttttttattagcgggaaaactcaggcttagcgtgaagaagggccacgaagaagcccaaaggcgtgcttaacacgaagttagcgtgaaaagtaagctactttaggcctatgaaaggaataagaagcaaaaggaaaagataccactctggagactcagggttctctaatgaatacatactaagtctgagcatctctaataggggaaatcctctatatatgtccattgtccccttctcctcctctatccatcccccttcttctatccacattagcccctaaattgtaaagcctctcatgacaatgagaggctaaacccctttagttagggactgacaggtctaaaaagt

SEQ ID NO: 164830 - DNA, 360 bp, Glycine max
acaaacaccctatttgccaaacctataccccgaaaataacagggaaagaagtccaccctaacccgaaattcaaagtcccactcgtagccacgcacttcacgactccaaaaatgctctgctttcacaatttggggcataaatggtggcccaaggttgaagctttgcttgaagcttcaacggagaatgatgaagaacaaagctaccttagagatggagagaaaacgcttctgaatttctgctttggctgaatgatgagagagaacagctcttcggtctaagataaaacggattccctttgtccatgatttatccagctatgcacatgtcctttggattggagcaaaagggcacttctctttt

SEQ ID NO: 164831 - DNA, 356 bp, Glycine max
agcttctatggtggctttatctttgagcttcaataaggtcattcaatggtgattttcagccatagagttgcagcggaagataaaggagaagaggtgagaggaggcgccatccactaaggaataagccatggaaggagaagcttcaccaccaagagagagccttggataagaagcttagagaggaaacttcaatggaggaagagaatgagagagagaggagggtgcatgggaattgaaggagattaggaagagaagttgaactttgaagtgtgtctcacaagtttctcattcatcaaagttaccacaagtgttacacatgcttctatttatagcctaggtagcttccttgagaagct

SEQ ID NO: 164832 - DNA, 413 bp, Glycine max
  unsure (1)..(413): unsure at all n locations
tttcaagggttgagaagtgaaaatgagaatggcgtaattctggagtaaattctcatctcaaacaagtatataacattaatttagacttgctcaaagtgattttaaggcgaaaactctaccgattcaagatttgacccctcaacacccaatttaccctagaaatgactcttgctttcacatttgtcactcatttttctcatttgctctgcccaagctttcctacaagtcctaattgacattttaaactaggatcaactcactttagactccaattaccactaaccccaaatttagcttttcaaaccctcaaaatctcacactgttccactcacatcactaccattctcacanttaaccctaggttaactcttcccatcatctctaccagttntctaccaacaatttcagcatac

SEQ ID NO: 164833 - DNA, 314 bp, Glycine max
  unsure (1)..(314): unsure at all n locations
ttcaattcaacatgacctgatccttttcatggatgactaaccaacccactagtgcacctttttgttgttatcaattccacaacgccattatatgatcatgagaatctttcttttaaaagaacaatttctaagaaatgggaatactaatcataaacttcttagtttgcatgccattagtttgtttgatgaggatcananaaacttatcagtcatgtcaaaaatgagatattggcatgactattgatgttgaggagccactttatgttaaagggcatgctgaaaccacaagtctaattattatgatgaatactcat

SEQ ID NO: 164834 - DNA, 354 bp, Glycine max
gaatcggattggttagatagaaagcataaataggatttgttgtaagaattgggctgccccatgattggcactttgcacctaagtaacatgggagatgcttttcaatggtgtgtagatatatgtgtaaatatatatggcataaaaataccttgcaaagtgaatgaatagtaaataatgcatttcaaaaaaatgtatatttgtggataggtagcgtaaaaatgcctttcaaaatatgtattattgtggataggtagcataagaagcttttcaaaaaatgtacccatgccaaaatggcacatgaattgcttccaaatgaatatatgatgtggaattgcccctccagtgtagatagat

SEQ ID NO: 164835 - DNA, 417 bp, Glycine max
  unsure (1)..(417): unsure at all n locations
atatcacttgaaagaaatgagagtccaagttcaaaagtgattaaaagggacactgtgtagctgcatatctttctctcccctgttttggaaaatactagctgctcattgctatccataatccatgggctacatgcatgcatcatagtctgctacaaattgcccattaattgtgactcccatatgacatgaatcacatgaagttatgggttaaatgatctgttacttctgagtagagtacaaccgtccatcttctctaattaactaaatatgatacatatatattatcaactttagcaatttcccttcatctattcaattattaaacacatcgaaagaacgtaagactctaagatgtatattcatatacacaatcagnaaataagtcatcctctatctttcttacacaataatgaaata

SEQ ID NO: 164836 - DNA, 399 bp, Glycine max
  unsure (1)..(399): unsure at all n locations
tctgaacaatctgaactcattctttgattctttgagatcatcatctttgttatcatgaagtgttcttgacctttgagctttntgccatcatgtttgttatcatcaaaacttctttgaatcaatcttgattcatcatgaagctcgcttttacaatcttcagctgctggtaatcgattacaatcctcatgtaattgattacatgccttcaaaaatattcaaaattactttaaaaatgtttcacgaagtgttttggccactggtaatcgattaccagagagtaaacctcttgtaaaacattnttgcttatatcattggccaacttcttgttgtttcaacctggaatcctttcctaaacactagagatcttcttgagattatcttgaattcctggattttggc

SEQ ID NO: 164837 - DNA, 172 bp, Glycine max
cattttttagcgtctctatatgtgatgcgcacgaattggacattcgagttaaaagttatgaccatttgaatatctcaagagcttccgttgttcaatttcgagcgcctcgatatattataagcttgattggacctcagcgtgaaaagtgatgaccatttgaatttctcgagag

SEQ ID NO: 164838 - DNA, 359 bp, Glycine max
tatagctttatgtcattcagccttcatatgtatgatcttttttgttttctttgaaaatatgaggtttgatttctcagtactccgttgtttataccaacgttctattattattggttgaatctgtatccggtgatagtttgaccttccggtttaattcgagctctattttatctgccctgaattgactatgttgagagtttgaccattttatctttcgactccgtgctattctcttcttgattatattcctgatttatagcgggattctttgactttgattttctgcttcgtgttattctactttttttgtttccctgtggtatcatgtaggttgtctttattctagaacttttttttat

SEQ ID NO: 164839 - DNA, 263 bp, Glycine max
ggactaagacgagcgcagcttaatatacatttgtttatttcaaacaccaatggcatctagatgaaagggatataattacgtctctctattttgagaaaaacaaagactccttatcttctatatacccatcaactgataaatagatgagactatacttatataattggcctaccaatattctattaatattagtataattaggaacaaatccatcaaaatacaaatttaatgaggaaaattatttaaaaaacaatctgaagaaa

SEQ ID NO: 164840 - DNA, 468 bp, Glycine max
  unsure (1)..(468): unsure at all n locations
actgtgtccacacctcttgagcacaaccatcagcttattctttttttttacatctnctagaacaacctgaacgttatctacgtctagttggtcgcctcatctatttgtgtgttaccagaccagagctattttattgtgttcacctcttgtcacaattcatgcaacaacctcgtgagaaacactggaatgcagctcttcgaattgttaaatacctaaaacgaagtcctggtaatgcatacttcttagcagtacggctaaatctcagttgcatggatggtgcgattctgattgggcaagctgccctttaacccgacgctcaaccaccggtctggttgtgttcttgggtcactctcctatctcttggaaaccaagaaaaacacactgttctcgtcctcggtgcgctgataccgtctatggtacaccacctgcgaacttaatgctcaagagttactatctaactggatctct

SEQ ID NO: 164841 - DNA, 320 bp, Glycine max
  unsure (1)..(320): unsure at all n locations
gagatgatggtactgcgggtgaaccanaagctgcagtttcttttggtgaggtagccatggaaaagcagagcgtttggaatgatttcgtaaatctcagaaagctattgggaaatgctggagaaaacacgaatgccaagcagatataaatttgaatgaagaatgcagaggggcgtgtgaagcaacggtcgaatttgctttgtggtgaacgtgctattaatgttaagtgattcgtttgggcacgttcagattgcagtagctgctataattcctctagcagacaaatgcccagcttgcccctcagttnttcaaactggattgca

SEQ ID NO: 164842 - DNA, 346 bp, Glycine max
gatggcgcctcctctcatatcttctcctttatattccgctgcatcttcatggtggaaaatcaccattgaaggacctcattgaagctcaatgatccaccctctatagaagcttcacaagtaagctctcatcattctcacacatctccttcatcattttgttgttcaaattggtggcattatcggtgattatctttctgggcaacccatatctgcaaattatttccttcttgatgaatcttaccaccacattcctagtcacattagcatatgacgtagcttccacccattctgtgaagcaatcaatggtgactacgatgatacgatgcccattcaataccttgggttc

SEQ ID NO: 164843 - DNA, 347 bp, Glycine max
  unsure (1)..(347): unsure at all n locations
agctttacaattataaanagatgtattacgtttttntttatgagaccataataacctngggtgcaggggaagccaatggacaggagcctatgtcatggaatatcgagatctaattaacttgcctcacatgggagtcggaaaccaggaagaagaagaagcacgattttcattcttgaagggtggatacgttgaagattctgaanatcacggtaggttctactttctattccttgcttctatgcttgcaactgaatgattactttaattagggaatttaaaanaataattatattcgcaattctgagataatagaataattaggtgaagatgttattgtcaatgacatt

SEQ ID NO: 164844 - DNA, 290 bp, Glycine max
  unsure (1)..(290): unsure at all n locations
ctgcagcttggtggagctcaatttttttgattttattataatggcaacgngagggagagagagggctgtctgacaaagcgcgcgggctgagtgaagagagagaaaagctttctggttttaaataaaagggtttttctctttttctattattttattataaactatgccacatgtctccatttgagtggagcaagaagggcccactttctcttttgatagcgacctatactcaaccacaaaagtgagaaatatctgacctttgaaacgctaaaatcctgcctcggtttgcg

SEQ ID NO: 164845 - DNA, 346 bp, Glycine max
  unsure (1)..(346): unsure at all n locations
agcttgccacccagctcgtntcagtttatctatgtngctncctccggaaggcaccgccttctggagaacttcctggaaggccaagtgtgcatggttgctatntgcacccncctatttactaaatacacccncttgtccttttttgctgattctttctctgtaacgttacggaaacttatgaattacgtaacgatacttgttttctttccgtaatgttatgaaaacttacggatcacgtaatcatcctcttttttggctttcgcaatgttacggaactttacggattgtgctacaatgcttttcttttgacttccggcatgtctcggaacttcacgaattacctaac

SEQ ID NO: 164846 - DNA, 418 bp, Glycine max
actaagctttaactgactggtaaactctgccgtttgtttttttttatgcttgctaaagcgagacaaaagctggtgctaatcaaaactccgatatctcatgggtggaatgaatgaatgcatgaacgaatgcatataacacaaatgcaatctatgaatgcggcggtccagggaattcgtcccccttttatacactacgtctatgggtagcaaagtgccccaacgtacttttttaagaatgcgacatggaccctccgttggtttgtttacacaagggatcaagacagaacccatatgcgatgcctatgcaatagacacaatgcgggaatgtacacagtatgacaatattcactgaacataatcataacggtgtatgatacttatgcatggcagtgtgaataatggcacgcaccgtgtttgc

SEQ ID NO: 164847 - DNA, 405 bp, Glycine max
  unsure (1)..(405): unsure at all n locations
catgcaagctnggatgtatgcacaggtcgnnacantgtctataaatttttatattatacccnnnaagangcatgngncttatagnatgctccttaaagaaagggtaactttttctttcttaaatgtacttccatattaatatcacacatgtatttataattacttatccagttatcctcttatgacacacatccaatgttttgtgtaaaatactaaagaacacaaagggaaggtgatgagttgaggctcacgtcccctctccaactaaagtgatgaggtattttaccataaaaaatctcacttgtcgatcaccagtcctaattcttttgattacttggaaaagtggtagggcgcatgggatcatcatattattattataattataatattattaatactattatt

SEQ ID NO: 164848 - DNA, 111 bp, Glycine max
aaaaaaaccgggcaagcaccggaccaacaacacacaccagtgatcaacctaacagagacgaaacagcacaaaagacgcccccagacaaagcaggaaaaccccgaacaacaa

SEQ ID NO: 164849 - DNA, 360 bp, Glycine max
aaatcaactgctgtaacttgactgttgttcttaatatagtcattgtaggagaaaacatgctcaattttcaactcccactccaggtatgtgtttgggtcactccagcctttgaaaggaggtacattgagttttactcactcaattctttgtttccccttaattcctgtttgcctcggtccatcattgcccactttgttcccaccatttggctgtccagcattctgaatcagttggttctctagtccttccattaatccatagagctcttcattgctatgattcggcaaacattgcatctgtgtagtcatcacatccagtaaacaacatcgagctctgtctagttgatgatattcatcacca

SEQ ID NO: 164850 - DNA, 314 bp, Glycine max
agatgtcaagtgccaacacgtaatattgttaagggtgtctatttttgactataagtcaggatcaggatctgcgctggtgacgatcttgacggaaaatgacgaaccttatgcgacaaatatatgtgaccttgatatcagtgattacatgaacagacccatacctgctcaacatgctgatagctggacacgtctaaaacgatggaaagctgacgtgcaccttgtgacatacatgctcaaatacaagatctggtcgatatgaatgcaagacatgaatgcgagctcggatgcaagttgcaatgcgctactgtcgacag

SEQ ID NO: 164851 - DNA, 257 bp, Glycine max
  unsure (1)..(257): unsure at all n locations
tcgagacgctcgaaatntaatgttgaagctctctaccaatcaaacgacaataactttttactcgaatgtctgatggagtcctgtaatataacgagacgctcgaaattgaatgttgaagctctgagccaattcaaacgacaataactttttacacggatgtctgattgagtcccgtcatatattgagacgctcgaaattgaaagttgaatctctgagccaatccaaacgacaataactttttacttcgatgtctgatt

SEQ ID NO: 164852 - DNA, 424 bp, Glycine max
  unsure (1)..(424): unsure at all n locations
gctaaacatcaacttcgagcgtctcgatatattacgagnctctttcaatttttcttaaanaagatattggcgngggaatttgctcagatgttcaacattcaatnttgagcgtctcgatatatgacgggactcaatcagacatccgagtagaaagttattgtcgtttgaattagctcagagcttcaacattcaatttcgagcgtctcgatatgtgacgggactgaatcagacatccgagtacaaagttattgtcgtttgaattcgctcacaggttcaacattcaatctcgagcgtctcgttatatcacgggactcaatcagacatccgagtataaagtattgccgttgaattcctccaccttaacattaattttgacgctcgaatatgaaggactaatctacatcgataaaagttatgtcgttga

SEQ ID NO: 164853 - DNA, 120 bp, Glycine max
  unsure (1)..(120): unsure at all n locations
acatgggagctagncctttttggagngcacacaaaactaattgatttcaacttgtggaactcagaagttcgaatttaactagttatatatgggtggctatatgctaacgattgcgaaaat

SEQ ID NO: 164854 - DNA, 127 bp, Glycine max
ttaactgtggataaacttgctgcgaggaatccgggcacatgtctgccaagaaagacttccgaaagaataaactcgcctattgttattatgtattatgcttaggaaaatattaattatctgctgatgc

SEQ ID NO: 164855 - DNA, 324 bp, Glycine max
accacagagaggacctggagatatgtcgcggcggtcaagagaccttggggacgtcaggtggcgtgctattgcccaaaaccaagcttgaccaatcccgacccaacccgggcatagtcagtcagtgagaacctgtgatgtacctaagcaggcgagctcctggcagtcaacagataaaaggaacaaagaccacaaagcaaggaggcttgtgtggtggctggccagctgcgaatcttgtgtgatatatgggttatggcctctgcgaactcgatactaagggcgggaatcgatacaaagctaaaaacgaaacagaggcaagatggctct

SEQ ID NO: 164856 - DNA, 346 bp, Glycine max
ttgaactagcttgagcccacttcaactatagacttttattttttttttgaactatgaccctaattgcttttgaatgccaccctcacaaaacttatagccctacaagaccaacttcgcaatactgggatcaaactatatgatttgtcaggccctcgtaaacaggttagcctaattaagtcaaaaattcgttttaacaatttccaaagcatatatgttgcatagataaatattcgagacagaacgatgcctcgtgcattacacagttcatcatacttacaccctatcgagttttttgaatgcaccagcttatggtgccacaaacagactgagatcaccaattaagagg

SEQ ID NO: 164857 - DNA, 450 bp, Glycine max
  unsure (1)..(450): unsure at all n locations
agcttgtagcattaacacattttttatgttttatgtggactcgaacataagaagatngcgtggattaaatgggatacaatgtgtcttccaaaagacaaggagggcataggcatcaagacttttaacatagcattgcttggtaaatggagatgggatctttttcggcatcatggggaattatgggcaaggattctggagtctaaatatggtgactggagatgcctggctgaaggaacaagaggcagcaaggattctatttggtggcaggacctaatggcaactcttaatcaatcacaacagggcactgcttttaaaatgtaacaggtggatgangatgtgggataggccaatctggaggattgtgactgctgataatatcttaagataaaatctagctgaccgattctgcacaaacacctatcacactggcagctacaatcagctggatga

SEQ ID NO: 164858 - DNA, 425 bp, Glycine max
  unsure (1)..(425): unsure at all n locations
ngttggagtagaaacatgggaccaactcactntattttattttgttgtatccagncaaagtctgagagaccatacaagtttcctagcaatttctaattatgtgggacattaagtctatcatatgctgacaatagccgagaagcccatgaatctcttcgggggcggagtaagtgtccgccattgccttggctctggctaacaatcggggaagttcttgactcccgttcaaggtaagagcaaaccgatccatccacatggttgcctcttggtgtaaagagtcgatcacccttcctctagcctctttttccatgcatacttgggcatactcatccgcgagccctcttagtctcttgttcaaaggcttgagttcactattgctaccccacagagctccgctaaatttgttacgggccatactcttcttg

SEQ ID NO: 164859 - DNA, 340 bp, Glycine max
  unsure (1)..(340): unsure at all n locations
agcttggaggaagaaagagacttttttangtttacgattatatgaacacgaaanngatcgctgtaaaagagctntgaaatctgaagnttaattttcaaacgatcaaagctgaaagaaatgcacacacatgacctctatttatagcctaagtgtcacacacaaatgcagagaaatttgaatttctattcatatttcacttggatatgatattgaatctgtggagccaaaacttcactaattatgattagtgaattttaggtatggctcagcccactaatccaagatgaagaccaagattctccactaaatgtgcctcgtgtcatgaggcatgtaaagcatg

SEQ ID NO: 164860 - DNA, 395 bp, Glycine max
  unsure (1)..(395): unsure at all n locations
agcttgctcccatcgntgntcactcttcatactcggttcacggcattccagaactcttcattgtagttttcaactcctctacctgaatgtagttaatattttaattcactggcttcatcattcatgtnggatggnttagaaacttagccaaaatagcaggctttaatatcaacttttggaattccactangaataacaccagtaatgctttgtgcaggaaaccaaaaacaaaggccatcttctataaacaactaanaaaataaaggagagatttgaaaataatatttggaaatggaaggaaggggtatttggngtgtcataacagaaatgttgagactcattntggaaattccaatcaagtggagttattagatagagatctttataccttaatt

SEQ ID NO: 164861 - DNA, 395 bp, Glycine max
  unsure (1)..(395): unsure at all n locations
ctaagcttctcaggatatagtgcgcatggtgttangtgtgtgtctgnctcttctngagccctcttgggagaagatggcgcttgttcggcttgtgcctcttgtctgacttgtgtgattcactcttgtacgagtgttgagctaacaacttcttcagctactaagaaatatagaagtaggggtactcctggcctgtgtcggctcaaaattggcggtgtggctatggtcttcttgaaagccaagaaagattgtctgcaagtctcatcctataaggaagcttgttcgcaagtcgtaaaatgacttcacctctgtggaaagcttcagaacgaatctggacaacgatgctagcctaccattcagtttctggacttgttggacgttggtcacgctatgaatct

SEQ ID NO: 164862 - DNA, 376 bp, Glycine max
  unsure (1)..(376): unsure at all n locations
atctcagcaaaaaacaagcatcattatggcgggcatgttcatcatcacagctgtgattcggtttgggacaaagtgaacaacgcattacgcaacattatattattacattntttttgtcacgattctttgccatttttatattccatcagatctcgtgtccaagtttttattcaagcaaattactaccttttttatttatttatagcatggccaaacttatcgtaattctgttatatttctatataaaaaattaacaataaataatgaatgcaatgttcgcctaaaaataaaataaatacctcaacattataaaatatgtatatactatcatctaatcataaaatgatatgacataagcgtatcaactcttataata

SEQ ID NO: 164863 - DNA, 386 bp, Glycine max
gctgcttgtctaaatgatctataataacgctctgaccctctcttgtgcaataaagcacggtcacacttctgcggaaataattaatttcatgactgttgatgccgaacgacttggcgtattcactcggcttatgcatgatctgtggatggaggttctgcagttaccctagacctgttgatcttgtatataaacactggtctggcttcaattgctgcttccgctgcaactgttattactatgttgcaacatgctccttgcgatcattgctcgacattctcaatacaagatgacggagctcaatgatacaagaatgaacgccacacttgagactctaatgaacattgacgatcctctaacctaccatgacgtggtaatcgaatactctc

SEQ ID NO: 164864 - DNA, 394 bp, Glycine max
  unsure (1)..(394): unsure at all n locations
agcttcaagaaaaatggtctcagcaaattccctattttcagaaagaaattctatcaatagaacctcaatctttaatggagagggttaccactactggaaaacccgaatgccaattnttattgaggcaatagacttaagtatttgggaagccatagaaatagggccatatatacccaccacagtagaaagaatacaacagatggtagcacatcaagtgaaagcataacaatagaaaaacctagagatagatggtctgaagaagatagaagacgagttcaatacaatctaaaagccaaaaacataataacatctaccctgngaatggatgaatatttcagggtttcaaattgtaagagtgctaaggaaaatgtggacactctancantaacacatg

SEQ ID NO: 164865 - DNA, 488 bp, Glycine max
  unsure (1)..(488): unsure at all n locations
cgctggcaaaatacttggganaatagctatgattcaaaatttttccttcttctgntatccttcctaaatatatgcaagcagccccaaagagagagagacatatttgcaaaatgttaacattaacggcgatggattccggctaagcaactcagcatctaatataaatgttaatttgtatccaagcttgcagaaaggcccgcctttggaggactcccagcaaaatcacttgaatagaattcacttggcctacgtgcctgaatgtttagattgttggagttggaagaaaggtgctcttgtacaatctacagggaaagtatgaacaaacttccagcagttagggtatgtatattaagtagaaaagaatgaatgaaagatcaattaataataaccaaagtcatcatttcactcaacgagacagcaaatgcaaaagtatagaagataaaaaaaatagtaaataatgtcatcttgaaatttaaagtgacaataat

SEQ ID NO: 164866 - DNA, 320 bp, Glycine max
gagatatcttctgctaaattccatctactactctgtctgagctggctcgagtagcctaaagtatactacaatatgaaattaacgtctgaaataacatatgaaaatacggtaaatgtgatgtgtattaacactgcatacttagaacctggcttgtccaatgcatgactaaactaagaacaaaattgaccatgtaaagatgtttacgaaactatacttatcatcagagcgaagatgcacaatgattaggtaccaacacacctctctgtatataccctgatattcaatgattgatctgatatatgcggcaatcgcctaattat

SEQ ID NO: 164867 - DNA, 409 bp, Glycine max
  unsure (1)..(409): unsure at all n locations
ctaagcttaagtgctcaatgctcangttgctgcatggaaggctttgtcctttggtggtcacagagagcacaaccacaacccttgcatgatgcacggccagctgggttaccaattgccaatgcatccatttgccttcagcttcttatttagatgatgcaaatgggttgtagctacctcatgcactcctgtatgactatggatcattttggcgctaactgtgggagtggagccatcttttaattaattttggcttagcagggtatctcaaggctcaccctggacattatatacttttcatttactggtcttataaaaatggaaaaactgttgaattgatgggggcacggcatattcttaatttccatctatcagctttcatgagtgctatacgaaatctctatgtgggctg

SEQ ID NO: 164868 - DNA, 440 bp, Glycine max
  unsure (1)..(440): unsure at all n locations
ttctataaaggagaaattaacaatgatttttcttcctcgatctcaacctatttattggctttaaacacaaaacacattcttgcatcattatttatattntatactaaattacaagttcagtacaatgaaaacatagttttcttttataaaaaaaagtattgtgtacatcagtcctgccaccaccaaccatgtagcacatcatanaaatgaattaagcattaccatcactgaaacattgcaatgaattccattcattntaacagtccagccaacactttaaagcanaaaccatcgccttttacttcttcttctagcaacatattaccactttttcaagctctatgaatgtcatattntcacaaaataatattatttgcttattccttcatcaacccactgaatctatacaacattgacctaaacatcactctatcatccat

SEQ ID NO: 164869 - DNA, 483 bp, Glycine max
  unsure (1)..(483): unsure at all n locations
ctaagctntctcccaagtcctaaatgacatttcaagctagtattaactcttttttcctctctttaccatagaattcagacttagccttgcaactcttaaagcctcactctttttccactcataacatcacattctcactttctaaccctaggttaactctacctttcatctctaacagttttccaaaagtaatttcagcatataaacatcacaaacatcatcacaaaaaccctaaaacagaatgggtatgtctaactcatccatcatggcaatttcaacaagctttcagcaaatgtcttcacaaataatcatcacacagcagaaacctagcaagactacccatcatatctgcgcaaaccccatacccacgaaaattaaaggagaaagaagtccacccatacctgaatgttcgaagtcccactcgtagccacgcacttcacgaccccgaanatgccctcctttcgcgaattggagcagaaatga

SEQ ID NO: 164870 - DNA, 212 bp, Glycine max
  unsure (1)..(212): unsure at all n locations
acaattacaatctcaacagctgaaggaataaaagataataatctgatagtgtactaccagatcccaaatcactgattcagtgaccctaccaaataacagaattctttcctgcccactactgctcaatactactacttatatnagactatttngatgtatcctctgccacctcatcattctttttcccttttccattctttctcgtatacact

SEQ ID NO: 164871 - DNA, 391 bp, Glycine max
  unsure (1)..(391): unsure at all n locations
taagctgcatctgaaagcatanatacatatgtaaataattttgctggtattaccgaattgtaaagctcatatatactatataccaagataagatgatccatgtttgtgaccctaagttcacatttcccataaatttgagaatcaagaatatctcagctgggagtcagcggcataacatagtgctataaagtgcagatagaccatttgcgatgtgccattacacaacagaaatgctatactgcaaagaaagatgcaatgatggctacaaaggaagtattgaagaatgcattgatgatcctagtgtatgcaataatgatgcagccacacttatcatgtcaaaacaacagaaaaatacagatggtaactactattgataacaggcatttaatat

SEQ ID NO: 164872 - DNA, 172 bp, Glycine max
acccttttttgcacaatatgtgaagtcccgagacgtgccgaaaatcaaaaggaagcaggcttacgcgatccgtgaaaattccgtaatgtgacggaaatcgaaaggaggtgttttttgcaatccgtgagttttcgtaacttcttcgaaagctaaaaaagagtaaatacataat

SEQ ID NO: 164873 - DNA, 324 bp, Glycine max
catggggaatacaaccttcattcggatgttaaaaaagcaggcgatagtcactcttttgactagtgaggcagaatatgtagcagctatttcatgcatttgacatgcagtatggctttggaatttgttaaaagagttgagcatgtcacaagaagagccaaccatgatccttgttgataataagttagtcattgttatagcaaagaatccacggttccatgattgaagcaaacatattgatacccattaccactatataagggagtgcatagcaacaaaggatgtacgcgcacaatatgccaagtctcaagaccaagtagatgatat

SEQ ID NO: 164874 - DNA, 347 bp, Glycine max
  unsure (1)..(347): unsure at all n locations
actgccctaactctntcagactggtgattcctaggatcttgaccttgacttgatagaacctctctttaagcgaaggcgtctgactcgatccaatgttttactaaagtgaaacaaaatccagtgcgaatcaaaactctgacatctatcatgggtggaatggatgaatacatgaagaaatgcatatgacacagatgcattttatgaatacgggagcccgggaaattgtccccttcttagatacaacattcgggcagcatcgcgcccgacgtatgcatttaagaaagcaacacggaccctctgtcgggttgacaaagtgaggggatcaagacgcaatccgtggatgatgc

SEQ ID NO: 164875 - DNA, 409 bp, Glycine max
gggagcattggccaagttgggacaaaaaataaaatatacaaaataaaatgaaccgaaaatacttatcatactcgatgatctttctttgaccaccaaacacaaagaaatttacttttgcactgaagtctatgccatgtttgaaactttatgtgtgattgttttttgtatgaataccttgttatttcttttatttttcatgattctgttgagtataaaaatttccagttatgaattatgtaatattctgtaatatgaattaattcgtgtgtatcaattagtaattcattagattgattcctaacctagtgacctaatactcttattaagttgttgaccggtccaaataacacttgaaatattatagaaatattatatgtgaccgtattaattaccaaaatcataacctaat

SEQ ID NO: 164876 - DNA, 380 bp, Glycine max
  unsure (1)..(380): unsure at all n locations
ctagacaaaaatttgaatgatgttagaattctaattattcacatacaaaagaagcaataaaagtgggaaaatccaacaatttttattgacttgatcacaaaatatacctatgcacaataattatcatttgtcgccgtgggatggttgtctttggcctccatgatgacttccatggccccgaccatgacctcggtaactggttgtgttgttgttaggggtgtagatgtagttggcaagggccaccctctgtattaactcctctatcttgtncctcanggcaacacattcctttatagtatgattgaagtttaatgatatcacacgtttctttctgtccgtgagtgactaccttgtaagctagaagatagatttcgcatgat

SEQ ID NO: 164877 - DNA, 379 bp, Glycine max
cccaacaactggaccaggtttgggtgagaaagtcttcctaacaagttcacttctgactgcattcttcaatcaacagaaaaacatgtcagataatcaaatagctatgctgaatgtatcacatggaacgtaccatgttgtgttgatagcagctacactataaatgtaaatgcaatatgctaactgaaatcacaacatgatagaatgccttgtattgattttgtaacagaacgagttcatctaattctgtatgtactttagaacagaaagagcatctaattcccatgcattagcattgactaatgctgacaaataaatcttcaacataaatgccaattcacatctcacagcaaacatactatgattaactagttgtcataag

SEQ ID NO: 164878 - DNA, 399 bp, Glycine max
  unsure (1)..(399): unsure at all n locations
agcttgtgccgatcccacatggttgtatcattctctcanaacagcgngaccctgactggtctccctatgatntacttagtgagagtgacctgatatactcattgtgtggggtgtcttgttatgtactcctaagcgtcctagtgtggtttttcactgatatggtaccacattgcatatagacttgagtcttagtataattgttgcataacgctngtgtctgactttcattgagttagcaattgtggtttgatattattttctggagtgtgtgaacttgaatggatgtgaataatgtgtgtgattttatgaagtgatgctatntatacaaattcacgtttaagtattatatgttntacatgttctaatggtntagtatatatgaatgtgataacccattcc

SEQ ID NO: 164879 - DNA, 446 bp, Glycine max
actaactgctctcaaaatgtcaatattaaattgttttgttttagcctactacccccatcccttctttataggcatcttcaccatactggtcatacagttctttcttctcaagatcacttaaaacttcatatgcttgacctaactccttaaactgatatatgaatcagatgtttagtattaaaacagaaaaaagcaagagcttagagaaaacttggcagtttctcaacataaaaagttagcaagtgaataacatcctttatataaatgagaagacttaaaacacaaaaatatagcatgcccaagtcatcttcaggcaacattaatatcaaatctctgtacatatactcactgtactaatataaaatatgtatgaatcaaatatatggtcaagctgtgaatgctgatcctaatagaatagcacggcatctgcatatgataatcaaaat

SEQ ID NO: 164880 - DNA, 131 bp, Glycine max
  unsure (1)..(131): unsure at all n locations
ctcaagcttctccatatantgctgtaaatatggggacanatgcataaggtttgtgtntacacactgacgcacttgtccatgtctatgaactgccgacgaagatcatctccatgaagggcgatcatcgttaa

SEQ ID NO: 164881 - DNA, 413 bp, Glycine max
  unsure (1)..(413): unsure at all n locations
agcttgtcaaggaagctacctagtctataaattgaatcatgtgnaacactnngtgnaaactntgatgaatgagagtcttgtgagacacanctcaaagntcaacttctcttcctttntctttccttcaatntcgtgcctcccccctctctctttctcnntcctcttttttccctcattgaagcatcctctccaagcttcttatccaaggctcatcttggtgatgaagctccttcttccatggcttattccctagtggatggcgccgcctcttacctcttctcctttgtcttccgctgcatctccatggtggaaaatcaccattaaaggacctcattgaagctcanagatccagcctncatagaatctccacaagcaagcttccatcaagtggtaatcagagcacaaaagcttca

SEQ ID NO: 164882 - DNA, 415 bp, Glycine max
  unsure (1)..(415): unsure at all n locations
taagctctccctatttgctataatgggggagaatgtttaagtatgtgttcggccacttggcacttctgtctctctcgaaatggctgaggaaaactagttccgtgaagaaaatccaagccgatgcgcttccgtaacgtttccgtgagtaattacgcgaagattatcgaccattcttcaagattcatcgctcgttcttcgttttcttcagtcttcaacgggtaagtacctcagaccaagcttgtcaattcattctatgtaccagtggtggtccacattttgtgtcatgtatgtttattcttgttttcggctactttgtataccacctcttgacgtgcttataccatttatgtaagtcatttctcgcttaatctaaaaataaaatacatntccaccgatcgcttgaatctgatcatcc

SEQ ID NO: 164883 - DNA, 434 bp, Glycine max
  unsure (1)..(434): unsure at all n locations
agcttctagtcatccatatacctctctcattgttatcggccagcaaacgttgcatctgtgcattcatcgcatccagtaacagacgttgacctccgtccaactgatgatactcgtcaccaccaccacctgctccagccataattcaacaggaaaaaaaatgtgcaataaaaattattaaggttttaggacctcacaacactctactcacgtgtttaactcttagatggtagtacactcgtgtttaatgctctcaatataggctnttgtgtaatgtattccctcttgccttttaccactcatgtttcctcttaagttcctggatggaccanattagacacacaaggtaatataaaataaaaggaaagacaatataatgatcacaaaccagattgattngggataacaactnggactnttgattggatataatatat

SEQ ID NO: 164884 - DNA, 413 bp, Glycine max
tactcagcttaacattcaatttcgagcgtctcgatgtatcacgggacttctgcttacatccgagtaaaaaggtatcgtcgtatgaatttgctcagagcttcagaattcaatttcgatcgtctcgatatattacgggactcaatcagacatctgagtaaaaaagttattgtcgtttgaatttgctgagagcttcaacattcaatttcgagcgtctcgatgtatcacgggactcaatcagacatccgagtaaaaagttattgtcgttcgaattagctctgagcttcagaattcaatttcgagcgtctcaatagattacgggactcaatcagacatccgagcaaaaagttattgtcgtttgaattagctcagagcttcagaattcaatttcgatcgtctcgttatattacgggact

SEQ ID NO: 164885 - DNA, 311 bp, Glycine max
  unsure (1)..(311): unsure at all n locations
ccaaccaaatccttaactcatcattaacacccatctcacaaacttcgagcatttggtttcttaaccctttccatgttttttgctttgtagttacacacacaaatataactctaagtataaacaaagtccttgtgaaatcgatactcgatcttatcgttntaatcctacttgtacaactnggacgcttgccaggagtcaacatctatccttttatatataaagaaatatatgattaagaatgagttacatgaaatatattttcaatagaattggctaatcaaatctttctttatctcttactactctattat

SEQ ID NO: 164886 - DNA, 482 bp, Glycine max
  unsure (1)..(482): unsure at all n locations
cactatgaatactaagctttatattgttatttaattacataaaattatatatgatatgctgntgtttattttataatagctattttaaaagtttagacttttaattgatcaataatgtaaaaaaaataataatactgaatttgaatgataattaaactctaacttgtttttggtttatataattgtaaatatattatcttattttattttgttttgatttcaaaacttaaataaaaaaactatagaaaaaatatgtttttagtgattcctgtgcaagttttgaaataagaaactaaataaaaatcaggtttaattgtagattttaccattcaattatcattatttctcaaaatttaccgtccaagcttttttcccacatttacaatcatatttttaattttacatattttccatcatgttctaacaaaatactgatgatgttctttagagtcatatcaacacttcattacacatttgacata

SEQ ID NO: 164887 - DNA, 194 bp, Glycine max
  unsure (1)..(194): unsure at all n locations
tagtctccaggttaaccaaatagtatacaatcgcagtacagcatcaaaataaacatgtgatntcactgatcacccagattcttatttcttaataagcataaccatctttcagagggaatctaacagaatcaaacaggtaagcacaacatatttatggactgcangaagtctatcataatattctttactacctc

SEQ ID NO: 164888 - DNA, 461 bp, Glycine max
  unsure (1)..(461): unsure at all n locations
tctnttcgaagcaagagatgttggtnnttgtgagtagcagtttgttatttctatatttcaaccacaagaccccatataacataacaaaagaaaaactgaataccaatatagttttctggctcatgtagagtattatatcttaaggttaagatatatctataatccttcatatatatctgattctgtttttctatctctgataattttttattatttcttgaaatttgaaaagttttgtgtttatccttattgttagtatttcttcgttaaccaaagatgtgatcattaacttttttaaaatacggagataaaagaaaaagattggaaaactcatcatggtcacatatgaaaacttgtgtaggatatggtgaaggcgacaaagaagtcgatgcggtttggggacaaatcgattctacaaacttcatcattgtcaaagtagagcatgcaatgaaagttagatg

SEQ ID NO: 164889 - DNA, 496 bp, Glycine max
  unsure (1)..(496): unsure at all n locations
agctntagcctgattgctaagcgacagcnatttcgggcttttcgtgatctattgtcaccaagggcaaatccttacgaccataattgaggtccatgatgctaagcgccagtcatggcagctaagcgagattcattgcggcaatatgaacgctaaatgagtccttcttagctaagcgcatgctcctctatacttaagatgcatcattntagctaagctggccaaagcctggtgatgtgtcctcattttctcatatttcttaaccctttttgtcaccattttaattactgattagccttatattttgaatctggaattgggcttggacttgaagagagcagacaattttattctaccacatcttatcttatctagaatttatctcatctagatattatttcatctagaatttatcttatcatatctagaatttatctcatctagatattaatttatctagatcttaatctatcttaatctatctagatttatttcatct

SEQ ID NO: 164890 - DNA, 448 bp, Glycine max
  unsure (1)..(448): unsure at all n locations
ctaagcttaatggctcaatgagaaagggganataatcgtcaaacaacattgtatgngtccgctttctatangagacaactgttgagaagttttatgtgatataatgtcaacggaagcatggcacattctgtcgggtagaccatggcaatctgacaagaaagcaattcataatggtctcaccaatgaaataaccctcacccatggaagcaaaaagttcaaacttgttcccttgacaccttcacaagtggctggggatcaggtacaaataaaactcatatgggatgaggaatagaatagaataagaaaagaataacaactcttaatggttaatgaagagtgaaatgaggtaagtgtctctctcaagatgttggctaacaatgaaagtcattctgctataaagacaaacattaaagaaacatgtgttcttagacaacctccacatcttctc

SEQ ID NO: 164891 - DNA, 300 bp, Glycine max
  unsure (1)..(300): unsure at all n locations
catctcaaggaagtttagtgctagaagcttctgaaggaacgtttctcatgatagattctcaaagaagctacctaggctatatatagaagcatgtgtaacactctgaagtagcgtttgatgaatgatagtcttatgagacacacttganagctatactgctctccctctattattacaatcaattcgagctccccccttctctctttcttttcctacataaaagcatcctcttcaagcttgttatcaaaagctcacacttgatggtgaagctgcttcttcatggcttattccgtagcggat

SEQ ID NO: 164892 - DNA, 83 bp, Glycine max
tgaccaggagaatgatacaacacaatgtgacaatcctacatttccatgacacatattgcctgtgcaacctctaaccctgcttg

SEQ ID NO: 164893 - DNA, 402 bp, Glycine max
  unsure (1)..(402): unsure at all n locations
agcttcttctgttgcctcaacattatatnncttaatttttaaaacggaaaaatggtttattaacaccaaagaagaaagtgcttacaattacaaaggttntgtcattcataccttatcttatgaagggcaggtatagagtccttagtgtaagtttcgagcaagagaacgtgctctagaacactgacatgtaatggaaaatatcacaattatgatagaacctggaaaaattaacaagttgaggctaatataacagaaaacaaaagccatgcaactatgtatgaattaaaccagctaatagctaaacttataatctgagtatctgactatcatgttggacaacaaatcatgcttccctctgcttcangggggaggacaaaaatgttgtaaatataaatgaaaact

SEQ ID NO: 164894 - DNA, 481 bp, Glycine max
  unsure (1)..(481): unsure at all n locations
ctaagcttgggaccttatctttggtggactagctgctttgtcttctgttactcgnntcacctcctgccatagcctttacattgctgcagatagttctattccttttgcttgtcaatggtgagcaattgacattggaaaatttgttcattctactagatgaagtgcgggcatggaaacctacatttggtagagctgatgccatttttcttgttagacaaagatgttggaaagatgtcaatgctatgataaggcaaaggacattgagaagctgatgtttgcattaaaatttataggaggcattggacatttctggacccaggtaagcattaaaaaaatcttatcttttatgaatgtgacttgggttcttggtgagatctagagttttccatataattctgtagtggcctatcctatttccatatntggatggggatgtggaaacatattccaaaatccaatctatttgtncttatgcaactta

SEQ ID NO: 164895 - DNA, 451 bp, Glycine max
  unsure (1)..(451): unsure at all n locations
agcttctttgagaaaacatccttgataagcttgatgctatctacacacactcaattaaaaactaaacttaacttccttgaaaaatacatgaaaatacaaaaaaaaggtcctaataccaagaacaactaaaaatcccctaaattccagggctaaaacccctatacctaatagaatgggccaaaatacatgggccaanaagaagganaaacctattctaaatattacaaagaagagtggatccaaccttgacccatgggctcanaaatctaccnctaaggtcatgagaaccctanggccttctttagtagttctagcccaagcctcttggagtcttctatccaaatacctgggggggtaggattgcatcacgtcttccaaggaaggaaaaatgcgcagagtcaccaccaaagtttattcgaggaaaacgtcgggaaaacaaaaagtggtctac

SEQ ID NO: 164896 - DNA, 420 bp, Glycine max
  unsure (1)..(420): unsure at all n locations
ctcaagccttctccactatttgctatanatagggggagaagtgtatangttttttgttanccccttangcacttctgtctctctcaatatagctgacgaaaattaagtccgtgaagaaaatctaagccgaggcgctctcgtaacgtttccgtgagtaattacgcgaagattctcgaccgttcttcaagattcatacgtcgttcttcgttttcttcagtcttcaacgggtaagtacctcaaaccaagcttttcaattcattctatgtacccgtggtggtccacattctgtctcatgtatttgtattctcgatatcatctactttctataccacctgttgacgtgcttaagccatttattaaagcatgtctcgcctgattaaanataaaattaatttccaccgatcgtttgaatcgtatcat

SEQ ID NO: 164897 - DNA, 287 bp, Glycine max
  unsure (1)..(287): unsure at all n locations
taagtatgtattacctatagttaacagaaaatacttataacactacagaataaccatgaattggagaagttcgatacaatttacacaaggtttatacacaaaagttagtcgtattcaccgactaacagatgtcactgaccatggcaagttcaatatcgaggcaatgatggaagtgcaagtgaaagagaggagtaaggacatatcagggaaagaacaaggatatgancaggaaaatcgattaatatctatcccttcattanaaagatacacgattaatagatctattc

SEQ ID NO: 164898 - DNA, 403 bp, Glycine max
  unsure (1)..(403): unsure at all n locations
cttctccagcgnttatgggtcctttcactatcaacttcgaacctgcctcattatcctcgatttccattctttcttcttcattttggtggactcttcagattcactattttcttttgatatcggcggcttccacttgtttgatgattgttgcactgaatttatatggccttggacttatcacattattcatttagaattggcaggtctatacaactttacggacttagttgaacgatgaaccaactatgataaagccagatgagaatacccaactcatgcttgtgaccaccagcacaagcgtaacaagcacccaagcactacgaaagtcaccacaatacgcagacgtttccattcctcgtgtatgatcgtttataggcgagaagcttatcccgccactccactt

SEQ ID NO: 164899 - DNA, 203 bp, Glycine max
agcttgtccagaagctcccactgttattaagttgtaattcttccaccccgcagggcattcttaacatcattccaatactctaccagacgattgttagacagtgactaccactaacctctgcgcataatactttgataaactgcatctaacgtctcccatctatggatatcttgcagtggtacaatggcgttctgtgcagtcta

SEQ ID NO: 164900 - DNA, 408 bp, Glycine max
tgcatatgaacatgcgccaatatcctatgccaaagccatgcatcacccttcttacttaacgagcattgtgactcacttatggatgctggtctagatctaacatgtagaaattatcaaggctatcttgtatcaactccatgtcatctaaaggattacaaatcatgcaaatactcacagtggatgaaatatcaaagccttatcacacaattgacttgtgctgtgcacattgtgctttagaccttgcacgtatagaacatcttcaatacaagtacgttatgaatcacccccattaccaatgcctataatctttcgcttcgtgatgtcaccatacggaacacaccgtgcttgtggttcatcagatataaaaacttgacttgcttcgttatgtgctgtagacctacaaaacaa

SEQ ID NO: 164901 - DNA, 392 bp, Glycine max
  unsure (1)..(392): unsure at all n locations
agctntctcataagtcctaaatgacatttctttcttgattaacccactntaacctctatttaccactgaatccagatttagccttccaactctcaaatactcactctttttccactcataacaccatgttctcaccttctaactctaggttaactctacccttcatctctaacagttttccataagcaatttcagcacacaaacatcaaaagcatcatcataaaaaccctaaaacagaatgggtaagcttgactcacccaaacatggcaagttcaacatgctttcaacaaatttcttcacaattaattatcatgaagcataaacctagcaaaactacccatctatatctccaaaacccaatacccacgaaaataaagtgagaaagaagtcta

SEQ ID NO: 164902 - DNA, 469 bp, Glycine max
  unsure (1)..(469): unsure at all n locations
taagcttctgccaatggactaccttgaataattactctgattctcttcttgttccttgnatccctatccttgttgtgaatctcactacaagccttaagtgataaaccatgatattaccatatccttaacgaattttggagctttggaattgttttgagaataagtgtggggggtttttgtttcattggacaacctgtcttgttggctatgcttcatgatgtattttgggccatacttgatgtacattgtatattggttaaatgttggacatgctgaatgaaatgttgtttctcaaatgctcatagagtaaaaataataacaaacaattcataaaatacacaagaaaagcactatagtgatgaatgagatctaaatggacaagaatgatgaactctgtgtcactcttatggtaattgtatcttacttctttattttcatattctaaatgacttttccctttgtctctatc

SEQ ID NO: 164903 - DNA, 158 bp, Glycine max
gagagttacaaagtcttgacaaaaggtacactctcaacacactagtataagcattgcctctctcacatatccaaattttctaaaaagcctccacagcctgacaaatattctcaggatgtcactaacctctgtatactcatctctaaattgtcaaatgc

SEQ ID NO: 164904 - DNA, 387 bp, Glycine max
  unsure (1)..(387): unsure at all n locations
tgaatcatgcagccactntgcttttcaatccactgcttatttctccaaaaatacactcgcaacctctgacttagacttgagaaaataaatccagcacattctggtgaaatcatctataaagatgatgtaatatttactctctttaagcgaagcagtcctttgaggttcgaccaaatctgtgtgaatcaaatgtagcttctctgttgctcttcangttgattgtttgaagggtaatcttgcttgcttaccatattgacatgcttcacaacttgttaatttagaatctaagtgaggtaagccatgaaccaactcctttcgttgcatgttcagcacaattgcatgatgaaaatgacctaaccttttgtgtcaagcctctgtactggttac

SEQ ID NO: 164905 - DNA, 308 bp, Glycine max
  unsure (1)..(308): unsure at all n locations
agctngctctannattacatngatgnttgtatttgtgggaggaggttatatngccattttgttttaagagtaatgtcccactggtaaaactaactntccaaatgtttgccttcgcaggaatggccccgaggaagcttgcctcanagaggtccaggaaggacaaggcggccgaaggaactagttccgctccggagtacgacagtcaccgctttaggagcgctgtacaccagcagcgcttcgaagccattaagggatggtcgtttcttcgggagcgacgcgtccagctcanggacgacgagtatactgat

SEQ ID NO: 164906 - DNA, 418 bp, Glycine max
  unsure (1)..(418): unsure at all n locations
tgtgttattcttcttcttcattcacttctacctcttgcctttttattctaaagactaaccgcttgagttcttttgtgtctcccttctccctcttcaaagagaatttaaaggactaactgcctaagaattcttttgattcttctcttcccattaaacaaaagatttcaaaggactaacctcctgagatatcttttgtttccccttacaaagattcaaaggactaaccgcttaagaattatttgtcctaacacattggagggtacatcctttgtggcacaagtagagggtacatctcttgtggatcagttcaagtggagggtacacccacttggttgttcatagagaacaacggagggtacatcccttgtggatcttcngcttgtaaaggactttacaaggatgaaagaaatctcaacaa

SEQ ID NO: 164907 - DNA, 362 bp, Glycine max
  unsure (1)..(362): unsure at all n locations
tcataaatacaacaattatgtatgaataagcttattaattttatcataataatcttaaacatcacactaaaataatttatcttcttaaaaaatatttaaaataataacatattatatagttaattagtcatataaatctttgcacactatgtagttacactgattctttttatcaagataatggtttgctacctagagaataagaataaggatccacaagtgtgttctaagataatttacttacaccacacatttgcgcttaattttattatgcctcaaatntcttaaattaggacagtacactgagtgagataagtttaatccgatcaataaagataactctataaaagagacctgagaac

SEQ ID NO: 164908 - DNA, 211 bp, Glycine max
gctaagccggatatcataacaattccaacttcgtttttgttgaccacgagcctcctatatctacccctaattgtcaacattcccctatattttgtggactaatggcattgatctaccacaacataggaacatatcactaaaaaatattgacatggagactgaagacagaacatttgtctgaaaactacttcaccaagaagggggggttgag

SEQ ID NO: 164909 - DNA, 313 bp, Glycine max
caatcgtcgttatgctcggaatcaaaacctccgaatccgctttcttattatcttcaccacttgatcaacaacggctttgcaagcacgagaagtgggcttaaacgcggatttccttaattcaacatcttctctctgccacttgctgatatctccatcaccgccatagccgaattgtactgcacagcctccgttcctttttcaagaagaacagcgaaacagagcaatgctcttgattaataatgctacaaccaaatggcgagtttcctttcgctaattgacagagagccctcgttgccatttccttcatggtagc

SEQ ID NO: 164910 - DNA, 219 bp, Glycine max
actgcaactgatatcaagacccaactacctgctcttcaaatcttgttgctctcacataatatacattcaatgatatgtgtgcttgctgaatttcatgttcaatgacccccttctccatgaacaaagaagtctgcttctgactccccgtacacacttcaaaacaagctgcactcaaaagacgaataatatctaaccgaatatccgagaagatattttgag

SEQ ID NO: 164911 - DNA, 429 bp, Glycine max
  unsure (1)..(429): unsure at all n locations
acatcatatgtaaacttgtccaaataaataataaagtcatctccacacaaagaatgtcatctaagtttcatacaattaatatagaacctatattctaatgtcacatcctatcagagcgtggtgttcccgagtcctctaacatgaggttcttcatagtcatccacctatncatctgctcccccaaacacaaagttcaagatcatcacaggatccaaacacaaatagcagactgggagtgagttatcacatttctaactactagagagaaacaacacagcatatactagccaaatacaagttacttagcatatctcacattatttcatcactgtgtcattcatcaatcacactgttcattcatcgagcacacctttcaatcataatcacaatacacaggaatcacacactctgatcatacataactacaca

SEQ ID NO: 164912 - DNA, 329 bp, Glycine max
ttaaacctccattaattgctgctgtaccttctcttccattgtttcctcttcatttctttccatgtatccgctcacatgtctcgtggtaaacgttgataacacgattctttatagttttcaccgatctaaacttgctataaaagctatattttattttctatggttcacatttcttgttcctgttcttgaaccatgaattgtgccgagtatacgttactttgactcctgtcttgctatcttctgtgactgaaacctaatccatataattcttacaaaaatcttaatgttgaacacaacctctaaaatctatagtgaccggttcacctatt

SEQ ID NO: 164913 - DNA, 347 bp, Glycine max
  unsure (1)..(347): unsure at all n locations
tgattttccgctctattctactaagaggcatattcttgncattataatattatttcatctcttcttgattcccaacgtggataccgcacgaccgaacggtcggaatttattttaaccaaagtttacggatcatacaattccaacgtccggtggaaaattatcttatttttcaagtaagcgagaaattacttaagtaaaatggctgaagcactgtcgacacgaagtataaaaagcctattgaacgacggataaatatcacgaaacacaatgtggactctcccggttcatacaatgaatcgaaaacctcgttcgagtgacttacccttgagatctaataccatgacgac

SEQ ID NO: 164914 - DNA, 272 bp, Glycine max
ctttagtatatcattacagaaacaataagacgaaaatatagttattgactatgcgtatataaataaacattgatactatgttctcaataatataatatatatagaggatatggcctctcacgacattcaattcctatggtacgtatatgtaaaaggcctttatatgttgataagtggcatgagtttggctatcgcccactacgtactgctcatcaatgttgtccattggagatgtgatttcatgcgtgttatctacatcttgtaatatattc

SEQ ID NO: 164915 - DNA, 300 bp, Glycine max
tccaacaaagcatcaatgcgatctcttgcctgaattaaactacaggtgggaaaatacgtacgcatttccacaatatgagatcaaataaaaacaactccctcatcacccatttaatagtgggctcaccctgcctaacctttacaactacgtcataagtatcgaagaatatacatcttagtatgattgggacattcctatatctctccatatcgagcaccactaaatcatccagatagacgaacctgagcacctgaaccagcacgtccccaactatgccgtttggatagaccatagacacac

SEQ ID NO: 164916 - DNA, 318 bp, Glycine max
  unsure (1)..(318): unsure at all n locations
agcnttagagagggcaaaaaagttatcataagtttgatatttgaccttaagtttcaggaaggcgatcatgtattcttgaaagtcactccttggactatgtttggttgggcattgaagtcaacaaaacttattccttgtttcattggtccttaccaaatccttgagagagtcggcgaagctaaatatttaacaaaacataataaaatatagttaacggaatttcaatatatattctaaataatttgagacttgacttgctcaatacagatgatgagtctaactcatggttgtccgttgaagtggggatgaatctgaact

SEQ ID NO: 164917 - DNA, 359 bp, Glycine max
gtttttctcaattcgactaacaaagaaatatcccagaggaaaaccgccgattgatcctttcgattattttactaaaagatacttctctactatattatcatcacttcgccgctctctggtcttaaaacgcggctacagcatgaccgaacggtcggatttcattctaacataaatcaaaggatgtcacaatacgaacgatcactggaaatttatcgcactctttcattacgcgacataatgacctatataaatgactcaagcacgtcaaaacggggtacggaaacgtaatgaaatcgaaatataagcacacaaaacatatgacgaccactatagggacacacaatgaatcgaaaagtcaa

SEQ ID NO: 164918 - DNA, 377 bp, Glycine max
  unsure (1)..(377): unsure at all n locations
agctnttaccagaaacannnaattaaagctattgtacttgntatannnngnataganataatcttggcttcttgctnttttctttcatacttttaaccagttttactgcagcttgaagcacgattgacgaaccttgaaggcaaagagttgggtcattttgctggttctaccaagggaaagcccaagatagaagcatatgacaaggactgaaacaaaggagttggaggatcgataaccccaatttggaggtatatatatatatatattctaacactagtcaaaattataattaagccaattaattagctagtgaggattgtttatatatatagtcatgcatagaagaaaatntattaattctctatctggtgtattgg

SEQ ID NO: 164919 - DNA, 465 bp, Glycine max
  unsure (1)..(465): unsure at all n locations
catggctnggattgtaaagaatccctgcatagttttttatttcgttttgtacaaccaanatcaatccaccatgtattatggggaacttcagttaagtttgattcacaacatacaagagcattaagctcacctttcttttcaaaccaagacttacgctttaggaaatcattctggaagtgtcgtactttcccacagaaatgacaattattgctctttgatgtcttattctggatttgcacaaggtcgtcattgatctttaatggccctttgcctttatcatgtttcttcacaaatttattttcggctccttgattccctcggtggcttacataatggacttagtgacttccttgattcttaagccttgtttcttcctaaactaacatactatgcaattcatgcacatgtcaattatctttcatggtattatagctcattcggacaagtcatacttacacaataatg

SEQ ID NO: 164920 - DNA, 364 bp, Glycine max
  unsure (1)..(364): unsure at all n locations
atgaaaaagcggagagaagttgaactttgagttgtgtctcacaagactctcattcatcaaagttacaacaagtgttacacatgcttctatttatagactaggtagctttcttgagaagatttcttgagaaaacttccttgagaagcttctttgagaaaacttccttgagaagctagagcttagctacacacacccctctaataactaagctcacctccttgagaagcttccttcagacacttccttgagaagattcctagagaagctagaggttagctacacaccccctataatagctaagctcaccccatgacaaaatacatgaaaatacacnaaaagtccctgggctcagaaatctaccctg

SEQ ID NO: 164921 - DNA, 325 bp, Glycine max
attcatcaagaaacatctcatgtgaattctattaattaaaacacatcactcaataaatcattaaaatttatacactaatcatatttgcgtattcaattaaataatataacaatgaacgaaaaatccctctagaaaaacataacttatagaaatgaaccactcctctcacattaaagttctaccaacacatgtatggggcgtgtacaaatattgtttctatcatgcgcatgagaatggttctatagtacccttatgagatcctatccattgctatccatattgatgatccattcttgtgctcaagaactactcatatgttttatac

SEQ ID NO: 164922 - DNA, 169 bp, Glycine max
  unsure (1)..(169): unsure at all n locations
agctntaaagaatactcacagattcttgatctgtataatanacactnagngaatactggattgctcaatctgagctacgtcctactctagtttacacaatagtaaagggttccactaattacagtttgtgtacaaacatgtattctaacgtgccactcctaacattaca

SEQ ID NO: 164923 - DNA, 310 bp, Glycine max
gacactccattgccgcctgtacatacatgaacaggcacaccctctcaactttgtcaaaaacatattcatatatcaatggggcacttcaccgagcactgggcgcgctcacgttcggacacgaatggccagacaatgggcactatgaggcatgcctcattactgcataatactacatacgcgtgatgccgttgtctacttagtctcaattctagaaaactcgcacctaaacatatagtatctgcctcacaaatataagcatgctctgtcacattgacgcgccacaagatgaagatgacacatccttgggaag

SEQ ID NO: 164924 - DNA, 271 bp, Glycine max
  unsure (1)..(271): unsure at all n locations
agcaccgcggctgcgctattatatattctgttgaggttatatttttttatgggcaantacaaatcatatagttgcagtacattgatttgaattgcttccttgtttcttccaggtttttccatcttagttnttttgctcactctatatgttggaagcttctattttgtgctaagtatttattgttatttccatgtctactgtattgtntttttggtagttggacttttgtantccttattgagctaacgagaataaggtatttcttgattga

SEQ ID NO: 164925 - DNA, 394 bp, Glycine max
catgtcctcaaaatgttcaaaacaataatgctcaaaatcaccaataacagaatgctcatgatgctcaaaaggtactaaatgatgtctaactaatctatgaaatgtcctatctatctcatgatcaaagggttgtaagttaaatggattgcctttagtcatacactatattcagcatgcacaactagttgccttcttatgcaagtaatagtgtatgtttgaactacacataccattaaatgatatccacatgacttgaaatagtgtgagcaaccttatcaaatgatgtgaagatcccacacataatcttaacaacaatcatagtctcactatcgaatctcaaattgatagcttagacaataagaaatatacttagaaataaaactctgatcaatcg

SEQ ID NO: 164926 - DNA, 217 bp, Glycine max
  unsure (1)..(217): unsure at all n locations
cagtggatggacaaacatngtgntgggttctaggtgctagccagtgtcatttcatcttgatgactngtgattgcactggatgtgtccactgaggaggctacagatgaactatggcatctaaggaaaaagntgtgcagcctttagatggggtgtgcanatagtcatatcacgttcaatctggtgcttatacaattatacacctctcccgaatgagttc

SEQ ID NO: 164927 - DNA, 430 bp, Glycine max
actaagcttgattatacactggttacaggcagacaaaaacatttgttctctgttccataattctcgaatctcagtagcctaagttgagtttaactcttgacactaacaactgtaacacccctcaagcttagctagatttaatgataccatctgttgacatatagcatcccaatcaaagcctgtgtgaataaattgaagttggcaatgcttaacacctagaaaaaacgcagagaacactatggagcataaacatgacacattatctaatgggttcctaaatgcataatcaatgtattaagtgtacacaatgttccagacaattcatagtagaagcaattctcattaaatatgatatgaatagcatgacaaaataatggcaaaattctaaaatatagatttggttatacaataatagttaatagatctattt

SEQ ID NO: 164928 - DNA, 433 bp, Glycine max
gagggtgcgtatcccaccattctttcatagtagagtatctcttatgtgtctaccatcacgatcatcgtgtgcctttgcatcattgggggtaccacctgggccgccagatccctccaccttttgggcgtgttctttgaaagatccgtccccctttctgcaaatgttctgtagttgcatcctatccggaaccatatcaaaattgtactgatactgcctaacaaaggcaaccattatgtccttccaagaatggactcgggaagattccaagttaatgtaccacgtaacagctaccccagtaagactttcttggaaggaatgtattagcaattcctcatctgttgcgtattcccccatcttctgacaatacatctttagatggttcttgtgacaagtagtccccttgtactcgtcaaggtccagcaccttgaacttg

SEQ ID NO: 164929 - DNA, 448 bp, Glycine max
  unsure (1)..(448): unsure at all n locations
acctgaggcatgcaagcttgctaacccatggaagntcctaaatcttcctacacctggtgtggggccatncttggatggccttgattttctcagggtccacttggacctcatttctaccaactacaaaccctaagaaaactatattatctacactaaaagtacacttctctatatttgcatagagggtgtttntcctaagaactgaaagaacttgcctgttgtttaaccttccatagtcatcacaaatagaagaacacaaaaattgacaagagagagaaaacagagttgacgagataatatatcctagaacctgtataaacagagagagagatttgactaaactgcactaaaatttaatatggttttttggaaagacttagaacaaaactactacctgaacatctagcaaaaacttcgcttctaaaaagacggtgccctctcgttacac

SEQ ID NO: 164930 - DNA, 256 bp, Glycine max
  unsure (1)..(256): unsure at all n locations
gcgcactttccggtacgggaaatacaaaagtcttttagctcctgtttaacaaacacgaaagtcgaaagggttcgctttatttgtttataaatctcccgagggtgctcangccgcattgatagatcctgtgaagactgtggaacggaggcagttgagttgtaagttggcgattactgatgggaagcatggaaagcgggtatggccggactcggcccatgcccatcacgggaatgttcagcactggcatggagatgga

SEQ ID NO: 164931 - DNA, 215 bp, Glycine max
  unsure (1)..(215): unsure at all n locations
atctaggaatgacaattgtttattcaatatagaaacaacaagcatgtgataatgaggtaaatgtgacatganattgttcataactcatttcattttatccatgttcatacaagattaaatttgaactattaaatgaagttagcaatataaacttatcttattaagtcataaaatatatatatcacaataagaaaaaagataagactgtacttact

SEQ ID NO: 164932 - DNA, 210 bp, Glycine max
actaactgcagaatgtgggataaaacagtctttcttgtataacaaaagtagtctgaggcatataaaggcaattactgcaaaaataacatttattccgcacaagcaatgactaagattatgatccgagatgtctcagaaaaagacattgactgatacacaacaactggttacatgatgaccaatctccacaaaattgaatgctgcaggtat

SEQ ID NO: 164933 - DNA, 365 bp, Glycine max
  unsure (1)..(365): unsure at all n locations
aatgagggcctttaatggtgattntccaccatggagatgcagcagaagacaaaggagaagaggtgagaggaggcgccatccactagggaataagccatggaagaaggagcttcaccaccaagatgagccttggataagaagcttggaaggatgcttcaatggaggaaaagaaagagggagagaaagagagaggggggagcacgaaattgaaggaagaaaaagagagagaagttgaactttgagttgtgtctcacaagactctcattcatcanagttacaacaagtgttacatatgcttctatttatagactaggtagctttcttgagaagctctcttgagaaaacttccttgagaagcttctttg

SEQ ID NO: 164934 - DNA, 502 bp, Glycine max
ctaagcttacatggagctacattagtaagtgtcgggccacattgttttgctacgaactcccacccatggtgatcacgctgagtcttataggagttccaaaaccgagtgacatacccccaagtacaagtatttccccttatgagaaactccaagtacttactcgcaaagtgtatactatttccatgcaacatgaagtatgaaacatgggtaccatcaatgcacaaactgtggataattaaagattctaagtcatcccccttcatagatgcttaaaactctctaaccactctttcctccaccagggatatccatcatggtaactgaacaccccatgtacatacacaacatacatcatcacaatgacatgttcaacatcaacaacatttcatctcaatgtcattatcaacatcaacatgatctcatctcaatgccattctcaacatcaatatcatctcatctcaatgacattatcaacaacaacatcatcatctgatatcaacat

SEQ ID NO: 164935 - DNA, 348 bp, Glycine max
  unsure (1)..(348): unsure at all n locations
agcttttaattctaaagaattattatttcctttatacttaaaatattgttccaattcttctatgtcctggatattntcgtagcaatacaggtacatcaaaacagaagacaacaagcgaattccatccttgtagagacatgcatttgttaagtggtggaatcaatttgacacaacaaaagcagcaccatacaaggtcaaaatctggtttaaaggtcacccggaattctttaaaccagctcatcaagagacttcaatgtttcttaatcagaaatccaagctagctgcttttctagccggatccaagtcaaaagaacatttgaccaagaactaaaagaatttttccactac

SEQ ID NO: 164936 - DNA, 451 bp, Glycine max
  unsure (1)..(451): unsure at all n locations
tactaagctcttgactctgatccactgatggagcttgcttattttcttctatggangctggatctttgagcttcaatgatgtccttcaatgatatcttcaaccatggatatgcagcggaagataaaggagatagggtgagaggaggcaccatccactatggaataaaccatggaaggaggagtctcaccaccaagagagtgccttggataagaagcttagagaggaagcttctatggacaaaaagaattagagagagaatgagggcggtggcatgtaaatgaatgagaataaagacggagagaaatggaactctgaagtgtgtctcacaagactctcattcatcaatgttacaacaagtgttacacatgcttctatntatagcctacgtagcttccttgagaaatcacttgaaaatcttccttgataagcgttcttgagaatcttccttga

SEQ ID NO: 164937 - DNA, 317 bp, Glycine max
  unsure (1)..(317): unsure at all n locations
actactggatttatgntattttctttttttttctacactatgctaactacattaatagatatttgataattcttctctgtattctcattacataatncccttatntatagatgatcctaggcctacagggctgctaccaacaaggtctatctgccccactgagcaaataaaagaacagaaataacagaatgcatatcttcctgttatcacacaattgaataacagaattagtggacaagtggtggaatactctgcagctggtgcccatgcatgtttgtctacacttcatccataacagtggtgctatcattacccac

SEQ ID NO: 164938 - DNA, 458 bp, Glycine max
  unsure (1)..(458): unsure at all n locations
actaagcttataaagtccttaatgatccatatcgagtgtgtgtgtgtgttttttccttgaatganatgatgtgcaaagttgggaatcctatattttgctgctttgatcgaaatacacataaccaaaacactcgtgtgcttgagagaaacaatatacttgtgagaaatgaagcatgatcgacgattgtcatactcgctaacctactttatctccaagtgagttcttgcttgcttctatcatgaaaactatgaaaaatgtgaacttgataattggaaattgaagctgtttgaaacgtatgcaattgtctcacctattgtggttggctacattctgaacatcgtcatcgacttgacttattgaatgttaacttactcttgcttgaggacaagcaaagctttatatctggggagttgataattcttatgttactaaaccatggattactcactcaaaattat

SEQ ID NO: 164939 - DNA, 426 bp, Glycine max
  unsure (1)..(426): unsure at all n locations
agctttctctactcttctaacctcttatgttatttctcacatactcatttgtccctacactcatcatcaaaatggtgtggttgaaagaaaacacaaacatatagttgatttcggccttacattattgcatcatgcttctttacccatacagttttaggattatgcctttactactgttatctatntgattaatagacttcccactgcttccctcaatttttttattccttttgttacccttttcaacaaggatctggatnttcatttccttaaactttnggttgttcctatnttcccttgttgaggccttaccatacacacaaactaaattntcaatctcaggaatgtctactttngnggtattcctcctttcacaaagggtgcgaatgttngtcttcatctggcagaatctatatttccaaatat

SEQ ID NO: 164940 - DNA, 453 bp, Glycine max
  unsure (1)..(453): unsure at all n locations
tcaggctgcgtcaatgctccaagttgctgcatggatgggcttatgtctgtatnggggtcagcagaggagcacaaaccacaaacccttgcgacaggtacagatttctgattcaaggccagctgggttaccaagttgaccaacgcatccagtttgccttcaagcttcttagtttcagatgatgcagatgggtttgtagctacctcatgcactcctctaatgactatggcatcatttctggcactaaactactgggagttggaggccatcttctcaattaaatttctggcttcagcaggagtcatgtctccaagggctccaccactggcagcatctatcatacttctctccatattactgagtccttcataaaaatattggagaagaagctgttctgaaatctgatggtgacggcaactggcacatagtttcttaaatctcttccagtactcatac

SEQ ID NO: 164941 - DNA, 412 bp, Glycine max
  unsure (1)..(412): unsure at all n locations
catgagtcagagaagcatttaatttatgaggcatgcccactgcctggcttntggcttntgatatgcggcgtcatttactaccctttaactcatcattcatttaccatctctcatctttctcacgctactccttgcccaccacaccacgcgccctacactatctttattttatttacaataaatagtgatttttgtttcacaatctttatagaaccgataaatttgtatctggaatataaaaaaattaaatntaatttcataaaatgtgaaanatgagataaatnntatttatcattaacattaatccattaagaactcacctatgtgacacatagaaataanaatatcacgaaatngatgctcacatgaatataaagaataaaattactcacaaatatattcctaaatcaac

SEQ ID NO: 164942 - DNA, 375 bp, Glycine max
  unsure (1)..(375): unsure at all n locations
tatctcaacataagagttcggtagaggatcttgaccactcttagagcacactttggctagagactgatcaacaccaagatcaatcagattatcctatattcaaccaacccaactcaattaccttctttgtacaaaaacacataaacatatatgtattttttcccataaaacattcccaaggagaaaaagaaaatatagagtacaagaaaaaaatggtacttatattaaatttgagcaattatgcaatgacaaataatcaaagactactctggtctcaaatataagaagaanaaacaacattactttcttaaatctaaatataagaaaatctcaattaatttatcttatttaacattactatatctctaaatatca

SEQ ID NO: 164943 - DNA, 334 bp, Glycine max
  unsure (1)..(334): unsure at all n locations
gcttatgtctggtcaagtataaatctgagcttacataattctttctaacattccagntgcaagcaagatatcatcaacataaagaattagaaaaataaccttactcacactgacattcaaatatatacaccgatcaatagtatttttcttaaatccaaagtaaacaatggtatcattaaacttcaaataccattggcgggaagcttgcttaagatcgtatattgatttctttaatttgcacatcatatgttcctttccttcaactgagaaccccattggttggtccatataaacatgctcctctanatctncattaagaaaggaaatttttaca

SEQ ID NO: 164944 - DNA, 503 bp, Glycine max
  unsure (1)..(503): unsure at all n locations
aaactaagctatgttgtaatcttatttcatctatattagatgctttatcttgtctaaagccgacctactatcctatcgttattattatttaaaccctgatcatcaacctcatcttcacctcatatccattatataactttatgtattcaatcacgttcaagcaataaaatatcaaaattgaaatcaatttagcttccataaagccttccattcactgtcacaatacaagagaatgtaaaggtgttagaaataaagcgtgggcttaaaaagctgtgacgtaaaaatccaagaatttcacgtacaggattagatcgaaagtatttgaaaaaacaaagaaacaaaactccataatatgtattagaattcccaaagaattcatgggctggagattcacgaaatctgttgcatatacatcacacaaattatgtacatgaccatatcatacgaanggtattcatcatgcaaatattatatatgcccattaaacaacgtgtaagtcacta

SEQ ID NO: 164945 - DNA, 230 bp, Glycine max
  unsure (1)..(230): unsure at all n locations
tttcagaaataacctgtaaattcacctcgatttcggtgttgtatgctaacttactcccatatctattcaataatacaatggtagccataatcccagcaaagattcctcaacctccattttcctgaggatacaactcgaatgcaacatgtgcttatcataaaggagttatggngcattctattgagcattgtatgaccctgaaatataaggtgcaaagtctaattgatatg

SEQ ID NO: 164946 - DNA, 409 bp, Glycine max
  unsure (1)..(409): unsure at all n locations
gagtacgacagtcaccgctttatgagcgctgtacaccatcagcgcttcgaggccatcaanggatggtcgtttctccgggagcgacgcgtccagctcatggacgacgagtatactgatttccaagaggaaatatggcgccagcggtggacatcactggttactcccatggccaagttcgatccaaaaatagtccttgagtnttatgccaatgcttggccaacagatgagggcgtgcgtgacatgagatcctgngtaatgtgtcagtggatcccgtttgatgccgacgctatcggccaactcctgggatatccgttggtgttggaagaaggccatgaatgtgagtatggccacacgaggaaccggtctgatgggctcgatgaaganggcatcgcncaactgctatgtatac

SEQ ID NO: 164947 - DNA, 381 bp, Glycine max
  unsure (1)..(381): unsure at all n locations
ctgaggctgcagctgtgaaagatggatggcaaagatgtttttatgatttctcgngagaagtttaatgcactttttacgtgcatataaggcatggttggttcaaattttcagcaagataactggttttcttttaaaaaccttcacccagaataaaatataacaattatttctttcaaacaagttaatctaacacgaaagtcttccaaacactaaacctaatagacaaccaacatagttaccctagcaacggacctgagtctatactaggtggtaggttcaaatttcattaccaactatagtaaaaaaaaaatagagcanaaagcaacanattttcaacatctctaagatgaataatgacgctatccaatatttctcaaaatc

SEQ ID NO: 164948 - DNA, 364 bp, Glycine max
gaagctatgaattatctacctactgcaggacgatgagggacagataattaaacctcactgtgcaacgtgtggaaatcatattttgcatgacacaatctgtcatgactatccttttcgatgtacaaattttcttaaactgacagtgccattctttttctaataacgattatctatgtgcaacctggtatcggactcgacataacttaacggcctctatgttcaacaacatatcgatacagacaaattaaccgaaaaattacacacttcagctacgcccgacgattgaatccgaactttcatacataaatattgcgtatccgaagatggagattgcgtcaatcatgtgctcaacattaaactgatt

SEQ ID NO: 164949 - DNA, 427 bp, Glycine max
  unsure (1)..(427): unsure at all n locations
aggggagcacaaattgaagataaagaggagagaatgtacttttgagtgtatctcataagactttcattcatcaaagttacaacaagtggtacacatgttagggacgaattctccataacccaggacaagagaatggcgtctgaatcagaaggaaacaacccgtttntaatattattagtttcgtattccagtttacttgttttgttctttaaatcacaaaacaaacaaacccccccccccaatcgttactgttactgcaagtatattatgaacactttggttatcattgctcgttggaaatgactangatcacttctagtacagcattttcatgttattgattcggacggcctcatcaccccatcaagcagacatgccgcttacacacgcctcacatgaactctagagtacacatttcatcgttcgc

SEQ ID NO: 164950 - DNA, 331 bp, Glycine max
  unsure (1)..(331): unsure at all n locations
agctttttctacaaccaaccttttcttcccctttggttacatcaaaaagccaaagaactagggaatcaacacagaaataacaaaggagtagaaagatataaagatcagagtataaagcataaccatccaaactcacaaacaagaaataatcaatccaaaatccaaataactcanaatgtcaacaaccacacaatgtcaagcagaanaagtctgaaatcttaataccacaagataaataagcaaagtacttaacgtaataatggaaactctaagaaacttaaacagccaaaatacacgtcttattaaagactatagtcagaaactaaaatct

SEQ ID NO: 164951 - DNA, 464 bp, Glycine max
  unsure (1)..(464): unsure at all n locations
gcgtatcccaccatcttttcatagtattgtatctcttatgtgtctaacatcacgatcatcgtctccctttccatcattgggggtaccacccgggccgccagatcccttcaccttttgggcgtgttctttgaaaaatccgtccccctttttgcaaatgttctgtagttgcatcctatccggaaccatatcaaaattgtactgatactgcctaacaaaggcaaccattaggtccttccaagaatggactcgggaagattccaagttagtgtaccaggtaacagctaccccagtaagactttcttggaaggaatgtatcagcaattcctcatattttgcgtattccnccatcttctgacaatacatctttagatggttcttgggacaagtagtccccttgtacttgtcaaagtccagcaccttgaacttgggagggtgatgatattgggtctatgaacaactcttct

SEQ ID NO: 164952 - DNA, 436 bp, Glycine max
  unsure (1)..(436): unsure at all n locations
agcttangagacataggnatgatttgatgnngtttnttttattangacgnnattnaatgggagggtagagattgacctcaaagccctctcattccatggntaatcttatattgttataatgtttgttataaaaattgttagtatattattattattaatttgtatggattggaagtgttgattttaatgaacatcatgatgaacttgtgtgaattcacattaacttatggtaatgtctatgaactagatcagcataaaagaaattgaanaagatatagccctttgatcttcatgtgaggtgtgacttttgctactaatgttagtatgtacttattntaataattattataaccatagtatttatttgaaaaaaaataaatgttctttatatacctaattcatggaataaaatacacttttgaattctatatattta

SEQ ID NO: 164953 - DNA, 426 bp, Glycine max
tctcggctcatactgtgaacgcctctagatcaaatttcgttctgtctatagcacccacccagagggaagctgcccaagttgcaactccgaacactactcgaccggccggtgattccaacacgacaaggaacttccctccgaggccattttcggaattcaccccactcccaatgacgtacgaagatcttgtaccatccctcatcgccaatcatttggccgtggtaactcccggaatggtgctcgaaccccctctcccgaagtggtatgaccctaacgcaacttgcaagtaccatggaggtgtgccggagcattccgtcaaataatgctgggcccttaaatacaaaggtcaacatgtaatggatgccggatggctgactttccaagaagatcgacccaatgtgagaaccaacacgctcaccaatcatg

SEQ ID NO: 164954 - DNA, 351 bp, Glycine max
  unsure (1)..(351): unsure at all n locations
tgataatgatgcgcttcttgcttgtgtcaacttgtcaaatggtgctctcttangaacaagaaagataggcggacaggcgtgagtgtccctcacctganaaatgcttcacaagcaaatgctcttacagtcattggagtccatcctgttgaaagcataatactcctcctttgtgatctcctaatgctgtgacatccaaatggacttatgcttgttcaccaacgagcattcatgtgacacttccttgctgacgaaaaaaaaatgtgacacttcctcaatcctctctataatactttatttcttctcgntgtcattagaaacatcctccaccttagtacactaatataatagata

SEQ ID NO: 164955 - DNA, 459 bp, Glycine max
  unsure (1)..(459): unsure at all n locations
tgaagacaagactatacgaagtatcttccttgggtatatgtgatctctatagnctaccgcgtcaacaacttggatactgaaaaactcgtcatcagtcgagatgttgaagttgatgagtatgcttcttggaatcgggatgaagaaaaagcggagaagaacattcttatacccgctcaacaacctcaagaagaagctgaggaagaagacctaggtgaaccaccttcacctccaccacaacaacaagatcaagaactatcatcaccagagtctactccaagacgagtaagatctttggtggacatatatgataccttgtacttggccatacttgaacctggaagctgtgaagaagcgttatagcaggaagtatgggtcaaggcaatggaagaagagatacagatgatcgagaaaaacaacacatgggagttagtaaatcgtccccatggaacagatatcatt

SEQ ID NO: 164956 - DNA, 409 bp, Glycine max
  unsure (1)..(409): unsure at all n locations
agctngcatgaaccatagcattactgttgctttatctgnagaactggaatcaaaagatcaagaanacacgtcatgcgtttcaatgtagttggcaaacgctactcctgtgctggccgagaacccaatactaacccgagcattctncaagttcactgtctcggagaggatatagcttgctctttgtgaagcaaccaacaggcttgtggatctggggaaataaattgtatgtccaccattcaagtcatcatgtaatcaattctaagtttaataataaaatattattttggtatcattatcatatttcactcttagaataaatagtccatttgataatggtcttaattaaaattaaagacttgtattattatagagatatgatatgagaaacaagtttttaatttatttaaat

SEQ ID NO: 164957 - DNA, 427 bp, Glycine max
  unsure (1)..(427): unsure at all n locations
tgtctcancgcttatgcgatacagagaccaacatgctttctatcatcgccaagtaccaagaagagttatgtctatccgcggcccacgagcataagattgcggacgaatatgcccaagtatacgcggaaaaagacgctagaggaagggtgatcgactctttacaccaagaagcaaccatgtggatggatcggttngctcttaccttgaacgggagtcaagaactttcccgattgttatccaatgccaatgcgatggcagacacctactccgcccacgaagagattcatgggcttctcggctattgtcagcatatgatagacttaatggcccacataattagaaatcgttaggaaacttgtatggtctctaagaccttgactagatacgactttctcttgaaataaaaagagttggtcccactgttcta

SEQ ID NO: 164958 - DNA, 444 bp, Glycine max
  unsure (1)..(444): unsure at all n locations
tcaagtcgagttcgagtcgaanaatagcttcatgttgagctttgattcgaaaaaaggttcatgttgagcttaagttgaatntcaagataagctaaatattaacaagcctaattgagctaaaccgaagttgactcagcttgactcatttctagcctagtcgcatcttatgttttttcaatgcacagtttgaattatagttaagttgattccattntgggactagtcaactaaatatctagtgtgataccaagtcaaactacattttctaagcatgtagctagaggcttgcacgcaattactgaaattggtaatgtgaagcatccaattcatgaaggtatatctttgatttattagacaatgaattaatatatgatcttcatatttcataaaaggggaatccatnatattttcagaatccagaaattgtcattttaatntacattc

SEQ ID NO: 164959 - DNA, 410 bp, Glycine max
  unsure (1)..(410): unsure at all n locations
agcttncttgagaaacttccttgagaagaatcttagagaatctagaccttaactacacaaacccctctaatagttaagttcaccttcttgagatgaaaagcttgagccttagctacacacaccccttataatagctaaactcaccccatgccaaaatacatgaaaatacaaaaaagtctctactacaaagactagtcgaaatgccctgaaatacaaggctaaaaccctatactactagaattgccaaaatacaaggcccaaaagaaggaaaaacctattctaatatttagaaataagagtggacccagccttggcccatggattcaaaaaactacactgaggttcatgagaaccctanggccttctttagcaactctagcccaatcctcttgaagtcttctattcaatac

SEQ ID NO: 164960 - DNA, 388 bp, Glycine max
aacttgctctcaatcaacagagaaccgagatgagcttatcttttttgcaaactatcataagaatacggtttacatcttatgagacaccataggaacacatgagcattgtatatagaatatatccttttagcatcaagcacctattaggaagaccaacgcgtcctctacctgatgttacacatcattgatcttgcgcgacattcccttgcgcatcgataggttacatacctatccatattcatgcttagatgtctacaccagacacccattcactgaaatagcttaccaagtgacacaagttccccgagagtgcgatactccattgttaccgtgttatactacttgcgtgatccggtgcacatgccggaacaaacagcgaccgcatatg

SEQ ID NO: 164961 - DNA, 237 bp, Glycine max
agcgtgactcaaaagtcagtatgacagatcctctgagcgcggaagaatatgtaaatctccgcgtgtcaacgggcttgtcggccgcgaatgacgaagggcgcatgagacgacgttaatctctgcgtgctatcaagcttttcgttttacagatagcaaaaaggtttatacggataaccactcgggtatttccgcccgtcagcgtgactcataagtcagtatgacagatcttgtgagcgc

SEQ ID NO: 164962 - DNA, 364 bp, Glycine max
  unsure (1)..(364): unsure at all n locations
ctgcagctgtaatacctgggctgacatttttgctgttcttttccaacctccgncacccttgttgcccaaattcctttgatctctaagtacatcaaccaatacacgttccatttccaaattccatgtaaaataacttcttgtttcctcattattttttcctaaaacttttcttttgtcagtcattttttcattagatgactccattgaagttaatgtcacttattcaacctacacataacanatagtagatatgacctactttattcatttgactagttcactgcacaatcatagaaaatatttcaagcanaagttttatgcaatagcanagtacataaaagtctatctttcatagaaaaggacc

SEQ ID NO: 164963 - DNA, 483 bp, Glycine max
  unsure (1)..(483): unsure at all n locations
tcctatgaagacaaacatgtggaaagtttgtctatatgataatgcttattctaacacaaaaatgatatgctaatctttccgatttagaacgaactcatgggcacatttaatgtaacacatttatgaacatgcgtatgtgtaaaatatcctactatttatgtcaacatacaaggacatccaatacattctagttaccacatatatatacatctttgaaaagaacacacattcttgtgctcaaggcattgtgtcaaaatttacacctaatcacatcctatatatttgtgctatgacaaactacctacacatatttgaagtatttatatgcacatcggaaagataattacgtcatgcacatacttgcatttgaataggaatatccatgccatcatatattcatctangaagcatnctcacgcnctctttgacatgggtacattttctaanatgatcctaatgctacctatcctcaaatacgcacat

SEQ ID NO: 164964 - DNA, 383 bp, Glycine max
  unsure (1)..(383): unsure at all n locations
agctnnttgtataagctaacaaacaactacttcttctgaaatttaaagggggaaatttaaagaactgaaacataaaagctgaaatttaaatgacataatcataaaataactaanaataaactaaagtgttcagaatgcaaaaatttaaacgtcctgctcctcctatggctggtcttcattaggatccagtgctaatggctgagtctcctcaggagcaagagcaaaggatggagatgattgtggggtctgatctggagtagtctcctcctctgctggtgctagtgctggtgctggtggctcctcagtcacaggctcctgngctgcaaaggccccaccccgtcctgaagaagagggctggtctcctggcaaggcacctgagtctc

SEQ ID NO: 164965 - DNA, 456 bp, Glycine max
  unsure (1)..(456): unsure at all n locations
tactaagcttatagaacaaattgcttcatcattcaaaatatgcttttgttttganacatcaacaagaatcaagccaatgctattgtgcaagcaatcaatggtgcaaaacacaccaaatgattatgatgatggatggctcaaattctcacaaaggtaaactcatcactttcaaattgagctctcaaaactatcatgacatgtagaggagaatcaaggatttcaagtcacaaaatgtcaagaacttttattttcaaaacaattacccatttcttgaacatatcctataattcaaagaaaaacatgcaaagtcgtacatgcacacagaattgacccaaaatattaaactagatatccggcgaaactaacaacattaacaaattaacacaactaacatattaacaaaaccaacataactagcataaccaaagaacactcccgcccatacttaaacaacac

SEQ ID NO: 164966 - DNA, 340 bp, Glycine max
  unsure (1)..(340): unsure at all n locations
agctntgtaatgcttgcataatttcaaaggttttagtacttaaattggcatacaaaagttcaatgcttaaaaatcatgttgtcccacacaagatccttaagcgtgttcggtacatctttccagttgttatgtactattggaatcttttctcttgctacgacccctagatagctgtggaacttctctttatgtggccccgatgcccgcccagttgtagcataaaatgtcacaactggtttgggctgatccaaggtccgtaaggtcaaccgtttgagtcatgtggattgtctactcttcttagacataccttcagactgaacattggactacggtggtgatg

SEQ ID NO: 164967 - DNA, 476 bp, Glycine max
aaaaacgttcagtaactgctgtttatctattaccaaatatgtgtaatcgattacacagtgcaaattttgaattcaaattttaatagctgctgtaaatcaatgttggccactggtaatcgattacatcctccggtaattgattaccagagagtaaatctctcgaaaaagacttttttaacttaaatttcttggccaaaccttttgctacttcaattggaattcccttcctatttaatgtaatcttcctaagactctagagactgtcttgatcatccatcttgaatatctttgatttctttgtctcgaataaaactttgagaagcatgtaatcctttggcatcatcaaaacatcagcttgatcctttgtctacaaccttatggcacgagagcacaaagaggagtttgaacctgaagcggtgctggctgtgatgagggtacagatacacggtgaagacgtgaaacaactacttatccat

SEQ ID NO: 164968 - DNA, 440 bp, Glycine max
aattgaagaagcattgccaagtgtctccattgataaacctttattcatacctgtcaaagtcagcgattaagcttaaccataaattatggaacttaaaaaaactaaatccataattgaaggcgtatgtgacaatcatagcgaattactaaacaagattggtagtttgcttaaggtcattccagacactctccaagcctcggaaaatacttccaaaacggtaacaagaagtaccttcaaattatataatgttatcaatgaagatagtgaccaacactcagataacacaactaagataggatcagtgtcacagaagaatactaatccaataaactccaaacacttggaaaccccctccaaatatattatcaacgtcaactcccctgacctttattaaagaagagtgaaacaattcaaaagtttatgcaatacatctatgatga

SEQ ID NO: 164969 - DNA, 403 bp, Glycine max
  unsure (1)..(403): unsure at all n locations
ggccacccagctcgccttctggaagaatcttctggatggcctctttgggcatggntgctatntgcacccccattnttactaagtacacccgccctgcctttttttggtgattcttttttcgtaaagttacggaaacttacgaatttcgtaacgatacttgttttctttccgtaatgttacggaaccttgtggattacataatcatcccctctttgacttacggaatgttacggaacctcactaattgtgcaacgatgcttccatttgatttccggtgtgtcacggaaccttacggattgtgcatcaatattttcttttgctttccggcatgtcccggaatttacaaattgcctaatgatgggtgacaagcacctcacaatgaccaaacaaaagttgcatgtca

SEQ ID NO: 164970 - DNA, 330 bp, Glycine max
tgtcagagtgtcaccctatgttactcataggtggtcttcattctatcatttcgaaaattctggccaatagaatgaatgcagtattacctactattatatctccgcaacatatatcctttttacccggaaggaaaatccatgatggcgcggctgttatccacgagttgcgggatcgtgaacaacgacatcgtgagacgatgccttatctctatggctgattcccagataacatatgactcggtcaactggatgttacgtggatacatgtgacttcatttgggggatggacgaaaacggagaagatggatgaaagctcgtgcttgaacatca

SEQ ID NO: 164971 - DNA, 316 bp, Glycine max
  unsure (1)..(316): unsure at all n locations
agcttanggataaactcttntttttctctctattgttcttcattcttcttcctcttttcacttctgttcttccattttcttgcaaaaaaatttatggcttttccattggggataaccatgaaaggctaaattgatgaaagcttgcttgtggagcttctatggaggctggatctttgagcttcaatgaggtccttcaatggtgattttacaccatggagatgtagcggaagacaaaggagaagaggtgagaggaggcgccatccactatggaataagccatggaagaaggagcttcaccaccaagatgagccttgga

SEQ ID NO: 164972 - DNA, 480 bp, Glycine max
  unsure (1)..(480): unsure at all n locations
ctgcacaaggctcttaatatttttatagtattcttgtggaaccttcacctgacaaagacactgaaaaaaacttatcttctccttcttggacaaagtatggcaggctgggggcaaataaattttcttcccatcagaccttggatgcaactgtgatcgtatacccatatcagctagatcttgacgtattcaagacatactttgtcatgccttgaatgttaaagagcatnccaatcacactgtcacaaacatttttctccacatgcataacatcaatacaatgtctaacgtcaagatcacaccagctcggaagatcaaagaanatggacctcttcttgcatatgcaactctgactgttatgcttctttggggtgttgcaaatatagtattcaagtgttcaacacactgatatacctgctcaccactcaacggtatcagcggaatatcatgctcttgacttcattaaaagctttctcagtctct

SEQ ID NO: 164973 - DNA, 341 bp, Glycine max
  unsure (1)..(341): unsure at all n locations
tatgtatctgaaggtcagtgggagtatgattattttctaattctgtatattgatgatatcttgcttgcaactaacaatcttggtcttcttcatgagactgagaaattactctctagacactttgaagtgaaagatatgagtgaggtaagctatgtgatagggatagaaatattccataatagatcacanaaatngttaggcttatctcagaaagtatatatcgataaagtactagaaagattcaagatggagagggtgttaacatcacctattctaattagaaatgagacaagttagtcttgacaatgtcctaaaatgatatggaccaaaacaatgaaagt

SEQ ID NO: 164974 - DNA, 480 bp, Glycine max
  unsure (1)..(480): unsure at all n locations
ctcaacttcttgtgtctggccatcgtgtagaaacattcttatgtttttgttataagntcattcaagcagctgtgatgatgacaaanagctcaagacaatgatttcaagattgagtcaacaagttcaagatcaagattaaatcaagattaatttcgagattctagaaatgacctccagaagaatcaagattcaagagaagatgatttcacaagggaagtattgaaaagaatgtttcaaaaacaaaacattgcacagatttgtttacaagataagctgcttctcataattttataagttaccagagtttcttactctctggtaatcgattaccaatcttctgttatcgattaccagtggcaaaggttgattcaaaagctttaactggattgcaacgtgccattgattttaatggtgtatcgataccagttgtttgacgctgaatccaatataatgtgaagagcatatctctcctaaatgctt

SEQ ID NO: 164975 - DNA, 334 bp, Glycine max
  unsure (1)..(334): unsure at all n locations
agcttctatggaggttggatcttttatcttattaangtcattcaatggcgattgtcagccatagagttgcagcggaagataaaggagaagaggtgagaggaggcgccatccactaaggaataagccatggaaggagaagcttcaccaccaagagagagccttggataagaagcttatagaggaaacttcaatggaggaagagaatgagagagagaggagggtgcatgggaattgaatgagattacgaagagaagttgaactttgaagtgtgtctcacaagtttctcattcatcacagttaccacaagtgttacacatgcttctatttatagcct

SEQ ID NO: 164976 - DNA, 409 bp, Glycine max
ctaagcttagatcaaggaatccaagctaggatcttttccttttttgaggaacttcaagtttgagaatgaaatgagaaggggtaatttggagtaaattctatctaaacaagatatatcattaattatacttgctaaagtgatttaatgcgaaactctaccgattaagattgaccctctacaccaattacctaaaatgactttgtttcaatttgtcactatttttctatttgtctgccaagctttctacaagtcaattgaatttaaacttgataactacttttactccattccactaacccaaatttactttcaaaccctaaatctacactttgactacatactaccatttacattataccttgtaactctcgcatatcttaccagggtctacaacatttcagatacaata

SEQ ID NO: 164977 - DNA, 309 bp, Glycine max
taaaagctgcgtaagacaattggttattaatatttaaaacctaatgaaattaactaaaaaagaactataaaatttatatagtaatgtgaaatccaaaatattgataacaaatcattgaattcaagtcgtaagcacgagttatcaaacgaaaataaaagagctaatcttaaaatgatggattgagatggtacactataagcggacaaaatatattagtcaatcacaatctgagccaattttgtattatagtatgttaaattttgaaagatatatctcagagttatttatctctaagcatattttatctat

SEQ ID NO: 164978 - DNA, 293 bp, Glycine max
  unsure (1)..(293): unsure at all n locations
aataaattgatttttaaaacttgacctcacctctgtggacttgctaaatgagcgaaggcaaacagtcaacttttcatcgcggtatcttgaaatgaattttacattatatgtaaaaagtcacataccactgcgcacgtgtgtgtaaaatactaaaattangttcatggtctggtttatgcacacacccctctgcccccaaaaaagaaaaaatgataaactaccacaatgatgtttcacaaatgaaagaaatcttaaatggtttttacttagatacaatggaactgcagagaaga

SEQ ID NO: 164979 - DNA, 226 bp, Glycine max
  unsure (1)..(226): unsure at all n locations
ttataagacaccaaatccctattgataggtgtatgacgaatgtaatgagtagtgcaacccttcctttgtaaatcacctatgcatccaacatcttcatgattcacatacatagggactcattangtagggtttttcttatntttagtttcaatagaaacttangggctcatatgggacaccttangtttgtcatactntntggtangaataatcaacatgaaaatat

SEQ ID NO: 164980 - DNA, 356 bp, Glycine max
  unsure (1)..(356): unsure at all n locations
cataaatctgtacctgtcgcaagaagttgtggtttatgctcctctgctgaccaccatacagacctttgcccttccatgcagcaacctggagcaattgaacaagctggagcaattgagcaacctgaagcttatgctgcaaacatttacaatagaccttctcaacctcagcaacaaaatcaaccacaacagaacaattatgacctctncagcaacagatacaaccctggatggaggaatcaccctaacctcagatggtctagccctcaacaacaacaacaaaaacaacctgctcctttcttacaaatgctgtggcccaacagaccatatattcctncccaatccaacacagcaacaac

SEQ ID NO: 164981 - DNA, 426 bp, Glycine max
  unsure (1)..(426): unsure at all n locations
tcgtcttcttcttttgccagncttcttctgacttcaattcatcagtgttctttccttctgngtccacgcatctgggatgttcccaacctttgatgacagctttccaagntctgctatccagtgatttgaggaaggccaccatcctttgctttcaatattcatagttggttccatccagaattggtggtctgttcactggtcctccttctttctccatgttcatcnagaattatctccctagatctcactcagtgacttcgagtgcctgctctgataccaattgaaattctgatactgnngacagatgtcgtacangatgtcacgacatcacgcttcagaacatgcagattatatttgacagtgtgtacagttatacaaagtaatacacaagagaattgtaacccagttcggtcaacctcacctaca

SEQ ID NO: 164982 - DNA, 287 bp, Glycine max
  unsure (1)..(287): unsure at all n locations
caaaaatcaaaagatgttactcttccaatggctntcagtttttcctcaaagtcataactcttccaatggttttcttgaccagacatgaagagtctataaaaacaagaccttgatttgcatttagaaattctattaaaaactttttcagatattcttttacaacctttgcatctctttgaacttctttttctacttcttcttcctttgccaacagctttcaaaaagttttatgggtttccaaaccttgaaaacaaaagggtgctatatcttttctttctcttctccct

SEQ ID NO: 164983 - DNA, 230 bp, Glycine max
  unsure (1)..(230): unsure at all n locations
aagccattggctggaaagacactggcattatgatttaataagcagaagggtatcaagcaaaagccacaagagtatgtgtgctctcatagtcaattttgaaatgttaaagagaatatttgtcatttgaaacatntttttctccttttatagtctaactggtaaagagatattttgaaaactgatgacagtatttttggctaattntgtattaattaaatatttctttatca

SEQ ID NO: 164984 - DNA, 278 bp, Glycine max
  unsure (1)..(278): unsure at all n locations
aacagaatacaagaaaactagactcaatggctcaaactatgatcttggtatgttatcacagtactggcgcctataatacttttgatcccttgagcaagacaattgtgataagtaatgatgtgatcgtggatgagacaaaggaatggaactggaacatttgtatggaaagacanaccaatgaaacactataagttgaactgggaggagaagaaatacaggatgaaagtcagattgacaatgagcaatgtgaatgatgagcacaatgtgaatgatggact

SEQ ID NO: 164985 - DNA, 209 bp, Glycine max
  unsure (1)..(209): unsure at all n locations
gaaagaaagatagagcctttgagagaaatgagatattttctaattgtatactgggtaccctcaaccattctcacttaagcgccacanaaaacttgcttatgcacatgtgaaactgcatataagccacgactcgcttaagttagaaatcttcctcgcttaagcaacaatgtggctagcatgaatctctcatttgccactcaattctcact

SEQ ID NO: 164986 - DNA, 292 bp, Glycine max
  unsure (1)..(292): unsure at all n locations
agcttcttagttcagatgattgcagatgggttgtagctatctcatgcactcctctaatgactatggcatcatttctggcgctaaactgctgggagttgaggccatcttctcaattataattctgacttcagcaggagtcatgtctccaatggctccaccactggcagcatctatcatacttctctccatattactgagtccttcataanaatattggagaagaagctgttctgaaatctgatggtgggggcaactggcaccatagttcttaaatctctcccaggacttatac

SEQ ID NO: 164987 - DNA, 182 bp, Glycine max
  unsure (1)..(182): unsure at all n locations
tctattattttatntaagcaatgccacatgtcttcatttgagtggagcaaaaagggcccactttccctttntgactgtgacccatactcagccacaaaagtgagaaaaatctgaccttaaaaacgcttaaattctgcctcggtttgcgtgccatatctctggttcccagttctcgcgtttct

SEQ ID NO: 164988 - DNA, 327 bp, Glycine max
gctttcaatgatggacattgttcatgtctaatatggtaggacgagaaattctagtagggggaaatttggattatcactacataatttgcattggagagggttaagaattatcatatactataaataccaattatcatttttaatgggagagttttatgatgcattgaagatgaaaaaggaaaagtttggtcacaaataacgatattaaagagagatgggagattattttcagaaagcttttaatgatggacaaggctcacgctatggagggactagaaatccaagaggtgggagatttggattattactacataatttgcattggag

SEQ ID NO: 164989 - DNA, 432 bp, Glycine max
  unsure (1)..(432): unsure at all n locations
taagctccatgtgagatgaaaatagtatttgggatctgcctatttatgataaaagtagttgaaagtgngcttctttctgaagttatttgcatcttcatatcttaccattttctttttgggacttctcttaattgaaaaaaaaaaaaggatgcgaatctttaataagtgaacatttacttcaataagtgttatttgaaatcttggtctctactgtgatgtgataccttttaggagccactgcatcactctgcntatgatcatgtttaactaattgaatattttctgacaattctttctgatttcttctgatgctgaagactttgatcaatatgcagcaggttggtgcactgtgaccaagtttgacctcaatgtactcatgtattgcacactgatgccatgacatctccagacatgaaagtctatgcaatctaa

SEQ ID NO: 164990 - DNA, 314 bp, Glycine max
cattgacttctatagacatacgtttcaattccgagcgtcttcatatattaaacggctcaatcggacatcccacctataaagatatgatatgtgaattttcatagaccttccactttcgataaccagcgtctagatattctacaggacacaatcggacctccgagcgaaaagcataggcgtagaatatgctacagcttatgcattcattaccagcggctcatttattacaggactgaatccacatccgagtataaggtattggcgaagagatgtcgtaatcctcctcatcaacatcgagcgtcccgaatataaca

SEQ ID NO: 164991 - DNA, 356 bp, Glycine max
  unsure (1)..(356): unsure at all n locations
aattcttcagagggcgtgccttcagggtcagcatcttgggatgtacccagcgcttgatgacagctntccaggttctgctatccagtgatttgaggaaggccaccattctagctttccaatattcataggtgcttccatcgagaattggtgggctgttcactggtccgccttctttctacatgttcatcagaatttatctccgtagatctcactctgtgatatcgagtgttggctctgataccaattgaaattctgatactcagggacagatgtcgtcaagatgtccgacatccgctcagacatcagatatattgtcgttggacagataacagtcatactcagaaatgttaccagtc

SEQ ID NO: 164992 - DNA, 338 bp, Glycine max
  unsure (1)..(338): unsure at all n locations
atatttaaataatcagctcaactgaagaaagagtttgcgccaaatatagttttccttttactataaatacctncaataggtgtatattgtctacactatcatgcaaactttcaagattactactacttcttgacatcttgaaaccttcttttccagacctatatctatgtatgactggnggaacatgggtgcacattgtatcaaatatgtatctcaacttgtataaagtaatgcttactnnntaattaatgtacagggaaattaagtagaaagaccaattntcccccttactatntatatatatatatatatatatatatatatatatatataattct

SEQ ID NO: 164993 - DNA, 246 bp, Glycine max
  unsure (1)..(246): unsure at all n locations
agaagaggtgagaggaggcgccatccactacggaataagccatggaagaaggagcttcaccaccaagatgagcctcggataagaagcttggaaggatgcttcaatggatgaaaagaaagagggagagaaagagagaggggggagcacgaaattgaaggaataaaagagggagagaagtgaancttgaagtatgtctcacaagactctcattcatcatagttacaacacngtgtacacatgcttcta

SEQ ID NO: 164994 - DNA, 286 bp, Glycine max
  unsure (1)..(286): unsure at all n locations
ttgcatgagggtttcgaatctggcggcaacttatagaggcaaaggaagaaagctaccaangatggagacatgggccgtaggaaaggtggcaaaggcgaatgattattattttattatcattattattattattattattattattattattattattaatattattattattattattattattattattattattatttgtacaactcttagatgttttgacatttgtttttaattgacaatgtgtttcacttacttantttttgtgttcgctgactgttttaac

SEQ ID NO: 164995 - DNA, 338 bp, Glycine max
  unsure (1)..(338): unsure at all n locations
gagtacacttatctaaactcnttttaatactttgaagctatgcttanataactngttaggaatcaataatggaaatgagagaaaaaataaaatattntattgacaataagaaaagaacagaanataggccagaaagctctcttctctgagagagttaatgttcagtctataacttatgagatcttgctctctcctatccttcttcctctatntatgactaataaaccccattaactaactaactcatgagttaactatattaactaacttctccttatatcctaacatatataaccacatgatatcctttaataananataaagaatactggatttta

SEQ ID NO: 164996 - DNA, 316 bp, Glycine max
  unsure (1)..(316): unsure at all n locations
tgcttgagccattaaacgacaaaacttttactcttatgtctgattgagtcctgttatatatcgagacgctctgaaatgaatgttgaagctctgaaccaattcaaacgacaataactntttactcggatgtctgattgaggcccgtaatatatcgagacgctcgaaatngaatgttgaatctctgagccaatccaaacgacaataactttttactcggatgtctgattgagtgccgtaatataacgagacgctcgaaattgaatgttgaagctctgagccaattcaaacgacaataacattttactcggatgtctga

SEQ ID NO: 164997 - DNA, 278 bp, Glycine max
  unsure (1)..(278): unsure at all n locations
atacaatagccgacatctgccgttgttaagccgcgactgatatttntctgccgacattgtgcaattacttatacgaacgctggccgatactatgttttaacggtagaggattctattntgttctgtgttgccgtaaaaatttcaatgtttgtcggctacgttttttcgttccagctgaaccgaaattgtgattcgaccgacaccggcatgttttcattgcttgcaaggaaacattnctcactctgcaataacatgattaccgatctgatcaaaaaatg

SEQ ID NO: 164998 - DNA, 174 bp, Glycine max
ttaaaaagctatttctcttttactcagttatgaattccttaatgacatcttcttaatattaatcaaatgaacaattgaattgaatataagccatatacataaggagattagggaagaaaaatgcaactcagtttatactggttggcacaccctgtgctacgtcagtcccaagca

SEQ ID NO: 164999 - DNA, 307 bp, Glycine max
gcgctgcgctagatcgttttatcgatcatttttcagtgggaatcagatcagaatatagatcagatcagactcagatcagaataagaaagctcatcagataatactaaaaagttttcaaacattagtagacaagaattttacaaaatctttaccgagagtttactctctgctaatcgattaccagaagggagtaatcgattaccagtagccaacattggtttcaaaactgatttacaaagctgtaatcgattaccataatcatgtaatccattaccaatggtttaaaatggtatattcaaattcaaga

SEQ ID NO: 165000 - DNA, 170 bp, Glycine max
ttctgaaagaatcagagatccaaatctgagagtttgtttcagattcaaagaagatgattccgatcagaaagaaccagagactcataaggagattgaaagatttcacaacaacatcacagtttgtttccaaagagtttctcaaatctctaattaccagagttttactctct

SEQ ID NO: 165001 - DNA, 240 bp, Glycine max
tacacacacccctcctataactaagctcacctccttgagaagctttcttaagaagattcctaaagaagctagagcttagctgcacatacctctctaatagctaagctcaccctcctgagataagaagctaaagcttagctacaccccccctataatagctgagctcacccccatgacaaaaaacatgaaaataccatagaaaggtcttactatagagactactcataatgccccaaaata

SEQ ID NO: 165002 - DNA, 229 bp, Glycine max
tagttgctcattttttgcaaattcgtgaagacaattgcatctgaatccatgcttgatttcttgagttaaagatttgaatgagaaggccttaggcctatgttgtattctgaagcaatggggcatgccacattgtccccattctcttgcaatttgtgtccaaacatgcgcccaccaagtgctcggtgaaatgccccaatgatatatgaatatgatttttgcaaattgggat

SEQ ID NO: 165003 - DNA, 142 bp, Glycine max
attgctctaaaagagctttgaaatctgaagtttatatttcaaatgatcaaagttgaagaaaatgcacacacatgacctctattatagcctaagtgtcacacaaaaatggagaaaaattgaatttctattcaaatttcacttg

SEQ ID NO: 165004 - DNA, 334 bp, Glycine max
  unsure (1)..(334): unsure at all n locations
gactctacctggagatttaactgtgttttctggctnatncttatgtaagattctcattgctctgaaaaaaggggaaatcagtgccatattggtccatgatatttccaaaactaaaaagataaaactttaaatgaagtcacgagacttttgaaaacaacttactaaataaataaattaataaacaagcaaaagttattatctgagatcaaattgaaaaaagtgatagtccaatcactattcattctggactcttagtacagagtatctccacttgactntaggggagtaggcgattactagctcacattgtgcaataaattcatcgtcaacacac

SEQ ID NO: 165005 - DNA, 193 bp, Glycine max
ttgtgaactgtgctattgaagccttaaatttctatgtactctatgcaacgatatctcctagtgggacaattcatgagtacactttaggctatactttattgctctagggtttctagcatgctgaaactcttaaagctgatgcttgattctcacctagtactaagactttcacgacatcaagagacaggttata

SEQ ID NO: 165006 - DNA, 163 bp, Glycine max
  unsure (1)..(163): unsure at all n locations
agcttcaagaaaaatggcctcagcaaattccttatnnctagaanngaaatctatcaatagaacctccaatctttaatggagagggtcaccactactggaaaacccgaatgcaaatttttattgaggcaatagacttaagtatttgggaagccatagaaatagg

SEQ ID NO: 165007 - DNA, 322 bp, Glycine max
  unsure (1)..(322): unsure at all n locations
gcacccncatttttactaaatacacccncttgcccttctttggtgaattctttttcgtaaagntacggaaacttacggatttcccaacgatactggttgtctttccgttatgttacgaaaccttgcggattacataatcatcccctcttttgacttacggaatgttacggaacctcactaattgtcaacgatgcttcctttttgattccggtgtgcacggaaccttacngattgtgcatcaatactttctttcggtgtcggcacatcacggaacttacaaattgctaatgatgggtgccaacaccatatacaagttgcttgc

SEQ ID NO: 165008 - DNA, 259 bp, Glycine max
  unsure (1)..(259): unsure at all n locations
tatcgagacgctcgaaattgaatggtgaagctcttgaccaattcaaacgacaataactctttactcggatggttgattgagtcccgtaatataaccagacgctcgaaattgaatggtgaagctcttagctaattaaaacgacataactttttactcggatgtctgatngagtcccgtaatatatcgagaccctcgaaaatgaatgttgaagctctgagccaatcaaacgacaataaacgtttactcggatgtctgattg

SEQ ID NO: 165009 - DNA, 314 bp, Glycine max
gctacctcattcagcctctgtttacgaccaacatttctaaaacattgtttgaatgccaagttacatcattcagcgccattttacggatcatcaacatcagaaacgttgcgttgatggctcaagtaacattcattcagcgtctcattttccgactaatcaactcgataaagcttgcgttgaatgctaagatcacattaattcagcgctgttatacggactatcgactccataaagtttgcgttgatgctaagtcacatcattcacgctcatttacgaccacaacccataaatttggtgattgccactcactcatt

SEQ ID NO: 165010 - DNA, 401 bp, Glycine max
  unsure (1)..(401): unsure at all n locations
ctatgtttgggaacctctccttccttatgtgtacccaaacccaatcacctggttcaagcacgactttctttctgctttttgtggcttgccttgcataactcgcaatttttgtttcaatttgagccttcactcgctcatgcaacttcttcacatactcagctttagcctgtgcatccttatgcttaaacatagcaatgttaggcataggcaacaaatcaagaggagtcaaaggattaaatccatacactatctcaaatggtgaacaattagttgtgctatggacagcccgattataagcaaactcaacatgaggcaaacaggcttcccaagatataagattttcntaaaacagcctaagcagtgtgctaaagcctattgactacctcagttggccatcagtt

SEQ ID NO: 165011 - DNA, 322 bp, Glycine max
  unsure (1)..(322): unsure at all n locations
agcttagctactcttacccctattataactaagctcacctccttgagaatcttcctttgagaagattcctaaagaagctagagcttagctacacacaccccctataatagcttagctcacccccattgccaaatacatgaaaatataaaaaaaagtccctattacaaagactactcaaaatgccctganatacaaggctaaaatcctatactactagaatggccaaaatacaagggccaaaagaagganaactaattctaacatttacaaagaagaatggtccaaccttgacccatgggctaaaaatctaccctaaggtcat

SEQ ID NO: 165012 - DNA, 334 bp, Glycine max
  unsure (1)..(334): unsure at all n locations
acttggaccccatttctaccaactacaaaccctaagaaaactatattatctacacaaaaggtacacttctctatantttgcatagagggtgttttcctaaggactgaaagaactngcctgagatgtcctaagtgatcatctangctcctactctacactaaaatatcatcaaaataaataactacaaatctacctatgaaatcccttaagacatgatgcataagcctcataaaggtgcttggtgcattagtgagcccaaaaggcatcactagccattcatacaaaccaatcttggtcttgaagcggtttccactcatcaccccttttatcctga

SEQ ID NO: 165013 - DNA, 275 bp, Glycine max
  unsure (1)..(275): unsure at all n locations
agcttcttctttcttctctatagttcttctcttcttccctaaagctcttcctgaactcgcattctncctctctgtgagtttctcaagctttcttatggtctcatatatcgcgggaggtttccctagctcttcgaaagctangtattacccggtcatttaatgaataacaaagctcacctaaagaaacacaggtttgtcattgttgtacacttcatattggtgagacaaaagattgctattgttttaccaattacacttcatattatatttcactg

SEQ ID NO: 165014 - DNA, 262 bp, Glycine max
  unsure (1)..(262): unsure at all n locations
gagatgtaatttcccctgctttctttgacatcatgattcacttgattgtcatctgtcagaaaataaatgtgtggcctgttatctacgggatgtacccgtgaacatcatgaaatctaanaggttacaagattattgttagagcattatgttgaagatgtgcaaaaagcatgatttgtcaaaacatgaaagataactgtgccttctagctcgctatacaggtggggtnggtcagagactgttatactcagctaacattgtcact

SEQ ID NO: 165015 - DNA, 190 bp, Glycine max
  unsure (1)..(190): unsure at all n locations
gtactaagtatttattacctatagttaacagaanatacttataacacttcaaaataaccataaattggagaaggttgatacaatttacacaagttttatacacaaaagttagtcgtattcaccgactaacagatgtcactgaccatggcaagttcaatatcgaggcaatgatggaagttgcaagtgaaag

SEQ ID NO: 165016 - DNA, 241 bp, Glycine max
agctccttgatctaacttgggttcactcaggttactttgtggtgggacatggtttcttctcacgtttttggtcctttcactagcaacttcgaacctgctcatttatcctcgatttccattctttcttcttcattttggtgtcctcttcaatttcactcttttcttttgttttcggcggcttccatttgtttgttgattggtgcattgcatcttcatgcgtttggatttatcacattattca

SEQ ID NO: 165017 - DNA, 297 bp, Glycine max
tgaggacgttttaactaataagtagccaaccagaggagctaatggggagctaaagaggactgcaatgaacttggatattattctgacgagccaacgatggtttaataatttaggccacaacatataacacaagagcttgattgattagaaaaatatatttcttccctcagcttgtttgttagaaaacccaacatatctacatacagttgtcattttgttaccttgcactttatagtttctagcatagaacgttagtttaaattctatttgacattatcactcatacatgttctctca

SEQ ID NO: 165018 - DNA, 402 bp, Glycine max
  unsure (1)..(402): unsure at all n locations
gatttagattccatagaattagaaaagggataattaagtcataagagttcaaagtgaaggacattttcgttaatgactggttaactagttaaaaaatagaattttagtttaattagttggtgactaattaaagtatattattcaatgatgtagaataattaaaataagttagagttgtaaccccctgaaaaattacaacttagactgacagagaaaacttcgtgttgtgtcatctgtgcatgtatatgtatatatgtacacacacacacaattgatttagtaaagcttgacanagaaatagaaattggttgagctagatgtccatctgcgcaanaatacactatgcattgagtcccaatgtaatntgtctatgtgtgagtgaactctctacaagggtcactc

SEQ ID NO: 165019 - DNA, 438 bp, Glycine max
  unsure (1)..(438): unsure at all n locations
tatgtctctctctctggtggtgctgcatatatntaggaaggataacagaaggatgtagaatttgtaccatagccattctcccaagtattntgccagcaagctntagaagcttggagcattttgattgaattgctgcacaggtaactgatctgattatgtacacaaggtggttgtggtggtgatggtgggagcaaaggctgaagagttgattgagcanaggtgtntgtttctctttcaattttgctcactatttgcatttggtgtcttgtcattgagccattttttnttcctttctgaanaatgtaatatgggggatagttcagcttggtggagggntggaagtggtagtcatacgtggggtcaaatgatagaagaaataagactattctttatgtttcttatgacagactacttgaaccaagtgaacctattaattat

SEQ ID NO: 165020 - DNA, 332 bp, Glycine max
  unsure (1)..(332): unsure at all n locations
gttcaagatccagaaataattcaagttcatgagaagaaatcctgaagatacaagaatcaagagaagtgtgatctccagattcaagagaagatgaattcaatattcaagagaagaaatcatgaagacttcataacggaagtattgaagagatttttcataaaacaaacatagcacagttgtggttttcaaaagagtgtctctcaaaattttctaagttaccagagttgttactctctgggtatcgantacaggaaactggatatcgattaccagtagcaatagttgatttcataagcttttactgaatttgcacgttcaattgatttcaaatt

SEQ ID NO: 165021 - DNA, 253 bp, Glycine max
tcatcttaggatttcttcgtcttggtactacaacccgtgtggattatcaggtggaattattgtcattgggattcttagaaagttcggtggcaactgaaatacactaacttgtcttgcatatacaaataccatatctaaagctttaacaaggctagtcacctatatgttttttatacttgaaagtaatatgacatagttaatgaagatctcggatagcaatattttgggcagtatacatcttaagtcaaccccc

SEQ ID NO: 165022 - DNA, 206 bp, Glycine max
  unsure (1)..(206): unsure at all n locations
tgatggagatagatggtaagccaatgcctaaagtagttgtgcttggaattttactacctcactctacaattgaggtaaaagagttgagcttgatgaacttaaaaggatatagtctacaacagagcatggacctacacttatgtctctgtatgttgctaaaagataagtagagtntcaaactggcattgttactgaagatatggagc

SEQ ID NO: 165023 - DNA, 264 bp, Glycine max
  unsure (1)..(264): unsure at all n locations
agctnntatagcgcgggtctggaaacgaangtcaagttgtctcgatatacnaagatgatgtcccgagtacattagatttcgtacgaccattgccctctgatttcagcttgaaattgcgagtggagacacccggatttaccacagcatagtaaccttaccgtttaaaagctctatgttggcctaagcttagagttttcctttgttaaggctttggcttttgttttgaataataaacaagatcttttttatctgtcctacgtctta

SEQ ID NO: 165024 - DNA, 361 bp, Glycine max
  unsure (1)..(361): unsure at all n locations
agctntatcaccatgcatcttgtagcactggcatgttcttatanttggaaattaatgtgggtngcttggttatttttctcgtataatttacttcatcttataacatttcaccttactagccatgcatgatatcagacggggttctcaaagagaaaatcttaatggttgtgtattttgtaaatccatcgtgaagtttcggaaactaagttcaatttctgaaanaagaagggtaaagtgaaatatatgcttaattttcacatatttctctgtgtattttctctatagggtatgaaaaatatgaaacccgtattgctgattgatctgcacattacatgtttaaattcatgcctattaattaatg

SEQ ID NO: 165025 - DNA, 277 bp, Glycine max
cctatctagcatttttttataacgattttataaagaatttctataaccttttttaacatgaatcttttttatgaaaaggatagatttataaagaaaggcccaagccccaccgtaactgcttttttagtggaatcaagtccataatttagtgcacattgatgaatcagactatgtatttaaattactttatgaatctacatatttaactataaaaaataaactgtatatgtagcctggagatgtctaaactgataaagtccactcgctaactgctttt

SEQ ID NO: 165026 - DNA, 273 bp, Glycine max
  unsure (1)..(273): unsure at all n locations
tgatgtatctacaaatatggtagcattatatttaagggttatttatgtgttacatgagtgggaatgatctatttattaaaaaanaagttagacttagactttttaaaaagtctttttttgataaaaaggccaaagtttatgcttaaaaaaaccttattaagccttggagaaattacttgttatantaatatttatatatattacatattacataaatataacacatatggtatatttatatttaaataatattattaatattaaataataatt

SEQ ID NO: 165027 - DNA, 183 bp, Glycine max
acttttgaaccagaatgtgatgcttctggagtgggagttggagctgttttgtttccaagtgggcaccctatcgcttattttagtgaaaaacatcatggtgccacccttaactacccccacctatgataaagagctttttgccttaataagagcactaataacttgggaacattaccttgtttc

SEQ ID NO: 165028 - DNA, 154 bp, Glycine max
ttctcgagagcctccgttggtcaatttcgagcgtctcgatatattatgtcccaaaatccgacatctgtgtgaaaaggtatgaccattccaatatctcgagagcgtcgcgtttcagattcgaacatttcgatacattatggcctcaaaaccaaca

SEQ ID NO: 165029 - DNA, 198 bp, Glycine max
gatcagatcatgaaatttgtgcgatggccacatatttatagccagttgatggctctggaagaaaccatgttaaaagttgtgactcttgacaatttcttccagaaccagccactttaaaaattgggactcttggcaattattttttctgaaccactcattagtaatcgagtaccattatagtgtaatcgagtacacatc

SEQ ID NO: 165030 - DNA, 444 bp, Glycine max
  unsure (1)..(444): unsure at all n locations
cgctgagaatatacactgcagntgctacagcttcacaccagaatcttgttggcacacctctagctttgagcatactccttgtcatcttaaccacagttctatatntcctctcggccaactccatttgctctggagtatatggagcagtccattctcttcttatcccttgctcctcacaaaaagtaatgaattcatttgacaagaattcaccacctctgtctgttctcaaagctctaacatacaagctagactggttttcaaccatagcctcgaaaatcttaaagctntcaaatggttcagacttagctntaagaaaataaacncagctcattctactttaatcatctgtgatgagcaagagatacttacttccaccaagtgagactggtttcattgngccacataagtctgcatgaagaagttcaaggcactcacttgctctcc

SEQ ID NO: 165031 - DNA, 382 bp, Glycine max
  unsure (1)..(382): unsure at all n locations
tgcacgcatgcaagcttgcctaattaacctgaaattaagagagaatgattatttaccacacaaaatggaattactaagtatttattacctatacttaacagaaaatacttataacactacaaaataaccataaattggaggagtntgatacaatttacacatgttttatacacaaaagtgggtcgntntcccagactaacaactcccccaaatttacagttttgcttgtcctcaagcaaaaagagaacagctcacttgtcctcaagtgacaatgacatgcagtgactatgtacaaaggtgtatgaaacaaaagttactgattgcatgataagagaatggagtataaatgccctcatcacttgtctttacaaggtatgcagtt

SEQ ID NO: 165032 - DNA, 371 bp, Glycine max
  unsure (1)..(371): unsure at all n locations
attttctgcaacaatgttctaaaatttatctttctggagcgaccattggtgatatgaagggaatatattattgacaaataagttaattgtgtttagccatgctatcaaatttctatagttctggaaaccccttttgtgacgaagtagtgcctctaatgatgagacatcaaattgctctgacattcaatataatattatttctatcaaagtggttctttaaataccttacactcttgaaggaccaatgtgatgtagcgcatatctttggagaaccaaaatgggtggcttttctgggttttcatacaatntagcanatgcaacacttttatgtnntntatgattttggtatataccttttctgctntatctct

SEQ ID NO: 165033 - DNA, 349 bp, Glycine max
  unsure (1)..(349): unsure at all n locations
gctgccagcatttcctgcgccgccagtttacccaacgtattctctgctaaggactgtctttgtgagaagtntacggtccttatgtactcgcccggtgatgtcgtcattaatgatattcatgcccattttcttcagttcttcgccgaagtaccaggtgagatgacccggcatatagccaatctctggcgtttgtttgtctgcggcgtctgggaatgcgcaaatggaataaccattcagtgggttatcgccgtggcgaagcgccagaaaagccgccgggccgtggcaaagggagataacaaaacggtcatttttgattgcccactgtaaagcggcagccacgtcctggctt

SEQ ID NO: 165034 - DNA, 314 bp, Glycine max
  unsure (1)..(314): unsure at all n locations
tccgggatatanatattcatcagcaccacaatattcttcagcactaaatctcttcttgttcaccccgacctctgataatggtctaaaatcattgaagccacttgcgacgacgttgctcaataaagaaaatttggcgtgaataatattcaacaccagtgcagcatcatcattacatacttacagccgccgactaccgctttcgatatattgactcaattntccagcctgggtaanaatagcgaccagctcagtcgcaaatatagtgactaccctaactaagcaacaaataggaatacactatgactgttcaaaca

SEQ ID NO: 165035 - DNA, 302 bp, Glycine max
taacagtctggaccttcactctttggctccatctgacatacttcctgaagatgcacttcaacctctacagaatcaggtttacaggctttctgaacatatccaacatttgttgctgcctcaccaggcaattccaaaagagagtttgcctcatcaccacaaggtggaggatcaatagccaggctaccacaattatattttaacgcgtgctgtagctcatctgaaaatttatgtgctccctagatagctcgattgaagcatcttttactgaaatctcttatacaagtgtttcctcctctaataac

SEQ ID NO: 165036 - DNA, 181 bp, Glycine max
  unsure (1)..(181): unsure at all n locations
taatctataaggtatggtggcttatatctcttgtatgactctcgcatatatttttatcatatgacatgagaattacttgcttaagattcattcataaagtttttcngaagccactatgttatatttatttatttttataagaatttcatatataaaaatcctttattctgaaaatgtgttt

SEQ ID NO: 165037 - DNA, 162 bp, Glycine max
attatcagccgttgagatgtgttacctttggagacttccagctgtcacccatggtggaagaattttaagagatccttcgatgtcctctatggcgaaggagaccatacctcttctcatgattctatctgtaaaagcccacgtgcacaggttagattggcttcc

SEQ ID NO: 165038 - DNA, 287 bp, Glycine max
ccttatctcactgatgcttgcccatttattttgctgcctttcttaacgccactccttttcaacacatccccctgggcttccacctgtggggcctggcttatgcaaatgggcaggagccctgtactaactggctagctttcacatctatcacacactaacaccacgcccattatcgctcttaacccattggaatccaggacaaactggagtctctgggagatacctaagaatcccaatctgggccaccactcgatttttgaggggggcctaactatactcccccaatt

SEQ ID NO: 165039 - DNA, 286 bp, Glycine max
  unsure (1)..(286): unsure at all n locations
acgttcaacaactgctggaatcgataccatatattgtaatcgattacacagtgcaaattntgaattcaaaatttaatagttgttgtaatcatttttggccactggtaatcgattacatcctctggtaatcgattatcagagagtaaatctcttgaaaaagactntttaacttaaatttcttggccaaaccttttgctacttcaattaagaattcccttcctatntaatataccctctctaagactctagagactgtcttgatcattcatcttgaatatctctaatt

SEQ ID NO: 165040 - DNA, 364 bp, Glycine max
ctaactgactattgtttggtggacctacatattctgacttatgcatctctttttttattggggatacaaaattgaaactgactgcagctaatggttggtttactaatgaaaccaaaaaaaatcttgatggataacgttcaacattatagtggatgctcgagactttgttcttataagactttgctgagatattacagaactaaactacaattttactgatcaattggatccaaatataacttggttgcagatatttgggaataagtgagcaaccaatcgtggtggcctatgactgttaagtcattgtatatcatgtattgcgcagttaatattgctcaaattattagggtcatctcgaatctgc

SEQ ID NO: 165041 - DNA, 338 bp, Glycine max
  unsure (1)..(338): unsure at all n locations
catgttcatctatctattttaaaaccatatctcagnannaaaaacttctttctttgtaagtggatcgntttttctcttgatcaataattaagtattagtatattttatttaaagaaacagaaagtaattaaatttaaaggtaattttatttgttctagatagaggaccactattcccctcataaggtacactaagtctgtttgcaaatatgcgtgttccactaaggtcactaagtaaagacgccctactgctttcaaacgaaggtataatgtgcataaaagatatcatctncgaaccctgttccattcattctctaatagtcatgtcttgtatttggg

SEQ ID NO: 165042 - DNA, 234 bp, Glycine max
  unsure (1)..(234): unsure at all n locations
gaagcctanaacactacccaattaaatataatttcacccagaattttgcanatagaatcttaaaacataacattgattctctctgaatcaattcttgcaaaagtggctctttatagtctgaaatcccaaaatggttagctacataattggatatggagtgtttggtgcaacttctttttccttttcttacagagttatagcaatgggtagatcaaagttagagttttgctcaac

SEQ ID NO: 165043 - DNA, 447 bp, Glycine max
  unsure (1)..(447): unsure at all n locations
atgccccacattatttccatgacacatatgcataaatgatgatntggaaactttatgcanaactggtcatgcatgcatctatgcggacactcaaatgtcaaaattttatggtcatgtgatgctagggctcaggattcatttcctctattntaatcaacccaatgtttccaaaatatgttcttttatcaattngtgcattcatccgagtccatttcgggcgtccgggggaaattcacagcattcacccttcatgtgtagacacattntccanaaattggtatgatcaatgaaatttttcnanaanagttgaaatcgtcttttcaaaccatgtcattttactaacaactattctcttttcacctttctactgcttctcttttctatttgccctttcttactgcccttcttccttagtcctttcactcattcctttcttctatttattta

SEQ ID NO: 165044 - DNA, 275 bp, Glycine max
taatccttaaccggaagcattaaagctctttaatcaacacaaaaacgcctggatatatcacatttttttacacaataaataggggaagaaaaagggctaatgcttggatgtatgatgccactttgaaacatggacctgacttgagcttcaatctcttgctttgggaacaaggatagcgataagggtggacattgatgggttcagaaatacgtcaatagtggatggcatggttggtattgccggaggggggaacggtttgctcctcttcgtaaatt

SEQ ID NO: 165045 - DNA, 351 bp, Glycine max
  unsure (1)..(351): unsure at all n locations
acccattattataatagctcccttcaagctggagcatataaatcgtatgcaccaagcttggaacatataaactggatcctatgcccgcttaaagggttagtcaaaatatctactggctgatcattagagctaatgaattcagtgacaatctctttagactatagcttctttcgaataaagagacagtcaatctctatgtgcttggtcctctcatggaagactgggttngaagcaatgtgaagagcagcctgattatcacaatataacttcatgtgcaccacttntgcagtaattcaactcttcaagaatttgtttaaccacataagttacacgtaccacagcatagattat

SEQ ID NO: 165046 - DNA, 298 bp, Glycine max
  unsure (1)..(298): unsure at all n locations
gcacganggaacttgtgttgtacaccctggtctcattccagcctgcatgttattntcaacaacaacatgggcagtgcttccaaccagatagacacagggaaacgcgaagatgctgcaaacttaactgaacaagacctcttgcagataccaataggaacccgcaccatggaagggcttagattaaacacaagggtgggcattcagtacctggcagcgtggctcaacggaagcggttgcgtgcctctttacaacctcatggaggatgctgccactgctgagattagcagggtgcagaact

SEQ ID NO: 165047 - DNA, 329 bp, Glycine max
  unsure (1)..(329): unsure at all n locations
tgcacgcatgcaagcttatgctgcanacatctacaatagacctcctcactctagttgtgaaatcagtctttcagaataattatgacatcttcagcaacaggtacaatcccgggtggaggaatcatcccaaccttagatggttgagtccttcacaacagcagcaacaacaacagccttatttccagaatgctgctggcccaagcagaccatacngttctccaccaatccagcagcaacaacaacaacaaccctagaaacaacaaatagttgaggctcctccgcaaccttcccttgaagaacttgtgaggcanatgactatgctaaacatg

SEQ ID NO: 165048 - DNA, 173 bp, Glycine max
ttaatgttatagactatgatctttatcttacccatatttgttagacgtaacatttagtcttcgcttctttctaaaagtatggctaatcacactctgtagctaaaaaataccaccttgtttcgcccacactacatatgtgtgacatgcattacaacacatatttgagagttact

SEQ ID NO: 165049 - DNA, 204 bp, Glycine max
acaccccggatgagagatcatctcacctcttaccatgtatatattgagtgggtgtattgaagaggattgccatccacctgctgttgcgttcgtaaaaataactttcttctatatatgaaagatgtggcagctctcatcttgtgttctacactaaattgcattgacaggggatgcccagctgttaaacccacagatctcttttta

SEQ ID NO: 165050 - DNA, 309 bp, Glycine max
  unsure (1)..(309): unsure at all n locations
ttctataatcgnatatagagataaactcactcttatntcaaatgttatggttcattttatttggagggaagcaaatcttatcgttcattctcaagattgtattgtaaagttgtaactaccactggtttgattntacttttccatgtatcgaaactctgattatcaatgatatgatataattcttggttaaataaaataaggaaattgactgtagatgatanggtgctcgctgaatatctaaagaaagaccctttcttcaatacagaaatacgttcatgagttgtagagtggtgtgagttgtgagtctat

SEQ ID NO: 165051 - DNA, 278 bp, Glycine max
  unsure (1)..(278): unsure at all n locations
agcttattgcgtagccgctcttggtgctcagaaatctcataaacaaacctcttatactagctattttgaattctctaggtcctgaatgtacaacctcaaattgttgctcagtcccctctctgtattctgcaaaacagaaaatcaatatcaaagaaaacatggatgaagtcctaacgatgccatgtacatgtgtatttatgaagatatagtatttatatgtcattcagcatacattgactattgatttcatgtnatagactttttataacatgggtgcc

SEQ ID NO: 165052 - DNA, 337 bp, Glycine max
  unsure (1)..(337): unsure at all n locations
agctntctcataagtcctagatgacatttcaaactattatttactcactntaacctctatntaccactgaatcccaatttagccttccaactctcaaagcctcactctttttctactcataacactacattctcactttctaaccctaggttaactctacccttcatccctagcaattttccatcagcaatttcagcacataaacatcacaagcatcatcatacaaaccctaaaacagaatgggtaagctngactcacaccaaacatggcaagttcaacatgctttcaacaatttcttgacacataactatcatgaagcagaaacctagcaaaacta

SEQ ID NO: 165053 - DNA, 182 bp, Glycine max
tagctgatgctggccatttttctggcctttctaaattccatctttcaaactacacatggcttacacctgggccactggatatgaaatgggatggagcctgttaaacaaagctagcttaacattactacacactaacaccaatgccacatatcgctcataagccagagaaaacctggactaaa

SEQ ID NO: 165054 - DNA, 358 bp, Glycine max
  unsure (1)..(358): unsure at all n locations
agctntagatcaaatncattaacaatgatatgtaatttattcacttattntattgcttaaatatgcttttggtccttataagttagcgctttttattatttgttcttggaagtttatttttctcaatttaatccttgtgagcacaaacttatggagactataaatgaaaaataagaattntacaggaccaaaattgaaaaaatatcaacttacaggaactaaaattagaaaatgaacttatagggatcaagaataaaanaaatattaacttatatggataaaaaatataatagaccattttctaatttaaaaaaaatattttaaaattaattaatttaataaatttaataccatatga

SEQ ID NO: 165055 - DNA, 249 bp, Glycine max
  unsure (1)..(249): unsure at all n locations
atgatgggttttttattgttctttgtcactaatggattgctaatgactagcaatgatcaacaagaagtgcaacagcttatgaaggagatgcaaaatcagtttcagatgtctatcttatggaaatagaatattttctatgcttgaaagtgcatgaaactgaagatggtatttttctgaatcaggaaaagtatactcatgaagttttgaagaaagttataatgganagtaaaaatctatccctactccttc

SEQ ID NO: 165056 - DNA, 401 bp, Glycine max
gcttgtaaagcggaagaaaagaaaaccgaaaggtagctttataaagtgaaagttctcttaacaagtagggacaaccaagggtgcatagaatgaattgaaagattcgatttcgggaacttactggttgaagaatgaagaacgaacgaagaacgatgaagcatttccacagaatcgctcacgaaaaagttacgaaagcacctgggcttggattttcttcacgaaacacatttttttcacccaaaacagccgaaatgcatagccaaggggttcagaatcttttgaaatagccccccttccctatttatagggaaaaatggaggtgcttgctgctcagaggcttcttgaggaagatttctaagcgcatcccaattactaagttcaccccacttttcatactttat

SEQ ID NO: 165057 - DNA, 457 bp, Glycine max
  unsure (1)..(457): unsure at all n locations
tgctngctctncacttaagttggctcgacctacgcttaatcttggctctctctatgcttaagcttggctgactccacgcttaagcttgaaatccagtagctcattttcccttgcaagtcatcttgcttaagcctggtctagtgataaacctcaaatttactatattttcatatgcaatttgagatgtttatttgatactttaggccttgttttgaatcaaatttgttatgttttcaattnttaatatattttagatatgtgtcgtaccctaatttcatccgaggaccattgtttggtggcatgcaacctttgctcgaccgcctcgaggtacttaacacccatcgttaggtaatccgtanagtttcgcaacattcaggaggtcaaaaagaagaatgtngcgtaatccataaagttcacaacattctagaaagaaaatggggtgtcgtacgtaatccgc

SEQ ID NO: 165058 - DNA, 292 bp, Glycine max
ttatgtgtaaattgatgcgtaacgtaacatattaattcaaacatattttatgaatgagcatagcttctataaccaagccatagtacatcatgaacaaaaagttgttccatggggaactggttatctgttcaaggatcacctaataacagtatatttcattcatgagagcattagttagaaacttgtaccagagccaaggaaattacagaacataacacaatacaaaatactgtccctataagtgaaagagccagaggccaaaccaacaaacaacaacatcacaagcttacag

SEQ ID NO: 165059 - DNA, 357 bp, Glycine max
  unsure (1)..(357): unsure at all n locations
gttcctagcggtttctaattatataggccattaagtctatcatatgatgacaatagccgagaagcccattgaattcttcgggggcggagtaggtgtccgccattgccttggccttggctaacaatcggggaagttcttgactcccgttcaaggtaagagcaaaccaatccatccacatagttgcctcttggtgaaagagtcgncacccttctctacctcttttccgcgatacttgggcatatcgtccggaccctatgctcggggccgggtagactaactcttctggtattgggatgatactgcatgtggtctcgctacataacctgaacaagctcttggacttgacaggcactactc

SEQ ID NO: 165060 - DNA, 310 bp, Glycine max
gctgcagctctccctatttgctataataggaggaggagtgtataagatatagagtcatttcttattggcacttctctctctctcgaaattgctgatgaaaattatctccgtgaagaaaatccaagccgaggtgcttacgtaacgttttcgtgagtgattactcgaagattctcgaccgttcttcaacattcatcgaacggtcttcgttgtcttcagtctttaatgggtgagtacctcacacccagcttttcaatttattctatgcacccgtggaggtccacatgtgggttcatgtatttttatactcgtt

SEQ ID NO: 165061 - DNA, 302 bp, Glycine max
  unsure (1)..(302): unsure at all n locations
gattcttttgagatctgatatgtgccaccttattgctcactgtcaatgtacatccccttcttggtgaagatgtccttcatgaatttggcgtagagtggcatctactgcaaggcttccccaaatggcatggntatctttagccccttgaactaaaggatatggtggctcctttagaggggctgatggctcttctttcctagccactcgagctagctggcttttggtcttagagggtaagaccttatttctcttcttccctcttatacttttcccttttctctccctctttggcacctttcctt

SEQ ID NO: 165062 - DNA, 442 bp, Glycine max
  unsure (1)..(442): unsure at all n locations
tgtaagaatacttattattgttatgattataactgctactattgtttanaataacaacaacaacaacaaagccttatcccactaggtgagttcggctacatggatcacacgatgtcattcggcacaattaaaaaccaaaggctaaattatatactaatagattcaaggcttaaatatctntntagtccttacaatatagcattcttttgttcttcgtccttgcaaatgtatttttcttaatccttgcacagtatgctagctgtcattatcgtccttatagcgcttagagaacatttctactggtcaagcatatctaagtgtttatagcttaaacaaacaacactattgcaggcttaaacaaaaacaanttgtagatgaaaagaaaaaacactaattgacgactatatgttttaacctagtcaacaattacatcacatgtatc

SEQ ID NO: 165063 - DNA, 273 bp, Glycine max
tttccacactctcgagatgggagagatatgtcatcttaagcctacaagtccctcatattatcaaaatctaaaattcaagctcctatggagcaaaacaatgtgtgtctcctagagagagcatcaactaccataatttgtttttccccttctcgattttgataacatataggaaattgatataggtactcctaccattttgattccctttagttaacctgccttgccctctaatgtcttaaaggagttgagatctctccaaagacacattcttga

SEQ ID NO: 165064 - DNA, 241 bp, Glycine max
  unsure (1)..(241): unsure at all n locations
atgatagatattctctctaatcgtatgagcacttctttagctatcaattggaattcttttgctcctacatggggattgaggcaaggggacccttcacccccttacctctntgtcttgcacatggagaggctgagcatatctcattaaaagtcagtcaatgagggtaataggaaacccttctggtttgggaataatacaggagtcacagtgttgcatctattcttcatcgatgacataattc

SEQ ID NO: 165065 - DNA, 114 bp, Glycine max
  unsure (1)..(114): unsure at all n locations
agcttatctggtttgattttattgctgagacatttgattggagtcatgatgcctangcttgtgaactatccttgcttgccacatgtgtagatttgctggtagtgcattatttgt

SEQ ID NO: 165066 - DNA, 292 bp, Glycine max
  unsure (1)..(292): unsure at all n locations
acttcacatgaattaatcaatttttatctcatacatatagatatatggggacccttgtcaaagggttctatgcatgggcatcgttatttttaaccattgtggacgatcattctcgctttacatggatttacctaatgcannacaaagctgaggctcgaaaactcattatcaccttcngtacatatgttcaaacgcaatttaataaaaccattataatcatacgtagtgataatggtgctgaatttcttatgaatgattnnttatgctcaagggggatcatacatcaaactac

SEQ ID NO: 165067 - DNA, 417 bp, Glycine max
  unsure (1)..(417): unsure at all n locations
agcttgtagaatggctagacatgatacatgtcanggctttggttggttcaagggtaaaagggatgccccacattatttccatgacacaaatgcaaaaatgatgatttgtaaactttatgcaaaactggtcatgcatgcatctatgcggacactcaaatgtcaaattttattgtcatgtgatgctagggttcagggatcatttcttctatttatcaaccccatgttcaaaaatgttctttataatttggcatcatccgagtcatttcggcgtctggaaaatctcacagcatcacccttaggtgttacacatttttaaaactagtatgatcatgaattttcaaaaaagttgagtatctcttcaaaacatgttgttttaactggcactaatttcttccttttacattggaattctttctg

SEQ ID NO: 165068 - DNA, 329 bp, Glycine max
  unsure (1)..(329): unsure at all n locations
tagcgcgggtctgggagacagatgtcaagcgttcgcgatatgctaagatgatattccgagtactttggatttggtacgaccatgccctcctgatttccagctgggaaattggcgagtggaggaacgccccggcatttacgcaacgagcataatgtaaacctttacgggttaaaagctctatatttgggcctaggctctagagnttttcctttggttaaggctttgtgtctcttcgttttgaacttataatacaaggatctttcttcatctgttcctggtctctacccattctcattcatttgcatgtgtacttatttntctaatacgga

SEQ ID NO: 165069 - DNA, 285 bp, Glycine max
  unsure (1)..(285): unsure at all n locations
acgagcatagaatcgctgatgagtatgcccaagtatatgcggaaaaagaagctagangaagggtgatcgactctttacaccaagatgcaaccatgtggatggatcggtttgctcttaccttgaacgggagtcaagaacttccccgattgttagccaatgccaaggcgatggcagacacctactccgcccncgaagagattcatgggcttctcggctattgtcagcatatgatagacttaatggcccacataattagaaatcgttaggaaactcgtatgggctctc

SEQ ID NO: 165070 - DNA, 273 bp, Glycine max
  unsure (1)..(273): unsure at all n locations
gctttgctcaaagaaaagcttactaaggcacctgttctagctcttcctgacttttctaaaaactttgagctagaatgtgatgcctctggagtgggagttggagctgtattgttacaggtgggcaccctattgcttattttagtgaanaacttcatagtgccaccctcaactaccncacctatgataaagagctttatgccttattagagccctcaaacttgggacattaccttgttncangggatttgcattcatagtgagtcatcatcactt

SEQ ID NO: 165071 - DNA, 445 bp, Glycine max
  unsure (1)..(445): unsure at all n locations
acagcttatgctataagccttctacaacgctagatgaagaaagggcggnnggttctggcttcatacaaatggaagagatgatcgcgtttcgagaacaaatgcacatagaattctcaaggaagcaagtagagagaaaggaaaaaactgagagtggacaggatcggngaagatccagaagtgataggctgcctctattggttgagatacgataattatactntactaacggaaatcgaagtcgggtgctggaagagggtttgcacgtataactgatccacttgttggctaaaaatttgacctccttcaagagtagacaaatccaaatactgtcattatcattgagtggcnnggacaacactaaagaatgaatacattgaggataaataataggcttatcaaaggcatcttagaagtcgcaagacaanaccgtcacaaacctgacaac

SEQ ID NO: 165072 - DNA, 357 bp, Glycine max
  unsure (1)..(357): unsure at all n locations
caccattatgcaccaagcaccaatatttgaatgagctaacgatcacacaagattccatgaaccttttctcttatctctcttntggaatccatcatgaactattaacttcgagacaatattgacaagatggattttcatgttgataaaatataaatagtttgttaagagacaacaattaaagggggtttttcaaaacatagtcatcccaccacttcggcctttagcatcaacaaaaagaaaagcataantcaacaacaatttgaatacaaatattatcaatatgcttagagtaacacgagtttacatttaaaatgtattccatgagacttttaggaggaatgtgtcggttgccagcct

SEQ ID NO: 165073 - DNA, 290 bp, Glycine max
gagttgtgtctcacaagactctcattcatcaaagttacaacaagtgttacacatgcttctatttatagactatgtagctttcttgagaagctttcttgagaaaacttccttgagaagcttctctgagaaaacttccttgataagctaaagcttatctagacacacctctctcataactaagctcaccttcttgagaagcttccttaagaagattcctaaagaagctagagcttagctacacatacctttctaatagcttagctcaccttcttgagatgagaagctagagc

SEQ ID NO: 165074 - DNA, 308 bp, Glycine max
tgcagctagacaagactgctgtgaaatttaaatacccctttcttcatatatgttctgcactaccccagcagcaactatagatatttctgcagcacattcaataactttaacaatgtctgatctgatgacttgaaaacatgaaacacagtggcatatatatttctttagctgcctacagtccatgcagatcgagaagagaagatcacacttgagagaagtcggaaatgggttggcaaagaggaggggtaaggaaataaggcatagtttcattggtttctttactttaacagctggctatttatcaaaaa

SEQ ID NO: 165075 - DNA, 322 bp, Glycine max
  unsure (1)..(322): unsure at all n locations
cttgccctctgaagtaaccatcctttccaaacttggtttataaaccttcttttgccaccatcttttgccttcaaagtgatggtgtacaatgtaccagaaaccacttgcttgtttgcacttactaccttttcaaactccaaaagggcattctgcataaccatttaacaatcaatataaatataatagaagtcatatttatattcccttaccacacaatgaaaagataatagaaacccactagtgtttctataactacacagaataaaaaaataacttcattattgaaattggnccaccaacctattattcctgtacatatgac

SEQ ID NO: 165076 - DNA, 440 bp, Glycine max
  unsure (1)..(440): unsure at all n locations
agctngaagggcaatcatatatctcattattcanactactaatgttggccaaacagtgggagttagagtagtttgcatggaatcttaagtacaagcccattaccaccattatacacccaaaaaaaaaatctcatatgcatgtagatagtcaaataaactagcattatatccaacatgacagtgaccttacagacacattcataccaaaattttagtgaacttacagtctctctttctcttgttccttctggtggcataatatcttgtattcattcaacctctgcaacacgatacctgtcatgtgtcattnatttctccaattcttacactttttggcccatttaatactaattagctaattgcaaaataatatgcagcttatattggggctcttgaaaatttgggtttaattaatttaggaaatataacaattggctgat

SEQ ID NO: 165077 - DNA, 179 bp, Glycine max
ctatctataagttcccgcatttctcaatatagatgaaatctaacagacaaaccattcaataatctttacagagagagaatgagagattcagaatttcatttaggaaacacacccaatacattaactatgataggctccaaatgaagacatataaccattgacagttcacccatccgggg

SEQ ID NO: 165078 - DNA, 130 bp, Glycine max
ccattggggataaccatgagacgctaaattgatgacagcttgcttgtggagcttctattgaggctggatctttgagcttcaatgaggtccttcaatggtgattatacaccatggagatggaacggaagac

SEQ ID NO: 165079 - DNA, 172 bp, Glycine max
tctagctctttttttctggagctttggaactcttttctgactactccccccctttctactcctctgaagttctaaaatctagactgactactcttcctttatctagtactctggaggactgacttctccccccatatactactcccctgaaaactgaatcaaaaagctctca

SEQ ID NO: 165080 - DNA, 266 bp, Glycine max
  unsure (1)..(266): unsure at all n locations
gatcacttttttttgtgcactntatcccaaggcagcaccaaacacagtcactgtcgataggaaggccaagaaagaaagaaacacggcattatcgaaccaataaaatgaaaagaaaaagggcaatttttgttagaaaagattaaaagaatgtcattgtgtactataaggtaagagatatgtgtgtgttgaaccaaatatgcacctgtctcttaatgattgaagcacaaaaagacaagattacggaggccagaaagattaagaatata

SEQ ID NO: 165081 - DNA, 367 bp, Glycine max
  unsure (1)..(367): unsure at all n locations
tatgcacgcaatcaatgcggcataacacaccataagattctgatgatggatgcctcatattctcacataggaggactgatcactttcaaattgagctntcaaaactatcataacatgtccaagaaaacaaggatgttaaatcacaaaatgtcaagagacttttattttcaaaacaattacccattatttgaacatatcctataattcaaagaaagatatgccaagttgtacatgcaaactgaattgacctagaatattgaactataaactcaacatacctaacaaaacttacatattntacacaaacttgctcagaaaattactaaaccaaaaccaaagaacactgcacccgcatacttaaacaaca

SEQ ID NO: 165082 - DNA, 481 bp, Glycine max
  unsure (1)..(481): unsure at all n locations
aacaaacattaagcatcttattaagttccaacataactgttatttatccaaacacaaaacaccaaatctctcgaaaccaaaccaaatgaaatgtctaaaaccatacacacataaaaggattgattggaatttgtgtgttttattgatggaatttgtggtagacattcgcagatcatgattaagactagaggattaggccatgtgttaggtaggattatggctagaagtctggggagaggggatggtgatgattctgacggtgctccccaacgctgaaggccgaccgcatcagcacgcaggcgacgagtacttgtcattgttgacgatgttgtgcctgcagtacccacggactcgcctgcgaactcgcctacgatactagaggcagaggctgctgtagctggngataagctcatggtagatgcagatgcacaagacatcngtncagagacaaacacacagaatattggtgacaagatgctgc

SEQ ID NO: 165083 - DNA, 287 bp, Glycine max
  unsure (1)..(287): unsure at all n locations
acatggacttctaagaagcaaggcattgtgacactttctacttgtgaagccgagtatgtaactgcaacgactncttgcacatgtcatgccatatggctaagaagattgttggaggaacttcagttgttgcaaaaggaaagcacacagatctatgttgataatagatctgcacaagagcttgccaagaatccggtgttccatgaacgaagtaagcatatatatacaaggtatccatttattagagagtgcattaccaagaaagaagtagaattgactcatgtgaaaac

SEQ ID NO: 165084 - DNA, 205 bp, Glycine max
  unsure (1)..(205): unsure at all n locations
gctttctttgtggggtgttgctttgggcactagcagaattgctggtacatccaacaaaatttttaaattccaataatacccctcccttataacttcttttgggattntgttcttcacgtgagccttttttttttcccttcacattcgttctcctgagaggtattccgagagagttgctcgtttgttgttgggtcctctctggtgg

SEQ ID NO: 165085 - DNA, 481 bp, Glycine max
  unsure (1)..(481): unsure at all n locations
tggatataaaactcttatctatacaccatgtgaggtagctncttatacaagaaacaaactcaaccttcatagtggaagtagtagtcaaggattgcttttcacttctctaagatacaagtccaccaactagcataaaaacataactagaagtagatttcctggtgttaatgcaaccaacatagtctaaatcagagtaaccaatcatctccaaatcatcaattcatctgtacatgagcatgtagtcatttgttccttgaagatatctcattaccttctttgtagctttccagtggtcaacacctggatcactatgatatcttcccaaaactccaacaacaaatgcaatgtcaggtctggtgcaaacttgagcatacataatgtttccaacaatngaagcatatgaaatattnttcatgtgctctctttcaagaatcattttcgggcattgactataatcgagtctatcacccttcacaatggg

SEQ ID NO: 165086 - DNA, 433 bp, Glycine max
  unsure (1)..(433): unsure at all n locations
taacaatcagtgtcatactattgttcaaaacagagcaggtgattatatgctttactagactcaaaatatgcaacacacactagacctaaatcatgtgtcacagaaattgcgaagagaatattttatccaagcacaaacttcaagccttattccatgtattggagggaagttatggctggccatatgggtagaggtgtcatatacgagcaagtatggaggaatggaccttggactgctgaagaggacaggttgcttgttgagtatgtcangttgcatggtgaacgcagatggaactctgttgctaggcttgcaagtaagaaacaccaacactttttcactgttccgtttcttaatatatatgatcggatttcacatgtatacgtgacaatatagcaaaaaaacaactgacattgttctcaactctactcgtcat

SEQ ID NO: 165087 - DNA, 296 bp, Glycine max
gcttatcttctgcgtccagcatcttgtgatgtgcccagcctatgatgacagcttttcatgatgcgctatccaatgacttgaggaatgccaccagtctcgctttccaatattcataagagcttccatcgagaataggcgggatgctcactggtaacgcttctctcttcatgttgatcacaatctatcttcctacaactcactctgtgatatcgagtgttggctctgataccaattgagattctgatacccatgcgacagatgacgacaggatgtcacgacatcactcttcataacat

SEQ ID NO: 165088 - DNA, 239 bp, Glycine max
  unsure (1)..(239): unsure at all n locations
cttaccactcatgagtccgagcctagagttataccaataaaacttttgtccaatcacaaagtccttcttagctatcangctgtcatggaacttcttggtcttctcatangcttctaaacggatctcatctagctcacttagttgcaacttcctttcctctctagcctggtccatagagaagtngcaagtctttactgcccagtangctttgtgctctatctctacaggaagatggcatg

SEQ ID NO: 165089 - DNA, 381 bp, Glycine max
  unsure (1)..(381): unsure at all n locations
tgcacaacaagtaactatatctanttttgtacaaaagtaactgtctaacttccactaatatatacaattacaactcagaaggaagggatggaccttgattaggcctatctaatctacctaattaaactaatcacatagcaaagcctaaattcacaacccaattattcaagtgcaaaggttctgactttcaggcccaagcttatttgtgaaaaaattgaagatcactttcttagctntccaaggactgctcacaagatccatttgaagttctttagtgtcctataggccttgcacaaggcagatatgttaggtaagcacaaaaatccaaaaataagccacaactatcaattaaactcaaccattttcctaagaccaaaaatg

SEQ ID NO: 165090 - DNA, 226 bp, Glycine max
gtggagtccaacatcaatagttcctttgacatatcataatatatgatgggccatttgtaaatgcataatggtaagagagtgtataaattgagacgcataattaacaccgtatgaaatatcagggcgagtaagggtgatgtattgttaagatccaacaagcccacgaaagtaacttagatcatcaaggggagtgttattagacattatcttggtctgagcttcaaat

SEQ ID NO: 165091 - DNA, 356 bp, Glycine max
tgacaagagattcctttgtacttggactgagtgagcatgatagagccattatggcgatgattcacctcaatacctaggaagtaatccctatcttctacatgcttgagtgcaaattctgaattgaggttgcttactaaagactcgatagctgttgggttatattacccgtgacaataatgtcatgaatgtataccagcatgtgtatcacagtaccattatctgacttgactaagagtgattgatcagacttgctggactgcaacttgtgagctagttgtgttgatggtagattgtccaaccatgccctaaaggcctgtgataacccataaattgccttgtgtcactcgcacacaagc

SEQ ID NO: 165092 - DNA, 357 bp, Glycine max
  unsure (1)..(357): unsure at all n locations
tgactgggctccctatgatattacctagtgagagtgacctgatttaccagtgtgtgggttgtcttgtcatgtanctctangcgctcgacgaggttnttcacttacatgataccatattgcatatnaggatgagtcttacctatatttttgcataacactngtgtatttaattannaatgatggtaagtgatatatgttttgatctttagtacgtgaatgatgtaaaatgcgtagacatgtagtgttgagatgtgaagtacacaataagtggtggaatgtcgtgagctatatttaagtaangttgtatttatttatatgatatgtatatttacatgttgtcctcgttctctctattag

SEQ ID NO: 165093 - DNA, 451 bp, Glycine max
  unsure (1)..(451): unsure at all n locations
gctaagatttactcactctaacctctaaatactaccatttccagtattggccttccagccctcaaaaattcactctntttccactcctaacaccacattctcactntctaaccctaggttagttctacccttcatctctaacagttttccataagcaatttcagcacatgaacatcacaagcatcatcataaaaaccctaaaacagaatgggtatgtttaactcatccaaacatggcaatttcaataagctntcaacaagagtcttcacaaataactatcatgaagcagaaaactaacaaaactacccatcatatctcccaaaaccccatacccacgaaaatcaaaggagaaagaagtccacccaaacctgaaatttcgaagtcccactcgtaggcacgcacttcacgaccccgaaaatgctctccgttcacgatnntgggcagaaatgat

SEQ ID NO: 165094 - DNA, 341 bp, Glycine max
  unsure (1)..(341): unsure at all n locations
tctaaatgcacactagcagaaggtcaattgtaagttatatagcaattcattctatcaaatatacctatttatatatatcatatcccgaaagctactttaaataaatttatttcatcaacggatgtaataaacaaagaaaaactggtgaagatgtcaagttaaattgtaaacagcatggtgcacaacttcacaccaatatataaatactctaaaccctctctggagaacctccaccaaatgcataaaaaataaactctatcctgaagattagctttaagtaaaaatcnacaatggtgtaaaacctgtgtaactctctgattatgcagacaactgatgaagga

SEQ ID NO: 165095 - DNA, 366 bp, Glycine max
acacgaaccgtacaattccaccatttgtgtttcttccccccttccaatcctacattggatctcatgactaccttgagacatcttacatgacattcgcaccatgtttcagaatataatgcttcagctgtattcaaatttcataagcataacgtgtggattacctctttgtaaacatcaattggaagaggcaatctaagatatgcaatccattctgtagtaaatgttagcttcatctttttggcaactgtggctgctgacaatacctatatatgtaaaatgaaaattaagtagacagtcaaaaaagacaaactacacaaacacatacaagagcttttaaatgagaaggaccttcaatatataaattca

SEQ ID NO: 165096 - DNA, 271 bp, Glycine max
  unsure (1)..(271): unsure at all n locations
aacttcatgaccccattacatagctgatagcttgaagatgtgaagccaaggacccatatggcttcgcttacctctttttggcttttagtacagatttggttggattattgctatgtgggtgggaatggcaagatcttagaaactagtaaccagattcatttttattatataaataaatcttttctctcttcatcatctataatctctgctgctntatgcgtgtgtctaaatcacaattagccatccccctcaatacaatagcatgaatgat

SEQ ID NO: 165097 - DNA, 419 bp, Glycine max
  unsure (1)..(419): unsure at all n locations
ttaattatactataagaaagatgatgacaactgaacccctccaattagcaagtgtattttatactttttcnttntattttggtggccctgaaaacaaaaaagattgatttatntcgaagttaaaaaactattntttaaaataaaatgaagcgtcaacttattttaaaaccgaattacattgttaatgaaataaatagtaatattatataaaatgttaaatattttttttactgaataaaatgttaaataatataatgcttaactttaaaagaagataattaaaaaaaggtaaataacacgcacaacagtgtaatcaaatntggtattctattatagaggatgttcatgtcataacgcccaactaanataaataaaaggtgaaatcaaattctctaaggaacctgtggtntggatcacac

SEQ ID NO: 165098 - DNA, 332 bp, Glycine max
  unsure (1)..(332): unsure at all n locations
gggagaattgatggacttctatggtacaaggatttggggaaccatctttatggggaattctcaatggctgtggttcaggccaatagttcattagaggatcgaggtgaactagagtctggaccattgtgttctaatcacttgggtcctcaagggacctttataggtgtttatgatggccatggtggaagtgaggcctcacagtttgttagtgacaatctcttctgcaatctcaaaagtatgcttctcatcttcattatgaacatttagactcaatntcattcagaatattattgcttctctagatgttcttctatgcagaatttcaaatggat

SEQ ID NO: 165099 - DNA, 460 bp, Glycine max
  unsure (1)..(460): unsure at all n locations
tgtctccccattctatcacntttagtcaccaaanaaataaagaaagaaagtgagaacatgtgtggcaagggtgggcagcagacctccccttttgaattgtccctgtttgggcctatctactgatacaagcaacttaatatatttggtagttagtaaaacaaattttgtagtgataatgacaaaaatcacaacccataaaagatcaagattcanagccataaacaaggattcatgaaccgacaattggttaggtgaagacacatgaatggttttatattatatttctaacatggctcctctcagttcttggtttaaagcttggagaatgcactggcccacctaccttgtgctgaaatggaacttntctatcggaagaaggggtggcacgtattgaactcaagataccatgtaataaaccaataatcctaaaagtttaagctattaagggaaaacacacatg

SEQ ID NO: 165100 - DNA, 243 bp, Glycine max
atcatgtagtttccaacctctttccacatcatcattgaaacatcatacaatatctggccactctttctacagaatcttctgatgctttatactttgatgtttctaaaagtcttatatcaacactgtttctttcaggagaagttctttgttcaacaactagtgttatacatcttcttcaatctcttctccctttgccagaagaacggaggactaatcgcctggattcttttgagtcgctcttct

SEQ ID NO: 165101 - DNA, 221 bp, Glycine max
  unsure (1)..(221): unsure at all n locations
catatatcgagacgctcgaaattgaatgttgaatctctgagccaatccaaacgacaataactttntactcggatgtctgattgagtcccgtaatataacgagactctcaaaattgaatgttgaagctctgagctaattcaaacgacaataactttttactcggatgtctgatngagtcctgtcatacatcgagaacgctcgaaatgaatggtgaagctctg

SEQ ID NO: 165102 - DNA, 399 bp, Glycine max
acattaatgtgagcgtgtcgaatattacgggactctatcatacttcctgagtaaaatctattgtcgttcggattggctcagagattcaacattcaatctcgagcgtctcaatatattacgggactcattcagacatccgagtaaaaagttattgtcgcttgaataggctcatagctctaacattcaatttcgagcgtctcgatatatgacaggactcaatcatacatccgagaaaaaagttattgtcgtttgaatttgctcagaggttcaacattcaattttgagcgtctcgttatattacaggactcaatgagacatccgagtaaaaagatattgtcgcctgaattggctcagagcttcaacattcaatttcgagcgtctcgatatatgacgggactc

SEQ ID NO: 165103 - DNA, 366 bp, Glycine max
  unsure (1)..(366): unsure at all n locations
gataccatgcaagaaaaccaagtccagcaaaggaccctgcataccaatagttggaatatttttaacataatttattataaaacgagaacaaaaatatacataggtctcacttacaaaccccaaatgcccaataacaaaaaaaaaaaaaaataataatgcaaattctagtcctgatatagttgttagtcatgcagcagacaaattaaatttccaagggtgagagaccaagtaagtatttccaaaagcaccaaatccttcaaacttacaaaaatggtataagataaataaataggtatttaattaanaaaaatcattgaacctgacacattaatgaaaatttcaggctatgtaactattatatttccc

SEQ ID NO: 165104 - DNA, 461 bp, Glycine max
  unsure (1)..(461): unsure at all n locations
ntaacctcatcgtctctcacagtctntagatgtgggagccaatctaatccttgtgttcggactctcagccacttatgatagccgccgatgatcccattactgcttcccctaagctctctgtcctttcttcacgccgcatcctatgccttgcgaactccttggagtaccctcgcgttgtggtcactgaaaccccgtccgatgaaaggcgtgatgctttcgtctgatggcacttctctcatggggtagccaagctgtcttatggcgaggacaggattataattaatacaaccccttgttccatcaagggaacatttggacatccttcgtatgaagatagaatcctaattcttccttccttcttggagaanaaggtgtgaaaccagccacacatagagagccagtgcacaacanacaattcttgcgccactctttttcacctcccggtcgaacgtgtcatacat

SEQ ID NO: 165105 - DNA, 380 bp, Glycine max
gtttggtggaataacgactctcctacgtacaatcccacacaagtgatgctgggaagctaacgaagacttcctagcacaacgccaacactaaaagtgctattgtatcgttgaacttcttaacatattgaaattgaaattctcatgtgctatgctattagatacttctttattataatgaggcactcaggttctatggaagtgatggcgtaacacgtcacatgcatcacaatacataataggcaacagacccatctcacgtttgactcttgcacaaatgttcaagtctcaggcattagtgtttcatgacgctggagatagccccaacactgatggaattcactgacaaaattctcaaaatgtgtgtatctatagtagcacac

SEQ ID NO: 165106 - DNA, 375 bp, Glycine max
  unsure (1)..(375): unsure at all n locations
gtcgtcctaattctctttttttgantacctctcaatgagctggtgaagaagaatgtggcatttacctggggtgaaaaacaagagcaagtctttgctttgctcaaagaaaagcttactaaggcacctgttctagctcttcctgacttttctaaaacttttgagctagaatgtgatgcctctggagtgggagttggagctgtattgtacaaggtgggcaccctattgcttattttagtgaaaaacttcatagtgccaccctcaactaccccacctatgataaagagctntatgccttaataagagccctncaaacttgggaacattacctttgttccaaggaatntgtcattcatagtgatcatcaatcacttaagt

SEQ ID NO: 165107 - DNA, 433 bp, Glycine max
  unsure (1)..(433): unsure at all n locations
gtaaaagtatgatatatcctaattagaaaagcagtaaacgcaagcaattaaaagtgacaacagtggtttaaaagcgttgggtctttctaataaacgagttgatgcatataaagatatttctctaattaagaatgttcttgtgttctatgctgaagactaaagtactaaacctcgatcccttgtaagtttagactaatttaaaccaagcttcatccttacatccctcttgttggactaggcttaatttaaacaacattataatcacatcataattaaaaaccaaaaatcctgcaatctatccctagcaatgcagttatctagccctactctatcaagttctaaggaaacagtacacttnccagtgctaaaagtccttacagtacacaccaatgggtgatcagaccaaaaagcatgcacaatgaagcatcgatag

SEQ ID NO: 165108 - DNA, 398 bp, Glycine max
  unsure (1)..(398): unsure at all n locations
tcatcctgtgggacaattaanaccaggagataatagggtggtattgaagcatacagtggacttgccaaaataaattattttagccactttcattataagaatcagtgtacattgttacactagactaattgcttatctattttccagtcttccaataatctaatctaatttctaacaacgttcattgacttaaaataacctatatatgaaacaagagtaagaacagactaatacctttaatagactatgcaaaananaaaaaaattcaaaacaagtatatggctcatntatgtaggggagtctatttaagcaaaggacacacgttattacaatataaatgtaacaccaccttatggcacctgaacaatntctttctcattagtggatgacgaaatcta

SEQ ID NO: 165109 - DNA, 307 bp, Glycine max
gtacaactagcttgtctagaatcatataataatgttgtttatatatataaatcaaatgtagcttggacatagaattatgtaataagtagttgattaacaacgtactcataattaaagcagggtatttggtattgtctaaacgtctaggacaccaattgtaactatcacatgttcctattttcggtacctacactatggtagtatctatttatttattatgatatcgatatggagcattgattaattctgttgctaattaatcttgattgaaaaatgtaactgattatcctaatgtgaccttttttct

SEQ ID NO: 165110 - DNA, 360 bp, Glycine max
  unsure (1)..(360): unsure at all n locations
tatagtcaacctgtaacgcacaagttaagcattatacacacaaaatgtaacaaatgcgcaccttgtttcatcacacatggttcccttgaaatccttaactctgttatgggtaagcaagtgtgcttattggagactcgtctntattggcaagagtggtggtaatagcttagggatgcttggataacttttcataacattttagaagaaataatnaataagcatttctagactaaataacacacttaaaaatagcatttaaanaattatatganaaaatcttacagaaaaatatttcatttcttctttaaaaacaatatatgtcgttagttgtaggcaactaaaaaatatgaatattataca

SEQ ID NO: 165111 - DNA, 419 bp, Glycine max
  unsure (1)..(419): unsure at all n locations
gttgggtctttatgtgacactttttgtattaaggactattttactctatttgttcttaactgtagtaaatgctcttccccatgcaactagaatngtaatcaccagttttaactggccatactgcnttctatcttagaatttggacttagggtctaacttaaccccacaataccagcttattaggtgaggagtgcccaagctttataagtactacttaggccttatctctagttgatgtgagcttcgaaccccctaacagccgatatcctgacgattgtacactattacgctctacttaaccttctgggtcaaccccttcatatgtatccctttccaagacattagcaactaactctaataggccacaatttagttgactttctaacataccctctcacacctagggatattggcctgga

SEQ ID NO: 165112 - DNA, 373 bp, Glycine max
  unsure (1)..(373): unsure at all n locations
atgaatctcgaaggtgtagaccccgaacccacagtccaagacgagttatgagaccactctacccaaggaatgaatctctcccaattccttggtcttccatggacaaacgcacgcangtactgttcaatcacgcgaatgagcacctcagtttgaccatcagtctgcggatggtaagctgagctcattcgcaggacagtgccgcttaatcgaaataaatcctgccaaaaatggctaatgaaaagtgggtctctgtctgagactatgctctgangaaacncatgaagcttgataacgatgttcaagaaaaagtgaagcaccatgtgagtngtatgtgaagtgngtaaaagtcccaagttgaattcctttgaaatct

SEQ ID NO: 165113 - DNA, 374 bp, Glycine max
  unsure (1)..(374): unsure at all n locations
cttattacagcacctgcacctatgttgggtgaagtcttcttgagagcaaagtctagtgcctctgccggtttatgcattttcctcttagacattatactcattgattaacctgcaccaatgtaagaaaaacacttcaaatgaagaaagctaagataaatatttacaaagacagaaccataaaaggaaatggtataatatttacctggtgtgttaaagaagcatttgatcagaacatgagtgcactatngatatagattctaaatngctcaagagaaacatcatncagtaaaagcanaagcgagcgtgtgtcatatgaatgcatagaataaataggctgttgtttaatgattgttataaagagttcatagagtatc

SEQ ID NO: 165114 - DNA, 323 bp, Glycine max
gatcggtcatctatcctggccgacgccgactgtcattcttttcgatcactatcggtgaataatatatttctgccgaggtgggctaatgttctccttgccgaatatatgagaacttgccattttcggccgaaacgaaacatctgttgagctcgcacgaaaaaacctagccgacctacattgtaagtttttcatgctacaccgaaacaagacaaattcccctgccgtgagaaaaaacattatgggccaacgagcgttatttaaaaataaaaaattgcgcaatgtcggctgaaaaatatcattcggtgccatttcacgaccgatgt

SEQ ID NO: 165115 - DNA, 378 bp, Glycine max
tgaccgtctgtaagcttattttcatacacattacgcgcgagatctagttgagttagtggataaaaaccataaacaactgttcacggagaacaattagcggtgccatgaacagatctattgtgagcaaattcgacatgcggtaaacaagcttcccacgtttttaagttatttctcacaactgtcctaagcaaagttgccaaagtactattaacaacttccgtttgaccatcggattgtgggtgacaagcggttgaaaataacaatttagtgcccaacttgctccacatagtcctccataaatgcaaatcatctagcctaggtctaggatgcctatatttaatggtgatgatattaatggctctacaatcagaacacatg

SEQ ID NO: 165116 - DNA, 265 bp, Glycine max
  unsure (1)..(265): unsure at all n locations
tgcattgatcgtatcccagtaagagtgtggtccttaaattttgagagaaacgactatcatttagtactgattnttgcatgaatctctaaagtatggactgaatgcatgaatcgaggattgtgaaggccatgttttgatgtgatagccacttagccaaaaagctgaccacgtgcttaaatgatntatccctngcacccagtttaagctgaatggaatattgattgatngaaccttgagcctatacagtggtatctcctactacctt

SEQ ID NO: 165117 - DNA, 456 bp, Glycine max
  unsure (1)..(456): unsure at all n locations
tctattatnttattcaagctctgccacatgtccctatttgattggagcaaaaagggcccactttctctttttgactgtgacccatactcagtcacaaaagtgagaaaaatctgacctttgaaacgttaaaatcctacctcggtttgcgtgccgtttctctgattccagtttctcgcgtttctctacatccgccggggccagttttcgaaagcaagcaatatatatatcaaaatgctcagaataaaaccccgagcgtggttcagagggttggtttcgttaaatttaagttgcacgcaaaacgatgattttaaactaattaattaagaattaacccataacctcccagttatggatttctcttccttaattagtctaacccgcgtatcttgcccnncactattctatntcttaccagaacatatctatacatatacactgaataatacttttatatat

SEQ ID NO: 165118 - DNA, 250 bp, Glycine max
  unsure (1)..(250): unsure at all n locations
gcttaaatgtggtagtttcttcccatgggtgttctttattaactacccaatngaagcatgaattgattccttttacttttagaccatttatcattttttttgtttaaatattnttttcttgcaatttagtatttttttttattttcgtccttgtaaaaaaataatcttttaatgcttacaaaatgtgctgatttttattttttccttaaaatgctttagataattgttttttactttttccaaacacttt

SEQ ID NO: 165119 - DNA, 383 bp, Glycine max
  unsure (1)..(383): unsure at all n locations
ccagtccccaacgtaaacctgaagcataaaatagatatgatgaaactaggcaagagattgaaataacaaaggatccaatttcaatggctaacttttgtggtgtggttctctcaaacttcttatcgattggtatcagagggtttcaccatgttctcaactgcaaacgagcagtggagatcgtgatgccgacattgcagtgttcacttggaactaatctaagtgctgcaaagtgagatgagatgttnggattcaattgcaagataagggacttgaatcccacattggaagtatgggattctggtatagggttagaaagccctgtctccccactacaactgctagttttatcatgtgggttctccaagttcttatcatgtcgtata

SEQ ID NO: 165120 - DNA, 297 bp, Glycine max
tccactctttcatcatgttgagactctggaagcccaacaggtcttggcttttcaatgtactctgaatagaattcaatagcttcttctgcaatgtacctttccacaatagatgcttcccgatggtgtagattctttgtataccctcttaagatcttcatgtatcgctcaaccgagtacatccatgacaaataaacaggaccacaacatttgatttctctgaccagatgaacaattaagtgaaccatgatgtctaagaaagtaggatgaaaatacatcttcgactaatacaatataatg

SEQ ID NO: 165121 - DNA, 429 bp, Glycine max
  unsure (1)..(429): unsure at all n locations
tctggtgcttcatcattcttctgtagtttctcattgggtatgattggagtatcaacaggtttgcaaccatacatcttgaatttcttaagtaagccttatgtgtatttcttttgcgagatgaatatcccttcatttctctgacttacctctatgccgaggaagtaactcatcaaaccaaggtcggtcatctcaaaggtcttcatcatgtcttctttaaactctatcatcatcttagtattgtttcccgtgtagataagatcatctacatatagagagagtaagagagtgtactgcccttgagacttgatgtaaagtgtaggctctctcttgctcctcctgaatcctcgatccatgaaatactggatcgatcttctataccatgctcgaggtgctngcttcaaaccgtagagtggctttcttagtcttaac

SEQ ID NO: 165122 - DNA, 130 bp, Glycine max
  unsure (1)..(130): unsure at all n locations
tagccttgtttccctttcccttgtttgaagctcactacaagccctaaatgaaaaaccatgatatcaccatatccttaaggaattntggagctttggaattggtttgggaataagtgtggggggggggggg

SEQ ID NO: 165123 - DNA, 399 bp, Glycine max
  unsure (1)..(399): unsure at all n locations
ctgtcactgcccttctttctctcttgnattctctatatatatgcttntttaactgcaaaattaatatatatattaagcaataaatagtaccagaggtattacaggatagcacatgagagaggatctcctgaaacagagaacaaaaaacagaaatacatttgccctacaagaaaccaccaaaagcttgaccctacagaccacactctaattaaaagccatagacatagctgaggaccattgatggaaaggaacattaaagtccttttcccgccccctcagccaggaccaagtgagaaaanttgtgttatccaccaacttatagatgtgaaaaggctgattatgaaagatgatatcattccggagcttccatattaaccttgtagctgctatccaccatat

SEQ ID NO: 165124 - DNA, 181 bp, Glycine max
  unsure (1)..(181): unsure at all n locations
actgacaacatctatcatacttctctccatgttactgagtccttcataaaaatattggagaagaagctgctcacaaatctggtggtgagggcaactggcgcataagtttttaaatctatcccagtattcatatanggtctctccattgagttgccctatgcctgaaatatcctctctgatg

SEQ ID NO: 165125 - DNA, 452 bp, Glycine max
  unsure (1)..(452): unsure at all n locations
ngaaggggtgcagtccaccatcttttcatagtagaatactggttatgtgtctactatcattatcattttttctctgtcattgaggtgccacttgagctgccaggtctctccacctttgggcgtattctttgaaagatctgtgcccctttttgcacatgttctgttgttgcatcctatccgaaaccatatcaaaactgtactgatactgcctaatgaaggcaaccattaggtccttccaagagtggactcgagaaggttccaggttagtgtaccaggtaacagctaccccagtaagattttcttggaaggaatgtatcagcagttcctcatcttttgcgcatgcccncatcttccgataatacatctttagatggttcttggggcaagtaatccccttgtacttgtcaaagtccagcaccttgaacttgggaggggtgatgatattgggtact

SEQ ID NO: 165126 - DNA, 316 bp, Glycine max
  unsure (1)..(316): unsure at all n locations
aacagacctgttcgtaaatgttttaaaagaagccccctacagtaaattttccttcaatattcacttaggatcaacatttcagccagcaattcaatcgccaaaactcatattcacaatagacacaatcattagaaaacttctaaagtcaagaagagggtcacaatcaaatactctcttaagaatttgcatganaatggtnaggactaattaacatgaaagaattgactcanatcanataatagggctanaagaatttcatacacttcatgaacaatgagttagacaaagaaacangaaaaataaatcaacacaacat

SEQ ID NO: 165127 - DNA, 321 bp, Glycine max
  unsure (1)..(321): unsure at all n locations
tttgtntctttctcaccaaagaaaccactgtgagagttgttgcagttacaagaacaacttcatcttctaacccaacaacaagtcctgtttttatatgatgctntgttntggtggaagaagaaggaacaaccaaaataccttgagactgttcactctggctcaagggggtggtagaagatgacgtggcggggccgaacaaatgtgaacgagggtcgcactctttgtgaacaatctccccgcagagaccggggttacctgaagcgaaaaaacaaaaacaataagacacccaaaagagagaataagtgaaatctcggtatcatg

SEQ ID NO: 165128 - DNA, 177 bp, Glycine max
  unsure (1)..(177): unsure at all n locations
tatgatactgacaacattgcactcttttgctgcagacctcgtattaaaagacagaattctgtctatgatcttgctcggcaacgcattggatgggctaactatgattgtaagtgtcacctacactacactcgagacacatagcgaacagcatgtgtaaatcacgacttctnttactta

SEQ ID NO: 165129 - DNA, 348 bp, Glycine max
  unsure (1)..(348): unsure at all n locations
tcaaatagaagacggtgaagcacaggaggcggatctttcaaaagagggagttcaactttgccatcaccataacaaagataaaatttacggattgtagtgtgttcgtgtttccatgttctttcttgataccacatataagcttgacaatgtgtacattggattattggatccccaataccaaaatatcctacaatgaataaaactgatattaaatattaagactctaattaaattgataaccaatatacaatatacaataccttatagtaggtcatcaacaaanactgctgtgggattggaaataggtatcttcctacaatcacattatttcagaaataagtctgatat

SEQ ID NO: 165130 - DNA, 408 bp, Glycine max
  unsure (1)..(408): unsure at all n locations
atgatggaaaaaaaatatgtgttcttctctgggtgtgatttcatatgccgggtgagtctgctcattggccttaaaaagactactacaaaatagccttggagacctatgtagtgtttgggaagccatgaacaacatgatcacgctgcaacacactaaaattaagacatcttntgagacaagtacacatgtggttggacatatttttaaagttaccttatacaagagactacttggcatggtatcaaggtatgctttaaattagattgctgctgagtntgagcgcgtacattatgctggcaaanacccctctcgttgtggatgtgtgatganaactactcactgtctctcatgtgcatgtgagctatccacatatgttgtcggaccataccacttgagacattatatgtt

SEQ ID NO: 165131 - DNA, 209 bp, Glycine max
cttagggctttttaggtttttactccttagatttaaacttagatttaaatttagaccttttaaaactgtcctgggctatatgatttaacctaatatttcttttctattgcccttttttttctactctacttttagctctgggaccttctgactggaggcctctttttcctgttctgaaactagcttattaacacttaccccactctgga

SEQ ID NO: 165132 - DNA, 455 bp, Glycine max
  unsure (1)..(455): unsure at all n locations
caaccacaatggtctaatgtccccataataacttcaaatggaatgatcttgatctggtgactcagaaacacactctccaatcctncattcccagcccacatcttgcctgtccaacctctaaccctgcttgaggtgggttgttctccttctcagccgcggtcgccgtggccgtgcctgtcgtgctatccgtggagccgctgctggcgcgtgaggaagatagtgtaaaggaggatgtgggagggctgcttgttttccttttgcggtccaaaccagaagagggctcaatgcccacatagcaaaagttttccctttgggggttccacctttgcagaaattgctcttgctgtggaagtaacaacgaatctgaaacagcagcagcagcaccagaagcaaaatctagcaccccgttccctctaaattcctgatagggtaggggcacggccttcatctaaatc

SEQ ID NO: 165133 - DNA, 231 bp, Glycine max
tattatgatgtaccaaggcttatttatagaatatagatcatcaatgaattgtgtatcatgcttatcaatcgctgaagcttgattggtatctatatagaagaagtctaattattattaattatctgacggcaaaagtccatttaaaaatgcaataatgaagagaaaaatattcactagtgaatcttttagctcgcaaaagatgtgacaggcggcagttgcaacgctgacatg

SEQ ID NO: 165134 - DNA, 454 bp, Glycine max
  unsure (1)..(454): unsure at all n locations
tggagacagacaccttttgaatggagaagccagnttctttgtgtgtgtgcagaagctngaatcaagaatctgtttaagtttaatgcagcatccctaggttgcattaaatctcattacaacagcatcactacatccaacagatgggaagtcacaaagacaatgggtgggagtggagctttatttggagaaggccattcttttgacaatgaaattgatacggctggtgtttttctcaatgaggttcaggatatggccattcaacaacatggacctgatgtgtgggaatggactgctgaccctacaggtcagtatacagcaaacaatgcctataaggtaataatgggaggagcagcagcaataacccacgaggaatgttttgtcaaattatggagcatataggttccaagaaaaatagcaatctttgcacggagaactaatagaaatagacttccac

SEQ ID NO: 165135 - DNA, 270 bp, Glycine max
  unsure (1)..(270): unsure at all n locations
attctgcatgctatctaaacaaataatccctggcattcttttgctctagtaacatctgtgcataatgcaaggaaatgtattgcaaaagaaaaaactctttccccatattaaatgcattagagaaacttcatacctccattgaaaaccctcaacacaatctcatcaagggcagaagttgatggggcgcatactaacactcttacacgatacttgcgatntgaagttatagcttcaggtntctgatacaacccatcattagagaagatatta

SEQ ID NO: 165136 - DNA, 469 bp, Glycine max
  unsure (1)..(469): unsure at all n locations
tcacgtggtcgtggaaatatacatataacgccgcatagnaattttatacgtctttataagagggttaatcataggagaaattctttagtacctttatgataaataagattctctaatgtgtgtgtacgtactagcacgtcttaagaaaaaaaatattgaagaatatctatcataaaagaatgtaatagctatctaatagtttttaattatatctgagtaatttaatgctgtttttcaaaatcggcaaagataaagaactttatagaaattggtaccagaagtaccgaagagcattaatattacaaggaaaaggaccatggaccatcacaaaatgcaaggttatgccatgccatatttatatgaaataaatatattagtattaattaatatatacaaaatacctaagtatttttagtattcttttttaataanatcgaactgtcacttcacttctcaaatatatagtaac

SEQ ID NO: 165137 - DNA, 248 bp, Glycine max
  unsure (1)..(248): unsure at all n locations
gatgccccacattatttccatgacacaaatgcaaaaatgatgatttggaaacttcatgcaaaactggtcatgcatgcacctatgtggacactcaagtgtcaaaattttatggtcatgtgatgctagggctcangattcatttcctctatttaaatcaacccaatgtttcaaaatatgttcttttatcaatntgtgcattcatccgagtccatttcgggtatccggggaaatttcacagcattcaccct

SEQ ID NO: 165138 - DNA, 430 bp, Glycine max
  unsure (1)..(430): unsure at all n locations
tgactcacaccaaacatgatatgttagcatgctntcaacatttttctttattaataactaccataaggcataaacctagtaaaactacccatcatatctcccaaaacccaatacccataaaaatttatgtgagaagaagtctacccaaacctgaaatttgaagtcccacaatgtagaggtgtgcttcacgactccgaaaatggcttcctttcgcgatttggagcagaaatggtgagcaaaggttggagctntgatggagcttcaatggtggaggaggaanggagaaaaagcaacgtgagaatgagggagaaaagctttngaattctnttggctgagtgagtgaggagagagagaacgtggctttgtgtttttagaaaaggctctctctctcnttattctttaaaagctgcccacatgtcttcttttgagt

SEQ ID NO: 165139 - DNA, 347 bp, Glycine max
  unsure (1)..(347): unsure at all n locations
cttcttagaacgaatgaagtggtattngatgtcaataatgtaacaccccgattttgcatactttagaatgttttaataaaaatagtaagccactactacaaaatatacatttaacatcgttactttaacatcgggtttcgataaaaccaatggtaacaaaaacacggtggcaaaattgtaaataatgtgactntgttaacatcggtttttcgaanaaccaatgttaactatgtaatgcttacgttaacatcagttttttttactaaaaatcgatgcattcaattttagtaaaaaccgatgttcaaacctacatttaaaaantattgaagtgtctctatgagccatat

SEQ ID NO: 165140 - DNA, 376 bp, Glycine max
  unsure (1)..(376): unsure at all n locations
tcacaaaatcatgcgcaaatgctcttgaggcatttcaccgatctcttggtgggcgcatgnttggacatgaaaaaatgaggcacggnggcaatgcaacatgcccatgcatttcagaatatagaataggcctacaaccatcccctacgacccccaattcaagcaaacaatcatggattcacatatgaattgcttcacgaattttgcaaaaaatgagcaactaaagcactaaaccacatcaatggagagccaaataatcaagggaaagtgcacttgcttgtagggagtgagcaagagtgcaaaaatggaagcaaaaacgcaaaaatggtgacttanggctgcaaaactcgtgaatctcgtagctttcatttntttgaat

SEQ ID NO: 165141 - DNA, 247 bp, Glycine max
tctaacttcatcttcaagatgtgcggaaacatacttggttaaatgataatgataatctcatatgttttgaggttagatttcgtagatagataaattatcttcattgggtaaaacttcttcatcagtatagcacttaaagggttcacttctaccatgtgtacacgcgtacccattgctaccagaattgaaatatgcagcctaccgtatatcgtacaaagctctacaataatgccacccaccaacagcc

SEQ ID NO: 165142 - DNA, 486 bp, Glycine max
  unsure (1)..(486): unsure at all n locations
tataaaactaagctatccttttgaaattcagttttggaagtctttntacaaggtttttggctatgattntatttaaataattcatatgaacatgtgcaaatatcctatgccaaagccatccatcaccattcttacttaacaagccatttgattcacttatggatgcttttctagatctaacatgtagaaattatcaagtctattntctatcaacttcatgtcatttaaaggattacaaatcatgcaaaaactcaaagtgaaggaaatatcaaagccttatcacacaattgacttatgctaggcaaattgtgctttagaccttccacgtatagaacattttcaatacaagtagtttatgaattacccccattaccaatgcctagaatcttcccttttgtgtatcaccatagggaacacaaccctctttgttttcatcagatagaaaacttttgactgtcttcgtcatgtgcctttagacctacaaac

SEQ ID NO: 165143 - DNA, 380 bp, Glycine max
  unsure (1)..(380): unsure at all n locations
tcagagtcacctgccgcatgcaagcttanggatgatacgttaatacagaaatgttattttttatcaatgcaatgaatgcatctgggatccaataaacagttgggtgttccgtaattaaacactggtaataaaagaaaagctcccacgatcattgatcacaggaataggtctatgacagaggactgttaagaattaagaagatattttgagtacagaaaaatatgcatggcgcataaatataccaatgtctgaaagctgccttaattgcgatcacccctaacccgcctcacttgcagcctctntgggggctgccttaattgaatcctcaagggtgatgtntaatcccacattgactagatatggcttaaataaagcttata

SEQ ID NO: 165144 - DNA, 376 bp, Glycine max
  unsure (1)..(376): unsure at all n locations
taacattctcaattttctttacgggttggttgtatcgttgtgattaaaaactcatttgatgttatgatctctataggagactcataacttgtggtccatgcagattaatttctcatcttgttattcaataatttgtagtgtttatttaacttgtacanttttattagctattattgctaagcatgaaatgcatacataaagctccaatttcttgtgtcttgggggtttaagaatggtaatatttttggcctagacacatgctaagggctaacataatgtgcctagaaaatattctctaaatngcattgtgatttcatgccccataacgtgcttcatcaactaaccaaattcgtactcaattttccagcattaaatt

SEQ ID NO: 165145 - DNA, 315 bp, Glycine max
  unsure (1)..(315): unsure at all n locations
gttctcagtataaaaattagtagtggaatgctcaaaatcagaatattcagaatcactagcaacagaatactcagaatgttcaaaatgcacagaatgatcaggatgcacactatgcctaactaatctatgaaatgtcctatctatctcaggatcaaagggttgtaagtcagatggatttcctctagtcaaacactataattagcatgcacaattagttgccttcttatgcaagtaacagtgtaggttngaactacagctaccatcaaatgatgtccaaatgacttannaatttgtgagcaaccttataaaatgatg

SEQ ID NO: 165146 - DNA, 374 bp, Glycine max
cgaagatgatgatctcagtctatttgtaaaagatcaacaaatttctaagagtcaaaggaaatcaaagaagaacaaatattaaatcaaagaaaagggaagaagattcatcctctatttcaaaatgttttgaaggcaatcagcctggacatctgagggttgattgcccaatcttcaagaaaagaatagagaaatctgaaaagaaattatttaatgaaaagaagactaagaaggcctacattacatgggatgacaatgatatggacccatttgaagattcaaaaaacgaagttgtaaacctgagtctgatggccaagaattatgaaagcgatgaagagatgacatttcagaatcattagaagaaatgcatattcatg

SEQ ID NO: 165147 - DNA, 364 bp, Glycine max
ttcctgggatgggctcccttctttatcttgcttcgctgatctcatggggaaatcccattgaggacctagtgagctcaagatccagcctctatagaagcttcacaagcaagcttccatcacaaaatacctggaactctcgctaagcctggttctgggccagcttagcttaaataatgcatcttgattacagaggggtaggcacttagcagttgatggatcgcttaacgctactttggccgcaaggaattgggcttagctggcatgagtagcacttatctcaatgaaccctaatttaggccgcatcaaaatgggcttagcggcgacgtctcgcgcttagccagagaatacaatgcactaagcgagc

SEQ ID NO: 165148 - DNA, 354 bp, Glycine max
  unsure (1)..(354): unsure at all n locations
atctttcatggagtgggtaccactacttggaaacccgcatgcaaatctttatagaggcaatagatttaaatatttgggaagccatagaacaaggaccttatgttccctctataatagccggaactgcaacaatagaaaaacctaaagcagattggcctgaggaagaaagaagaatagtacaatataatntaaaggccaaaaatattattacatctgccttangaatagatgaatactttanggtttcacattgtaaaagtgctaaggatatgtgggatacactacaagtaacacatgaaggcacaacanatgttnaaagatctangataaacactctaactcgtgaatatgaac

SEQ ID NO: 165149 - DNA, 485 bp, Glycine max
  unsure (1)..(485): unsure at all n locations
aagctacctantctataaatagaagcatgggtatcttttgttgtaacttcgatgaattttagtcttgtgagacatactncacagttccacttctctccctcttttattccttcaatttcgcgctcccccctctctctttctctccctctttcttttcctccattgaagcatccttccaagcttcttatccaaggctcatcttggtggtgaagctccttcttccatggcttattccctagtggatggcgcctcctctcacctcttctcctttgtcttccgctgcatttccatggtggaaaatcaccattaaaggacctcattgaagctcaaagatccagcttccatagaatccgcacaagcaagccttcatcaagtggtaatcagagcacaagagcttcaagtaggcgctccttatacctccattaattatttgctttacctgctctgcatccgttttcttcatttgctccatgtattgcgcacat

SEQ ID NO: 165150 - DNA, 183 bp, Glycine max
  unsure (1)..(183): unsure at all n locations
cccccccccgcacctccccacgccaccctcccccnccccaaggatgaccgtcaccccaanacgcgacagcacacaaacccgaggggcaattaaaaaaacgagccagccaagcccgggcggccagcaccccagcacatgacaaaaagcccaccgagcacaaaaacccccacgacaaccaacgag

SEQ ID NO: 165151 - DNA, 415 bp, Glycine max
  unsure (1)..(415): unsure at all n locations
aaaaatctaaaattcatacatcttaggcaaataaggcattgctacncccaacattattgcattttgattccatctttggacattcaaattgttgtttatttttcctgttatcttttcctttgccttagtctaaatttcaaacttacaattcggtatctctttcttcttttgtttctcctcatttcttaataattggatttgcatcacttaagtacaaccaaagtccctctggattcaacagttgaacttcaatttcaatctttactacttgtgataaaattaggacacttgtcaatctattaacaagtntntggcgctgttgatggngactttggttttcgtacttggttgttacaaatcccaatttgagagcaatcattctttatttttcatcttttaattnntttttcaaaaa

SEQ ID NO: 165152 - DNA, 369 bp, Glycine max
gtcatggaagaaggagcttcaccaccaagatgagctcttggataagaagcttggagaggatgcttcaatggaggaaacgacagacggagagaaagagagaggggcgagaacgacattgatcgaacataaagggagagaagttgaactctgagttgtgtctcacaagactctcattcatcaaagttacaacatgtgctgccatgcttctattcatagactaggtagcttccttgagaagctatcttgagagaacttccttgagaagcttctttgagaagacttctttgataaggtatagcttacctacacacacccgcttcataacttaggtcaccgccttgagaaactcccttagaagattcctaacaa

SEQ ID NO: 165153 - DNA, 381 bp, Glycine max
  unsure (1)..(381): unsure at all n locations
agagctatctaccacccctatatagctaagctcacccaatgccaaaacatgaaatacaaaaatgtcttactcaaagactactagaatgccccgaatacatggctaataccctatactactagaatgactaataccatatactactagaatggccaaaatacaaggcccaaacgaaggaaaaatctattctaatatttacaaagataagcgggctcatacttagcccatgggctcgaaatctaccctaatgctcatgagaaccctagggccttnccttggatatctagcccaatctacttggagtcttctatccaatgcccttgtggggtagattgcattagccaaagcgttatctaactactccagataactactcaccta

SEQ ID NO: 165154 - DNA, 366 bp, Glycine max
ctaagctgaccgactccaggttttgcttccgctaacagttttcccttttggtcaccctatgcgccgcgagagtgaccgggcatacccattgtgcggtgtgtcctgttatgtactcctaaatgctccagtatgatttttcactaacatggtaccacattgcatatatgtttgagtcttagtataattcgtgcattacgcttgtgtttgacttccattgagttaacaattatgggttgatatcactttctggaatgtgtgaacttgaatggatgcgaataatgtgtgtgattttgttaacgatgttgctttaagtattatatgtctacatgacttgacgttctatatatatgaatgtgacactcattc

SEQ ID NO: 165155 - DNA, 369 bp, Glycine max
  unsure (1)..(369): unsure at all n locations
tctagcgacagatacaatctaggttggagaaatcattctaatctgagatgggcangtcctncacaacaaccatagcatgtccctccttttcagaatgctgctaactcaagcaagccatatgttcctcctccaatacagcaacagtcacaacaaaaacaacaagcaattgaggttccttctcaacccttcttagaagagttagtgaggcaaatgactatccagagtatacaatttcagcaagagacaagaacctccattcagagtctgacanatcagatggggcagctggctactcagttgaaccaaattcaagtgcctcaaccagtaacagcacctgcacctaaacctatcaagcttaattctacacat

SEQ ID NO: 165156 - DNA, 389 bp, Glycine max
  unsure (1)..(389): unsure at all n locations
gagatcttcacttgatcttcgcttgatgaanatggtcgntgggagcatttaaagctagcattaaatgtgcgtcctttcttcatgccgaaagtcatctcttcaatgcttgcgtgttagagaatagtagccggtagtcacttctttgtgttagagtaggtcatgcatagcagaactcttcttttatttttttagagggtttgacagattctagaagaatattctgcaaataaaatctcagataagatattaaatgacgtcttaaatatcatcacacaagttgtatcaaattatgactccatctgcttattgtctgacacatcagatgcatactttattagatacgatatgtcatagcataacacacaactttaaatcttgcattggtatat

SEQ ID NO: 165157 - DNA, 400 bp, Glycine max
attgctctcccataacatatgcgatatctgtgcctcttagaatatataatgtgagacgtctaactctacctcaaaaatatagtcaagagatgaggatcgcccctcacttatatattctaatgtgaaactacttttaatcgatgtgaaacttgaattattcttaacaccaatttctaagcagctagcctttgatggccttgaaaataggtgcatagagatgacttctcatatggggactcttcacaagcttcaccacaacagcataattcgattccagcataagccttctcacacctgaagaccaaccagcactaatatagatgatagcatatgtaacatatatcatccatttattttaaagaagatgttaggagcacctcttagagttttttagatattg

SEQ ID NO: 165158 - DNA, 348 bp, Glycine max
  unsure (1)..(348): unsure at all n locations
acccttttgtgacaatngcaaaagatggcaaaaataaagcctttgctatttcgagagtgatacagcgaaaacatgactcttcttcctccaaaatttaaaaaggcatgaaaccccacaacatggtttgtgtttgatttcagataggcgcgagtcaataaaaagtgcatacttaagacgtgatagaggataaatgacataaaantttgtgcatgtgttcaaaattcaacacattgcacacaaattacatgaggaagttcaacaataatgtcattcaaaaactnttttcttcatactaaatatcacttcattttgaatncacaatattgaaantngtatgttataactact

SEQ ID NO: 165159 - DNA, 434 bp, Glycine max
  unsure (1)..(434): unsure at all n locations
ggtagaatggctagacatgatacatgtcggnggttggtttggttcaatgtataaaaagggatgccccacattatttccatgacacaaatgcaaaaatgatgatttggaaattttatgcaaaactggtcatgcatgcacctatgcggacactcaaatgtcaaattnttatggtcatgtgatgctagggctcaggattcatttcctctattttaatcaacccaatgtttccaaaatatgttcttttatcaatntgtacattcatccgagtccatttcgggcgtccggggaaatttcacagcattcacccttcaggtgtagacacattntccaaaaattggttatgatcacatgaatttttcaaagaaaagttggaaatcgtctcttttcacaagcatgttgngttttaacttgacaantaatttttcctttttcta

SEQ ID NO: 165160 - DNA, 398 bp, Glycine max
  unsure (1)..(398): unsure at all n locations
atgctctattncatctccactccaataggccttcggatcattctttcctttaaatgganggaatgtgagtttaataccatcaattcngttntgtctaagaacaccatcattccctcttctcctcctttcttcttcattatgatctctattctccatttgatccaacctctcatggagcgcatcatctcgttgtgtcattaacctctccaaatgttgcatcaaagcttgcattnggaattgcgaaagcccccactcatcattangaatagtacctgacatctcaaacaaacaaatcanacgtaacaagacaantatagntgctgtttgatacctcacccactcaagtgtatcacacaattatgggctttctctatnaaacactcttgcctttacactct

SEQ ID NO: 165161 - DNA, 402 bp, Glycine max
  unsure (1)..(402): unsure at all n locations
tctacttatgtggcatggcgggctttcttcactatcttgtctttcacgcgagcattgaccactgctcttccttcccgcgatgcttcttttcatgtccgcctgagtgggcttatagcctaaaccatacttgccacgatttccttgggcatttatcaggctagttatgccgccgttgtctttgcctaaacccattccgggttcataaccgttccccaacataactcgggccatcattactgctgcatcagacagacaaggctgcccagagaaggagtccactgaggaaatgctgaccacctcataagactggaaagtggtttctaacgattcttntgcggcttccacataaggcatagaggatgggcagcttaccaagatgtcttcctcgcctgacacgatgac

SEQ ID NO: 165162 - DNA, 484 bp, Glycine max
  unsure (1)..(484): unsure at all n locations
agaacacgagtgcggggggtcgattggtttagattcacccaatcagccaaaatattgtggccctttcatataaagattctctactcttgttgtcttaataacttctctaagggcaccggttagcaattttcatatttttattgatatacacaatgtgacgatgttttggatcacaaataactaactctaacccctctctaatatgtaaattgtttttaaaaaagtgaagccaatgaatcaaaccaaaccaatatgtttttgatcaggtttgtctggtatagatntggtacaatataagaagaaatagcataagcaaaacatactgatccaatccattttttactagctgaaattttttttatttcctagaaccaaaccaaaccaactcattagacatgatacccttggcagcgaaagagaaagatgtatcctaatctgatgttatgattaacacagaaatacttatgggtctgcatatgtcata

SEQ ID NO: 165163 - DNA, 294 bp, Glycine max
  unsure (1)..(294): unsure at all n locations
tttttatgacataatggtaactataaaatgtgcacttaatcgtcttttaaatttaatattattataagtttataataaaaaattaatcccaaccttctcctctcttgcatagccacttatatatcccacttcaatacatgaattctcaagctnttactgaaaattgaccccagtaaactaagctgttagctatcattattttggggtgcagtcaccacttatgtgggcctacatttaggatggcaaatgtctcactaatataactgcaccacatcactgtaccttcgttctgct

SEQ ID NO: 165164 - DNA, 427 bp, Glycine max
  unsure (1)..(427): unsure at all n locations
ttttgtctttagttgattcttctgcaccttctaaagctatatcagagcaacgaacctgaacaagagttctggtcagatcccttgctgcatgtnttagttcgtctggggatgctcttatgagcttttcagctacatcaatagccctttccacctgcagtaaaattaaaaaaatttataaaacatcaaatttcagcagaaaagcagaatctcaagagaggactacaaactggtttttaaatagctcagtctaaagtctaaaccgaaaatataatacttggtaatcgcagtaagtgttgaaacacttaattaataaccaattaatatttttctcacaagaaattaaataacattaagcatagacatggcagatgatcaaaacataattaaaaagtgtttngagagaaaatacaaaccccatcggcatcat

SEQ ID NO: 165165 - DNA, 456 bp, Glycine max
  unsure (1)..(456): unsure at all n locations
ttatttaattaccaattacgcttaattagtacctaatacactttatatctatctatattataatatacgtgttcctcccaaataataacccgacacttgctctcttgtcttttctcatgtcttatgaatctngngtttggtggtctgaatggtattgttcaaaagagaatatctacaaaagatactctaacattcaagttagagctctcaaccttggacaataaagaagataataactgcatacanatgatggtttttacttganggtcttatcctgctcataagaccttgagtctatgtgtgctgattatcattttaataagtaattcgtcacctaagctgcattaactgacctaatttgngactatcttatgttgatggtttgcttatcanggccgtagatgatctaccaatacttcagatatagtatgacaaattcatattatgtatatgaca

SEQ ID NO: 165166 - DNA, 486 bp, Glycine max
  unsure (1)..(486): unsure at all n locations
atgtataacaacgcccttctatgtccaatgccacgcaatgtactgacactgcattcacaccaacgataacacacttcaaaacacataacccataacacaacagaataactaaaaaaaagaagtgaatataaaaaacaaataaacaattatttntttaaaaaagttaccgcagccggaggcgacgtagcgaatatcgacgccgacgagaggacgtaggcgcgagggagagacgaggttaccgtcgacggcgcctttgcgacgaccaatgatatcccaacacgtggcaccgcagaacaagagttctccccctttgacctcttggttcttctcttcctcctcgaccttcttctccgcttcggacgcagacatttcccgttcactccggcgagagcaacggtaaanaaaataataatggcagatccaacggctagtattcaaaatcagggtaaaggaagcgcgggataagatcacgagcatgggagaggg

SEQ ID NO: 165167 - DNA, 469 bp, Glycine max
  unsure (1)..(469): unsure at all n locations
acccacctantagtgaatttcaaggttttttgtgaaaatgaaaattacgtgattttgaggtaaactctcatcttcatcaagtctataacattgaattagacttgctcaaactaattttaaggtaaaatctccacctattcaaaatttgacctctcaacactcaatttacactataaatggctcttttctttcacatttgccactcattttcctcatttgctctgaccaagctttcctacaagtcctaattgacaatctaaactagaatcaactcactttaaactcaaatttccactaaccccaaatttggctttctaaccctcaaaatctcacactnttccacctacaacactaccattctcacatttaactctaagctaactctccccatcctctctaccagttntctatcntaaatttaagcacacatatatctcanaacatcattattgaaacctanatcaacatg

SEQ ID NO: 165168 - DNA, 243 bp, Glycine max
actcgaagttgtttcccctaacatcaacaacagtcttctcaccactagagaaaaaccttctgggcttgaattctaaagggtttggccattcctttggatctcgtgctatagcacacacattgactaaaagagttacacctttacgaatgtggtagccaaagatctcacaactctctgccgcaacacatgggagggacacaggggttgatggataaagacgaaatgtttcttttaccacaacct

SEQ ID NO: 165169 - DNA, 484 bp, Glycine max
  unsure (1)..(484): unsure at all n locations
gacatgattatgattttataaaatatgtagcaactnnttttttaatcaaatagtacaaacttaatattntagtggaggttgaagacagggacctgagagtagaaacataaacaagcatgtccaaagccacactttttgattccatacatgcaacagagaagaaaaacacaacaaattggagacgacaaaagaagaagaaaagagaaggtttttacctcatgatattgacatggaggtgagctctgagctcgatgaagaggtcgtgcatctgacccgagtcagcggcattaccgtgagagtacacgaaggtgaacctggcaaaagggtgtttccagaaggtggcgaggatcttgttgccacctttggtgtggagaatgtgagcgtcgacgtttttgtcggcggtgacacccgacactgttgggttacaagtgtgaggtgaaatctcacatcgggtagaagtgaaaaangtgagcaccatataagt

SEQ ID NO: 165170 - DNA, 435 bp, Glycine max
  unsure (1)..(435): unsure at all n locations
ctattattctagtgtcttacacgcctncttttattatcttaatgtagggccccaaagaatgatatgttagaccttgagagtctcttcttagcagaagtcttttcaagtcctgccaaaaagtcaaatgtgcaaagctcaactggtcctaaatatgataaagtgcaacaactggtaatttagattcagtttgcagtagcactgacactgcttacggatatntacataatctgcttngttataactaaatgtgacagggaaatgcaagagaactaattactaagaanatgcaagaaaatgcgatagtcctagtaattataacccggggcatcaatgtctgtggtagtntagtatgatactatatataactataagagtcacttatttatagactataagagtcacatgttagtgaatgtggagatatagtgttattat

SEQ ID NO: 165171 - DNA, 465 bp, Glycine max
  unsure (1)..(465): unsure at all n locations
cctacaccaatgctcanataaacctaaaagttctagacatctntcctaaggtgttggaaccaaagacaacaattataacacctaaaatgaatcacatcggaatgagaggaatctaanagttgtgtaggtatgtgactataagttgataatgacttaaaggaattaattggtactacttgtaccaacatgatgcatctacttttcagtaacccatcacttaagaacttcataattaagtgtgcttggcttaaagagattatgggatagatgaccttttaggaagttgtacaagggttgcttattgctggaaaaatttgtggacttagagaacttgaagagcgatggagaatctcanagttttacgacaaactagatgttagaaaatngaanataaataagcataacgaagcaanaatttaaatgattatagaaccacacaatatcacttaattacatatagataga

SEQ ID NO: 165172 - DNA, 277 bp, Glycine max
  unsure (1)..(277): unsure at all n locations
tcacctatgggagacaatgatgctcaattcaaatgggataagatcaccactgaccaaactctctttatgcagntatgtacattctaaaattcggaaatcgaattctctggcttaagttgaaaagactttcaactactttatacacttactagtatcaagtgtgcgattaagtcctaatccatgaacaaaatgtttgaacaaggttgatatgcctacctgcaagggttagaagctggttcctgcttacactaaactctataatcaccagaatcaatga

SEQ ID NO: 165173 - DNA, 410 bp, Glycine max
  unsure (1)..(410): unsure at all n locations
ctatgatactaagctcgtcccatttgctattatatggggagaagtgaagaagtttgggtntagcctctaaggcacttctctctctctcgacatagctgaggaaaattatttccgtgaagaatatccaagccgaggcgcttccgtaacgttttcgtgagtaattacacgaagattgtcgagcggtcttcaagattcatcgatagttcttcgttntcttcagtgcttaacgggtaagtacctcacaccaagcttttcaattcattctatgtacccgcggtggtacacattttgnttcatgtatatttattctcgctctcatttactatttatacccccttttgacgtgcttaagccatatatataagtcatttctcggttaatctgaatataaaatacatctccagcgatcg

SEQ ID NO: 165174 - DNA, 208 bp, Glycine max
agagtctgtggtctatgttcttctgcagatcaccatacagatctttgtccttctttgcagcaatctggagtccatgagcaacctgaagctaatgctgcaaacatttataatagacctcctcagtagcaaaaccaacaacagcagaataattatgatctttcaagcaacagatacaatccaggttggagaaatcatccaaatctgagat

SEQ ID NO: 165175 - DNA, 423 bp, Glycine max
  unsure (1)..(423): unsure at all n locations
tcatcaaaataatcttggaagtcattgcttccacaaatctgagggtcacacttagcaatttcaccacactgagatcgagttagcataaattgtcnaacacaagaaaaagaatcaaaacacaatcggcagaaaaaataaaataaaattgcaataaaagttatgaatttaaactaaaaaataaaacaaaanaatatgaacaaaaaaattatttaatttacttaaattaaattatctatggagctcncaaccagtcctcgacaatggtgccagaaattttgatgcgaanaatatctactatctaaaggcaagtgtaccctacacagtagcaacaatggacttaanagtncagatatcgtattctagagactagttgtgttcctaataatctannatgaacactatagatagatagataatactttc

SEQ ID NO: 165176 - DNA, 392 bp, Glycine max
  unsure (1)..(392): unsure at all n locations
tacttattaaatatatgttgaaagtatttgttatataatggtatattaaaggatgaaattaaaataaagagaacaataaatagatattcgtacttgaaaatgatataatataatctttttaaaaatttattttattgaatatatcttttctcttttatattattattattagttaaggttaaatcatttggataatatgtgagttgaattcttgacataaatcattcttaatcagaatttatttatttttctctaatgaatcggagaactaacacanacaataataaataataataataataataataataataataataataataataataatattattattattattattattagtattatttatactattagtattactattattatta

SEQ ID NO: 165177 - DNA, 438 bp, Glycine max
  unsure (1)..(438): unsure at all n locations
ctaacaagcactctnggtcatgaaattccctctcttcggctctctagtgtgaaagatgtgcgtgagtagataatgcaaatgcaagatatttcaactcaacttaagaaattggaggttaatatgcttgagtccttcctgataaacttcattctgaacacatttctgctagaatatgggtcgtttaagatttcctacaacatacataaggacaaatggtctattaatgaattaatgaccatgtgtattcaagaagaagaaaggcttgtaatggagatgggtgagagtgtattgttggaaactgcttgtgggaaaaacaaagatactaagtctcaagctaatcagaaagggactggtagaataccaccttaagctgatattgagaaggttacaaagtggtttttctataagaaaaagggacacatgaagaagaattgccca

SEQ ID NO: 165178 - DNA, 238 bp, Glycine max
  unsure (1)..(238): unsure at all n locations
gactcagcataaggaggcacaaaccaaagntgcgtatgtaaaaaaattgtatgaccaagtgaaggtgcaaattgcatagaagaatgaaagctatgccaagcaagcccacaagaaaaggaaggaagtggtacttgaacccggtgatgatcttggacatttgaggacaaatgttttccaagaaggagggaatgatgagaatcctgaaattggccatatacaggctaaaggcccaagtgga

SEQ ID NO: 165179 - DNA, 329 bp, Glycine max
acactatgaaactaagctttatatagctgaccatttatcataacacatttgtgtttattcacaaattagagttatctctttatcttagtgagagtgattctcctaaattcttgagtgattcaagaacaccctggctgtatcaaaggactgtcacaaccttggtgtgatagcctcgctggaaagagtgattctttccttacaatcatctccacccttgttctttcaaaccacaattccagatcatacacctctgcccaaaagtatctcgtgaaaggtctagccttgtaattcaatatcagctccagaatctcttagtaagagtgcgtaag

SEQ ID NO: 165180 - DNA, 317 bp, Glycine max
  unsure (1)..(317): unsure at all n locations
gatctttgacattctttggtggggagcgaatggacaaataaacggcacatgcaacaacttcngcccaaaattcctttggcatattnttagccttcaacatacatctagtcacattaagaatagttctattttttctctccgctaccccattntggtgtggagatctangaaccgttaaagggtgacgaatcccatatttttcacacaattcattanattcttttgatgtgaattcgccacctctatcggatcttagagctntgatacataactactctnctttntcacaagagctntanaattttaanaactacaaa

SEQ ID NO: 165181 - DNA, 385 bp, Glycine max
  unsure (1)..(385): unsure at all n locations
catgctgatatatatcaataagttaaatttgatagtgatactggtgtatatattaaactacattgagatntggcaaaagcaaaaagctattaaacattgtcttgtgttgcattctcattcaggaaacaggtttcaacttctgtacaaaacagaaatntcttacaataaaagaagacggcttctgttcaaatttgcctcatctgatctgtctgtgtctccattagcatgatttacaggtcattcaagtgacacgtgacagttaggaactcatccttcttacatggtattgtgagaccacccattgngtgctcatacccgaattcttcctcagctttgatcaacatatcatgaaaggaaggctngctcaagcatgatatgcgataac

SEQ ID NO: 165182 - DNA, 405 bp, Glycine max
  unsure (1)..(405): unsure at all n locations
ctcatctatgaatgatacaaaatagttattaccttccattgattttacttcaaatggtccacacacatcagagtgaattgtctccaactntcttgttggctctggtggaatctcagtgttgtaagaactccntgactgctttgaaatacaacacttgtcacacaccttgtcaggttcagtaatctgaggcaatccaattaccattntcttcttctgaagcttatngagatctccaaaattcacatgcccaaatctttggtgccataaccagntctcattaccagctnttgtcaacaagcactgattttcacaatattgatccaatnttgaaagtctttgctngacattgaacctcagaatngtctcatttattgtcaaaatctaagtcttgcttcatctacagat

SEQ ID NO: 165183 - DNA, 378 bp, Glycine max
  unsure (1)..(378): unsure at all n locations
tctaccacacttcacaaaacactttgacaagtcatgacccttcaaaatatagctgtgatcgattatcagaaacccgtaatcgattaccagtgaagaatcttacagaaaactctttgacaatacacacttcttcaaaccattttgaaaaggcatgacggacctatctatatgtgtgtctgacttcgaaaataatgagagagagaatgagagaacctaattgtcaaatgctctctcacaacttttggatgaacacttgcaaatctattgaatatcatctacgaactcgaaatttattattatctctcaaagagagatattcttctaggatctgcaatntgtatcatgcactcttaaggagagaaactcttctgtctatct

SEQ ID NO: 165184 - DNA, 349 bp, Glycine max
ataatatatcgagacgctcgaaattaagcaatggaagcgcttgagcaattaatatgatcctaacttttcactcggaagtccgattaaggcgcataatatatcgagacgctcgaaattgaacaagagaagctctcgagaaattcaaatggtcattacttttcactcggaggtccgaatcatgcgcataatatatcaagacgctagaaattgaacaacggaagctgtcgagaaattcaaatggtcataactatcaactcggaggtccgattcatgtgcataatatatcaagacgctctgatatgaacatgggaagcttttgagcaactcaaatggtcataacttttcactc

SEQ ID NO: 165185 - DNA, 368 bp, Glycine max
  unsure (1)..(368): unsure at all n locations
gatgaatcgagtcacatcactgcttcgtctactgccaaacatatttaggattgttgatgtccttgttacttccagtttcaccttgacaaagatgtcatggaccatgttgaaaatctaaattgattcaaccccatatcctgcgtaaaaattcgcaatacttcgactgtacatcattcgcatgcatccatgcttttcattggttgcattgctcgttgcattctttccttgaaaaataaaataaaatgaacttaatcattgttataaaaaaagaaagggacacgctntacgacgcccttaccgaactcgtgctagagctagagtaatgggtgaagtagaggagatacaagagaagatgaaggccgacatgg

SEQ ID NO: 165186 - DNA, 210 bp, Glycine max
  unsure (1)..(210): unsure at all n locations
agagagtgaaagttaattggggaatagtctctgtatcttaattcaacccccccccccttcttaagttaactgaggccatttttccaacatcctattcttgataacgcacttcactctaaaaagacanactttccggaatgaataaatgaggtcacatgaacgtcttgaaaacacaatcaatcaaatgctgttttttttctttttgaactt

SEQ ID NO: 165187 - DNA, 470 bp, Glycine max
  unsure (1)..(470): unsure at all n locations
ccactgactgggataaactaatagcatgatttactatatacatgtatttatatcatgaagaaatcatacataaagtataaatcttagaattctcatgacaaaacatctcataataatcatcagttcgtcaaccattacataaaggttcaatcatcatacatcatcgttatcaacaatcatcaaatagcacaatatttccatgactcaataagtaacacattactcttaagtcacaattatacattcatatgtctatctatcatgttatgtcatgctgactctntactctcgaaatatttcacctcccgagtgattaatccaagcacatcccttaacatagttgtactctatgatctaaccatntagggagactcaaattaaccttgcggaggaagtgtgattntattgaaaatggataagtatgggtagtggcttaccttagtaaggcttacacagaacttaatctatct

SEQ ID NO: 165188 - DNA, 433 bp, Glycine max
  unsure (1)..(433): unsure at all n locations
ttctaaactgcactcactcctgaggatattgtggtcttaagtaactgtgactggtttacttcagaaaatgtctcatcacgaggaacatagaaactngaacttctcttctcatatgatgggtctgtaaaacaacaaaaaatggacaaaagttaaaaaaaaaaaaaaaaaaccgtgttaactttgcatgttcaaaactttcagtctttccaccacaataagtagtataaaaaaatgaacaatcaattngataaagctatgaattggttaaattcagaataaatccagtcttagttaaaaactaattaacttgtggaaatataactaattagctcgcagagtaaagtacaaaataattaaacacaaatcaaagaatgtaactatacgatattatttatctgantctactctctatatcagctgtcttaaatttatt

SEQ ID NO: 165189 - DNA, 478 bp, Glycine max
  unsure (1)..(478): unsure at all n locations
tgtagggttaaagtctcacgattgtcacgtgctcatgcaactattgttagtcatgactatacgagacatcttgccaaacaaagtcaggttcacgataactcgcctgtgctttttcttccatgctatatgtagcaaagtcattgatccagtaatgtttgatgagttggaaaatgaggccgcaattatactgtgccagttggagatgtattttccccctgctttctttgacatcatgattcacttgattgtgcatctggtcagagaaatcaaatgttgtggtcttgtttatctacggtggatgtactcggttgagcgatacatgaagatcttaaaagggtatacaaagaatctatatcgtccagaagcatctattgttgagaggtacattgcagaagaaagccattaaatttgtttagaatacttagagaanggctaaagctgtgggcttcctgagtctcggcatgatgacagagtgggt

SEQ ID NO: 165190 - DNA, 433 bp, Glycine max
  unsure (1)..(433): unsure at all n locations
tcttacaatatctgcacaaatctagtttcatcagtttgcaactttgttcatgttaagtttgcttaacattatatgttgtaaaacaatttcacaattattgaagaaaacacatagggaactccaaacgttgcaccttatgtcatatctaccatagtatttcccacggtcagatttgacaaccttaattntcttttctaattgaagttcaacttctgctttgaaagactaaatgtctagagaccaaaacttctcataatttaaataaagagaaatcatctatggacataataaaatatatttgtccattccatgaatccataaggaatagaacactaatatatgtatgtgttatttctaagacattcttagttctttcagcacctgaattccattttgttgtttattttccctttatatactcaatataaactat

SEQ ID NO: 165191 - DNA, 331 bp, Glycine max
  unsure (1)..(331): unsure at all n locations
gatgagtaanaaagatgatgacacgaatgaattcaagatagaatcaagaacacttcaagattcaagaggaaagttgaattccagaatccagaatcaagattccagagatcaagggtcaagactcaagattcaagaatcaagaaaaggctattcaagaatcaagaanaaacttaatcaagataagtatgaaaaggtttttttcaaaaactgagtagcacatgtgattttctcaaaacatgtttaccaaagagtttttactctttggtaatcgattatcagaatattgtaatcgattaccagtagcanaacggatttgaaaagtttcaaactg

SEQ ID NO: 165192 - DNA, 477 bp, Glycine max
cttcatcatcgtacgtgtgatctttgattcgataggaaatcgtgtgcaaaataaagtcatggtgcagttatggtttggggtttagggtaaaacacttgcctgcgtgagtttttatacactatgagtgatttattcccagtttcagcttaacccgatgttttccctgaatgttcatttaaaagctaaatgttcacgtcctgcccttcattttcggttacaaggaagattaaccttggcatgggtatattgcttctctaagatatggtgctctcgcgaatgatttatttttctttgcaaaaagcatgttcgcctttttaggtgaaaaaaaaacccggtggaccattcggtcctgccaacaaatcttgttcggagacccatgaattgattgcctagcgctgttcatgtgtcctccaccaatgagtctggagccccgcgaattgattgctaacgttgtagccaatctccattctcacttta

SEQ ID NO: 165193 - DNA, 323 bp, Glycine max
agagcacagcacagatcccccctttgaaagaaaccatgaaagatgcaatgcagcccatactaatctcacttcaagtaataaataaataaaatagtgaaactgataaatgattatacgatttctattgatctttacctacagtaaaataagtaaagcattgacaacaaagagaggcattaggaaatagattgagatcacaaatgcaagattactatgcacgaattatagaaccactactagaaattgattgcagagagagaatgaatagtataaagaatatataatttttttacagaagctgaaacgtctttgtgggggtgtgt

SEQ ID NO: 165194 - DNA, 483 bp, Glycine max
  unsure (1)..(483): unsure at all n locations
tccatcacaactgatatggcttcctgaagaacataactttatcatacttaacacatcttcacaacacanaacattttgaagtaggtggcttcataaatagaaagtgaaggaatagttgctagtgtgttagtggtttgtctaaagttagactgcataataacttcagtcttccattctgatgttgcacatcaaatcttctcatggatagtttcaattttcaacctggttgcatctggaaatgcttcaacatcaatcttcttatgagccctcagtatatgtggcttcatatggaagatgcaatgtcttcaacttcagccttttgatgagtcaactttctttagtgaaggcatacataagacaagatattgttcttaaggtataggcttaaaatcatttgaactctattctaaagttcagttctcataatcaagatcttcatcattctgatgtanactctannatcattttgactctattctaagt

SEQ ID NO: 165195 - DNA, 403 bp, Glycine max
  unsure (1)..(403): unsure at all n locations
atccttgagtcacctgcggctgcagcttattctgacctgaaaagaggatgagatatttcacaaaagagaaagcttcctgatcataagggagctatacaaaaatttcatgtaggtggaccttcttctagtaattntgacttgtagcagcctcctatccctcttccattcccacctaaagcaattccaaacaaaaagatggaagaagtggaaaaggagatcttggagaccttcangaaagtagaggtaaacatacctctgctagatgccatcaagcagattccaagatatgccaagtttctaaaggagctgtgtacccacaaaaggaagctcanaggcaatgagaggattagcacgggtagaaaagtgtcagcattgatagggtaaatctgtcctcacattcctg

SEQ ID NO: 165196 - DNA, 436 bp, Glycine max
aagcgagagaagtcactgagaaatattctatatcctctaaatcaaagattatgtgcctataaatcactattattaggtgtcagttttcaaatgcaattttcaaaacaaaacgtgttaggcaaaaatgaagcttaaatggtttttaaatcattttcgaaacacttttacactcatgttcaaaaccaagaaattttcttctgtgaatttgatttagtttagaaaaacatacacacatttcccacatctgacaatgacacattgtgctgtcaccaccacaccaccaacaccatcaccgactctatcattggtgtgagcatcattactagttgccactgtcatgaccaccattggcattggcaccatgcaccatcgtcactggcaccaccaccaccactactaccaacaataccacctctattacttgtgaccacaccac

SEQ ID NO: 165197 - DNA, 236 bp, Glycine max
catcatttcgtgatgttgacagatgatcagtatgctgcctggaattggtgtgaacaaatatgtggagaagaacattctgatactctgctcaactacctcactacgaatctgtggtacatgacctatgtgaaccatcttcatctccaccacgctcgcaagatccagatctatcatcaccagagtctactccaagacgagttagatctctggtggacatatatgatacctgtaacttg

SEQ ID NO: 165198 - DNA, 415 bp, Glycine max
  unsure (1)..(415): unsure at all n locations
cttccatctctcttgaaggtgataaacatgtattatcattatgattgatgaaacattntgtctgctccagataaacaaaatgtnggttgagttgccaaaatgcaaattggttattgttttgtaaaagtgtaaattttcatcgtgattcttgggtgctttactcctgtcatcatcttttatagattcaaaatcttgactcgaagtaattgattgatattatcggcttgaaatgtttaaatccccccttcctcccttttgattntaaactatatattaataagatgcctgatcacagccaaacctttggttttgcatgtgaattaaaatacatttggtaagaatggtatatttgtatgcattcggagactgcaatatccatatacttattgtgaattcttgtgtacttcaatgactc

SEQ ID NO: 165199 - DNA, 372 bp, Glycine max
gaaagaaaggcttcgagcattgatgatctgagttcacaactaattctgtggccactgaaggatggatccaatgctgaggtcaaggcacagtggccatcgatgatttctcataggcagactttgactgattcccatcagatgaggctttactagaaaatgctatatgtcgactctggtgcattataacaggaggtatacctctaccagccgcatcacacttatctatgagaggttattgactatcgggacgaattcgcacacgtggagacgttctgacactctctatctactctaacgacatgacagctattatgcctcagataaattgtctccttagctaaacagtagagatttgcgatcatccatagtcct

SEQ ID NO: 165200 - DNA, 299 bp, Glycine max
  unsure (1)..(299): unsure at all n locations
actacacacaacccttattatagctaaactcaccccatgccaaaatacatgaaaatacaaaaaagtctctactacaaagactagtcgaaatgccctgaaatacaaggctaaaaccctatactactagaattgccaaatacaaggcccaaaagaaggaaaaacctattctaatatntagaaataagagtggacccagccttggcccatggattcaaaaaactacactgaggttcatgagaaccctagggccttctttagcaactctagcccaatcctctggaagtcttctattcaatacc

SEQ ID NO: 165201 - DNA, 263 bp, Glycine max
  unsure (1)..(263): unsure at all n locations
tcacccccatgacaaaatatatgaaaataccaaaaaaatctctactaccaagactactcaaaatgcctcgaaatacaaggctaaaaccctatactactagaatggccaaaatacaaggcccaaatgaaggaaaaacctattctaatatttacaaagaatagcgggctcatacttagcccatgggctcaaaatctaccctaaggctcatgagaaccctanggccttcccttggatctctagcctaatctacttggagtcttcta

SEQ ID NO: 165202 - DNA, 476 bp, Glycine max
  unsure (1)..(476): unsure at all n locations
tagccatcactctctatgcacactaggaagtgtatcatggaaggaatacacataagagaaagaacaaaaaataatcacacctatcacaagtccctacttaattactcttgagagtggatgcctcgagaaattactcctgtaaaatagtcctctctcaagacattagcactcattttccatcctttgtattcttggccgcttgccatatcgtcccattgcacttgacaaattatacaaatggccaatttgataacttatgacaaggcattgaaactcatggtatagtagagacatcacggatacaaacatgttatgactagaccaatcaaatctctataactcatggaagcacaacaaggtgagtaagttccaaatacagacaactagagaaactatcaaacaattatgcgctcaaacattagacattcgacatggcaaccatagaatgcatagagaaacacaacanactcataact

SEQ ID NO: 165203 - DNA, 304 bp, Glycine max
  unsure (1)..(304): unsure at all n locations
tttctctcacagtcttccctatgctcacacacatgattgaaaagcccaaactccccactcttatatgtgttccacgtgatccttcaaggaattggatgcatacttttacgtgtgaatgtcttgtgattcagcaaggacaaacaccaatatttctttcctttaattagagaatctataaatatgacattaaataatagatgaaaatatgattttgtcttatgtacatctcgccacatagtattngtagtgtccagaccacacaaatctacgtgataatctactcgacacacaaagacatgtgtca

SEQ ID NO: 165204 - DNA, 472 bp, Glycine max
  unsure (1)..(472): unsure at all n locations
tgtagggttaaagtctcacgattgtcacgtgctcatgcaacaattgttagccgtggctatacgagacatctttccaaacaaagtcaggttagccatagctcgcctatgttntttctttcatgcgatatgtagcacagtcgttgatcctgtcaagtttgatgagctagaaaatgaggccgcaattatacagtgctagttggagatgtattgtccccctgctttctttgacatcatgattcacttgattgtgcatctagtcagagaaatcaaatgttgtggtcctgtttatctgcggtggatgtacccggttgaacgatacatgaagatcttaanaggatatacaaagaatctatatcgtccagaagcatttattgttgagaggtacattgcagaagaagccatttgaatttgttcagaatacattcagaagggctaaacctgtggccttctgagtctcgcatgatgacagagt

SEQ ID NO: 165205 - DNA, 331 bp, Glycine max
  unsure (1)..(331): unsure at all n locations
cacacgagcatgattgattagagaaacatctntatatacatcagctggtccgttagaaagacccaacatctttcccactgctgcaattttattacttgcatttactgttttaacctagaattagtttaatcttgttccaaataatcaattattgtagaagtaagcttcatgatgatgatgaatcaagattgattcaagttgttatgacgataacaaagatgataacacaacgcccaagataatgatttcaagaatgagtcaagaacaattcccaagagaatgatttcaagactgagtcacgaacacattcagaatcaagagaaatttgatt

SEQ ID NO: 165206 - DNA, 481 bp, Glycine max
  unsure (1)..(481): unsure at all n locations
tactcagcttctcaggaagttctcacggaagctacctaggctataaanataatcatgtgtaacactntntgtaactgtaatgaatgaaagtcttatgagacacacttcaaagttccacttctctctctcttttattccttcaatttcgtgctcccccttctctttttcttttcctccattaaagcatcctcttcaagcttcttatccaaggcacattcttggtggtgaagctccttcttccatgacttattccctagtggatggtgcctcccctctcctcttctcctttgccttccgctgcatcttcatggtggaaaatcatcattgaaggacctcattgaagcttanagattcagcctccatagaagctccaatgagggccttcaaaaatcctcccctctcctcaaaatacaccccccctataatagctaagctcaccccatgaaaaaatatatgaaaatacaaaataagtccatactac

SEQ ID NO: 165207 - DNA, 314 bp, Glycine max
tctgagagacggaagaatcattcatggagaccataagatgggcaaaaaagaatattaaagccacaatgacatccaaagtgagatagtactaacatcgacgtgtattattgcagaacaaaatgtcatattcaaacattgtgtcttgaaatgcaagaagacttcgaacaatcgagagttatgaagaccaatgatcacaagtctcatgctacttgatgggaaaataaacttttgtgtgttcctgtcataactccgacgccactttgtggagaaattctctaccccaagagtctaatcatcatcaaaatcatacctta

SEQ ID NO: 165208 - DNA, 361 bp, Glycine max
  unsure (1)..(361): unsure at all n locations
atataatcactggctatatgaaggtagacaatatatgcttcagtcgaatcagtaactgctctatgtttcagcattntcccataacattggtcagaattctgactgaaattattaaactgaacattaagaggaaaatcactagggagaaaccaggaagaatctggaaatggctcacaaaagagatcaaccatatccgttccagggtcaaccactagaacacgggttgtgagtaatgcatatagaaatgcagaagctagggtcaaaatcctattccctaatccactaaatgaaatccacagaacatatttacactctgaggactcagtgaaccgagcaccagacctaacgtgttccactgttt

SEQ ID NO: 165209 - DNA, 393 bp, Glycine max
  unsure (1)..(393): unsure at all n locations
cctctaatctttaatggagaggggtaccactactggaaaacccgaatgcaaaattttattgaggcaatagacttaagtatttgggaagccatagaaatagggccttatatacccaccacagtagaaagaaatacaatagatggtagcacatcaagtgaaagcataacaatagaaaaacctagagatagatggtctgaagaggatagaagacgagtacaatacaatntanaagccaaaaacataataacatctgccctaagtatggatgaatatttcanggtttcaaattgtaagagtgctaangaaatgtgngacactctacanataacacatgaanggaactacagatgtaaaagatctanngataacacgctaacccatgagtatgaacta

SEQ ID NO: 165210 - DNA, 401 bp, Glycine max
  unsure (1)..(401): unsure at all n locations
catgatctcactggtcaggttttactcgtgagatcgagacttatattatcgaatgaagaacgtcgaagaacggttgaaacctctgcgagatttctcacggaaaacgttacggaaacgtttcggaagcgcctcggcttagatattcttcacggaaacaattnttccaagcaaattcgaaagagagagaagtgcctaaggggctgaacccttttcttcttcacttcctcccntatctatagcaaaataggggaggtggttgccgcccagctcgcccaggcgagcagggttgcttcctccagaagcaaccgccttctggaggaatattccagagggcccaagtgggcctgggtgctatttgcacccncatttctactaagtacacccncctcttgtggtttttg

SEQ ID NO: 165211 - DNA, 317 bp, Glycine max
  unsure (1)..(317): unsure at all n locations
aacacacaaaccaaggccatgatgganaatatgtnaggtagaaatgatcatagttattggcggaaatattgacttctgtaactgctactaagctngcaatggaagacattgtatatatgttgatgaattttccattcactaatacaaatntgtttaatttgtacgctcaaatctattagctcatgtgttcaatttgaaatatgaaatttctattttacatcttttatttggcattatgtaaccttgtccagcacatcacanattnttctttgatttctcttcgccatagattagacctgttntatatagttctactt

SEQ ID NO: 165212 - DNA, 435 bp, Glycine max
  unsure (1)..(435): unsure at all n locations
gatgataanatactatgtttgtttgtgttcatcctcctcctcctgccgaagatccaacattgattacatggcctcctcttgcaagaagcaaacaagttaatagatgtgtgcatcattgtttctctcaaggaagaatttccagcccttgaaagaaagatagaccttgtaaacaaaggtacatgtcaaaccttttcacacacacacacacacacaattgaaaagtggtggacttgaccacgatcattatcgtcactgacggactcgctgngccgtggtcaattgaccattgttatagtactagcaaacaaattatcttagaaacttaatattaatcaattaaacataatggatcaagtatgggtgcatctacgaacactgttgacattgacctatgtggagatgagtgtcaagttgaaggtcacatggttcactgtg

SEQ ID NO: 165213 - DNA, 379 bp, Glycine max
  unsure (1)..(379): unsure at all n locations
acactatanaccactcacgcttgaaggacaagttgtccatctcttatgattttatccatgccatattcacatctttttttttaacaaagtgtttaattgttacaacgtcagcttttgttagtaaaagagattgaattcacaatctttcacacattcatttcttctttaatcattaaactaatcttatatcttcatattcacattcttttaagtattcacaactcattaactacttgatgaattacaaggaaaaaaaaagaagggaaaaccagttgtgctttatgcataatttaacaagtgaagatgaattgcctaaattaagtttggaatccatcccagtgatgttcattgaaataaaagtagaatctctgttaacctt

SEQ ID NO: 165214 - DNA, 425 bp, Glycine max
  unsure (1)..(425): unsure at all n locations
acctgcggcatgcaagcttcttaagtaggtgctgcctaattcttttttaatnntcagctttaccttctcctccattgttgtttcttcatttttcttcatgtatctcctcacatgtattattctaaatgttgttatcatgattctttaagaatttccaccgattaaacttgctataaaagctagatttgatctcctaatggtcaaatttcttgttcttgttcttgaacaatgaattgtgttgagtttacgttcctttgacttttgttttgctatattctgtggctgaaaatataaacaacaaaattcttacaaaaacattaaagtagaagaaaacctcacaaatctatagtgacttgttcacctattgtagttttttcatagaagtcatgtctagtcatgaaacttgtcacataagattccttatg

SEQ ID NO: 165215 - DNA, 341 bp, Glycine max
tctagccaaatggacttaccttgaattattttctttgatagcccctttgagcctattttcccctttctttgttttgaagctcattacaagccttaagtgaaaaaaccatgatatcaccttacccttaaggaattttggagctttggaattgttttgggaataagctgggaataagtgtgtgtggggggggggggggattcctataacggtcaacggacactgatctctcttctctgggtgaaacccccttcataccacatatccacatagtgaagctaataaaaattcttaaccctatttgggctattaaatttccacaactcacacgatccaattccttt

SEQ ID NO: 165216 - DNA, 368 bp, Glycine max
  unsure (1)..(368): unsure at all n locations
tgtggnggattggcgtgaggacgcgactttcttttttgtttgactctacagacacaagctcggacctcatatatatgacatgcatacctatatcacctcaagaaccatcgtataaaatcacgatccgtcgaaggaatgctccctcatgatacaagaaatgaatcttgtgatatgacgaaccaactcccagtatcgctcactcgccaaaacttgcatatgctgagtaccatcgtttatcatggaaaaaaacatttgcatcactcagctgcaaaaattgcatattttaagtaaaggtatcaagtataagcaaacaatatcgctctcttaaaagaactctcgaacaatatttttgaacatgccgaacaaca

SEQ ID NO: 165217 - DNA, 431 bp, Glycine max
  unsure (1)..(431): unsure at all n locations
agcttgtagaagctcttagaagctgttctgtattctgtcaccataggctaggctgtaaccccttcatcatgaacttttttgtactatctatcaattctctctctcacacacacacacacatatatatatacatctcccagcaaactaaggctgaggatcctttttgtgtgcatattttcatactcaaacatttcaagttcaacaaagagctaattatatctgtaaaaataaggtagataaaaaagtaaatgtaacaacaaaataaagaaaataaaataaatctcacattatccatgtggagattactacattatctctagataacttccacaaaggcatgatcacaagagttgtgtgaactaagtgaatctatcaagttgaggtaagatattgagaanataaaatntgcctctaggcagtctccttaacaa

SEQ ID NO: 165218 - DNA, 355 bp, Glycine max
ttaacttttgctgatggtgtctgcttatatacacaggaaatatattgatagccgtgaacccttttcaaaggttacctcatttgagtgcaactagtaccatggcaaagtataaaggggcggcttttggtgagcagagcccacatccttttgcaattgcaagttctgcatataggtatcttgttgttgcttaattttttttgccttggtattatagactagaaaaataaaaattaatgataaaactatctatatgtaatttttaaaaatccatcactaaaatttagtgaccccaaaccagattattgtatattccctctgatcctttttattatcatttgtttcttataaaaatgac

SEQ ID NO: 165219 - DNA, 232 bp, Glycine max
acttttgaaaaaatcttcacaaacaagtcacatgaagaattgtgacttttagatatgtatttttcgaaatcagtcactggtaatcgattaccattaaggtgtaatcgattacacatccatagatgagactcttcatttcgaactttgagaaccttaatggtttaaaacactggtaatcgatcactacctcttgggtattcattactcagaagtaaaactctttggttactga

SEQ ID NO: 165220 - DNA, 358 bp, Glycine max
tctacagaaggttggttgctaacttttctatttttgcatcacctttcaatgagctggtgaagaagaatgtggcatttacctagggtgaaaaacaagagcaagcctttgctttgctcaaagaaaagcttactaaggcacctgttctagctcttcctgacttttctaaaacttttgagctagaatgtgatgcctctggagtgggagttggagctgtattgttacaaggtgggcaccctattgcttattttagtgaacaacttcatagtgccaccctcaactaccccacctatgataaagagctttatgccttaataagagccctccaaactcgggaacattaccttgtttccaaagaatt

SEQ ID NO: 165221 - DNA, 357 bp, Glycine max
tctcttgggacatagcaagactttgttccataacactgaggtaaaattggacttgctcatttctatcagagaagttaagcccattaaaattggcaaagatgatacataagaatccaatgaattcaaaacaagtattacataataaaattcacataagtgttttgagacataaaatacatgtcatacatatgattcattcaaataacggtcaatgtatattgatgttcttctttgggtgatacaccaacacacaacatataaacatagtgatgctaataaaaattcttaacattatttggcaattaaatatgcaccaattagtagtatctatttcctttgggcatataaataaaacta

SEQ ID NO: 165222 - DNA, 434 bp, Glycine max
  unsure (1)..(434): unsure at all n locations
cagctntgcatagcagtggacaattnattttattgtgagcgagagagagagagaagagaatagagagattgagaaacaaattattattcatcctcaatgaaaacagttacaggaagagtttatatagttgacagtgagaactgtcaactatcctaatatggcatcctaggaacacgttggttttctccaatgaagaattcgatggttagaaagtgctggaggaggcaattttctcttgttggttgtggctgaaaaacatggaaaaggattctgaaataccatttcaggtatgaaccatcaatattaaagctgcgcttttgtgtagcgggggataaggttcatttgtgggcgggatctaacatgctttacatcacagggatgtgtcactctaatatatactgcatacagtatatattagactcccaaactggagt

SEQ ID NO: 165223 - DNA, 377 bp, Glycine max
  unsure (1)..(377): unsure at all n locations
ctatanaacactctagcttaancacaggggtggcgcacggttaattttttttcaaacangcagncgggaagttctgtgacatctttacaaaccagagcaattagctattctaaaaaagcaaataggttgttggaaaaaaacttaactcacaaaatgaagggagatgaatgcacatattttattgaataataatatgtttgaatagagattttttgtaactgaatgaaattataaaaataataactgacttcctaaacaataaccactaacataatagctattgtaactaaaaagaatcataacaacaattataactgaaaataaacagtcctacgcactcatgataggcaactgttgatacacagcggttggcaagt

SEQ ID NO: 165224 - DNA, 356 bp, Glycine max
tcacgagatggtagtggacgctttctgtcatccgaccaaaaaggtatggcgcattacaattttcttagagcatccgatttaaatacgaccggctccatggattacgggactggggcagacatccgaggaaaacgctcacgtccttagaatatggccagagctgttgattggaatatcaggcgtgccgaaatattatcgcactgaattgatccactgaaacaatataaactggggattgaactatctatgagttattcttaacaatccataactcaaatatattgaccccgaaccaaaatagtgtatattacctctgatcctctccattactcattggttctcacacaaatgacaac

SEQ ID NO: 165225 - DNA, 353 bp, Glycine max
tttgcaagctggaatcatttatcctatctccgacagccaatgggtgagtcccgtccaggtagtcccgaagaagaccggcctcacagtgataaaaaatgagaagaaggagctgattcctactcgggtgcagaacagttggagagtctgcattgactataggagggtgaaccaagttaccaaaaaggaccattttcccctgccattcattgaccagatgcttgagcgcctggcaggtaaatctcactactgtttccttgatggtttttctggttatatgcaaattactattgctcctgaggatcaggaaaagaccacattcacctgccccttcggcacttttgcctataggagga

SEQ ID NO: 165226 - DNA, 362 bp, Glycine max
cagccttgagagttatgaatcagcattttgtttttcttcataatagacaatgcctattagacataattagtatgaaccatactaaacttcatgcttaagtaactaaattcagaggacaaaagattaggtatgagtcaagtatccaagtaagttattaatataactgaattaaatccaactaaaatcagtacaaccaaatatctaatttgtgatggcaatggattttagcattgatgaaatggaagaagtttgactatgcaagatgtggacatagattgaacaattacacagccaaagatataaattatatatatgtatgtgctctaagatcacaccatcaattgatttttgttgggatatgt

SEQ ID NO: 165227 - DNA, 428 bp, Glycine max
  unsure (1)..(428): unsure at all n locations
agctgtggacgaattcgtacggtcatattttttgactcgaatgtatgatcgatgcccatgatatatcgagacgctcaaaattgaacaaaagaagctctcgagaaattcaaattgctataacttttcactcgaatgtctgattcacgtgcatcatatatcgagaccctcgaaattgaccacggaagctctcggcaaattcaaacggccataacttntgactcgaatgtatgatcgacgcccatgatatatcgagacactcaaaattgaacaacggatgctctcgagaaattctaatggctatatcttttcactcagatgtccgattcacgtgcatcatatatcgagacccttcaaattgaacacggaagctctcggaaaatcaaacgggcataacgtttgactcgaatgtatgatcgacgcccatgata

SEQ ID NO: 165228 - DNA, 285 bp, Glycine max
tcattgcctaacaagccatcttttttagcaagccccaagagactcagcataaggatgcacaggtcaaagttgagtatgtgaaaagattgtatgaccaagtgaaggtgcaaattgcaaagaagaatgaaagttatactaagcaagccaacaagaaaaggaaggaagtggtacttgaacccggtgatgatcctggacatttgaggacaaatgttttccaagaaggagggaatgatgagatatattacacatgctcactctagttaaaggcccatttggagaaagact

SEQ ID NO: 165229 - DNA, 430 bp, Glycine max
  unsure (1)..(430): unsure at all n locations
tgagcagcaagcgagatggagccattttctgcgagaataaacattngggaagttagttttaccagataatgcttatcttaacataaaaatgacatgctaatccctctgaatttaggacgaactcatgtaatctatttatgcacacgcgtatgtgtaaaatatcctactatttatgccaacatacaaggacatccgacacattctaattgtcacacatacatatgcattttgaaaagaacatacactnttacgctcaaggcattgcgtcaaaatttacacttaattacatcctaaacattcgctattacaaactacctacatatatttgaaatatatatcatacaaacttttattgcttcactcacacttatgcatattggcaagctatttgcattatgcacacacttgcatttagaagggaattccctgc

SEQ ID NO: 165230 - DNA, 350 bp, Glycine max
  unsure (1)..(350): unsure at all n locations
tttccttgagcttcaagatttagccttaggttgntcattgtattgctcatgttgctcccctcatctctaacgatctccctttttttggctttgatgatgccaaacataaatacaacattgagtgcatttggagagtcaatcttgagattggattagagacttgatccttagtcttatcctaaaaaattcttaacacttaagaagagattaattcatcattatcatcatcatatatgtcaattcattatcctgtatcatatatataaataacaatgcaatgctcaatgctatgcaatgcattcaatatataatagtgtatattcttctcccccttttggcattaacaaggc

SEQ ID NO: 165231 - DNA, 435 bp, Glycine max
  unsure (1)..(435): unsure at all n locations
agcttgcatntggagaggttccatcatctcttcctaattccttgangctggtggtatctaagcttttaaccttgacttggtagaacctcttaccggtttgatttgttcccatgcttgctaaagagagacaaaagctggtgcaaatcaaaactccgatatctcatgggtggaatggatgaatgcgtgaaggaatgcatataacacagatgcaatctaagaatgcaggggtccggggaatacctccccttcttagacacaacgtctaggggtagcaaagtgccccaacgtacatttttaagaaagcgacaccgaccctcccgtggtttgtttacacaagggatcaaaacaaaacccatatgcgatgcctatgcaaaatacacaatgcgggaatgtacacagtatgacaatattcactgaacataagtcaaagggtat

SEQ ID NO: 165232 - DNA, 361 bp, Glycine max
tcggaagaaagtgatgaggtacaagttcttattgcagagcttgaaagagcctgggtagtcgaaaagaagttcaagtccatagccatcaaagtctgaaaagagtatgatgaactaagggatgtcaatatggccaccgatgaagccttggaacgagaaaccaagaaggctcgaaaggaagagcacgtgccagcaaagttttgaggggctttatagggcagcaatagtgagctcaaactccgaagaggtgaaaggaatcatcacgggtcaaaggcatgatcttgaaggacgagctaaaggcttaccttaggtcgaaaagaaatttgtcccaacagttaagcgagactgaagggaatatgtgggc

SEQ ID NO: 165233 - DNA, 445 bp, Glycine max
  unsure (1)..(445): unsure at all n locations
gatcttaagtcacctgcagctgcagcttcaagctatgatagatcttctcttaatttcactaaatctgtttggtctaagaaaagaaatcaataattccacgtagataggttagaaaacatccttaaaacatgatggaaattaataattaataatatattaatatctgcataggttagtgaaacatggaagtattaaaaaattggtgcaccaatggaacgattttaagtttatcaaagacattaaacagtggcaatggcaacaaattttaagtgtctaagctctttggctggcagcgagtgttaaaaggatagagcaagagaaaaatatattggacgaaanagcttaaagattgtcaaagaaaaaacattcaattgacacggatcctgatttattagttcatctgtcccatgatgattggacaggttgaccaaaaatgagacaagtc

SEQ ID NO: 165234 - DNA, 359 bp, Glycine max
ttgcatatgttgttaccagccgaattttttaagagcacaaaacctaagcggccatctatcaagaccctattttgtaagcatgtgttcattgttttatgccttgtgcgtagtatacttgttgattagcttgagatctagtggttcacttcagttatgagtaatgctatggcaccaaataactccatcatagaactatacatccttcttcatggcattatggggtagtttctcacatctctgaaattttagaatattaaatctcttatctggtgataatttaagagttatgttaatgataataaactattactgatgtttgtgttaataaggttttctcaagtaatagatcagcaattcct

SEQ ID NO: 165235 - DNA, 98 bp, Glycine max
cacagaaaacaaggatcatcacccaccccaccacctaaaaacccgccaaacacaacacaacagaaacatctacacgtaccccgacacaaaaccgccac

SEQ ID NO: 165236 - DNA, 328 bp, Glycine max
ttactctcaccccccgcaacacgcccacccatcccttgtataccctccacatgctctaccatgcccaccttccaaggctcctcctgcaccccgctatcgccgctggcctaaaaagcaagcaagacccaccaccaaagtctaaaacggtagtatagctactgccactcacatattatgctgatacaaaccttgcttaaacagctcatcgtgcctcaacccattacagctctctatagcgaaaataccatgctgtccacctcgaacacaatttaatccatgcaacaaactaacatgccgaatcctattacccctacttgaaaaaaaaaaa

SEQ ID NO: 165237 - DNA, 298 bp, Glycine max
aatcaagcggacaaacaaaaaaaaagatatctcaagctgaaagaacgggctattaatccctaccaaatatctctcaaagacactaatacaaaaatgaacaaaatattataaagacgggaaagaaaaaaatacatatactaaaaggactaaaacaaaatagtgcccccacaacctcgctcattcctatcttgggctccgcacatgtcttattaacaagcctaatacaaaccgcatccttccttttctttccacgaaggaccaaaatcacaaacggccaccaaacacctcaacccaaact

SEQ ID NO: 165238 - DNA, 258 bp, Glycine max
ccacaccgcgcccctatcagaaacccactcccgcgaacatcggaaaacagtcgaaaaccacgaccccgaacaaaccaatccaccaaccgccaaacacaaccgtgccaaccaaaggggaccacaagcaaggaacccaaagacccgcaccaaacgacaaacgaagcacatcaacacgacccgaggaacaaccccagccaccgaaaccaacaacaaaccaaaggcacgcgcccaaccaacactccgcggacgacacaaaaa

SEQ ID NO: 165239 - DNA, 346 bp, Glycine max
  unsure (1)..(346): unsure at all n locations
ttaaagagtgtgagtatcgccttttttttnncanaccaaccaacataacttgacctcatatccaacaaattataattgacaacacatgccccttcatgttcctctctctaatccttctttccccatatttggcttcctggctgtaaatcaaggagtcgcggaaacaggtcgactgtataccaaggtgctattgaagatgcacattctgcaatgtccatcgccgcacgcaaatggtggcacaatcaaataacattctatgccttatttcctatacttaacaatttcagtaccaattatttttaataaatatagtctttaatatctcggataaattatattttcctaa

SEQ ID NO: 165240 - DNA, 422 bp, Glycine max
  unsure (1)..(422): unsure at all n locations
cacctgcngcatgcagctgaaccgagacgcgggtttgttgttcttaancgcgagagaacgactagcatatagctatgatttttgcatcaatctctgaatnttagaatgaaatgcataaatgtggatatgatgaaggccattgttgtatatacaagccacttgactaaaaagcttacctgtttatcaatgatgatatcattttcacccatctgtgaactggattgtaattgtcaaattaaaccttaagctttgaaattgtcatctccatttaccttgcttagattttatgagagcacatgggtttaagacaattttgccccaaatttgggggagttggtttgatggataattctaaaggtaagaaacaacaacatatacggaaaattaataaaatgttctatgtgttaaaaaaggggggaaag

SEQ ID NO: 165241 - DNA, 357 bp, Glycine max
ggacacataaaactaagcttgcagtaacggtgctgtccatttatattcattcccaagcttagttgagacaccgcaacacagctgccgctaagttatgaaattcctaacagaagagaaaaggaaaacatgcattcacatttcacacgcacacactactctttctttctctgtgatggattcagagtgagtaaaagcaagcaagcctttgcatttggattgagacccgcaatggcacccaacaacaacagaatcaagggaactcatttccctaatttcgcttcccactttctatgccttcttgctcccctcctcctcttcttcccatctcccccttatgggctcattctcaaatctcac

SEQ ID NO: 165242 - DNA, 424 bp, Glycine max
  unsure (1)..(424): unsure at all n locations
agcttgtgtgggaccttatgttactttcaactcatccttcaagatcaaactatctactcgcgattggtccctttcctctctccggagcctaagctcactgttactgccccacagagcccctcagaatttgtttcggtcgtgttcttccctacgagccctttttgtctcttgctccaaggccttggtggtagctatatttacatctcttagttcggcattctcctttcggatcttaagagctgccgatttgaacctttctttgactgtttgagctngctcgagttctgccctaagggcctgcacctcttcatcttcctctggtgcctcaacttcctcccctttagcggttctcaaactcgggagccaatccaaaccttgcatgtgggctttcaaccacttacggtagccgccgatgggcccgttg

SEQ ID NO: 165243 - DNA, 354 bp, Glycine max
ttgagagtttggaatcagcattatgttaactacataatagacaatgcatataagacataattagtatgaaccatactaaacttcatgcttaagtaactaaattcagaggacaaaagattaggtatgagtcaagtatccaagtaagttattaatataactgaattaaatccaactaaaatcagtacaaccaaatatctaatttgtgatggtaatggattttagcattgatgaaatggaagaagtttgactatgcaagatgtggacatagattgaacaattacacagccaaagatataaattatatatatgtatgtgctctaagatcacaccatcagttgatttttgttgggatat

SEQ ID NO: 165244 - DNA, 443 bp, Glycine max
  unsure (1)..(443): unsure at all n locations
ggatccttaagncacctgcagctgcagcttgagatgggtcttcacattgtatgatcgaagcggatctgaaaagaggcaaatttaatcatcctgcttagacgaatgagaaaactggggcaaataaaaagggtgaggatgagggagaaacccatgctgtgactgccattcctgtacggccaaatttcccaccaaaccaacaatatctttactcagccaataacaaactttctccttacccaccacccagttatccacaaaggccatccctaaatctaccacaaagtctgtctaccgcacttccaatgacgaacaccacctttagcacaaaccaaaaacaccaaccaagaagtgaattttgcagcgagacagcctgtagaattcaccccaattccagtgtcctatgctgacttgctcccatatctacttgataattcaatgggagc

SEQ ID NO: 165245 - DNA, 351 bp, Glycine max
tcttttggaccttgaacaggctactaactcctctttcaaaaccatgctatgtgctcgtgactggcccctttcttcctttcgtaacttgagttcactattgctaccccatagagctccgcgaaatttcgtccggccatactcttccttgcgagccctcttggtctctcgtccaagggctcttgcggtaattgcattctcttcccgtaacccggcacactccttccgaacgtgtgtagcggccaacttgaacttcttcttggcaagttttgcctttcctaactcgcttttgagagcttggacttcttcgctctcttccggtgcttcaaaactctctatgctgacgacttttac

SEQ ID NO: 165246 - DNA, 196 bp, Glycine max
  unsure (1)..(196): unsure at all n locations
gctggggtttgacccacgccggtgttgaagagacggcatgggcatctccttccttcctttttgcccctgtcgccccgattcttttggcattcacgtttgtggaggaaacgtaatcaaactttcctctcttcaatccaaccctnaattctttccccgcaaacaccatatccgaaagctggacggcatgtaacccact

SEQ ID NO: 165247 - DNA, 253 bp, Glycine max
ttaccgactatgcccttcatgatgtgcaccaggcaacatcatgtatgaatgagaataacttgtcttactcattgagcgctatagaacaccttgtctgattatcataactctctaaccatgattcggttctcaagtgttcctatcgtgcaaggacggcgtttctatcggcccaatctatcacacgctgatcattcttgatctccctcttgacttcacacaatgatagccatttccagagcctctgctttaaccc

SEQ ID NO: 165248 - DNA, 355 bp, Glycine max
ttataagtgcgggtgtgggagacgtttgtttagtggtcgcgatatgtaaagatgatgttccaagaactctggatttggtccgaccatgccctcctgatttccagctgggaaattggcgagtggaggaacgccccggcatttacgcaacgagcataatgtaaacctttacggttttaaaagctctatagttgggcctaggctttagagttttcattttgttaaggctttgtgtcttttgtctttgaatttataatacaaggatctttcttcatctgttcctggtctctacccattctcattcatttgcatgtttacttctttttctaaaacggcagattcgatgacgagtcccccg

SEQ ID NO: 165249 - DNA, 350 bp, Glycine max
  unsure (1)..(350): unsure at all n locations
agcccggagagcgcgctgcgcactacttttagaancaccgcgtgagccctctttgtggctgacttactcggttaaccccattcccaatatattcgatgcatacatgtggatgggctaataccaggaatgtccgccagggttcagcctgaaacctcttgcttctcgaaaacaaataacagcttctcctcttgctcatcagcaagggaggcagatataattactggaaaacttctgctatcatccaagtaagcatatgttaaatttgatggcagaggctccaattttggtgtgggcggctggatagtggcaaaaagagatggattctcagcctataccccataaagaaagtc

SEQ ID NO: 165250 - DNA, 396 bp, Glycine max
  unsure (1)..(396): unsure at all n locations
agctcgaaggtgtgtggcccacttatttatctctagtaacangtctactatcattgttattatttctttcttcgtcattaagggaaacacttgggctgccagatccctccacctttgggcatattctttaaaagatccgtgccccctttttgcacctgttttgtagttgcatcctatccgaagacattatactgacactgcctaacgaaggcaaccattatgtccttctaagaatggactcgggaaggttccaagttagtgtaccaggtaacagctaccccagtaagactttcttggaaggaatgtatcagtaattcctcatcttttgcgtatgcccccatcttccgacaatacatctttagattggtcttgtggcaagtagtccccttgtacttg

SEQ ID NO: 165251 - DNA, 356 bp, Glycine max
tggtaggattgaccggcaccctatttatttggtaaaggcctgtgatcaaagcaggaaaccctagggccctgttggacttctccgggtccactgggtgtctaggaggcatgatccctacaaactgatatatagtgtctaagataaactagaccacatggatactcaccttagttaggatggcgtagactagctaacacttcggcagggggaggtccgaattatggtcgttggggagaatgttgttgagcagcaacgtcatccaaatctgtgtgagggtggtcatgatagtgcacatgatccgcacccgtctcttggccaccctttgggcaaagttctaccccagaatgcacaacaac

SEQ ID NO: 165252 - DNA, 422 bp, Glycine max
agctgtgagccgagtcatacgacaattatcttttactcggatgtctgattgagtcccgtaatatatcgagaccgtcgaaattgaatgttgaagctctaagccaattcaaacgataataacattttactcggatgtctgattgagtcccgtcatataccgagacgctcgaatttgaatgttgaatctccgagccaattcaaacgacaataactttttacttggatgtctgattgagtcccgcaatatatcgagaccctcgaaattgaatgttgaagctctgagccaaatcaaacgacaataactttttactcggatgtctgattgagtcccgtaatataacgagacgctcgaagatgaatgttgaaccttttagccaattcaaacgacaataaccttttactcggatgtctgattgagtcccg

SEQ ID NO: 165253 - DNA, 342 bp, Glycine max
tcaacattcaatttcgagtgtttctatatatgacgggactcaaccagacatccgagtaaaaagttaatttcgtttgaattggctcagagcttcaacattcaattttgaggttctcgatatattgcgggactcaatcagacatccgagtaaaacgttattgtcgtttgaattggctcggagcttcaacattcaatttcgagcgtcccgatatatgatgggactcaatcagacatccgagtaaaatgttattgtcgtttgaattggctcagagcttcaacattcaatttcgagggtctcgatatattacgggactcaatcaggcatccgagtaaaaacttattg

SEQ ID NO: 165254 - DNA, 454 bp, Glycine max
ggatcttaagcaccgcggctgcagcttccttgggattaatcatgattaataggatataagtcacaggaaatctatttaaacttctataatgctttattctaggatacgataaatttacaaatggttgtttatctctttatgattaagcaaacattaaggcagagatagcatatggtgaagggggtggaaggggttgtggcaacagaatagactaaaggaaaaggcacagcactaatgggagtggcactatcacactgcaattcttgatattccaggaacaatgaactgatccgctatggtggcccatgtagaggcctctccgctgttatagcagcactatggggcactatttaaatccctggagtcatattggaagtaagggaatttggtgtgcgtctgtcaagggtcttaatttcttatcatgtaccttcaaagttatatataaggcttatgc

SEQ ID NO: 165255 - DNA, 358 bp, Glycine max
ttgtttggactattatataagtctcttgtgcctctaacttaaacctttgacaatatctaaaatttgaccggagaatatttctacttgtctgggaaacaaggaggatcttgcgttccaagattttagtgcaaatgtttagggtggaaagtgactaagtgagtaccagatgcaaaagtgaacgtgggatcattgtgctagggtcattagtaagcagagaatttgtacttgggttcacattccccaactatcaagaaagattgcaagatatattctcagttatttttctcacgtggatgccaagttgtagatcaaatttcaccggctctcatgtctttcaatatttaagtgtgattttttt

SEQ ID NO: 165256 - DNA, 437 bp, Glycine max
  unsure (1)..(437): unsure at all n locations
cagctngaaattgcatgcgggcacctattttttatctcctatgncgnctctacatatataaaacagtcccaccatcccaatttcgcaaaatcatattcatatatcattggggcatttcaccgagcacttggggggcgcacgttcggacacaaattgcaagagaatggggacaatgtggcatgccccattgcttcagaatacaacatatgcctaatgccttctcacacaaaccctcaactcataaaaacaagcatggattcagatgcgaattgcttcacgaattttgaaaaaatgagcaactaaagcaccaaaacacatcaatggagagccaaataaccaagggaaattgcacttacttgtggggagtgaattaaagcatgaaaagggaagcaaaaactcacaatggaagcttggcggctgctgttctcatatatccc

SEQ ID NO: 165257 - DNA, 356 bp, Glycine max
tgacaggattgatggggacgccgttttgtttatatacgacgatatgggctacgtgggagtacgtgagcccacatggacgtgggcaacaggggatggcgggtttatgcgcgcattgtggatgtggaaagcttgttgtgcaccatctcccgaccgccacctactaccaaatgtgatgggtaccccataattctacaagctcgatacgaggaactgctgatgggcgaaacttcctgcttttattgttgaccacagagcggtacctggagatatgtatcgggggtcaggagaccttggggacgtcaggtggggtgctcttggccataaccaagcttgaccaatccccaacccaatgcggg

SEQ ID NO: 165258 - DNA, 385 bp, Glycine max
  unsure (1)..(385): unsure at all n locations
agcangngcatccaatacgaccgagatgatgttctatacgcncttaaaactggacggatccatttgcttccaaagcttcatggccttgcaggtgaagacccccacaaacatatgaaagaattccatattgtctgcttcaccatgaaacctccagatgtccaagaggatcacatatttctgaaggcttctcctcattctttagagggagcggcaaaggactggctatattaccttgcctcaaggtccatcacgagctgggatgacctcaagagagtattcttagataaaattttccctgcttctacgaccacgaccatcatatatacaactcattggagagagcctatatgaatactatgagagatccaaaaaactatgtgccagt

SEQ ID NO: 165259 - DNA, 356 bp, Glycine max
ttataagtgcgggttcgggagacatttgttttgcgtccgcgatatgcgaagatgatattccgagtactttggatttggtacgaccatgctctcctgatttccagctgggaaattggcgagtggaggaacgccccggcatttacgcaacaagcataatgtaaacctttacggttttaaaagctctatagttgggcctaggctttagagttttcattttgttaaggctttgcgtcttttgtttttgaatttataatacaaggatctttcttcatctgttcctggtctctacccattctcattcatttgcatgtttacttctttttctaaaacggcagattcgatgacgagtcccccga

SEQ ID NO: 165260 - DNA, 342 bp, Glycine max
  unsure (1)..(342): unsure at all n locations
catgcaagcccangcgcatagagcgctacgaatttttacttgctcaagacatcctattaactaagaaaaacgcacccatatacaaccaaggcagctccattacctacactaactacatgtacttccaaagcgcacctggtatttacatcatacacgccatcacgccaaaattgacagacatgcatacccacagcattctggggtaccaaaaaacgcaaatgtgcacatctcgggatttctaatacccatacatacgcaaacatcatgacgaatcttgactatcttcacaaaaaggtgctacacgcgaagctctcttgtcaagattttgctacttaaagccgc

SEQ ID NO: 165261 - DNA, 359 bp, Glycine max
  unsure (1)..(359): unsure at all n locations
ttgatggcgtcaagaagaaatcacatttttgttatcatcaaaaagggggagaatgtgaatgtatgtatacatgactttgatgatgtcaaagaagaatctaacaaggctgcttcaaatgataagcatttgcttcaagaataattcaagattgcttcaacaaacaaagccttgtttcaagattcactaaagaccaagccttgccttaaaacaatgtgctttcaagacatgcaaggctctggtaatccattaccatgaagtgtaatcgattaccagaagacagggttgagaaatagctgttgaaaaacgttttgaatttcgaattttcaacatgtaatcgnataccatatgtctgtatccat

SEQ ID NO: 165262 - DNA, 357 bp, Glycine max
acactctctaatacttacgcattgttgggactatgtagataagtaccttttttccctaacttaaaccttagcccctatcttatatttgaccggtcaatatatctacttggctgggaatcaacgaagatcttgcgtgtcaagactttacagcaaatgttatttggctggaaactgactcactgagtaccatacgccattgtgaacgtgggatcattgcgctaaggacaatatttggctgagaatttgtacttgggttaccgttgccgcattatacttaaagattgttagatacacatacactattatgtctcacaaggatgccaagttgtatatcaaatttcaccggatctcatgtct

SEQ ID NO: 165263 - DNA, 256 bp, Glycine max
taaaaccacaccacaccggccgcgccaactacttagacgacctgccccgagactctaaaaaaccacagcatttcacaactgctcaagaaccgaccaaaacagcacaaaaccggccaaaaccggcgccgaacccgcataaaaaaccggcgtcgaaccggtcccaaaactacttctcgcctcccaaatcccattcactcaaccaaaataccctcaagacacacaaaaccacattaaacaccccacacacagaacaacc

SEQ ID NO: 165264 - DNA, 367 bp, Glycine max
tgaaaagtaaagggcagatgacattaatagtctccgcaagacaaaagactctgatagcctttgaaatctttcactaaaatgcgaacatgcttagcaaagaaacaaactcccaaaccgatcagaacaatatatattttaaaaaaaaacaatgtgattaaaaggaaatgaaagcatgcaggtagaatttctcataacccgaaatgagttctaagaaatttacatttcatttctaaaagaacatcagaaaaacactgggtccaatggaatagaagaaaactgctcaaggtgtataaaatctcacacaggcaagtgtttcatcgtaattccaaaccacagatatgtcataaacgactcttgcagtcatttc

SEQ ID NO: 165265 - DNA, 375 bp, Glycine max
gacactataaatactcagctttgatggtgtctggaagaaatttcatgtttgtcatcagcaaaaagagggagaatgtgaatgtatgtatacatgattttgatgatgtcaaagaagaatctaacaaggctgcttcaaatgataagcatctgcttcaagaataattcaagattgctttaacaaacaaagccttgtttcaagattcactaaagaccaagccttgccttaaaacaatgttttcaagacatgcaagactctggtaatcgattaccaggaagtgtaattgattaccagaagacagggttgagaaatagctattgaaaagggttttgaatttgaattttaaacatgtaatcgattaccatatgtttgcaatcg

SEQ ID NO: 165266 - DNA, 422 bp, Glycine max
agcttgagtcgtactttgtagttgtttttgcatgacttccaggattagcctccattaatttttcacagaagaaaggtaactgactatatgcctctttataagaaccctgaagctgctccttagcaatctctttcccacgccatgcctgaaaatagttaagttgaattccatattcctgtttgatgtcattgacaatgtccttgggcttgtaatccggaaaatctttcaacttctcctttataatactggctacccaactcctagttgcttgatgccctgttgttgcaaaagccccttcacagttatgagttgaattcattttcttgatacatattcaactgagtagttgacagccttgatgcatgtattctccaaggacaaccttctgccttgcattaacagttacacaatgactatcattt

SEQ ID NO: 165267 - DNA, 356 bp, Glycine max
tgtacgcacatcgttctcgtgtttgatatcaactccacaaggtttgaagtagaggagagcttcaaccctataacgcaacgtggcggacaaaagtgggcagttaacttgaatggtcatcattgtcaatgcggaaggtattctgcgcttcactatccatgttcacacattattgcagctggtggttacgtgagcatgaactactaccaatatatagatgttgtttatacaaatgagcacatcttaaaagcttactccgcacaatggtggcctcctgggaatgaagcggttattcctccttctgatgacgcatggacacttacccctgacctaactacaattcgtgcgaaaggtcggcc

SEQ ID NO: 165268 - DNA, 427 bp, Glycine max
agcttctatataagctgaatccatttatcaataaacacaagttgagttttattcagaaaattagagcttatctcttttatcttagtgagagtgattctcctaaattcttgagtgattcaagaacaccctggctgtatcaaaggactttcacaacctttgtgtgttgccctcgctagaaagagtgattctttccttcctttcatcttcacccttgttctttcaaaccacaattccagaaaattcacctctgcccagaattatctcgtggccataactcccattttacgcactcaaattaagtgattcttgagcctaaattgaatttcaaaacgagacctttcacctcgttttggaatcacctcatttggagccctgtagcttcagttatttccatttctatatttctggccagccaccacttaaccta

SEQ ID NO: 165269 - DNA, 351 bp, Glycine max
tatcgtaatcgattacaaaatttgtttgaagcttgcagagttatgtctcgtatcggtttaatcaattacaaccttatcataattgattatgtcgcaacctacccttcagcgggaaggtgaggcgtgactcaagggtgagtcttcctaaaaagaaaatgcgcgggagtcgccaccaacgtttattcaaggaaaatgttagaaaaaccaaaatggggtctatgaattttaagaataagggttcgggagttgtttacgtgcggggaaggtattagcaccccacgcatctgtcacaagggacagcagcctttaattgagtgcgaaaaatcatgagttcaatgtttattttatttt

SEQ ID NO: 165270 - DNA, 329 bp, Glycine max
agcgtggatcgagggacttacccgttttagatcgacaaacgatgaagaacggatgaagaacgtcgaagaacggtcgaaaccttcgcgaaattcctcacggaaacgttacggaaaagtttcggaagcgcctcggcttaaattttcttcacggaaacaatttttccaagcaaattctaaagagagagaagtgcctaaggggctgaaccctttttcacttcacttcctcccctatttatagcaaaataggggagatgcttgccgcccagctcgcccaggcgagcagggttgcttcctccacaagcaacagccttctggaggaatcttctgga

SEQ ID NO: 165271 - DNA, 347 bp, Glycine max
tacccattctgttttagggtttttattatgatgcttgtgatgtttatgtgctgaaattgcttatggaaagctgttagagatgaagggtagagttaacctagggttagaaggtgagagtatggtgttgtgagtggaaaaagagtgagacttttagagttggaaggccaaatctggatttagtggtatttggaggttagagtgagttaatcctagcttgaaatgccatttaggacttatgagaaagtttgggttgtgctagagagaaaaacaaatgaccaaagtgaacaaagagccatttctagggtaaatttgggtgttgaggagtcaaattttgattcggtggaatt

SEQ ID NO: 165272 - DNA, 447 bp, Glycine max
  unsure (1)..(447): unsure at all n locations
cccaagcacctgagctgcagcnnctaagtggagaggcgctttctcnttctaagagncctctcacgagatggaggttgagccatgttctcagtatgaaaattactggttgaatgctcaatatcagaatattcagattcaccaacaacaaaatactcagaatgcttaaaatgctgacaatgctcaaaatgattaggatgcacactatgcctaactaatctatgaaaggctgtatctatttcaagatcaaagggttgtaaatcacctgcatttcccctagtcatgcactatatgaagcaaataatgtgttctcaaacaagcgctaggagaggtgtaaaactacaactataggctaatgatatccaaataagctgaaattttgtgagaaacaccctacaatcatgaaaagatatcacataaaagttcaaacaaaaattccaagtctaacta

SEQ ID NO: 165273 - DNA, 357 bp, Glycine max
  unsure (1)..(357): unsure at all n locations
nnnctttctgaatgagagcctgcctattgctttacaattctaatttcaagttcgcattcttgttctttctttgtctaacatacatacttgctcaaacttatgaaaagaaacacaaactccatcacaatcatgcattcaatccaaaatcaattcataacaccaattttcacaaaaagataaaaatgtttcactgcataatcatccaagtcaagttaaactattccatatgcttcaaaacaagcatactagctatccacaaacaaaaaagcagtgtatataaacattaaccaaaataactaagacactaaactgaaatataataattatataaaaaatatccaaaaagcaaaatcctca

SEQ ID NO: 165274 - DNA, 358 bp, Glycine max
  unsure (1)..(358): unsure at all n locations
tgntggtgaacgtgtgttgaaaaatgtttttctcgagagttgaagaaaatagaggatatgttgaccccaaaacgattcatcttggaggctttacgtaaggctggcatggttaaatacaatggtaataaaggagatcaattcccgctgcatccaggggagtatcatgatgtacaaacatgcccgcttcaatgtcttctgtcttttatgctttcaaagacttcaatgtcttctgtcctttacgctttcaaagacttcaatgtcttctgtccttttacactttcaaagacttcaatgtcttctgttttatgattttcaaagacttcaacgtcttctactttatattttcataggactcaat

SEQ ID NO: 165275 - DNA, 360 bp, Glycine max
  unsure (1)..(360): unsure at all n locations
tttntggatgctgaatatcagcccttttttatttcccaactctcataagctcaatgctttggttactgattaatatcggcagtttttgtaccagccaaaattttacatttcataattttggttgctgtggatttatggtgctctttccctgcaagttgtgaattcaagggttatgtcctgctgtctttctattggttctttcgcaaatgaaatatatatgtatattttcaagatatcattggcatgaaactgtgacttaatcagttgtgtgagtataatgtatgaactggttcgcgaatgcaccaatatcttgcaaaattagctcgccagtgatgttagattttaactgtggaaaataac

SEQ ID NO: 165276 - DNA, 424 bp, Glycine max
  unsure (1)..(424): unsure at all n locations
agctntattgtaaaagccataattgttttgaaaaanacttgtaactttatgaaagttagtgaaaacttagtggattatcaagaactgaacgtagtctcattagtagagacaaatcagtataaaacgctcaatgtctgatctatttttcttatctgctttaattgaccaatggtttaaatttgattttgtatataaaagtgtttgcaaaatcttttaagtatcatttaactatgtttgtttgtgaaaaccttattttttttcctttaattttttcaaacaatggttttctttgataaaaaggtttccaaaaaaatttaaatcacaattcaactctcccttcttgtgatatttacttttatagaaacttctcttctagtgtattccaatatgtgagaccgtgattaggatgagattggagcaaagt

SEQ ID NO: 165277 - DNA, 351 bp, Glycine max
  unsure (1)..(351): unsure at all n locations
tacagttgatgagtattcnattttttttactccattggatactggaacagctaaaggcttaaccaagggaaaaagagtcatcttaccctcaacgtttgttgggagcccacgttatatgaatcaactttacttagatggtatgacaatatgcagtcatgttggttttccaaatctttttattactctaacctgtaatccaaattggcctgaaattcgtagattactttcacctttgaatctcaaaccaacagacaggccagatattgtatcacgaattttcagattaaaatatgaacacatgctgtcagacttaacaaagggtcaattactgcgaaaagtggttgcatgtca

SEQ ID NO: 165278 - DNA, 356 bp, Glycine max
tgcccactgatgtaagctccattgtagcttgtaggcctagaatcttcttcatcaacggattcctttgcttcttggaagatgaatgacagtggaatggagaaggaagagagagaggagatgccacttcaaggagaagatgagtctagaagaagttcaccaccataggaggccatggataagagcttggaggaagaaggaaatgaatgaagggaaagggagagaagagcacgaaattttgtgctccaaatgagctttgaaatctgaagtttaatattcaaatgatcaaagttaaaaaaaatgcacacacatgacctctatttatagcctaagtgtcacacaaaattggagggaaattt

SEQ ID NO: 165279 - DNA, 354 bp, Glycine max
cacacataccctcaggaatagctaagcccacccttctagagatgagaagctagagcctagctacacaccccctataatagctaagctcacccccatgacaaaaaacacgaaaatgacaaaaaaagcccttactacaaagacaactcaaaatgccccgaaatacaaggctaaaaccctatactactaaaatggccaaaatataaggcctagacgaaggaaaaacctattctaatacttacaaagaaaagtgggcccatacttagcccatgggctcgaaaactaccctaaggcccatgagaaccctacggcctttccttggatctctaccccaatctacttgggagtctccaacca

SEQ ID NO: 165280 - DNA, 285 bp, Glycine max
  unsure (1)..(285): unsure at all n locations
gcccgtatttcttgaacccgngaggaccaccacggncgggacccacgcccgacaagtcccacgcgcaacgcacgggccgcgccctcgcacacacatcactcaccatgggaggcacgtaccggagacaccgagccgggaatcacaaggactaaccaagggccgacctagggatatgcaagcccttcggaggcacgacagggaaccgtcaaaaccgggccccgggccccaagccgtcgcatacacgccactcaccacggggggcacacaccgccgactcaacggcgc

SEQ ID NO: 165281 - DNA, 242 bp, Glycine max
aacccccattcccacgcaagcttaccaaatgacgtcccgcaaagccacatctacctcactccacagcccactatcacggccagcgaccaaaagccacaagaaccacagcaaagggccgagccacccaaaaagagaaagggagcatactccaacgttaccgctgatgcgcaacgacggcacggcccatgcggaggacccacagcacccaaacccgactgcatgggaacatcaagaacagcaac

SEQ ID NO: 165282 - DNA, 356 bp, Glycine max
ttgcggattgtggtcttcgccgttgttttttttaagcggatctgaaaagaggcatatttaatcatcctgcttggaccaatgataaaaccgaggcatatgaatagggtgaggatgagggaaaaacccatgttgtgactgccattcctatacggccaaattttccaccaacccaacaatgtcattacttaaccaataacaaccattctccttacctaccacccagttatccacaaaggccatccctaaatcaaccacaaaatccaccttccacacaaccaatgctaaacaccacctttatcatgaaccaaaacaccaaccaaggaaggaatcttgcgcaaaaagcctgcttaattcac

SEQ ID NO: 165283 - DNA, 322 bp, Glycine max
tagggatggaacactcacttgttttttatgaacaaaaccgcaaatcggaatccaaaacagcgaaaataggtgaccctaaggctgcaaattcttcagtcccgcggttatggattttgaaacgggggaaaagaagttattgaatggaaaaacgcccccctttcgtcatttttataattgggtgcaagggtggatcgcccagcatagaccagctcggacagacgagctaacccccactctgtcttctacatttatggtgtttcattgaggggaacattatccatgacgccttccttataaggatcgcattaagcctactcgaact

SEQ ID NO: 165284 - DNA, 375 bp, Glycine max
  unsure (1)..(375): unsure at all n locations
cggaactgtccactgcttttcctgagaataacaattgcttgaccacaacagcgctggaggcggcaacggacaatggactttcaaataaacctgttgtacatgaacaaacattatatcatgcgctgaccgngccaaacgaaccatcgaagtcattgcataactgttacactaactatattcaatgtacctgaacaaaatgatttccaaacacgtgaccgacacatgatgcggtggccacaagaattaagtggcggttgactcctaacaggaaaaatgtcatgctttgttgctgggacaacgatacaaggattacgccataccgtgaagccatcacatatcccatcgtcgttatatccatccactcgcccaactaac

SEQ ID NO: 165285 - DNA, 353 bp, Glycine max
tgcccactgatgtaagctccattgtatcttgtacgcctagaatcttcttcatcaacggattcctttgcttcttggaagatgaatgacagtggaatggagaaggaagagagagaggagatgccacttcaaggagaagatgagtctagaagaagttcaccaccatacgaggccatggataagagcttggaggaagaaggaaatgaatgaagggaaagggagagaagagcacgaaattttgtgctccaaatgagctttgaaatctgaagtttaatattcaaatgatcaaagctaaaaaaaatgcacacacatgacctctatttatagcctaagtgtcacacaaaattggagggaaa

SEQ ID NO: 165286 - DNA, 450 bp, Glycine max
tgcccggatccttaagcaccgcggctgcagctttaatatcctgtacttaatgcgtaatcaagtagccaaatcaacttatgatgatatttattaatcatattccatgaccataaaccaatttttatattattaatatataccatagaagtcaaaagaaaatttccccaaaacaacaaaccttacacaaattaaattttgaatttggcattgtatgaattagtccccgtcgttttaatctatacgtatataattaatacccgaaggtattttcaagctaaaagaaagattctttctcccaaaacctggaaattgaagcagatctcgagccagaaattgaggccaatgtctattcaaacaattccatccattcaaagctcataaataaaaaataaaaaaataaaaaacaattgtaactttgtaagatattaaatttttaaaaaaaaattcaag

SEQ ID NO: 165287 - DNA, 355 bp, Glycine max
  unsure (1)..(355): unsure at all n locations
tgggttntttggtcttgcaagccacttttggttgcgttttgtttcattttttcatattcctactcactcaaactagtaagtattcaatccttgagttttttgctttccattggtgtattttgttcatcttttggagctctaagttgtaagaatgtgctcatatttgtggggcagttttggggttttttatgcttgatgtgttagagttgaggggttgtaggggatgaccttaggcctatgtggtattctgaaacaatggggcatgccacattgccctcattctcttacaatttatgcctaaacacgcgcccaccaagtgctctgtgaaatgccccaatgacatatgaatgtagtt

SEQ ID NO: 165288 - DNA, 256 bp, Glycine max
  unsure (1)..(256): unsure at all n locations
catagcaccggcgctgagctgactcgaactacccgcctcaacactacggcacccacaccccaacacaccgatgacacccacatccgtcactcccctccacatacgaaacgacacctcaccctactttcccgcactaagaaaanacgaagcgactatcatcacaacataaaactcaatcaacaacacccccttacttaagtgaatatgcacaatcacccacacacaacaatctgacaccccccatacatatacccaa

SEQ ID NO: 165289 - DNA, 246 bp, Glycine max
gtataagtgtggccctacaccatggattcgctacatctatgtggacgccaatttgggcaaaaatttgagcatgggcgtgcgaagcgcgccgctatcaaatgaaaaacggtagccacagaggggctatgcggaaacaactccggccaaagaagttgttcgggaacaaagatgacagaccgcgactaaagaaatcgaaccgacttatctctcaggcgaaagcaaccaaccacgacatgaagagcgtga

SEQ ID NO: 165290 - DNA, 359 bp, Glycine max
cttctagacgtcgtactgcggatttcttcattttacaacgcatcctccagacaaggagtaaatggcatttattactgaagatgtcaacttttgctacaaggtcatgccattcggcctaaaaaacgtacgcacaacatactaacgactaatggaccaagtctttaaacaacaaatcggatgaaaagtcgaggcatatgtggatggcatggttgtcaagtcttaaagcatattccaacatgtggcacactacgcacataccacatgtgcctcaaccctaaaaaatatactttcagggtaggcggcggcaagttcctcagcttcatgtaccactgtacaccccagacaacaacccatgaaac

SEQ ID NO: 165291 - DNA, 159 bp, Glycine max
  unsure (1)..(159): unsure at all n locations
ggacccaagcccgcgccgcacgcgagcgagagcctttctttancgaccccgagagcnttcaaaaacattcaacaccacactctttaatcggctcctaacacccccagggggttatatatgggcctgggacccaatttactagaggtttcaaacacaagg

SEQ ID NO: 165292 - DNA, 351 bp, Glycine max
cttaatacctacatgaaccgcttattatatacatccatcgtaaaaaaaatgggcccacacaacctgatctccctcacaagatgaataattaagtgaatcattatgtccaaaatgaagggggaaaatacatatccaattgacaaagaataatggcaacctcattttctagatcatctaattggtgagggttaatgactttgctacaaatagcattaaagaaaaagcacaaacgtgtaatggcaaccctgactttgtcaaacaagataccgcgaacaacaacagacaatagttgttgcattaacaacagacaataatggcaacctcagggaacttgcttattagacaaagttt

SEQ ID NO: 165293 - DNA, 374 bp, Glycine max
  unsure (1)..(374): unsure at all n locations
gccctcanaacttgtttcggcccacatcttctttccgggccctcttcgtttcccattctaatgcctcagttgtggccatgcctgacgtctcctcatttatgtcgctaatactttccagaaccttgatgagtcgtccgtcttgaacttttccttgaccacctgggttctttcaagttccgccttcaaggcttgcacctcttcactctcctcaggggtttcaacctcttcctcacttgaaacctttagctttaggagccaatctgtctcttgcattcgagccttcaaccacttgttatagccgccgatgatctcattgttgcttactctaagctacttatcctttcctagcaccacaatccatggctttctgactc

SEQ ID NO: 165294 - DNA, 350 bp, Glycine max
taaaataagcataaattcatatttagggggagaaagagatgagtgaacgatataacaaaacttgtatgtatcctcttgatttcaagattgtcatcatcaaaaagggggagattgtggaagcaatgtcttccaagattattttgataatgccaaagaatcaagagtcgagcaagttccatagaatcaagatttacattcaagtttcaagaatcaagatcaagattcaagattcaagaataatcaagatcaagattcaagattcaagaatcaagagaagactcaatcaagataagtattaaaagagtttttcaaaaactattgaatagcacaattttgttcaaaagaatttt

SEQ ID NO: 165295 - DNA, 415 bp, Glycine max
agcttataatatatcgagtcgctcatatattaacatcagaaactctcacgaaattcaaatagtcataactattcacacggatgtccgattcgggcgcataatatgtcgagaggctcgaaattgaacaacggaagctgttgagaaattcaactggtataacttttcacacggatgtccgattcgggcgcataatatgtccagaagctcgatattgaacaaccaaagttctttacaaattcaaatggtcataacttttcacacggatgttcgattcaggcttataatatatcgatacgctcgaaattaagcactaaaaactcttgcgaaaatcaaatggtcataacttttcacacggatattcgattcggcacataatatgtccagaagcctgaatttgaacatcggaagctcttga

SEQ ID NO: 165296 - DNA, 356 bp, Glycine max
tgaatcggatatccgtgtgaaaagttatgactttttgaatatctcaagagcttccgctgttcaatttccagcttctcgacatattatgcgcccgaatcggacatccgtgtgaaaagctatgaccatttgaatatctcgagagctttctatgtttaatttcgagcgtatcgatatattataagcctgaatcggacatccgtgtgaaaagttctgaccatttgaatttgccagagtctttcatgcataatttccagcggatagatatattatgcgcccgaatcggacatccgcgagaaaagctatgaccatttgaattttgtcacgagcctttgttggtaaatttcgagccttttgat

SEQ ID NO: 165297 - DNA, 356 bp, Glycine max
  unsure (1)..(356): unsure at all n locations
ggcttacccttggtaggagggccatcttttttttgtngcncctaagttgaccaccgccaggagtatccctgctcttctacctttcaatggcagaagaggccatcaactcagccctcgtccaagaggatggaaagcaccaaatacccatctatttcgttattcgcgtccttcatgatgttgagaaacggcaccaaatgaccaataaggtagcattggcactcataacctctgcttgatggtcttgcctcttactacaaacatccctttgaatgtcatactctcactttctcctccaacttcataaatgcggaggtccataataatggtctcccatcttggaatctcacaagattctc

SEQ ID NO: 165298 - DNA, 356 bp, Glycine max
  unsure (1)..(356): unsure at all n locations
nnatagacgtgttggtcctgacgttcattcttccgccccnggcaagacaaatattgatgttgaccgaatacctgctggattaccttgtggtcgtgaaggatttctattaatgtatgctccatggaaaaagcttgaaaccgacctgtataatgaacgcaaggagtaagcattctccattatttggtttagacttgttgctttgttttaaccttatcttttcaatatattacacatacacattagctacatacatgaccaaaattacaccagaattttttgaaactaattatttcttatctgagaagctaaaacttattacataatttataacgacattatctatatttgtccttatt

SEQ ID NO: 165299 - DNA, 303 bp, Glycine max
  unsure (1)..(303): unsure at all n locations
gtctaanaatctaaacncgggtcccgaaagtggaacggcctgaaaaccacgacatgcttgcgagagctctcccgaatatggctgccccacgaggggcacttcacccccacggagcatggaaaacacccctcgacggtatgtaaacacgtgtataacaatagcgagcacggaaaacaccccccaacggtgggtccatatggcataaaactccttgcaaagcgagaatgacgagcacaaaaatgcctttccacacatgcgtatctgaggagaggcagcattaggagccccctatacaatgcaccc

SEQ ID NO: 165300 - DNA, 360 bp, Glycine max
cgcgatggctgagagtatatatacatttatatacaaaaaagaaaagaaaaccccctgaggttcgcacttgcacatttgagaagaaaactcattggaccaaaagctcatgggaaaagcccgaagacaattgcgatagtagggtgcatttgatgatagtcgctcatgcagactccttatgatgtcttttgaatccaaggatggcctttgttatataaattctttcatgatcagcccatgtcataaagtttcagcgggatcgatagaccaatggcatcactctatgaccttaaatcaagaaagtttcacttggtcatataccaaagtgtaacaatccattgtcatccttcaacggcgcatgcg

SEQ ID NO: 165301 - DNA, 227 bp, Glycine max
caccgcgcgcaccggggaggatattgggacgaaaaaaggcacctagcctcccccctaaatgcgagaaagtcggaaaaaccaccggccccgacgcatcagaaaccaaatccaccgcaaaaatcacctcgcctaccactccctcacgaagaccaaccagctcataacataaccggggcccaccgcccgacttacccgtcaactataacccatgcgccacccaacaccac

SEQ ID NO: 165302 - DNA, 237 bp, Glycine max
cccacacataccgcagagggccccccgcacaacggctcaacccacacaaggcaacaagccgaccacaacaacaccaaccacaaaacccaaaaaacaacaaatcacaccaaaaacagcacacccacaaaaacaacacaaacggcgcaacaaaaaccgaccgccacaacccggatcaaacgaccgaacacatcaacaacgcccccaccgtacactcaaatacaaccagcacaaccaacc

SEQ ID NO: 165303 - DNA, 311 bp, Glycine max
attttgagccacaatgaggcccccccacggtgacctttcacccacgagatgcagcggaaggccaatgagaacatgataggggaggcaccatccactagggacaacacccaggaacaaggaccttcaccaccaagaattgccccgcataagaagcttgacgaggatgcttcaatggaggatcaaaaagagagaaggggggaccaccaaattgaacgaatcaaagaaggaaagaagtggaactctgaagcgcatctcatacgaccctcatccatcaaagttacaacaagtgttacacacgctcctattcatac

SEQ ID NO: 165304 - DNA, 375 bp, Glycine max
agctctctgaggagggggagagacattttttgctacgactaactcactttaacctccatttaccacagaatccagatttaaccttccaactctcaaagcctcactctttctccactcataacaccacacttctcacatttctagaacctagggttaacctctaccccttcatctctaacagtttccataagcaatttcagcatataaacatcacaagcatcatcacaaaaaccctaaaacagaatgggtatgtctaactcatccaaacatggcaagttcaacatgctttcaacaagagtcttcacaaataactatcacgaagcagaaaactaacagaactacccatcatatcttccataaccccatacccacgaa

SEQ ID NO: 165305 - DNA, 355 bp, Glycine max
tgaatccagtgtacccgcgcttttcttatggtggcgctaagcgcaacgccgcgaattcagagcctacttaaagcctgtcttgtgcaaaattagggtacactttgacacacacttttacagacttttagacaaattgtaggcagaagaaagggcatagattctagagcacaccacaatgcctattaggggaaaaaagccctagaagcatcaagaggagcaacttgtgcattgaaacctaggttttgtaagattattattgtttgggtttctttgtaatggctagctaagcaccctagttggggatttctaatgaacatctgatgtaaatacctaatatctaattgattatgttttc

SEQ ID NO: 165306 - DNA, 404 bp, Glycine max
agcttctccctattgtgttaaattgggttaaagcgaagaaaaaaagggttcagccccttatgcacttctctctctttcgaatttgcttaggaaaattgtttccgtgaagaaaatccaagccgaggcgcttccgtaacgtttccgtgagaaattacgcgaagattctcgaccgttcttcaaaattcatcgttcgttcttcgttatcttcagtcttcaacgggtatgtacctcaaaccaagcttttcaattcattatatgtacccgtggtggtccacattatggttcatggattatcattctcgttttcatttactttttattccccctttgacgtgcctaaaccatttattcaagtcatttctcgcttaatctaacaaaaaataatttccaccgaccgttgaatt

SEQ ID NO: 165307 - DNA, 353 bp, Glycine max
tggagtgaatgctgcaacggtttttttattgagggcgcgaaagagagaggggggagcacgaaattgaaggaataaaacagggagagaagtggaactttgaagtatgtctcacaagactctcattcatcaaagttacaacaagtgttacacatgtttctatttatagactaggtagcttccttgagaagctttcttgagaaaacttccctgagaagcttctttgagaaaacttccttgagaagctagagcttagctacacacacccctctaataactaagctcacctacttgagaagctaccttgaaaagattcctaaagaagctagagcttaactacccacacctctctaata

SEQ ID NO: 165308 - DNA, 334 bp, Glycine max
ttccgactggcagcagccttctatccctcatttattcccacctagagcaattccaaacaaaaagatggaagttgtggaaaaggagactctacagacctttacgaaagtagaggtgaacatacctctgctagattccatcaagctaattccaatatatgccaagtttctaaaggagctgcgcacccacaaaaggaagctcaaaggcaatgaaaggattaacatgggtagaaatgtgtcatcattgataggtaaatatgttcctcacatccctgagaaatgtaaggacccacggactttctgatactctgccagtgaaaacttgatgaaaaaagat

SEQ ID NO: 165309 - DNA, 307 bp, Glycine max
ttttcaactaccaaacaaacacagactacactcttgagtgaacatgcataatgaaatcaaacataatataacatctatatcacataccacacactggagtgaatccaaaaataaatacctgtaaaaagtcctttgggcaaacataataaaacttgaggactcttggcaataaacagatataactgtttgtttcgaactccaagttcaacacactgatccaccatcgactaaagcttagacctttctatctgaagggataaacaagagacttcaactctacagtagaatatgttttcaataaaaaact

SEQ ID NO: 165310 - DNA, 284 bp, Glycine max
ttgatatctccaccaagtcgcttgtatagtacactttgcctactatatactccaatgaaggattcgttacaagaatataggatcgagcacttaccactacgccaaaagctatagctgatagttagggcacaactctttctacttaaaagtataacagcccaagtgccacgagacgactatgactcgacccacctgggcctccatcactggacaattgatgccacaacccaacaaataggggttagtgctaataccttgaaatgatcgctgtctcacactgagaa

SEQ ID NO: 165311 - DNA, 347 bp, Glycine max
ctcaagagtgaagcagacatttttttgtgcgagcatgcaacttccggattcgcacctattcctccaactccaacaattctacctttgctagtcgtctccatacatcacatattcactatctttgggagaaatatgaataatctttgacgcaactcccgccatgtgtttggggcaaccgctatcaatgtatcaactttgctcttctccacttccataatcttttaccatgagagccaaatttatgattctatctttctgaatcacttgaagaatttatgtcattatcttcccaagcgatgcataccttcccttttgaaattccccttgccggattctccattcttctt

SEQ ID NO: 165312 - DNA, 426 bp, Glycine max
agcttaaagctgtgttcagagatattttattttcccccttatatacgtaattactgggtacaaatgacttctgttctgaaaccgtactatctaagggacaaacatttttattaagatatagatatataattgtaagacagttaaaataacaattccatgtagttttctgcatgcttgttgggaatttgacttaggcaaagttatttatgctttgactatctgctacattggacacaatttgcaccttttctctatctttcattgaagaactctaattaattggaagttggtaagacttaagagtacatggggatctgtttgctttgttatgaagttattacttattaggcatcttttaggatgtttcttcattgatatttctttttaaataccagtctgtgaagtggctggaaaatcatgtcaagt

SEQ ID NO: 165313 - DNA, 357 bp, Glycine max
  unsure (1)..(357): unsure at all n locations
ntagaaccacgcctcttgctttctctttattaacgttgagatccaacgagattctttcatatacttcctcctcatagtatttagaaacaagtcaaaatgagtgcattatcgctagctatttgtggttgttgatccttagtgacttccccattagcttcttttccagaaacatttgaattcttttcaaccaattttgtaaataacaaatagcgtaggttttgtgtccaaaagtttcatgctttacagctgaatccaaagaatctggactaataaaactgttgtgaagaaccaaagacttagactcttctgttagaacatagttagatggggatgccaacttttgatgctctagtactg

SEQ ID NO: 165314 - DNA, 354 bp, Glycine max
  unsure (1)..(354): unsure at all n locations
ttgaaatcacacttggctagcttcttgctctattcggngccaatgcacaatgtgcacccccacaaacaggatcctgaatggaaatacaagttatttgatattatctcactaattttgctttcatatattcaagtgaaatggaagactggattggctttccatgatatcctttactttattctaactgatcaaacaatgttccatcagtttaagattttttttttctaatatagtttaaaatgatgaactgcttgttgtaagacttgacctcagatttgctggcagacttgtagattgtagggtaaaacgaaaggaaagaacagcattaagtggcaatttttaagggattatgca

SEQ ID NO: 165315 - DNA, 365 bp, Glycine max
tactcaagcttgtacaactacgtgagagggcgcgtttttttttaacttgcccccatatctactccataatttaatggtacctataaccccagccaaggtttctcaacctccatttcttccaggatacgactcgaatgcaacatatgcttaccatgggggagccccgaggcattccattgagcactataaaaccctgaagcatacggcgcatggtctaattgatgcgggctggctgaaatctgaggacaatcgcatgtgaatcctaacattgacaagcgacgccatacatagggcaaatttgaaagtcgctgttacatgtctctactgactcattacgattctcaagttcatgccattattgtaaa

SEQ ID NO: 165316 - DNA, 317 bp, Glycine max
caatgaaggaaagctggagctgctcgacatgatgtccaacgtcatgtcaaagaaaaagatcgggctgcacaatgcacaaggcaagataaagtgtcaaataaacaattgaagctgcaggattcacgatgtttgatacaatgtccaggacatcctgcctgaaaatactggaattgctaaaagcattgaaaccgcaggatccaccatgtctgacaccatgtccacgacatactcgcccgaaaaaccggagctgttaaaagcatcgaaagtgcaggattcaacaagtccgaaacatgcctcagacattttgccccaaaata

SEQ ID NO: 165317 - DNA, 325 bp, Glycine max
tggtaatcgattaccatgtatgtgtaatcgattacacagtgcaaattttaatagcttttttaaatccagtttggccactggtaatcgattacatcctctggtaatcgattaccagaaagttaatttcttgtaaaagactttttaacttaaatttcttggccaaaccttttgctacttcaattggaattcccttcctatttaatataccttttctaagattctagagactgtcttgatcatccatcttgaatatctttgatttctttgtcttgaataaagctttgtgaaacatgtaagcctttggcatcatcaaaacatcagcttg

SEQ ID NO: 165318 - DNA, 318 bp, Glycine max
agcttatgcgcatatattcttactaactttcacttgcacaagacatcctatcaactaagaaaaatgcacccatatacaatcaaggtagcttcattacctaaattatttacatgtacttccaaggtgtatttgttatttacatcacacacgcctccttggctgaatttacatacatacatactcaaagcattttggggtaccaaaaattgcacatgcgctcatcttggtatttctaatacccatacatatacaaacttcacgatgaatcttgactacctacacaataaggtgctacatttcatgctttttttttttttt

SEQ ID NO: 165319 - DNA, 352 bp, Glycine max
tccatcaagtggtaatcatagcacattagcttcaagtaggtgctccttaaacctccattaattttttttctttaccttctcttccattgttgtttcttcatttttctccatgtatctcctcacatgtcttgttctaaattttgttaacatgaatctttagagtttccaccgattaaacttgctatagaaactagatttgattttctatggttcaaatttcttgttcttattcttgaaccatgaattgtgttgagttgaggttcctttgagttttgtcttgttattttttgtgctgaaacctaaaccataaaattattacaaaaatattaaagtagaagaaaacctaaaaaat

SEQ ID NO: 165320 - DNA, 397 bp, Glycine max
  unsure (1)..(397): unsure at all n locations
agctnttgccagaagataagaacatattcccnggaatacctttggcctaaaaatcaaaggaagatccaaaaatattgcataattctctgtgatggcaaagtcgtgcatcatgatgggatctgatactgttatgggtacaggatcatgcatataaccatcctttgaaattactctgtatgtgatatatggtggtgtatgcgcatagccaaatgtaaacatctcccctgcatacaggatatttattcgttggtataactattccattaaatcagtcactttaattactttttttaagatggcttcaccagtaaatgggtcaacttttggatgagcagtgaaggagtggcccaatctcttgtcataatctatcatgccaagtgtctgcaaatcaccatct

SEQ ID NO: 165321 - DNA, 356 bp, Glycine max
tcgccctcggagtgtgctctagttggattatgcccaatcgaggcaaccttcttaggtttagactaacttaaactgagtttcatctgcagatccctcttgtaagactagactaagctcaagcagcttacaaaagtttagcctaatttagcctaagcttcgtccacagatccctcttgtaagactaggcctagactaaacaacattattgtaacaacatacttaaaaccaaaacttaattcacagatccctcttgtaagactaagtttcaatcctgcttcaatcaagttctaaggcaacagtacatttcccaataataaagtcacctaattatgcgtacaaatggatgatcattcaaa

SEQ ID NO: 165322 - DNA, 340 bp, Glycine max
gcatctgcatcatacataaaacaatgcaacgaacctctataaaacgaataaatacctaatgaactggactatatgccacaaaatgaaatctagactccgcgggaacaaaatatactccaacctccacgcctcatacataaggaacccctctcattacacgccaggttgacagacaacaactacaacaaagaacggcaaagacaagaaacggaacgaactgcgaaataacttcgcaactgaaaaggacaaaaacgaaagctaaatacgtatacaaaatgacaaaaacattccaactaaaaaaacaaacttaacaaccgacacaacttgagtgatacaatat

SEQ ID NO: 165323 - DNA, 355 bp, Glycine max
ttgtataaaaggttactgaccattctttttctttttgcatatcatatgcctatagatttaagatgaattcttttttatagatgcctttctttttacaagttacatttttattataatttataaaaatttacgggaaggaaacaaatctgaaggcttttcctgcattactaattaggatctacaggaagtctaatatattggataaaataacttgtagatgcctatcttttgacaagatatatcgattgttgattatgtcagaaactggtttggttttcagtatttagaactttgaggagaccttaattttacagattgttccatggtaactgtttaaaatgtgggttatatttct

SEQ ID NO: 165324 - DNA, 310 bp, Glycine max
acttgcgtgcacgatcaacttattcttatgaataatgtacacctttattggacacagttaacccatcgaatcactagaatagtgattcacagaccttagcctactctcgcaatacatcttgtgagaaacactggttgacgacacaactctatttttcactgtcgatgacaatgagatacatttctgctatatatattttcccagccacctgaagaatttgatccttcataatagaacaaagttgacagttatgtcagactcagacaatttagaactaaacagccttatgtatgtaaaactaccagctcga

SEQ ID NO: 165325 - DNA, 403 bp, Glycine max
aagctagcagccagctcttcattcgatctagggtaccggtgccttctggagaactttctggaaggcccaagtgggcatggttgctatttgcaccccctgtttactaaatacacccctgcccttttttgctgatttttttttccgtaacgttacgaaatcttacgaattacgtaatgatacttgctttctttccgtaatgttatgaaaccttacggatcacgtaatcatcccttttttggctttcggaatgttacggaactttacggattgcgcactaacactttcttttgacttccggcatgccacagaacttcacggattgtgcaacaatacttccttttgactttcgacatggcatggaacttcacgaattgcctaacgatgggtgccaagtaccttaaag

SEQ ID NO: 165326 - DNA, 338 bp, Glycine max
ttaacctcatcgtccctcacagtctttatatttgggagccaatccaatccttgtgttcggactctcagccacttatgatagccgccgatgatcccattactgcttcccctaagctctctgtcctttcttcacgccgcatcccatgccttgcgaactccttggagtaccctcgcgttgtggtcactaaaaccccgtgcgatgaaaggcgtgatgctttcgtctaatggcgctcctctcatggggtagccaagctgtcttatggtgagaacgggattataattaatacaaccccttgttcccatcaagggaacatttggacattctttccattaaaaata

SEQ ID NO: 165327 - DNA, 333 bp, Glycine max
  unsure (1)..(333): unsure at all n locations
tacacatgtggtggagaattatttattcttgtcctnctgtattggataagtcagggatctcaataaggtttcgacaaccacaaaggctaattatctttaaattaccaagattctgtgacaagaaagatgcatcacattgttcagaaattgttaaaatcataaccatgagccttaactgaaagagaaacctaagcatgactcttgcgaatgaacttcacttgaggcagcacaaaaccacttaccattgacaactctctcatgttccttttacaattgaaagaaaaattagcatgtatgcaacattcatacctgaaccccgtcccaaggcttttt

SEQ ID NO: 165328 - DNA, 389 bp, Glycine max
agctgggcggcgggagttctatatatctacaccaagggtctagattagccctctcttctctctctctccctctcttctttttcttctttattttcggtttttgcaattccaattctgactttttgttttagcaataaaatttcgttcttcaatctataattgcgttctctatttgattaatggaaggctaagtccccagcgttgttttctcttgaggatcaagcacagctctctttgaggttctattattactgttaaattttgttcagtttttcctcttcactaattactctgaatttgttgctattaattcatgcctgcttagtgcttgattaattgtctctacgcttaatttacgttcatgcttaatgatcggttatgaggaattg

SEQ ID NO: 165329 - DNA, 353 bp, Glycine max
ttctcataagtgctaaagacttttatctaggattaactcactctaacctccaaataccactaaatccagatttggccttccaactctcaaagactcactctttttccactcacaacaacatattctcaccttccaaccctaggttaactctacccttcacctctaacagttttccataagtaatttcagcacataaacatcacaagcatcatcataaaaaccctaaaactgaatgggtaagcttaactcatccaaacatggcaagttcaacatgctttcaacaaatttcttcccaaataaccaccatgaagcagaaacttagcaaaactacccatcatatctcccaaaatccc

SEQ ID NO: 165330 - DNA, 256 bp, Glycine max
ttcctcaagcctatgcatgtgttgcgggattcaactgcgttcggcgtagacaatgattatgctcccttgcacataaagcatgatcatcatggggaaattacacaccatggtcaatgtacgaacattattattataaacaatatggcatatgacagtaactctaattacaagccattacctaattgaatgttctgaattgatccataatttactttatattaacaacaatagtcaatcaatgagttaagtctatgat

SEQ ID NO: 165331 - DNA, 334 bp, Glycine max
  unsure (1)..(334): unsure at all n locations
cccccccccctttcccttttccacctctttaacaagnnatttnttaataaaaaaannaannaaagagattttgtttatngagtggtatgatagatttatatattattatttattataatatccatttttatatatattaatatttattgataaataattaatttttagtaatttatatattnaaatnttatttttttctatttcttttaatactacacatcttctattcctccattccaacccgttcctatcctccatttccccttatctcnttttccttctcactccttctaaatttgcacaagtggtatttactccccatccccaaaccctt

SEQ ID NO: 165332 - DNA, 289 bp, Glycine max
tcaactcctatcaattccatgcctattatatatatatatatatatatcaacggtcaaattgtaacattaccattcaatcccaagaaaaaaatctagtttattgttgtcctaacatgacagctagagaactatttagctttctagtcaaaaaaaccttgcgaaaaatacttcctaatgcatgtatattttaaaaggagattgcatactagtcttagcacaaatcattgcgaacatacaccatatctcttacaattccacactatatataaaatgagtcctctggcttaac

SEQ ID NO: 165333 - DNA, 386 bp, Glycine max
  unsure (1)..(386): unsure at all n locations
tacactcaangaggatctttatgctctcaacaaggtccttatattcaccaatgacagtggaggacacaccctgtctaccaattcaataaataccaccgtggatcctctaacacgccaattcaacaagggtctaacatctttcacacgacaactaatttggaatagaccttgactgaatttatgcangtaacgatgtcaaatcataaaagtactaagctancactataaaaccttcaantacaaatgggacaactggccaagcagatagttgacaagtcatcacacagctttggagccctaccgacaataatcctaangatgaatgcantgctgtgataaccacgacttaaaggtctatcgaagctgacgatgaatactatgtggta

SEQ ID NO: 165334 - DNA, 356 bp, Glycine max
  unsure (1)..(356): unsure at all n locations
actatanactactcaacgctgagatgaggaagcgtacaagggtgaaactttctcgctttattcgttgaccacagagtggtatctggagatatgtctcgggggtcaagagacctttgggacgtcacggtcggtgctattgctcaaaaccaagcttgaccaatcccgacccaccccgggcatagtcagtcattgagaacctgtgatgtacctaagcaggcgagcctctgacagtcaacagataataggaacaaagaccatatagcaaggaggcttgtgtggtggctggccacctgcgaactctgattgatatatgggatatgggctcttgcaatcgataaccaagggtgggtgatcga

SEQ ID NO: 165335 - DNA, 385 bp, Glycine max
  unsure (1)..(385): unsure at all n locations
ctacacaaataaacaaaggttgttgtttgaattgcacaatgactaactttgtaagcatcttataaatgaatatacaatctccacacttantctatntgctcaatatgttcaaggtgttttgagagcttctctaaactttacaagaatttacaaatatngttttatanaaagaatttgaatgaatgctcgtaaggttcatgtcctatttcttaaaagcttctactatttatagaccttaatcttcaaatgtttgttgtctcacaacaaatgaagttcttcacttaagcttcatcttataattctggttgttgaagcatttaattcttgtattaaatgccatccattctcatggagggaatcactttgatntgtttcgtgtaaatac

SEQ ID NO: 165336 - DNA, 273 bp, Glycine max
  unsure (1)..(273): unsure at all n locations
tgattacactgattatggtcactcgattaccagtgccatgttgtgaataaaatgtcaagagatgtaactcttgacataattttcngaacgttataactcttccaatggtcttcttgaccagacatgaacagtctataaaagccagacattgacttgcattcaatcaattttttaacaacttcttgaccacttttgagtaccataaacctttccataaacttttgaacgactcataaaagttctttttaacctgtttctgaaggaaattctgcc

SEQ ID NO: 165337 - DNA, 383 bp, Glycine max
  unsure (1)..(383): unsure at all n locations
caatatacttggccttcatttaactgtctttgcgcttggcggccacgctcaacaaagtattttcnacacctactgtaccttgattcgaccaatgctgttatgggaatgtttctacaatccttcaaaaccttattgatacattctgaaacgttggttgtcatgtggccatatcgacgtccttctctatcataagccatcgtccatttttcctttgaaattctatcaacccatgtggctatggctggactcagttcacaaaatatttgtaaattctgatcataaatgtgcttgcaaggagtgtatgctgcataaaacatagtatgaataaccactttaantattcggaaacttaaataaacgtcaccatcaaattggaaatctta

SEQ ID NO: 165338 - DNA, 375 bp, Glycine max
actcaccaggttgataaactacctctatgcgttcgaaatctgcatagttcttcatggtctcttgagccttcacaaacttcttgtgtatagtttgaaaagactctttcatgttacatagcatttctctcacaacatcaattctggaagacctaacaatgtattctgaaaagttgaagggtttgcgaccgaagtttatctagtaccgagttgttcttgtgcccatagtccaagatgagttgtgtgaccattcaacccaaggaagaagcttcctccacatttccgaccgacaatggaataaagcacgcaagtattgcttaattacacaattcacgaactctatttggcatcactctatgggtgatacactgagcttca

SEQ ID NO: 165339 - DNA, 345 bp, Glycine max
  unsure (1)..(345): unsure at all n locations
taaaaangagacaaaaaggataaaganagaaagacctcgaaggtcgacatgttatggttatgaagaatanatcattcctacacagcatacatatcttctggaaacaagggactgacgctaagaatttattttcctgaataacccccataacaatggatgaattcattgaactgatgaaagaacataattgggaaaccgtgggtctatttgtgtaaattcctgaccataatatcacaatgtcataaacgggatacttgantgcccacctggctatggccatgactaattttgcaccttgtatccaaatcctcattgtcccggtgccttgtggataatatgaagttc

SEQ ID NO: 165340 - DNA, 345 bp, Glycine max
  unsure (1)..(345): unsure at all n locations
cgcttccctaactgtactggagggcggtgtcgtggctttaatctctataagtttctagaagtttaacatgacctncgagatggaagccatttgatcttttaaggccgatagatcggccttcatctgttcctgcacgccctcttcattatccattnttctggatcgagtgttataggggtgcctctgtgctttcttagttatgatgaaattcctaaagaaataaacaacggtgagtatgccaccaaaacatgaatatgaaaatgaatgatcggagcacttggatccaccccaacgtttntttagataacgtgataagtctagaacttctcattttataaaaagaac

SEQ ID NO: 165341 - DNA, 318 bp, Glycine max
  unsure (1)..(318): unsure at all n locations
tcccatgtttntactccaaagatcagtgcgaatcaaatcacttccacattttatctctatcatgcatcncataatcatctatttatggcatcataatgaacatatcgttcctgcatttgtctgttgtcatattccaccanccaattttgcatgactcattgcatcatcatgcatacgcgttcaacatactttttgctctacaaacttcataccttttatttccatgcatgatcctcacaatttcctcttccaaacaaactcaataatggaaacctgaaaattcacatacattcttggtggcatatattcgggaccatg

SEQ ID NO: 165342 - DNA, 333 bp, Glycine max
  unsure (1)..(333): unsure at all n locations
cctcgcgggagactctctctctgtctctctctcttctatacttcgcatttagcattagactctcttctctttctctctcatatccgctgttcttcaattccacgtcacgcttttagttttatcaataaaatctcattctctatttgattaatggaaggctaagntcacagcgttgttttcccttgacgatcaagcacagttctctttgaggttctattattactgcacaattctgcttagcttttcctcttcactaactaccttgaatccgatgctcttatctatgcatgctcactgcttgattaattgtccctgcgcttaatttaccgtcat

SEQ ID NO: 165343 - DNA, 273 bp, Glycine max
  unsure (1)..(273): unsure at all n locations
cgccgtccattgatatgaacatatcatcgcatgacaatgattatcctgtgagatatgggatcgcgttgcactctctcagcttgtccaccgctagaaaatcatgctacataagagcacaccgatgaagatatttctactatgcgaattctactttttgttgttcaagaatgtgtgataaatgtcataaaaatccttctatatgttttattggcaaggttatgacactctttnttttcttttcacaccatatgtctcttcagtatatcaacgaga

SEQ ID NO: 165344 - DNA, 85 bp, Glycine max
  unsure (1)..(85): unsure at all n locations
gagaaaaaaaccaccccccttttttttgnnacgaaaaaaatggagttgcccggctacatagcactaccccaaacaccagggaccc

SEQ ID NO: 165345 - DNA, 362 bp, Glycine max
  unsure (1)..(362): unsure at all n locations
ttgagcttcaatgaggtcctttaatggtgattntctatcatggagatgcagcggaagacaaatgataagaggtgagaggaggcgccatccactacgggaataagccatggaagaaggagctctaccaccaagatgagccttggataaaaagcttggagaggatgcttcaatggaggaaaagaaagagggagacaaatagagaggggggagcacgaaattgaatgaagaaaaagggagagaagttgaactttgagttgtgtctcacaagactcttattcattaaagttacaacaagtgttacacatgcctctatttatagactacgtagcttctgtgaaaaactttttgagaaaactttcttg

SEQ ID NO: 165346 - DNA, 355 bp, Glycine max
  unsure (1)..(355): unsure at all n locations
gttagtgaaatntgatgattctccaagaataggacgtactctcaatggtagagatgaaccactataaaactttccgcaattgatctttcttgctttcctttaagctttatctaaccaaagggtgtgaatttgcttttagatttaaatagatatctcgtgttttctaaaaacatttttacatcatctaatagcttctttgaaaaatctataatatgctctctacaaagttctatcagatgacaactctgctttaagtgaaaaaagattttaaaatgtataacatcagaattcaatccccatttgtgataggtgcctttacattatataacaagtatgaacattttagatagataat

SEQ ID NO: 165347 - DNA, 215 bp, Glycine max
tgatgtacctcttgaaaccaattaactttcaactcttttaaagcgttttccacctatgacccctccttctattgattaaatagcttttgaacccgaacctatctctgatgactaatattactaggttttcccatttctaaccatatttctctttccttaactacttccacactacagaaaaccgattacaaacacccgtcctcctggaggatttt

SEQ ID NO: 165348 - DNA, 389 bp, Glycine max
  unsure (1)..(389): unsure at all n locations
ggggaaatatatgattgagttggtgggaccaaatgctaagagagggaacggtagtgcttctacagtaccaagtctatccgatccctctacccaaccatttaaagaggagaaaaattcactcgataagacttatgtactccctgagagaaggtagctcggtcatgtggtgccgcgtaatcacttttattgtgcagaggtcgtgtgattcataaaccctgcatgaaggataaagcaagtgacaatatgacctacgatgaatgtgatattaactggtggcctaaaagccaaaggaactatctcatttgcgacgctagaagtcactncacatgcggagtaattacacgcagatgtacacgaagatattatcacgggatcgcgacatttatcac

SEQ ID NO: 165349 - DNA, 387 bp, Glycine max
  unsure (1)..(387): unsure at all n locations
gatcttaagcgactgcagctgcagctgaaccgaaggcggcccctctttttatttgttgagagaacnactancatanagctatgatnnttgcatcaatctctgaattntacaatgaaatgcataaatgtggatatgatgaacgccattgttgtatatacaagccacttgactaaaaagcttacctgtttatcaatgatgatatcattttcacccatctgtgaactggattgtaattgtcaaantaaaccttaagctttgaaattgtcatctccatttaccttgcttatattttaggagagcacatgggtttaagacaatcttcgcccaaatttgggggagttggtttgatggataattctaaaggtaagaaacaacaacatattcgga

SEQ ID NO: 165350 - DNA, 455 bp, Glycine max
  unsure (1)..(455): unsure at all n locations
cgcagtaacgttatctctctaccaacattcattccagagcttatttgagacaccgcaacacagctgccgctaagtaatgaaattcctaacagaagagaaaaggaaaacatgcattcacatttcacacgcacacactactctntctctctctgtgatggattcagagtgagtaaaagcaagcaagcantttgcattggattgagacccgcaatggcacccaacaacaacagaatcaagggatctcatttccctattctcgcttcccactntctatgcctccttgctcccctcctcctcttcttcgcatctccnctttatggtctcattctcaaatctcacttnctttcaattattagttctgttactagtgttgcgacatccacgtagtgtctcaattaacacaaatcagattataggaattcgaaatacatgcttggatccttattttatttcta

SEQ ID NO: 165351 - DNA, 410 bp, Glycine max
  unsure (1)..(410): unsure at all n locations
gcgaatataaatatgcctggccgctgtaagcacatgtcactatgaaagataaagattgaccacgctacctcgttctcatttntttttttccaggccatgcatctgttatctcacttattttctcgtnaacatatttaataatcttaagaattaaatatatntttatttctaataaatatttcatttttatatttattttttaataactttttgttttgtgatgtgttcttaataaaataataatattactctttattttttatactcatctctattgtatgacaaattagtaaattttatatttattccatgataaatattttttattggttatagtacacattacaacaaaattcactaatttattaaaatgttaacataacatataatatttatttatttattagaga

SEQ ID NO: 165352 - DNA, 190 bp, Glycine max
tgttcacttttaacaagaatttgtggttaaaatacacgcgactggtgtagcttaatacagggactggttatacctgaatcacggaggtcgacgattgtaataccagcgagatcgtatcatcttgtaaattacaagttatccatatgtttgagagaatattgtgtgacagcataagctttttgaaagtatt

SEQ ID NO: 165353 - DNA, 408 bp, Glycine max
  unsure (1)..(408): unsure at all n locations
gtggatctganaagaggcaaatntaatcatcctgcttagacgaatgagaaaactgtggcaaataaaaagggtgaggatgagggagaaacccatgctgtgactgccattcctgtacggccaaatttcccaccaaaccaacaatatctttactcagccaataacaaactttctccttacccaccacccagttatccacaaaggccatccctaaatctaccacaaagtctgtctaccgcacttccaatgacgaacaccacctttagcacaaaccaaaaacaccaaccaagaagtgaattttgcagcgagaaagcctgtagaattcaccccaattccagtgtctatgctgacttgctcccatatctacttgataattcaatggtagccataaccctagccaagggtcatcaa

SEQ ID NO: 165354 - DNA, 387 bp, Glycine max
  unsure (1)..(387): unsure at all n locations
tcttttggaccttgaacaggcaactaactcttttttttaatcatgctatgngctcgcgactggtccctttctttctttcgtaactcgagttcactattgctaccccatagagcctcgcgaaatttgtctcggccatactcttccttgcgagccctcttggtctctcgttaagggctcttgcgcgaattgcattctctttccgtaacccggcacacttcttccgaacgtgtgtagcggccaacttgaacttcttcttggcaagttttgcctttcctaactcgcttttgagagcttggacttcttcgtcctcttacggtgcttcataactctctctgctgacgactcttaacttggagagccaatctaaacctcgatatgaactttcaa

SEQ ID NO: 165355 - DNA, 362 bp, Glycine max
  unsure (1)..(362): unsure at all n locations
caatccctcttattactagctattttgaattctttagttcctgaatgtacaaccttcaaattgttgcttgttcccctctttctgttctgcaaaaaagaaaatcaaatgttgtcaaaacattgatgaagtcctaagaaaatcaatatcaaagaaaacatggatgaaatcacaattaanaagcacaactacctatctttcaaagtcctttggttaatttgttntgtcttcttatgtggtggggttttgtttaataatcttatacttttgccttccaaaaaaaactaatcactaatcctcttttattaatccaattttgtatgttattgataaaagatcatggttgctcacctgcctccactcct

SEQ ID NO: 165356 - DNA, 370 bp, Glycine max
cttgcgtagccgctcttggtgctcagaaaatcccaaagacttatctcctcttattactagctattttgaatgctctagttcctaaatgtacaaccttcaaattgttgcttgttcccctctctcgtttctgcaaaaaagaaaatcaatatcaaagaaaacatggagagaattgtcatggttattattactcgaacctgaaggaataacatctaaacaagtcatcttattcttagaatgtgaaaactctgcatatctatggaaaacatggggtatggaggcaagtaagcatgtgaataccacaagtcattttctccaattcaagggctgtgattattgctctatgaaacaagcatacatctggtatattgtc

SEQ ID NO: 165357 - DNA, 395 bp, Glycine max
  unsure (1)..(395): unsure at all n locations
agactggaaagcggnttctaatgactcctctgcggcctccacataatgcatanaggatgggcagctcaccaagatgtcttcctcgcctgatacaatgaccagatgcccttccactaccaatttcaatttttggtggagtgtagagggaacaactcccaccgantggatccaccgacgccccaacaggcanctgtagggggggttaatatccattatttggaaggtaactcgacaggtgtgagggcctatctgtactgggaggtcaatctctcccctaacctctctgcgggtgccgtcgaaggcacgaaccaccattgaactcggctttangtgggaacatcgaatggtaatttctccaaagtgctcttacgcatcacgtttaaactggaaccatt

SEQ ID NO: 165358 - DNA, 440 bp, Glycine max
ctgttgatgaccgtgacacttgcgcctctcgcacatctctgtgtctttctagccttgctagctcttgactccatatggaatcgatctcgaaataataacaatcataattaataactcattttctagtgataatctacgggaaaaacatcaacataatttaatttgcattacttggcaagagtagtctccacttggtatatatgtttcctatgactgctcaagctatggttatcgtgggatgagtagtcaacgtacatgactacatagtgcctgtactctccccatggaatgacatattgttgaaacattgcataacacgacacatagttagaagcgcacgctcaaaaccctgagatggacaatattatctacaggaataacatgttgtattatcactctgcccatgcttgtcacaacactggtattcacgactgggaggt

SEQ ID NO: 165359 - DNA, 355 bp, Glycine max
  unsure (1)..(355): unsure at all n locations
gcatttntattatnngtttgtttactttttataccccctgttgacttgcttaatccattttacttaanntcattttcncttaacttaataataaaatatatttccaccaaccnctttaattgtattatccattatcttctgttaaaataaattcctaccgctcggtcatgccgtaactcacttggaaatcaaaaagaggtcaataatcatattaataatcaaaacaacatcttttattataataaacctgaaaatcaatcccaccctttctctttgggatttctccttcttaatccaattgattaataactaaagcgaaactaatgctataatcactctcctactcaacctcgtc

SEQ ID NO: 165360 - DNA, 335 bp, Glycine max
  unsure (1)..(335): unsure at all n locations
catttccaattcatatattttaaagcttcgtgcattttacaatgtccttgttgatattcaagaaaagagattatggaagcatgcatgcagattggaacatcctttctccaatagaaatcaacgatgtcaatggctaaatgcataaaacgtacaactttgagacaagacttaatctatttgcttgcatctgtatatgtttgtgaatactgatcttttttccaaaatgacctatntcttacattaaattgacttttatcttgtccgggttgttcaattggtggacacaccttttgtgaatctaactatctatgtatcaaaaatatctactcatgcta

SEQ ID NO: 165361 - DNA, 425 bp, Glycine max
  unsure (1)..(425): unsure at all n locations
attgaagtctttattccactgtctatgtgcgatgagtgtttctccctccccagccattaattttaaaatcccaacagtgatctacaaaccttgtgttctaatatcaccaagatccaacggttaacaagttcangattgttattttattggaacaagtttgggtgtctgcaggaaaagagaaaactatgatgcgaaggacttctctcaccaaaaatatcggtttacaaattacaacggtgagaatgttctcaaatgagatgcaaaaccagtgctcatatttcaccaagatccaatggttaacgagtctgagatcgttattttacttgaaatgtttgggtgtatgcgggaaaaagagagagttttgggagatgaagaagtataaacaaaattgagaggaagataaagcgttgagatatcgtcagtct

SEQ ID NO: 165362 - DNA, 184 bp, Glycine max
agaatcgaagcaggggcgtttttgcccatttataaacacctgcttttgtatttttctactcgactacaacctacagctgttctctatgtcaaccttaaactaactcttttggttggagtcgactcgaggacagtttttgtcgtgacgattacgttcaaagttttactggcttacttcttggaat

SEQ ID NO: 165363 - DNA, 314 bp, Glycine max
  unsure (1)..(314): unsure at all n locations
atttgttgaaaaagactttttaacttaaatntcttggccaaaccttttgctacttcaatttggaattcccttcctattcaatataccctttctaagactagaggctngtcttgatcatccatcttgaatatctttaatttctttgtcttgaataaagctttgagacgcatgtgaaccttttgcatcatcaaaacattcagcttgatcctctgtctacagaaaggaagatgaacgagcaccactttgggccctctcatcatgggctatggctattaagagttaaaaaagactaacatcagtttgttaaaactatg

SEQ ID NO: 165364 - DNA, 462 bp, Glycine max
  unsure (1)..(462): unsure at all n locations
tgcggcatgcagcttacatggagacaatccccccaacttatattctatnattagctctcacagaattacaatcccataaaattcttcacaggttaatctatttgaatctgtggagatcaataaattaacatactttcctcaattcttaaaatttcattcagtttatctaattattaaagacactaaaattgtgtcctcttcgtaacaaaaataaatatttttacattggttgtcaatacaataagaaatgtttacatgattgctaatgcaattgctgtaaaaaaaggacatccttattgaaatttgtgactgatgtaaatagacatttttacatcaatcgtcaatacaatcgattaacattctctaattcgcgaatgacacaatcttatgggtgacacatccttgacaaatttgataccataaaatgtatgcttagatgctttgaacttgtgtntggactca

SEQ ID NO: 165365 - DNA, 338 bp, Glycine max
cactcagcttccaagtttctggtggcaaacctgattactggctattcatcttgtcaccccctaccttgccaaaaagaatgcgccaggactaaccggctgaattctttttgtctgtctcttcttctcttccaaaagaacaaaggactgacagcttgaattctgttgtgtctcccttctcccttgtcatagaattcaaaacgacagagtctgagaaatcttttgattctctcctttcccttatacaaaagatttcaaacgactcaccacctgatcactcttttgtatccccatcaccaagtatcacatgtttaaccgcctgagatctttgtcttaacaca

SEQ ID NO: 165366 - DNA, 282 bp, Glycine max
  unsure (1)..(282): unsure at all n locations
aagagagagccaaaaaccccccttttttttttttaaaatnttaataaatatgacgaaatatacaaacccacaactaactgcgtttaatatcgctgaacaacctacaactatcatgcgtacaaacattgccgaacaattcataactataaccntctcgataacatcgaagaaactagaaccatcatgacactaatctaccatgacaactctataatgacctacagtaatgcataaacattcaccacaattnaaaagccggcgacttgatcctataaatacgaa

SEQ ID NO: 165367 - DNA, 263 bp, Glycine max
agccataactcgcctgtgctttttcttccatgctatattgagcaaaatcatcgatcctgtcaagttcgatgaactggaaaatgaggccgcaattatactgtgtcaactggagatgtattttccccttgctttctttgacattatgattcacttgattgtgcatctgtgaagagaaatcaaatgttgtggtcctgtttatctacagtggatgtacccggttaattgatacatgaagatcttataagggatacaaagaatctata

SEQ ID NO: 165368 - DNA, 396 bp, Glycine max
  unsure (1)..(396): unsure at all n locations
cgacaactccaagaccctgctggacttcttctggtccactgtgtgtcttgcagacgcgatccctacaaacaatagatgaaatcaaaaatcagttgagtgatgtgcatacttacctatgtcatgatgacgtgaccttgccggggggaacgggcaccctgtatgactacagaggcccgtaaccagagctggaaaccccagggccctgttggacttctccgggtccactgggtgtctttgtgggtgcgattcctgcaaacaatagatggtatcagaaattagttgaaccatatgtatacttacctatgtcacgatggcatgaccttgttgggggaacgggcaccctgtangactgatagaggcccgtaaccagagctggaaatccaanggcctgtggac

SEQ ID NO: 165369 - DNA, 416 bp, Glycine max
  unsure (1)..(416): unsure at all n locations
ttgagcttcaatggggtcctttaatggtgattctccaccattgagatgcagcggaagacaaaggaaaagaggtgagaggaggcgccatccattaaggaataagccatggaagaaggagcttcaccaccaagatgagccatggataaaaagcttggagaggatgcttcaatggaggaaaagaaagagggagagaaagagagaggggggagcacgaaattgaaggaagaaaaagggagagaagttgaactttgagttgtgtctcacaagactgtcattcatcaaagttacaacaattggtacacatgcttctatntatagactangtagcttccttgagaagcttttttgaaaaacttccttgagaagcttctttgataaaacttccttgagaagctagagcgtagctacacacaccc

SEQ ID NO: 165370 - DNA, 469 bp, Glycine max
  unsure (1)..(469): unsure at all n locations
cgctagaggngnnggggcacgaagcagatttatgatgtttttttgatgacgngatagcagaggatgtcagtgatggcgacaagagagcaatggtggtatgagaggtgcttaatgacaaaatggtagacattgtggatggcgaggagttaggggtgacaatcaacttgtaaatagttcgtaatttgattcgataatccactcgttaaattaggttcatgaatcaaatgacttgtacttgagctaaaaataaagctcattaaataagtgagccgaacttgagctacatatagttcgattcatttggttcatgaactagctcanaatatatatatatagattaggtttttctattatttatatatgcaaggtgcgaatagttttatttatgtagtagactctggttgtaatcttttttttgtgtcataccttgtggctctacanagctaataaaataagtccaaatttgtct

SEQ ID NO: 165371 - DNA, 401 bp, Glycine max
  unsure (1)..(401): unsure at all n locations
cataatttaagatacatatgggatacaaccatctttttccgccataattatttaatatgtgtaataatatatatatgttctgtcacaataataaaagcaactctcttttaataaagaaaaaaacaacaactgagcttataagaaacttttcaaaataagttttaattttaagctaatacatgaaaatattaaaagtgattgttttaaaattatgttgaaacaaacaaaccacctgttatttcttataaaaataagaagtagatatatatatatatattgaaggagaataaaattgttacctaagttgcttaataaacttcgttgacggtcactatgacatgnaatactgtgaattcttgacaagcanaacaatattctgctctttatcatanagatactac

SEQ ID NO: 165372 - DNA, 346 bp, Glycine max
  unsure (1)..(346): unsure at all n locations
tgagatgaggaagngtagaatgttgatactttctgcctttatttcttgaccacacagcggcacctggagatatgtctccggggtcaagacaccctgtagacgtcaagtggtgtactattgcccataaacaagcttgaccaatcccgacccaacccgggcatagtcagtcagtgagaacctgtgatgtacctaaacaggcgagctncctgcagtcaacagattaaaggaacaaagaccacaaagcaacgaggcttgtggtggctggccacctgtgaatcttgtgtgatatatgggttaccgcctctggtaatcgattaccaaacggtgtgttatcgattacatggct

SEQ ID NO: 165373 - DNA, 398 bp, Glycine max
  unsure (1)..(398): unsure at all n locations
ttttactcggatgtnntgatgagtcccgtaatatatctagaccgtccaaattgaatgttgaagctctaagccaattcaaacgacaataacattntactcggatgtctgattgagtcccgtcatataccgagacgctcgaatttgaatgttgaatctccgagccaattcaaacgacaataactttttactcggatgtctgattgagtcccntcatatatccacaccctccaaattcaatgttgaacctctgagccaattcaaacgacaataactttttactccgatgtctgattgagtcncctaatatatccacaccctcgaaattgaatgttgaacctctgagccgttcaaacgacaactaacttttactcggatgtctgattgagtcccgctatata

SEQ ID NO: 165374 - DNA, 408 bp, Glycine max
  unsure (1)..(408): unsure at all n locations
tcaacattcaatttcgagcgtctcgatatatgacgggactctatcatacatccgagtaaaaagntaatttcgtttgaattggctcagagcttcaacattcaattntgagggtctcgatatattgcgggactcaatcagacatccgagtaaaacgttattgtcgtttgaattggctcggagcttcaacattcaatttcgagcgtcccgatatatgacgggactcaatcagacatccgagtaaaatgttattgtcgtttgaattggctcagagcttcaacattcaatttcgagggtctcgatatattacgggactcaatcagacatccgagtaaaaacttattgtcgtttgaatttgctcagaggttcaacattcaatttcgagcgtctagatatattacgggactccat

SEQ ID NO: 165375 - DNA, 392 bp, Glycine max
  unsure (1)..(392): unsure at all n locations
actaacaaaccaagcaaaacagggcaaaggcagaaaactctgcccaacactcaaaccaaaatcacagcntttttctcacttaaagaccccaagaacatttccttcattccaattcgttaaccgttggatcgactcgaaaaatttactggaagtctctagtacataagcctacattttgaccgttgggatctactagcaaacatccaaaactaattctgcattactctttctacaaccagcaaatacatagcatttttctgcacttgtgcaaaattctgctgcacaatctcataacaaaattctgcataaagtgcagaattcgaaaatcacactntncctcatcaatctttcncaaatcaaatcctacaagtcccaaatcatgtatcaatcgt

SEQ ID NO: 165376 - DNA, 442 bp, Glycine max
  unsure (1)..(442): unsure at all n locations
cagaaccaacagagactcgtgcctaaggtgagggagcacccattgaagaacaacaaagtcatgttcaagttgaaccaaatggaacacaagtgctaactgaagtgaacaccgaacatgataattgaacacatgatatggaaattgatgcagtgattaatctgctaacacaagctagccaaacaaatccaaacaaggtaaaatctataccattctgagttagaagctattgtgtatttcactttcattttcagtctttaatggtccctttacacacaanaaatcaaaccttgtctcaaagaacactggtcctgcatctgcatctacaaataattctggtattcaaacaaagtgagttgtgcgcaacaaaaaaggaggacttttgcgtctttgcctttaaaaacccacattatggtgtacaacataaaactgactatgtggtggt

SEQ ID NO: 165377 - DNA, 331 bp, Glycine max
  unsure (1)..(331): unsure at all n locations
tgactgcatgacggattgttggacacactaccatacactcgtgctacccccctagtgatgacaaaatctgtctgtgtcatctactaatcaatatgcattcgatattaaaacacctactgaccttgataattgaatgtggaacattnctgaatattacagatccgccatgtctggttgtacaaactcaatgacatgtgaaaaacaagacatctaaccccaacaactcatttcatgaagaataagctactttcacagcctcttcctcaaagcataaaagcaagcaacacccaatcaatcttctaagttacttttacaaggagctacccaatga

SEQ ID NO: 165378 - DNA, 257 bp, Glycine max
  unsure (1)..(257): unsure at all n locations
caaacctcaataactttttactccaattcttgattgagtcccataatatatccacacgctcctaattgaaaaccgatgctcctagtcaattctaaccgcaataactcttattcttgatgtctgattgagtcccgtcatttatccacatgctcctaattcataacataatcttttatcatactccaaccacaataactctttactccgatttcctactgactccnctatatatcacacctccaacttaaaaccgagct

SEQ ID NO: 165379 - DNA, 219 bp, Glycine max
gcggggtcagagacttgggactacgggggctttgccaaaccaagctgacaatccgacccaacccggcatagtcgggtagtgagaacctgtgatgtacctaaacacgcgagcttctggcagtcaacagataacaggaacaatgaccacaaagcaaggaggctcgtggtggctgtgcagctgtgaatactgtgtgatatattgggtgtggcctctggtaat

SEQ ID NO: 165380 - DNA, 371 bp, Glycine max
  unsure (1)..(371): unsure at all n locations
gagagattntgctgtgtgaagatctgtagagaccacagctcgaagaggaagctattctgagagcttgagatgagtttgtgagtggttgtgagatcctataggtgaaggagacatcctcaccacttgtatctttggaatctttcatcttgttcttctctcttgttgaaatgagggttcctggttatggaaagctaaaatcctctgttggatcttctctgtaggtacttgaagtaaatatctttttatctatttaatgatgttttgtgtgttctctgtgctatcaactttacattctaatatgcctttatcttgatcacgtanatgcacctttgttacggtcattcaacagtggaaatctgtctgattctgat

SEQ ID NO: 165381 - DNA, 307 bp, Glycine max
ctaccatggagatgcagcagaagaaaaaggaaaagaggtgagaggaggcgccctccactacggaataagccatggaagaaggagcttcgtcaccaacaatgtgccttggataagaagcttgaagaggatgctctaatggaggaaaataaagagagacagataaagagagagagggggggcatgaaattgaaggaagaaaagagggggagaagttgaacttcgaagtttgtctcacaagactcacattcatcaaagttaccacaagtgttacacatgcttctatttatagacttggtagctttcttga

SEQ ID NO: 165382 - DNA, 373 bp, Glycine max
  unsure (1)..(373): unsure at all n locations
gtcacctgcggcatgcaagctggagatgaggaagtgcgaaccnccctcttcctgtttttattgntgaccacagagtggtacctggagatatgtctcggcggtcacgagaccttggggacgtcaggtggggtgctattgcccaaaaccaatcttgaccaatcccgacccaacccgggcatattcggttagtgacaacctgtgatgtacctaaacaggcgagctcctggcagtcaacagattaaaggaacaaagaccacaaancaaggaggcttgtggtggctggccagttgtgaatattgtatgatatgtggattatggcctctggtaatcgattaccaacggtgggtaatcgattacaacgcttaaaattgaa

SEQ ID NO: 165383 - DNA, 420 bp, Glycine max
ccaagaaaagctactcttaaaacataaatcgcccacaacctcctccaataaacacaaacattaatgtataattaaagcatactcatgcacatacttccttaccagcattcactcccacaagatattcttctaactaataaaaatgcacccatgcacaatcaaggcaccttcgttacctacattatttatatgtacttccaaggtgtatttgctacctacatcacatgcacttccttggctaaatttacaacatgcatactcaaagcatcttggttaccaataattgcacacgtgcacattctggcttttctaatacctatgcatattcaacttcgtatgaatcacgctattacacaaaatggctcattcatgctttttcaaagtttgctaccaaaccgatgcaattacgtatttcgttgt

SEQ ID NO: 165384 - DNA, 252 bp, Glycine max
  unsure (1)..(252): unsure at all n locations
taaagagagtagcagacacaacncggcagattctagtcactcattctgagccacgccccgctctcctttacaaaatgataaagggttccactcactcacgattgattacaaccagtattatgacctgtcacttctggccttacaagtaatctctaagtcactactagcacaacccttagactctctctggatctataaacacctaagtattgctttgtcaccttatccactcttctacttgtacaaacaatc

SEQ ID NO: 165385 - DNA, 402 bp, Glycine max
  unsure (1)..(402): unsure at all n locations
tttattcgnngaccacagagnggtacctggagatatgtcgcgggggtcacgagaccttggggacgtcaggtggggtgctattgcccaaaaccaagcttgaccaatcccgacccaactcgggcatattcagtcagtgagaacctgtgatgtacctaancatgcgagctcctggctgtcaacaaataaaaggaacaaagaccacaaagcaaggatgcttgtgtggtggctggccacctgtgaatcttgtgtgatatatgggttatggcctctggtaatcgattaccaaggggtttaatcgactaccacgcttataaagggaactggaagatngtagaggcctctggtaatcgattaccactctgtgtaatcnnatacacatangaatgggtcactggtaatcga

SEQ ID NO: 165386 - DNA, 391 bp, Glycine max
taccctgaataagggcctccacacacttttgattttgtctatctggaccttatcgcccctgctgggcatttaaatattgaagtacaactctgaattattggctttgccttcatcgcacatgggtaatctggggtatgtcttatatggtagcatcgcgattcaatagctctatcgatatgcacactcaatggataagttgttgcttgcattgctacaaacatctatttcaaaattccttctaccatattttgcgcaacctacaactcagcgggagggcgactcgaggctcaccgctgcctcttccaacgaatgaacacgtgtggagtcaccaccaaccttatttgacgaaaatgttacacacaccaaacgtgggtcctacaactctaactat

SEQ ID NO: 165387 - DNA, 278 bp, Glycine max
  unsure (1)..(278): unsure at all n locations
tcaatgacatcaatattttgttgtgttaacatacacaatcctgacaatataattgtgcacatacttcttcttcttctttcttactacttctattacttccctaataaaaacacaatgaccactgtagagccattcctttttattcattgctttgcancaaccacttatatggcgctcatatggtgttttattaatgccctattacatcacttttgtatgcttaatttcaactttgtctatggcctatggttaaaaatgatccatgttgaccttaacga

SEQ ID NO: 165388 - DNA, 370 bp, Glycine max
  unsure (1)..(370): unsure at all n locations
tctatataagctgaaccatcntatcaatagacacaagttgtgttttattcacaacatcagagggcatctctgttatcttagtgagagtgattcttctaaattcttgagtgattcaagaacacattggctgtatcaaaggactttcacaacctttgtgtgttgccctcgctggaaagagtgattctttccttcctttcatcatcacccttgttctttcaaaccacaattccagaaaattcacctctgcccagaattatctcgtggccataactcccattatacgcactcaaattaagtgattcttgagcctacattgaatttcaaaacgagacctctcacctcgttntggaatcacctcatatggagccct

SEQ ID NO: 165389 - DNA, 457 bp, Glycine max
agcttcttttggaccacaatccccttcttcttctcttttataaccatgctatgtgctcgcgactggtccctttcttcccttcgcaacttgagttcactattgctaccccataaagctccgcgaaatttgttccggccatactcttccttgcgagccctcttggtctctcgttcaagggctcttgcggtaattgcattctcttcccgtaacccggcacactccttccgaacgtgtgtagcagccaacttgaacttttccttggcgaagtttgcctttcctaactcgcttttgagagcttggacttcctcgtcctcttccggtgcttcaaaattctcttcgctgacgacttttaacttggcgagccaatctaaacctcgtggcgaactttcagccattcgcgggacccaccaatgatgccattacgaatgcctctaagctcttgatcttccttaacggg

SEQ ID NO: 165390 - DNA, 473 bp, Glycine max
  unsure (1)..(473): unsure at all n locations
ntatctatgatgggattatntatctggataatcttatgatatcttgactattncttnnacantnctggtntgtatctttacctacgctatgtttggactaatggaaagggatggaatgaaataacatgatggcataatgctaggttccacttattggattgtttgagaatggaatagaacccgatggagtgcattgctttccatccattagcccttttttcttcccctgccttgttctggtagtgaatagtatagctaacttggatctttaattattnttttagtcaaattctctttctatattattatcttaatttattcttaatttcatgtatctcggctctgaagatagtaagttgagcttgcttttctggttaaataattagtgcgaaatggctgacatgcaatatagcacaagcatgaattcttgtatatacgtagaactagctagtgataatgtgaatacatgtatc

SEQ ID NO: 165391 - DNA, 391 bp, Glycine max
  unsure (1)..(391): unsure at all n locations
tatcaccttccaacattaaatcatatataaatataactcaacacacactgccaatgtaaaagcttaaataaatctttctgctttaaatttcactaaatacaccggtgttagtatttcgtcaaataacttataaaaaactcacaacgattcacttcacactgctcacatgtttaatgagtcaagcttataaacccgcaagtcaaaccgtcttaaaagaataacgtccaaacgtattcacttgactctacttcaaacatacgaaggtttctcatcggacataaatatcatcataataccacaaacaaaaatgaaatgcgctagtgaggtggatccaccaacttatgggacaccacttaaatcttttcctctctntctctctccctacattccc

SEQ ID NO: 165392 - DNA, 440 bp, Glycine max
  unsure (1)..(440): unsure at all n locations
aagccttataatcatgtattgcgtgatatatcatttttcattcatttttattcatcgctacgaatatccacacttaacacaactattataaacactaatcaatttattatatattgcatcttatgattaaacgacctgtcaatcaaatagttcaactgcttctaagttgattggtactctgtcaagaaatatataacttctcctgatatctcgacagtgttcgcaacatcaacttatgacatactctttcttcttgtttcttctatgatttatcaacctaatcttgctctctttctgatttttttccccaaactagtcgacgaataaaccacatctcctgtgccgccaattggacctccctgnctgctgtgaagtcatactcggaaactcttgaccgcttttttaccttccctttccctttttatctttcaccaaatttt

SEQ ID NO: 165393 - DNA, 439 bp, Glycine max
  unsure (1)..(439): unsure at all n locations
tttatgcattttgaggatattcctaaaacggctttcataacccaccatggccactattaattcaaagtgatgccattcgggttatgcaatgtgccttctctttttcaggcaactatgaacatgatatttcacccctaccttcgtcgtttcatcatcgtcttcttcgacgacatcctgatttacagcgcctccatggatgaacatttggatcatttggagcttacctttcaggtattactcgacaatcagtttgttctcaaactctctaaatgttcttctgggcantcacacgtggaatatttgggtcatttggttttgcatcgtatatgttatgcaaccttggttaaattccttacaaaaagtgatntttctcatggtgataaaatctcattctactacaagcgtcatgaacacnatttgaannatattattggaagtc

SEQ ID NO: 165394 - DNA, 425 bp, Glycine max
  unsure (1)..(425): unsure at all n locations
acacttagaaactaagcttatgcataagttctacacatgtgcttcctgttngttagtattgtatctactgcttcaatgctagatgaacccgctatgtattgaagaaacgttggcggcttctttccaaaggttacctcaaacagtgaggttccagtgcttgaatttcgtgaggtattgtaagaccattccacccaagcaagaatttccccacgttgagggtttgttgtgtacgaaggctagtaaatattgttgcatgattcgattcaaaacctcggtttgcccatcagactaacggtgataagcagaactcatacatagctttgtgtcggaaagtctaaatagtttttgccacaatttgctgatgaataaaggatcctaatcgaagaccaagcttctacgcataccatgggtgtttgcaatgatgt

SEQ ID NO: 165395 - DNA, 235 bp, Glycine max
aaaaaacacctttgtccaacacttttttaatatccttgtccacactccctctatatatactttcacttcaaaacattaaccccaaaatgctcaatataataacactcttcactggatacttaatcaaaacattgacattgcctttccataaagcgattacaacacaaacaatgaacaaccacaatttcacttctttttgcgttccggaatcatctttattaacttccatccttct

SEQ ID NO: 165396 - DNA, 358 bp, Glycine max
  unsure (1)..(358): unsure at all n locations
tctacatatacgcccatttaatataatttttnngnattattatagananacaacaacgaacatactatctcataatagtggaatgtgtacaacacgtcaatatttgttgtgaattctcatacaatcctaatgttcttttttactactcttgtaacgcacgaggagaaatttaacaattataaattacacttgactaatatgacaatctaaatgacatgtttatgctatgatgaccattcaaatgacaattaaatttataatcatcattataagagtcaacattcttaagtgctatgtgtgccaaatatgtttgaatacaaagaacacttattgaaagaatatggattgtaaccaaata

SEQ ID NO: 165397 - DNA, 379 bp, Glycine max
  unsure (1)..(379): unsure at all n locations
acctgttcagaccacaagccacaaaataaaactagatgtacctcgtttcgatggtactgacccattgggctggatcttcaagatcacccaattttttgagtatcatcgcactccggagaacgagaggcttaccgtcgcgtcgttttatatggatggtcgtgctttctcctggttccattggatggccggtaatggccaattcacttcctggccagcgtttctccaagccctccagacgcgctntgctccgttgtagtacgaagaccccaccggaaccttgtttaagttgactcatcgtggacggcggcggaatatcttgcaccttctagatctcgccaatgaccattggctcccaccccttcctctgagctgtcatcta

SEQ ID NO: 165398 - DNA, 270 bp, Glycine max
agcgttaccgctctcttcttttatcataaataaatattgactgaacaatagcttattccgtcatcgttgtaaatctgctgcacattacatgttacgtgatacctcaataatgctaatattttatttgcctctgtcgttgagaaaacacagaatagtacggtagtttatttctttaatgtgagcatccaaccactctgcatttggaacttttcaatgtatacttcttcacgccctttctgatttcttctgcctatgaaatggaataataca

SEQ ID NO: 165399 - DNA, 273 bp, Glycine max
  unsure (1)..(273): unsure at all n locations
ccaactatatcattatgatgactatataatcaatgcctttccctcatcctcaaatttaatcttcactgattccaacttgtcaaaaatactattaaacccattaatatgatcatttacacacatacctttctccatcttgacgttgaacaactggcgcatcaactatacttctgtggctgccgacggcttctcctacttatctgataacgccttcattaatcctgcagtattcttcttgttcacaatgttgaacnctaccttcttggcttatgt

SEQ ID NO: 165400 - DNA, 437 bp, Glycine max
  unsure (1)..(437): unsure at all n locations
ttagccttntgaacaaaacaagcttgtccactactatcttgaacttantgttggatgtggccacacaaagacacctacccttagcccaatctagaaaaccctattctagcatgcctctanaaattcatgcatacactaacaacatgtaaaacacacaatggtaacaacttacttttaccatgaatgcttcaaaaaatgaagtttacaaggtgtgagtcgcacaaacttattcttanaactttttcttttctcttacaagtgacaacataanggcattanttatagagaaaatanttataaccgcctgtatcgattatatcatagaagtaatcgattaaatatcattctaatcgattaatggtgtctttccaacatttggaagccttaagaacacttaattgattnaatattcatgaatcaatgaaggtcttgacact

SEQ ID NO: 165401 - DNA, 294 bp, Glycine max
  unsure (1)..(294): unsure at all n locations
ttcctntaattttaaactatgctgaatatcatttatatatgtacctctaccccactggcacagtgtcaanggaaatctgattngttcaatctgctaccacacatgtggcgattactctcactatattttgcagcctcntatgatgcaccatgtttcatatatcagtctttcttatcaaacactctcctttaccagaaaacgggacacctcaaactaatcctgaatcagaatgaactacatcatcaaaacattgtaagaccccctatattctataaccattgcattctacacaca

SEQ ID NO: 165402 - DNA, 409 bp, Glycine max
  unsure (1)..(409): unsure at all n locations
ggaataggaaagctatactttattgtgatggcattcaacgccctataatctgtgcaaaatctacaaaagccatccttcttcttgatcataattattgcatgtgataaaaggcttttgctacgggcaataatatccttcccttgagcactgtcantcctatctattacattaactttcacattcttatccctttccttacccttcacaccacatcgggatttgacatgatatgtcaaattcttttattggggtcaacactgatggcacattaaagactgtntaatatatgtaaactatcatggcctagtctcggtccatatcatccggtttatctaataactgattctgcggcccatccaaccttcattattgaacactaatatttctgctacggcacgcgtatgctgca

SEQ ID NO: 165403 - DNA, 270 bp, Glycine max
  unsure (1)..(270): unsure at all n locations
ggggggggggggggggcggaacagacgtccccctttttttnnnaaaanntcaaaactacataccaccaccaaacaccctccttcacccacacctccacaccttaccccccacaacatcctatccactccacccaaaaaacccacccctaaacctacaacaccaaaaccccaataccacaacaaactccaactcccacaaccccccacctcaatcctatttcaaatttccctccaaactccactaaacattaaccccccccccacccaacc

SEQ ID NO: 165404 - DNA, 475 bp, Glycine max
  unsure (1)..(475): unsure at all n locations
tcttaagtcaccgcggctgcagctagatccttagacgcnccctttatatgtatttataangaacaaaaaatcttatgagattcaaaattaaaaaaatacaaacttaggactaatacaaactaaaaaacttacaataattaaaattgaaaaatacaaactttcaaagaacaaaaacatatttaaaccaaataattatgaaaaaaaatatnttatcaatctaatggatttatttttctctttctctctctttctatattctttctttctctctctctatatatatattatttatattttatgtatgtcgaaatttcaaatatttattattattattattattctaccttcttcaaatcgattttttggctgtgtccctgaatttcaaggtactggtttatatatctcttataaactattaacaaataaaacattctggataaaaaagctatcganaggagcaacccattcagcacat

SEQ ID NO: 165405 - DNA, 476 bp, Glycine max
  unsure (1)..(476): unsure at all n locations
ctcaagctctatatggacganagtgcaaaactcctatctgttggtatgattatgtagaagcagnacttcntggacctgaaatgctacaacagattaacgaacaagtgaagttgattcgagagaagataaaagtatctcaggataggcagaagagctattatgatagaaggaggaagccactagattttcacgaaggagaacatgtgtttttgaaggtttctcccgtaaccggagtcggaagagctcttaaggctaggaagttgacacccaagtatctaggtccgtatcagaatttgaagaagattgcgcctgtagcttatcatatcgccttaccttcgagtttatcgaatttgcatcctgtgtttcatgtctctcaactgagacggtacaacccagatccatcacatatacttgtagtggatgaggtacaggtgaaggataaccctcactatagagcacaacctcagaagatcact

SEQ ID NO: 165406 - DNA, 419 bp, Glycine max
  unsure (1)..(419): unsure at all n locations
agcttaagttctggcctcccctattcattctcttagaacttgtntcagacccattcttcttttctggccctcttcntttcccattctaatgcctcaattgtggacatgctgacgtccctcattttgtcgcattctttccagaccttgatggtcgtcgtcttgaactcttccttgaccacttgggttcttttaagttccgtcttcaaggcttgcacctcttcactctcctcaggggtttcaacctcttcctcacttgaaacctttanctttaggatccagtctgtctcttgcatttagccttcaccactcgtttanccgccatgatccattgttgcttctttaagctcctatcactttttcacccactccatgcttacggacttttgaccattcttgcttgggtactgaacctctgcaag

SEQ ID NO: 165407 - DNA, 266 bp, Glycine max
tagaacaaaacttgtgtgtatcctcttgatttcaagattgtcatcatcaaaaacggggagattgtggaagccatgtcttccaagattattttgataatgccaaagaatcaagagtccagcaagttccatagaatcaagaattagattcaagtttcatgagtcacgatcaagattcaagattcaagaataatcaagatcaagattcaggaattcagagtcaagagaagactcaatcaggatagctttacaagagtgtttcaaaacta

SEQ ID NO: 165408 - DNA, 364 bp, Glycine max
  unsure (1)..(364): unsure at all n locations
attatcaataannaccttngcgacaacatggtccatacatctcaccgacacatgtaaagccttattgtgtcctctcccttcaacgtgaatctcttcttctccaagtgcgatataattattggtggttatatgattaacgatgccttcaaaaccctccactgagatatcatgtgctacatgggcatcgttgaggacctttatcaatagcgcacgatgaggctcggagtttatgagcagttcaagcaaagagatccttgctggagttttattcagttgctcaactaccttacactcgctctcgtggatgaggcgaaggaactcatgagctctcttcaaaacaccgtctttccttgaaaaccatctt

SEQ ID NO: 165409 - DNA, 348 bp, Glycine max
  unsure (1)..(348): unsure at all n locations
atttaatcatcctgctgggatgaatgagaaaactggggccaatgaagacggtgaggatgaaggagaaacccatgctgtgactgtcattcctatatggccaagtttccgatcaacccaacaatgtcattacttagccaataacaacccttctccttacctaccacccagntatccataaaggccatccctaaatcaaccacaaaacccacctgccacacaaccaatgcttaacaccaaccaaggaatgaatcttgcagcaaaaagcctatagaattcactctaattctagtgtcctatgctgacttgcacccatatccactcgataatttaatggtaggcataacccca

SEQ ID NO: 165410 - DNA, 411 bp, Glycine max
  unsure (1)..(411): unsure at all n locations
atgagggcctttaatggtgantttncactatggagatgcancggaagacaaaggagaatatgtgagaggaggcgccatccactatggaatataccttggaagaatgagcttcaccaccaaaatgaaccttggataaaaaccttggagaggatgcttcattggacgataataaagatggagagaaataaagaggggggagcacaaaattgtatgaagaacaaaggagagaagatgaactttgagttgtgtctcacaagactctcattatcaaagttcaacaagtgtacacatgcttctatttatagactangtagcttccttgagaatctctcttgaaaaacttccttgataagcttctttgatgaaacttctttgtaagcttgagcttanctacacacacccctctcataa

SEQ ID NO: 165411 - DNA, 117 bp, Glycine max
taccatctgtggtgaggatcatgaaacaggccaatgtattcccactgaagaaaacactcaagacattcattatatgggaaatcaacagtgacaagggtatactcaaggaggattttc

SEQ ID NO: 165412 - DNA, 382 bp, Glycine max
  unsure (1)..(382): unsure at all n locations
aaagaggcaaatntgatcattctactatgacgactganaaaactgtggcaaataaaaagggtgaggatgagggagaaacccatgctgtaactgccattcctgtgcggtctagtttcccaccaactcaacaatatctttactcaaccaataacaaacattttccttacccaccacccatttatccacaaaggccattcctaaatctaccacaaactctgtctaccgcacttccaatgatgaacaccacctttagcacaaaccaataacaccaaccaagaagtgaatattgcaccgagaaagcctgtagaattcaccccaattccactgtcctatgctgccttgctcccatctctaccttgatattcaatggtagccataaccc

SEQ ID NO: 165413 - DNA, 331 bp, Glycine max
  unsure (1)..(331): unsure at all n locations
aagaaaatgggtcatttttataggcccacgccttaaaatgatcacctttcatgttaaaagaatcacttgattcactcataaaaaagaactacntaggtctgattttctcatcccaattgatgaatgcttatgagcaaatggaaacacccttgtctacctctaaaagacaaaaaatacaaaaagggtatagaggatataatgacatataagggaacgtaaaaatcaaagtcatgtctgcacattctattaaaggctgccgtcccttgtgacggacgtgtggggtgctaatacctttcccgcgcgtaaatacgactcccaagcctttcactta

SEQ ID NO: 165414 - DNA, 317 bp, Glycine max
  unsure (1)..(317): unsure at all n locations
ttaggcacttctctctctctctcaaaattgctgaggaaattatttctgtgaagaaaatccaanccgaggcgcttccgtaacgttttcctaagtaattacgcgaagattctcgaccgctattcaagattcatccttcgctcttcgttttcttcagtcttcaacgggtaagtatctcaaaccaagcttttcaattcattctatgaacccgtggtggtccacattttgtttcatgcatttttattctcgttttcatttactttttatacaccccttttgacgtgcttaagccatttatttaagtcatttctcgctttatc

SEQ ID NO: 165415 - DNA, 459 bp, Glycine max
  unsure (1)..(459): unsure at all n locations
aaacttncttgagaagctagagcttagctacacacacccatctaaaaactaagctcacctcattgacaaaatacatgaaaatacaaaaaaaagtccctactacaaagactactcaaaatgccctgaaatacaaggctaaaaccctatactactaaaatggccaaaatacaaggcccaaaagaaggaaaaacctattctaatatttacaaagaagagtggatccaaccttgacccatgggctcaaaaatctatcctaaggttcatgagaaccctanggccttctttaatagctctagcccaagcctcttggagtcttctatccaatacccttggggggtaggatgcatcatcccctccacctcggaaaggatttgacctcaaatcccgaggttcttcatactctgtgctccttccctcgacacctataaaaagaaataaaacatatgtatgagtggtgtg

SEQ ID NO: 165416 - DNA, 391 bp, Glycine max
  unsure (1)..(391): unsure at all n locations
actaagcttgtatcccaggaggggattcgagcttaatgctaatgggcttgtctttgaagattatgaggaagaacatgaccactctagctcagacatggagtgttatttccttttctaacctcattcctacctctgatgtcaccttggatagagccaaattgatttatggcatcattatgaagatggatatgaattangggtacctcatctcccaacagatccctctgatttacagcatgacacatctaaacttggattccatgccttgatcacagctctatgcaagtgtcgcaacctacccttttgcgggagggcgacgcgagggctcatgggtgcgtcttccaaaagaagaaaatgcgtggagtctccaccaacgtttattgaaggaaaa

SEQ ID NO: 165417 - DNA, 328 bp, Glycine max
  unsure (1)..(328): unsure at all n locations
gataactcactttaacctccatttaccacagaatccaaatttaaccttccaactctcaaagcctcactctttttccactcataacaccacattctcactttctaaacctaggttaactctacccttcatctctaacagtttccataagcaatntcagcatataaacatcacaagcatcatcacaaaaaccctaaaacagaatgggtatgtctaactcatccaaacatggcaagttcaacatgctttcaacaagagtcttcacaaataactatcacgaagcagaaaactaacanaactacccatcatatctcccaaaaccccataccca

SEQ ID NO: 165418 - DNA, 395 bp, Glycine max
  unsure (1)..(395): unsure at all n locations
tgaatccacttacccgcgctaagcgcaaaggtggtgctaatttcttcgtcgcgaattcagagcctacttaaagcctgtcttgtgcaaaattacggtacactttgacacacacttttacagactnttagacaaattgtaggcagaagaaagggcatagattctagagcacaccacaatgcctattangggaanaaagccctataagcatcaagaggagcaactcgtgcattgaaacctacgttttgtaagattattattgtttgggtntctttgtaatggctagctaagcaccctagttggggatntctaatgaacatctgatgtaaatacctaatatctaattgattatgttttctgtgttcaatgcttccttcaattcttaatggttgtattgc

SEQ ID NO: 165419 - DNA, 455 bp, Glycine max
  unsure (1)..(455): unsure at all n locations
gatccttgagtcaccgcggctgcagctttctttacaacatccnctatcgtcatattattctaatngcaaggtctcatgcttgttctttctttgtctaacatacacacttgctcaaactcatgaaaagaaacataaactccatcacaatcatgcattcaattcaaaatcacatcatacaccaattttcaaacaaagataaaagtgttttactaccatatcatcaaaatcaagtcaaactgttccatatgcttcaaaatgagcaaaccaactacccataattaaaactagcagtgtatataaacataaaagaaatactgtactgaaaccataatcataataataataataatcttaaaagtaaaagtaacatcaggaattaacagtgtcaacagtgtctaaacacggaatcagtgagagcaacaactttctcagatggcgactcanaaagattagca

SEQ ID NO: 165420 - DNA, 361 bp, Glycine max
  unsure (1)..(361): unsure at all n locations
cactcaagctttgatctaccaccaccaccggcaccatcagcttagtttgtctattaattcttaatataaccagcattttggtttctagccgcgtatatggctatactattatgacatttgaacaatctagtatttcctttatttgcatggtatgattaaacaattatgaattatgttatatgactatgcgatttttatatatttgatctactcatgtttcttgcttcatgataggaatatattcttcaatgaatgtcttgtgaatgattaatagcgtatgtatggtttatacttgntacacactctggccttttgttgatgcccaagggggagagaaatatggattaaatccagaactctt

SEQ ID NO: 165421 - DNA, 289 bp, Glycine max
  unsure (1)..(289): unsure at all n locations
cccttgtattttattctttgatagcccttttgagccttgtttccctttccttgttttgaagctcactacaagccttaagtgaaaaaccatgatattaccatatccttaacgaactttggagctttggaattgttttgggaataantgtgggggggttttgtttcattggacaacttgttttgttggctatgcttcatgatgtattttgngccatacttgatgtacattgtatattggttaaatgttggacatgctgaatgacatgttgtttctcaaaggctaaagagtt

SEQ ID NO: 165422 - DNA, 381 bp, Glycine max
  unsure (1)..(381): unsure at all n locations
cttataagtgcgggtctgggagtttaaagtcatgtgttcgctatatgngaagataatgttccaagtacttgggatttggtccgaccatgccctcctgatttccagctgggaaattggcgagtggaagaacgcccccgcatttacgcgacaagcataatgtgaacctttacggttgtaaaagctctataattgggcctacgctttagagttttcgttttgccaagactttgtgtcttttcgtttcgaatttataatacaaagatctgtctttatctgttcctgcgctctacccattctcattcattngcatgtttactgcttcttctgagacggcagattcgatgacgagtcctcccgacgtactaatacctggaacccgtc

SEQ ID NO: 165423 - DNA, 444 bp, Glycine max
  unsure (1)..(444): unsure at all n locations
taactcttgattnncttggcattacatcaaaataatcttggaagtcattgcttccacatctaagtctattctatacatgccttgaaatgtcatgtatgtctgtcatttgtaacatataacagaaagaaaaacatgataaaaatgacagataatgaaccaaaaaagagttaccttttgttgatattgcacctccaattgcacatccactcaacaaagcaaccatttattttcttccccaatcctttttatttatcttctgacttagaaaaaaactaacgaactatagtataacaaagcctanataatactaataataataataataatgaaacacaaccaagataatcccaagctttctctcctaatcctatttattnnttttctaattagaaaacaaactaataaactattgaagaacagagcctaccctataattataataat

SEQ ID NO: 165424 - DNA, 411 bp, Glycine max
  unsure (1)..(411): unsure at all n locations
tactaagcttgttaccccatgttgangtttcataccatagtagtcttcatatcactactaaatgatctcgctttgaaagtggttatggttttaacccactaactcctcttgatcttttggctatgcccaatatttctgtttttaagcataaagaaggtcaagcaaaggcggactatgtgaagaagcttcatgagagagtcaaagatcaaattgagaggaaaaataaaagctatgctaaacaagccaacaaagggagaaagaaggttgtctttgaacccgaagattgngtttgggtgcacatgagaaaagaaagattccagacaaaggaaataaagcttcaacaagggagatgaatattcaagtgctgaagaatcatgacatgctacaaagtgactaccggtgagataatgt

SEQ ID NO: 165425 - DNA, 400 bp, Glycine max
  unsure (1)..(400): unsure at all n locations
agcttgatttacattcncnctatcttctcttttaagatatagnncattacttttgatatttttcaccaatacgattgttttgtatagtttgccttctatacacttcaatgaacgattctctacctgattattggattgagcacttaccacttggcccaaaattatacttgatagttatggctcaactctctctacttaaaagttaacagcccaagtgccactagacgactatgacttgacccacctgggcctccataactggacaattgatgccacaacccacaaaatacgggttagcgctaattccttgaaatgatcagtagctcacactgatataaaacactatgtggcatacttctgatttataggatatagtacaatgtacaaaagcttaatgtgc

SEQ ID NO: 165426 - DNA, 297 bp, Glycine max
  unsure (1)..(297): unsure at all n locations
acatgaagcaccagctcttctgcgcgagcatnggacttttggattcgcacctagtcttgcaacttcaacgatattacctttgtttgttgtctccatagatcacatattcactatctttgggagagatatgaataatctttgatgcatctcccgccatgtgtctggggcgatcgctatcaatgtatcaactgtgctcttctccactntcataatctttcaccatgagagccaaagttatgattttatttattgaatcacttgaagaatttatgtcattatcttccgcagagatgtata

SEQ ID NO: 165427 - DNA, 255 bp, Glycine max
tttggaataaacaaaactcgatcccagatactgggtcaaatatactaagttaaatcataccactccaacaaaatatcaccaatcaatatgaaatgacacccaaaatcaacgaattaatccaaatatacaagcttactaatatgtatttaaaactaaccaaaacacgtataaaatatataaattaactaaaacgagagggggaacaacttgcaagttcactctttaactggaacaagtctacgaacggattacata

SEQ ID NO: 165428 - DNA, 436 bp, Glycine max
  unsure (1)..(436): unsure at all n locations
tgtgctgggctaacggcgacagtcggtcagggttcgtgattctattttatattagtgagcgacggtgctagtcctttgttgtaggggttgctgtatccttgtagataattcacgacttatatataatagccgggagcttaaagataatgttagagataaacatttcaattatagataaagtagaagataatcataccatgtaggtaatgtgacgttatagataatttaatacctgccaaatagataagatattcaaatacatttgagtattagctacgttagagataacctcatttgtggagagcccgactgctaatgaccgggcgtctgcactcctgttgtagagctgcgtggatgatnggcatgtgtctataagtgctacattgcatgtcacatacgttctgcgggccttgatattacaacgcctactatgaca

SEQ ID NO: 165429 - DNA, 434 bp, Glycine max
  unsure (1)..(434): unsure at all n locations
aaaatcgngagatctacgtaggctcatgagagttttcgtagactcgaatagtagatctgtaaaagtttacttcaaataaaaaaataataaattaactataaatatcatatcaatttaacattttattaatattttaaagcacataagtaataagttcatccaattacaaaacataagctcttctccaacaaaaggtcatacaattataaaacacaaatagagaagatgaacctgattggcagcaattgtttaccaatggaatgcaggatagagaacaagtgctgctgagtgagtatactaatactctntggaattataaagaatatgaaaaaactagccaactagagaagaaaaatcaagacaacaactctgattcatctttccanctaaaagaactgaagacggctaatgccatgaaagatgcagagataaga

SEQ ID NO: 165430 - DNA, 319 bp, Glycine max
tcattatttatgtaaaaaataacggcataactgtaagtacatatataccacattatctcaaattacactactaaaaaaatgcaatttatcgaccgaaattattttgttgctatcaacaaccgaaatagtggctgaatagttctagtcattatttggttaattatcttctataaaaataaatattaaatattatactaataaaggtataagatattttaagaaaaatcaataaagataattgagtgataattaagttagacacattaataaaaataattaaatcttagccacacatattatccatggaatatgcatgagt

SEQ ID NO: 165431 - DNA, 363 bp, Glycine max
  unsure (1)..(363): unsure at all n locations
tggttgagtctcgtccaggtagtcccgaaaaagactggcctcacagtgatcagaaatgagaaggaggagttgattcctactcnggtgcacaacacttggagagtctgcattgactataggaggctgaaccatgttaccaaaaaggaccattttcccctgccattcattgaccaaatgcttgatacgcctgcaggtaaatcccactactgtttccttgatggtttttctggttatatgcaaattactattgctcctgatgatcatgaaaagaccacattcacctgcccctcttgcacttttgcttataagaagatgcctttctgcctgtgcaattgccctgcgccttccaccggcgcatgatta

SEQ ID NO: 165432 - DNA, 327 bp, Glycine max
atacattaattatgataaaaaattagaagttggaaaactaacaatggtagaaaatgagagtatacaacaaattatagcatatgtgaaaaatgacaaattgtctaacgtggatgacaaaccaactcacaaagctaggtcaatgtatgacaagtacactcccttgaatgcatctcgaggtagaatattgaatgaaattatgaatgtagaactgaaggatactagtcttgatgttaagaaccgaaaatggcaaacaacaccagctaaaatattttactatcatcgagaaactagacaagataaacaattattttcaattgaaaaatggta

SEQ ID NO: 165433 - DNA, 464 bp, Glycine max
  unsure (1)..(464): unsure at all n locations
gatcttaagcaccgcggctgcagctaggtatggatacttatgtttccttgaacctcagtgtatccacaatgcaaagaacaaacgtgaagatcatcaacattacattcaaacatgggtcaaggaatcacaatgagaagtgtacttgggaccttacctaaatcagtaagttgaattgatgttgtacaatatggatattatgtgaattattgttgcctaactaatgtttttcatcttcaaggcacattancaacttgttgttcggtgtccacgggacaatgttgttgtttggttttgttctttgcgtaagaagcctgatgttaacatcaagactgtagtgaacatgttagttttaacattaaaagtcaattgaaatattgcaatggtacggtaacaaaacaatattatttgattaatattcgttaacatcattttaaaatagtgcaatgaacacattaagcactact

SEQ ID NO: 165434 - DNA, 358 bp, Glycine max
  unsure (1)..(358): unsure at all n locations
tatgatccttgaattattctcacaaaatgatcactaagaaatatactttaccagcactttaatttatgagaattaaagaaactgaatcaagtaatctattcatttaatttataattgcatctggtatattatgaaaggacaagtgttttatgaatgtcaaacagacccagatcatgccaaaatcaaaagttgctgccttcttttctaccacacatcaagtgatctcagcctcacaagtacaacccccatgctctntttccttgattttttgtacatgccaatcctacaatctcaagttattacaatccccagtcatgattgtttgcagaaatgaattgtagatctgataatatttaca

SEQ ID NO: 165435 - DNA, 296 bp, Glycine max
  unsure (1)..(296): unsure at all n locations
cttttttcttttatttaacaancgaaaataactatctttaactacaccttatgtttttgatgagacccaccccccgaggtattcttctcctctttgacttctataatcaccttgcgcttttataatggaattttttttgcttttctcatggatttttaacttcgtcatagaagagctatcaagttctacaatggacattacgattattttatgaactaccatctatgaaaaagacgtggatactagcatacttttttatttaaatgagttaaagttttaggaacactaagttattg

SEQ ID NO: 165436 - DNA, 413 bp, Glycine max
  unsure (1)..(413): unsure at all n locations
acatgctctatnttcatctcccactccaagtaggcctctggatcattctttcctttaaatggaggaatgttgagtttaataccatcaattcggttttgtctaggaacaccatcattccctcttctcctcctttcttcttcattatgatctctattctccatttgatccaacctctcatggagcgcatcatctcgttgtttcattaacctctccaaatgttgcatcaaagcttgcatttggaattgcgaaagccccactccatcattangattagtacctgacatctcaaacaaacaaatcaaacgtaacaagacaattatagttgctggttgaatantcacccactcaagtgtatcacacaaatatggcttttctctaataaacactnctgcctttccactctaattcccttg

SEQ ID NO: 165437 - DNA, 302 bp, Glycine max
  unsure (1)..(302): unsure at all n locations
tctccctctnttccctataataggcgcaggatggaagaactatatcttctaccctcctggtatctgaggatcacttgaaattagtgaacaaaatcatttccgcgaagaaaatccaagtcgaggtgcttccataacgcgtccgaaacgctttcgcgggtgatttcgtgaagattttccgccgtctttcgttcgttcttcgtcgctcttcggtcttcaaccggtaagctcccgacaactaacttttcaattcattctatgtaccctaggtggtccccacttgttttgccgtcttatattttcat

SEQ ID NO: 165438 - DNA, 281 bp, Glycine max
ggaaagcggcttctaatgactcctctgctgcctccacataatgcatatatgatgggcacattaccaagatgtcttcctctcctgatacaatgaccaaatgcccttccctacaaatttaactctttgtggagtgtacagggaacaactcccaccgagtgaatccacttgactccccaacacacaactgtatggggggttaatatccattatttggaacgtaacttgacaagtgtgagggcctatctgtactgtgaggtcgatctctcccctaaccactctgc

SEQ ID NO: 165439 - DNA, 197 bp, Glycine max
aacacccagagtgcagattttgttttttgcccaccctccgctcctaagactacaagtcttatctacctcaacactccatgctgagtattacctttcaagcatacatgtctcattacatttaaagacttactgtctcagcattatgatttcaaatattataagctggcatcccaattttaatgtcctcctcattcacc

SEQ ID NO: 165440 - DNA, 319 bp, Glycine max
  unsure (1)..(319): unsure at all n locations
agctttagcaagcaccctgagcattaagaactcctctctccggcttatcagtgtgaaaggcgcgcatgagtacataaaacaaatgcgagatatttcagctcaacttgagacaatggaggttgatatgtctgagtcctttctggtgcactctcatttgaacaccctttcactggaatatggaccgtttaaggtatcctgcaacacacataaggataaatggtcgatttatgaattaacgactatgtatgttccggaagaagaaaggcttgtnatggagatgggagagagtgcattgctgacaaatgcttgcgggaagaac

SEQ ID NO: 165441 - DNA, 383 bp, Glycine max
  unsure (1)..(383): unsure at all n locations
ccggatcttagcgactgggctgcagcttgcacagcgccccccgcgatctatgttaccggtgccttctggagaacttcctggaaggcccaagtgggcatggttgtctattgcacccnctgtttactaaatacacccctgcccttttttgctgattnttttttccgtaacgttacaaaatcttaccaattacgtaatgatacttgttttctttccgtaatgttatgaaaccttacggatcacgtaatcatcccttttntggctttcggaatgttacggaactttacggattgcgcactaacactttcttttgacttccggcatgccacanaacttcacggattgtgcaacaatactttcttttgactttcgacatggcatggaac

SEQ ID NO: 165442 - DNA, 379 bp, Glycine max
  unsure (1)..(379): unsure at all n locations
cctcatcggccctcactgtctntagatttgggagccttatccaaccggggggtcggactctcagccacttatgatagccgccgatgatcccattactgcttcccctaagctctctgtcctttcttcacgccgcatcccatgccttgcgaactccttggagtaccctcgcgttgtggtcactaaaaccccgtgcgatgaaaggcgtgatgctttcgtctaatggcgctcctctcatggtgtagccaagctgtcttatggtgagaacgggattataattaatacaacnccttgttcccatcaacggaacatttggacatccttcgcatgaagatagaatcctgattcttccttccttctagcgagggaaccaattaacaga

SEQ ID NO: 165443 - DNA, 337 bp, Glycine max
  unsure (1)..(337): unsure at all n locations
taccctngaaagcaaaaaaaggaaagaaggaaaggaaatttcccatcaaagagaaagcttaaaaggaaggaaaggaaattcccaatcaaagagaaagcaaaaaaggaaggaaaggaaattcccaatcaaagagtgggagaaagagaaaaaaagaaacgaaaggaaattcccaatcaaagagtgggagaaagaaaaaagataagaaagaaaattcctaaccaaagaatgggagaaagtaaaaaagaaggaaaccatgacctacaagtggtcttctccctttgattaccaaccanaatcctgtgcgctagcgactttttgccccacactaaacaaaaac

SEQ ID NO: 165444 - DNA, 326 bp, Glycine max
ctcacgaaacgaggactaccacgtaaatgaccggctgaaactctgtcttacactgatggaaagagcttaccacaccaacgtgtggaagcaatgccttccaaggttattttgatgatgccaacgaatcaagagttaagaaaattccaaagattcaagaatcaagtttcaagaatcaagattcaaaattcaagactcaagtttcaagaatcaagattcaagaataatcaagatcaagattcaagactcaagagaagactcaataaagataagttctaaaaaaagtttcaaaatatcgagtagcacaagatgttttcacaacatcatta

SEQ ID NO: 165445 - DNA, 423 bp, Glycine max
  unsure (1)..(423): unsure at all n locations
agcttgggacgaacccntctttccncttcttgttctagnnnagccctctcttctctctctctccctctcttctttttcttctttattttcgntttttgcaattccaattctgactttntgttttagcaataaaatttcgttcttcaatctataatttcgttctctatttgattaatggaaggctaagtccccagcgttgttttctcttgaggatcaagcacagttctctttgaggttctattattactgttaaattntgttcagtntttcctcttcactaattactctgaatttgctgctattaattcatgcatgcttagtgcttgattaattgtctctacgcttaatttacgttcatgcttaatgatcgttatgagtaatcggtgtatgtgttgcttaatcatataatgaatgccttatgtt

SEQ ID NO: 165446 - DNA, 296 bp, Glycine max
gagttggccttccaactctcaaagactcactccttttccactcacaacaacatattctcaccttccaaccctaggttaactctaccctttacctctaacagttttccataagtaatttcagcacataaacatcacaagcatcatcataaaaaccctaacactgaatgggtaagcttaactcatccagacatggcaagttcaacatgctttcaacaaatttctttccaaataaccaccatgaagcagaaacttagcaaaactactcatcatatctgccaaaatccatacccacgaaa

SEQ ID NO: 165447 - DNA, 269 bp, Glycine max
gttccaagcttcaattggagtcttgtcttttacagacttagttggacatcttgtgagtatggtaacagcagtgtacactgcttcagcccacaatgtgttaggtaatcccttctccttgagcattgatctagccatttccataactgtgcgattctttctctcgacactccattttgttgaggagaatatgcgactgtaagttgtcgctcaatgcctttattctcacaaaatctttaaactcgcgagaggtgactctttgccggatcact

SEQ ID NO: 165448 - DNA, 302 bp, Glycine max
cttccatcttggacaaactactaaacctcatagatgttgtgctcaacaacaatagctttgttggacaaccacgtaacattggaactgtgagcttagcaccaattacaatggtgacagctagattgtgaagttcactagctagatagatagctagattgacacctaggtagctagtgacaagacacaacttgcatgcctgtcccaagcatgcaacaatattgtgacttgtctccattagtggtaaagaatcatatattatatccactgctgattatgtacatcaatttcgtaataccaaattt

SEQ ID NO: 165449 - DNA, 352 bp, Glycine max
  unsure (1)..(352): unsure at all n locations
gagtgatccatgaacttcaaatggatttccgctgaacttattaatagagagatagagatgtnntaaatctatctcccataagttgcggagattaccctaaaaagtcagaattgttccttcaagttgattacgtgataaatcaagttcaacaagagaagtctaatctcccacagaacttggaatggttccttcaggtgattatttgacaaataaagtccaacacgagaagtaaatctcccaaagaactggaatggtccttcaagtgattatatgacaaatcagttcacaagaaagcaaattcccaggcatcaaatatccatcagttgtggacttagcccagactgaacataaa

SEQ ID NO: 165450 - DNA, 278 bp, Glycine max
  unsure (1)..(278): unsure at all n locations
tcagtcacaaaacaaacttccatatgttggactgcctaacaccgcgatgttagaatttattcacacttgggtctgggaagcacatatcacgttttgaattaaaccgctctcataatcaatccatcgtgagcttgtgactacatataaaaacccaatctatccagatgtganctaagcccaatattatgtggtaattacctatctttcaacgctgcgattgggagaccttcaaccaatcatctctggtccttcagagtcttatgtactatcagacaacc

SEQ ID NO: 165451 - DNA, 187 bp, Glycine max
ttcttactgaaagtccataatagggggtgccattcagttcaatattgttgtcgtcgtttaccctcctaataagaattcactattggcttcttttaattatgggtggcctcccttcaaaaaattacactctattctaatagagctcacttctttaattctaaaaataattaattgatttgcttacgct

SEQ ID NO: 165452 - DNA, 296 bp, Glycine max
  unsure (1)..(296): unsure at all n locations
gcactattacctacttgaagaatttattttctaattcgaatttaagaaagtttaaaagaagatagatgtgtacgaagatcatgtggttggatcttcatttttgaggacaaaaatctttttaagggaggtagaattcgaacaccccaagttttgagttctaggaatataccataagaattcttattaagatccttctgttatatnttctggtaatatctattactattatntgtattntattgggtgtgcctaagcactacttgtgttgaatagtgcatgtgctctatcaacgtaca

SEQ ID NO: 165453 - DNA, 274 bp, Glycine max
tgaatcattcatgttatttaatttcttgtcatgaacctttaagtcccaattagctcttcaatggacatggagtccacgttcttcacaactcttaaggctgtcacttgtggtctctactttcttgataaacttcttagaaatttgtttatgctatcataattattaagacgtttgttaagataacatacattcatttaaatattcttgaagcgtccaaacatggcttgtatatcttcaccatcttcctatcgaaaagttatacatatgtgtaaca

SEQ ID NO: 165454 - DNA, 291 bp, Glycine max
  unsure (1)..(291): unsure at all n locations
atattcatatgtcnattgaggggcatttcaaccgagcacttnggtgggcnngcatgtttaggcataatattgcaagaagaatagggggcaattgtggcattgccctcattgcttcaaaatacaacataggcctaaggccattccctacaacccctcaattcaaacaaatcaagcataanaagcaatccaaaactgccccacanatatgagtacattctcactaattagagcactaaaagatgaacanaaggcaccaatggagagctaaaaactcaaggattgaatacttac

SEQ ID NO: 165455 - DNA, 218 bp, Glycine max
gatgaggggaagtgtggttctcgaaatctgcactctatgcagaattatgctgtgaaagtgtgcagcagaattttgcataagtgcagaacaaaatgctatgtatttgctggttgtggaaagagtaatgcagaatgagttctgggtgtttactagtagatcccaacggtcaaaatgtaagtgtatgtactatagacttccagtgaacattttgagtctat

SEQ ID NO: 165456 - DNA, 434 bp, Glycine max
  unsure (1)..(434): unsure at all n locations
ctgaaagccctatacatgctcttttctaaggcatgttcttttcactactatgctaaaatcattactaatttgagcgtatttacaggtaactaagtatacagcaggcaataaacatttcgcctgatgtcttcctaacattgccgatatctagcagaatcaatgtgccccagttctctgaagaacactcttacaatttaaactttcaataaatgactatgtcttttatattttcgcaatttcttaatctactcnccattactaacttgttaatatcactaaaccccttaaagcataagtaaaaaatatgctatcgctactattagaatcatgcttaaaatccaagatcgtagctacatcaagttaatataaatgacaaacgcgatcaatggttaaaagagatataatagcttatgatctctaattacttctaagtc

SEQ ID NO: 165457 - DNA, 396 bp, Glycine max
  unsure (1)..(396): unsure at all n locations
gctcctntnttttcgctttcaattaattagacaaaataagctcacanggaatanatttttagtagaaaccnagncacaangcagaagatgcagcnaaaaaaaccttccccagaaaatgtatgttcaaatacatataatatacatagatatactcctctatcttcttcttctttttttctcactaattaatattattatgctattataatttgtcagcattgtgatggcatggcgcatgggtggatagcacaagtgacagtgaaaggaagagaaaaaatggcagaccagcagcagatatgcccctttacctaacgtatagaaataaatgtgtcacagtgacaacccaatctcataactcattgatnggatataacttgtcatttgtntcatatatca

SEQ ID NO: 165458 - DNA, 421 bp, Glycine max
  unsure (1)..(421): unsure at all n locations
agaaaagaaaatgagaatggngtaactttggagcacactctcatctcacaaaagactataacattaatctacactcgctcaaaccggttctatgatgaaaactctaccgaatcaaaatttgactcctcaacacccaacttaccctagaaatggctcttgccttcactttgggcactcattntcctcacttgctcagcccaagctctcccataagatctaaatgacatttcacactaggagtaactcactntaatcttcactcaccactaaatccagcattagctttccaaatccttagagcatcacacgtttccactcatatcactacattctcaccttttaagcgtaggttaactctaccctgcatctctatcaatttgcatcagcaatttcagcataccaacatcacatagcatcacat

SEQ ID NO: 165459 - DNA, 366 bp, Glycine max
  unsure (1)..(366): unsure at all n locations
tggaaagtgtggtttntcaccttctcgctaagccaatctgctggttttcgagcgtccgctaagcgcaacactcatgggctaagcgcgaggaagactctggaagaagatgagctgtacaagtttgctaagcgcaccgcttcatctcactaagcgcaccgcttcagttcatctgctaagcgagagagacacgcactaagccaaaattcactaatgtgcactaagcgtgccataagtgtgctaagcgcacgagcacgaacaaggccacttatntaatcctgaaatcatatnttanagagggagtctggattgggatttanagctntacatgtctaggggttctagagagagaaaggtccaagttccata

SEQ ID NO: 165460 - DNA, 420 bp, Glycine max
  unsure (1)..(420): unsure at all n locations
ctgcaagcttaatctaaatgaatagagtattattgttctatctntcatttgtgaaatgttggcgaaatgttaaacaactaagaagcaaattaaagttagactcagaccttaaatttgcaaaagagagattcgaaagaattgaaaggtttgaagaggcaatatgcggcactaccaaaacaagaaaaatttagcatttaccaccactaattgttattagcttttgtttatttgatttgggtaatatagatagctaccaggataagcaggactttatcacaaaagaattatctattgaagttttagttatttctctctaaataagttaatgtatataaaataattacgcatcatctttcttgtttctggtactgtagaaattcataccatatagcagtattggtatgagaaaacatattaaca

SEQ ID NO: 165461 - DNA, 396 bp, Glycine max
  unsure (1)..(396): unsure at all n locations
tttaantacatgccagnggtgaccaaaggtaggaggcagatcacacaaaattcattaacctggctaagtgttccaatctgcttcagaagatcaaacatcatttgattaccatgatattcagattgcttttatctaattattatatgctgccatacagaagcagctgaagcttttacaaatgcatatatcctcggtctaacccagaaaatgtaattaaacattccttcaccattagaataaaacttattttttcacatttttctcatgactatgatagttnccaggactgtagagaacaagccaaaatggattatcaccactttaatgcttaggacatatgaatcacgatgactcacatgctcattagatattatatccacaccatatgcgtataat

SEQ ID NO: 165462 - DNA, 359 bp, Glycine max
  unsure (1)..(359): unsure at all n locations
cgaaaacacaacattaaagtcagttccacgttgtcttactgctagaccatcaacataacttgtttaatgtatccatccaattatttaatgctacaacattttatgctataggcaacaccaatgactccaacagttggaaaaatgtttcctaaacatacaatangaaactgatgcttatttatataaccgttgataatcaattcctaaacacttatataatctttgacaataatatanttgttttatgtccttctattaaatatgtatatatagctcgtacgtatctacatcaagcaacagattcaaaccgtctgataagtatagactacattttcttaattgttgtgagttacgctgcg

SEQ ID NO: 165463 - DNA, 336 bp, Glycine max
  unsure (1)..(336): unsure at all n locations
tgttcgcacatcgttcgcttgtatgatatccgctccacaagccttgatgtatatgagaccttcaatcctattacgcaacgtggcggataatagtgggcaattaacttgaatggtcattattgtcaatgcggaaggtattctgcgcttcactatccatgttcacacattattgcagcttatggttacgtgagcatgaactactaccaatatatagatgttgtttacacaaatgagcacnatttanaagcttactccacacaatggtggcctcttgggaatgaaacggctatttctccttccaatgacgcatggacacttatccctgacccaactaca

SEQ ID NO: 165464 - DNA, 379 bp, Glycine max
  unsure (1)..(379): unsure at all n locations
agctgagtgaaacaatgactctganggtttggttgattgatccttcttgaannctgccatcctaactagcttatnttagttgtgactctaatacgtgtgttcctatcnttgaaaagctgcatgtttgtgaanagcaatntattgaagctttccatgatattcagttcatatggttgaatttctctatgaagcacacaccattnttgggtgaccactgtaggttgccacttgaggacaactgaactgttctttctttacttgaggacaagcaaaactgtaaatttnggggagtttgttagttcgcttatacgactaaactttgacttgaaacattattcaaacttgataattcccacttgacggtattttcgaagtattt

SEQ ID NO: 165465 - DNA, 396 bp, Glycine max
  unsure (1)..(396): unsure at all n locations
ngaagggaaactagatgcatnggttaactgggtaacccagctggccttgaatcanaaatctgtacctatcgcaaaggtttgtggtttgtgctcctttgctgaccaccatacagaccttngcccttccatgcagcaacctggagcaattgagcagcctgaagcttatgctgcaaatatttacaatagacctcctcaacctcagcagcaaaatcaaccatagcagaacaattatgacctctccagcaacagatataaccctggatggaggaatcaccctaacctcagatggtccagccctcagcaagagaccagagcctccattcagagcttaaccaatcagatgggacagttggctcccaattgaataacaacagtccccaaatctgacaagctgct

SEQ ID NO: 165466 - DNA, 333 bp, Glycine max
  unsure (1)..(333): unsure at all n locations
ttcgagcctctcgacatcttatgcgcccgaatcggacatccgtgagaaaagttatgaccatttgaatttcttgagagtttccaatgtttaatttcgagcgtatcgatatattataagcttgaatcggatatccgtgtgaaatgttatgaccatctgaatttctcaagagcttctcttgttcaatttcgagcctctcgacatattatgcgcctgaatcggacatccgtgtgaaaagttatgaccatntaaatttcgcgagagcttccgatggtttatttcgagcgtatcgacatattataagcctgaatcggacatccgtgtgaaaagttatga

SEQ ID NO: 165467 - DNA, 375 bp, Glycine max
  unsure (1)..(375): unsure at all n locations
ctgcagcttanctactgcttaagagtacacaatatgctttcgtatgtaacacgttgcctaaaagngactatcaggcgaagaagatattctgtccgatggatatggagtatcataagattcatgcttgctcgaatgattgcatactgtacaaacatgaagttcaataaatgtccaaatgccctacgtgtggggtatcacggtacaaagtcaatgatgctgaggagtgtagcagtgatgaaaactcatagaagggcccgccaacgaaagtgttgtggtatcttctgatcactccaaggtttaagtgtctctttgccaatggagatgacgctaaaaaccttacatggcatgcanatgggagatactgcaatggaatgg

SEQ ID NO: 165468 - DNA, 273 bp, Glycine max
acaaaaaagagatatggagctttaaatgtaagagtaaattacacttcattcatttaatatatgcaaatattacattgtctttaccttatacttgaataaggaaaattcacaccacactttaaccacaaatcttaatgctcatgtttatgggtgttctcttcacttatatggtgctcaacattttcacttttaatcgatgtgggacttcacctcatacttgtactccaacagatattccatgtatgttatcaattgatatgtcattattttatc

SEQ ID NO: 165469 - DNA, 251 bp, Glycine max
  unsure (1)..(251): unsure at all n locations
ctatgaattggccacacagccgncaccatcagagaagtgtgtttatgctaaacttattcatccaacctaaagatcactgcgattcaataagctcactcaacagcaataatgagtctctaaaataaagcttaatcgcgagaagatcaaaagatgtaaaacattcttgaatacttacaacgcctcgaagctatcaatacatatcaacagttagtgcttatacacaacttttgctagaaatatttccaaactga

SEQ ID NO: 165470 - DNA, 163 bp, Glycine max
caggcctcatctaatcattctctccatattcctggctgatctgcatatgtggattcagcctcccagtgcgaagggcgccaagcataagcagacatgcacatgttatgtttgcttaacaaagaagcgacgattccgatccttattttacggcgtgagaagaaac

SEQ ID NO: 165471 - DNA, 262 bp, Glycine max
  unsure (1)..(262): unsure at all n locations
aacattaacagtggatggccaccaataagggccctactactgaacgtgcagagagatgagtatgatcagcattggagcagctctcaatgctctgngaaagctgtatctctttggctttggtgcactgccattcttgtgtccatgttcttagacatgggtatctttgagaaggttcttaaacctacctcacgcgccatattgccgttcggcaggaggaaccgccgccggagctcttatatggacttcaatgggaagcttggac

SEQ ID NO: 165472 - DNA, 296 bp, Glycine max
  unsure (1)..(296): unsure at all n locations
aggaacaggcacattctttatccccaccggggaggggcagtccaaaatcaaacaaatctcacactataagccaaatcccaaaacaaatgncacgatctcaaaacgaccaaacgatgtctaattaatctatgaaatggcctatctatctcaggatcaaaggagctcaagacaaatggattaccactagtcatacactaaaatcagcatgcacaactagatgtcttcctatgcaagtagcacatgaagtatgaactataactaccatcaaatgaagaccaaacgactcgaaattctgc

SEQ ID NO: 165473 - DNA, 218 bp, Glycine max
  unsure (1)..(218): unsure at all n locations
caagtgggcctggatgctattngcacccccatttttactaagtacacccactgcctttagtttttggtgattcttttttcgtaaagttactgaaacttacaatattcgaaacgatacttgttttctttccgtaatgttacagaaccttgaggattacataatcatccctcttttgacttacggaatgttacggaacctcactaattgtgcaacgatgc

SEQ ID NO: 165474 - DNA, 283 bp, Glycine max
  unsure (1)..(283): unsure at all n locations
atatcgagacgctcgtaattgataacggaagctctgagaaacatcaaacgacaataacttntaactcggatgtctgatggagccctgtaatatatcgagacgctcgaaattgaaaatggaagctctaagataagtcaaacgacaataactcttaactcggatgtccgattgtgtcccgtaagatatcgagactctcgaaattgaaaacgtaagctctaagaaaagtcaaacggcaataaattttgactcggatgtccgattgaggctcgtgggatatcgagac

SEQ ID NO: 165475 - DNA, 270 bp, Glycine max
  unsure (1)..(270): unsure at all n locations
cttgatactcagcttctgtttaattacagcgtctcgaatagacgggactatatctgctttctagtcaaagtattctcgttgattttctcacagcttcaattntaattacgagcgtctcgatatattacgggactcaatcggacatccgagataaaagatattgcgtgtntgatattgatgaaagcttctattttcatttacgagcgtcttgacatattacggggctcaatcggacatccgagtaaaaagtaattgtcgttggatttgctc

SEQ ID NO: 165476 - DNA, 375 bp, Glycine max
agtaaccagcataggctaaagagaggatgtcgttttcttgtgtgagtggctaacagcgcagacacttcaaagtggataacaacttcctggctcagcaagcgcatagcagctccctgagagaatttcctagcatacaaaaagcacggaacggatgtggaattggtatgacaccattctatccggtactcagtctcataataaacatggttgatgccctgtttaacaagaaaaaaaaagagtatcgagacagaactagttgcattatagcatgtaataatcacttcaacaaaacttcacaaaagaaaattactagcatcaatatatgcgacgatatctacctttcatccacaaagataatagaggactcgggaatta

SEQ ID NO: 165477 - DNA, 357 bp, Glycine max
  unsure (1)..(357): unsure at all n locations
cacggcataaagntgtctgtcttcatatttatctcaactaaactctactgattagactgaaattgatncatttgcatccttacataccaacactcatcacagnaaaatcttgaacaaatcgtgctcccttcttcacggtttcatattgcacgcgttgtgaaaagtntcagaagttgtgtctgctatataatctatacgtaaatgcacaactcatatctacataaaacatccatcttgattatcggagataagcccaagtggcatactatagaaggttacgtgatagaatatatgaacgtggtgggatcatatgatcaacgaatatatgattgcattataaacattggttctactttt

SEQ ID NO: 165478 - DNA, 224 bp, Glycine max
  unsure (1)..(224): unsure at all n locations
ataatttatgctcaatgaatcccaagtctctnttgtagttcttagtctgcagatcttgttgcactcattctttgtanggcacatgtcaaagtacatatggctttttgtgtgacctccataatggctagatcgtcatttgctattancttcaggtctgggaatagggatatcccattgtcatgataagcanaatctatactaggtggactgatgtacttctccat

SEQ ID NO: 165479 - DNA, 371 bp, Glycine max
  unsure (1)..(371): unsure at all n locations
ctggttcttgattttcctaagttctgtaacaagcttagaacattatatcttgccttctcttaattggctttgggcttggcgaccacgatcaacaaagtactttccgcacctactatatgttgactcgaccaacgctgttattggaatgctgcgacaatctttcaacaccttattcacacattcttataaggtgggtgtcatgtgaccatatcgtcatccagatgtatcgtaagtcatgctccatttntcctttgaaatgcgatcaatccatcttgctatggctggactcagntgacgaaaattttctaatgtttgatcacacacatgctctgcaggagtgtacgctgcatcaaatttgttatcatcaaaag

SEQ ID NO: 165480 - DNA, 359 bp, Glycine max
  unsure (1)..(359): unsure at all n locations
ccttagcacctgcgctgcagctctccccaatttctataatagggggagaagtttattgttaanggtncagccccgtaggcacttctctctctttctgaattgcttggaaaaattggttccgngaagaaaatccaagccgaggcgcttccgaaacgtttccgtaacgtttccgtgaggaatttcgtgaaggtttcgaccgttcttcgacgttcttcattcgttcttcatcgttcttcgatctttaacgggtaagtacctcgaaccaagcttttcaattcattctatgtacccgtggtggtccacatttggtttcatgtatttttattctcgtttcatttacttttttacccccttttgac

SEQ ID NO: 165481 - DNA, 418 bp, Glycine max
  unsure (1)..(418): unsure at all n locations
tggggtacccatcacatgtggtactatgtggcggtcgtgctatggtgcaaaacgattctccacatccataaatcacgtacaaacccaccatcccctgttgcccacctccaattgagctcacgtactcccacgtagcccttatcctcgttcatctcaacgccgagtccccatcaatcctcccaagctcccacaacatccaattaattccacatccaatcatcatggactaacataaccaagcataacagggcaaaggcagaagactctgcccaaaacacaacccataatcacagcttttcacatacaaatacnccagtaacatntccttcgttcgaatacgtaaaccgcggatcgactcgaaaatctactggaagctctagtacatagctacattttgaccgtggatctctagaaaatt

SEQ ID NO: 165482 - DNA, 318 bp, Glycine max
aggatgagggagaaacccatgctgtgactgccattcctgtacggcaaatttcccaccaaaccaacaatatctttactcagccaataacaaactttctccttacccaccacccatttattcacaaaggccatccctaaatctaccacaaagtctgtctaccgcaccttcaatgacgaacaccacctttagcacaaaccataaacaccaaccaagaagtgaattttgcagcgagaaagcctgtagaattcaccccaatttcagtgtcctatgctgacttgctcccatatctacttgattattcaatggttgccattaccc

SEQ ID NO: 165483 - DNA, 450 bp, Glycine max
  unsure (1)..(450): unsure at all n locations
ctatagatactcagcttctctggaccttgaacaggcactaactcctctntcaaaccatgctttgtgtctcgtgactggtcccttcttcctttcgtaacttgagttcactattgctaccccatagagcttccgcgaaattgttccggccatactctttcttgcgagccctcttggtctctcgttcaagggctcttgcggtaattgcattctctttccgtaacccggcacactccttactaacgtgtgtagcggccaacttgaacttcttcttggcaagttttgcctttcctaactcgcttttgagagcttggacttcttcgtcctctttcggtgcttcataactctctttgctgacgactcntaacttggagagccaatctatacctctgatatgaactttcagcattctggtacccacaatgatgccttacgattgctctaactcttgac

SEQ ID NO: 165484 - DNA, 331 bp, Glycine max
  unsure (1)..(331): unsure at all n locations
tatattctatcttccttccttccttatagtccttggagatatgctcataaacagngnacaatggtatnntaaggctactccactcgatcgagtntatattcacaccagccatttctatttttgatatcttctcagcacttcagaaaaacaacttngcatttattttcttttgtttntgtggctaaatcaggcctaaggatatgcttacagcgtgtagttctgccatctatctatcacaagagaaagagaagcgttacactaagctagtattaagtatttaatttaataataacgtgaagggattctcgaattatttattgaaagtaaaata

SEQ ID NO: 165485 - DNA, 423 bp, Glycine max
  unsure (1)..(423): unsure at all n locations
tactaagctngtgagtaacaacattacttaatacttatttcaagagatattactcgtgtgtctntnngaattatttattatacgggtctaagaacatattaagaaataatatataaaattatgaataataatacaaatatntaatatcttaaaaatgtaataaatatgtaatatntcatatatatatatagataacttaatggaaacaaatctattatttaatttataataaacagtaaaactaaaagccgataaattattgtgttattctcactaaccaaggtcgtacttaattaaaccattaatttactatgttttcgctaatatggttctaaaataatatgatacaatctcggtaaaaaagaaagaaaaaaaatagtaaagttaaaagaccaatgtatagaaagtaccaaatcaatcata

SEQ ID NO: 165486 - DNA, 401 bp, Glycine max
  unsure (1)..(401): unsure at all n locations
gcacgagctcagcttggggcactctaagtgatggaatgttctatcttttaatagtgtgggggaatcttgtgtctttggagcgaggaaactctctaattggaaaagacgactgtgaagtggtttgtttacttggaagggatatgggttggtgatggtgaaaaagtgtcaatagtgaacatatattcgccatgtgttgtatctttgaaaataaatttatgggatcaagtcaggcagctcagagctgcaagcattgngggtctttggtgtatactaggagattntaatagcattagaagaccatcacaaagagttggactatgtcaaagggagtaattctgnggtcacatgaatgaatntaatgactggatcgttgatctagagggtgaagatgtgccttgtgt

SEQ ID NO: 165487 - DNA, 400 bp, Glycine max
  unsure (1)..(400): unsure at all n locations
agcgcgagctagctgctcgctagcgcgttgaagactaatgcttagcgcaagtggtgcgcttagcgagtgaactactggatnaatttctaagttctttttctgttcacctcttcaccaaagcttataaacccatcttttcaatattaaacaagctgaaaacacacaatcacaaacaacaactacacttaatgcaagcaaaacannaattaaaatgactgggttgcctcccaacaagcactcgtttgatgtcattagctngacgcatcgttctgttatcccagatcaatcttggttctctccttcagaaacctcttatccaattccttcacctgtaagcatacatcctggtccagcaattctcttccttcattaaatagatcaaagctgatttgttggtttt

SEQ ID NO: 165488 - DNA, 317 bp, Glycine max
  unsure (1)..(317): unsure at all n locations
actaaacaccaacctgagagactacaactaagacattcttctaagagccacaactaatgcaagctgggggtgactacaattaatgcgactntccaacactctccctcacacccaaggctactagcctagagcatggcaatgtatgttgtccaacaatggatttgggataggttttgataccatattaaaatatgggcttagggcctctaactgaaccccacaaaatcagttngtttgtaaggtgagcgttgctgaagcattataaggtctatctctagtcaatgtgggactaaacactacccttgagacttcaatta

SEQ ID NO: 165489 - DNA, 416 bp, Glycine max
  unsure (1)..(416): unsure at all n locations
actcaacatcgaacccatcataagcgatccaaccgccatattccccactgccaaatccctcgagctacccatcatcgcataaatcaatggtggtataaagctcgaatctgcacaaacacatatcatancgttccatgtatattagacacagttttaatcaaatgaaccaaaatatntactagtaacaatagttataagtagttgagttagtaaagaagcatcaaaatgttaaggttntaacataaaatatcctgtaaaagtattatgtgctacttatgattattaatgtaagtcttttgatacttattctttttgaattttcaataatngatataaaatcgatttgaatgttgatcaacttatataataagacaccaaatgaattataacatgaaatattngtatgaaagtttatg

SEQ ID NO: 165490 - DNA, 408 bp, Glycine max
  unsure (1)..(408): unsure at all n locations
acgcatcaacaagaatcaagccaaggctattgtgcaagcaatcaatggggcaaaacacaccaaatgattataatgatggatggctcanattctcacaaaggtaaaatcatcactttcaaattgagctgtcanaactatcatgacatgtagagaagaatcaaggatntcaagtcacaaaatgtcaagaacttttattttcaaaacaattactcatttcttgaacatatcctataattcaaagaaaaacatgcaaagtcgtacgtgcacacaaaattgacccaaaatattaaactgaaaatccgacgaaactaacaacattaacatattaacacaactaacanattaacaaaaccaacaaaactatgcaaaccaaagaacactcctctcccccatacttaaacaacacat

SEQ ID NO: 165491 - DNA, 191 bp, Glycine max
gatcgaagaacgatgaagaacgaatgaagtatgtctaagaacggttgaaacctttgcgagattcctcactgaaaacgttacggaaacgtttctgaagcgccttggcttatattttcttcacggaaacaattatttcaagctaattccaaagagagagaagtgccttaggggctgaacattttgaaacagct

SEQ ID NO: 165492 - DNA, 277 bp, Glycine max
tggcttgaaatatgagttctttttactcgtctcttgtttgaactatctcaaatctcctgtggttttatgaaattttcttgtttaaactaagacaaattttcaacaacttctcggttggagcccttgtgagaataaaacctcatcatgacacgccacgtgactgcctttgtgtgcaattgggtttggcaatgtgtaagttttcttgattatgagtctctatgctgatcaacttaaaatggtgttacagtctcttaaactagagagaagatgattttta

SEQ ID NO: 165493 - DNA, 316 bp, Glycine max
  unsure (1)..(316): unsure at all n locations
cacatacacattctttttcctagtcgatcactcacttaattctccatatgctccccccttgtttntgagtttaagcttcacttgaaattaagttatttaattatgtgagttcttgatttaatccctattttctctccccctttggcatcaacaaaaagccaaagtgcgtaagacataaaaaanaacatacacaaggtattcaatgaacaatctaaaccaatcatgaagcataaacatgaataacccagattgaaatataaaccacatagtcatataacataattcataaatgttcagtcatactaagcaaatatta

SEQ ID NO: 165494 - DNA, 314 bp, Glycine max
gtgtaggattatggagtacccatcacatgatggactaagtggctgtctttctatggcgcacaacaagttgttcacatccacaatgcgcgcataaacccaccatccactgttgaccacctgcaactgagctcacgtactcccacgtatcccatatactcgattctctcaacaccgggtccccatcaatcctactaagcttccacaacatccaagctaaacaacattcaaacagcacaagctatcacagtctagcgaaacagagcacaggcagatgactctgcctaaacaccaaccaaatcacagctcttctcact

SEQ ID NO: 165495 - DNA, 376 bp, Glycine max
  unsure (1)..(376): unsure at all n locations
gctctttgagaaaacttgcttgagaagctagagcttatctcacacacccctctgataactaagctcacctgcttgagaagcttccttaagaagattcctaaagaagctagagcttagctacacatacctctctaatagctgagctcacctccttgagatgagaagctagaacttagctacacaccccctataataactaagctcacccccatgaaaaaaaacatgagaatacaaaatataagtccttactacatagactactcataatgccccgaaatacaagggctaaaccctatactactagaatggccaaaatacaaggcccaaacgaaggaggaacctattctaatatntacaaagataagtgggcttatac

SEQ ID NO: 165496 - DNA, 365 bp, Glycine max
  unsure (1)..(365): unsure at all n locations
tagttctctgcaggtctgggcccaacanaatctctcagaactctctgtattcagacccttctctctctagaatctctcacatgcagaagctcttcgagaaaatggccaaaatcttctccaaaatctaatttcaggcttaaataggtggctttgtntgtgctagcacacttagcgagactatggacgctcaacgcgcattagtgtgatttggcttantgcatgcttttctcgctcagtggatggactaaagcggtgcgcttagcgggataaacccttgctcaacgaacatgcacatctcatacttcttccagattcttcctcgtgcttagccaatggaatggtgtgctcagcgaatggctcgctta

SEQ ID NO: 165497 - DNA, 405 bp, Glycine max
  unsure (1)..(405): unsure at all n locations
aagcatcaacaagaatcaagccaaggctattgtgctagcaatcaatggggcaaaacacaccatatgattatgatgatggatggctcaaattctcacaaaggtaaacttatcacttccaaattgagctttcaaaactatcatgacatgtagaggaaaaacaatgacttcaaatcacacaatgtcaagagactnttattttcaaaacaattacccatttcttgaacatatcgtataagtcaaagaagaacatgcaaagttgtacatgcaaacagaattgacctaanatattaaactacgaacccaacaaaactaagacaattaacatagtaacacaactaacaaaatcaacaaaaccaacgaaactagcacaaccaaagaacaccttccccatacttaaacaacaca

SEQ ID NO: 165498 - DNA, 400 bp, Glycine max
  unsure (1)..(400): unsure at all n locations
actcagcttctgcgtactgctctggtgctcagaaaatccaagacaaatcctcttattctagctatttcgaattctntagttcctgaatgtacaacctttaaattggtgctcgttcccctctatgtattttgcagaacagaaaataaaaaaaagtacctcacgtacttcatcattatntacataatgaaatatttatatatttgtgccgattaaaaataaaccttacagatcatagctacacacttacagcagctccagatattacacagattacaacatcatacaataatttccaccacgaggaaatcatgactactaatagtttatgcagatacagaccaaaatgcatcacacacaggcgcaagtacctcagtgatttcgtataatgaccagaggagct

SEQ ID NO: 165499 - DNA, 329 bp, Glycine max
tccacaaaggccattgcctccctcgcccagtattatgatcagccgctgagatgctctacctttggggacttccagctgtcacccatggtggaagaatttgaagagatcctatgatgtcctctatggggaaggagaccatacctcttctcagggttctgttcctcattagctcgaatttcagagatatgccaaatctcggcgcacgaattataccatggaaagcaagtcataaatggtgtggttggaataccgagaaaatctttggaggcgaaagcaagaaccttggtaggtagaggcgaatgggctccgttcatagacattctcgcact

SEQ ID NO: 165500 - DNA, 383 bp, Glycine max
  unsure (1)..(383): unsure at all n locations
tccttaagaagattcctaaagaagctagagcttagctacacatacctttctatatagctaagctcacctccttgagatgagaagctagagcttatctacacacctcctataatagctaagctcacccccatgacataaaacatgaagattaaataaaaagtccttattacaaagacaactcataatgccctgaaatacaaggctaanaccctatactactagaatggccaacatacaaggcctatacgaaggaaaaacctattctaatatttacaaagataaacgggctcatacttagcccatgggctcgatatctaccctaaggctcatgagaaccctagggcctgtcctcggatctctagcctaatctacttggagtcttc

SEQ ID NO: 165501 - DNA, 366 bp, Glycine max
  unsure (1)..(366): unsure at all n locations
cctgccgcatgcaagctgcttgtgggcttaatggaggctgtttctntttgnctttatggggtcctttaatggtgaatttccaccattgagatgcagcggaagacaaaggaaaagaggtgagaggaggcgccatccattaaggaataagccatggaagaaggagcttcaccaccaagatgagccatggataagaagcttggagaggatgcttcaatggaggaaaagaaagagggagagaaagagagaggngggagcacgaaattgaaggaagaaaaagggagagaagttgaactttgagttgtgtctcacaagactgtcattcatcaaagttacaacatttgttacacatgcttctatttatagact

SEQ ID NO: 165502 - DNA, 367 bp, Glycine max
  unsure (1)..(367): unsure at all n locations
tcagctgctagaggggngggcacaagtcagacccaggaggaatngattgtatgacctgatancacaagatgtcagngagggcgacaagagagcagtggtggtatgagaggtgcttaatgacaaaacggtatacattgtggatggcgaggagttacgggtgacaatcaacttgtaaatagttccgaatttgattcgataatccactcgtctaattaggttcatgaatcaaatgacttgtacttgagctacaaataaagctcattaaataagtgagccgaacttgagctacatatagttcgattcatttggttcatgaactagctcaaaatatatatatatagattacgttgttctattatttatatat

SEQ ID NO: 165503 - DNA, 360 bp, Glycine max
  unsure (1)..(360): unsure at all n locations
agcttatcaaacataataacattgattatctttctatattctctcaacgctcataatctaagatacatatggtgtagaatgatttatcttccgtcataatgaattaatatgtgtcagaattgatatatgttgtgtctacaataataaaagtaactttctgttatgagagaaaaatacaacaactgagcttataagaaacttttcacaataagttttaattctgagctaatacatgacaatattacaagtgatggtgtaaaattatgttgaaacaaacaaaccagctgttattcctagaaagatagaagtagaacatatatatatatcgaaggagaatanattgttacctaagttgttaat

SEQ ID NO: 165504 - DNA, 224 bp, Glycine max
tattcgttgaccacacagtgggacctggagatatgtcgcgtgggtcaggagaccttgctgacgtctagtgcggtactatatcccaagaccaagcttgaccgataccgacccaacccgggcataatcagtcagtgagaacctgttatgtacctaaacaggcgagcttctcgccgtctacagattaaaggtacaatgaccacaattcatggaggcttgtggtggct

SEQ ID NO: 165505 - DNA, 455 bp, Glycine max
  unsure (1)..(455): unsure at all n locations
gctgccactatgacttcttctcagtttctcacctgtaaaatcagcctcagntaatgtatgatattacatgatgctcgctctaatnntaatttgtcttgttagtttctctatttgtagatttcattgatgtcacttgggaaaatatgatatgatgacatgacagagttattatcactttgccttgttttatgagattntagattaatgaagtattcaatttatgttcttaatgtaaggtgtgaattaatctttgttccttgcaatgtttcaagtcttcctttattcatcatcccttccatttggtggtttntcaggatatactgtaatgccggttctgagaattcatggatatgccttggctcgttcggtntgtcttatcatcttcatagcagcctcacaacgaacggacgcttcagaaggtgattngctttatatgctttcaagtcttaatcttc

SEQ ID NO: 165506 - DNA, 129 bp, Glycine max
  unsure (1)..(129): unsure at all n locations
accttagaatctcagcttctgatgacattgggtcgtgggagcagatgatgttgttgctgnagttgatgacgatggcgacattgccttngtcactaacgattctgcttgctactatgcgtcgaccactat

SEQ ID NO: 165507 - DNA, 470 bp, Glycine max
  unsure (1)..(470): unsure at all n locations
cccatcacatgtggtactatgtggcggtcgggcgatggtgcacaacaagttntccacatncacaatgcgcgcacaaacccaccatcccctggtgcccacctccaactgagctcacgtactcccacgtagcccatatcctcgtttctctcaacaccgggtccncatcaatcctcccaagcttccacaacatccaagcaaaacaacattcaaacagcacaagctatcacagccaagcaaaacagagcagaggcagagaactctgcttcaacacatcaaccataatcacagctnttctcacgtaaagaccacagtaacaattccttcgatcccaattcgtaaccgttggatcgactccanaaatttactggaagtctatagtgtatatgcctgcattntgaccgttgggatatactagcanacatccagaactcattctgcactagacttccacangccaccacacacaagca

SEQ ID NO: 165508 - DNA, 356 bp, Glycine max
  unsure (1)..(356): unsure at all n locations
ctagaagtggatctaaatggcatgtcaataaattggcttcaacacanagtgagatttgataatngaagcatganaatgaaaaacttgtttcaaggcataaagccactagttgtgtttgtgcttctacatgattacaaatctntgcaagatgagtttgaaaagttaaaaaggttctctatgaagaaaatatgaagttgcaaactaagctttgctatcttaaatattatgntagaaaaatgaataaaggagagactgatcttaatcacttactcaattngcaaaagcatactaccgataagattggtttggggataacaaagaaaactgacctntccaagacaaccaagattgcaccc

SEQ ID NO: 165509 - DNA, 378 bp, Glycine max
cttagtgagcaagtgtctgtttatatatgtaacattttaaaagtgttactattataatacggcgagattggctgagtatacgtatgaaaatgtgcgtgtgctggtgttgacgtgtttggtcatttgtattctgcagtcaatatattactataatggagaggaatcttaattagtaatattgcgttgtctctatctgctactaatacgtactatatatcgggccaggcatattaagcgtataattgctccacaaatctaacaattcaactacctagctaaatagttcccaactgtgcaaacagctactcaattcaacgacctagcgtaatctgatacatatcatccaaaagtatatctattatgttcctcaatctctcc

SEQ ID NO: 165510 - DNA, 432 bp, Glycine max
  unsure (1)..(432): unsure at all n locations
taagcttatgtactttttaattcgttaccaaatgtgcaggggggctgtgtctttatatcaatttatctcttcagaggaatgggagtctatcggttcaacatgaataataaacatgaaagatggtgagaagtccacacttatagtcttacaacttgataatgaagaataagatgccccaaaattataactatantttctacagagaatgagagttctcaccgggttgcattgtttctaatatattcataacatgtagattttaactctctttttctatcccacatgaattcaaagtcactctttctttccatattaataaattaaaagatatttaaataattaatattacatatcaagtaaaatgagtatatatntatgttaatgtcttctataatgcacggatctatgtactaatatacttaaattgttaga

SEQ ID NO: 165511 - DNA, 401 bp, Glycine max
  unsure (1)..(401): unsure at all n locations
gtgtctactatcatcgttatcnattttttcttcgtcattgaggtgccacttgagctgccagatctctccacctttgggtgtattctttgaaagaaccgtgcccctttttgcacatgttctatagttgcatcctatccgaaaccatatcaaaattgtactgatactgcctaacaaaggcaaccattatgtccttccaagaatggactcgggaaggttccatgttagcgtactatgtaacagctaccccagtaagactttcttggaagaaatgtatcaacagttcctcatcttttgcgtatgcccncatctntcgacaatacatctntagatggttcttggggcaagtagtcctcttgtacttgtcaaagtccggcaccttgaacttgggaggggtgatgata

SEQ ID NO: 165512 - DNA, 427 bp, Glycine max
  unsure (1)..(427): unsure at all n locations
agtacattgtcacataataactactacacctactctcttgaaaaataaataaaatttcaaaaatcgaaaaaagacatgttgaaaaaggtgaaagaattaaatgatgaaattcaagagatagaagaaaaatgcgacaaagaaatggcaacaaccgaggaaaaatgttntcaagaaatggcaacagtggagcaaaaaattcaatttcttgtagagactgaactaaatcaaaacgcatcnagaattaatgttgcatctatggcaacttcgttatcaactccacctgaagctaagtgctntacgttcttcaacatcaacacatgctccaattaataataaggtatgttgcagctntggcaagctttgtatcaacatcacctgatgctaagtgctttacgttcttcaacatcaacgcatgctccaataataa

SEQ ID NO: 165513 - DNA, 338 bp, Glycine max
  unsure (1)..(338): unsure at all n locations
gacaagacagtacacactgtcttgttcttaatatgataaaatagggaaatctactctaaagatacatctaacaatacccataattataacactgcccctcaagctggagcatataaattatatgcaccaagcttggaacatataaactgaattctaggcccncttaaggatatattcaaaatatctgttggctgatcattggaattaatgaattcagtgacaatctctttagatagtagcttctctcgaataaagtgacagacaatctctatgtgcttggttcactcatggaagactgaatttgaaccaatatgaaaagcagcctgattatcacaata

SEQ ID NO: 165514 - DNA, 283 bp, Glycine max
  unsure (1)..(283): unsure at all n locations
gttaagtcctgccttgccaacaatgctaacaagaatantaatatacgttattggaattatttgataaatgtgcgaatatatacatctatgtgatcacatatagagaggatgttcactacgtgacctacgttcttataggtttagtgacctacttaaatactaataacaaatgagatggcgttttccttttcttcttatacattagatagatcatggtgatatactactctctccgcttgagaaccagcgggaaatggcgggagatgatgaacacccttaatca

SEQ ID NO: 165515 - DNA, 387 bp, Glycine max
  unsure (1)..(387): unsure at all n locations
actcactntaacctccatttaccacagaatccagatttagaccttccaactctcaagcctcactctttttccactcataacaccacattctccctttgtaaccctaggttaattccacccttcatctctaacagttttccataagcaatttcagcacataaacatcacaagcaccatcataaaaaccctaaaacagaataggtatgtttaactcttccaaacatgtgcaattcaacatgctctcaacaagtttcttcacaaataactatcatgaagcagaaaactagcanaactactcatcatatctnccaatacctcatacccacgaaattcaagagggaaagaagtccacccataacctgaaaattcgaagtcccacacgtagag

SEQ ID NO: 165516 - DNA, 482 bp, Glycine max
  unsure (1)..(482): unsure at all n locations
aacatcagttgtatgagaatagatgttaactatgcattttgtaaataaaatgtcatcgttaacatcagttttagaaaaacctacaatcgatgttgtaaatactcacttaacatcagtttttaaaaactgatattaaggtttttaaaaaaagacccttgcaagctcacttctacttcttggtaccctttctctctctctctctctctctctctcaaccctaagcctcaccgtcgcccnccaaagcctctctctcatgtgaattttcaatgattcttctttatctctatgttttcttggtcaccctntctttctctcacagtcacaccttncaatggcttcttcttctcctctgttattaagggaaaacaacccacacaacacacacacacacacacatgcaatgcgacacatccccttttttctctgtgtcgttntcgcttcattgttgtttcatatctgcctctcttatgtcatttgaaaat

SEQ ID NO: 165517 - DNA, 299 bp, Glycine max
  unsure (1)..(299): unsure at all n locations
gctagcttgtctaacagcagctgagatatatgttcttatcctcactgcaattgcagaggagtgtaaatataattagatccattcaccaagctaaacaatgtcagttatgtgtaaccaagaaaagatagttcataacgaaaagaacatgtactctgctttgatgttgnggttgaagattgacattgagtggcatgaccgggtcagtatctgttaactgtactttgaggctgatcaaatgttgctgagatgactggagttgcaacaactagctcatgataaagtgaagtctgcatgattga

SEQ ID NO: 165518 - DNA, 444 bp, Glycine max
  unsure (1)..(444): unsure at all n locations
ctcagcttctattgatccncaaggagagcatacacctatgtactcagtatccccattttatcagccaagagattgacattgccatctgaagaatgctaacatgagaaaagaaatatgcnacgaaatgtaagaacattcaatggggaatgcgatctgctgcacactaatgaatcgaatgagaagtcagataagaacatgtgttgatcacatcgatgaagaattggggagctagatggatgctaatgtatttacttcacaaggcaacatttatttctaagaaacaactggattctgtgacatcataccattgttggcaacaatcctgtgtctggaagataacattcacatcaggttattattgatagatcacacatggataaggacatattactgaagtctagatattgctgcatgttcaagccttcttcacaactgactaaaatg

SEQ ID NO: 165519 - DNA, 322 bp, Glycine max
  unsure (1)..(322): unsure at all n locations
catcaatcattagaaatatattaacacacactgcctatgtaaatgctaaagtaattctttttgcttttaaatttatactaaaatacaccggtgtaagcttttgtcaaataagttataaaaaactcacaaggattcactccacactgctcacatgttaaatgagttaggcttaaaaaccggcaagtcaaacggtcttaagagaataaggtccaaacgtatttacttgactctacttcagacttaggaagggttctcagnggagacaaatattaagagaatagcaaacaatcaaatgatatgggcttgtgatgtggatgccacc

SEQ ID NO: 165520 - DNA, 417 bp, Glycine max
  unsure (1)..(417): unsure at all n locations
tactcagcttatatcatgtttgcgtaaatcattaccaatgaaattattctatgtttgaatattaagacttaacaaaattattataaacattaataaatctattatatattgcatcttatgattaaacgacatgtaaaattcaaatatttaaactgctcctaagttgattggtactctgtcaagaaatatataatntctcctgatatctgaagtgttgtaaattaattatgatatatctntctcttgtttcttttatgatntatcaactcattcttgctttctttcttgatttattccccgcacatagttgaggaattaacactttctctgtcagccaaatggacctcactgcatgctgntgagctcatatctaggaatctttgtccgccttttaccttactcttcctcttttatctt

SEQ ID NO: 165521 - DNA, 471 bp, Glycine max
agcttcatcacgggtagcaaacaactataacacaattcttagaatgtctgagatcaatgaacatttatgtaatataattattgtaccaacaacaaattaaacaaatacctaataagtattaaaggcatcagagcaatcaacatgttctactttcatgccaacatcttccttatttttaacattcatatcaacttcttcaaacatgatactatcatatctccactgttcttcatccatcttaacaaaacatttaacaaattcaatgataaacaaaaaccaacttaaaaaattatacaattacctcatttgttatcaacacaaatatagctctatacaaaatttaaaaaaataatgtattatcatcatatagccacaaaatacattttcactacatatcttcattaaaatattcaactataacaaaataaaaataatattattaattaacccaactgactaataatatcatat

SEQ ID NO: 165522 - DNA, 305 bp, Glycine max
  unsure (1)..(305): unsure at all n locations
tcagcaaactccttatntccagaaggaaattctatctatatacctccaatctttaatggagagggttaccactactggaaagctcgaatgcaaatttttattgaggcaatagacttaagtatttgggaagccatagaaatagggccatatatacccaccacagtagaaagaattacaatagatggtagcacatcaagtgaaagcataacaatagagaaacctatggatagatggtctgaagaggatagaagacgagttcaatacaatctaagagccaaaaacataataacatatgccctgagaat

SEQ ID NO: 165523 - DNA, 308 bp, Glycine max
  unsure (1)..(308): unsure at all n locations
accacagagtggtacctggagatatgtcgcgggggtcaggagaaccttgggacgtcaggtggggtgctattgcccaaaaccaagcttgaccaatcccgacccaacccgggcatagtcggtcagtgagaacctgtgatgtacctaaacaggcgagctcctggcagtcaacagataaaaggaacaaagaccacaaagcaaggaggcttggtggtggctggccagctgtgaatttgtgtgatatgtggattatggcctctggtaatcgattaccaaggggtgggtaatcgattacaanggctttaaattga

SEQ ID NO: 165524 - DNA, 343 bp, Glycine max
  unsure (1)..(343): unsure at all n locations
gtattgagaaaacttccttgagaagcttctttgagataacttccttgtgaagctagagcttagctacacacacccctctcataactaagctcacctccttgagaagcatccttaagaatattccttaagaagctagagcttagctacacatacctctctaatagctaagctcacctccttgagatgagaagctagagcttagctacacaccccctataatagctaagctcacccncatgacananaacatgataataacaaagaaaagtccttattacaaagacaactcataatgccctcgaatacaaggctaagaccctatactactagaatggccaaatac

SEQ ID NO: 165525 - DNA, 316 bp, Glycine max
  unsure (1)..(316): unsure at all n locations
ntccgcaagacttacggaaagatcttagagttgaccttagcagaggtatctatataagccattgcatcactcacccaatactacgaccagcctttgagatgcttcacattcggagacttccaataagtaccaaccattgaagaatatgaggaaattctatgatgtcctctctgtggaagaaaaccatatctttcatccgggtgtctcccctctttgagcagaattgcaacagtggtcaaggattcagcaagaggtttggaccgcataaaacagactcggaacggcatagcgggcctaccacggnggtacctataag

SEQ ID NO: 165526 - DNA, 300 bp, Glycine max
tagcccgagctgcactctccattgttaatggggagagtgtgatataaggttctcctctaggcacttctctctctctcgaaattgctgaagagaattatttccgtgaagaaaatccaagccgaggcgcttctgtaatgtatccgtgagaaattacgcgaagattctcgacgcgtcttcaagattcatcgatcgttcttcgttttctaagtcttcaacgggtaagtacctcaaaccaagctttcaattcattctatgtcccgtggtggccacattttgttcatgtattttattctcggatca

SEQ ID NO: 165527 - DNA, 398 bp, Glycine max
  unsure (1)..(398): unsure at all n locations
ctaagctgaggcaactgatgcgttggcaacttggtacacagctgccttttatcatatattgacctgtcgcaagggtttgtgggttgtgctcctctgctgaccaccatacagacctntgcctttcatgcagcaacctggagcaatngagcagcctgaagcttatgctgcaaatatttacaatagacctcctcaacctcatgcagcaaatcaaccacagcagagcaattatgacctttccagcaacagatacaaccctggatggaggaatcaccctaacctcagacggtacagccctcagaaccaacaacagcagcctgctcctttcttccaaaatgctgctggcccaagcagaccatacattnctncactcaatcaacaacagcaacaaccccagaaac

SEQ ID NO: 165528 - DNA, 423 bp, Glycine max
tactaagcttgcgctactcagacatttctcaagatccaacggtagatcatgtgcaagtgtcttggaatctgcaacctcatttcagaagatcaacattaacgaaggctgggaagcatttctaccgaggcagctcatgtagcttcctcaagaagcttcattaagaggcttcctcaagaagcttcatcgtggcttctttgagaagatttctcaagaggcttctgtgagaagctagacccttatctacccacacctctctattaattaaactcacctccttgaaaataattaccgataaaaataacacaacgaatataattcaacatcaaacatatttactaacaatatatagatatatattagggtgttacaactgggcccttcctaaggagaattgcatcacacctcatgtggatgacatttaac

SEQ ID NO: 165529 - DNA, 273 bp, Glycine max
  unsure (1)..(273): unsure at all n locations
gattcacggttcaagttccaagaatcaagatcaagattcaagactcaagattcaagaatcaagagaagacttaatcaagataagtatgaataagtttgttcaaaaactgagtagcacatgtgattttctcaaaacttgtttaccgaagagttttactctctggttattgattaccagattgttgtaatccattaccatgcgccaaatgtttttgaggaaaagatatcaactgaatctacaacgttccaactgattntaaaagctgtaattgat

SEQ ID NO: 165530 - DNA, 408 bp, Glycine max
  unsure (1)..(408): unsure at all n locations
gagaagagaatgaaagatngtagaaatacaagtagtctggatatctcctncacctctatgacctcacaatcactcacaaactcatctcaagctccaggaacggcttcctcttccagctctggtctctacggatcttcacacaaaaaattctctcaaagtctctggaacttggacctttctctctctagaactctccaattatgcagaagcttcaagaaaaggcccaaaatcctcacaatctgatttcagcttaaataggtggtcttgttcgtgctcgtgtgcttagcacaattctgaaccactntgcgcgcattagtgaatttcggcttagcgccgcttttcttgctcagcggatggactgaagcggtgcgcttagcaagatgacccttcngtcagtgaacatgcata

SEQ ID NO: 165531 - DNA, 372 bp, Glycine max
  unsure (1)..(372): unsure at all n locations
agcttgttgatccatcatttagagatactgctgatgagtatttgttatatgccaaatatcgcccttattgtagggattgtattggtgcaatagatggtactcatatacgaattcgcgttccctctcatctaccaggagtctatattggttggaaaggctacactaccactaatgtcatggttgtttgtgactagatatttatggagggtttatgcaaacctgcattgcattttccatatcctcttcaaggtacttaacatatatatattataaatatatgtatcattactaatttgtggtgtaacatgcactattnntttattctttaggtaaatattatctcgttgattctagctaccctactcttatggg

SEQ ID NO: 165532 - DNA, 324 bp, Glycine max
  unsure (1)..(324): unsure at all n locations
actcagcttatgngaatcagatgattccagatgtttgatgataccacgtgattcttatatctcaaggtcaattcatgataatcaaagaatgggttcaagatgtttaagaggctcaagatgttcacgattgaatcaagaacacttcaaggttcaagaggaaatttgattcccataatcaagaatcaagatttaaggttcaagcttccaagaatcaagatcaagattcangactcaagattcaagaatcaagagaagacttaatcaagataagtatgagaagggttttttcacaaactgagtagcacatggattnttctcataaca

SEQ ID NO: 165533 - DNA, 247 bp, Glycine max
ttaattaataacaatcatcaatcacaacaatactagacaacgtctatatatatgatgccaatggtataaagattaatgttttaacataccaccatctttatctttggctgccacacacaaatcttgcagaggactaggatcataggcagagacaacagaggatgtcaaagccaagatggcaacaaggaagtacacaactctcattgtgttccttagaatacactcgaaacaatagactatatgtaat

SEQ ID NO: 165534 - DNA, 434 bp, Glycine max
  unsure (1)..(434): unsure at all n locations
ttgatactaagctttagccaatggactaccttgaataatgactagatagttcttttatccttgtncccttccttggttgaagctcactacaagccttaagtgaaaaaccatgatattaccatatccctaatggaatttggagctttggaattgttttgggaataagtgtggggggtttttgtctcattggacaacttgttttgttggctatgcttcatgatgtattttgggccatacttgatgtacattgtatattggttaaatgttggacatgctgaatgaaatgttagttctcaaaggctatagagtaaataaaataaatcgataaaaatactctgaaaaagataaagacatccataacgtgagtgaatagatcttaatggacacaaatgatgaactctatgtctactctcatgttaaatataatcttactt

SEQ ID NO: 165535 - DNA, 414 bp, Glycine max
  unsure (1)..(414): unsure at all n locations
gctaccttaagataggggggtatatggatttacatattagtgaatgctcatnggatataacatgttggacgctagattaaaacagagcctactttctatagttgtggatgatactgtgtgttgtaaattcctttaacataatgtttttgtccacttgtcaaaactcattagaatatcaataatttatacttattgttatacattaaaatccaaggtggatgaaacaagtggtcgttcatacctaacaaagtgattcacccaaattccccaaccttaacccttctagataaatgtccctaaccaatctttcattttgctagtactatgtaactntttgcataaaaccatgatctttaccacaaatccctntcttttcaaaacatgaatcanaaacttcatgaagatgaaaactca

SEQ ID NO: 165536 - DNA, 384 bp, Glycine max
actcagctggtcgaggactacccgtgagatcgagaacgatgataacattgaaaacgtcttaacggtcaaaccttgcgaaattttcaggaaaacgtacggaaacgtttggaagccctcgcttaattttttcacgaacaattttccagcaattcaaagaagagaagtgctaagtggtgaacctttcttttacttctccctattatacaaaaaggggagatgttgcgccactcgccagcgagctagtcgccagccagcagttgcatctcaaacaaacctttggagattttggaggccaggggctgtgctttgacccatttatatcacccttgtttttgggattttttcaagtacgactacattcgacatcttttcttcgatgtcgac

SEQ ID NO: 165537 - DNA, 369 bp, Glycine max
  unsure (1)..(369): unsure at all n locations
ctagttgtattaggctttcttatcctttcttttgctaactntcaaatggtatataagcttcttcttagagttctgttggccatgntttagtgtctcaaaagccaaagcatgctactactaaatatgtttctaaagagacatacaaaatcctnttctctcctttggcttcgattattgctaatcttgctgagcattgcttcagttaatggaaatgagcagaaggcatntgatntcttctcccttttcattccttattagcaatagatctatttgatttgtntcatattaaaacttctaacctctagcatgccatgtaatcgntgctttcgttatgagcttaaccattatttgacnttgttgcagaacttt

SEQ ID NO: 165538 - DNA, 425 bp, Glycine max
taggacactatgaatctcagcttatcaaatgcttttcaagtggaaattgagctgactttcttttctggataacttaacctactcgtaaattattttcaatcaaggcttattcaccaaaaaatggtgcttttttaaacacttagattattacatataattgatgaccttcacaaattacacctaatttttgatagatttgatttaagcatttataatatttaaagggaaacattgtataacacactatatatacataaggatagacccttatttcgaatattatatcaagattggggataattttaatacttattaatactattcaatgtaattataattgtaaatatctgacgattataaatatgtattattgatataattatttaaataaaatgtgatataaatattaatataatgctaattat

SEQ ID NO: 165539 - DNA, 483 bp, Glycine max
  unsure (1)..(483): unsure at all n locations
agtcacctgcggcatgcaagcttgtcttttattaaacgagaagttctgaacttatcactttatctaanaaactntgaggtggatccaagtgctctgatcattcatttgcatattcatgttttggtggcatactcatcgttcgttttttctttagggaattcaccataactaagaaagcgcaaaggcacccctataacactcgatctagaaaaatggataatgaagagggcgagcaagaacagatgaaggccgacctatcagccttaaaagatcaaatggcttctatcacggaggccatgctaaaactccagaaaactatagaggataatgccacngcaaccgcctccaatgcatntagggaagcggaaccggtgctatagcccgcaatatacttgggccgagatagaaacacaatggtngtcggtcggaggtatagtccgcaagcttactcttatagctggcctncggacttcactcctcgtg

SEQ ID NO: 165540 - DNA, 296 bp, Glycine max
  unsure (1)..(296): unsure at all n locations
atccccaaataaggacttatcataacttgaaacccttatgctctcttagaatcctaaaacatggtcaaggatatcaaaattaggctcacgggtttatacaaacaaatcattattacttttggctcaacacgagtgcaagggataaatacatcacacgttggtnttttggctaagtggttaaaataaaaagaagcatagccttgatcatatccaccttatgcacataatcttacagtataagaatgatgcacaactatgaatttaaaaacagacattctctcataattaaattcaca

SEQ ID NO: 165541 - DNA, 329 bp, Glycine max
  unsure (1)..(329): unsure at all n locations
ctgaggcatgcaagctngcaagcttcanaatccacaggacagacctctctacttgttattntggatcggcaaaaccagcctatatgaataaataacatgattagtatggcaaagttgaattaaatgaaggcattagtatcagtatttggtccaaggttgaataaaataataaatacctcagctgcccggtcaaagaaaaatgaggcaacaaaaaggtttttctgttcatcacccncaccaccattccatatcctcccaaaagtgcacttcgtatgtgtacnattgacccattaaccttgagagccttgagagctatgtctttgcattca

SEQ ID NO: 165542 - DNA, 488 bp, Glycine max
  unsure (1)..(488): unsure at all n locations
atgaaacaaactngcatgtgccatctcattctccttttggctcaaagtaaggaagcttaaattcaatttcagcaatcaaatggaattgatattgatttgttggtcttaaatgtgactgaatcagccgtgtcaatatctgaacaaccgactaagtgatttcttcttagacgatcaattggattttgtttctcagtatagggttttatttaagtgtaaaaacattgaataataataatttaatttttattgatttttatacgacacaaattaattcacgtataacttcgaagcttatattcggtgtgtgactccgacgttatgagaatctgccatatgttatatagaaaagcaattagaatataacatcttcatatngaagagcatctatatatactcgagaatcatcatctgatgtgatgtgagagaatgagaagactattctcatccgtcgaatatatcaatataatataaatatctacattaaataa

SEQ ID NO: 165543 - DNA, 278 bp, Glycine max
actagcttgagcgatcaacgaagaactgtgactcgatgtccgattgttcttatgacatatcgagacgctcgagattgaaaacagaagctttgagcaaattcacacgaccgtaacttgtagactcggatgttcgattgagtcccgtgtcatatccatatgctcggatttgaaacagaagctcgtggccaattcaaacgaccataacattgactcggtgttcgattgttcgcatatatttcggacgcttcgactgcagacgagcttgagaaattcaacga

SEQ ID NO: 165544 - DNA, 417 bp, Glycine max
  unsure (1)..(417): unsure at all n locations
tagctgtagntcaaacctacacctttatttacatgacaaggcaactagttgtgcatgctgaatgtagtgtatgactagaggcaatccatctgacttacaaacctttgatcctgagatagataggacatttcatagattatttaggcatcattttataccttttgatcatcctgagcattccattactggtgaatctgtgcattctgttattggtgattntgaacatcctgattttgagcattataattctgagcattctgattctaaatattctgantttgaacattctaagaacatggcacaacctccaccctgtaagaggactctaaaggaaatggctgcacctgatntcacctacgaaagcttgtgcatccaataccctgatgaggatgtcccatatgttcttaaaactggact

SEQ ID NO: 165545 - DNA, 414 bp, Glycine max
  unsure (1)..(414): unsure at all n locations
taaaaatgtctgcaactggtggtgtgtgcacatnntttgagtatactatgttgttcaataatattgcctctattcaatctgtagaaagcagttagagtccctaacagaagcatagaaacaagcactgcttgaagaagttgaggaggagaacagtcactagttagaggtatgcaggggaattggagtacctttgtgtgtgtatatacactaaaatgaagttttcccacagtaattgaaatagaaatttcaatctatatggactacttcagaaaggtgttagctatgttttcttcaatntactcagacaaaaggatcagacttcanaaaccttagtgttctgctcacaaaaaatttccagatggaagcaactcttgtacatatgacgaataatgctttaagttctaggtctcttat

SEQ ID NO: 165546 - DNA, 348 bp, Glycine max
  unsure (1)..(348): unsure at all n locations
cggagaagggtttatttatatccaaacttacatgtttgatgattgtccactaaggatnggacatgagagcaattttttcatgtcataaattattatactntttaaccttgtttcagaaagggtaccattggtgtgtggatgctgaagaggcgcttgacaaagacgaggaggtacatgatgacacggatgaggagctcaacctagtttgtttagtgttttagggtttcagggagagtgaaggaatgtaatatatcttatggcgttgaggaatgtnctgaagtgatgatcatttgtgtacgttttcttatttgatttgggaatgtgagtgagagaatgaacgtggatctt

SEQ ID NO: 165547 - DNA, 517 bp, Glycine max
  unsure (1)..(517): unsure at all n locations
tactaagctatgttaccacatgtaagctntgggagagatggtatntatcttgaatcaatataatatgttaacaaatatgcactngcagtggtatttatccctaaaactagatattggaattgtaagcaatctgggagaataaatccatgaggctgatatgacttctctcaggagaattcaaacattcaactaagccattcaattcaattagtaaaacagaagattaggaaaaaactgatttactggaactaccaataaatcaacacaagaaacctcggttacatctaacaaatacagagcccaagcatgaagccatccaattcttttcacttagctatgcagataatgatggcatgtggaataggcaagggaaaatgaatattgcaattgcaacaatagtcacattttaagcatcccttcgactctctttggctttcaagagctgatggacaaagtctcttgcaaattatttgatcactgacacatgataaaagcactaacattanntttatttact

SEQ ID NO: 165548 - DNA, 182 bp, Glycine max
atatttgataacaaatggtgcttgaccaaacatgctcaaggcaaaaatgtatacaatgtataattggggctacaagtatgctctcaatttacaaggaggagcatataacttttcatcacgaccacaatgttgactatgcacacaagccaacatttcatcttgttgactttatcatgcaaaaa

SEQ ID NO: 165549 - DNA, 290 bp, Glycine max
  unsure (1)..(290): unsure at all n locations
cttaacaagaagaggacgagatattgatttttnaatatagagcaaccggccaggggaaacaatgacactatcataagcgtgctgctctattgctcattcgctttggatgtcatgagagaccaacaacatcatcatcatattacttggcttttaacagaggccagacagccgcttctgcacataagttgacattagagaataaaatcacgtaaagtaatccatgcccctctattcatgcgcatacttaaagacatgcatgctctgtctgcaaataccaggaagagggtgga

SEQ ID NO: 165550 - DNA, 111 bp, Glycine max
atactaagcctatactcgacaaggggagtatgcccattggcttatacatgtgtattatgtactccatattgtcatgaaagcaacatgttaaagatattcgttccttcttat

SEQ ID NO: 165551 - DNA, 345 bp, Glycine max
  unsure (1)..(345): unsure at all n locations
ctaagcttccacattttactgcgcatntccttgggggcatgcaagaaagtaaacctgatgtgtcaacaaagaaactaaatgaatatggtcaactgcaccaaacatcaaagttgtcatcctgtactcatgcacaaagcatgctacttccctagcatgtcaaaataaagaaaaagcanataacttacgataatcaaagcgacagttntttgagggatgtgggatggggggtacaggaacacatatacctgaccagagatgttagaaatgcataacgcatggtatccattccaagcacaaacgtaatatgtatgccagctttaaatccctccatcaacaaaacaacac

SEQ ID NO: 165552 - DNA, 500 bp, Glycine max
  unsure (1)..(500): unsure at all n locations
actaagcttgagcagaagagtgtgccctanatagctctagttggtgatatatacttatctngagctgatgcaaatctntgcttccgcgccagccagaatcacattctgtttacttcccctgttttttcttttacaaatcaaaatagaanttgggtgtatatgaataaattaagcactagcttgattataaaggtatgaaataaaaattgtgtctgaccttaaatgtgaaactcattgaaataaaattcaaacgtctgatggtcttctggctttcttttaccaagggtattactggnttactatgccgntttagtaatgaaattttttttttcttgttcagaaactcaggaatgctctttaataatgggagacaatatgcttgaatcacganggtgtgtaggaactgaaaaatatgcgaagagttatgggaaatgaatacccttcaaattaccttatttctgatcatatgtttcaaattgatgttatactaattctacata

SEQ ID NO: 165553 - DNA, 327 bp, Glycine max
  unsure (1)..(327): unsure at all n locations
atatgctcaatagtgggcaacaaacctattcataaacttgcaactcgtaagtacaggcgagtgcactcagcaggaaatgaatatcaacagaaggaaaactgtgctaaataaataaatgtataanaagttgatataacatcacagttgagaaccaaagaagaaattaaccatanctcgctggtttgactagtgtttcccaaattgtgatattntaccagaggggcaccaatcttttatnttattaccacaaggagcaaatgtcaccatttatatgcagagccagaatatcccatacccttcttcttcatatcttttatacaattcata

SEQ ID NO: 165554 - DNA, 442 bp, Glycine max
actaagctgagtgagccccatgatgagacatgtgtagccattctgtttcttctatctttgtatagggaagaatcccatattgaagaatataatcgtgtgctgccattactacctgtaattactaagtgcctatcttaacttcacgaagcgggagagtccgagttttcccaacaatttctattggagcttgaaagcccttataattgtcttttatttgcgtggaatgtttgggcatcatatttaagatataatctccattgaagcttggaagcgcttgcatattggaaagaggctatgacagacatgtctctttcacatctttattatggatctgattccacaagctgctctgaatcaagttaatgacagttgtttcttggactcatcatttctatttgtacttaagatatatcttaaatatttatatttgactaagaatatc

SEQ ID NO: 165555 - DNA, 391 bp, Glycine max
  unsure (1)..(391): unsure at all n locations
ttcaactgactcatattttgaataaaagacactgaagttggttctcacaacgcaatctcatctaatctttgcatcgagaatttgaatgttctttccaatttcaattcctttcttacttcctcttccagctctcattgtcctgccaatgtcatctaatgggcaatgatttctctcgtgatttcctccttctctagccctcgccttattttctctttctccaactctcattggaactctntgtcaacattgaccgacatgaccattataaaaactctatgcgccataacattgctaggaacaccacctgatgcaaactcactctagatattagattgtaatagagtgaatantgacaaaagtcttgtattttatacagaaaacaaatgggtct

SEQ ID NO: 165556 - DNA, 453 bp, Glycine max
  unsure (1)..(453): unsure at all n locations
aaaatgcacatgagacatctattttgaacttttaaaatatatttacaacattctctgtactggattctgaattattctcttaggaacatgggcaatttctttaaggaaaattgtatcccttcacaacttcgctggaacctaaaagttatcttgccatgagatggtgtgaatgttaatgagtatttctctttttttttgtatgattcttgttgatatcatgtattagtggctacttttttttcacaatctaagacggaccttaatgtnttgatgtcctccctttcaaaatatgtatttataaattattgtcttcttttatacggcatcatttgtacctattaaatataaatataaatttgtcagctatataattatgcccaataaaagaccatcgctgagtaaaagatagtctcaattctaattagtaaacacactctcgcatcgtcttatatt

SEQ ID NO: 165557 - DNA, 263 bp, Glycine max
ttaagatttcaagtatcagacatgtagatctacatcaatagtcatacctctagattcatggaaagataacatcataatcctatatgacaccttattatgaaatcacaaattcaagatgagatatcagcgcacaccttctatatggaattatgtgaataaaattgacaaaactttgtgagcctatacaagttctctcttttatcaatcctcacaataattctcgtacctgagaacatacaatatgccactagttctgatatatt

SEQ ID NO: 165558 - DNA, 159 bp, Glycine max
  unsure (1)..(159): unsure at all n locations
gcgtgtgcgtgagaacanagaacgcagctacgtgtgttttgtgacaataatcaangatcctgaaagcattcttaactgctactctatgtctcactaattactccctaccaacagatacaatcgatgaaggagtttaactatcaaaaaggttgaggtgaa

SEQ ID NO: 165559 - DNA, 381 bp, Glycine max
  unsure (1)..(381): unsure at all n locations
tacagagagtagttcaggctgtatttctttnggctctcancgcacttacaagagttcacaaaccgtaagggattggtgcataacgcctcctggccagctaagcccagcttataggctcaaggtacagaatgtatctggggcttaatgcaagattgcgcgctcagcgctgctacaatgaaatatntacagagaaaaagtggtgcttagcacactcatccacactatgcccacaggttaaagttgaattaccgcaaagatatggggcttagtgcagtgatatgcgcttagctgaactattcagccaaccaatcatgggtctttgcgcttagcgtgagatagctcagcttagcgcgtgacgatagatctcttatcacaatgtct

SEQ ID NO: 165560 - DNA, 422 bp, Glycine max
  unsure (1)..(422): unsure at all n locations
ctcagctgccccagctcgccagcagcaggtgcttctccaaactatcgctttgtagtaattttggaagcccaatgggctggtgctatttcacccccaattttactaataccccccttgctctttttggtgattcttctctgtaacgtacgaaacttacaaatttcgaacgatgcttgtttcttttcgaatgggcgaaacttaggattacgtaatcatccccttttaccttcggaaattatggacttaccgatggcactaacactccttttatttcggatgtacggactcacgatgtgtacatgcttctttgatncgcatatacggaacttacaatgctatgatgggccagtcctcaagggctacatgtcgatctacacgaggccccgtaaataggataagtgcctttactgtctttggaataa

SEQ ID NO: 165561 - DNA, 152 bp, Glycine max
caaagatgaggacaaaaagaccaagagaatgagttcaagattgaatcacgaacacttcaagaatcaagaggaaatttgatctcaagaatcaagattcaagtgtcaagatttaagcttcaagaatcaagaatcaagaataatcaatttgaaga

SEQ ID NO: 165562 - DNA, 263 bp, Glycine max
  unsure (1)..(263): unsure at all n locations
gcttcacaaatgttccatatgctatatatgacccatgatcttgatgtgtcattgttattaataagaacttcattatntactctgctccacaagttgagtcatccctcttctttgtagtagcatacccatgttcttaagttgagtttctccttcagaataacatccatgtccaatggatacaaatctttggtcctcatggttcttttgtacaacgaaattgctagatctatgtccactttgtctatttttatatccatggaaat

SEQ ID NO: 165563 - DNA, 378 bp, Glycine max
  unsure (1)..(378): unsure at all n locations
gctaaacaaagccaacatggcattcaattgccatattttatganggcgaccaatctaaacaaataagaacaacaaatcaatgaaatcagtgagtgaagaactgagttgatactagaggagctggtctggtaaacttaatggtaagttcaccctgttcaagaagatttctcaccatacaactttcataggagatcaaagtgaaacagaatntgtcanaagtcaaaaccacttcttatgtgtgtatgtgcagncttctggtttactattgctgaagggcaattctacctataacagaggagaacaacactcaccacctcgcctttgtatgtgacctatgccacgcaccatggacaccacagctatgggagcgcaactgtg

SEQ ID NO: 165564 - DNA, 333 bp, Glycine max
  unsure (1)..(333): unsure at all n locations
ntcattatgctattacctaaacttatgagctctagctatggtgnatcttcctataatagggataagaataggatcaaagcttctactttgacaatcacagtgtcatggacttaactgatgacattnattgcaattcaatgttttgacattccttacatttgtaggtactaccaatgggaaacgggcaaccccanatccagaaatgggttctacatctcaaggtgaacggaagaggaagcggttagcaaccgacggagaggaggaaactatgcaaagccaattaattgatgtcttagataagaatggcaaaatgctacatgatcaacttgaagc

SEQ ID NO: 165565 - DNA, 495 bp, Glycine max
  unsure (1)..(495): unsure at all n locations
agcttgcatgtgtgcgctaagngcacatgcatagtacaattggcttgagagaccatgaacaaagaanatggaggaaatggaagaggaagccctccaatggaatagtgtatccccttataagacacctcaaaatgttgcattgtcatgctctntgaaaagtcattgtacgctaagttngcatatgcatgcttagcgcacatgcacggtacaactggtgcattgagcgtgcactggcacgctgaatgcactgctccaaatctttacacatcttttagtcatttgttgatgtactaanactctacaaaataaaacacaacactatatattcactaactttaacattcttaagctaanaactcaaaagaacttgaattcctgtctttntatgtcaaaagaagcattgaaagagaagaaatattgttattgtatgtaatctaagtgcacacactaagtatgcataacaattattggtgacacatcaccagtngatactac

SEQ ID NO: 165566 - DNA, 410 bp, Glycine max
  unsure (1)..(410): unsure at all n locations
tactaagctanccacctggannatttgcaattatctgataattatttcacaggtcatttacctcacaacatttgctatagtggaaaagtgacacagtttgctgccaaggttaactntttcacnggcccagtaccaaagaagttgaagaattgctctggccttacaagggttaggcttgaacaaaaccagctgacaggaaatataacagatgattttggtgtttatccgcatctggattacatcgacctgagtgaaaataacttttatggccatctctcccaaaactggggaaagtgctataatctcacaagcctcaaaatctccaacaataatttatcatgcagtattccaccagagctaagtcaggcaaccaagttacatgtacttcacctgtctttaaaccatctgac

SEQ ID NO: 165567 - DNA, 378 bp, Glycine max
  unsure (1)..(378): unsure at all n locations
gtacttggatcatggaatgtgtctcttccacttcctttagtgtggcagtcaatggatccatttatggtcacttcaaagggcagcggggtcttagacaaggggatcctctctccccttatctgtttgtgctctgtttggagtacttttccagagatatgagcagcctcaacgatgatgccaatnttaaattttatcccaactgtgcaagtattcaactatctcatttggcttttgcagatgatattatgcgtctatctagaggagatatcccttctgtgtcaactatgtttgccaagcttcagcacttctgtaaaggttcacggctttccatcagctccgataaatctatcatatactcagccggtattaagcctcatg

SEQ ID NO: 165568 - DNA, 418 bp, Glycine max
  unsure (1)..(418): unsure at all n locations
aagcttatcaagtcaaaagagtaannggcataagtggtatgatacccattttttcctaactagntcacatacaccaggaagaccatgtgtatatcttatatgcatccacaatgatcgttgtcaacaccaacaaacttaactcaatccaatttctctttgatacgattaagagcataccttgaaatgaatatgtgcaactctttatatgattgtacattgcgattgttacccacgaaatgaatactcttatcaaatganggcttaattttattgtgctgcactgtgatcaagttagtcatggcatcccaatatatacacaagtgccccatactagtttgaattacacctcttaaagtccaatgtgcagactcaatcctantaatctacaacactcacattatgttcaatataatacact

SEQ ID NO: 165569 - DNA, 496 bp, Glycine max
  unsure (1)..(496): unsure at all n locations
ctgcagcttttctcttccatgactagcatgcattcctgtataatcaaccttctcacactgatcttcatcaaaggttctacacatgttggtcaactgtgcaaagttatgaatactgtgatagtttaccatcatctntacttctggtcgaaggccattgacaaatttcacacatttgaacctctccccagcttccccctgataatgaggaaaataccttacaaggttctcaaacatcactgcatactcttccaccgtcatactcccttgttttagctcaaggaactccatctccttcctattcttcacatcttctggagaatacttctccagaaaagtntgtctgaaggtaccccatgggacaacaacaccacctactccctccaaacgtgggcgagtgttctcccaccaatactccgcctcatctgctagcatgtgagtagcaaacaacaccttctgatggtcctgacattncatcacccggaagatcttctcatct

SEQ ID NO: 165570 - DNA, 394 bp, Glycine max
  unsure (1)..(394): unsure at all n locations
gccgccaggtgtacccttgatattttgctttgaaaacaatggaagcctataggttatgctggtgtcttgaggaaaanaagatcatcgntgttggacaattggcctcataaattttaagaacggggagttgaaataagaattcgttgactatccctaattgaaattttccctttcttaaatattccncagattcaattatctctttgtaacaagttactgaaataatgaatgaaggaaaataactngtggaaatgtaaagacaacatatagttaaagagataagggaagagagaatgctaaatcngatttatcctggttcggccacaacttgtgtctacatccagtcctcaaacaacccgcttgtgattttcactacccttcgtaaatccttaag

SEQ ID NO: 165571 - DNA, 439 bp, Glycine max
  unsure (1)..(439): unsure at all n locations
gatgccccacattatttccatgacataaatgcaaaaatgatgagttggaaactttatgcataactggtcatgcatgcacctatgcggacactcaagtgtcaaaattttatggtcatgtgatgctagggctcaggattcatttcctccattttagtcaacccaatatttccanaatatgttctgttatcaatttgtgcattcatccgagtccatttcgggcgtccgggagaatttcacagcattcacccttcaggtgtacacattnnttgtttaaaaactagttatgatcaacgatctttttcaanaaaagttggaatcatctcttttaaagcatgtctgttttcagctaacaacattttttctcctttcttattctttggtattcttttctgtcgttttgtcgttgttttttcagaggacttgtcctaactggttattt

SEQ ID NO: 165572 - DNA, 356 bp, Glycine max
actaactcgaaaaggataggtcaaccctaagcaactgaagatctcgtagtttataaatcaagtcctacctcaaagttgaaagagtatataactaaggactaatatgccacgctgaccttgaacaaaaccaaaatgctaaagaaaacacaccaagcaagtttgaggcttataggcacatgtgagctcagctccaaagtgaaagatatacggtcaagcatatctaagacactaagctgctagtcaaataattgccacattacgaactaaggatattgtcaagaactaattacgcactacacaagctagatatcccaaatactaagacaggaaggatgttattgcaagacattgtgaca

SEQ ID NO: 165573 - DNA, 259 bp, Glycine max
  unsure (1)..(259): unsure at all n locations
tatatcgatacgctcgaaaaaaacatgtatactttctgtatattcaganagncataactgttcacacggatgtccgattcgggcgcataatatgtcgagaggctcgtaattgaacaacgcaagctcttgagaaattagactggtataacttctcacacggaagctctcgtgaaatacaaacggtcataacttttcacactgatgtccgattcacgcttataatatattgatgcagtcgcaactaaacatccgaaactct

SEQ ID NO: 165574 - DNA, 226 bp, Glycine max
gtgcgcccgaatcggagatccgtgtgataagatatggccatatcaatctctggagagtttccgacgtctaatctcgagcgtctcgctatattataagcctgagtaggacatccgagtgaaaagatatgaccatattaatctctcgagagcttccggcggataatattgagcgtctccatatatgaagcgccccaataggacatccgagtgtaaagatatgaccata

SEQ ID NO: 165575 - DNA, 358 bp, Glycine max
  unsure (1)..(358): unsure at all n locations
ctgaaagtaaggaccacaatgggatttcacccatagaggtaaaagcgttaagctaatgacgttaaagaagcgcttcctgtgaggcaacccagttttaatttctgttatctttttttcatgcattgtatgattggaatttgctttatgatcttttgaanagagggtgtttcagcttattttgaaggatagatataagggtttcaaattccttgaggaagggactaaaaaataacttagtaaatttnttctgacaatcagtcctttcgctaagcgcaagcctcgcgctaagcgcatcttttatcatgcgctaagtggagagtctctagcacttagtgctcaaacctagcatatcaagctg

SEQ ID NO: 165576 - DNA, 435 bp, Glycine max
  unsure (1)..(435): unsure at all n locations
tattcaagtggttgggggctagacttntctgagatctagtttaacatattgngtggtnnggntccgaatcagaccaagatgacagaatggattntcttcctgcacccagcatatttcctcatacacccaatagtaagagggaaaaaccaaaaacatccttacgtatagtccatatggattgtcaattcaccatttgtaaactcatacgagttaccagtcaatattatgttaaaaatatgtnttatgaaataatttaaaattaatggttcatgcaagtctcaaccttatgatctttgtgttattagcaagacactctaaccaattcagntaataggtcaattatgttaacacataattaatattgttatatataacacttaaacttctaatgtatatttaatacacatataagttcacataattaaatttgtaaca

SEQ ID NO: 165577 - DNA, 286 bp, Glycine max
  unsure (1)..(286): unsure at all n locations
tgagaagctagagcttagctacacacacccatctaaaaactaagctcacctcattgacaaaatacatgaaaatacaaaaaaaagtccctactacaaagactactcaaaatgccctgaaatacaaggctaaaaccctatactactagaatggccaanatacaaggcccanaagaaggagaaacctattctaatatttacaaagaagagtggatccaaccttgacccatgggctcaaaaatctatcctaaggttcatgagaaccctagggccttctntagtagctcta

SEQ ID NO: 165578 - DNA, 364 bp, Glycine max
  unsure (1)..(364): unsure at all n locations
ctaagctntgtatccanggaggggattcnagcntaatgctaatgggcagtctttgaagattatgaagaagaacatgaccactctagctcagacatggagtgttatttccttttctaacctcattcctacctctgatgtcaccttggatagagccaaattgatttatggcatcattatgaagatggatatgaattangggtacctcatcttccaacagatccctctgatttcacagcatgacacatctagacttggattccatgccttgatcacagctctatgcaagtgtcgcaacctacccttttgcgggagggcgacgcgagggctcatgggtgcgtcttccaaaggaggaaaatgcgtggag

SEQ ID NO: 165579 - DNA, 410 bp, Glycine max
  unsure (1)..(410): unsure at all n locations
tatctagccaagatcgtacaaaggtgttacattataatcctaatggttctaattatatgggccatcaaatctatcatgtgttggcaggaattgattagcccgtgaatatcctctggggctgaacacacttcagcaatggcctctgctttggctagtagtcgcgtgaggtcttgacttccatttaaggtcaaggcgaacctatccatccacatagtcgcttcttgatgcaatgcatcaatcactctccctcttgcttcgctttcggcgtatgcttgtgtgaaatcctctactagttntcgttcatgggtcacagactggtttaactcttccatatactgccctatgatagctagcatgcttcgctccgtggcttctaagtgttgagccaaactcctcttggatcttgagca

SEQ ID NO: 165580 - DNA, 362 bp, Glycine max
  unsure (1)..(362): unsure at all n locations
tactaagcttcagacttagatgctggttgctagctngttgaaggattannctcattatgcgtagcttgcaagaattggcccaacaaaggccaatcatgagtgtagagcaattcattgagaaggtggcctggcccagagcttaaccttggagttgttgatttttcggaaggaaaattagaaacaagaattgatgaagctgcttatccttggccagtgccagtactagctgatccaccatctncagtggtggatccatcttctctagcaccagaaacagctctcctacctgccttatntattattataagtattcttttttagtaccctttcatgattatgctagcgtggtatagtaattatat

SEQ ID NO: 165581 - DNA, 395 bp, Glycine max
  unsure (1)..(395): unsure at all n locations
ctaacacgtctaanagatgataaatctatattacatgttttagactaggcatgtgtgatatagccttagcttttttgcttcatgcttagtgatttatcaaacatgaagtgaatgaagtattcttattctctaagtttcttaagaacttagttctgcttgaaatttgtctatgaaattctgatactggggacagatgtcgtacatgatgtcacgacatctcgcttcataacatgcagattgatatgaccgtctgaacagatgacacaagtaaataacacaagagaattgttaacccacgtcggtgcaacgtcacctacatctggcggctaccaagccagggaggaaatctcactaaataagaattagttcgagatctaacagncactgtatacaac

SEQ ID NO: 165582 - DNA, 295 bp, Glycine max
  unsure (1)..(295): unsure at all n locations
tcgattcattctatgcacncatggaggagcacatggagtatcgtgtttgtttactctctgtttgcnnactttctatacccactcttgacgtgcttaagccgtcttacttaagatatttcttgcttaacttatagataaaataaatttccaccgcatgcctgaatgatacatccgctacttctgtaaaataattcgaccgtcggcgtgccgaccacgcggaaataaatgaggtaacacacttactataataaaacgttctattaaataagggaaataatcgacgttttcttggatt

SEQ ID NO: 165583 - DNA, 386 bp, Glycine max
  unsure (1)..(386): unsure at all n locations
ttgcgtcatataaacttcttcttagtcaccatttacaaaattcattttcacatccatttaatgtaatttcaagtcaaaatgagcaactaatgtcattatgatgtgtaaggaatctttcgtggatacacgagataaggtttctctgtattcaactccttcctttaagcgaatcctttgccaaccaatcgagccttgtgtctcttaatgctacctaatgaatccttctttggtttgataacccatttacatccaatatgctgtatcctattangcaactcaacaagatcccatactttattattngccatatgatccaatcatctttcatagttctaccatacctanaaattacactgttatcgcttgcaaaacaactaggatcattt

SEQ ID NO: 165584 - DNA, 325 bp, Glycine max
gactactatgggataaagcatctcattagtgtgtctttgcttctctatcttttgtcgggaattctttaattcttgccttatcttatctacatgatatctacattccttgtggttgggctgttacagagattcaaaaacaaaatccataatcttaatcacactgtcttgtattcttggtccaatttgagaatactttgaatatgttttgtgtgatttaggtctatattttcatcataatatctggctgacctagatcaaagttattccaatattgttgaaaaaaaaccaacaactagtgtaatcactatcctgtgcttaagcatgt

SEQ ID NO: 165585 - DNA, 472 bp, Glycine max
  unsure (1)..(472): unsure at all n locations
tcctggcatcatcaaaataatcttggaagtcatggcttccacatctaagtctattctatacatgccttgaaatgtcatgtatgtctgtcatttgtaacatataagagaaagagaaacatgattaaaatgacagaaaatgaacgaggaaagagttaccttttgttgatattgcacctccaattgcacatccactcaacaaagcaaccatttattttcttccccaatgccttttatttattttctgattagagaaaacactaatgaactatagtagaacaaagcctagataataataataataataataataatgaaacanaaccaanataattcccaagctttcttccctaatcctgtttattttgtttctaattagagaacagactaagagactatagaagaacagagcctaccataatatnnatatanntataatataatagtgataatagttatataatgatagtataat

SEQ ID NO: 165586 - DNA, 231 bp, Glycine max
  unsure (1)..(231): unsure at all n locations
tgtgtaccccatgttgagttntcatacaatatagnttttcatagcactactaattgttctcgttntgaagttgtttatgggtttaacccactaactcctcttgatcttttggctatgcccaatatttctgttttaagcataaagaaggtcaagcacaggcggactatgtgaagaagcttcatgagagagtcaaagatcaaattgagagganaaataaaagctatgctaaac

SEQ ID NO: 165587 - DNA, 365 bp, Glycine max
  unsure (1)..(365): unsure at all n locations
tcatcctactaggacgactgagaaaactggggcaaatgaagagggtgagaaagaaggagaaacccatgctgtgactaccattcctatacggccaagtgttccaccaacccaacaatgtcattactcagccaataacaaacctcctccttacccaccacccagttatccacaaaggccatccctatatcaaccacaaagcttgtctatcgcactctcaatgacaaacatcacctttagcacanaccaagagcaccaaccaagaaatgaattttgcaatgagaaaacctatagaattcacgcctgtcctgtgtcctatgctgactngctcccatatctactngataattaatggtagcacaacccaa

SEQ ID NO: 165588 - DNA, 275 bp, Glycine max
  unsure (1)..(275): unsure at all n locations
tactcagcttggtatctccttcttactacatcaagaattacggggtngagtcttctctatggctgtcttactgggttagccccatccctctaaattattcgatgcatacatgtggatgggctaatacccagaatggccgtgatggttcagcctatacccctcttatgcttcttgagaactgataacagcttctcctcttgctcatcaacaagggaggcaaatataaatactggaaaactttgctattcatccagtaagcatattctaaatttgat

SEQ ID NO: 165589 - DNA, 466 bp, Glycine max
  unsure (1)..(466): unsure at all n locations
gcttgtgagagcccctatggtgacctgtgactgaggttttctggttatgtcttatacnaaccatgaccaagtcntccaatttaaattcaatatccctgcgccttttatctgctgagtgtttcataattacttgggccttcggaagcttcttctttaagtcttgaaaaatggactccctattagtcagaaactcgtcaacagcttccacttttgaggtacctgtaacatatgatggcaaatctggtggcctccggacaaaggtgacctcgaagggggagacaccagttcctgaatggtgggaggtattgtangaccattcngcccagggaaggaacttaccccacgaagaaggtttcttgtggacaatagctcgaaggtactactcaagcacccggttcagcacctccgtttgtgcgtcttgttggggtgataagctgagctcatcctcatgtgtgtgccacttaac

SEQ ID NO: 165590 - DNA, 482 bp, Glycine max
  unsure (1)..(482): unsure at all n locations
gattccgcttaacacaagtcgttcaattcttgttttataaatgtgacctaagcgcttatgccataatgctcctgagtttgtattatcaattctacgcttagtaccatgcaataggattcaccataggaagctacagtatcaagtaaatatagattatcattaaccaagagtgaaccagttccaacaatatctgaattaaaagacaacctanaaacacattgtttccaaatgaccacaaataacccaatttgtccaaataagaaactgaaaccaaattccgtctaaatgacggtacaacaaaagtgtctttcanatccaaataaanactagtacatagaaataatctaaagtgctctatagcttccgcttnncaccgattaccatctncaacatagatccatctntcagaatcaattggcttcggtagcttagacaccctacattgaacactgatgtattagtgcaccagatctaacaccagt

SEQ ID NO: 165591 - DNA, 303 bp, Glycine max
atggtacatgttgaacgaatttgataattcttaggatattatcctgagtaaacacatacaacaaatgtgctctgcggaggtatgtttcattttcctgtagtaatacatgatcgcgtcaagagtatggggcattgtgcattatagcaagtttatcactccatctggtgttcttccaacggtgcataataactcaatcggaccaacatacaaaaattgatcattacacattaacattgatgtgacatcgtcatcattatcaattcataacacagaagcaacattgtttcctgatggtgatggctt

SEQ ID NO: 165592 - DNA, 434 bp, Glycine max
  unsure (1)..(434): unsure at all n locations
acatctcgcncctccagaggggaaaggtntcacttctcttctcttatcctcactctctccgtaatctctcacacacaccaaccaacgttgatcgatgcttctgattttctctcactagccacaaggttagcgacgaaatctcaaattcctaatctatataaagcttgtgagtcttgtctagtctcttgaattagtagtacacttgctgtctgtgacaccctctacccctcacatatatactaataaggaatagaactaattatatattaattaaaagctattttaaaacattatttttaaacatgtctttcacaggggaaaaaggctcacattcagtttcttctacatcatatccaaacttgtccaaataaataatagagtattctcgactcactaagggcgctaagcttcatacaattaatatagaacctata

SEQ ID NO: 165593 - DNA, 395 bp, Glycine max
  unsure (1)..(395): unsure at all n locations
caaacccttccctntcctctcattctgatgtcagcttctatgggagtntanagcttcttacttcttctccttcttgctactgaaggctggtctagaaaccttgaagcctacgagtgatggttaacaagttcacccttcactctagccttgctcattcttcttcatcacttgaatattctctcatgcttttgagtattgtagaagcttgcttttgactcaagagaactccatctctggttgtacccttctcttttacgtggagactacaagaggtaaggggggcgtctctcaattcttgaatcctaaccatgtcatgcatggaaactgagcttcacaaatgtagttgtggtggtcttgaaattntcgtgctcgctgccctatcttcgaactatatg

SEQ ID NO: 165594 - DNA, 398 bp, Glycine max
  unsure (1)..(398): unsure at all n locations
cactctatgggttgcttgaacttcagttttccacaatgcaaagaacaaacgtgaagatcatcatcattacatttcaacatgggtcagggaatcacaatgagaagtgtacttgggaccttacctaaatcagtaacgtgaattgatgttgtacaatatggatattatgtgaattattgttgcctaactaatgttnttcatcttcaaggcacattaacaacttgttgttcggtgtccacgggacaatgttgttgttaggttgtgttctttgcgtaagaagcctgatgttaacatcaagactgtagtgaacatgttagttctaacattaaaagtcaattgaaatattgcaattgtacggtgacaaaacaatgatcatntgttatattcgtaacatgatttta

SEQ ID NO: 165595 - DNA, 441 bp, Glycine max
  unsure (1)..(441): unsure at all n locations
gcttctcactatggtctggacatgantaatggataatgcatattgttccctctctaatcaatgctnaggatttattctatgtacattcgaaggtggtgcatgatgtggctgtgcaacatctgcccgtnataatcactcatcatttattaacatatgtatgccatggtgatcaacatttattaaagtgtcaaagtctgataacagcattacctttgtaagtaaagaatgaggatatgagtgatgtcactgtgtaacgacccgcctcgtcgctacgatatcaccattctaaatcgggattantttcacatttaaatgagaactcagttaatctgcttataaaacaaatgaaagaatatttgtctcacatacattaccaaacacacacatacttaagtggatcatatatatagtatagtactcagacacatcatcacatatgga

SEQ ID NO: 165596 - DNA, 106 bp, Glycine max
  unsure (1)..(106): unsure at all n locations
atgacacacatgcaaaaatgatgatttggagattttatngcaaactggtcatgcatgcgcctatgcggacgctcaagtgtcaaaattttatggtcatgtgatgcta

SEQ ID NO: 165597 - DNA, 177 bp, Glycine max
cacttgatactcagcttagaagaaagaaataagagctttcctagttgtaaagatatattttgaatctgatggactagacaactccgatggatccacacatggtgaagtgaccctcatgtcttggaagtcatatagatgatgaagaaaggaaaagttcaacattcctctagacataaa

SEQ ID NO: 165598 - DNA, 412 bp, Glycine max
  unsure (1)..(412): unsure at all n locations
ctgcagctccatcattatgttgcacatgcgcttgtgaatctgttgtctcaacatcagnnnttttgtagctgtaactgcgaactgaataacaccttgaatgcgtatccataacaattctattaatggtgttgacagtaacacaaacaatttcctggaaaaaaaacataggcgtcacattccaaaccaactggtacagccattgaataaatagcaggactttcattacagttcatagactttgatcaccgggacttttcatcaggttttccattgaactgaattaatagttaagataaataacaattttacctcagaatatttgntaacctcagagattgtctttgcttcagctctngaaagagatgcatcctttgacgatatttggcttgaacctgaaacctgcgaactccct

SEQ ID NO: 165599 - DNA, 428 bp, Glycine max
gtgcatgagtacataaaacaaatgcgagatatttcagctcaacttgagaaattggaggttgatatgtctgagtccttcctggtgcacttcattttgaacacccttccactggaatatggaccgtttaaggtatcctgcaacacacataaggactaaatggtcgataatgaattaacgactatgtatgttcccgaagaagaaaggctttgtatggagatgggcagagtgcattgctgacaatgcttgcgggaagaacaaacactaagtctcagctaatcagaatggaatggtaaatacacactaagtgatattagaaggtgcatagttttctttgtagaagacggcacataagaagactgcacagatctataatgctgagagaaaggagtcatctatcattgtataacctatatgcagtgtatatacac

SEQ ID NO: 165600 - DNA, 402 bp, Glycine max
  unsure (1)..(402): unsure at all n locations
cactctcacacatgaatatgaactgttcanactgtttcaatatgagaccatagaagatatgcataagagatttactcgtatcgctaatcatcttgtatcattgggaaaaatatttcctagtgaagatcttatcaacaaagtgttgagatgtttgagcagacagtgtcaaccaaaagtaacagcaattgcagaatcaagagatctcactaatatctctcttgccactctctttggaaaactttaagaacatgaaattgaacttatgagactccatcaacatgaagagaatgatataaagagaaaaggaatagcacttagagcctcatcctctnttattcaagaagaaagtgacaaagaggacttgactganatagaagaagatgatgatgatntcagattctt

SEQ ID NO: 165601 - DNA, 462 bp, Glycine max
  unsure (1)..(462): unsure at all n locations
gcatttgctccatcaactgaccatgtacattatttatttgtgttccccaactccanataacaacaaaaacatcagtcatgccctcagaaaaattatgttgagttgaacaagttagaaggcttacgttctcaaaccagtatcctccattcatttacgaataagattgattgccctcatggatgcacgactcaagaatgttctctccaaataaccgctagcatcactcacctgcattatatccaaaaagcaacattaacttccaagaacaataaacaattcgtggccaccagccactgaatgagaattatcagcacaatgaatgttgactatgaatacccaacgtcattgaaaacttgatactttaacaatggtataaaaaactgtcgagaaagtctacttttctacagttgcagaacactgcttaaaagctagaatggtctttcaaacgtaccacgcttaaat

SEQ ID NO: 165602 - DNA, 281 bp, Glycine max
aaattcccaatctacgacaaagcagataatgacggaaatgagattcccaatcaaacagtgggagacagagaaaataagaaacgaatggaaatccccaatcactgagtgggagaaagaaacaacaacagaaagaaaattcctaaccacagaatgggagatagtgaatgagaaggaaaccatgacctagaagtggtcttctacctttgattaccaaccaaaatcctgtgcgctgcgactctttgccccactaacataactgaaaagaaaaagccaccacaata

SEQ ID NO: 165603 - DNA, 279 bp, Glycine max
gactacgcagtaaatgaccggttgaaacgttgttctacactgatggaaagagtttacgacacaaacgtgtggaagcaatgtccttcaaggttatattgatgatgccaaacaatctagagattagaacattcccatgactcaagaatcatagttcaagaatcagcattcaacattcaagaatcaagttccacgaatcaagattcatgaataatcaagatcaagattcaagactcatgagaagactcaatcaagatcagttctaaaaggtttcaaatattg

SEQ ID NO: 165604 - DNA, 323 bp, Glycine max
gtaagttaaataatctcttgaataattactaatgataaaactacaacctaagttaacataaaaaaaattacaactgtcaactggtaatcaaggtttaaaaacaaaaagtctgcaacatcaatgttttcaggtggcagggagaggcagaaagtttataacaaaatcaccaaatcaaccaacacagatctcaatacctatcaactaactaactgatcgactttcttcaagcaaaaagcttacatttaacagaattttaccaataaaccaacgcatcacaaatccgatcgaatatattacaatctcaattctagcccagtgttcaa

SEQ ID NO: 165605 - DNA, 85 bp, Glycine max
  unsure (1)..(85): unsure at all n locations
acttgatactcagctttaatatctataatacctgtaataacagtgaagctgaatttttacactacgtcattccttnctctctctc

SEQ ID NO: 165606 - DNA, 211 bp, Glycine max
  unsure (1)..(211): unsure at all n locations
ctgccgcatgcaagctgattgcactcagacttgacttttatatctctctgaataaagagnnatcccatgttttactccaaagatcggtgcgaatcaaatcactcctgcattttatctctagcatgcattcattnttctttacctactcctcacgtntggtttttaggaaaaagcaccataactaaacacgttccaagcattcctatcgcac

SEQ ID NO: 165607 - DNA, 299 bp, Glycine max
  unsure (1)..(299): unsure at all n locations
tgcacgtgngctntcaaccactcatggtagccaccattgggcccattgttactgcctctgaactctntgtcctccttttgtaccacctcccatgccttgcggaccttctaaagcgtctncatgttggtcttattgaaacctcgtgaaatgacaggtgggagctcttcctctaatggtgcccctctcatcgggtagccaagttgccttatcgcaagaacgagaatgtaattgattcaaccccttgtccccatcaagggaacattcggaaatcctccgcactagataagaactctggttct

SEQ ID NO: 165608 - DNA, 316 bp, Glycine max
  unsure (1)..(316): unsure at all n locations
aagaaacacatacacattctgtttcctagtcgatcactcacttaattctccatattctcccgctttgtttttgagtttaaccttcacttgaaataaagttatttaattatatgagttcttgatttaattcctattntctctccccctttggcatcaacaaaaagccaaagttcgtaagtaatataaaaaccatacataaatgactaatcatacaagagaatagcaaacaattaaacaagataacatagtgtcataccctaatttcgtccggggattattacttgatgacatgcaataaaagaagtcccgagacgtc

SEQ ID NO: 165609 - DNA, 404 bp, Glycine max
  unsure (1)..(404): unsure at all n locations
tagatactcagcttgtgaatcgatacctgattggtatcgataccagcgattgtttcttaataaaatcaaaagatgtaactcttcacatagtctttgactcttacaaactggttgtaagattttctaanagtcattactcttctaatgggtgtcttgaccagacatgaagagtctataaaatcaaggctgtgttttgcatttcaataatgcattcaatcaatcttttacaagccttgaatctgcttgaacttcttcttcttcttagtaccaaaagctttctaaagtatctggtgttctaaaccttgataacttgtgctattcatcntntcattctcttctccctccgccaccaaagaaatctgccacgactaaccgcctgaattctttttgtgtctctctctctc

SEQ ID NO: 165610 - DNA, 275 bp, Glycine max
  unsure (1)..(275): unsure at all n locations
agctntactactcctttgtattcttcccaagcccgcttctntctctaattttattctnnccanccncgcttcattgtcataactcattctgctgatttgatcaccagagttaatcatctccgccatgagccttagcggttttggagatggtggagtagcatctccacttgtagaagtcattcttacaatgaaagatagtgcacaagtaataaacanaataggaccttcccactcaactcagtgttgcactcaagatcactagtgtatcactcttt

SEQ ID NO: 165611 - DNA, 436 bp, Glycine max
  unsure (1)..(436): unsure at all n locations
ccataagatctactggggcttcccttcaatcattgaacatncgtgcccatatatgaaaagttctttttaaaaaaaaataaaattggagcagagggtaactctcactttttatcttaatagtagtagtagttattactaaacttaccgggtcacccaataattatttgcttaccccttgaattaattacttataaatgtttagtcttgggaaacttttgttgttagtgatatgatgaaaataatattatgcataaatagagagaaactcttatntcatgaattatnttttaaaattgagttaaatctaaacccgaactctaatatttgatgtcacaaattaaactgacttaggattggaaaagaaagtgctgatcacgagcatgatggaactcttcgttatatatgggtggacgagatgtctctcctaaacactctg

SEQ ID NO: 165612 - DNA, 159 bp, Glycine max
  unsure (1)..(159): unsure at all n locations
aattctttagttcctgaatgtacaaccttcaaattatggctcgttcccctctttgagaatgacgaggatcttcataggacttcatccagcttatngttgtcgccagtntnttcattggccctcccccgtaaaaatatatcgtgctccaaccattctttt

SEQ ID NO: 165613 - DNA, 325 bp, Glycine max
  unsure (1)..(325): unsure at all n locations
aagtgcgtggctacgagtgggacttcaaaaattcacgtttgggtggacttctctctctcttgaatttcgtgggtatggggttttgggagatatgatgggtagtcttgctagttttctgcttcatgatagttatttgtgaagaaacttgttgaaaactcgttgaaattgccatgtttggatgagttagacatacccattctgttctangcgtttgtgatgatgtttgtgatgtttgtatgctgaaattgcccatggaaaactgttagagatgaaatgtagagttaaccctacggtcggaaagtgagaatgtggtgttatgagtgga

SEQ ID NO: 165614 - DNA, 338 bp, Glycine max
  unsure (1)..(338): unsure at all n locations
tacacaaaacaattatttcactgcttaaaatgctatagtctaccgctcaaagggttgctatntttactaaaaactttgtaaggtacaaaaaatcgggatgttacacataagtctatagattggtcatccattgcatcatcccgtaaaatatattntgtgttttccacatatctttgggggtttgggtatgacctagtaatagattactaatttgtagttntggcttcctatgactgatttagttttgaaggtaattgggaaatccaagtggcctttntctcaattagattactannattgtagtntggctctctattacngttattaatgctctagtc

SEQ ID NO: 165615 - DNA, 347 bp, Glycine max
  unsure (1)..(347): unsure at all n locations
cccttaggcacttctctctctttcgaatttgctgaggaagaatatttccgtgaagaaaatccaagccgaggcgcttccgtaacgtgtccgtgagtaattacgcgaagattctcgaccgttcttcaaagattcatcattcgttcttcgttatcttcagtcttcaacgggtaagtacctcagaccaagcttctcaattcattatatgtacccgtggtggtccacattgtgtttcatatattttcattctcgtgttcatatacttattatacccccttttgacgtgcttaagccatttatttaagccatttctcgccttatctaanaatataatanatttccaccgatcg

SEQ ID NO: 165616 - DNA, 401 bp, Glycine max
  unsure (1)..(401): unsure at all n locations
gaagttntgggagagagagagcangggaagcaaaattcttgcgaatgggtgtgtaactgatgttacccccactaagcaagtttcgactttctcgctaagcggcatggttcgctaagcgggcgagtgagacggttggtttctcaaggcgtatcgcttagcgaagcctcgcgcttagccaaacttcaaattcaattttttttagagaattagagtttggcttagcacgtggatcggaacgcttagcgagatctacagatcanaaaacctacaacgcccgcttagcaaaaatcatgcatctaaagtgcagaagagcaggcgctgagcggacaatagaatcgatccgcgcaaagactgtcacaagcatttgagcatagctgcaatgaatgacacttagctcaatc

SEQ ID NO: 165617 - DNA, 422 bp, Glycine max
  unsure (1)..(422): unsure at all n locations
gatccttaagcaccgcggctgcagcttttatccaggcacattctcgatggtgaagcttatagtataagctttcatagaagctccacaagcaagcttccatcaaggagctctagtttcttggtcctccaccaaggaaccagtagtaacattgtcatcctatgaagctgagtatattgcagcctcagaagctgcatgccaagcagtgtggctagatgccccgatgaagaaattgcaactggaaaaatcatgtaaagtgaagttgttggtagacaataaatcttccattgatttagctaggcatccgacttctcatggaagaagtaaacacatagaaacaaagttccacttcctaagaatgtcagcaatgagaaactgaagatngaacattgcagaactgaaattcagcttgcanacatactcac

SEQ ID NO: 165618 - DNA, 415 bp, Glycine max
  unsure (1)..(415): unsure at all n locations
ctatggagcacacattgttcccactcttcatgtaggtacaataatgctgaggccaggcctccagcaatgttatatcttgctgcccatgtcaggaggcttttgcctccaaacaaatgggaatctaggcttccatttggcatgagctcatagataagtaaaagatcatttttcttgtggcaccatcctaggagctgcaccaaattcctgtgcctcaatttactaatgatcttaacttcagaggcatactcttccacaccttgtcatgatcccggtgacacccttntaattgcaacatagtcacctaattctcttataaatcctttgtagactccaccaaaacctnctttctctagcttcagttcatttgcaaaagttgttagtgttctaacaaagtcattgtatgaanaaccttttg

SEQ ID NO: 165619 - DNA, 320 bp, Glycine max
  unsure (1)..(320): unsure at all n locations
aaagagaatgaaaagtacatataaatattattttatttgtaacgattaaaaatacatttaaacctaaaaattaacacggattatgactattntttataaaattatattgccgattttgtcttaattttagataacttatgattgcaatatttggtaatgaatataaacttcaccacaagttaatacttgattctatataattaaaaccaaaagctaatattttataatatatatatatatatatatctatatatatatatagttcatctcagaaagagaaaatcatattatatataaaacaagctctatataaaattgca

SEQ ID NO: 165620 - DNA, 254 bp, Glycine max
  unsure (1)..(254): unsure at all n locations
tccggttcgagaagtgcgtggctacgagtgggacttcaacaattcacggttgggtggacttctttctctcttgaatttcgtgggtatggggttttgggagatatgatggagagtcttgctagctctctgcttcatgatcactatttgcgaagaaacttgctgaaagactggtgaaactgccatgtctggatgagttagacatacccattctgttctacggtttcgtgatgacgttngtgatgtctgtatgctga

SEQ ID NO: 165621 - DNA, 269 bp, Glycine max
agactcttcatgtctggtcaagaaaaccattggaagagttatgaccttgagaaaatcatgtcaagagttacatctcttaacctcttattcaaaacatgtcactggtaatcgattactataatcatgtaatcaattacacaatgcattttatgaaaagatatgactcttcataattgaatttgaattcaacattcagatcactggtaatcgattaccaatatattgtaatcaattacatcattttaaacaatatttgggtatcgattaca

SEQ ID NO: 165622 - DNA, 431 bp, Glycine max
  unsure (1)..(431): unsure at all n locations
ttattnggcactaggttttggaaaagtctaaaagaaatgctcttgggtcatggctggaatagaactttgagaaagaaatatgtctgagcttagtcctaacaaattagagtcattaattgtagttattattcaattgataccattgttaggaacaacatagtgttaggatgcagagatggcaatgctggtgggtggctctaacttggtccactnggaagcttangaacagcatagtgttctctaatgcaacctttaatgctaacaaactgtttgaagatgcaatattcactctatggacgtggctcaggcactttgagaaagatntactatccattttaataatggtcaagtagcattagacaccgcttttgcatcgtagaggatacatattttgactatagatgtcattactgtcccatatactggtcctc

SEQ ID NO: 165623 - DNA, 390 bp, Glycine max
  unsure (1)..(390): unsure at all n locations
attataatggtatatttacaacaattaaaaaaattaaccagataataaatttatcatatttcttttacttttaaaactaaaattttaattttaatcttttaaagacaaacttgtccaacactaaaacataagaagaaaatagttattaaaaaataaaaatgaaagatctntactcctgattcaatgattcgggtcttacccgcgtgaatcctgattctgaatctggaacagcggctcccgtccgatcggcatgtaaggtacgaccatgaatcagtaactgacatgtatcttatcattcgtgcaactatcatctgtatatagagcacaacacgggaaggcgtgactgcttgtactacgaatatcatccgcacgtggaccatatgatggatg

SEQ ID NO: 165624 - DNA, 349 bp, Glycine max
  unsure (1)..(349): unsure at all n locations
taatttaaggaatcaagtgaatgccattggttgcttggggaatggcattgaattgattctgaattgagcaaagttggggaagcttggggaaattggccactggttgcttgtgaatttaacttctaaagtgctgcataatcaacatagttggtctcttatatttgttgttacaattgataatttatggaagaattttagagaataagttgggcactatgttggaaacctcttgcacaaattagaatcaagtcaatgccatttccttaagtttcacgaagactataaacatttagttagctccaacaattgacatgngtcaacgaggtatttcatgggtcaacaattgaca

SEQ ID NO: 165625 - DNA, 488 bp, Glycine max
  unsure (1)..(488): unsure at all n locations
tctcttcttatgggtggactttagttttctttcagntttctctatccgaaaaccngatgtttaatggatttagtatttactggttattctttcatggaatgtattccaggttcagataaaaacaaattagattggagtaaaaggtataaaatttgtcttggaatagctgatggtctcctctatctgcacgagtgttgccacaggcgaatcattcatagagatattaaggcagagaatattctgctcacggagaattntgagccacaggtttttactaaacttcattagagtgaatgataaaataacttatttgcagtattactttgatacatgaaacttaggctccatggatatattctgaattttgtggctgtgtgtagggacattaaactatagtttcnggtgtaccaatttagcttatatactgtatcaactaccttgtntcaatatctgagctactaactatctctatgctgtaccactctatg

SEQ ID NO: 165626 - DNA, 442 bp, Glycine max
  unsure (1)..(442): unsure at all n locations
gcttatgcagagatgctctccatacccgatgctatttatagttaaaattcgtatgtcatgtgagtgtccaaaattcgttgctatgcaaaacaaagatatatactagatgtggtgtagaaattatacaattaccatgattttaatagaatttttagtaaccttctatttatcctctaaatattaagttttttttcttctaaaataagaattaagaggacgtaatttttaaaaaatttaaaatagaacatttataatatgtcactctttattactcttttcaataaagagaannaagaaactggtatggttctttcctttccttttntattntatcgccactattctggtctactatntttccattgtattattgagaatattataaaacaagtaataatataatgagcaaattaaatatatgactcatattgattatccgata

SEQ ID NO: 165627 - DNA, 394 bp, Glycine max
  unsure (1)..(394): unsure at all n locations
caaaacattattttaattaaaacaaacataatttaaaaaaaaaatcataaaaattcactcagtataaaagtttntttatggtatcatactattgtcacgtaacaattattttaaaagtgatacttaagttcagtttgatagtaaactttaanttaaattaatgaaatattaagtaatagatgttctttttgaaataataaatatttaaaatggataaatcctgaaattatcgataattatttaaatatttggtaaaaaagataattantaatatataaaccatatacagtataatntaaatagaggaagtgtttttactctctcttcttctctnttcttttggagcattggctgcatttactcatttgtgatctactttattatgctacctata

SEQ ID NO: 165628 - DNA, 375 bp, Glycine max
  unsure (1)..(375): unsure at all n locations
ccttgacttggtaaaacctcttgccggtttgatttgtccccatgcttactaaagtgagacaaaaagctggtgcaaatcaaaactccgatatctcatggatggaatggatgaatgcatgaagcaatgcatatgacacagatgcaacttatgaatgcggnggcccgaggaattgtctccttcttagatacaacgtctaggggtagcaaagtgccccaacgtatgtatttaaaacggtgacccggacccttcattgatttgtctatagagaggatccagacagaacccctatgcgatgcatatgcaaaaggcgcaacagcatgacaatattcacttgaacataagcaaagggtatatgatatttatgcatggcagtgt

SEQ ID NO: 165629 - DNA, 437 bp, Glycine max
accacccgtagtagcgcgagacagacctcaaattttgcagcagcttctgcaatacgttttgtacccaaaaaagttaaattcatgtttcacacttttggtacatcaatgatcaatcaatcaaacatatttttcctctttttttcttcttctttaactaaaaaaaagactacctttcttcatcgaagataatagtcgtgttgtgtcatccagaagggaaaacaagaagtttccaaatactctcgaattatttactactaatatgtattcatcacataacgtaaatgttatttatttacctaaagttttcattaataaatattcttaatatataagatatattattgtaaatttttgattaaaggtttaatatacaaattatatatttatttggattgtattagatatattttatttaaatcttataatcatctaattta

SEQ ID NO: 165630 - DNA, 289 bp, Glycine max
gatcttaagtcacctgccgcatgcagctaacaaacttagaaataagtgagcattatttcttaatatatggggagtaaacgctttatctatatacaattgtatgttgtacgcttgactcttgattgcaggtattgtattgtcatcatcaaaaagggggagattgtagatgcaatggtctttgatgtcttgatgatgatcatgatgatgtgttacaattgatacaaatgggcttttcaagattgattcaagacaatacttaagaattacagtccaacatcaagatgatcac

SEQ ID NO: 165631 - DNA, 235 bp, Glycine max
atacttaagacctgacctaacgaactataacatgtcgtgcatgcaaattatccatgacgaccgtgtggagaaactcataggcgcatctgatgacactttgaacatgatcagcccgtcacaattcctacgcataacgtgaaccccagcaccgggcctgtactgtcacatatctcttctttctgaagccacgaccatctcacatgatccttacaccggcatacaatcaactctaact

SEQ ID NO: 165632 - DNA, 422 bp, Glycine max
  unsure (1)..(422): unsure at all n locations
agctntgagaaaattcaaacaacaataccttttttacttttatgtctgattgagtcccgtaatctatcgagaccctcgaaattgaatgttgaagcttttagaaaattcaaacgacaataactntttactcggatgtctgattgagtcccgtaatatatcgacacgctcgaaattgaatgttgatgctctgagcaaattcaaacgacaataactttttactcagatgtctgattgagtctcgtaatatatcgagaagctcgaaactgaatacggaagctctgagcaaattcaaacgacaataacttattactcggatgtctgattgagtcccgtaatatatcgagacgctcaaaattgaatgctgaagctctgnagcaaatcaaacgacaactaccttttactcggatgtctgattgagtccc

SEQ ID NO: 165633 - DNA, 238 bp, Glycine max
ttattatgatcacgccgttgagatgctttacctttggggacttccagctgtcacccatggtggaagaatttgaagagatcctaggatgtcctctaaggggaaggagaccatacctcttctcaaggttctatccctcattagctagaatttcaaagatatgccacatctcggcgcatgaattagaccatggaaagcacgtcagatatggggtggttggaataccgagaaaatctttgga

SEQ ID NO: 165634 - DNA, 345 bp, Glycine max
  unsure (1)..(345): unsure at all n locations
aagcttagacattgtggcactgaacacgctcttgtttgttgtgtaataaatcacaacgaatttcacagaaagtgatacacgacaacattcgttggaattgatgattagaatttgntcttttttgacttgttaaacatagcaaacgtccaacacgtttggaggtttgatacatcatcacgataccaccagattagaccgacttctatatagatcacatatatcagctagttactgtgtttaagttagatcaatattcttaggcaaatgtattatttaatattccagacaaaatacaaatataggtttactagtgttagtatattgaaataccacctcctgataaaa

SEQ ID NO: 165635 - DNA, 298 bp, Glycine max
ctatttaccaattagtttttaccttatctttcatacctcttttagtgtttattttggctagtttcaaccattgttagttttaccttttgttttgaaacccccaacaggaaagaaccataacttatgaaccaacatgaatcttcattcttcatctagtgttaatggtgagtgttgtactcctaaggatcccttgtataagatattagatgagttgagatcccttacattgtgcgaagagaaacatgagagagaagaatatggaaaaaaagagtgggagagataagtctagatgaaagag

SEQ ID NO: 165636 - DNA, 345 bp, Glycine max
  unsure (1)..(345): unsure at all n locations
acataaaggctcgagggagtattcaggttctacagaaaagaaaccatcttttgaaattccgatcatgccaatgtgaccggggttcagtgaatgccgccaaaacaacctcaaggttataaaaagatagcttttacaatgtctcattctctacgaattttcanaggaagtgtaaaaacaccctattacagtacccaacacataagagacactaagaggaactcaaactagctagcagaaggcttagaagtcaaggttacctcanagaaactttatatggaggattgaggganttctccaccgaatcttcgaggaggaatttgaggattccacttcgattaaagtgtc

SEQ ID NO: 165637 - DNA, 293 bp, Glycine max
  unsure (1)..(293): unsure at all n locations
gtgacatatgcctaaacttaggctcgccacatttatgatataagtttgtttcatgagcaaaacaattggatctctatttgtgttggtcaagccatgacggatgatgctaatgtctgccaacatcgtagtgttcacaaagcactaatagtaagaagataccaagtggatttaaaagggctaattttaatgttttattacacagtttctttcttttgctcgttangaaaatttgtatcagtgtgaatattggccactgtgcaccaagttntttctttctttcttttattttcttg

SEQ ID NO: 165638 - DNA, 419 bp, Glycine max
  unsure (1)..(419): unsure at all n locations
ctgcagcttgagagtttacacacatgcttctatntatagtctatgttgctttcttgagaaacttccttgagaagcttccttgagaagctttcttgagaaacttccttgagaagcttgtttgagaagcttccttgagaagccagagcttaactacacacacccctctaataactaagctcacctccttgagaagcttccttgagaaactttcttgagaagcttccttgagaagattcctagagaagctagagcttagctacacacatctctctaataactaagctcacctccttgagatgagaagctagagcttagctacacacccnctataatagctaagctcacccncatgccaaaatccatgagaatacaaanaaaaaagtccctactacaaagactactcaaaatgccctgaaata

SEQ ID NO: 165639 - DNA, 391 bp, Glycine max
  unsure (1)..(391): unsure at all n locations
aactaatgcatagccttgaaaatatcatcactttgtttcttaataacaataaacatataggaataatttaaaaaaagtaaacaccaatgatttagcaaaagctttataaactagaaaagaaattcagaaattacattctcaaatcaatgcagaattttacttgtttcttgaactcttcgatcataaagataataggaattaaactgcccgatatagtaaaaataaaaagattcaaattttatgcactcttaaaaaattaaaaaagaaagtttaagccttgctattccattccatgtattgaagctaaatatcaaatttgattntcctttcattaccttcaatgnggcaaagactaacatattagctaacttttcatctatgaacaatactt

SEQ ID NO: 165640 - DNA, 316 bp, Glycine max
  unsure (1)..(316): unsure at all n locations
atgctcttccttgcgagccttcttggtttctcgttcaagggctcttacggtagctgcattttcttctcgtaacccggcacactctttccggacgtttgtagcgactaacttgaatttntctttggcaagtcttggttttcctagttctattnttagagctcggacttcttcatcctcttctagagcttcgaagttctcctcgttgataattttcaacttggagagccaatctaaccctcatgtacgaactttcagccattcatgataaccaccgatgatgccattacggatgcccataagttctntatctttccat

SEQ ID NO: 165641 - DNA, 344 bp, Glycine max
  unsure (1)..(344): unsure at all n locations
agcttcattacatgcaagtaatctcatggtctatcaagtgatattctggaaagccaaggaaacttccaacttccttccgagaagttattacaatagcataagttcctacatccatgcacataatgttgagccttaacgagtataaaggaagttatgttgttagacttggtaaccttcagaaaaaagtttgtgttcatctcaatcatntagctggctcaacttcttttgctaaagcgatgcagtgaacatgatntacttgagaanaaggctaaatattagacatacatncttttacaagaaggtgaaagaacaacaattgcacgatcaatcagagcctacattta

SEQ ID NO: 165642 - DNA, 443 bp, Glycine max
  unsure (1)..(443): unsure at all n locations
caagcaccgagctgcagctggaactgcaagaagcagaagaaagtagagttttctcgatncgncanngaagagtagaaattagttagttgcatgttgttatggccactatatatacttaagctagttggaataactaacttttaactaattaactagaactctaatcattagccatgagcaagttaaactaagcatctaactatgcatagattacctgccactatttgggttggaacaagcctcagaaagggatcatgcatgtatggtgtgatgtgattgtgattctgccagattagacaatgcgatggaattgaatagcgttgatattgtgccacttagctaagggcttaagcggcaaataaaaactcccttgagttcttctacaaaaaaataatgattgttaaataaaaaaacaatatgcgaatcttaattactttatgttc

SEQ ID NO: 165643 - DNA, 458 bp, Glycine max
  unsure (1)..(458): unsure at all n locations
gatccctaagncacctgcggctgcagctatgcgccatntccttacaacgntctcttgtcaagtcttttaaccgaaaaacatgcgcccatntacaatcaaggcagcttcgttacctagattatttacacgtacctccaaggtgtatttgttacttacatcacacacatctccttggctaaactcacatacatgcatactcaagcattttggggcaccaaaaattgcacatgtgcacatcttggcatttctaatacctacatacgcaaacttcatgatgaatcttgactatctacacaataaggtgctacatatntaagcatatttttctttgctgactaaaaatgcattcaaatntaaaaggtatatntttttgcaatatgtnttcttcatgcaacatatatatatatatnntttgtgagaacatttgactaccaaaaatatatatacatacattcaag

SEQ ID NO: 165644 - DNA, 338 bp, Glycine max
  unsure (1)..(338): unsure at all n locations
gcagcttttatccaggcactctcttggtgttaagcttctccttccatggcttattctctagtggatggcgcctcctctcacctcttcttctttatcttccactgcaactccatggctaanaatcaccattgaaggaccccattgaagctcaaagatccaacctccatagaagcttctcaagcaagcttccatcaaggggtaatcagagcacaagagcttcaagtaggttctccttaaacctccatttattttcagctttaccttctcttgcattggtatttcttcattnttcttccatgtatctcctcacatgtcttgcgcttaatgtngttaacatg

SEQ ID NO: 165645 - DNA, 461 bp, Glycine max
  unsure (1)..(461): unsure at all n locations
atcttcatctagcagaggttagtgtagcttcaatggctntttctccctttgtgaatttctgtaactttttatttaatcgtctatttgaattcctcaaactgtttttctcaacaggaaagaggcctttaccataactttgatattgatgaagaaaccagattctcttcagtctataggggtaaaggtgttgatgatagtgaatatgatgaaaatgaggacaagctcttggattcacacaattctgaaacatttgataatatttatgatttagtcaataagagaccagttgaagcaagaggtcagaaaggcagtaatggagctcanacatggtcaaatttctcctctgtggtacctcctcaacccggtattttgataattgtgtggttttataagtctatatcnattgtcactttgcatgtcacttgcttgtcccttcttgtgacanaatactaccataatgg

SEQ ID NO: 165646 - DNA, 394 bp, Glycine max
  unsure (1)..(394): unsure at all n locations
agcaccgcagctgcagcttaacattcaatntcgagggtctcgatatattatttgtctctatctgacatccgagaaaaaagntatggtcatttgtatttcctcagagcatcaacattcaatttcgagcgtgtcgatatattacgggactcaatcagacatccgagtaanaagttattgtcatttgaatatgctcagagcttccgtattcaatttcaagcgtcttgatatattacaggactcaatcagacattcgagtaaaaagttattgtcgtttgaatntgctcagagcatcaagattctatttcgagcttgtcgatatattatgggatccaatcagacatccgagtaaaaagatatggtcgttgaatttctcagagcttcgattcaattcaac

SEQ ID NO: 165647 - DNA, 361 bp, Glycine max
  unsure (1)..(361): unsure at all n locations
tctgagtcacctgccgcatgaagcttggcatttcattggcatgtctactaactttgttagactactcacaaanaagaatcaagaacagatgttattaaggcgtgtgttgacgacaaaagaggtacataaaacattggtttcttgactcaggttcgagtaattgtatgtgtggaaaaaggaagtattcttcagattttgatgagacgtccatagattcagtaaagttcgacaataactccaatatatggtggtcagtgggaaaggcaacatcacgttggagatgaatcgatntagcagcataaccacgagtcttttatgtgtcagaattgaagaacaatctactgagtctnggacaattgca

SEQ ID NO: 165648 - DNA, 369 bp, Glycine max
  unsure (1)..(369): unsure at all n locations
acctacacctttatttacatgacaaggcaactaagtgtgcatgctgaatgtagtgtatgactagaggcaatccatctgacttacacacctttgatcctgagatagataggacatttcatagattatntaggcatcatnttatacctgttgatcattttgagcaatccattactggtgaatctgtgcattctagtattggtgattttgaacatccctgatttgagccatataatattgagcattctgattctaaatattcttgatttgaacattctaagaacatggcacaacctccaccctgtatgaagactctaatggaaatggctgacctgatttcacctacgaatgcttgtcattcaataccctgat

SEQ ID NO: 165649 - DNA, 364 bp, Glycine max
gctctttgagaagctagatccttatctatccacactcctctattactttataacttccttaagggcataccctaatttcgtccggggattatttctcgatgacgcgcaataaatgaagtcccgagacgtctcataaatcgaaaggaagcacgcttgcgtgattcgtgaaattccgtaatgtggcggatatcgaaaaaaggtgtttttgcgcaatccgtgagtttccgtaacttcttcgaaagctaaaaaagagtaaaatatataatccgtatggattcgtaaccttgcggaaggaaaataggtatcattacgaaattcgtaaagtttcgtaacgttacggtaaaagaattacaataaaaaaata

SEQ ID NO: 165650 - DNA, 165 bp, Glycine max
  unsure (1)..(165): unsure at all n locations
tgtcaattcttaccctcggaagcaaaanaaagggggagagggaaaatntccaatcatagaggaagcaaaaaggagagaatgaatatttccaatcaaaggaataaaagagaggaaagggaattcccaatcaaagagtgggagaaagccaaaagaatagaaagaaaa

SEQ ID NO: 165651 - DNA, 236 bp, Glycine max
tatgatatgaatctataacttgtctgataaagacatgaaattggaggaagtaatcatcgctctatatatgtggcatgtaatcaacatgttggtcttcacaggatttcgagggtgatgctaggtgcacccaacattataagtgaatgggcgagaatgcccttcacttaagttgatccgtatgagccatacggatcatgttcgtccgcactaaatatacggatcaactctgattagta

SEQ ID NO: 165652 - DNA, 426 bp, Glycine max
  unsure (1)..(426): unsure at all n locations
gcttgtgcaaatcaaatcactcctacattncatctctagcattcanttttctttctttacccactcctcacgtttggttttttagggaagaacaccataactaaacgcgccgctagggatccctatcgcaccagatccaaatctagaacgatgggtgatcaagaggagacgcangaacaaatganagccgacatgtcggctctgaaagaacaaatggcctccatgatggaggccatgttaagtatgaagcagctcatagagaagaacgcggccaccgccgccgctgtcagttcggctgccgaagcagacccgactctcttggaactacgcaccatcctccctcatacatagtaggacggngaagggacacactggggcacgatggcagccctcacctgngatacaaccgagcggcttacccttatg

SEQ ID NO: 165653 - DNA, 263 bp, Glycine max
  unsure (1)..(263): unsure at all n locations
tgaggaggccatgaatcttgaagttgtgaaacttttctcaagatacctgctctgataccacttgttggatcaagtggcctcggaataattaagaaagggcggngggctgaactaattattaatgtgtcttgactaattaaaaatatatccttcttaatatttctagattcaattaggctctactactaagttatgagaaagtaaagaacagagacaataacttagacaaaagtaaagcggatataaaaagtgcacagccgaaa

SEQ ID NO: 165654 - DNA, 297 bp, Glycine max
  unsure (1)..(297): unsure at all n locations
ttctaaaagaggcacaattgatcatcctactatgacgacatgagaaactggggcaaatgaagagggtaagaaagagggagaaacccatgctgtgactgccattcctatacggccaagtttcccaccaacccaacaatgtcattactcagccaataacaaaccttcttcctacccaccacccagttattcacaaaggccatccctaaatcaaccacaaagcctgtctaccacacgttcaatgacgaagaccactcttagcacaaaccanaaacaccaacaaaaatgaattttgcagca

SEQ ID NO: 165655 - DNA, 328 bp, Glycine max
  unsure (1)..(328): unsure at all n locations
ctaagcaccgcagctgcagctgccaggctggctagcccancaattgatctgaatcttctaagcgatggcctgctcgctaagcacatcatattcaatagctaagcgtgacatgtcgccgctaagcccaattccttgcggcctaaattggggttcattgagctaagcgctactcatgccagctaagcccaattccttgcggccatagcagcgcttagcgaaccatcattccgctaagcacctgcccccttgtattcaagatgctattatttagctaagtcagcccggagccaggtttagcgagagttgcagggtttatgatctgcaaaat

SEQ ID NO: 165656 - DNA, 324 bp, Glycine max
  unsure (1)..(324): unsure at all n locations
tgccgcatgcaagcttaagaaaaagatggcctcagcaaatttctnatttctatattggaatncnatcaacagacctccaatctttaatggagagggttaccactactggaagacccgaatgcaatattttatcgaggcaatagatctaaatatctgggaagccattgaaatagggccttatatacccaccacagtagaaagagtttcaatagatggtagttcatcaagtgaaagcataaccatagaaaaacctagagatagatggtctgaagaggatagaaaacgagtacaatacaacctataagccaaaaacataataacatc

SEQ ID NO: 165657 - DNA, 310 bp, Glycine max
  unsure (1)..(310): unsure at all n locations
aacaaataataacaacataacaatgaaatccgtgagtgaagaactgagttgatactacaggagcctggctggtaaacttaatggtaatttcaccctgttcaataagatttctcaccatacaatnttcaaaggagatcgacgtacaacagaacttgtcaaaagtcaaaacctcttcttatgtgtttatgtgcagtcttctggattactattgctgacagcaattctacctagaacagaggatagacacactcaccaccttgcctttgtagtgtgacctatgccacgcaccatggacaccacaactatggga

SEQ ID NO: 165658 - DNA, 416 bp, Glycine max
  unsure (1)..(416): unsure at all n locations
acataccntaacataggggacatgtgaagggtgttgttgttgtgttagtgttctttccttggtttagacttcacaaagtctttttagtctctattctaatgttgcacaccacatcttctcaaggacattttcaactttcctcttgtatatcttctaatacagatagcattcattttctgatgtgctctcagtatgtatgggaacgtatgaaaagtgagatgctttcaactttagtattctaatgtgtctcgtgtatgtgtggaagatgccagaccctaatttctgccggggaatattgttctgatgtgtcattattttctcctatttcttaaccctttttgtaccaattaagtactaattactctaatggtaaattattattcattttatcaatggccacttgactattgatgttt

SEQ ID NO: 165659 - DNA, 327 bp, Glycine max
  unsure (1)..(327): unsure at all n locations
gaatgatttcaagaatgagtcacacagttcaagatcaagattaatttctaatttcatgagaagaaatcaagaagattcaagaatcaagagaagtttgatttcaagattcacgagaagatgaattccagattcaagagaagaaatcaagacgacttcataagggaagtattaaaatatttaaaaaaaacaaacatgcacaatttgttttcagagagttttctcnaatatctaagtccagagtttactcttggtatcgatccagttcctgaatcgataccagagcaagttgattcaaagctttactgatttgcacgtcattgattaaat

SEQ ID NO: 165660 - DNA, 351 bp, Glycine max
  unsure (1)..(351): unsure at all n locations
acactaacctcaaatttagcttctctaacactcaaaatctcacacttttctacctacaacattgtcattctcacatttaaccctaaattaactttccccatcatctctaccagttttctatcaacaatttcagcacataaacatcacaaagcatcatcatanaaccctaaaacagaatgggtagctttactcacatcaaacatgtcaagtntagcatgctttcaacanattccttcacanataactacccataggcataaacctagtagaactacccatcatatnctccaaaaacccatacccatgaatttatgtgagaagagtcacccatacctgaattcgaagcccaca

SEQ ID NO: 165661 - DNA, 337 bp, Glycine max
  unsure (1)..(337): unsure at all n locations
cccacaactctcgcaaatgggagagaaatgttcatctaaagcatacaagttcctaatattatcaaatcctaaaatatgagctcttatggagcaaaacaatgtgtgtcttctagagagggcatcagctaccacatttgttcttctctttttgtatttgataacatatggataatgttctaggtactctacccattttgcatgtctcttgttaacttgatatgcctctaatgtacttaagtgattgatgatcactatgaatgacaaattccttggaaacaatgtaatgttcccaagtttggagggctcttattaangcataaagctctttatcatagat

SEQ ID NO: 165662 - DNA, 379 bp, Glycine max
  unsure (1)..(379): unsure at all n locations
ttttcacaatatttacatatagctttccattttccctctattttctttcttttgaaatgggtccaagcagtagaagttaatcctcttttatttggacttctttcaacatcttcaacttctatatttggaaaaattttgcttcttccaccggattgctttgtgcgtcattagcaacttgttgtgtttctaatgaagcaatactattaacagatggatcaatatgcgtatccattttctgtacaacanacaagtaacanaatttacaaatgagtcatgtaaaatngtaaatgcacaaatctaactcttattgtagattacaaatttaaactcatgaatcaccaaccaaacatcacatagctgctccgaacaagattgaaat

SEQ ID NO: 165663 - DNA, 324 bp, Glycine max
  unsure (1)..(324): unsure at all n locations
tatctgatgtgccgcangcacgctctgtggctgatttatggataacctatgtggatgattgggctttcttgactggtaaggtggtgggtaatgagaaagaccgatattggtcgagtatagatattgttgagcttggggggaatatggccatgtatacaatggtatccacaagatgggttcctccctcattcttactcttctcatttgccccagacttcctattcatcaaagcaagataatcaaatttttctcttctcagacccacctttgatcctttcgccggtgataactaaattggcaaagcttgaggcgtgtaaccatgat

SEQ ID NO: 165664 - DNA, 335 bp, Glycine max
gcttatcccatgtctccttaacggatgttgcatcatatatattttcatatgcatcatcatctaatgcttgatagatgaggaagagagctttcttgtctctctttcttgaatcctctaaagtctcctttttgtgcttgggatagtgaagtcttatcttgcatctccttatagccgttttcaaccattttccaaacatcatgtgctccaagaagggacttcattttgatgctccaattatcataggtgcctcccttagaagtggaacttggaaggatgtcgctccattgcttgtcataactatagaggaatgtcttatcataacctaagctcagata

SEQ ID NO: 165665 - DNA, 339 bp, Glycine max
acaacatccaagcgaaacaacatttttacagtacatgtctatcacagccgagcaaaacagagcaaaggctagaaactctgctcaacacatcaaccataatcacagcttttctcacgtgaagaccacaggaacaattccttcgatccaattcgttaaccggtggatggactccaaaattttactggaagtctatagtgcataaacgtacattgtgaccgttgcgatctactagcaaacatccagaactcattctgcactagactttccacagccaaccacacacatagcatttctgcaccaagctaaaatcctgctgcacctatatttgacagcaaattc

SEQ ID NO: 165666 - DNA, 401 bp, Glycine max
  unsure (1)..(401): unsure at all n locations
ctgccgcatgaagctttagccaaggactaccttgattttncctttttagccctnnngagccctgnnnccctttccttgttttgaagctcactacaagccgtaagtgaaaaaccatgatattaccatatccttaagggaatttggagctctggaattgttttgggaataagtgtgggggggttttgtttcattggacaacttgttntgttgactatgctttatgatgatttttgggccatacttgatgtacattgtatattggttaaatgttggacatgctgaatgaaatgttgtttctcaaaggcaaaaaaaaaaaaaaaaaaagaaaagcaataaagttgagtgaataagatcttatatggcacaagaatgatgaaactcttggttctactcttcttgtt

SEQ ID NO: 165667 - DNA, 269 bp, Glycine max
  unsure (1)..(269): unsure at all n locations
aatgatttcgagattgagtcaacaagttcaagatcaagattaatttcaaatttcatgagaagaaatcaagaagattcaagaatcaagagaagtttgatttcaagattcgagagaagatgaattccagattcacgagaagaaatcaagaagacttcttaagggaagtattgaaaatattttaaaaaaaaacaaacatagcacaattttgtttttcacaagagttcttctcangattttctaagttaccagagttnttctctctggtatcg

SEQ ID NO: 165668 - DNA, 413 bp, Glycine max
  unsure (1)..(413): unsure at all n locations
gcttgcaatgtgtaagtgcttctattagtcagncgatccacttttccttcaatgcacaatctttcacacatgaagcctgaaagatgcaaacacgtcgatctattatcagtttcctggccggatggtccaaaacctaattataattattctcataaggttaaatagaattttgttttcttgaaaaaaatacccaacagataaatagatattttttcgtacaaaaagataaatagatactgtgcattanaatgttgagaaatttcaagtcatagttgaggctagctgttctcccttatccatatccttttaaaggtagactggtcagtgtntaacatatttaagcaagtaatgtggtcatgcccacgctacgatattctcttcacaacattagcccataacaatctcctttacat

SEQ ID NO: 165669 - DNA, 280 bp, Glycine max
  unsure (1)..(280): unsure at all n locations
gatgaatgacagccttatgagacacactccanagttccacttctctccctctttgattccttcaatttcgggctcccccctgctctatattttttgctcattgaagcatccgttcaagcttcttatacaaagctcatgttggtggtgaagctctttgttccatggcatattccttaatggatggcacctcctctcacctcttctcctttgtcttccactgcatctccatgggggaaaatcatcattaaaggaccccattgacactcaaagatccaggctc

SEQ ID NO: 165670 - DNA, 336 bp, Glycine max
  unsure (1)..(336): unsure at all n locations
aacaagaatcaagccaaagctattgtgcaagcaatcaatggcgcaaaacacaccaaaagattatgataatggatggctcanattctcacaaaggtaaacttataactntcaaatagagctttccaaaccatcatgacatgttgaggaaaaaacanggattttctaatcacaaaatgtcaagagacttttattntcaaaacaattacccatttcttgaacatatcctataattcaaagaaaaatatgcaaagttgtacatgcaaacagaattgacctataatatttaacttgaaacccaacaaaactaacaaaactaacaaagttacaccaacaaac

SEQ ID NO: 165671 - DNA, 341 bp, Glycine max
  unsure (1)..(341): unsure at all n locations
tctaagcacctgggctgcagcttactgctgcgctagcctttgcttgttnttttttaanantnctattntcttgagaataaacctatactaatctcttgcgttttgtcttatatttcgcagatggcttctatgaaaagaaaggcaccctctacacctaccctagccagattcgataaatccagattcacttcccaagaagcttgggaaagatacaccgacattgtggtgcctcctaagctgttaccacagaggaatgtggtggtctactatacagagtttgatgagttcaaggaggaactcgagagacgccaatgggatgaggagttgactgattttgctga

SEQ ID NO: 165672 - DNA, 397 bp, Glycine max
  unsure (1)..(397): unsure at all n locations
gcaagcttcaagtctgtgaagtgctctctcgatctcttctttcccattcacagacaactcgctcctcctgatgtgaaagggttcacttcttttctctnttcctcactctctccgtaatctctcacacacaccaaccaacgttgaatgatgcttctgattntctctcactagccacaaggttagtgacgaaatctcaaattcctaatctatataaagcttgtgagttttgtttaagtttttgaattagtagtacacttgctgcctgtgacaccctctacccctcacatatatactaataaggaataaaaaaattaaatattaataaaagtattttaaaacattttttaaacaagtcttcaaggggaaaagctacatcatttctctacatatatcaact

SEQ ID NO: 165673 - DNA, 86 bp, Glycine max
gtcgggggaacgcaatgagaagtgctcttgggaccgtacctaaatcagacagcagaattgacgttgtacaatatggatattatgtg

SEQ ID NO: 165674 - DNA, 365 bp, Glycine max
  unsure (1)..(365): unsure at all n locations
tcaaacatttagttcttcgagataagtcctgagagctngaataaattaaagcccaaaaatcaaccaaagtgcgatgcattntgttctttagttaatcatccaatgtgtcaatatgatccacaattagtgggtaaaggttatacacaagtcaaacccaaaataaggaatgttatgcaaattgaggaccagaggaataaaaagttgaagttagagaaaacaattccttttcgtcctctttctcctttcacaacatancccgaatggaaatgaaaacattagacatttctcacaatcatattgaaatgaaagacaaatgtggcattttcatcgtgaagaatatcatttcctttacagacacctcatgt

SEQ ID NO: 165675 - DNA, 257 bp, Glycine max
  unsure (1)..(257): unsure at all n locations
ccacaactctaaaacatagaagagaaatgttcatctcaagcatacatgtccctaacgatatcaaatcctaaaaatcgagctcctagggagaaaaacaatgagtgtctcctagagagggcatcaacaaccacatgttatcacctcaacgtattgggataacatatgaaacaanctctaggtgctctacccatgttgcacgcctcttgtataacttgcaatgccctctaatgtacttaaatgatccatgatcactatga

SEQ ID NO: 165676 - DNA, 307 bp, Glycine max
  unsure (1)..(307): unsure at all n locations
tcatcacacacacncacacatgagtgtgaactgttctaactgtttcgatatgagaccatacaagatatgcataatagattcactcgtatcgctaaacatcttgtatgctggagaaaaagatgtgctactgaagatcttatcaacaaagtgtcgagatgctcgagcatagagtgtacaccaatagtaacatccattgcagaatcaagagatctcgctattatctctgatgacactcattttggacaactgtgtaacaagaaaccgctcttatgagactccgtcgacgtgacgagaatgatctaactag

SEQ ID NO: 165677 - DNA, 337 bp, Glycine max
  unsure (1)..(337): unsure at all n locations
gggatttcaagtttgagaagtgaaatgagaatgggcgtaatttggggtaaactctcctctcaatcaagtctgtaacattgatttagacttgctcaaactggttttaaggtgaaaactccatcgattcaaaatttgacccctcaacacccaatttaccctagaaatgactcttgctttcacatttgtcactncattttctcatttgctcttgccaagctttcctacaagtcccaatggacttttaaactatgatcaacctactttagactccaatttacactaaccctcaaattagcttctctacccctcaaatcttacatttntctaccctacacat

SEQ ID NO: 165678 - DNA, 351 bp, Glycine max
  unsure (1)..(351): unsure at all n locations
accaaaaggggtaggcttttatntttctttntattactaattatagggatgcaatctttggtttgtaaagccataagtccacttgtatgttcttcagataattctggaattatgcttttttcaaaattttcgtaaagaagatctacangtttttctaatttggttagtctgatttccaaagtggaaatcctattggtcataantttatttccatgatcattttctttcttaaagtctggaaactctanntttcagaatagttgtacactagttttgcagagattcttatagcatatactacagtgagctcttagtggtttgtgtggatatcttttacagaattaacattct

SEQ ID NO: 165679 - DNA, 293 bp, Glycine max
catggacaacaaacattgggcaagctgaaccaacaacttcaaacttcttaacggcatcatcgaaacgcaccctacaaggacaatcaaccaaactcccccagacaaccatcacataatcccaagcattttcctgaccaactagagatctacatctcaccttgacattctctgccacgtgaaacctacacaacaagttggcacacccagggaatacagctatcactacattcatcaacgtcagggctctatcggaaacaataactccaaggaggaatcacatcgtaaaaaaagac

SEQ ID NO: 165680 - DNA, 302 bp, Glycine max
  unsure (1)..(302): unsure at all n locations
ttgaaagcaagagccactgctagggtaaatagagtgttgacgtgtcaaaattcgattctacggagcctacgacggggcttaaattcagacaaatacttacccatgantccctaggggtgcgataagacaatttgctccaaaattaccttattctcattcccactcctcaaaccttgaaaatccactaaattgaggggctataaatacctacattttgaactgctatggtttgaagcttgtgtttggcttagatatgattcatacctgattcaagacttgtaagatctaatctggcaaaaatt

SEQ ID NO: 165681 - DNA, 428 bp, Glycine max
  unsure (1)..(428): unsure at all n locations
gagtcacctgaggctgcggcgtgtatcgattactaaagagaatttcataattaattgtcaagagtcacatctgttcaaatgattttttaatagccatcaaaagtctatttatatatgacttagaacacacatttgcttagagtttttcagaacaaaaaggtcttattctctcaaaagcaaaatcatcttatcctcttagaaattccttggccaatacgcttgcaattcaataagaaattattagagcgctcaattgttcaatctatctctttcaagagatatttcttcttctcttcatcttatttcanaaaagggattaagagaccgagggtctttgttgtaaagcaatatgaacacaaaggaagggttgtccttgtgtggttcaaaacttgtaaagggcttttgcagaaagtggaactctcaagcgg

SEQ ID NO: 165682 - DNA, 358 bp, Glycine max
tcggaagaaagtgatgaggtacaagtccttatgcagagcttgaaagagcccgagtcgtcgaagagaagttcaagtccatagccatcaaagtctgaaaagagtatgatgaactaagggacgtcaatatggccaccgctgatgccttggaacgagaaaccaagaaggcccaaaaggaaggacacgtgccagcaaagttttgaggggctttatagggcagcaatagtaagctcaagctccgaagaggtgaaaggaatcatcacgggtcaaaggcatgatcttgaaggacgagctaaaggcttaccttacgtcgaaaagaaatttgtcccaacagttaagcgagactgaaagggaatatgtg

SEQ ID NO: 165683 - DNA, 411 bp, Glycine max
  unsure (1)..(411): unsure at all n locations
agctnnttcctaaaacgcatgggttgcttatcncattgctctggcaaaagattaccagaagacaattttgaaaatcatgtttttaaaagggttttgaatttgaattttgaatcatgtaatcgattaccagatgtttgtaattgattaccagcaaggaaacttcatataacactgtgaaaagtcatgacccttcaaaatataactatgtaatcgattaccaaaaacctgtaattgattatcagtgaagaatttcagaaattttttttttgaaaagatacatctcttcaaaccattttgaaaaggcacgaagggcctaaattatgtgtgcctgacttcaaaaagtcagagagagatattctaagataacttaattgccaaatgcactctcaacaactcttgggcaaacacttg

SEQ ID NO: 165684 - DNA, 355 bp, Glycine max
attgatcataccattagtgtgaatttattatttcgtcagctacatgtgatgaataacattatgcttcgttaattgttctgtcaaaaaaaaaaaatcattatgcttcgttgtctttcttttcccatttatgcaaaattaatagttcacctatcccaactactcctaggaccaaaaattctagcctttgcccttagtgagatattttctagacgatggcctagttcaactatattcttaatttacatttctggcacaatatttgaacaacactgtatggcaatatatactagattctaacgagcgtcctatgtggttggagttttgtatttgattattcgtgttaaaatcttatatt

SEQ ID NO: 165685 - DNA, 412 bp, Glycine max
  unsure (1)..(412): unsure at all n locations
agctntatgatatctaatgatatttatgatatgtttgttattngntngnttttcccttttattgccttagtaccatccttttgcattatctcatattgtttttttttcttcattatgtatcagatttgatagtgactggaaaaagattgaagcatttgttgtatcaaagacagtcatccaggtaatttcaaatacaagttgtaattggttatttacattagctgttgtttctgggttgttatccattaaatgttgtggattgaattaggcatgttatagtttttgaagtgtgtttgattatgttacattaaggatttggcactttccaaataaagaattggttattggacatgaaatgccaaaaaaaaagaagatttcaggacatgaagtggttccatttgtcaaatcacct

SEQ ID NO: 165686 - DNA, 355 bp, Glycine max
ttaagatattctgcaacatcattcttattttcaacaagaacatgctatttcttgatattggtaccttggtgattagattatttctcccgtctctgatggaaagactagaatctttcatgtgaatatcatagcctttttcaagtaattgtcccaaactcaaaatattgttcttcatagttgggacgtagtagacatttgatatgaattcatgccttccatctttcaaacgaattgagatcttacctttgccttttacaggagaattagaattatcaccaaatgagacattgcaacttactgattcgtcaagatccacaaacatgcttatttttctacacatatggttgcttgcact

SEQ ID NO: 165687 - DNA, 413 bp, Glycine max
agcttagcacctggaaaccaaacgctttataactatcttgtcgatgctgggcagagggtatgcgtctttagggcacgccctgttcagattagtgtagtcagtgcacattcgtcattttctgttggccttttttaccataatgacgttggtgagccaggtagaaaacttgacctctctaatgaagtttacattaaggagcttgtcgacttcttctttggctttactttgttcttctcccatcttccttttcttttgtgatattggtttgacttgtgggcaaatggcaagtttgtgacagattatgctgggatggattaccgcatgtcaaacggcttccaagaaaagaaatccatgtttttgtgtagcatgttggcatgtggcgatgctcatgactggtgaggtactgagccgca

SEQ ID NO: 165688 - DNA, 360 bp, Glycine max
tgaaggcaaactggatgcattggttaacttggtaacccagctggccttgaatcagaaatctgtacctgtcgcaagggtttgtggtttgtgctcctctgctgaccaccatacagacctttgcccttccatgcagcaacctggagcaattgagcagcctgaagcttatgctgcaaatatttacaatagacctcctcaacctcagcagcaaaatcaaccacagcagaacaattatgacctctccagcaatagatataaccctggatgaaggaatcaccctaacctcagatggtccagccctcaacaacaacaacagcagcctgctccttccttccaaaatgctgctggcccaagcagaccata

SEQ ID NO: 165689 - DNA, 374 bp, Glycine max
gacaatataaccttcttcccaattgaaaatcctaaatccttagatgaaattaaaaagtaataaacattaagatcgaaaatctctaacaatagaaagcatccaatggctatggttatgtgaagaaatgttagctttcactgcgttttcttcacatacccacaaggttctgatagagagatctccaatccattttcctcactagtgcttacagtgaccttctttgtatatgtccaaatcacctttaaccaatttttgtcatttttttctcaatcagtgccacccaatatcatctcatatacaatcattttggattatgtgcttggaatctatttaataatgctgattattatctccaaacaggtcaattaccgaat

SEQ ID NO: 165690 - DNA, 355 bp, Glycine max
tctacttatgtggcagggcgggttttcttcactttcttgtttccaacgcgagctcagaccactgttcttccttcccgcgatgcttcttttcatgtccgcctgagtgggcttatatcctaaaccatacttcccacgattcccttgggtttttatcagactagttatgccgccattgtctttgcctaaacccatcccgggttcataaccgttccccaacataactcgggccatcattaccgccgcctcggacagacaaggttgcccaaagagggagtccacggaggaaatgctgaccacctcaaaagactggaaagcggtttctaacgattcttctgcggcttccacataaggcatg

SEQ ID NO: 165691 - DNA, 364 bp, Glycine max
  unsure (1)..(364): unsure at all n locations
ggtccaaggataaaagggatgccccacattatttccatgacacatatgcaaaaatgatgatttggaaactttatgcaaaactggtcatgcatgcacctatgcggacactcaagtgtcaaatttttatggtcatgtgatgctagggctcaggattcgtttcctctattttaatcaacccaatgtttccaaaatatgttcttttatcaatgtgtgcattcatccgagtccatttctggcgtccggagaaatgtcacagcattcacccttcagtgtagacacatttttcaaaaattggttatgatcaatgaactttttaaagaanagttggagatcgtctcttttaaaaacatgctgtttttagcta

SEQ ID NO: 165692 - DNA, 114 bp, Glycine max
tcaaaaagagccataccaatactgtgtttggtagctattgttgtaagtaaactcaatcaatggcaaacaatccatccagctaccttgttgctctacaatacacgcccgaagtat

SEQ ID NO: 165693 - DNA, 391 bp, Glycine max
  unsure (1)..(391): unsure at all n locations
agctatccatcctgcatttcttatgttttagccgcagaagaatcgttagaaactgctntccagacttttgaggtggtcagcatttcctccgtggactccctctttgggcagccttgtctgtccgatgcagcggtaatgatggcccgagttatgttggggaacggttatgaacccgggatgggtttaagcaaagacaacggcggcataactagcctgataaatactcaaggaaacccggggaagtatggtttaggctataagcccactcaggcggacatgaaaagaagcatcgcgggaaggaagaacagtggcaaagctcgcgttggagacaaaaaagtgaaggaagcccgccctgccacataagtagaagctntataagcgcgggtctggg

SEQ ID NO: 165694 - DNA, 360 bp, Glycine max
ttgagccaaaatcctgactcatcattattcttgacccagggtgagaatgtcaatccttaccctcggaagcaaaaaagaatagaagggaaatttccaatcaaagaaaagagaaggaaaatttccaatgaaagaggaaaaaagaaaagaaaggaaattcccaatcaaagagtgggagaaagaaaaagaaaagaaagaaaattcccaaccaaagaatgggagaaagtaaaaagggaaggaagctcctggtcaaagaaaccagagaggtctttggaccagataatatctgaacagtacagaattgtcaccaaatgaacaaaaaggaaggaaaggaaaccacgacctaaaatggtcttctccctt

SEQ ID NO: 165695 - DNA, 405 bp, Glycine max
  unsure (1)..(405): unsure at all n locations
agcttattcttagaggtagctganngtgnntgttaatcngaccgnctatgcaaattaattctatagagaacgggtctaagcaaattagctaaatagattttgcactattaaaagtaggcagtgctgaatttcaattctggaaggtttggttagatggaagaatataagagaattaatactgatgatacaggtattcacaatactgacgagacctacagaaaatctaggcttcctaaaaaaaattaccgactcaaccccacaaaatttaatagacaccatagatcgtatcacgtttaggaacaaggcatgaaccaatacaactatatcccagtattgtgattgttcccagctagaattagagaaatttctaaccctcggctaaaagccttggtaaacattaggcga

SEQ ID NO: 165696 - DNA, 350 bp, Glycine max
tgaagagcccgactgagtttattttgccttccccgacaggagtcggagtaatgcctccgaccacaacataatacccatcttctgatccttgaagctcatcaagaaccgacaacaaaacctgtgcatgtgcatccaaatcactctccagctaagcaataatacagaaattatcgcatgtatcctcaagttgttaacgaaaaagaacttctagggtacctggttagttgcatgtaaccgaaatctaacataaaacattatttgttacataccataatcaatcataaacaaataaactaataatatcatgatattcctctaactcaaatctgaatctttctcaagtgcagaaa

SEQ ID NO: 165697 - DNA, 274 bp, Glycine max
  unsure (1)..(274): unsure at all n locations
agcggcccaagagggtgtgttgancacttgttacgggngggnggcggccagaagatgtatctggaggatgtttcctttcatacgatgctgaagcanaagcatatgtctgaccttgtctaggactcggcctatactttcccttaaaggatgtgttacacttgctgcaccttagatcctggacaggctgactataccacttaacgtccctccatattacagctcaagatctaaattccctgcaggaccctacgctttataatccactactagaaat

SEQ ID NO: 165698 - DNA, 339 bp, Glycine max
cttgggcgaggggacagtttttttttctccaaggcacgggggggcgtgaagatcgacaagcctacatacagctcgaccatccttggcgtttatctcattaagcgaatgcgtccgacctcgaatccaacatcatgcaattcacaacgccttggagatttgaaattaacacttctcggattcgcgaaacattattcacacattatcatagctatacccttctctcaaatgctgatagtgtcgatatcatactctaacggcgttaccttctgcacgctttggcgcactctgataccctaaacacaccttgctgatcgtataccctcgtgaatatcacaccac

SEQ ID NO: 165699 - DNA, 407 bp, Glycine max
  unsure (1)..(407): unsure at all n locations
agctttctgcagactcttatgccaattattaagngctgctcatctcttagatcaacttgttaaggtataatataataaatttctcctgaactccaacaatcctttgagcagatttacatgtgtgcacaactgtacatatcaaatgttttttgaataggtattgatctaatagtgatttgaattactgttccttttgattaactaatgattaaatgttaatttattcaaacagaatattgtgactgaaagtgatcagttcaggtgccccttcttctttcttctatgctatatgtttctctgtatgactgtatctgttgtgttttaaatttaaaagacttgtcaatacagagatctcagactgatttgtaatgcttcatgcctccattttactctcttgattgtcagat

SEQ ID NO: 165700 - DNA, 108 bp, Glycine max
ctcttgctgagcatggtatctctttagtcgaaactcacctatctttccactctaaataaattactgtaaaggcttccaccctcgaactttagaccacaaaaatgatac

SEQ ID NO: 165701 - DNA, 405 bp, Glycine max
  unsure (1)..(405): unsure at all n locations
agcttganaagaagaatgtgcttctgtgnatttccactaactaaaacaaagattgatgtcagtgtggatacaagtaaagtaattgaagaaaaatgtgttgcttcaagaacgcacatccgattacacaattctaaattgctctagctattattatcatagtatattttgaatgcaaaatgcaaaatttatcctattattgcgttgcaagtgttaagaacattcatttataactatcaacaacaatactttgtactttgctattaaaattggtcaccgtatgaaccaattttgattattaataaaagtgttcttccaaatttactagccgagtaatctaatcttctctttcatctagtggtagtatgatctgtgatcctgttcttactgtgcgataggggtacctat

SEQ ID NO: 165702 - DNA, 352 bp, Glycine max
ttgacctttaacacttctactaactttgactgaaaaacatgacatgctatttgagcattgagctttaaaaactctagtattcttttaagattggttggataatatcattatactccatgtttgaataaaatattttgtgttatagatatgaactttttgttttatagtgataaactatagtttttaagattttgggaatgccatcctttctgtgttgcatttgtattagttgcttacatttccttgctttattatagaaacaaaaaactggtggtaggacaaaagtccttttggacaacgttccagttcacaagttggctgatatatttgtagctagttttgagataaaatt

SEQ ID NO: 165703 - DNA, 373 bp, Glycine max
  unsure (1)..(373): unsure at all n locations
agctngatgcatgagtcangaagggttatagtttattagttaggcacatcatatggcatgaagctagtggtgtcaatttacagtgtagggtataatatggcacacacgttgggtagaaggtggtacaagtccatggggatacaatggggggttttgccttgtgtagaggcatccagtttacatattaactgagggtagttttgttagcaaaacgttgggtgatacgaacaacatatgaacaatagaaacatatttatataatggtagggctataaggaacaaaatacactaattttttttttgttctaggtgtttctttgtttattggtatttctatgttgatgttgttaattggttctctttgtaaggggtt

SEQ ID NO: 165704 - DNA, 358 bp, Glycine max
  unsure (1)..(358): unsure at all n locations
agcttactatgactcattattnattnatttattatttatgacaatcataggtttcgagatccggttgattttctatcattgatcatctaagaaactcttaaaatttttacatgtgatatcggaacatagattataaaatttatgattctctaataatgatttattttttctcaattatgaatgaatcctaattatcaaatttaaaaattttatttttttctgcggctatgtatgatattttattattgttgttgaattttcgaaacaagcttacgaagtggtgttacattgcgtgaacgaaagctttttattttgagttgaaaatttttggatgttaaagtggtatattccaattatg

SEQ ID NO: 165705 - DNA, 402 bp, Glycine max
  unsure (1)..(402): unsure at all n locations
agcttaacaatattagatcgggcagttatgatatctgtgtgatagncagngtaaaagtaacataggcagcaacagataaggaagtaatcagcgcaaagggagctccaaatttgtaggccaatatacctgctaccatagatatctggatggatacatgttaaatctgctgaagtagttcaaaaaaaaaggaagcaagagttgggatgacaaaataaatttcaaagatcattaaaaaaaaaatcaaagacaacaagaatccacaaccaaaaatgcaattcctgctaaatatattccatgtttaatagtgagcaacatttgggaatacataagcaacaagggagtaactgagacgtacctctaatatggtgggtactacatngaacaccatagaggagagaatga

SEQ ID NO: 165706 - DNA, 360 bp, Glycine max
  unsure (1)..(360): unsure at all n locations
gctngtgcggntaagggattgatngaatttaatatattaatcggcctaatattatggttaatttctgtataaacaaaattggtatgtaatatgaccgacagattattatcgattaacttttccgatggatatctccatgtcaaattattggcagacatgtccatgaaaaattaccgaaaaatatttttatggaaaactaccgaccgatttttttgtgagagcaccgattgattttttagtgggaaattatcgacagatcttttcagtgagactttttttttttaccatggtagttttgggggactttagcatgtattatgctacgcttcgcactaatattattaataatattcattttgc

SEQ ID NO: 165707 - DNA, 387 bp, Glycine max
  unsure (1)..(387): unsure at all n locations
agctnnaagacaggtcgtaacacaagttcntttgttatttaagggnngactttaaatcctataacagcttatattacatactcctgcaggatttctattgatattctcaagtagttttctctaagatacatcactggattctgtacatactacaattgtcatacatactgaacccaaaacagaaaatgtggcagtttatctgttacaaataacccatctagttgataacataaccatctaattgattcatgatcatctggacttgggtaataacttctattcatatgtaaactcttttctctctatctgtgaataatacacaataattcaaattgtacaaagttttagtaatatggctctacatcatgcacatgcatgaataattgg

SEQ ID NO: 165708 - DNA, 261 bp, Glycine max
ttttttttcgcaaatccaagaccattcatggtgttaaatgcaaacgatcacccttattttaaatcgttccacacacatatgctaaaagaattacttgggcttaacataacttgccctgtttgcaataaaatattctccaatcccggcctcttgttcggcgctatccacttatgcttaacctaaatatactatataaaacaatttgcccaaaataaattagaacagttcaatactcgcgtaattttcacatttttgggaaca

SEQ ID NO: 165709 - DNA, 343 bp, Glycine max
tgacctttttcactaattttccaaccaacacttaaagcgcttattctagggaattcactcaaactacctggctgatacgaactgaaatcgttgccaaccaaaagttacctccaacacccaacaagtcaggcaccatttggtctcccaaaaggctgatgctaggctgccaatagggcccttattacaacttgaactaacgcccatctagttgattaacccaatacatatttttggtcatccaactttacaaggactgcggcattatttacacaaactacacactctaacattgaaataaagtggaggcctttagtcctccatattgggccatgaatcaactcac

SEQ ID NO: 165710 - DNA, 355 bp, Glycine max
  unsure (1)..(355): unsure at all n locations
aaaaaagcgccagaaacaagtaactagaagaacgggacnngggaaannattttttttttcttagctggaancgannaccatcaagatgtaatcgattacacatcaacagatgtgacttcattttaaattttgaaaatcaaaatgtttagaagctctggtaatcgactacaagtattgtgtaatcgattacacaagttgaaaatgttaaaacacaagttgtaactcttgaaatgtgaaatcttaatgttttaaaacactgtaatcgattactaccttctggtaatcgattaccagagagtaaaactctttagtaaaagattttgtaaaaaattcatgtgctactcaatgttgtgat

SEQ ID NO: 165711 - DNA, 348 bp, Glycine max
  unsure (1)..(348): unsure at all n locations
accccacnatgaggcaggtcaggcttttttatttttttgccgccaacgagagcgttgaccaatgntctaacttcccgccatgcttcatttcatgtccagcatgagtgggcttatagcctaaaccatacttcccacgatttccttgggcatttatcacgctagatatgccgccgatgacttttcctaaacccattccgggttcataaccgtttcccaacataactcgggccatcattactgttgcatcggacagacaaggctgcccacagaaggagcccaccgaggaaatgctgaccacctcaaaagactggaaagcggatattaaccatccttctgcggcttccacat

SEQ ID NO: 165712 - DNA, 355 bp, Glycine max
  unsure (1)..(355): unsure at all n locations
gagccaagaaatatgngtctagcactaactatcgatgattttagcccttgtggcctattgagtacgtcataatgtatggtcgattattcttattccatacaacatgcctccatgggtgtgcatgaagcaataatcattcataatgtcaatgataactcctggtagaaaaatgcccagaaatgatatagatgtctacttgcaacctctaatcaatgagtagtggacaacgagtgcggatgcctatgattctttcaagcaagagatttttaattgcatgcaactttgatttggacaactaatgatcctcttgggtgagcgacactatatagatgggagaactacactggacttgctt

SEQ ID NO: 165713 - DNA, 308 bp, Glycine max
  unsure (1)..(308): unsure at all n locations
gggaaagggagggggaattacagagnacaccccgcccccgcgacaagcaaacgagacaaaagcagagagggacatgccgcgacgatccctcaaagccacaggaacgcctgccgagaggatggaagacaagccgaaaaatattcgcccagacgaatagcaaaccatgctccagtgatatcacgaaatgcgatcaaaccgagaaactatggatggacccaatcgacgaaatcgttctaagttatcatgaaacacatgctggaaatgagtgtgcgccagacaaagcttgggaccaacaaaaggtgtaggca

SEQ ID NO: 165714 - DNA, 364 bp, Glycine max
attcgaggagactttaagaaacaatatgtttccatcataaatttcaacagtactagattttgcgcgaagagatctacgctctcctttactagtagggggagcttgcttattatcaatcaccttgtctttgaaagatattttatttattgtcgttagatcaagtagttttcctagagcttcaatgtagtatagtactcttaagtagagaaaaccaaatccccatatcttcctcccccttaaagattgctctgttgaaaagaaatacatacaggttcctatttataaaatcaaattatctaatttatcaagattaagaaaaatgattaatttaattgataataataaatgcactaaatttatatat

SEQ ID NO: 165715 - DNA, 354 bp, Glycine max
tcccaaaaaactggttaatgcatcctaatttgtcatgcaattcagaagctggtctggcatggattactatgagaatgagattgctgccttgtgggataatttcaaagtatgttgtttgtttgaaatctgtaggtgtatacgttactatgttattatccatctatttaccttaactcctaactactatacgaccatcttatctttgataacctctaaaggtaattcgagcttccaaatctgattctcggttagcaaataacaacctgcctccagagattcagaagcttcgctgccgtgcatgttatgatgctcttcgtttctctccacacattgaaaaaatgggaaaagtatata

SEQ ID NO: 165716 - DNA, 394 bp, Glycine max
  unsure (1)..(394): unsure at all n locations
agcttggaagaagatgttgttcccatatatgggnacnangggcggcgggcgatggtgcacaacaagttttcacaatcacatgcgcgcataaacccaccatcccctgtagcccacctccaactgagctcacgtactcccacgtagcccatatcctcgtttctttcaacaccgggtccccatcaatcctcccaagcttccccaacatcaaagtaatgcaacattcaaacagcacaaactatcacagccaagaaaacagagcaaaggcagaaaactctgccaaaacaccaaccaaaatcacagctcttttacttaaagaccccaggaacaattccctcgttccaattcgttaaccggtggatcgacttcaaaattttactggaagtctctagtacat

SEQ ID NO: 165717 - DNA, 293 bp, Glycine max
ctttgaagaaactttcctaacttaaaacattttcttcctctcacactatgatgaagtacaatgcaaaatagatatcatgtgtactaagatgcaacactgtagctaatagccgatacagataccactcaaaagagtgaggcatgttaaagccaaaacttcttcaaactttagccttaagcttcaagctttatccttacgttgctccatgttgctactcccttatgtctaacaatctctcccattttggctttgatgatgcctaacttgaatacgacattgagtgcatttgaaga

SEQ ID NO: 165718 - DNA, 424 bp, Glycine max
  unsure (1)..(424): unsure at all n locations
gatctctaagcaccgcggctgcagctatgagaagtgtattcatatcatttatnagcacattngatcttctgcaacacttatagactagagattagagattaattcacatttcgcaatcatggttagcaactcttggacagcttgtggattgatagaacaaaagtaatgtaaaggcaaaaagaacttgactagaaacatatgtgatgaactaaggtctacgctaatactggcaaaaatgtcactgttttttttttttaaataatgcttttataaccattctaaaaagctgttcaagataatgtatttttgtactagtgatagaaatttctatttttttgccaatttttatttttttgtaaaacttcattgcaagaatttccagccatttttttgtaaggaaaaaagagattgcatggattactac

SEQ ID NO: 165719 - DNA, 356 bp, Glycine max
tggagagagataacattgatgacgttttttttcatatagcgcgccagataaattcaatgtattcatttcctctgatgcaactaagatttccttgagagaggaacaaccactaagattaagttctatgagagattttgaatgaaagtgaagtttttctatcactctacattgacttgaatccaaatatgtaagcttgtggagagagatgacattgatgacgacaatgcatatatagcggtgtctgataatttcaattttgtcatttgctctgatgcccttgagatttccttgagtgatgaacaaccattgagattaacttccccgagagattttgattgaaggtgaagtctttcaat

SEQ ID NO: 165720 - DNA, 445 bp, Glycine max
  unsure (1)..(445): unsure at all n locations
tttgacgccccgggatccttaagtcacctgcggcatgcagctgcctaaaaacctgaaatngatagaaaatgatnatnaaacacaaaatgaaaatactatgtatttattaaccatacttaatagaaaatacttataacactattttataaccataaattgggagagtttgatacaatttatacaagttttatacacaaaagatagtcatttttaccgactaacacctacccgcaagggcattggataaagaagactccaagtagattaggccaaggatccaagggaaggccctagggttctcatgagccttatggtagatttcgggcatatgggttaagtatgagcctgctatctttgtaaatattagaatagggttttccttcttttgggccttgtattctggccattctagtagcataaggttttagccttgtatttcaggata

SEQ ID NO: 165721 - DNA, 357 bp, Glycine max
tgctctaaatttacattgatgtttgtttttattggaggaggttgtatgccatttttgttttaagagtagcatcccttggtaaaactaactttccaaatgtttgccttcgcaggaaatggccccgaggaagcttgcctcaaagaggtccaggaaggataaggcggctgaagggactagttccgctcctgagtatgacagtcaccgctttaggagcgctgtacaccagcagcgcttcgaggccatcaagggatggtcgtttctccgggagcgacgcgtccaactcagggacgatgagtatactgatttccaggaggaaatagggcgccggcggtggacatcactggttactcccatggc

SEQ ID NO: 165722 - DNA, 398 bp, Glycine max
agcttaattaagagtaacgtgcaagattatttatctaaaaaaaataatagacagcaataggaaattaaagaagtagataaaaattcctttactccaaataatgtgcttttaattagttcatagatctatgaatcaggtagaaagtttagggtatcttgataattttatttttttaaaattaaacaaaaagtacattattatcaatattttttgacttttttttatcatccaatatttatagaattttaaataaacataaaaaatatggatgaaaatagacacctacctataagttcgagaagtaaaccaaaaaaccattaaacaattattgcaaaattatttactttaaaaattaacaatactaattggttttcttttataagataaatggggcaaaa

SEQ ID NO: 165723 - DNA, 296 bp, Glycine max
ttttgcacgaccccacctggactatcgtgaccgcacattgagttcaaccaccaagctcgggatggattggtgtgggcccttatgcctaggacactacaatattgaaccatgaaccgagcaaaggcacgacattaaagccaatatattggctattcatcgagaggccctaattttggactggaggggacaccaaaggcctctgaccttccatcccttgaataaatagagaggacgggcagagcatatggatatttcatgtctgcaagagttgaacgatgaaaatggatgactagcgc

SEQ ID NO: 165724 - DNA, 412 bp, Glycine max
gatcttaagcaccgcggctgcagctatggaaaactcttggatattacacaatatcaacaaaatgaagattgagtaaacgttaaaaaactagaagtacctccattgcacaaagatagtcatttcagaacgtgaggctcatcggggaccggcttgtcgaagccctaggcatgtgcaccaagatgagcaaaacgaggatgcagacattagtggaagagccttcgtgcctcatcgattactggatgcaagaaacgctcagggaaatcaaggaggccaagctcgccggagacatgtcgcagctgttctccaccgacatcgagatcagtggtacctctttgactttctcttcgcggcgcaggacgcatccacttcgtcacttctgtgggcggtggcgctgctcgaatgcacgcgagct

SEQ ID NO: 165725 - DNA, 352 bp, Glycine max
tgaagtggagtttttaaagttatttttgtttttacatgcctaattcctttgagtgacatttgtattggttattatcttgattgacggatcttagtacatttgatatatgttttgcatcatacatcatcattgtttaggtgaaggaaattttctaagttagaaaaatttcttcaaaggaaaaaactctctattttaatcgattacaaccaactgtttgaagcttgtagagttgagtctcgtattggtttaatcaattacatatatctcacaatacattacactgttatttgagacaatgactaatttagtcaagagtctctgctttaatcgattaccaagtggattaatcgat

SEQ ID NO: 165726 - DNA, 378 bp, Glycine max
  unsure (1)..(378): unsure at all n locations
acccaagnnngacgaaaattattagaagctaaaagttttagctcagccaaaactgcgaaaactacaaccctccttctttgcaaatccaagcttttggctccattaatggctacgcaagcatccaaaatcataataaacatatcaataatcaatatttaagcttctaaatactaaaccccaacaaaagaactcaagattcaagccaaagaactcaaaataatcataaagaaagaaaaagggggtaagcttctcttacatacaacatctccaagctagattgagaagaagaaaagagagaatttgagctcactcaaagaacttggtcatatcaacaatatcatcacctcaccacccgtggaaaaacacaatcaaagaaac

SEQ ID NO: 165727 - DNA, 355 bp, Glycine max
tgtggactatacctccgaccgaactctgttttgtttctatctcggcccaagtttattgcgggttgtagcaccggctccacttccctacctgtattggaggcggccgccgtggcattatcctctatagttttctggagttttagcatggcctccgtgatagaaaccatttgttcttttaaggccgataggtcagccttcatctgttcttgcacgccctcttcattatccatttttctggatcgggtgttatagggttgcctttgtgctttcttagttatgatgaatttcctaaagaaacaaacaacggtgagtatgccaccaaaacatgaatatgcaaatgaataatcggagcact

SEQ ID NO: 165728 - DNA, 419 bp, Glycine max
  unsure (1)..(419): unsure at all n locations
agcttatgctgcactagcactagcaggttctttaatgctaccaatataatcttgaaatcaatgattcttgaggtaataccatagtaactttctccacattggaaaaagaacgaaagactttaaaattatacaacctaccaaccaagggttattatgcaggcctttaaatgctacaattattatatcgaatccattgagtcgagttaatgctacagcaaactatatacattggtaaaagaacatgagattgaagttatacaactaggcagtccgggattagtacaattcgtcataattatacaggatttgaggctgcgaattttctcttggattaaataaaaaaaaaaatgcaagaatgaggatgacttcgaggcattntggtcaaacactatttcaagatgaatttaccgaaataaggg

SEQ ID NO: 165729 - DNA, 290 bp, Glycine max
  unsure (1)..(290): unsure at all n locations
gatatgattggcggcatgagaattttctcntctataaccttccgaggctgtcaaggatcatcaccgcaccatctttgatgctctcgtcaacgattctgcatcgcagagcaaaaccgccaactaacaaaggatcgccaaatcactataatcataataataataatagcaacaaacagtgaagcataaatcatctgcagggccacaactagaatatgcaagctgtgccgtgactatgtccacgtgtgcataagccaaagactaaaccactgaagagaaaaacatattgaaga

SEQ ID NO: 165730 - DNA, 390 bp, Glycine max
  unsure (1)..(390): unsure at all n locations
cgcaagcttgngctactagccctcaccattataattagatgttattgcanaaccattatttttatgaagggttgatgttaatggaaaaaagtatgattcattcagccagtggaggcactttaatgggcaaaactcctgttgctgctagacaatngatttccaacatggaagaaaattaccagaaatttggtactagagttgctgcaccaaatgaagtttctatttctatggttgctgataatcaaaggctggagaataaacttacagagttgacatcccttgtgaggtagctagccattggtcaacatcaaaatgtggcgcagccaatcaaccaaggctatgtggtatctgtagcgctcctgatcatccaatagatgcatgctccacact

SEQ ID NO: 165731 - DNA, 363 bp, Glycine max
  unsure (1)..(363): unsure at all n locations
ctggatnactcggggagggcgcgtcttctattgttacagngggccatatgaagctgaatattacatttaaaagtgtattatggaattgttgacgcttgtgacctacgacctgatagactacctgcactataacgcgatccactgctagttataggaaggggcgatattgcagctcaaactcaatcacaagcgagacaagccgatagagagggtgatgctgaacctacttattcaccgctcgatataaggggggatgacgatctatacttggatgatgagactatagcatcgtttatgtctaaaaaaaagcaaaggccagtgtgcaacctccaagtgatgaagataatgagccgtcagacaaag

SEQ ID NO: 165732 - DNA, 414 bp, Glycine max
  unsure (1)..(414): unsure at all n locations
agcttanccgaatacatatcgaatgttttttanctttgttcaaccttggcaagcttagcagaccaaatcaacctcagatgcaagggttgggcactaagcatgagacttgcatcttagcgcatgaacagaaatgcgtttagcgcgaggtttgcgcttaacgaaaagactgtttttcagaaaatatttttctatgttatttttcaatcctttttccatgaaattgaaacccttatgttaaacatccaaagattagctgatatactcctatgtacatactatatagaaagttccaaatgatttaaatgcctgaaaataaacaagataatagaatttaaaactgggttgcctcccaggaagcacttctttaacgtcattaacttgatgcttttaccttactgcgtgatcttatgtttt

SEQ ID NO: 165733 - DNA, 369 bp, Glycine max
gacttatgaaactaagcttagcattatgttggttcagggttttttattagctctgataaatctgccatatactcatccgatattacgcctcatgagctttctcatatttagcagcttattggatctagcttgagtggcttcccttttagatacttgggtgttccccttttatcatctagattaaatgtatgccattatactcccttgctttccaagattactggcctgattcagtgatggagcaggaagtctttatcttatgcaggtaagctagagttgatcagagtagttattcaaggaattgtgaatttctggatggggatttttcctttgcctcaatctgttctggatcggatcaacacttcatgt

SEQ ID NO: 165734 - DNA, 325 bp, Glycine max
  unsure (1)..(325): unsure at all n locations
tttgatttctaaccgtgtatttggctatattattatggcatttgaacaatttagtatttctttatttgcatggtgtgtttgaaaaattatgaattatgttatatgactatgtgacttttctatatatttgatctagtcatgtttcttgcttcatgattggtttgtatttttccatgattgttgcgtgaatgattagttgtatttgcatgtttcatacttgttacgcactttggctttctgatgattccaaatgggagacacacatggatggaatcaaaatctagcgcgtgttataaccataattntaagtgaatcattaattcaa

SEQ ID NO: 165735 - DNA, 357 bp, Glycine max
  unsure (1)..(357): unsure at all n locations
agcagatgccactctactctattttttnattttatacgccagcaaggaaacacaagtttattcaccaggaaaacattgttatggaaggaaattgtagtgatgtgatttaaaagatccttccacccaagcataaagaccctaggagtgtaaccattccttgtgcaattggagaagtcatagtgggaaaggctcttattgacatgggagccagtgttaacttaatgccactctccatgtgcagaaggttgggagatttggagatcatgcccactaggatgactttacaacttgttgaccgctccattactagaccatatggagtaattgaagatgtgctggtcagagtaaaacatttta

SEQ ID NO: 165736 - DNA, 376 bp, Glycine max
  unsure (1)..(376): unsure at all n locations
gccaaggaaaaccgggcaaatgtatcttcatccaccgattgataaaagaaaaaaagagctttcttgtctctctttcttgactccttcaacggctcctttacaccttggcttaacaaggcttcatcttgctcctccaagccattctctacgatatcctacacatcttgagctccctgatactccaattatcatagttgttctttgtgagcatcggcatttggaaaggaaaacctccattcgccatcttttgaggatcttgaagctctgataccactttgttgaaataatgctttttatgtttaggaaaagggtttaggaatattggagacnttgaatagacacttgatagaaaggagaattctttatggaggagaga

SEQ ID NO: 165737 - DNA, 220 bp, Glycine max
tatctctaacctatcttcgagatccttttcatctctttaacagatctttttaacttattcctctcattttccaaacgcttttttaacactttctgtgcaaaaaaagcttctgtcaaaaactcggctatcatctttttcatccacttactcctttgcaaagaaccaagaccaacgctgaatttttcggctctctctccttacaaaagattcaaagactacc

SEQ ID NO: 165738 - DNA, 199 bp, Glycine max
ctacaagacatgcttcacacaccctcctccttctggacctaacaagagaagaaaattaatgaatctctttagtgctggagttgaagttggtagctactcggcagctgaaattgataactcattggattattctcaaccttagctgtgttctgatgatacagtgaaaccactcagatgatacagtgaagcacacaatata

SEQ ID NO: 165739 - DNA, 355 bp, Glycine max
ctcaagcttgacagggggtgggataattattatttttataataataaatctattgtatcaaattttatcttatccagattttattctatctagattttattttatccagattttattccatctagattttatttcgtctagattttatttcatccaatcttatcttatcttgcccagattttattttatttcgttcgtgggcttagacttaaaatagatttgtgagctttggggcagaggacctatataatagcaccaaggttttagtttaggaagtttttttttttggagaggagaataattctaggattttagaattccagtttttattactattcatgcacactgttcacgt

SEQ ID NO: 165740 - DNA, 361 bp, Glycine max
  unsure (1)..(361): unsure at all n locations
cccaataatgtngtacaaggcttggattttatagaaaaatcactctgttcgctaatacaagtggaaaggggcagagtaatttgagaataatgctttggattgaactacaacaggaaagtttcagcaaaagtgaatatgaaaaaatacaagataacacaaccaagtacaagttacaactaatagtcaaataaaatgagctgttttctctccaaaaaagtgtcagaaaattataataaaaaaaccatcttctcagaaattaatcaattctaattattgtttgtaactatctaagagaaaaacaacaaaaatattttgctgctagaagattcttctgaggataacaaggaatatggcacgaaat

SEQ ID NO: 165741 - DNA, 360 bp, Glycine max
  unsure (1)..(360): unsure at all n locations
tatagcctactcaagcttngacgttgggtgctcgcggttttttttcctgatcagccgcggcatgacagattcttgacactgacgaacgacaaatcagataagctttgagggatttgacctgaactgttgtttagtcacacatcaagggattctaacaatctcatttttcccatgtcatttggtatccctccacacagatgattcctagacaagttcaaataccccaaagcagatagcttggaaatttcagatggaattggtccagacagcttattacttgaaagaccaatcattctcacccttatcagattgcctctggactctaacttttctcctttgggaactaacaccagagcttcc

SEQ ID NO: 165742 - DNA, 400 bp, Glycine max
agcttcttgaatactggaatgaggagtgtttgtgtttgagccaaactggtattttgtttacccttgtttttatgaagtactctctagtttatgattagtatgagtaccgaacttccttgaatttttgttgtttggcctataacaggtacataccagtcataccattggttcttgtcaatggtagtgaaggaattgggacaggctggagttcttacattcccaattataatccaagggacatcattgccaatgttaggcgtttgttgagtggggagacaatggtgcctatggatccatggtacaagggatcaaaggaaccattgagagaagccccaaggaaggtggatacgtagtcaatggctcagtggaggaaataaatgaacaaactttcaaaatcact

SEQ ID NO: 165743 - DNA, 357 bp, Glycine max
tgtagaaaccaaagagacagatttatatagtttaaaatccaactcgtagaaaccatagaaagaaataattttttttgaattgatttttttactgctttgagttgcttactaattataacaaaatttcacttctttcacatttgtgcatttgctgtcacatgaaggcttgtctgtttggccttattgtgaaatattatggagtacactcgttgacagcaattttgtgtgtctgctactctgctgtcatataaaaacactaaaaagaatttggcaaaacaccatgaagagttaaaagatatgtctagctttctacatcggttcaggccaaaactgatgtagaattctacacattctaca

SEQ ID NO: 165744 - DNA, 377 bp, Glycine max
  unsure (1)..(377): unsure at all n locations
gatacttttcttaaaaaagaaggttttaaaggttagaaatgataatgcagccggctgacagaaaagcagataattgaatgaaaatagaagacgaagtcaaaatcaagaaattcatggtggtagctagacacgggggcagtgctgaatatactgagggacgttactgtttgagttaaagcattaatattttacaaattaaaaaaaaagcattaatagtttcgtaaataactttttcatactcaccaataaaataataattttgttctagaatctagatcatatggcaccgcaatattcggttntatattgaagtgcttgttaagacaatgtatatttttttttcttttctagaatcctgcattgaagacgcaacatag

SEQ ID NO: 165745 - DNA, 409 bp, Glycine max
  unsure (1)..(409): unsure at all n locations
agcttataataagaaagtgaagtcaataatctttaangnnggagatttagtttggaaggttatcctgcccatggatagtaaggatcgagccttgggcaaatggtccccaaattgggaaggaccgtttaaaataattcagatctattcgaatggtgcttatgaattagaggaattaacccctcagaaacgtactttgagtataaatggtaaatatttgaaaaaatataaaccaacattgctcgaagttaaaataagcatagaataggaagaaataatggaaacataaaaatggcgataacagtaaaattgccagaaagggcatgtgtcaatattacatcgaaaagtagaatcgaaatacagaattcgaaataaagaaatcataagttctactaagtcatgaccaaatcct

SEQ ID NO: 165746 - DNA, 351 bp, Glycine max
ttttcctctcccaatcctacttccttctcctctcccgccgcgcctcgcctacctcatctccggctcctccgccgacgcctccgccatcctccgcacgctctccgccctctaccacccccgcaaccgctacgtcctccacctcgaccgcgactcctccccggaagaccgccgccttttaacccaccacgtcgaccgccatctcaccttccagaagttccgcaacgtcagggtcgtcaccaaggccaacctcgtcacctaccgcggccccaccatggtcgccaacactctccacgccgccgctattgcgctcacggagagcgatgactgggattggttcattaatctcagtgc

SEQ ID NO: 165747 - DNA, 390 bp, Glycine max
  unsure (1)..(390): unsure at all n locations
agcttcatgatgatgaatcaagnagtttttattatgagaaaaaaagcccaaaagaatgatttcaagattgagtcaacaagttcaagatcaagtttaatttcaagattcattagaagaaatcaagaagattcaagattcaagaaaagttgatttcaagattcaagaaaagacatcaagaagaatgaagattcaagagaagatgaattcaagattcaagagaagaaatcaagaagcaacaagtcaagatttcacaagggaaatattgaaaaggatttttcaaaaaccaaacatagcacaattttgttttacaaaaagttttctcaaatttttctaagttaccagagtatttactctctggtaatcgattaccagtttcctgtaattgattac

SEQ ID NO: 165748 - DNA, 369 bp, Glycine max
  unsure (1)..(369): unsure at all n locations
cctatgctactcaagcttatgatgatgaacagttgatttagtagttntgatgatgacaaaaagcccataagaatgatgtcaagattgagtcaacaagttcaagatcaagattaaagaaaagacatcaagaagaatcaagattcaagaaaagatgaattcaagatttaagagaagaaaccaaaaagcaacaagtcaagacttcacaagggaagtattgaaaaagatttttcaaaaaccaaacatagcacaattttgttttacaagaaaagtttttccaaatttttctaagttaccagagtatttactctctggtaatcgattaccaattacctgtaattgattaccagtggtaaagtttgatttcaaaag

SEQ ID NO: 165749 - DNA, 340 bp, Glycine max
gttattactttccataccccctcttgacgtgcttaagccatttcatctaagtcatgtttcgcttaaactaaaaataaaataaatttccaccgaacgtttgaattgcattatccgctaactctggttaaaaagaatttcgaccgatcggtcgggccgttaccacagtggaaatcaaaagagaggggaaataataatataacgatcagaaaatactcctgtaagtaaatgaagcaaaagaccaaaatcggacgtttctctgtggatttctcattcctaatgaattgctaatgactaagggatactaaggctaaatcttcttgcgtgtcaagctggccacaaa

SEQ ID NO: 165750 - DNA, 299 bp, Glycine max
ggcgccggctctcacctattctccatcaccatccgctgcttctccattgtgaaaaatcaccattgaagaacctcattgaagcttaaagatccaacttccatagaagcttcactagcaagctttcatcacttaccgtggatgatgtgctaagcgacacttcttctttggaagaactttattgtagcagcgctcagcgtgctatcctgcgcaaagccccagatccattttgtaacttgagtttttaagctgggcttaccgggccatgaagatctaagcgccaacttcttatgggctctgaa

SEQ ID NO: 165751 - DNA, 405 bp, Glycine max
  unsure (1)..(405): unsure at all n locations
agcttcaagaataatggcctcagcaattcttttattttctgaaggaaattcaatcaatagacctccaatctttaatggaaagggttaccactattggaaaacccgaatgcaaattttcattgagacaatagacttaaatatttgggaagccatagaaataggaccttatatacccaccacagtagatggaagcacaacatgtagaagcacaacaatagaaaaacctagagatagatggtctgaagaagatagaagatgagcacaatataatttaaaagccaaaaccataattacatatgccctgngaatggatgaatattcagggtttcaaattgtaagagtgctaaggaaatgtgggacactctacaagtaacacatgaaggcacaacagatgttaaaagatct

SEQ ID NO: 165752 - DNA, 361 bp, Glycine max
aagctttgtcagttatatcaattgattgattctttaagtttcggtgcttatacacaatatatgttcttaccaatttcttaccttagttctggatgtctatttaacacaattgaaattgcttggagaataggcatgtcatcaggatgctcatccctcacttttgctgtctagatatctcaccagaaagccattagattcttgtttaagataaccacaaccggattcatgattaaaagaagcaacagaagccatatgcagcaaagatcttacctctgccagaattctcttgtaagtgtctccaacttccatcataatgtgttgagggacttgatgaccatcaatgttaaatagcatacagcta

SEQ ID NO: 165753 - DNA, 353 bp, Glycine max
  unsure (1)..(353): unsure at all n locations
agctncttaaccaaggcactctatgtttttgaanctttttcttccatggcttattctctaggggatgacacatcttctcacctcttctcctttatcttctgttgcaactccatggctgaaaatcaccattgaaggaccttagtgaggctcaaagatccaacctccatagaagcttctcaagcaagcttccatcaatggctccaagctcgttaagtgtcttcctaccaatcaaaccaaaatatgatgtatccacatcaacaagcaaaaatcttattgtgaggctcctatagagttggcgttgaccgaaagtggtcattagtccacataaactctgggccttacttttttgccta

SEQ ID NO: 165754 - DNA, 359 bp, Glycine max
  unsure (1)..(359): unsure at all n locations
tagagcatggtccatcggatgatngtttttgcttatcttaanctctcaattttgacccatgaatgacccttgctcagccatggaaaatgtctacatcactaccaaatgtggtgggcttcacttttgaaattttacttaaaaaggataaattttactttggaaattttgcttttactaaaattgataatttatatcctaaacttcttgattattgtgctaatctccctagaattacgtataaccaaagtgaacctcacacagagatcactctcacacagagctaaattatactaccagtcagtgtacaatgccatttttttacaaatgatttttttgttcaggtagtttccatatctcta

SEQ ID NO: 165755 - DNA, 388 bp, Glycine max
  unsure (1)..(388): unsure at all n locations
agcttaagctctttcgactggacaatgctcttaatattttaaaagnanccctggggaaccttcacccgatgaagacactgaccaaaacttatcttctcctttttggacaaaatatgacaagttgggggcaagtaaattttcttcccatcaaaccttggatgcaactgggatcgtatccacatctctgctagattttgacgaagattcaagccatccttcgtcttgccctaaatgttaaggagcgtcccaatcacactgtcacatacatttttctcgacatgcataacatcaatacaatgtctaacatctagatcagaccctacggaagatcaaagaagttgacctcttctttcatatgcaaggctgacttttatccctcttttggggc

SEQ ID NO: 165756 - DNA, 358 bp, Glycine max
  unsure (1)..(358): unsure at all n locations
tgccacaaagagatctaggaaggatttttcttctgaaggaaccagntccgctcccgaatatgacaaccaccgttttaggagtgctgagcaccagcaacgcttcgaggccatcaagggatggtcatttctctgggagcgacgtgtccagctcagggacgacgagtatactgacttccaggaggagatagttcgccggcattgggcatcactggttacccccatggccaagttcgacccagacatagtcctcgaattttatgctaatgcttggcctacagaggagggcgtgcgagttatgcgatcctgggtgaggggtcagtggatcccgttcgatgcggatgctctcagccagttcctg

SEQ ID NO: 165757 - DNA, 413 bp, Glycine max
  unsure (1)..(413): unsure at all n locations
agctngtaaatatttattggtataattctcctgcttttttatgctcttganggctttaaaggttacttcctcgttgacatcttttgtcttgaatggaattgccatgacaggtttattgttactgtctttgatatttggtagttgatattgtgttgcgggaggtaattcccattggattaactcaccatccttaacttgccaatttgttatgacatttgttgttggatcacctatgatgtcttgtttccaagggtaatctatatcctttctgatggcataagcatgaaaccaatcaaagaaaaagacattaattttgactcttcgacaaattcgtagaacttgtcttggatttgttttctgtttgtacccttgtaatgttggaaaaaccatctcctttgaggttcattctctgg

SEQ ID NO: 165758 - DNA, 360 bp, Glycine max
agcttcctgaagacaagttgtgggctctgttcttttaaaagggaaactccgtggcttgcgcggtggcgagacaagacgagacgttggacgggcgacaatgtcctacgcccttcggccgaggtcacgggggtgcgacggagatgcaggcaaacggcaaaggtcactgaagatcgaaatttcaaagaaacagggaagtgggagctcgagcgcgagtgtttgccgcgcaaaacattatataaacctcaatcttaacgacggtggatcaagaaaacgtcgttgccgttcaaaatttcaacgacggcgttttaaaaaacaccgtcttaacttacctgctgcataacgaacaaagacgtgctacct

SEQ ID NO: 165759 - DNA, 401 bp, Glycine max
  unsure (1)..(401): unsure at all n locations
agcttcaaattcagagttatttattcttccttcncanannnagaatccaccttttcatttttaattatcacaacactaaagcaccctttacgtcgtcgtttcgttcttcctccacttgacattagccttgcttctttgatgtggcagacccgtttcactgggacccattcttgcgctccatagcctctcgatgtttgtaatctccgccaccatattctctggcctcttggtcttcgccgccgccaaaatcaaagagacgcggtggctctagcggcgctacaagaccccgctccagtggctgctatgtttccccttgggatgtgtccctgtggtcgtgttttcttctggtcctatgttttctacctctcgcattttcttcacatggtgagaactgtgctcgt

SEQ ID NO: 165760 - DNA, 433 bp, Glycine max
  unsure (1)..(433): unsure at all n locations
gatccttaagtcacctgcggcatgcaagcttaccaacctgacatacctatttatggagagcaanggaggcactctacaattctggcaaggctcaagctataggggtcagcaatttctctgtaaagaagcttcaggatttgttggatgtggcaagtgtgcctccagctgttaaccaagtggaattgcacccttcattacagcagccagaattgcatgctttctgtaaatccaagggagtgcacttatcagtgagtgtgcaaatttaaatccaaacatttatgcatgctacatgaacaatgattntaagatcggaccagtgattgaaactagttcaaggttcgactgtagttgaatcggttttatattttttaaatataatataatatttcaactaataaaataatatataattaaaaaattataaattaatatt

SEQ ID NO: 165761 - DNA, 380 bp, Glycine max
  unsure (1)..(380): unsure at all n locations
agcttggtaaagaacttattaaaaattttttatcaagcgcgntcgcacatcggtcgtgtgtatgatatccagtccacaaggtttgaagttgaggagaccttcaatcctattacgcaacgtggcgggcaaaagtgggcagttaacttgaatggtcattattgtcaatgcggaaggtattatgcgcttcactatccatgttcacacattattgcagcttgtggttacgtgagcatgaactactaccaatatatagatgtgtgttacataaatgaacacatcttaaaagcttactccgcacaatggtggcctttgggaatgaagcggctattcctccttctagtgacgcatggacaccttatcctgacctaactacaattcgt

SEQ ID NO: 165762 - DNA, 364 bp, Glycine max
  unsure (1)..(364): unsure at all n locations
actcaagctngaactatattgtgtagatctttgttttttaaatggaacgaaaagatgggaattagtttcagttcactaagattttacaaattgtttgtattgactcataaagctggataaagttttactatttataattataaaaagaaaaacttttccagcggataaatcctgtttggtgtatagacttttagatttactgaggagtttgatgccactgccttgattttgctgaagaaaaaatggtgatcttttgcagactttctcaaataccgttgaagaaaaggcaaaatggatcttcaacaaattgaaaggtatgtgtgttttgaccctcaaagagatgtttatggttgacatttttaaa

SEQ ID NO: 165763 - DNA, 407 bp, Glycine max
cagcttattaacaactggatgtgcatatttgtttgggctggcgaccccgacgcgcaaaaaattactattctcatcaatgaagctgctgtgttaaaactttgttgggacgtattaacttcttctagccaatgggcttctttctgtccagcccgtttcctgaggcatgattctcacaaatatatcaaatcattcatttggccaggtatcaacaacaaaatgagtcttgttaagcttcactcctcccggataattggatatggtaaaagtatgaagttctggagcaataaatggttgtctgaaataatagcagatgccttaaatttgcccgctgaggtcagattctctttcaaagccactgtcagtgatttttaaatagatagagcttggcacattccggcttttatcat

SEQ ID NO: 165764 - DNA, 355 bp, Glycine max
  unsure (1)..(355): unsure at all n locations
tgnngtgatatcgccggcttgtcgtttatttccacatagttgtgagggggagatttgttgggttttttgggttctcttcctctctagagtaaaggcccaattgataaggtccattttatctcacttatttaagtggagaggggtcagattacggagagtaagagagactcatttgagagggaaaaatagttacaaaacattgatagagaaaggagagggaaaatcattgtgatttttgcacacccactagagagcgtttttcacattacaactgcggatttgtttaccgttggattgtgctgatttttggacagcatgttttacacatgtgatactctaaattatctggttggat

SEQ ID NO: 165765 - DNA, 363 bp, Glycine max
  unsure (1)..(363): unsure at all n locations
gaagaccccacagaggccatcgcctccctcgcccagaattatgatcatccatngaggttttttttttttggggacnnccaacnaacacctaagggagaagaatntgaagagatcctaggatgccctctagggggaaggaaaccataccttttctcagggttctatctgatgtaagctccattggagcttgtaggcctaggatcttcttcatcaatggattcctttgcttcttggaagataaatggcagcagaatggagaaggaagagaagaggatacgccacttcaaggagaagatgagtctagaagaagctcaccaccatacgaggccatggataacagcttggaggaagaaggagatgaat

SEQ ID NO: 165766 - DNA, 351 bp, Glycine max
  unsure (1)..(351): unsure at all n locations
caaaccatggatttggnantagtttcttttcttagaagnngnngcatgcacacctcctcttcaagaatgccattacgaagtggtcacccataagtgatagctaaggagagaagaagtcttaccattatggacttgataataggggagaaagtctctatataatcaattctatactactgatgaaatctcttggtcactaatttggctttttactttttgaccgagccatctaggttttctttaaccttgaaaattgacttacagtcaataggaactctattacggggcaagggaacaagcaaccaagcgtcatttttaatcaatgcatcatattcaactttcatggcaact

SEQ ID NO: 165767 - DNA, 370 bp, Glycine max
agcttgcacgatccgtgatattccgtatgaggcagaagtcgaaaagaggtgtttttgcgcaatccgtgagtttccgtaacttcttggaaagctaaaaaagagtaaatacataatccgtaaggattcgtagccttgcggaagggaaataagtatcgttacgaaactcttaaagttccgtaacgttacgaaatctaattaccaaaaaaatagaagggggggtgctatttatagaaaaggggtgcaaatagaaaccagtgccacttgggccctccaaaagattcctccagaatgctgttgcttctggaggaaccaccttgctcgtctgggcgatttgggcgtgaagcttatacctaattttgacttaaatagg

SEQ ID NO: 165768 - DNA, 349 bp, Glycine max
  unsure (1)..(349): unsure at all n locations
tgtagactataccttctacctaacttgccgngtntctgtctaggcccgggttcaaggcgggctgcagcaccggctccgcttccctaactgtactggaggcggttgcggtggctttatcctctatggttttctgaagttttaacatgaccttcgagatggaagtcatttgatcttttaaggccgatagatcggccttcatctgttcctgcacgccctcttcattatccatttttctggatcgagtgttataggggtgccttgatgttttcttagttatgatgaaattcctaaagaaataaacaacggtgagtatgctaccaaaacatgagtatgcaaatggatgatcgga

SEQ ID NO: 165769 - DNA, 401 bp, Glycine max
agcttgttatagcaatgaaatgaactttttaatcttattatactacaaatttatataatcttataacataattatttactttgtgagattacttttcttcgttcctatctttaaactcatgagtaaccaacaggttgattggaaatggatttcagacaagaaagatttaatctggattccatagttgctattaaattcagagcttggaattggatatcaactttggggaaaggactggatgcttctctctattcatggcgcttggatcctacacattgcatcaaatttctatcatatggtcattcataatagagtcatacgtaggggaattacggaaaagtattaggtgagtcatggtttttcgaacatatgtgatagggaaaggtatgctcttccttatg

SEQ ID NO: 165770 - DNA, 351 bp, Glycine max
tgtagaattgtacggctttttttattcccatgtcgatcgcgttcatttgcatcttccttttcttcatctttctttacaagttcctcatcgcttatggtattatcatttcacttctttcttctctcttcatttatccttttctattttgtatttcgattctaattctctctctctctctctctcttttttttttaattaggcgatttcactttgatgtctaagaagcaacctaagcgccaagagattgaagataaggttacatgaatgaatgagatgcacacacttgatttcctcattcttcgtgtcttaaataaatgactttgtcttttcaatgtttcgtttccttccacg

SEQ ID NO: 165771 - DNA, 325 bp, Glycine max
ccaaaagcacgtgtaggttatacaggaactacctacacggccctgagaagcatcattctcccaaaaatatcttgaggcacgacgcgagcttaagataccatagacatattctttcctcttataagagagcataagaaacatataactttttactggtatttcctgcctttgcagaggaaagaatcaccaccactatatatataaaaagatgtctgtgtaagtgtaatcaaaaagtctcatggatcataagagaaagggagatatagacgaacgaaaggaaaatattggctgcgataagaggcattaaggaaatcaccctaagaat

SEQ ID NO: 165772 - DNA, 356 bp, Glycine max
  unsure (1)..(356): unsure at all n locations
agctggcttctacaaactctaaacatattntgcacctattntgcctcttcaatagcatcccattggttttgatagtatacaacttgaaacccattcggccctaaagctttgaaagcacctatgcaaatgctttgaaattcttgagaggatatattagctcctagtgcctncaaagaagtagcatcaagtgtagggtacatgcctttaaccacaagctcttgataagcatggtcatcaacaaacaattcctcaatcactctactcttcatcttattaaggttagagatccaactcccatctttcaacttaaaaggatctatttactttttcctctttatgaaatagcggaaccatga

SEQ ID NO: 165773 - DNA, 366 bp, Glycine max
tacccagctttagctcgatagaatacaataacttgattttaattgcgattcttgaccagatggaaccccaagaacaacaattgggtcaatgattgggacaaagaccaaactagtgcatttgggacaaggatgggccattacatccaaaacaaagatgggccactgcaactaagacatattgggatatatctctaatagtccctagcaagctggaaggtggactcaactcttgtagcttggaatgaaaaatacaagtcccaaatgaaagtgaaatccaatgaaaaatgccaaaaataaaatggttgaaaatgacatgaacaaagattaaccactatatatgcaagaagctaaaatcatcaaagacat

SEQ ID NO: 165774 - DNA, 249 bp, Glycine max
agacggaaaagacatgaaatcgcaactgcaaaaaaaaacaagcgctaatatcaatggtgacgacatctccaaaaaccaaagaatggccacttggataaatgaagaaactaaaactaaatgtaatcaatgcttcgagaaccaaaaatgcattgtaccacccaaacaagaataacgaatacacttgtcggaaatgatctgtacacgtggggcccataaacatattgtgtatatataaaccacatgcatcat

SEQ ID NO: 165775 - DNA, 298 bp, Glycine max
acgagaattagcttttattttgtgtgggaaaccatggaggaatatgccaaatactctgacatactaagccgattttcttttttactgttctgtaaatgtggcagatgatattatctgtaatttgctatttacaatgtgaaaatgtgtactgtcgctacatgaataatctattgaaaatttcagcttatctatatcgcctagattgatgtcacaagacacaatacatcaggttgcacttttgttaaaaatcgttgactatttttcaactccacgataaaaaactttgcaatctccttgt

SEQ ID NO: 165776 - DNA, 324 bp, Glycine max
tgacaccaacaacaccaggccctttgaacagcccactacatcctctcgttcttcatatataatttacaccttgaattggcccatagcattcaaatccatgtaaatcccgaacctgttaatggcaaaggctcataacatgtatgatattgatacatgcatgcactaaagaagctacaaaaaaggtagcctgcctcgataaatgatcagcctaatatgtgacttgctaacagatagacacctatacacccagtccgcctaaatattactggactgtttccagatctgtatttcttaatgcacgaaacactttgagctatttgatta

SEQ ID NO: 165777 - DNA, 279 bp, Glycine max
  unsure (1)..(279): unsure at all n locations
ccaagccaaagcggagatgacaataagaggatgcggaaaagccggacaagcatgagcagcattttttccttttaagtgaactcacnaaagatgataggaatgcatttgaaggtcaggttcgggaagcaatgacagggttagtaaaggagcagggtcccaaggtgagtctgcagtgactctatttacatccacaggaagcaggggctctgaaggaggctgacgtcctcatgatagtcgtgtaaggggcaagaaatagtgtaaggtttcttgataaagagg

SEQ ID NO: 165778 - DNA, 337 bp, Glycine max
ccccggaagaaaacccgaagagaaggaaaattcccaatccacgaaagggagatgactcaaaaatagaagagagaatttccaatccaataacgggagaagacatataacagaaagaaaattcccaatgaataagtgggagaaagcaaaataaaaaaaaaggaaaattctcgatcaaggatcggaataaaacagaacaaatatgcagaaaggtcttcgaaccagacaatatctgaacaatggagaatcgtcaccaagttatataaaaagataggaaacccgacccaaagtggcccttttcctttgattgcaaccaaaatccagtgcgctatcaactttc

SEQ ID NO: 165779 - DNA, 310 bp, Glycine max
aagacatcctactaactaataaatacgcacccatataccatcaaggcagctccattacctacactagttacatgtacttccaaagtgtgttcgctatttacataagacacgtctccttggctaaagttacatacatgcatactcaaagcacttcggggtaccaaaaatagcacatgcgcacatcttggtatctctaatacctatacatacacaaacttcatgatgaatctcgactatctacacaataaggcgctacgtttcatgctcttttcaagttttttgctacctaaaggcgtatgcaaactcaagt

SEQ ID NO: 165780 - DNA, 341 bp, Glycine max
  unsure (1)..(341): unsure at all n locations
agcgggcaggccgtgagtatttcttcttttaagcgaacccncnctccttgaagtttaataccagtggaatggagaaggacaagaggggagaggagacgtcactctaaggagaagatgatttaagaacaagctcaccaccataggaagccatggataagagcttgaaggtttgagaagatgagtgaagggagaaggagagaaagagcacaaaattttgtgcctcaaatgaggtccgaactttgaagtgtaattctcacatgatcaaagttgaaggaaatgccacacatgacctctgtttatagcctaagtgtacacgaaattagagagaaattgaatttcta

SEQ ID NO: 165781 - DNA, 319 bp, Glycine max
caaagctaggggaacttgatagattgtcaagaattgaatatagtctcagtgaaaaagacgaaccaatataaaactttttgtgtctgatccttctatatcctcttgctttaattgactaagggttcgaatttgattttattttttaaaagagtttttgcaaaatcggttaatatcgtctaattgagtctgatgtgaaaatcaggttttttttatctttaagctttatcagatgatagctttgcgatatttggctttacaatttgatgttctacatcccaatataacaaaaccttttaataggaagtatgcctcctaaaaa

SEQ ID NO: 165782 - DNA, 368 bp, Glycine max
ccacaaagaaactcatacatttacaactacgaagcggtttgaaattaaatataattattttaaaatcgtcagatgacaacacatactataaaaggaatgtaccatacagcctataatggagttacttatggaccacagcaaattgcttggggactgccatactaccaccatggataaaaactcaaatggattaccaatttaccatccaccaaagtattaactgttcttataaacctaagaataaaaagtatagactaaaattgatgaaatataatatgcttaacaaacagcatttttttacttattcagaaatgatgggtatttaatataaaagctatttacacaattcattccaacacaactggtaa

SEQ ID NO: 165783 - DNA, 314 bp, Glycine max
ctatatctaaccgatagcataaagattcacatcccctctccttatttactctcatttctccggggttctgggacggacgactagtaagattaacaaccaaaacactgaatatttatttatctttctaaaacatgcaacttgatgattactcttatgacgatgaaaaaattatctcgcggcttcaacgttcatttatggtaaataatctctgcatttttcaattatcgaaaacataatctctcacaatcgataataaaaaatatttcttctatgatatgatcatacatagttaaacccaatgatgagaaaagaac

SEQ ID NO: 165784 - DNA, 275 bp, Glycine max
tgatgccaaagccccgagatgattcggattagtgggagacttcccaatccaaaaaattaagagaaagttcatcctaaaatctgatttcagattcagaaaatcagatcaagattcacgactcaagatcatactatgagaagattaatcaagataagtattaaaaagtttttcaacattgagtgccaagaagtttccatatcattaccaaaagttttctttggtatcgatacctgttatatatcattccgggtttaaacgttagatttcgaattcaa

SEQ ID NO: 165785 - DNA, 274 bp, Glycine max
ccaaaaaaagaggcccgatgatattactgacacacccttaaactccccctgaatctaagacactccattattgtataacactaaacctcgcttgcctgacataaacaaacactgttcgattaaactcacaagatacaaaccactcaacaaagtggaaaaacattaagctcgaatacaaatgaacagctttgcaacgcaaaggataaactaaataagcactgctgcgtgtcgcccgaagacttgacaaattctcaccttaaaatgactttgcttt

SEQ ID NO: 165786 - DNA, 400 bp, Glycine max
  unsure (1)..(400): unsure at all n locations
caagcttgctcagagttttgctanattgtaccaacangctagctatcatcgccaagtaccaagaagagttaggtctagccacggcccacgagcataggatcgcggacgagtatgcccaagtatacgcggaaaaagaggctagaggaagggtggtcgactctttacaccaagaggcaaccatgtggatggatcggtttgctcttaccttgaacgggagtcaagaacttccccgattgttagccaaggccaaggcgatggcagacacctactctgccccgaagaaattcatggtcttctcggctattgtcagatatgatagacttaatggcccacataattagaaatcgctaggaaacttgtatggtctctcagaccctgactagataccactttttgaaat

SEQ ID NO: 165787 - DNA, 360 bp, Glycine max
  unsure (1)..(360): unsure at all n locations
ctcaagcttgctgatataatcagcactttttaatttttgccnaaccaacccgaaactgagaggttatgaatattaaactacacaaaatgatgcaatccaatcccgcaagggcattgggtagaagactctaagtatattgggctagagatccaagggaaggccctagggttctcatgagccttggggtacatttcgagcccatgggctaagtatgagcccgcttatctctgaaaatattacaataggtttttccttcgcttgggccttgtattttggacattctagtactatagggtcttagcccttgtatttcagggcattttgaatattctttgtacttaagactcttttctgtatttt

SEQ ID NO: 165788 - DNA, 371 bp, Glycine max
  unsure (1)..(371): unsure at all n locations
agctgtcacaagtgtgttcacaaattatcatcacacagcagaaccctagcaagattacccatcatatctccccaaaaccccatacccacgaaatttaagagagaaagaagtccacccaaacctgaattttcgaagtcccactcgtagccacgcacttcacgatcccgaaaatgctctcctttcacgatttggggcagaaacgggcactaaaggttgaagctttgtatggagctttaatggagaatgagggaggaagaaaggcaacgtgaaggagagagaaagctgtctgaaaaaaaagtgagggctgagtgagagagagaaaagctttttggtttaaataaaaggttgtnctctgtttctattattttatt

SEQ ID NO: 165789 - DNA, 288 bp, Glycine max
  unsure (1)..(288): unsure at all n locations
tctaaactttatacaagaatttagttctgataccacttgttggacaagtggcctcagatatcttaagaagaaggggggttgaattaagatatcacaaacttttcctaattaaaaattctattttgattttaacccaaatcccaagatttctttcaaaatgaactcctaaataattatgcaaattaaacttattgaatagaagcaataagcaataaacaacaaaagactttaagggaagaaagattgcaaactaagatttatactagttcggccncntccttgtgcttc

SEQ ID NO: 165790 - DNA, 416 bp, Glycine max
  unsure (1)..(416): unsure at all n locations
agcttgaacaacaaagaanaacaccatttattagaaatgctnananangnnncattcattattatctaaagagtacctaaaacagaaatctgaacggagattttggcagcattctatgtgagacaagacaagttcataggagtgatgctagtgccgggatatcagccataaaaagtgtggtcaatgaattcacaaatatctctgggttttatggaatttcataaagtttgaccattgacaatccttgttttcttcttatttcaagttctaacttctaaattctaaacacttggtaagtggtaactgactatgatcacatgaagttttccgcaaaacagcttacccaaaacctcaaccattctgttgactcaagaacttcacctacttttgtttgacaatcaaaatgatgagtcaag

SEQ ID NO: 165791 - DNA, 294 bp, Glycine max
aggaaacctccacccacatatcacgaatagaaccaatgagataaccgcgagacactattaaatacttccatagtccgcgagatatgacggaaccaccccgggccagaaccaatcacgcaggaatgagagagcccatgcccatacaaagaactctgagtcttgagccaacaatgaaaagcggcgcccaactcgcagaaaccgaaccccatgtctattgatcggaatggaggaacccacctcgggacaaatatcagagacaacgagttccccagaagggccaagtattctaattcg

SEQ ID NO: 165792 - DNA, 422 bp, Glycine max
  unsure (1)..(422): unsure at all n locations
acctgaggcatgcaagcttttcaacatcttaaacaagtgatttcccangtcttgttttggctacccccaacttttcgctactttttacaattcaaacagacgcgtcaggctacgccatgggtgtagtgttacttcaagaaaaccacccaattgcttattatagcaaggttctatgccctcggttacagagagcattgacttatgttcgcgagttgcatgcaatcacatcctctgttaggaaatggtgccattacctactgggcacttccttcaccatcctcacggaccacaagagccttagagatctcatgtcacaagtcattcagaccccaaacaacaaacttatttgtctaagcttctaggatatgattacactatcaagtataagccagggtttgctaatgttgttgccgatgcgttgt

SEQ ID NO: 165793 - DNA, 297 bp, Glycine max
attatgctatccccctcacttccggacgtgctggccctcgtaagcctagcttctatctttgagaacctaacatttggtgcttttatcgtcttcatgtcagaccctcaccagcctcgatgataccatgcattccatgaccttaaaaatggatgagctccttcacagagtttctccgttaactccatcttccactgcacaaccaccaccagaccaccatcacccgccctctgctcctgcaacaacacacaaaacgaagttagaagtgcctcatttcgatggcacagaacccctcgattg

SEQ ID NO: 165794 - DNA, 415 bp, Glycine max
  unsure (1)..(415): unsure at all n locations
agcttgcaaccacaaacaacttctactcttttagtttcagnnagggaaggcgaggagctgcagtgcaaccaagtttgcccggaagttgcggtacacattcaggcacacaccttcttggttgatttccatattcttccaatttgcggagctgacgtagtgctagaagtacagtggctaaagtcactgggacctgttctaacagactacgcaactctcaccatgaaattcatttataacgataaattgattaagctcaagggtgatcgtgatgcaaatattgatcagatatcaccatcacagctgcgacgccttatgaacaaggtaacactagtacctattttcacattcagcttgactctcatcatcccaaacccttaccattgactcactcgataccggcaattcaaaccttact

SEQ ID NO: 165795 - DNA, 333 bp, Glycine max
attttttttctcaccacaacaggagggtcatcgactattccctcaccgccacacccggaagacataaacaaacaatctccaccgccctatcctcaaaaaccaaatccccacacgatgtgacacacacatacttaaaaataaacccacagtgactctgtcttcaatactcaaagactttcgccctgatgaaaggcgagaatcaagtcctgaagtgaggtcaaaggaaaagagctatgagaaccatgccaagcttgaaaaccacgcaaagcacaatcaactgccacaacaaaatgacaccccacataccaatcccgactgacacccttatatggc

SEQ ID NO: 165796 - DNA, 408 bp, Glycine max
  unsure (1)..(408): unsure at all n locations
agcttagaatatatgtattagagagcttgtatttttatgngnagggatcggggggtaggtgggtatttctcctttgcttcctactccttttataggcctaaggtagcttaatttccaagagacctcccgcttagcgcaagctttcacactaagcgcgcctttgagctttttaatgggccttctttgcgctaagcatgagcaggccgctaagtgaggagacgcgttgggcctgtcttgtgcgctaagtgagctatcccattcttcaacatttcttcaatgctttttcttccagtttttgcatcaattttcctccaaagacttgaaatctttntcttttaacttctgctgataaaaaatcgcaaagatattaatttcttcattatttcattaaaaacaacagtaaagtga

SEQ ID NO: 165797 - DNA, 361 bp, Glycine max
  unsure (1)..(361): unsure at all n locations
cttctttnggaccttgagcaagcaacttacttctctttcagaaccatgctatgtgctcgcgactggtccctctcttcccttcgcagctcgagttcactattgctaccccatagagctccgcgaaatttattccggccatactcttccttgcgagccctcttggtctcttgttcaagggctcttgcggtaattgcattctcttcccgtaacccggcacactccttccgaatgtgtgtagcggccaacttgaacttctccttggcaagtgtcgcctttcctaacttgcttttgagagcttggacttcttcgtcctcttccggtgcttcaaaactctcttcgctgacgacttttaacttggcga

SEQ ID NO: 165798 - DNA, 408 bp, Glycine max
  unsure (1)..(408): unsure at all n locations
agcccccagaccctaagcatgagaaatatttannnctcatttcttaaaccnncgggggactgggcaaggtccctcaactttttcttcatttcggctattagtccctaaacttttgttagactgatcaatgtcccttaacttttttttattaatgtctttagttccttaacttttgaaaaattcaatatttagtccgggaaacctcattaaataaataaaaataataggttcaaactttctcattttattgcacggaagtaacaacggcatttcaacctacatataccatccaaggggtgccattaatatgggaaaacttgcacagaccatactgggctattttgaacaatttaaatgaattatcaatcacccaacgggagtgagatgaaaaccaaaagcatcatgaaa

SEQ ID NO: 165799 - DNA, 358 bp, Glycine max
tttaaccaattaacagtgttgaattttaactgtttgttttggactgcaatcacatagtttgtccaccatggcatgatctatgttcctattggttatagttatggtatgctctatgttcctattggttatagctttggcgctagaatgttcaatttggagtccacaacaggaggatctccatatggcgctggagtttttgctggagatggtacaagacaagcaagtgaaatggagatggagcttgcagagtatcatggcaagtatatatgaaattagcccataaaagctagattggattctgcgattaaaattccattaagccctcctagctaggtcagcattctagtctgtcccaagt

SEQ ID NO: 165800 - DNA, 316 bp, Glycine max
gaaaagacccgacatatatacatatatatatctatatactatatccctatatatatatggaggcgaattattcatgcttaatcgtcaactcctgtggaggagatttatacaccatcacgtactaataatctgcgtgcatattaccccactcccatcttatttttaaagaatatagcatatatacacgtatactagctcattcaatatatctctaatcagcatcctagatatatatgtcttacattaagagatgcctacccctcgccatatatcctttgcaaaatagacctaagatctaagatcgattgatatttga

SEQ ID NO: 165801 - DNA, 336 bp, Glycine max
accccatttcttctccattgccagaatctgccattgtaaaaatatttaaactgtacatcaatacaaaagatatcagaagtcaaaatgggaaagatgtataatttctatatattatctatgataactgaaggctaaacctgtggcgtggtataatcccagatgattgtagggactttcacataatccaagtttttaaagttacttgcacatagttctgcattagcagcttccttggtgtaatcaatctcctgaaaattgttaattcatgttacatcaacaggattagataaagctgaggatgtgcagaaaacacatgaaaacatcatactgaaacaa

SEQ ID NO: 165802 - DNA, 270 bp, Glycine max
tgtgctctgtgaaatgggttcacggtctttcggggctaataaggtttgtggagagagaacatgatcgttgcgctgagcatgattattgatgggtcgctgaagtagaacggttaacgtgcacactaacgacactaacaaggttctgaacgggatgccgacctacgctcctccattgccttcttctaattccatgttaatgtttctgacgacccttatgttgttaatgcttatttcgtttctatattggccctatgatagctttctgggacc

SEQ ID NO: 165803 - DNA, 307 bp, Glycine max
acaagggcggcgcgggacgacccgagcccacccgaccgcgggcaaccggggatggtggacccatgcgtgactcgaggaagaggagaggcaccttgcaccatcgcccgaacgccacctagcaccacatatgaccggtaccccatagacctacaagctcgaagtgacaaagcgtggaagaaacagccttcccactactacccgcagaccacacagtgggacctggagatatatcgcgggggccaagaaaccttggggaacaccagtggggtgcaaaagcccaaaaacaagctggaccaatcccgaccca

SEQ ID NO: 165804 - DNA, 408 bp, Glycine max
  unsure (1)..(408): unsure at all n locations
tgcagctagcctaaattctgttttnattttcgcaaagctcacattatctgcttcaactcctaaacaatccaaaatttttggcttctggttttatgtcaatacatcaaaatcttatgttttacttgtgtcatcatgtaatgcttcctctactattgattccataaaacagaaaaaaaaacactaaaaaatgaaacctaatatcatcaacaacataaaccaaaatttttgggtgctggttttgtgcccattccccacatttgatcttcggagatccaatctacaaatctcccccccgcccccatttaaatgaataaagatagaaaataaatgaaacttcataaacccagtcagaaagaaaaaagcgctcaatttaaaatcccattgaaaaattatatatgaagaaaaatg

SEQ ID NO: 165805 - DNA, 364 bp, Glycine max
  unsure (1)..(364): unsure at all n locations
cctcaagctnngagtttcttcataggccttttcttatgcctcttngctagcataatagatatatacagttatgttcatccttttctcttagtagcttaaaatttatttggcataattctatcatctgctttaagtcatttttcacaattgaacagaagacctattgtaaattaattaagattcaggattttcttaattagtttagtatattagaacgaatgttagcatttagtaaattttaggtttggtttcattctaaaaattattttttattctatcaacttttaaataaaggttctcacatcgacaaggagattcaaacacacgtccatgtgggatataagtccaatccttaccaaatgga

SEQ ID NO: 165806 - DNA, 348 bp, Glycine max
gatctctaagcacctgcagctgcagctgagagaggaagtgttaagttttaacccggagacccggatgacctaagcagcaactcctgcagtcacatataaaggaacaagaccactacaaggaggcttgtggggggtggccgctgcgaatctgtgtgatatatggttatgctctggtatcgatactaaagggggaatcgattcaagctaaaaatgaagacaggaggctaaaggtctttgtaatcgattaccaaggttgaatcgattacacgttgaaacgagtcacagctatgggtctggaatcataccaaggggtatcattccagctaaaagaagcacagtgtaagcctt

SEQ ID NO: 165807 - DNA, 363 bp, Glycine max
  unsure (1)..(363): unsure at all n locations
tcaagctggcattgtgttggagtgaactttctttttttaagcatncgacgaagagaaatattttcaaatagaaacaaacttatacaaataattgattcccagatttctaaagatgtagaaaaaagtattaaaaaaaacaaaaaacattgtttagattttttaacgtgtacattattttatatatcatttgtttaaaaaattttatacttgtattatttgggtcatttttttgtattaaataggtaaaaaaattctactcatgtaaaacacaaacttttgtaagttttgttatttgaaataaaaaaatttattgggtcccatatctcatttaatgtttgtctcttgatattgtaggtctaaaaa

SEQ ID NO: 165808 - DNA, 400 bp, Glycine max
  unsure (1)..(400): unsure at all n locations
agcttaacaagctgtgtttatagnnttggcttggtctttntatctaaaaaggctttttaaaaagcttgagcttagcctttatagtaaacaagccgagtcgagtcgagccttacataggccgagccaaaggcccttgacaagctgctcgactcattttcacccctaatcgtaggctaggctcaggcctttcaaagtctggcctaacctggcctattcccacccctagtaagcacatgccttatcaaggcccaaaagataatgctgccttgggtctaaatttgtatgattggagtaggtactatacccanggagtgactacaaaaatctcatgcattaaaagcttgggcattgagtttgatcagaatgattgccatgtcttttactaataaagacatgtatg

SEQ ID NO: 165809 - DNA, 352 bp, Glycine max
tggagggattgatggggacctggttttgataggaacgaggataaaggctacgtgggagtacgtgagctcagttgaaggtgggcaactggggatggtggatttatgtgtgatttgtggatgtggagagtcaacttgcaccatcgcccgatcgccacctagtaccacatatgacgggtaccccataatcctacaagcttgaagtgagaaagtgtggaagagtcagtcttcctacttttattcgttgaccacagagtggtacctggagatatatcgcgggggtcaggagaccttggggacgtcaggtggggtgctattgcccaaaaccaagcttgaccaatcccgacccaacccg

SEQ ID NO: 165810 - DNA, 313 bp, Glycine max
gcttcttcttccgccctttgaaattttgttcccttctcctcacaggtttgggcatcttccattgactagctttgttcgtttcttctgccatctaggttagtgtcctaacctcgggccttcttttgaaagggtaaatggccgtaggataaacaacatgattgatgtggggtggctgaggttgaaaacaaaggttcttccgcaagatgaaccttcttccgcgcatgtgggaggggcagttggatattgaagcggaagaaggagttcttctgcgggaatctgcggaagataggggagaaggttcttccgccgttct

SEQ ID NO: 165811 - DNA, 354 bp, Glycine max
tcaatggaggctagattttttatctttaatgaactccttcaatggtgattttcaaccatggagatgtagcagaagataaaggacaagaggtgagaggaggagccatccattaaggaataagccatggaaggaggagcttcaccaccaagagagtgccatggataagaagcttacaaaggaagcttcaatggaggaagagaatgaaatagagagagagagagaggaagggcacgaaattgaaggagaaaaagagggagagaagttgaactttgaagagtgtctcacaagttttacattcatcaaagttatgacaagtgttacacgagtttctatttatagcctaggtcattaact

SEQ ID NO: 165812 - DNA, 403 bp, Glycine max
  unsure (1)..(403): unsure at all n locations
agctnggtacaatctatggacgattttgtctatagtttgttttacaagcattgtaatgcttcaataaatcgttgattttaagtatgttgattttgcttcttgattcctttgtcattttatgttacctctaaataacttaacattaatagatcttgctataataaaaactaaggcgaccaccagttgaacagttgaatcgtcaataaattaattgaaacacaccgtttcactttatatatatatatatatatatatatataataataataataataataataataaaaaataaaaacaattctcccttttgtttatagagagtcccctcttccccnctcctaatttnttttttttttttttnaataatccaccctcatctctcaaaaccttcctcttctttcca

SEQ ID NO: 165813 - DNA, 173 bp, Glycine max
ctactggggcatctggcagagtcattaaggtgattgtggatgtagagaggaagatgcaccatagtccatgatccgttatgacaaactgaccgataccccctaaaacgacagctgaagggacactgcagaaaggaacttaccaggtatccactgacacagagtggactggagat

SEQ ID NO: 165814 - DNA, 413 bp, Glycine max
  unsure (1)..(413): unsure at all n locations
agctggnggacaaaaccaaaaccctttatagaaattttccaaacctataggaaaggggagcaattatattcctaaggaattctgtcctaacaaaaccaaggacagagtcctagcaagtgtagttctcatgagtcaaagtgccaaggttagcaagtttatttacacatgagttttcctctctataaacatgtgagtaacaaaaaactatatttttacaaaaaaaataaacatttttcccatttactatggagacattaaggaaccaacaaaggattgctgaaagcctgaatgaccagtgaagagtcacattcaatccaaaattattccagcctttgcacttcactacttctaaggtgatgcctacaccttagcaaaaaaatttgtttacacccctatataggaggagaaacacc

SEQ ID NO: 165815 - DNA, 361 bp, Glycine max
  unsure (1)..(361): unsure at all n locations
gctatnagaacgagatgtgcgtgaagcttttttatatttgcatgcgaattaagaagcttcaacaagaatcaagccaaggctattgagcaagcaatcaatggggcaaaacacaccaaatgaatatgatgatggatggctcaaattcttacaaaggttaactcatcactttcaaattgagctttcaaaactattatgacatgtagaggagaatcaaggatttcaagtcacaaaatgtcaagaacttttattttcaaaacaattacccatttcttgaacatatcctataattcaaagaaaaacatgcatagtcttacatgcacacaaaaatgacccaaaattttaaactaaaaatgcgacgaaa

SEQ ID NO: 165816 - DNA, 408 bp, Glycine max
  unsure (1)..(408): unsure at all n locations
agcttgngggttggaagtccaatagttatctctttttgcagaatcatgattgcaaagtctgttattgaggctttgcctatctactctatggngacaaataaaattccatggggaattatcaacaatattaagaaggatgagagatcttttatttgggaagatcaagtgggaagaaagaaaatgcatgctataggttggaacttgatggctcggcctaaagcttatggaggggtggctatgtgaaatctcaagcataagaattctgctagtttgatgaagttagggtggtttctcaaaaatgatgtgaacaacttatgggtcaggttcctaaagggaaatatgcgagacaagatttctctgcanatgttttggtagccaagccacatgattctcccatttggaaagttg

SEQ ID NO: 165817 - DNA, 358 bp, Glycine max
aataaaatagatatagttacggtgtatgtgtgttaatgacttagattataaaatatctggtttttgagtgagaaaaaatagcaactttttaataaaagtgttaaaaaaaacattattttttatacaagataaataaaatgatagtttgtagctcctttcaacattaatatcatctaacaacccagtcattttggcattagaatctgcacataaatctggtattaaattcttttaacattggccatgttattcttatttttacttgtttttttataactaaaatcaacttgattacacaaagagtattgtcaaatcagccgcttaaggcctataatattcactccttaatttggcacac

SEQ ID NO: 165818 - DNA, 435 bp, Glycine max
  unsure (1)..(435): unsure at all n locations
gatccctaagtcacctgcggcatgcagctttacttatgtggagggagggttccttcattttcttgnctccaacgcgagctctgaccactgttcttccttcccgcgatgcttcttttcatgtccgcctgagtgagcttatagcctaaaccatacttcccacgatttccttgggtatttatcaggctagttatgccgccgttgtttttgcctaaacccatcccgggttcataaccgttccccaacataacccgggccatcattaccgctgcatcggacagacaaggctgcccaaagagggagtccacggaggagatgctgaccacctcaaaagactggaaagagtttctaacgattcttctgcggcttccacataaggcatggaggatgggcagcttaccaagatatcttcctcgcctgacacgatgaccaagtgcc

SEQ ID NO: 165819 - DNA, 365 bp, Glycine max
tacccaagctttgtccacaagataggcagtggaattcgtttttatgtccaacaccttaacggagtctcccttttttactttcatcggttaaaacgaaccgtttaaaagtctaaaatcaacatcccgcataactttctcgctttttaaaagaactgcgtaggtcggagttcctcattgcaattgaggatacataggagcaaaaaccccacttttgccgaccccaaaagataaaaaacataaaaaggggaaaaagaaacaaacttgaagtcatgattttgcacatattattaaaggctgacgtcccttgtgacggatgcgtagggtgctaataccttccccgtgcataaacaactcccaaacctttt

SEQ ID NO: 165820 - DNA, 415 bp, Glycine max
  unsure (1)..(415): unsure at all n locations
agctnggactacctatgttcagagaacctctcctncttatgtgtacccaaacccaatcacctgggtcaagcacgactttctttatgcttttgttggcttgccttgcatagctcgcattttcttttcaatttcagccttcacttgctcatgcagcttcttcacatactcagctttagcctgtgcgtccttatgcttaaacatagcaatgttaggcataggaaacaaatcaagaggagtcaaaggattaaatccatacactatctcaaatggtgaacaattagttgtgctatggacaacccgattataagcaaactcaacataggcaaacatgcttcccaagatttaagatttttctttaaaatagtcctaagcagtgtacctaaagtcctattgactacctcagtttgaccatcag

SEQ ID NO: 165821 - DNA, 360 bp, Glycine max
cttaaaggaagtgatcgaattagcattttcttatttgtctccgcattgattggtaaatctgttcctcaaattcctaaaaaatgcaaagatccaggtacattcagcataccttgtattatagggaatagtaagtttgacaatgccatgctagatttaggagcctctgttagtgttatgcctctgtctatttttaattctctatctctaggtcccttgcagtcaactgatgtggtaattcatttagctaatagaagtgttgcctaccctgttggtttcatagaagatgtcttagttagagttggtgaactgattttccctgttgatttttatattttgaatatggaagatggattttctcaa

SEQ ID NO: 165822 - DNA, 220 bp, Glycine max
acactcttactatctatttaatggttatttttctgtgctcattgcttctatctatgcttatttcacatgcctatgaactgatcacccatttgtatgtgtagttaggctttttattattgggaaatgctttaaaaccttaaaactgatagagcaagctaaaaaaccatatttttagccctggagtgcagcgatctaattcatattatgttggaagcttaat

SEQ ID NO: 165823 - DNA, 353 bp, Glycine max
tctggaacgtgatcaatacattcatttgcatatattgaaggatgaagttgtggtgcgtgatctattttggtatcacccagatgcagtaaagttatgcaatgcatgtcatctggtgttttttatagacaatacctacaaaacaaacatgtacagactcccactacttgactttgttggggtgacaccaacgacgatgacattctctgatgggtttgcatatctggaggctgagcgtgttaataatattgtatgggctttggaacgatttcgaggcctatttttaagaaacgatcgcctctctgttgttattgtcattgacagagacctagcactgatgaatgcagtgaaaactg

SEQ ID NO: 165824 - DNA, 328 bp, Glycine max
tcaaacaaaaaactgtgcttaccaatctggattgcgaaaaaacatgatggaactcaataaaccaagagggggtgaattggatttctaaacaaaatgcacttttttaaaaaacacagttacaaaaaaacttttgtatggatcgtatcacaaaaaaaatatgaattgaacgtaattaatacttaatcaatccttccttaaacatgatccttcattaacatcctatctttcatagtcataaaacttgaatctttaaaatcttgattaatactcaatgactgttcttaaacttgaatgagttgattaaaccttcatcacagaaaaagattag

SEQ ID NO: 165825 - DNA, 356 bp, Glycine max
  unsure (1)..(356): unsure at all n locations
ncataaagtgtgtcttgaggtttctttcttttaagctccggtcagagactcttaattttcattctctttttgcttcctcaccatttttgtgcaaagctcgcattcttggttccaatttctattttcatcctttgaagcttgggaacatctagatctaagttcttgtttcatctgagcatttttcatgcaagcttcatcaaggtaaggggaacattttcacttcttgaaccctaaccttgttgtcttttaaagctaggcttcattacatgttgttgagatgtttaaaatttcgtatatgctaccttgaccggaattggacgatatgttgtttttatggaagttttaagtttaaaaat

SEQ ID NO: 165826 - DNA, 380 bp, Glycine max
  unsure (1)..(380): unsure at all n locations
agctgcatatatgcagcttcatatctttattgnaactnagctgggccatttcggttaaccctaggtacatttcatgctgacttgagttacaaggaaagcttcaagtctgcatgccattgtgactgatctcacttccagcctcgctgccattgtcactgttgggtttgaggtaagcttcgtctatttttaatttctagtttagttagcaaacatcttcaagtttgtttttgttaagagtttgatttttctagctatctattactcatttgctttgctgcaacccaacctagatattgaaagattaatgtgttagttgtgtgctttggtttgaaaacagatcatganttctttgttgtgcgctttgggtcaaattaaaaata

SEQ ID NO: 165827 - DNA, 351 bp, Glycine max
taagaggtatggcggcgctattggttttttcccttgataggagaaggtagaaagattgtttaataaggagtactattttgatatcacattttgttgcaaaatgattttccttcttaacaatcttcttggaggaatccttttcctctttttccttccccttggcctttgaagacgaggccttactatccttctttttcttttggttttctagtttttcttcctcttatctttcaaagttaggttatccttggccacctgcaaaggtgtttgaggatgcaacacaaatttagcgccaagatgggtgagggtaatctcattagttaggccattgtaaatgatctttctatcaaa

SEQ ID NO: 165828 - DNA, 390 bp, Glycine max
  unsure (1)..(390): unsure at all n locations
agcgggagncagagagtttttttacnnctantctggaanaccaaaaggnganaaaaatatgagagatgccttcttacgtaactcaatacttaatatgcacaaacatgtgggagatttctacttaccctcatctgtcatatcaatgaaatctaccacaatgatgcctccaatatcccgtagtcgcaactcccttgcaatctgtaacacattggttctattaaaaaattataccgctttacatgaattaatgttgcaaaagaaaacaaaggcacaaaattattttttttacttaataaaagaaaatcagaaaaatgaatagaatcaataatgaaatatataactccatgaattatcttacaagattggcagggctaatatagaattctctaa

SEQ ID NO: 165829 - DNA, 359 bp, Glycine max
  unsure (1)..(359): unsure at all n locations
agcttnntctgtgatatatagctagttatttattttttgcannaatcgcagaatgcacaatgcttaccaagaaggacggggcaaccttataaagaggtattctctggtgtaacgccattttaataacgtggctgaacaaatacttaaaacataactggtacaataaaataataatgtgaactgtctacacccaaaagacaaaaattaaagatggccagaaagatctattatttttcttgtgtatcacataatgtagccagttatccatcaactaagatatcttttgaagctaagaatcatactttgagtttaagggtgatctatgtataaattttcttcttcgcgatggactaagtggt

SEQ ID NO: 165830 - DNA, 338 bp, Glycine max
  unsure (1)..(338): unsure at all n locations
aaacgaagaaggcanacaaccnnccccagaatttcttttttatcgaaagggagagcgaacncangcacatacttcctttcgaacattcactcgcacaagatattcttctaactaagaaaaatgcactgaggcacaatcaaggcaccttcgttacctagatcacttatatgtccttccaaggtgtatttgctacctacatcacatgcacttcctttgctaaatttacatacatgcatactcaagcattttggctaccaaaaatggcatacgtgcacattctggtatttctaatacctatacatatacaaactttgtgatgaatcttggctatctacaca

SEQ ID NO: 165831 - DNA, 409 bp, Glycine max
agcttcttatccaaggcattatcttgtttgtgaagtttctccatccatggcttattctctagtggatggtgcctcctctcaccttttctcatttatcttccgttgcaactccatggctgaaaatcaccattgaaggactttattgaagctcaaagatccggcctccatagaagcttctcaagcaagcttccattaagtggtatcagagcacaagagcttcaagtaggtgctctttaaacatccattaattttcagctttaccttctcctccattgttgtttcttcatttttctccatgtatctcctcacattctagtgttgaatgttgttaacatgaatttttagaatttccaccgattaaacttgctatagaagctagaattgattttctatgattcacaattcttgg

SEQ ID NO: 165832 - DNA, 355 bp, Glycine max
actcaagcttgagtgagagagtgcatttgttgtttttggtcacaactgtaaacacaaaggcaaacacacttttaagcagaaattctaggagggtcaaagaaagtcgaacagaaatagaaaactaagcgaggtttgagggagtcattgaattcaaaccttcgagggaatccacaacttggacaaagatgaacgtaagtaaagaagaaggttacacgcgattgacaggaagctaattagtgattttgggaataataagtaagattattcaaagacggtcttatataaaaatcgtctttgtactagcaatacaatcatgacggtttttgtcaacctgtcgttgtactccttgttcaaa

SEQ ID NO: 165833 - DNA, 420 bp, Glycine max
gggatccttaagcaccgcggctgcagcttatcaacaggtttacttgtttgataagtatatagaggaggaagaaagtgctagtggccgtatgggaataacaaatattaaattggttaagatgttacttataatagtctatgggaagtactttactttgtatacctgtaaaaatgacttaaagttagaggtgacgaggtgtttagctaaactaattaattaagcacttattgaataagtgtttatgtttatcatgcaaacacttatgtataagttgtttctacaattgaagagaaaatagggttaaactcttttcatatgttataagctatcttgagagcttatggaaataagttgaaaacaacttttgaacatattttaagccattttcataaactctcttaaacacttgtacaattactt

SEQ ID NO: 165834 - DNA, 352 bp, Glycine max
tgtatctgtatcagttcttcatcgttttggaaattcaactgctgtgcagagtgctgttcttgagagtcctttgtagcttctactgaatgttggggactgacatcctcttagtatgagttgagagctcccctattatttaagctttactgtttttgagatgacgagttgacaaatatttagtgtgttttggaacctcttttcatcaggaagcaacattttgtgtcattcacattctatgatgactgtttccatatgttcaactggtaaccaaactcatgctaacacagttaatgcctctgaaagatgcttcgcaatgaggaactcatcaggaacaaagtctataaagtattaa

SEQ ID NO: 165835 - DNA, 417 bp, Glycine max
  unsure (1)..(417): unsure at all n locations
agcnttttattatcgatgcagtatacaagtggaagcttatgtctgaaaatacagggcatcatttccttatataagcagaggacaaaacagaaaaataacagaataaacttccatatggattttggtcacaacccaacatggatgcatttgaaagtagttcatgataggctaattttagatattcaaggacatcaagctaggtttacttcttcatgatggtatgactcggactcttctaatgctatgttagccatcatacaaaagttagcttcttcgctatcctcatccgacaatgtgtcgtctaagtcttcccgagtactataagctccttcttatcttttgatttgataaataataatgagagagatttattaatggattagtggtctcattaataaatttcttatatcttgaatt

SEQ ID NO: 165836 - DNA, 372 bp, Glycine max
atactcaagctttagtcaaacagaataatccaaaaatgtttatgaattgggtgttgaaaaagcataacaagactttctgtgattggtttaaagatacaatctttgtagatgaaaatgcttcagaaacattaagaaagctagcagatgggcctaaaagaaatgttataacttgacaaggatacgacataaacaagtattcattttacacaaaagcacaagacgacaaaactacaatgcaaaacagcggggtcaccctaagggctgaatctcaacactttgcaagtgtgcatgatgtcaatccttgtgtagcttccaccccttacgttgggttcattgatgaaatttgggagcttaactatatgaaatttactg

SEQ ID NO: 165837 - DNA, 419 bp, Glycine max
  unsure (1)..(419): unsure at all n locations
agcttgcccaaaggcattccataaaatttattatnttcttcacacactccngncacttgagaatctcaaatgcccccccccccaccaccaataaggcttaaaaccctagtatttgaaattggatatacaatgatttctgtcaaatttcaaaatcccgtcaagtttctctggataccaccacctctaaagaatgaccccaacattgatggctataaatcattcaatagagctcctttttggtgtaataaatacaatttaaatttccaacattaaagtaagcacatatattcaaagtcagcccctttctcttctgcagttacccgtaacaaaaacctgaatctctctgcattattcaataaatatgctggaagatgcactgctgagtaagaatgaggaatatgtcccaatctcccaatgat

SEQ ID NO: 165838 - DNA, 358 bp, Glycine max
  unsure (1)..(358): unsure at all n locations
gcagatcaacttgatgcatatgctttttttggtttaagcnganccgcattaatgcatacggatatgcggatcatctacgtcctaccctatcactattgcggattagataaattcatacgcggatcaagcaaatgcctaagcactacacagcaccaccaacaatggaaacgcaaacgacggggagggagaagagggcttacctcgacaatgccgacgagctgaagaagaagacaccacgggacgtgccgcgcacaacgaacagagctgcaatgcgactaaagaacaacgtcgcaagggctcaccaaggacgctgcaatgctggagaacgcaaaggaagcaccagaagaatggagctgcg

SEQ ID NO: 165839 - DNA, 416 bp, Glycine max
  unsure (1)..(416): unsure at all n locations
ctgcaagctgtggccctcatnccctcttgtatatttttaagangnggataatcccaatgccagcaatcaaattccgaatttctttcaccaatctccatcccaaagagcaagataatgttgtttaaacctttttgatggactaaccatagcccccgaatactccccataactcggccataaaaaccgatcctctgcctatgcacttggaaaagccccacaaccatttccatcgtgatccctcaacaacccgccaaatcatgctaaaccacccaggctctttacagccccatcagtattgaggcatagccatccttgatgaggggatgccatttaatctgcacttggatcttggacttaatcaccacccgttggtgggtgatctatgtgcacccaacattttaagtgaataggtaaaa

SEQ ID NO: 165840 - DNA, 409 bp, Glycine max
  unsure (1)..(409): unsure at all n locations
agcttatgcgcatatttccctacnaacttttatttgcacaagacatcctattaactaagaaaaatgcacccatatacaatcaaggtagcttcattacctagattatttacatgtacttccaaggtgtatttgttatttacatcacacacgcctccttggctaaatttacatacatgcatactcaaagcatttcggggtaccaaaaattgcacatgcgctcatcttggtatttctaatacctatacatatacaaacttcatgatgaatcttgactacctacgcaataaggtgctacatttcatgctttttttttttttttaagtttttgctacctaaagccacatgcaaattcaagcatattttcctttgctgactaaaatggtattcaaattagaaggtatatactttt

SEQ ID NO: 165841 - DNA, 349 bp, Glycine max
ctcaagcttttgagaaattcaaatgtttttatttcttcacacggacgtccgacgcaggcttataatatatcgacacgctcgaaattaaacatcggaaactctcaagaaattcctatggtcagaacttgtgacatggatgtccgcttggatcgcataatatgtcgagaggctcgaatttgaacaacggaagctcctaagaaattcaaatggtcataacttttcccacgaatgtgcgatttaggcttataatatatcgctacgctcgaaaataaacgccggaaactcttgagaaattcagatgggcataacttttcacacggaagtacgactcgtgcgcataatatgttga

SEQ ID NO: 165842 - DNA, 400 bp, Glycine max
agcttggatttccttttagtagggaatctatccttcctatgatggagccaaacccagtcaccctcattaagaactagctcttttcttcctctattgcctttagttgaatacacttttgtttggttctctatttggttcttaatcctctcatgcaaattctctacaaactctgacctagattcctcttcgttatgtataaaagaagtgtccagtgggaggggaatgaggtctaacggtgttaggggattgaacccatagacaacctcaaaaggggactgcttggtggttctatgaacccccctgtgtaggaaattcaacatgaggaagatactcatcccaagacttatggttgcttttcagcagagcccttaaaagggtggataaagacttattcactacc

SEQ ID NO: 165843 - DNA, 352 bp, Glycine max
aagcttcacataggagctacgtcacatattttttaaccaaataaaaccaacagattcttgcctattaatagaaaaacataaataaaatggtcttcaaaacaaatggcaacatgtgtcttcgatcattgatcgaggccgtacccgaatcaaataaacattaaaatgcagtaactaggaagtgatcctaggtcgtttcccaacgagcaatgataaaccaaatgttcatattatacttgcagtaatagtaacaatgggggggggggggtctaatattgtctttgtaatctcctctaattacttccctcttatctcttctcatgtccacctttactacatccatctcacccctcct

SEQ ID NO: 165844 - DNA, 408 bp, Glycine max
agctttcctacaagttctaattgactttcttaactagaatcaactcactttagactccaatttccactaaacccaaatttggcttttcaaaccctcaaaatctcacacttttccactcacatcactatcattctcacatttaaccctaagttaactctccccatcatctctaccagttttctatcaacattttcagcattcatatatcacaaagcatcatcataaaaccctaaatcagaatgggtaatttggctcacatcaaacatgtcaagtttagcatgatttcaacaaattccttcacaaataattacttaaggcaataacctagtagaactacccatcataactcccaaaaacctaacacccatgaatttcatgtgagaagaagtccacccgtaccttaaattc

SEQ ID NO: 165845 - DNA, 362 bp, Glycine max
  unsure (1)..(362): unsure at all n locations
tcaagcttttcgattcgttctacgtacccattgtggtccacattgngtttcgtgtatctttattctcatttcatttactttttataccccctgttgacgtgcttaagccattttacttaagtcatttctcgcttaacttaaaaataaaataaatttccaccgaacgtttgaattgtattatccattaacttcggttaaaatgaattccgaccattcggtcgtgccgtaaccatgttggaaatcaaaaaaagagttaaaaaataatataataataaaaaaaacatcttttagtaaaataaagcggaaaatcaatcggacgttttttctttgggatttctcattcttaatcgaattgactaaat

SEQ ID NO: 165846 - DNA, 400 bp, Glycine max
  unsure (1)..(400): unsure at all n locations
agcttgctncaaaaatttattgatgtttgtattnangggaggagggtatatgccatttttgctttaagagtaatgtcccgctaaaactaactttccaaatgtttgccttcgcaggaatggccccgaggaagcttgcctcaaagaggtccaggaaggacaaggcggccgaaggaactagttccgccccggagtacgacagtcaccgctttaggagcgttgtacaccagcagcgcttcgaagccatcaagggatggtcgtttctccgggagcgacgcgtccagctcagggacgacgagtatactgattttcaggagaaatagggcgccggcggtgggcaccactggttactcctatggccaagtttgatccagaaatagtccttgaattttatgccaatgct

SEQ ID NO: 165847 - DNA, 364 bp, Glycine max
  unsure (1)..(364): unsure at all n locations
tcaagcttttcaatttattctatgnacccggtttggttcnncattgntnntacgggcttnntattttcattntatttactttccgtacccccttttgacgtgctttagtcatttgcttaagtcattttctcatctaatcaaaaaataaaataaatttccaccaatcatttaaattgtaaaatccgttagtttctattaaaatgaaatccgaccgttcggtcatgccgtaactacgttggaagccaaaaaaaaaaagagggtaaaataataatataataataaaaaatatcttttagtaaaataaatcaaaaagaatcaatcagacattttcctttgggatttctctttcttaatcgaatcgact

SEQ ID NO: 165848 - DNA, 375 bp, Glycine max
  unsure (1)..(375): unsure at all n locations
agctntggtgaagaggttatcagnaatagatcttanaaaatnngncagntgttcactcgctaagtgccaagtattcatacgctaagcgagcccctgctcacgctaagcgcttaaacccctgattaatggctggatggtagcgctaagcccaattatctctctagaatctgaatttctcgaattaggcttagcaaggtgatgcgctaagcacaattccctctctattttggaaatctttggaatagcactaagcgcaagccatcactgcatggaggagcatgtttatgcgctaagccccacctttagcagctaacgcagagcgcaggtcctcgcgctaagcctaaaaacctctctggaatttgaaatttgtgaatt

SEQ ID NO: 165849 - DNA, 360 bp, Glycine max
  unsure (1)..(360): unsure at all n locations
agcttnnnatcattaaggactagcaagattttttatctttgaacttcatctcatgtcataaagtcagaaatgcacaaattgaatcataaggacttttattggcttgtaatgaggctgggctacaaaaatattggtttttctaagattcaaaggcttaaattctaagagagcacaaatcctagacttaaccaggatgtcacaatactcccaccctttaaggaattttgtccccgaaattaactactctatgaacaaacttgggtacaattctctcaccctatcctctaactcccaggttgaatcaccctcgtcgggtccccactgcactttcaccaacgcaatctccttccctctcaacga

SEQ ID NO: 165850 - DNA, 397 bp, Glycine max
  unsure (1)..(397): unsure at all n locations
agcttcaagagaaagacttaaatatttttctttgcgcgaaagaaaccgtatctgcggatatttatgcctcacttctttatttattttttcattttttaaatcacatacatacagatggccatactatattgcagaatctaaagaaactacttcgtgttaccaccttgggatgctcaaagaacattttgcaatcaaataaaatgtaatctgagttggcctataacaacaacatttggcttagatttcagatgttcggtcgacctataacattgataatgctctcccatctttatatctttatcatcacgctctatgcactntactttagagacaagtgtatgcatctaataaatgctttaaataaaactatgtggcaggtaatatagttagattcgaa

SEQ ID NO: 165851 - DNA, 335 bp, Glycine max
  unsure (1)..(335): unsure at all n locations
ttatttatttatttnccgaataagtaaccgagatatacgccccatggctctgagtattcacggactttcagcgttaattggcaagttgaaaagcccaagagatatactccatgaaatgatgagatactaataattgatgtgctactgcccgaatgggggagaatttaacgatgccaagaattctcaactatgtaaactacatattgatgaaatgggagaatcaaaataattaactgaattggaacacgggaatcataagatacgtgccctttttgaaggacatggagatgaataccagcttaacccagacttttgcatcccttcattatctgcca

SEQ ID NO: 165852 - DNA, 379 bp, Glycine max
  unsure (1)..(379): unsure at all n locations
agcttgcacgatccgtgaaattccgttangangcagaagtcgaaaagaggtgtttttgcgcaatccgtgagtttccgtaacttcttggaaagctaaaaaagagtaaatacataatccgtaaggattcgtagccttgcggaagggaaataagtatcgttacnaaattcttaaaggttcgtaacgttacgaaaaagaattaccaaataaataaaagggggggtgcatttagtaaaaaaggggtgcaaatagtaaccaggcccacttgggccctccaaaagattcctccagaaagctgttgcttctggaggaagcaccttgctcgcctgggcgagatgggccggaagcattttcccaaatttgctatatatagggggagaag

SEQ ID NO: 165853 - DNA, 405 bp, Glycine max
  unsure (1)..(405): unsure at all n locations
agctttctgccttaagctatatctnttacttcccatangnnncaacgatatcaatgtaaacagatatatcattatcaagaataataccatttctctctgcatgatacaacaaatggtgggctgtctcaggtaagtccattctacagtagactgacaccataccttggtacagacattcagatgactcaacaccattgaatctcatgtcagagaaaatctgagaagctacatcgaagagttcattctgtatacattcctgaataagagattcatacattgtacaacttctaaattgaccaagttctcctttactctgtattcctccaaggctgcatctaactttttagccttacaaagtataatgatgagtgcttctgtgatcattgaatatcatttggagcatgt

SEQ ID NO: 165854 - DNA, 354 bp, Glycine max
tcaagcttttgttcattttatgcaaaatttttttcgtcaagcaggctcaacaattttttgatcaagctaagaatcgtttcttgttaactgctaaaacttacagcattttgataagtggatggggtgatattggtgattcagagaaagcccatgagctgtttcaagcaatgcttgaacaaggatgtccagtggatttgcttgcatataataatttgttacaagctctttgcaaaggaggttgtgtggatgaagctaaaactatttttcatgatatgccgtcaaaaagagttgaaccagatgcttttacttattcaatactcattcactcatactgtgatgcagatgatgtgcaat

SEQ ID NO: 165855 - DNA, 362 bp, Glycine max
  unsure (1)..(362): unsure at all n locations
cttcaagtgcacagtgcaacctggaaatcattagcaacagatcaacatcttngctaatcccaacaaacaanaattagaactcagatcttccctatttccanatcatatacagaanatgaataactaaatccaatttattaccctgaacttangtaaaagtgtccacacacacacatcccanaaaaaatctctctcatccctttgcgaaattatntcagtggctggatactacaactgacagtattancatatgaagcccctttctttcaaatacacccaatacataatgttgttccttttctatccttatanagtgatatcagcacatgattatagatcttcagtcacatttatataataat

SEQ ID NO: 165856 - DNA, 380 bp, Glycine max
  unsure (1)..(380): unsure at all n locations
tctgttggttcttccttttttgtacttgatgtacatacctttatatctatctaatgatgttttatgtgttccttgcgctatcaatattgtatttaagtattgctttgccttgatcatgtagatgcatgcttttgtacgatcattcaacagtgggaactggtctgattcttagaacttgataggacagggctagtttatcgtattatcacgagggatcggggtacagtaacctagttggttgtatgtttgtcttaatgcggctctggtcaagtttagtccaacaagagagatctgacgatgatgcttgatcacgattangctagactatcacgagggattggggttaagcattttaggagataccatataacacatgagca

SEQ ID NO: 165857 - DNA, 420 bp, Glycine max
  unsure (1)..(420): unsure at all n locations
aatagggacggcagtgacgacataaattgatgatagtaacctctccagccatggatgaaaatttctggttccatttagacaatttatcttcatatgtcctgatcagcggttcccacaccaagctgttggtggacttttcctcaatgggaatgcccacataatagaaaggaatctccatatgtctatagtacaaaaattctgctgcctcatgaatccagttgacctcagctccaaagatcccaactcgactctttgcaaagtaatcttcaatctagatgccaattcaaaacccctcagcatagacttcagagcaataacattatcctatgaagcatgccccacaaatactgtatcgtctgcatattgcagntattaacctgctcatttgcttcctcctgaaactaggtcagattctctcta

SEQ ID NO: 165858 - DNA, 374 bp, Glycine max
  unsure (1)..(374): unsure at all n locations
acactctgctgctcaagtatcatggtcttgcacgtgaagatcttcttaagcctcataaagaattccatactgttctgttccactatgaagtcctctgatgtccaggaatatcatatctttctgatgtgccatcatcttctcctatctcttaaccctcttcgccccatgntaaatactgattacgcctaatcagtccaactcattacgcagttctattattagggcccattcagctcattagacgccttaagataatccctgacttaatgacgcatggggtcgaatcacaaaggccttgggctctatcctaactgagcttgactgaaaacgcatgacttttattctagacatagatctatgcatcctattcatca

SEQ ID NO: 165859 - DNA, 355 bp, Glycine max
ttactaagtatttcctaattagatgatttagatgatgcattgtaatgtgtagagtcccatgatgtcacaacctagaatcatctattttacttaccaagcaacttagctcatgaaatgatgcatgttcaacatttagcatatagatattacctattctctttccaatgaggacacctttaccggatatgacttcacttatatggcaataatttctgttgaattcaactttcaagtattcatcacaatgttgactaatgctttagtccatccacatataacacagttcttatctaattcttccctatatgcgtttctccactatttttctgtgctatggtctcaaacatgacatatc

SEQ ID NO: 165860 - DNA, 271 bp, Glycine max
  unsure (1)..(271): unsure at all n locations
catatgatcgagttgatcgtccatataattaggaactgctgatgcatttgatttaggctttactttgacacgataacaatattgctcttaggaanatgagattgattcaacctatgtcttcgctaaattattgtgtgggccaatactttgatactcgcattgcatgcatcatgttattcattgcgcttactcatgctttgtctttacattatagcataaccctaccaaaaacaacccttacacacctataaccgttcaactaatatgataa

SEQ ID NO: 165861 - DNA, 459 bp, Glycine max
  unsure (1)..(459): unsure at all n locations
ataatatgcctcttatctttagtggagtgggttaccatttttggccaacccgtatgccaatttttatagaggcaatataattaaatatttgggaagccatagaaatagggccttacattcccactaaggtggcaggaaatacaaccatagaaaagcctagggaagaatagagtgaagaagaacagagattagtgcaatacaacttaaaagccaaaaatataattacatctgccttaggaatggatgggtactctagggtatcaaattgtaaaagtgcanaagacatgtgggataccctatcagtaacacatgatggcacgacagatgtaaaaagatctatgataaatacattaactcatgaatatgaattatctagaatgaattcaaatgaaagtatctagacatgcaaagaggttacacatatattaatcatctgcatcttatgaaattttttcaatg

SEQ ID NO: 165862 - DNA, 418 bp, Glycine max
  unsure (1)..(418): unsure at all n locations
aattacgaagcatcaacaagaatcaagccaaggctattgtgcaagcaatcaatggggcaaaacacaccaaatgattatgatgatggatggctcacattatcacaaaggtaaactcatcactttcaaattgagctttcanaactatcatgacatgtagaagagaatcaaggatttcaagtcacaaaatgtcaagaactcttattttcaaaacaattacccatttcttgaacatatcctataattcaaagaanaacatgcaaagtcgtacatgcacacagaattgacccaaaatattaaactaganatccggcgaaactaacaacattaacaattaacacaactaacaaattaacaaaaccaacaaaactagctaaaccaaagaacacccccccatacttaaacaacacattgtcctcaa

SEQ ID NO: 165863 - DNA, 308 bp, Glycine max
tatccatcttcaatcatctttcatatctacttaatctcttaaagcctgtcacaaaactttcagagcatttgctcgcatcaaagtggggtcaacacttcctcttcagaaagtcttgatcataactggctagcatcttctatctctctccttgccaaaaacaagataccgcctgatcataggctcctctctttcagaaacaaggccccctgaatctttatcttctttcttagcaaaattcaggatacattggaatcttggtcctacaaatcaagctacgccaaacttgccaccatgagtcatctgggcag

SEQ ID NO: 165864 - DNA, 375 bp, Glycine max
  unsure (1)..(375): unsure at all n locations
cagtgagtggaaaaaccagaattacccttcacttaacctatagtttccatctctcctctcacactaacctacaatatcacaccattcacgctgaaaaaatctctcatcctctnttctttaattcgttcatctcatcaatttgtgcttcatcaatctgtctatcatcatcctcgtggtcgccatcatcccgatgtcgccactgtgaaagttcgctctcgccgtgtgtgtttnttttctcactgtattcttctacctttacggattggcaacccgtatggactatatgaatngtcaatctatataggtagaatacagcggaaaaaaaaacatactaattagtattaataatccctgagtaacattcttaaagtaata

SEQ ID NO: 165865 - DNA, 423 bp, Glycine max
cataaaactaagcttcataagtggttcagagctaagagctcaagattgttctccttatacctgcataaatggttcgctgtaccttctcttccattggtggtgtctcattgtctttatccatgtaccttctcacatgtcctgtgttaaatgttgctaacatgattctttagagcttcctccgatcaaacttgctatagaagctagatttgatcttctatggttcacatgtcttggtcttgttcttgaaccatgaattgcgctgagcttacgctcctttgagctctgtcttgtcatttcttcttcgtggctgcaacctaaaccatataactcttactaaactcttacagtataagaatacctctcaaatctatagtgacttgtccaactattgtagttatgtcataccactgctggctagtcatg

SEQ ID NO: 165866 - DNA, 486 bp, Glycine max
  unsure (1)..(486): unsure at all n locations
tctaaactttatacaagaatgaagctctgataccacttgttatactagtggcctcagatatcttaagaagggggggttgaattaagatattccaaactatttctcctaattaaaaatctatttcactttttactcaagttatgaattcccttaaaaacaatcttcttaaatattaattcaaatgaaacaatttgaatatgaatataaagcaataataaataaaggagattaagggaagagaaaatgcaaactcagttttatactggttcggccacacccttgtgcctacgntcagttcccaagcaacccgcttgagagttccactatcttgtaaatccctnttacaagttttaaacacacaaggacaatccttcctttggtttagaatcctttcaacaagagactatagctcttatccctagagaagagaagagaaaagataatctcttagaagagaggtttacgatggacctcaatattcctatg

SEQ ID NO: 165867 - DNA, 327 bp, Glycine max
agttagtttaccaagaaatgctactctttaaacaaaaatggcatacaacatacaaacatcaatggaaatttagaggtaacttatgcacatacttctttacgaacgttcacttgcacaagacattcttataactaagaaaaatgcacccatgtacaatcaaggcacatccattacctaaattatttatatgtactctcaaggtgtatttgctacctacatcacatgcactttcttggctaaatttacatacattgcatactcaagcatttggggtaccaaaaattgacatgtgcacattcggatttctaatattatgctatcaaactt

SEQ ID NO: 165868 - DNA, 432 bp, Glycine max
ctcattgcttcatgatgatgaatcaagagtgagtcacatgtgtttgatgattcataagatgatgacacacagctcatgagattgatttccagacttagtcccgaccgattcattaatcagcagaaacattcccgagaagcttcaagtttcagccttcatcaatcaagaatccagaatagtctagagcgcgactcatgattccggagtcaataaaaggctcaatcaagataagcccagaaaacagttcttcataacattcagtagcccacgaagttttcacacaacgctttaccatagagcttttactctctggtaatcgattacccgtggcaagttgtgttcttcaaagctttcactgaattacaacgctcccatcatctcaaatggtgtatcgatcacacatatggtactcactctactgtgttgacgctg

SEQ ID NO: 165869 - DNA, 388 bp, Glycine max
  unsure (1)..(388): unsure at all n locations
tgagctaagctctagcttctcaaggaagtattctcaaagaagcttctcaaggaagttttctcaacaaagcttctcaaggaagctacctagtctataaatagaagcatgtgtaacacttgttgtaactntgatgaatgaaagtcttatgagacacacttcaaagttccacttctctccttcttttattccttcaatttcgtgctccccccttctctcttttntttcctccattaaagcatcatcttcaagcttcttatccaaggcacattcttggtggtaagctccttcttccatggcttattccctggtggatggtgcctcccctctcctcttctcctttgcctttcgctgcatctccatggtggaaaatcaccattgaaggacctca

SEQ ID NO: 165870 - DNA, 341 bp, Glycine max
  unsure (1)..(341): unsure at all n locations
cgatatctcattcgcctaacttgacctcgtattctatgatatatgctcaaaagacacaaggtatgtcatgcatgctcgcccaatacttctggtctaactctaaaactgaattttaacaccgaaattcccgaattcatccattttacaaagtttgtagatatctttattaactctcctagcatataaagaacatcataattagagatctatagcttaagttatgactaanatgctgatatagtgtcaaaatatcactaatgctggcaaaattaagaccaagtttgaaacctagaagcacacgtagactccttggtgatgtagccaacttcaataaatcacac

SEQ ID NO: 165871 - DNA, 240 bp, Glycine max
  unsure (1)..(240): unsure at all n locations
acattagtcaactccttcaagtatctttgngaaagagacaaagtcaaagtatgtctcacgtacaatatcactaaatcttagagaaactcttgattaattaatgagtttaatccttatctattaataatataaaataatcttacactataattcaatcttaaataattattttgatttattttacaagcaaacttaccatatataatatgtaataatagaatgattatatataacctttta

SEQ ID NO: 165872 - DNA, 362 bp, Glycine max
  unsure (1)..(362): unsure at all n locations
tctttagtgtgaaaacatgagttcacgcctctctctctctcaaaacaccgcccaaacaaccctagaaactcctcctccaccacgagctgtcgttgcttgccgtcgaaccaccgcatgaagaggaatattttaatcagagtggaatcctcacaatccaccttaaggatttggtagagaaacaagctctcaatcatttctttcatagtttgtctaagggaatcttgacttatatgcctttctccaagtttggttgagcatctcttagtgtctcttgtgttttgggtaccgtaataggatgttttacacttcctttgaacaccttgaaatgagatgtngtaaatttatctttctatacaatgatg

SEQ ID NO: 165873 - DNA, 461 bp, Glycine max
  unsure (1)..(461): unsure at all n locations
tcattcaccccagaacctaccccaagcttcttagaatgaatgcactcatgggatttgcgacttctcagccctaagtcaccattgtttgcatttttggttccattnggcattattgctcactccattcaactaagtacaccatccttcggttctctagctttccattgatgcatatttgtgctctaaattgtatgtatttgctcaaatccgcgaagcacattgtccttgaatttgtgcttgttctgttgaattggtaaggttccccctaaaagtgcacccaccaagtgctcggtgaaatgcctcaatggcacttgagcacaattctgtgaattttgcttatgaaattgacttgcgcataagtggctgtcattgttgagtttagggacagcttgtagaaactaagataggtgcccaatatgtgctangcctaaagaaccaccttcgtttttgatggcagaaca

SEQ ID NO: 165874 - DNA, 410 bp, Glycine max
  unsure (1)..(410): unsure at all n locations
caccctattcaagcaagttgtgggaagaaactattttgatcataaaattgtaaacccctcaaattatgtgttatggccatacaatttttctcctctttagaattaataaaaggcatctgcatttgatttatggcgttgtacaatttttttgtgtgttgcatttgctagcatattattctatttgggataaaggttctacgtatctagtattgacatttagtacgtgacacaatttcttaaataattttnttttgtttatatgaatcagtaataagacaactggtttttgtcttatatgaaataattttcttggccaatcgtcttttttatgacacggtgataagatgataantctatgtattcatgtggctagtataaatatgtgatagtaccgtcgatatatttgttcg

SEQ ID NO: 165875 - DNA, 258 bp, Glycine max
  unsure (1)..(258): unsure at all n locations
atcaacccacttttaccatcttattttcaaacagagcaatgctaataatatactgtntaacacatngttattgggttgatattcacgaagtccacanaatgatgtgggttctgctccttatttagcagactccaatccactattagtggactccacatgaattttacccaataataaagcatgttgaaagactatgtcagagtgtgtgctagcattatatacaaatacanagcttactcctctntcctcatggactca

SEQ ID NO: 165876 - DNA, 311 bp, Glycine max
  unsure (1)..(311): unsure at all n locations
gcacctcatctagttctaacactaccatgcttacctgtgatcgaggcantgagccggttatccagtattctaatagggcccaccaccagcaacacaaaatctccgaagatctaatactggatgagtatgcttctctgaatgtcagtgattcttaccaaaaattcattactagtaccaacagccaaccaacaaagaaacttttctatggggcaaataaatagaatcatgactcaaacgaacataagaaaaagatgattcatatggagattgaaaggataaggacacaacatatggctaccttctatgcccct

SEQ ID NO: 165877 - DNA, 374 bp, Glycine max
ataactaatgccattaacctagtgatttaaacacactatatgctgagtgtaactgaaattgtgggcaccaaaaagcacccccaacagttcacaagtcagccaacaatttggtctaccagaaggctgatgcctaagttgtccattgggcccttattacaacttgaactacagcccttttagtcgattaacccaaaacatatatgtggtgagccaactctacaaggatcgcgccattatttatacaaactacacactctaaaattgagatatagtggtgtcattcagtcctccttcatttgtgccatgatacaactcacaaacttggacttttctccttgagacatgcgcttgattcaaatagtatggacaacact

SEQ ID NO: 165878 - DNA, 277 bp, Glycine max
atcaaggatgggcgttttccggagcgaccgtctacttacggaccacgagcatctgacttcacgatgaaatacggcgcctgacggtgggcatcactggttacttctatggccatagttgatccacaaatagtcctttgagttttatgccgatgcatgggccaacagacgagggcctgcgtgacatgagatcctgggtacgggcacgagatcctcttgtgccgctcttctgcaactctatgatttctctggtgttgaagacgctatcacgttcacttgc

SEQ ID NO: 165879 - DNA, 306 bp, Glycine max
aacatccattccatgtcatcacctaaaccatgccacggtaagaatcctttctacttatagttatagaaatatgtttgccgagcaacatggtgcaaaggataatctcaaattactaccaaccttggtttcatcttaatctgttaattagtacaataaacgcatcactcacgtacattgtatttgactatccttcctaactctcacgccttgtatagcaagcttaactgctaatctttcaaaattctaactaccctacatagaggcggtacgacatatactgctgatgtacaataaagtgtacatagc

SEQ ID NO: 165880 - DNA, 399 bp, Glycine max
  unsure (1)..(399): unsure at all n locations
tcttctcctgctatcaagtcaagcagtacactgcctgtataaagcaggcaatgacagttctcttataatttacataccttcctgtatcaaccaaaacaatatcaacatccgtatatgttacaaaaaaaatgtgaatgaaactaatactatgggtccctttccacagatttgacaaatgaaggataaaggggtcttggtagagttaatgccaacaaaattcatacaataataaatccatggtatagatcaaaatttaagatgaccctgaacgggttcaaaagagaaaaggaaaagggcttctacgttgtgtttggaactgcatcaagaatcaagtaatgcataagctacaatggtgtatagttcgatacacantttttcctggcggtcanaacacccact

SEQ ID NO: 165881 - DNA, 280 bp, Glycine max
tgacagtgaaagattcagttataagattgcctgtttggtccttgtgcaaacaatgccttcttgttcttggtcggcagatgcgtttgtgccacaactctcacgtgtgtgcgcagtgaaatgagatgatggattctggacactatttccctcgcttgtacaccccatagtaatattttgtaaattctagtgtgaacgtttaatatgaagaggagaatgtagaatagttcatgaaatcttttatattataacatcaaaaaggaatgaaatctatgtgctgtgg

SEQ ID NO: 165882 - DNA, 282 bp, Glycine max
  unsure (1)..(282): unsure at all n locations
cacatgctttactatagactagacacacctacataaagcctccttgaaacttccatgaaactagagctagctcacaacccttctaatactaagtcactactgggaagctcctgaaagaagagctactacacacaccccttaattctacgccaccccatgccaagaacagaacaatttggctcacacacccntatatagctatctcaacgctgccaaatcatgaaatacataaacgtcctactataagactaccaaaagtgctgaaaacaaggctaaatccta

SEQ ID NO: 165883 - DNA, 267 bp, Glycine max
ttctaaagcagaaccaagccaaaacgcgctacaattcttccacacatgaacatcaatgtaaatttagagcaaactcatacagcacgtctcttgatgaaatacatttatgaacatacacgcgtgcaagatattctgctacttacaaattacactcatgcacattctaggaatcttgctacctacattacatacacgcactttcaaggcatcctgctacctaaatcacatacacccatattggcgtaatttacatacatgcatactcaa

SEQ ID NO: 165884 - DNA, 367 bp, Glycine max
ttccacattcacatagcgcgcataaacccaccatcctctgttgaccacctctaactgagctcacgtacttccgacgtagccatattctcttttctctcgacaccgggtccccatcaatcctctcaagcttcctcaacatccaagcaaaacaacattcaaacagcacaagctatcacagccaagcaaaacagagtagaggcagaaaactctgctcaacaccaaccaaaatcacagctgttctcactaatagaccccagtaagaattcttcaatcaattcgcaaccgtggattgactcaaaacttaccggagtctatagtacataacctacatgtgaccgttggattactagcaacatccagactcatc

SEQ ID NO: 165885 - DNA, 436 bp, Glycine max
  unsure (1)..(436): unsure at all n locations
gcttgngagataacaaatattatgcttaatattatcctatctatctattggctatacatttggaataaatagctgctatgataaatagtataatctcataataataaattggcagacgtgtatagtaatattgtttgtgcttcaagctataagacttgactttggatgaagattgaagaggatatagtacatataaaatacttaagtataagtatcatttaaatcttgagaaaatattaaatttgttaaatagtatgaagtatataaatttatcaaagcttaatctttcaccatttaattttaattaattattttttactcgtgttattagtatgtggcaataattcatgtgattaagtctttattcgaatatttctcatcttatgagctgctgttgttttacataatttagaacttctcgatccttgccctgtat

SEQ ID NO: 165886 - DNA, 374 bp, Glycine max
tactaagctgttccaattgaagagtgtgaactgttctagcctttatataccttgaccgagaaagtccctcatgtacaagtctaaacatcaatattcaaatagttgctcacttctcatggcaccaaaatactagttttcatcccaactaggttgcaggtgacttccttggagaagggagtccttacatttggacaaaccactcttggaacaagtcaatatatagtgtattaccttttaaccatttggccaccaaaactatcatttgtccctaagaacacactgggctatttaggctgctttcactgggggcaactgtcaatatttttaggtcaaccaaacattcaaatgacccccacaagcctgagaaatattta

SEQ ID NO: 165887 - DNA, 64 bp, Glycine max
attagaaaatacaagaaggaaagcacgtaaggtccccttgattcacaagctacgaacttatcct

SEQ ID NO: 165888 - DNA, 329 bp, Glycine max
  unsure (1)..(329): unsure at all n locations
ctacgntcttcttctgtatacacacactatataatattcttttacatcggcaaaccatagacaaagccgtaaccaaaaccaccattctcgtgttttgaatgacaactagatctacgcatggtgaacaccaccatgggttttgaaactcaatattagatcatggcaccacactcacacggtgagcactaccataggcgttgtgttcatactttgctctgtgtaaagcgaccacacactcaagggaacacatggaacaccatctatggaggaaccctaattcgcggatcccatctctattatcatcaaattgcgaaacctatttaggactc

SEQ ID NO: 165889 - DNA, 428 bp, Glycine max
  unsure (1)..(428): unsure at all n locations
tatcctaaagttgcacataagagctatatcgataaagtacttgatagattcgacatgaaagatagtaaatcagaagataccccaatagctaaaggagacaaattcaatctcaaacaatgccccaataatgaccttgaaagaactgagatgcaaaagattccctatgcatcaacagtaggacgtctgatgtatgctcaagtttgtactcgtcctgacatatgcattgtcgtaggagttctaggtagatacttgagtaatcttggattgtagcattggaaggtagtgaaacgcgtaatgcgttacttgaagagaacaaaagactacatgctcacttatcagaagtctgacaatntggagatcatcgggtattcagaactctgatctgctagatgtcaagacagcacacgctccacttctggatacatata

SEQ ID NO: 165890 - DNA, 381 bp, Glycine max
tgatgttgtgctctaatacacatgacaaccctccatgttagccctggcacaggagcacgaacatatcacccttaacagtcaagctactaaaccgatagggtatctctagataccttattatttgaatattaatgataatgttacaaccctcttatctagtggcaggtacttaattatctataagagacggattatctataagccatgacttatctactagctattatctacaagctaggaattatctgcaaggattgttataccactgttagaagctctacaatcaaagactcaaagctcctctcccactctgtaaataatagatcctatttcacccttattaattcattgtcaactggctcacatacttacttgagcgtc

SEQ ID NO: 165891 - DNA, 406 bp, Glycine max
  unsure (1)..(406): unsure at all n locations
gcagcttaacctcatcgtctctacagactttatgtttgttatccatccaanccttgggttcagagtctcagccacttatgatagccgccgatgatcccattactgcttcccctaagctctctgtcctctcttacgccgcatnccatgccttgcgaactccttggagtaccctcgcgttgtggtcactgaaacctcgtgcgatgaaaggcatgatgctttcgtctgatggcactcctctcatgggacatccttcgcatgaagatagaatcctgattcttccttccttctagcgagggaaccatttaacagacgcccctccatgctagccaagagttggttcacaacaaacaattcttgcgccgctcttttcacatccccggtcgaacgtgtcatacatggccaaaat

SEQ ID NO: 165892 - DNA, 305 bp, Glycine max
ataaatagaagcacgtgttataccttgcgataaccttgatgacctacagtcctgtgagacacacttcacacgtaaacttctcttcctctctttccttcattcccacgccactttctttctctctctctcattctctaccttcattgaagcgttctctctaagcttcttatccaaaacactctcttggtggtgaagcttattcttccatggcttactccctagtggatggcgcctcctctcacctcttgtcatccatcttctgctacaactccatggcatacaatcaccattggaactcaaagatc

SEQ ID NO: 165893 - DNA, 392 bp, Glycine max
tatggtcaaagctacaacacaaatttctcaatcagagatctagcacaaagtgctgcaatgttgggatgcttcaacttcttcttcatagccttcgaaaatgccttataaagctcccaagaagagtgttatagtgagcctcatacaactagcacacttatggagtaagtagattcactttacatatgtcatgaagtgacagcaaacagaaccattatgaggttcccattttgaggaacctctgtgataggcatttggaagaaccatcaaaatagttattctgatgctttcttagaaagaatccatgctcgatgaagttcatattaatattccattatgatgtagcgtgatttcatcacttttaacacttctacacaactttaagcattctaaag

SEQ ID NO: 165894 - DNA, 436 bp, Glycine max
cctcaacttatgcaaaaatttgacattaactttctgtgcaatattatatataatcttcatcataagcccactgaaaatgcacttctacatgggatattaattacaccaaacattttacccttttgaagtcttctttcattgtcgcaatactttgacacactgcatacgttctttccattcatagcacatgcaaggtgtgtcaacgtcaatcttagagtcatatccaaatttagatcctagtatataccatcgcccgctaactctatttaattattttatcgttgaaatcaagacgtatacaaagatattataaaagcaacctaaggattggcacagttcgcaaattgtaaagtttcatgtatctgcctgtaaccaatgatttattaagggagatactaagtatttaatttctttattgaaaactttctttaatcaa

SEQ ID NO: 165895 - DNA, 366 bp, Glycine max
  unsure (1)..(366): unsure at all n locations
tgctaatcgattggttgatagaagctatttcttcacctggacttggcttaaacatttcgagaaagacttcacaacccatctaaatcaatggtcacgcaatattagacagggttttgtttatgtaatgggtgatacaaatagaacaaattagatgttctcctggtatctagaataccattcatctctggtgtctagatataaggactgtatantccttttgtattagtacctttggtactgttttaatcctatatatataatacatntattttgctgataaaaaaaaaacatatctcgtatgattgtataactgtaattgtgtaattatatccttaattacatagcccaactgtaggttaccatata

SEQ ID NO: 165896 - DNA, 351 bp, Glycine max
  unsure (1)..(351): unsure at all n locations
tattccctagtagatggggccttctctcaactcttctcccttatcttatgctgcatcttcatggtggaaaatcaccattgaaggacctcattgaagctcaaagatccagccttcatagaagcttcacaagcaagcttccatcaagtggtaatcagaagcacaagagctncaagtaggtgctcctgaaacctccattaattttcagctttaccttctcctccattgttggttccttcattttggccatgtatctcctctcatgtcttgtgctaaatgttgttaattctttagaattctcaccaattaaacttgctatagaagctagatttgattttctatggttcaaatttc

SEQ ID NO: 165897 - DNA, 151 bp, Glycine max
acttatagggagaggtttttttttctcaccacttacacgtctcttcccatgttttccatcgctgagggtatgctaactcttccacatccttggcattataagctagtatccgccgtgtcttgctaacccatcaggtcgaccgttccacata

SEQ ID NO: 165898 - DNA, 408 bp, Glycine max
  unsure (1)..(408): unsure at all n locations
aatacgaccncacaacttctattacagaatttatctctttaatatgcctcctacttctaacggagagggataccactactggaaaacccgaatgccaatcttcattgaggcaataaacttaaacatttgggaagccatagaagtatgcccttatgtacccaccatggtggctggaaatgcaacaatattaaaaactatagaagagtggactgaagatgaaagaagattattgcactacaatttaaaggctaaaaacatcattacttttgccctacgaatggatgaatattttacggtttcaaattgtcagagcgctaataatatgtgggacactctacaagttacacatgaaggtacaactgatgtcaaacgatctacgataaataacttaacctcatgacactacta

SEQ ID NO: 165899 - DNA, 315 bp, Glycine max
aactgcactcgaaccaactgttcaatggtgtaaaataaaaaattaaacctcccgtaaaccccaaagattcactctcagaagacaaaataactcttcatcaacattcactaattcatattcaactaacgaaagggtgttatcctctttaacgtcaaaatatgcggggtctgtgtgctcaatacgcccacattaactcactgcaagtctcatagatcccttgaacatgtcatactgtgcattacgcacacatacagatgcgccagcattcatatggctcactgcacaaagtaacacagtgattcaccactataacac

SEQ ID NO: 165900 - DNA, 236 bp, Glycine max
acttacacgacattcttactcgcgtcacacgtaacaatgtaccatctcaccttgaaatgttatttagaaacctatagataaaacttatttcttgcataagtaatgcaattacacaaaacaaaaacttggactaagcaacatctagacaccaaataaatccaactctcaaaataattcccaatatcctaactcgctttgctttagcacaagaactccctcacattttttccgccaaa

SEQ ID NO: 165901 - DNA, 345 bp, Glycine max
gatgccccacattatttccatgacacaaatgcaaaaatgatgaattggaaactttatgcaaaactggtcatgcatgcgcctatgcggacgctcaagtgtcaaatttttatggtcatgtgatgctagggctcacgattcatttcctctattctaaatcaacccaatgtttccaaaatatgttctttttatcaattgtgcattcctccaagtccatttcgggcgtgcgaggaagatttcacagcattcacccttcaggtgtagacacgttttttcttcacaaatcgggtatgatcaatgaatcttttctcaaagaaaagttggaaatcatctcttttcaaaagcatg

SEQ ID NO: 165902 - DNA, 404 bp, Glycine max
  unsure (1)..(404): unsure at all n locations
ntcaacaagagtcctcacanataattatcatgagactttatacttgcaagactacccatcatatctgccaaaaccccatacccacgataatcaagagggaaagaagtccacccaaacctgaaatttcgaagtcccactcgtagacacgcacttcacgaccccgaaaatgccctcctttcacgatttggggcacaaatgatggccaaaggttgaagctttgtgtggagcttcaatggtggatgaggaagagagaaagctacgtgagagagggagagaaaaggcttctgaattttcttggcgctgagtgaggagagagaacatagctttttgggtttaaataaaagggtgttctctttttctattattttatttaagcaatgccacatgtctccatttgagtggat

SEQ ID NO: 165903 - DNA, 257 bp, Glycine max
acagccaagctaccatgcctaaaacaacattatctggtaacaattaattgtagaaaaatagaagacataagacgcttaatcttgtcttatcagtgtaactattcctcagcgactcaatagaatgatggctccatatagagggggatatggacagtctattgagaattgtcttataaatgcttacgacagcgtgtgacataatgtataaaaattgtgctgtgagagcttcataagatcttttgagcttactttaataa

SEQ ID NO: 165904 - DNA, 295 bp, Glycine max
tatcagtacaattccgatatggctcccgatcgcactcagctgcagaacatggttaaaaaggaaagtgagacctttaaagagtacactcagtggtggagggacctggcaccacaagtggcccctcccatggtcgaaagggaaatgattaccgtgatggtagacaccttgccggtgttttactataagaagttagtgggctacatgccctccagcttcgtggacttggtattcaccaaggaaagaattgatgtatgtttgaagagagggaagttcgatcacgtcttctccacaagta

SEQ ID NO: 165905 - DNA, 365 bp, Glycine max
ctcagctggagtcattggtggtcttgttagtgtgatggagctgttcatgagcgattcaagactataacaagcagctattatagaggaggggataccaaagataccagtagatcatcagagaaaaattcaattgaagaagagattgaaacttaaactgctgaagcacaaatgtaagtttattatgcatataatttcaataccatttttgttatatgattttggttcttgggtatgacagaatttctagcaaaaatcggggaagaagagaaagcagtgagacaactcatgatgaggcacagtcagaaaatacatttctttgacttgctttattttggcctcttctttctaaatcatgcacacatctt

SEQ ID NO: 165906 - DNA, 400 bp, Glycine max
  unsure (1)..(400): unsure at all n locations
atagtttatgttaatgtcttatcagcttaaaatttggttttttgaataaaatttatatgaatctataatatatttggcacacataattgacaaatcgattaaatgctaatcaatcaaatatttgacacatatattaaaaaatatttttaaataatgtaaaaacaatttaaataaattatcacaattaaaatctatttttaaatntagtagataaaatttaaatagtaattagtttactaaatttagtttgataaaaagtattaagtttattaaatcaaatttgtaaaatcatctaaattccaaaatacaatattgaagttaaaacatataaatgtgtgttctatcataaactatcntacaagagaaaaaaaaattaatgtttcacatggtaaaatgtcat

SEQ ID NO: 165907 - DNA, 331 bp, Glycine max
  unsure (1)..(331): unsure at all n locations
gcctataggcttggacctccaaaagagtatggagatagcaccacttttaacatttctgatttaattccttttgcaggtggagctgatatttacgaagaggaactaatagatttgaggtcaaatcctcttcaaggaggaggggatgatgcaattctctctaggaagggaccagtcactagagccatgagcaagaggctccaagaggattgtgctagagttgctgaagaaagccctanggttctcatgaaccttacggtagatctctgagcccatgggccaaggttgggtccaattatccttntacatattagattaggatattattatattt

SEQ ID NO: 165908 - DNA, 429 bp, Glycine max
  unsure (1)..(429): unsure at all n locations
tatgttngattgggcattcttgtatatagtaacttttcaccacaatttacaagtttccattcaactgtaccccattccaccatattcttgtggctatgattgtggattagatgatagtattctgagaaattaccgtacttttgaaataatacaccttaacanaacaagaaaatgaaagaataaagcattttgtgccaaaagaaaatacagatcttgcatgggccacacaatttatntacgtgattttttacaagaatgacatatggagctgctgtntcagcatatggcctattctatctatgcttatggttttgcacttcagtcaatacaataatgaaccanaatacacagaagggccaatggatgtttcttaactagcagacatcctaanaattggtgcacatagcatggccgcttgctgcatggtta

SEQ ID NO: 165909 - DNA, 392 bp, Glycine max
  unsure (1)..(392): unsure at all n locations
cacatatgtttctatcttcctgncgcaatgtgccctctcggggcgagcgagggcgatgctcacgggtgcgctttccaaatgaggaaagatgcgccgagtccgcaccaaccgttatttgtggaaaacgcccggaaaattcaacgaaactggtcaaatgaatattctaaaatcgggaattgtatttacccttgaggaagggattagcacctctcacgtctgtctcataggacaacagcctatttnttagaattgtggaaattgtgttaccttaacttttatttccttttattctttgagggcgacaaaagcgggggtcttgctcctacgtaccctctatcanagagggaatangacctacgtagttctttcttatgcgtgaatcaagtgactct

SEQ ID NO: 165910 - DNA, 395 bp, Glycine max
ataacttggcctataattacatccagcagaactgttccttattttttaagcttgttagagaatagaatgtcacatttttcaatcttaaaatcccaaagcaagtcaagtcacgtcccactgttgaaatcacaagtcaaaagtcctatatgatatgtcccaaagatggcagaaaatttactagtccaaagccctatatgatatgtctcatacatgggacgcaatctcatgttgtgacacagtgatttacaaagcacccactccccacataaaagatcatacttgaaccattaattacttggtgaagtaaagaacatctctatctctatgatatgatatgctatcgaagaagatctttacacgtggaatacggtataactaatcaccaaaaactctgc

SEQ ID NO: 165911 - DNA, 384 bp, Glycine max
tcgcactatacgaggaagctttttcttattactcaatgcacgcatcccatgcaagttgtgtatggtatatcagaataatgaaactgcgcaactcgctaatcctcattgattatatataattctaagtctaattgccaattgactgattcctatgtcaggccttgtccgaatctaccaaatagtatctatctaatctctcatgctaccaattgcatggtaccaactactaatgctgggacagatcgatatgtctaaacttatgcatttcattagcatctatttatcaacacactttgcagactatcgctaattataaccaacagctatttttttacacaattataataatcacatttgtctaataaacagggaggactccacgtt

SEQ ID NO: 165912 - DNA, 218 bp, Glycine max
  unsure (1)..(218): unsure at all n locations
ccatatattaacaagcaagcttctacgatcctactatagacaatagaaactgagacccccacccatgacaattactctctgctctatatccatgccactaatttagagaacaatgaattggaatacactacccttatacatcaaatagaaggagaaaaaagatcttatgcccttttgacatcattgacatagccatcatgctnttacgagaactcaaa

SEQ ID NO: 165913 - DNA, 364 bp, Glycine max
  unsure (1)..(364): unsure at all n locations
cctcgcctgttggcctggtcctttgtcacaggaagccggaaggtccatatcaacttcttaattgtacatatggggcactgcgcccccaaatgcgcgagatagaaaaaataattttccgggctctcgcgtccgtaaaatgcattcatatcatgcaccgcataaacatctcttcaccatcataatgaacatatcgctcctgcatttgtccgntatcacattcccattttgcatgagtcattgcatcatcatatgcgtacaacatacatgttgttcgctcatacataatccttggattttcctctacataacagaaactaaaaatagggaagtacaaacattcacgcactattcttagatgcatata

SEQ ID NO: 165914 - DNA, 432 bp, Glycine max
  unsure (1)..(432): unsure at all n locations
ntgtaaaacctatagacactctgcactacattagagtatctttttctcatccctancattttacaacgctcaaaagagacaaagaatatcctaatctcattcgacattgaaaaccaatcacacttagccatacttaatctactttaacacgtaatgaagcacaacaagatgctcctcgctatgataaaatgacaaagatagaacatatcaattctttaaataacaagatgcatgatgtttgcggtcaagtattctaaaggtccaattctgcctataattttctgtaacaactaattaatgatttttttaacgaactaattaaaccttaacacgtatgctaatgatagtttcacataacaacgtctcaccataataatatttcaacccacattccattttattgaccattagctagacttataattggataaa

SEQ ID NO: 165915 - DNA, 414 bp, Glycine max
cttctaaatcacagggagcataaatattatccacgaccactcttgtcaactcacccaaccaaaccccttccagcagaatcaacctcttttctgaaaatctataatcaaccttgaaattgttattattccaaatgcataacatccccccagcagtgttcacagctgggaaccattcccaagcaaaatctgggtctccccacaaggcctgaacagctgccttatccagagaatccctcttagtttcctgcaaacaaagaagattcaccttatgcttcccaactaaattcctgatagaggcccatttaatgcctctacccaaccctctgatgttataagataaaatattcatctatgggttgtcctatcttccaactccatagcttccttttgatcattggattccatatcagcata

SEQ ID NO: 165916 - DNA, 399 bp, Glycine max
tgtctgaagaccgacgcgcgctatctctggtcatcactgtttgcgatgaagccgcgttgtcagctgtccggtttgggtccgccgccattgcttgcagatacacgggcggggctgtgaccgaccgcggcgaagccatgtaactcttcttccaaagcacttcctccgatgagctatcctactttccgcgcctgcaataaggtgggtctgctagacttacactgtcctcgacgatgtgcacgttgaagatcctcccttgcatgtgtacgctgactgtatggttgattatgggactgcacgatgttttgatcaacacccttatcacatacagctggccgagattctctacatcgtgttcaacattcaccatgtcgctacacctgctatatcttctaatatgct

SEQ ID NO: 165917 - DNA, 459 bp, Glycine max
agcatgcagctcggacactatatagatatccatatcttttattgtaataatacttaaacacctcattaatatttcaaatacccctttgacacttctcatttcgttctatatctctcttcttgtcatatcaaacgccttggtcactttttctattatttattttccttcttgaatgttgattaccatagtgtccactaagactatgttctacaagacatttaagttaattcttaacttattctactaacagaaagaacttatatgattattctataaataagtttttttagtaacttaagatgttttttgaaatgttacttgaagaacatgtttaaaaattatcttctattttatatatgctccactttatcctaatacactattcatttttagctatattttaaattatcataatctatcatctcttgacatttacattctcaactactcaacgttagt

SEQ ID NO: 165918 - DNA, 420 bp, Glycine max
gcaccatttccttaagttcctcacggtgtggaggttgtgccatgttctcagaatgtgcaaaactcaaatgctcagaatcagaatgctcaaaattataatgctcaagatcaggatgttcaaaatcaccaataacagaatgcacagattcaccagttatggaattctcagaatgatcaaaaggtataaaatgatgcctaactaatctatgaaatgtcctatctatctcaagatcaaagggttgtaagtcaaatggattgcctctagtcatacactacattcagcatgcacacaactagttgccttgtcatgtaaataaaggtgtaggtttgaactacagctccctcacatgattccaaatgacttgaaattttggaccaaccttataaatgatgagaagattcacaaataattcacacaaaa

SEQ ID NO: 165919 - DNA, 396 bp, Glycine max
  unsure (1)..(396): unsure at all n locations
acacccattctgttttagggttnttgcgatgatgtttgtgatgtttatatgctgaaattgctgatggaaatctgttatagacgaagggtaaaactaacctatggttataaagtgagaatgtgatgttatgagtggaaaaagagtgagactttgagggttggaaggctaagtctgaattctgtggtaaatggagggtaaagtgagttaatactagcttgaaatttcatttaggacttatgagaaagcttggactgtgctagagagagaaatatatgtgcaaagtgaacaaagagccatttctagggcaaanttgggtgttgaagagtcaaattctgattcggtgagaatttaagtgttaatccagttcgaacaagtctaaatggatgttatggactg

SEQ ID NO: 165920 - DNA, 383 bp, Glycine max
  unsure (1)..(383): unsure at all n locations
tctcttcggattcaacctaaccatgttaagaaagcanggttggaatttgattaataacccacatactacaatttataaaattctcaaaaatcaatattatccaaatgttggattctatgatgccaaactagggcataaaccaaactatacgtngtatagtatttttgcttcacatatattggtcgacgaaagcatttagtgcaaaaaaagtgatggtagatctataaacgtttggactcaaccttgggttcgagcatcaacaagcccatatatcacttcatcaaccctgctcgatcttgatgatctcaaagtcagttcactcatcgacaaccaacaatgatgttggcgtcaagatgtgctacacacaaatttcaatgacaacg

SEQ ID NO: 165921 - DNA, 381 bp, Glycine max
  unsure (1)..(381): unsure at all n locations
ctccccacaagtacacgttttgcttgcctcgagcaaagaaagaacagttcacttgtcctcaagtgaaaagacagcggccaatctaaagataatggtgtttgattcatcaacgacatcaaccatatgaactgaatatcatggaatgcttaaatcaatcacttctcacaagcatgcagctcttcaaagataggagcacaagtattagagtcacacgtgaaataagctagtaagcatgatagacatcaaggaaggatcatcaaccaacacctcacagtcattgtttcactcanactcaagtggttaggcttattccatcataaacaaccaacacacagtcccacctcttgcattcatctcatatccgatatgtaatgaacacat

SEQ ID NO: 165922 - DNA, 362 bp, Glycine max
catgatgtatctccatgtgtagcttctacagggcatctcgtgagagaatagtgtcgtcactactaaaaagaattcttttaacatcgggttttgataaaactgatgttaacaaaagtatggcgacatatttgcgaataacatgagttcattaacataagtcttttcaaaaatcgatgttaaagtgacaatgttaacatctatttttcaaaaaccaatgttattttatgcttatcgacattggttttttaaaaattgatgttgtgttctgatgttaatatcagttcttataaaaatcaacgctgtgttgttcctatatttagtccgcttctccctcttctgcgtccactctcacgctcttaatc

SEQ ID NO: 165923 - DNA, 267 bp, Glycine max
  unsure (1)..(267): unsure at all n locations
tcaatgctcaaatgataacatgtgaaggcgaccagcccttgcgtgggcttggagtgcctaatctagatcctagttatgccaacatgagagctgtatgtccctctccttactttcctcttcaaaatcatctcggtaaataaaccgatcatgattcggccatatatgaaacaaaactatcaatgagaccatatagtgcttgttgtatttattctacaaaaatactaatggaaatctctntacgcgatagacatgatctctcattcatta

SEQ ID NO: 165924 - DNA, 380 bp, Glycine max
  unsure (1)..(380): unsure at all n locations
atgggcactcgaacgcaacaatgaccgtgtggacaacaactgtgaaaaaatggcactagcaaggagacatgggcccaatcttgtcagacccgtagagatccctcgtgggaggtatgtactttgtaatatgaattgttttcactaagaattcagttcttataatagatcgtagcaatcatattcattaatgttcgatttttgcatgatgtgcggaaaatagcacaggccatcatgaagcaaaacatcttcccccacgtgctgtctcgtgggggctatgaatattcagaacaaaagctgatggctgagaagacaaagacataactagagatagctactaattctggaagcactganggcgtcattaaccctctatctcccat

SEQ ID NO: 165925 - DNA, 331 bp, Glycine max
  unsure (1)..(331): unsure at all n locations
cacaactatgcctactgattcacttttccgttatcacatcaggaaacattacattgacaatacaagaatgtcccttaccttgctgctcgctaatccctgacatctgacagaaacagagaatgagagttctgcggcactgattctgtatatataaataggaaggttcgaaaagaaagcaggatccagaccattggctgtacctcgctctgatgctgactcctacactttcatagacagaatgatattaaactcacaacgtaaaataatgtgaattaatgatacatgcatagacaacggcaagagattntatactatccttcacatttatact

SEQ ID NO: 165926 - DNA, 279 bp, Glycine max
atgcacctttttaacgatccccagggcaagacgtccaagagcaatttcaagcgcgatacaaacatattatctctattctaccccttccaccttattgtactggcatccaccctgtagccctctcattatcacaaaacggatacttccgggctcatgactacatggaccatccgctatgcctattcgggataaagttacactggccaagatcaataggcgtctgaatgacctgtctaagtcttgttgctcaacctatcttcgactggaggcacccgagac

SEQ ID NO: 165927 - DNA, 277 bp, Glycine max
tatgagaatgccaagttctacaaaggaaagaccaagaagttccatgatagcatgatagttaaaaaagacttcgtggttgggcaaaaagtggtattgataattctaggcttggactcatgagtggtatagtgaggtctaagcggagtgggcctcttgttttactaatgtcttccttatggacagttgagatcaaagcgatccacaacaagagctcagggcacggcatcacttaaccattctacgaccctcttagtgacgtagggggagagattctact

SEQ ID NO: 165928 - DNA, 378 bp, Glycine max
ctagtgacgtcggagagattattgtgaagctgggtgaatattccaaccgtacctcttatggtattcgcggcggaaatagctaccacccactccttcgttgaccacgattcgtgtactctatatagacaaaaccatacaaccttgccttgactaatgaattctatcttaaccatggtgatcactcgaacaaaagggagaaattcccacaagcttggagcgctatccgcacactcagcagaagtcagttgggaaagagatcagactatgtgcacgaatcttatacccagcgggttattgataagaacaaagctctggcctaccctacccgctacctagatagctatcgccgacattccaccatcttcttggctatctctt

SEQ ID NO: 165929 - DNA, 391 bp, Glycine max
  unsure (1)..(391): unsure at all n locations
caatgaaagtagacaatctcttcaatatctcacttaacattttatacaacagcaaaaactactgggacatgcatgttagatttcttctgatgtgggacttgtgtatttcccaacaatgcataagtcatataggcagggtattctagtctctagacatcagttcctatcacatgaatgacagaggaaacaaattaatggtttcattcacttacatcaaccaagtccaaattggctactctatatgtgtgtgcctaaccagcgtgcgtccagacaggatagactaatagaatgattaatttgaggaagcttggtcagaggtcactgtctntagacgcacttcgcaacttggtgcctcatattgaagccttatccttatcatccatgaactctt

SEQ ID NO: 165930 - DNA, 367 bp, Glycine max
  unsure (1)..(367): unsure at all n locations
actatcgaanactgaagcttgggtggcaacataatgtgacggtcagagggccattcacttattgcatcactcacatgtccacgagaggacaaatcacatcgatgtgaatctatactccatcaaatatgtgaatcgattctgaactgtgaaggcggaaactgttatatcggaagataacccggccgatatcgccacacagtccatctctagtggcaagatcaagcactgctgggactagataaacttcgaacatgcctgaggcacgatggtagaatcgcaaccctgcatcacaaggtacgcacttgccgatacagataccaggcggagagttgtggcgtgtgactcanattctctataggcacaagtg

SEQ ID NO: 165931 - DNA, 230 bp, Glycine max
caaccgaccggaacagaagaaggaccaacccaacggccaacccggaaaaaacacgccgcccccccccgaaaggaggaaagacgaaagcaacagccacaaataaaaaaaaagaacaaaaaaaaacctgataccaagaacaacgcggcgggaaaaaaacaaaaagaatacaaaagaacaccgcggcaaaaaaaaagagaaagacgtcaacaaccccaaaaaaaagaccccca

SEQ ID NO: 165932 - DNA, 223 bp, Glycine max
ccctctagcgtgctgaatattgtttatttaatcccaacacaagcctcggtatttttctttacaggagaacgttgacttaatatcacaaatccgtcctgtctatgaacaccacaatacctcttttcgctcttcttctcattatgatttgattctgcattgacccacctgcatggaccgctcaccactgtgtatcattaaccttccaatgtgcatcaagttgcat

SEQ ID NO: 165933 - DNA, 343 bp, Glycine max
tgttgatgacgaaaaagtctaccggatttgtatttttatgggtgattgtgatttacatggagttctaagaagcaaggcattgtgacactttctacttgtgaagccgagtatgtagctgcaacttcttgcacatgtcatgccatttggctaagaagattgttggaggaacttcagttgctgcaaaaggaaagcacacagatttatgttgataatagatctgcacaagagcttgcaaagaatccggtgttccatgaacgaagtaagcataaagatacaaggtatcatttcattagagagtgcattacatagaaagaagtataattgactcatgtgacaactcaag

SEQ ID NO: 165934 - DNA, 295 bp, Glycine max
cgccctttgcctcctaccagtcggcaattcaagcttaattgtgatgtgtttgttccggagtaagggagtattgcaattgcatgtggagttttctagagaccatagcgaacgagtttttttgtgcctttgcttccacattaagtttatgctctgtggtgcaagacgaacttcaagagattctatttggaatcccgattccttggagtcgaggttgaaaaacttttgtggtagaatctgattcacacaggttgccattaatttgcttaagaatggttgcgctacagttcattcttgg

SEQ ID NO: 165935 - DNA, 344 bp, Glycine max
agcttctatagaaggatcgttcctaatatctcttctattgcatcacctctcaatgagctggtgaagaagaatctggcatttacctgtggtgaaaaacaagagcaagcctttgctttgctcaaagaaaagcttactaaggcacctgttctagctctttctgacttttctaaaacttttgagctagaatgtgatgcctctggagtgggagttggagctgtattgttacaaggtgggcaccctattgcttatattagtgaaaaacttcatagtgccacccttaactaccccacctatgataaagagctttatgccttaataagagacctccaaacttgggaacatta

SEQ ID NO: 165936 - DNA, 420 bp, Glycine max
ctcagctgaagggagtccacctcacaaatatgtatgtgtgtttgttgcaaaaaccttagatatgcatgtatgtatttatgttcaaaaaatacctcacaaatatatatgtgtgtgtttaggcagtgaacataccttagatatgcatgtatatagcaaagatacctcacaaaacatatatatgtatgtttaggtagcaagataccttggatacgcatgtatatagcaaaaattcctcacaaaaatatacacatgtttaggtagcaaaatacctcatgaaacataaacaaaaacaaacacgaacaaacaatatatctttcggctgaaaaaccaacacgcgtttgaaaagaaataacttccagctgttctctgaaaagattcactgatcataacaccaattcttgataaaaatgtgatacacct

SEQ ID NO: 165937 - DNA, 330 bp, Glycine max
tccaagtagtctgttcaatacaattagcttattcactagccattcattttaacttgtattagaccttattacaacaacacacactttctgtgatcgcttttcattttcctcgtcttattatttattaatcctttttaacacaacttattgagcgtgtgtgatgtgcttgcttcacttacatccagctaactccccatatagggaaatttcttgaccattgatgcatctccctcggacatgatgaaactcataaattggccaagagcaaaaaggcctaggtccatgacttacgtgattcagccatggctagatgaaccacttcgtgacata

SEQ ID NO: 165938 - DNA, 232 bp, Glycine max
  unsure (1)..(232): unsure at all n locations
cttttgaaatgcgggaaaacaactttctgaatgcaaaaacgtgccacctgtctccattcttataatatggctcaagggtggctcgcccagccgagcttacctgctctatctttttctttgaggggaacattaaccatgttccctcccttctcatggataaacctctggcctaccttgaactaactatgttacaaatanggtgtgattacccattcttaccttttatgactaa

SEQ ID NO: 165939 - DNA, 428 bp, Glycine max
ccaccctccttatcttcattctatcattctctcctcccccccccagaggtctgtgctcatgacgcccaaagacgcagctcagctacggacattatagcggctttttttttatataacatttttatatattaactgtgcacaattatgttgaatattatactcgaactgtttcctaccatacatagcataggaatgcttgctagtgcttcaaatagtcttgaatactattatagttattattaaatttctttcatcacctcaaaaaaattaaaacattactttcactttttatcattaattacagttttattcttaaatctcttcatcattgttcattccactattttttataagataaggcttaacattctctcttcttcttccgctcataggatagaatatttatctggtctcacccttctataaca

SEQ ID NO: 165940 - DNA, 363 bp, Glycine max
aagacaaagataagatctctatgcctatctcatgctctcggcattctaaactaacaatctaagctattcacaccttgcaaatgacggctggtcatgcacaaactcattccacaattcactattcacaataacacatgcaatggtcattgaggcatttcatccaacgtgtgcggggcgcatcttcaagcatgttaaaatgacgaatggagaataatatgacatgcccatccatatgaggatcaaagggaggtctagggccattccttgcagcccccaatcatacaatcaaagcatggattcataacagaattgtcttacgatatttgcaagaatatgacactatagcccatatacacacacaat

SEQ ID NO: 165941 - DNA, 347 bp, Glycine max
tcagcttgtgtatccacacacgattggtaccgacaccggtgtctgtttctgaatcaaccacaagacgtgactcttcaaaagggtttcgactctctcaaattggcgttaagttcttctatagtcataactctcccaaatggcattcttgccagacatgaagagtctataacagcgaggctttgatttgctcttcaatacaattctacactcttactctctcaataaatcctctacaagcgctgaatctgcttgaacttcttcttctttgaaccaaaagtcgtctgaagttctctgcgtttccaaaccctgaaaacttgcgatatgcatcttctcattctcttctccct

SEQ ID NO: 165942 - DNA, 375 bp, Glycine max
acggaccttaaaaactcagcttctaagcgagctctcttgagaaaactgtcctgagattcttcttgagcaaacctgcttgagaagctagagcttatctacacacacccctctcataactaagctcacctccttgagaagcttccctaacaagattccgaaagaagctagagcctaactacacatacctctctaatagctaagctcacctcctcgagatgagaagctagagcttagctacacaccccctataatagctaagctcacccccatgacaaataacatgagaataaaaaaaaatgtccttattacaaagacaactcacaatgccccgaaatacaaggctaaaaccctatactactagaatggcccaaatac

SEQ ID NO: 165943 - DNA, 284 bp, Glycine max
caaagactggaaagcggttcctaatgactcctctgcggcctccacataaggcatacaggatgggcagctcaccaagatgtctttctcgcctgaaacgatgaccagatgcccttccactactaatatcaacttatggtggagtgtatagggaacaactcccactgagtggatccacggactcccctacagacagctcgtgagggggctaatatccattatatggaaggcaacttgacaggtgtgatggctctatctgactgggagactgtcttctccctaacctc

SEQ ID NO: 165944 - DNA, 373 bp, Glycine max
  unsure (1)..(373): unsure at all n locations
ctggccatgaatcagaaatctgcacctgtcgccagactctatggtttatgctcctctaccgacaaccacaaagaccattgcccttatgtgcaacaatctgaagcaattgaacagcctgaagcttatgctgcaaacatctacaatagacctcctcaacctcagcagcaaaatcagccacaacagaataactatgacctatccagcaacaggtacaatcccggatggaggaatcatcccaaccttggatggtcgaatccttaacaacagtagcaacaacaacaaccttattntcaaaatgttgttggcccaaccagaccatacgttccttcaccaatccaacaacaacaacaaccgcaacagccccagaaatagc

SEQ ID NO: 165945 - DNA, 495 bp, Glycine max
tcttatccaaggctcatcttggggtgaagctactttcatgtcttattccttaatggatggcgcctcctctcacctcttcttctttgtcttccgctgcatcttcatggtggaaaatcaccaataaaggaccccattgaagctcaaagatctagcctccatataagccccacaagcaagcttccaccaggaagcttctggatcagggagctaacaaaaatcttcatgcaggtggaccttcttctagtagctctgacttgcagcagcctcctatccctcttccatttccacatagagcaatttccaacaaaagaatggaagaagtggaaaaggagatcttggagaccctcacgaaagtaaaggtgaacatacctctgctagatgccatccagcaaattccagatatgcccagttctataagattgtgccccacaaaaggagctccaagcatggaaggatatattggtaaaatgtgcaccctgattgtaaattgtcccc

SEQ ID NO: 165946 - DNA, 391 bp, Glycine max
  unsure (1)..(391): unsure at all n locations
cccgggatctctgagtcacctgcngcatgcaactgttgaaatgccatgtttggatatttttacacacccattctgtttcaggtcttgtgatgatgtttgtgatgcttatatgctgaaattgctgatggaaatctgttatagacgaagggtagaactaacctatggttagaaagcgagaatgtgatgttatgagtggaaaaagagtgagactttgagggttggaaggctaagtctgaattctgtggtaaatggaggttaaagtgagttaatactagcttgaaatctcatttaggacttatgagaaagctcggactgtgctagagagagatatatatggtcaaagtgaacaaagagccatatctagggcaaacttgggtgatgaagagtcaaa

SEQ ID NO: 165947 - DNA, 339 bp, Glycine max
accttaaaactagcttcatgaaaaatgcagctagatttttatctttttattcacctaccatgtacgaaagcaggtcgaatttgataatatcctcactaccacactttataaaagttctatcaataactattatccatatgttggatcctatgatgcccaactatagcgtaaaccaaactataccttgtatagtatctttgcttcacatatattggtccacgaaagcatttattgcacaacaagtgatggtagatctataaacgtttggactcaaccttggagtcgagccttaacaagcccatatatcacttcatcaaccctgctcgatcttgatgatct

SEQ ID NO: 165948 - DNA, 375 bp, Glycine max
  unsure (1)..(375): unsure at all n locations
atcaaacaattggattattgatgtttctgtcacaatcaagtgatagttgatgtctccatatgtgcgtacactgtgattatgttttcgtttctagaattcatttggagtatctattgttgattctagatgagtgatccttcttgatttaaaattattgtctcctaatcaatcgagtgttcatcttattattggctgctcatcttccaatcatgtctagttaaattgcttgataatctttcttgttgctacttctaattcaataaagagagacttcgcctttgacaatcacgttaagatgtttngagaggaaatacttgagtagacattatcattggtacctatagacgaaagtcaaactttagtagacgtgtacct

SEQ ID NO: 165949 - DNA, 425 bp, Glycine max
catgacattcagagggtgtggcggaacattgacattgtccgcgtacgcttgacatttatggcatttcctcacatgggcgcaacaatcgctttccatagtgagccagtaataacctgctctaaggatcttcctggccatagcatgcccattggcatttgtcccaaatgaacgcccgtggatttgctcaatcatgtagttcgcctctttggcatctatgcatcgcatgagggtcatgtcgtggtttcgtttgtacaggatggtaccactcacaaagaaaccagtagccaatctccttaatgttcttttgccattgtcggaaatccctggtggatattctctgttcttgacatattggttgatgtcgaaataccacagtttcctatcttgctctttctctatcgtacaacaatgtgtccggtttcccc

SEQ ID NO: 165950 - DNA, 456 bp, Glycine max
  unsure (1)..(456): unsure at all n locations
tcacacctgtcgtggttaccacacncgacatcgaataacactcatccgtgcttggaggcttgacaaactcatcacctttctacttgtcaaggctactacctcaggcatcagacaatgtccttcaacactaaaaaacctatttcgcccataagccgacttagagcttagggggattatgtactatctagggtccataaaatacacatggcatcctatgtgacactccgagtcatgtgtcaacccttcatgtcaaccttagcactggagcacgaatgtctgacccttagcagtcaggctccctaactgacaggttatctctaaccttntattatttgaatatattgcaacccttctatctcttggcaggtagntaattatctacaaagtcacacattatctatgaggtacaattatcctctagcttttatctttaagctacatattatctctaacttt

SEQ ID NO: 165951 - DNA, 388 bp, Glycine max
tacacataaagtaacctatagaacaatcaccccttgtttacaaaaaccaacctttatattgctagcccacgaatgaaaaggaatatcaaatcctttttccatattttttagccatatccagcagaagaaaatggcgtcatccatcatcttttgaccgttgaatccttctattgagaaaacaatcttgttcctctgaaaccatatgcaccaagttaaggaaatctaccaccttttccattactgagatctaatacccttgagatatccgtgagaatgctaaaggaaatgaattgaggctattccggcgaaacatcaactatatttaaccaagacaatgattcccaccataaaggcaatatcttataacagttgaagaacagatgggatg

SEQ ID NO: 165952 - DNA, 424 bp, Glycine max
  unsure (1)..(424): unsure at all n locations
tctatcaatagacctccaatctttaatggagagggttaccactactggaaaacccaaatgtaaatttttattgaggcaatagatctaaatatctgggaagccatagaaatagggccttatatacccaccacagtaaaaagagttacaatagatggtagatcatcaagtgaaagcataactatagaaaaacctagagacagatggtctgaagaggataganaacgagtacaatacaacttaaaagccaaaaacataataacatctgccctgggaatggatgaatatttcagggtttcaaattgtaagagtgctaaggaaatgtgggacactcttcgattaacacatgaaggaactacagatgttaaaagatctaggataaatgcactaactcatgagtatgaattatttagaatgaatgcaaatg

SEQ ID NO: 165953 - DNA, 459 bp, Glycine max
  unsure (1)..(459): unsure at all n locations
gcttagtctgttttattttctttatctgcggaggccaagagatggttgtgttcattcaagggcaacaatttaaagacctgggatgaggttgttgagaagtttctaaaagaatatttcctagaatctaaaactggagagggaaaagttgtaatttcttcattccatcaatntcccgatgaatctttgagtgaggcattagaaagattccgtagcttgctatggaaaactcccactcagggtttttaagagcctatacagttgaacatcttcattgatgggttatggccgcagtcaaagcagttactcgacgcttttgcgggaggaacaattaagttgaagacacctgaagaagccatggtgttgttggatcaagtggcctcagaataattacgaacggggggttgattaactattaatgtgcctgactaatacaaattaacctcttaatgtactaaaatc

SEQ ID NO: 165954 - DNA, 322 bp, Glycine max
  unsure (1)..(322): unsure at all n locations
gacacaagagtgatagggacccttgggtacatggctccggaactagtccgaatcgggcgaccgttcactgcgtgtgatgtgtataagtttggagtattggttttagaagtggtgtgtgggagaagacccatcatatcagatcagccaccactgattgattggttgttttcccatatggagaatggggaattgagttgtgctatcgatgaacgtntgaagggtcaaagtggatacaatgctgacgaagctgagacgctgcttcattttggtttgtatgtgtgagacagaccctggtgtatgccaacaatgaagcatgtggtga

SEQ ID NO: 165955 - DNA, 269 bp, Glycine max
  unsure (1)..(269): unsure at all n locations
agacgaagcgctccatgagaagctgcctcttatggagaatatataccttcatcaagacgacctgangagaacacggattgatggtgttcctacacaaaacctaattgatgtattaaactcaacatttcttcctttcaaggaaacaatgagccggaggcctacttggagtgggaaaagaacaaacagcattgttttttatgcatcaactatgaggacgaccaaatggtgaaacttgccgccacggaatttaccgactatgctcttgtgtg

SEQ ID NO: 165956 - DNA, 248 bp, Glycine max
aaaccactcccacttagccctacttaatgtactttaacacctaatgaagcacaagcagacgctcctcgctctattaaaatgacacataaagaacatatcaatcctttaaactacaagacgcatgacgtttggggtcaagcagcctaaacgtccaattttgcctaaaatattctggaacaactaattaatggtttctttacggaactaattaaaccttaacccctatgttaatgatatgttcacataac

SEQ ID NO: 165957 - DNA, 405 bp, Glycine max
  unsure (1)..(405): unsure at all n locations
agcttgnttcgttggaaagtgggaattctaacttatactcattctctccccacgtcatagtcatgtatggcggtggtgaatgttctgcttattatgtctatgtatgccctcttatttctgattattttcctttccgctgtaattctatttaatttgggagatgaagtatcaataatagtgataaacctgagttcccacactttgcaagtcggttatgctggcaaagatgcttccaagggtggccttccctttgtaactntctctcattncacctttttcatttgcattttattctttgtattggaagagatatctggaacatacattgtcacatacttatgtcgntggtgctattgatcacatggacattgatggaattgctggtattaatgatgagaactctga

SEQ ID NO: 165958 - DNA, 266 bp, Glycine max
atcatctaactgatgaaggcagggtcagttttacgttccacgcaaacctttagcgaatttaggggcgagagccacgaatgacatagcagtgagggtatgaacaacctgaggatcacgctcggcagataacgagcaaaataagtaccgcatgaacgagctataacgtctgtaatataagaggatatacaagaccgcttattagaaacccttgactacatacaatatgacgggatgtaacctgagtgtgctcttgtcagggcaactcc

SEQ ID NO: 165959 - DNA, 378 bp, Glycine max
  unsure (1)..(378): unsure at all n locations
tacctcatgcactcctctaatgactatggcatcatttctggcgctaaactgctgggagctggaggccatcttctcaattaaatttctggcttcagcacgggtcatgtctccaagggctcaaccactggcagcatctatcatacttctctccatattactgagtccttcataaaaatattggagaagaagctgttctgaaatctgatggtgggggcaactggcacatagtttcttaaatctctcccagtactcatacaggctctcntcactgagttgtctaatacctgagatatccttcctaatggctgtggtcctgaaccacggaaaaatntttctagaatactctcttaaggcatcccagctatatggaccttggac

SEQ ID NO: 165960 - DNA, 326 bp, Glycine max
  unsure (1)..(326): unsure at all n locations
aacacatacacattctttttcctagtcgatcactcacttaattctccatgatttgccnctttttttgagtttaagcttcacttgaaattaagttatttaattatatgagttcttgatttaatccctattttctctccccattcggcatcaacanaaagccaaagtgcgtaagaaatataaaacatacataaatgactaatcatagccaaatacacgacttgaaatcaaagtactaatattaatactaaaaattaataaaaactaagatgatggtggtggtggtggtggtagatcaaagcatgtgcggatgaaagtgacatcttcat

SEQ ID NO: 165961 - DNA, 419 bp, Glycine max
  unsure (1)..(419): unsure at all n locations
cactatcactaatcacagcaatgatgatagaaatttaccaaatntacctgaaactcgccatgactcggacgagttgactcaacagaacgacgtcgttgcgggagaggccaacgattcggaaccgatcgcgcggttcgggtcaccggtggaacaggtggcagccggcggagactcctccgacggcgagaacaaccacgaggcggtggttggcgtgtcgctgatggacttgctggaggaagcagagcaggaaatggatttgtatagagtgagcgatgatgatgacgtggcagaatatgagaagcgagaaggagaatgcgaataagaaaaaggtggtgtggtggagtataactgctgcgtgtgcatggtgcggtatanaggcgcgtgcgttatcccgtctgtcacactgtttgagaatgtgt

SEQ ID NO: 165962 - DNA, 361 bp, Glycine max
  unsure (1)..(361): unsure at all n locations
gtgttgccatgttttcaaaacccgtactaaggcatacaactccttatcataagttgaatagttaagggtaggaccacttaacttttcactaaaataagcaataggatgggcttcttgcatcaacacagccccaatcccaacatttgaagcatcacactcaatttcaaaagattattgaaagtatggcaacgcaagtatgggggcattagttagcttttgcttaagaacattgaaagcttcttcttgtttctctccccattcgaaaccaacatttttcttgagcacttcattgagaggtgctgccaatgtgctaatatccttcacaaatcgtctataaaaactngctaagccatgaaaactc

SEQ ID NO: 165963 - DNA, 361 bp, Glycine max
aaaagtaacttatcacatgaaaatacattaatcttcaatcgtagatacaacgtatagataagcacaaacataagagcttaactaagtttgttatccaaaagcaccctaataagaatagtggtacctcttaattgagtataaaacaaaagctttgaaagaacatatcttcacctgccatgtttcatgtgcctgtgagagaacccgaacattttcttctttaagctcacagctagttccactattggaaatcactgacattgaggacacaaacctacactcacaagggtggtacatttgctaaagcaagacttcttctagagtgaatcagacgtctttcagtgtcgatacaaactactcagct

SEQ ID NO: 165964 - DNA, 357 bp, Glycine max
aatcaatcacccttaccaaaaacctgttgtaaagttctctttcaaaatgatattttctttaaacttagcaaattgaacaagaatataataagaaagagagataagatcaagagaagatgctctccaatttttatactggttcactctgtctctagagaagctactctagttatctaattcaatcaaaactagattataatgagaaagagagataagatcaagagaagatgtactcctaattttatactggttcactctctatcattagagaagctactccagttatctaattcaatctgaacaagaatttcactctgcagatagaattcttacaagcaattagagtcaatctcagtt

SEQ ID NO: 165965 - DNA, 302 bp, Glycine max
  unsure (1)..(302): unsure at all n locations
actaagcctttgcatggttacgaagttctagagagagagagggccagttttctttagttctganagattctgctgcgcgaagatctgcagagatgtgagttccaaccgaacgccattctgataacttgagatgacttcgtgagtgattgtgagatcctancagtgaatgagacatctcgatgacaatcctgaaactagcccaatacacgcctaaggcccacgtggagaagaacaaaggcccaagtggacaatgacaaaccccgcaagtggagaacgatgaaagctcacaggcagagacatta

SEQ ID NO: 165966 - DNA, 407 bp, Glycine max
  unsure (1)..(407): unsure at all n locations
tgtgacctccattctggngcagtcatgggctattttgatattccagntgatcatgtgtatggccaggtaacggattattatgtcactagcatatagtaatagcatggaagaataataagcatttaatctattaaactcaaacaaacatggcttggatgtgttgtatatntgtaatttgtaattgatagtccatccaataatttgttaatttattgtatntatgcatctcaagtctgaattgaaatgaagggacaaccttctggaaacatgcttattntactggttatagttatatgatcatttacatttacgatctctgtagtaaagaaacttcaaatctnagtctctttacacgtgctaaaatcttctattgtttattttcccagttcntcacacatggactctaa

SEQ ID NO: 165967 - DNA, 210 bp, Glycine max
tttctctcttttcttctctttcacctttgttgcacaattctgtgtgtatgacatttctagtctgctgcaatttctgctgctttcttggttggtcttcatcacttttataacagtaactctggaattcaagtttttgtcatcaagctaatgacgagttaacatagaaaatcctcgaaaagagaatcacatacgtaatgaccaagttttgga

SEQ ID NO: 165968 - DNA, 358 bp, Glycine max
  unsure (1)..(358): unsure at all n locations
accacgtcaacaaagtactttcggcacctactatatgttgacttgaccaacgctgttattggaatgttgcgacaatctttcaacaccttattcacacattctaataggttggttgtcatgtgaccatatcgtcgtccagatgtatcgtaagccatgctccatttttcctttgaaatgcgatcaatccatcttgctatggctggactcaattgacgaaatttttctaagtttggatcaaagacatgcttgcaaggagtgtacgctacatcannattgttatcatcaaaagttgtatgtagacatgaaactcanattanattaatgtataaaatanaccttacccaatttcttgaacatc

SEQ ID NO: 165969 - DNA, 358 bp, Glycine max
  unsure (1)..(358): unsure at all n locations
ttcctggcctcgccgaatcatgactcttgattcatctgacattgggtgggaccaagcagctagtgatgttggagagattattgtgagttgtggtgaatatcccaacgtacctcttttgtgtatgcgtggcggaattagctacaacccactcctcgctcgacgacaattcgggtaccctataaagacaaaaccaaacaaccttgccttgactaatgaattctatcttaaccatggtgatcactcgaacaaaagggaaagattcgcacaagcttggagcgctatccgcagactcagcagaagtcagtngggaaagaaatcagactatgtgcacgaatcttatacccagtgggttattgat

SEQ ID NO: 165970 - DNA, 439 bp, Glycine max
  unsure (1)..(439): unsure at all n locations
ttaagtcacctgaggcatgcagcttcctacaggtgtagttgcattctatactataatcaactcactntagactccaatgtccactagacccaaatgtggcttttcaaacgctcaaaatctcacacttttccactcacatcactatcattctcacatttaaccctaagttaactctccccatcatctctaccagttttctatcaacattttcagcattcatatatcacaaagcatcatcataaaaccctaaatcagaatgggtaatttggctcacatcaaacatgtcaaggttagcatgatttcaacaaattccttcacaaataattactctaaggcaataacctagtagaactacccatcataactcccaaaaacctaacacccatgaaattcatgtgagaagaagtccacccgtaccttanattcgaagccccacaat

SEQ ID NO: 165971 - DNA, 369 bp, Glycine max
  unsure (1)..(369): unsure at all n locations
aactcaagcttttcattcgctctacgtactcactggaggagcacattgttgtttcgtcgatctttattcccaaancatttaccttttatatcccctgtcgacgtgctcaagccattttacttaaaccattcctccctaacttaaaataagataaatttcaccggacgctcgaattgtcttatccattaacttcgggtaaaatgaattccgaccaatctggcgtcgccgaaccatgttgcaaattcacaaaagagttcataaataatatactcataaaaaaaccattttctataaataaagcggaaaatcatcggacgctttttcttcggatatctcattcttaatcgaattgactaaaaactaaacgga

SEQ ID NO: 165972 - DNA, 374 bp, Glycine max
  unsure (1)..(374): unsure at all n locations
atggagaagcaacatatctttcagttaaataccactatttgctagactggctcacttcctagaatacattgacaaatactttaattataagttgatatattctatatagtaagttagcacaaatgctagagatggtgtaaggttgatataaaggagacaatgtgtcaataaaatttctaaatctagcttatctccactaaaattttggtgtttgccttgttacaatagagagtccgacagttgaacctgtttgaatctactaatccccattgtttaatgcacattattacaaagtngatattaacagagtgataaatatgtgatatttttaccaacgtctagcatgattggaaataattgagtcttgattatgt

SEQ ID NO: 165973 - DNA, 361 bp, Glycine max
attacctatacttcacataaaatacttataacactacaaaatatccataaattacgagagtttgatacaatctatacaagttctatacacaaaaattagttgttttcatcgactaacattgtggcaaccaaatgttgatcctgcctcaatgcttactctaactcgtattgaagcaggtagaacactctcgttgaattcatctgactactcatctaaaagttcacaactaacaaaagagacaactatgacaacttttccttccttccatagatcctcagcaaacgcaacaacaatctccaacttagaaccagctccaatcaaaataacctcatgcttcgtactagatgagttgtcagaaatg

SEQ ID NO: 165974 - DNA, 366 bp, Glycine max
  unsure (1)..(366): unsure at all n locations
ctcttttaatacgaggctaataaatgcttcggatgtccactaagaacattgccaatagcagaanaactactggtgcccatattaatggtccactagacctctgggtagttatttctatcttgtgaattaaccaccttcggctcacaagttgactccttctgcttgttttggaatttaataccgcggcttgctttctttcgccttaatcattagctgcctatgctcatttaagcaaacaaagccatcactttccatttactctgatagagatttatgcanatagtcaccatgctatgcctagctatcttattatatgagctcgtcttgccattaatttgtccatttacactttcccgtaaataaacg

SEQ ID NO: 165975 - DNA, 295 bp, Glycine max
atgatgctcatcttcatgtacgactcagcgggcttatagcctaaaccatacagtccacgaataccatgggtacttaacaagctagttatgccggcgatggtttttactaaacacatccctggatcataacctgcacccaacataactggggccatcaataccgctgcatctgacagacaaagctgcccacatagggagtccacggaagacatgctgaccaccttaacagactggaaagcacctactaacgattcttctgcggctttcccataatgcatggaggatgggcaactta

SEQ ID NO: 165976 - DNA, 442 bp, Glycine max
  unsure (1)..(442): unsure at all n locations
ctgttcacatatgcaaatgtagggtttcatttttcagcttctttttgtgttactattcacgcatggtactgttcgcgtagcaaattccaatttcgtattctgcttcaatttccaagatcgatttctgcttttaattcaccgttcgttttcatttctgtcttctaaattcaaatttgggttttgccttttgattnctattcatttttgcatttncgttccaattgcaatttcatatatcggttctgtntgtagaatcaatttcgtttctgtgttgcaattaagttccatgttgctgtattcatttctgtttccagattcaattttgctattaatggaaggctgaatctctagtggttgtttttcttgacgattaagcatagctctctttgaagttatgtattaatattaattctgatcatttttcccctcaccaatattctga

SEQ ID NO: 165977 - DNA, 421 bp, Glycine max
ctcagctctctcactctgttcaaagactgaagaacttgcagaacacgaagaaatgaatcactcactcatcttgctttctcttgccaaagaagttttatatgaagtaggaaatgataaaactgcaagtggcttatggctcaagtgtgaaaagctgtatatgactaagtcaatgtgcaacaagctctcctataagaggcatctatttggtctacacatgaaagaaggtacatctcttaaagatcatcttcgatgatataaattctattttgatggaattaagagatatagatgttaagataaatgatgaagatgcttccatgattctagtagcctctctaccaccatcatatgaaagctttgtcaattctcttagcgttggtaatgaatgtgtcaccatggaggacgtgaaatctatcttata

SEQ ID NO: 165978 - DNA, 209 bp, Glycine max
ctgcagctgagcattaaattggacaacttttcttttgttacctcagagccttacaagcctagtcttattttcttacggttccatgctatgaccttgatacctgaattgacccaaatttcaaggaagaacagcttttcgtgggctccctcatgggaccctactgttatacagcgcggatgagtaatgcaccctctcctataacggatgtt

SEQ ID NO: 165979 - DNA, 526 bp, Glycine max
  unsure (1)..(526): unsure at all n locations
gctttaccagaaaggaatgtggtagtctattatacatagttngatgagttcaggaggaactctagaaacgccattgagatgagaagctgactgatatttctgacagcagcatagacattgccattgtgaaggagatttatgccaacctctatgaccccaatgataaatcacctaagcaggtgagggtgagaggtcatttattgaagtttgatgaggataccttgaacacatatttgaagacccctgtagtgctggaagatggggagaacttgtgtacatattccaaatttgcactcctaaggcccgatcctcaagagttggctactaagctttgtatcccacggaggggattcgagcttcatgctgatatgcagccttcgaagattctgaggaagaacatgactactctagctcagacacagagcattctttcctcttctaacctcattcccaccttccacacatctgatgtgacactggacagagccatattgattatgggattattattaagatgagatgactc

SEQ ID NO: 165980 - DNA, 255 bp, Glycine max
tgcagcttgtctcctctcaagctcttctctgaaactgtatcttctctttagagactcgcttcttctcggatgaagaagactcgttcatgcactcatccccattgtcgccatgtcaaacgcgcggaagaaggagccgttacaccccttccctccttctccttcaaaactcatcatggatctcgaatctgaaccaaattataacagaaacaccatccattagtcataagtcaaaaacaaaaattggtgagagagagg

SEQ ID NO: 165981 - DNA, 507 bp, Glycine max
  unsure (1)..(507): unsure at all n locations
ctaagcttcgcacagtgtttatgtgtgtgcagttatcctctctacacgaaaacagatgatacatgaanattgttntctcnaccgttgctgtccaaggctgcattacatctctttntatcagtcggcaatagatatatattttgtgcttgcgtcttaatggttaattgtgaatcaaaccaaactgtacggaatattctggtttatcttgtctatangtgcgtttatattatatgcaaagacanataagatntctgacataattggcatgtttcgtaattatctattcacacacacacacacacacatatatatatatatgcagatttcaaccttntntagtttttattctttttaacatcgtagattacattgttgaatcggaacatgataccatcatatatgataaggtggtccanactgagaaatatttaacctgaatttttatcaggaaatcgtgttactgatatctcttgactgtgtgttcaaatattgaagtgacatacacca

SEQ ID NO: 165982 - DNA, 168 bp, Glycine max
  unsure (1)..(168): unsure at all n locations
cctcttaaactcttcatcgttatgatgtaacgctgtgacaggcctgatgtntcttggagctcttgtgaacctgattccttacctcctgccatgtctttcttcgaagattgggactcacttctttaaccttgctgactgttatgaaaattgcaaagatctggatagaag

SEQ ID NO: 165983 - DNA, 399 bp, Glycine max
  unsure (1)..(399): unsure at all n locations
ttctatttcatagggcccgcgtaatatacccaagatattttcaaaagttgcatccccatgttgtatgattccggagacttattcgagaaaatctatattgagcacagagcgaacaacattaaaaaagaaatttaaatctaagggtttaatcaaccaataaagccagttaattcaccagccaccaatatgcctatagtcctttcataacaacatcacaactcccaaaaatgaactgcatctatctatggagtaataaaaaatcgctagctcacagtctcatagtgctcaaatgtgggagataatgccaaaactaaggtgcacattctnttctaattctgtcatctatcacaatgaaantctgcttcatagaagtacgcgatatttgaataagctgtctca

SEQ ID NO: 165984 - DNA, 403 bp, Glycine max
  unsure (1)..(403): unsure at all n locations
cttaacgcacgcagctgcagctgaccttctataagaaagtatatgcatatttctacgttttgataaaataataaatgattctaacctaagacacatagtccctctcacaaccttctcataagatgtgtggcgagacttgatgtggtaaagcagaaacttcaatgcacattaagaaagaatcataattccagaactagtaagactatgatatattgatgaaacactaacaatngaattattgatgaaacgctcacaattgatattcatgaattcatactgtggaagaagtgtggataggaacaaantagtcaacatagaggacagntaggacagaanatacgggttcctattaaagatgnttacagctgaataaagtggataagtttagagcactgacaacatg

SEQ ID NO: 165985 - DNA, 372 bp, Glycine max
ctacagcttgatgaacctgtgttcaaagacagtgctgtgaagaatcttgcatacttacatagaagttacaagtcatggcctattctgcaatttcagttcccatctctataacttcctctgcaacgatggacatcacaaaagagaataaatttcttctccattcactctccaacacaggcttattatgcctacattcaacaagtggaaggtcttactctactagcaattactgcatcaagccacatcaatgcaaccaaagcatataaacaggaactccataatagtatttccacttcaacattcagtttccattctttcaaatccacttcgctccttcttatttgacacagaaacgaggaaggaaatgaacat

SEQ ID NO: 165986 - DNA, 325 bp, Glycine max
  unsure (1)..(325): unsure at all n locations
gctcttctacgcttcatagtctntcaacataagacccagatntatgaatttattttctaaatcacttggagaatgtatggcattatcttcctaagcgagggatggtgttctttctttcttttctttgaaattcctcttgtcgaattgttccattcttcttntaaagacaagaacaattaatctcatgtgcccaggtagatcgcattcatagcatgttgggccaaagaggaatcttctttttttattggatcgaattgatttctttgacttcgttctaaaacttatgatctctcacgaactgaatatacttcttttaggttttata

SEQ ID NO: 165987 - DNA, 382 bp, Glycine max
ccacagcgagtctcatcactagaggtgtacagatgatcaagggagacacaatggctcgacgacaaagactgaaactccatagccgccataacagcagaagggaggatcaccagagctgacgaacaaggaggcatcactactggagcaccaatggtcgccacatcggcacttagcaaaagagccacgtcagtggacgatgacataacacccaagtcagcctgagtggctgcacaatagcttcaatagtagcattagaaacctcctaatagcaacaatggagggaggtgaaacagtacgattggctggagtcacaacagtagcatcaggagcctcgacatctggtggagacggaagcacatcttgcatagtcataggtgactcg

SEQ ID NO: 165988 - DNA, 451 bp, Glycine max
  unsure (1)..(451): unsure at all n locations
gctccggggcatatgtactntaagtgagagagaagatataaaagaagtggtataatatttaatattacgagtaaatcacatatacaaagatgattaattnttacataatcaatcacatattatcatataatgtaaattgatcgatagtcataataataatataaaattcatatcaattatgatttaagttctaaacattatagatgatatgataaacaatatgtgtttaaaaatgagaatattagcaataatgagagaaaataaaattgaataatgaaagagagaaagagtgtgaccgtcacacctttcaatagattggtgttgtcgcgcaagtacttgaggacccatgttagaacacttgctgcggtgtcatgtgcagctaagatgacaccaatgagaatatcaacaacttcgagagtctgtgtgctgctgatagtacaatcttgtcttc

SEQ ID NO: 165989 - DNA, 297 bp, Glycine max
  unsure (1)..(297): unsure at all n locations
gtaaacaaaanatatgacatatgttaataaaaccatttcatacactctgcanaaccatttcatacaggatttgtagtgtactctcaatggaaatacacttatgagataacctctaatatttttttatcagtgaaaaactctataaaaaaaggtaaaaccaaaagacagaaactccaaggaccttataagtccaatcagctgagcccactgagcatcaacagtactccattgatcccnctcaataaccaaaaaaatatgaaatacggcatgtgagaatagggtcagagagggatacat

SEQ ID NO: 165990 - DNA, 512 bp, Glycine max
  unsure (1)..(512): unsure at all n locations
cttgtggggtcttatgataataaactagagagagctgtaaattctataatgaatcanatcattattgttctaactttcatttgtgaaatgttgtcaaaatgttaaacaactaagaagaaaattaaagttagactcagacctcatatttgcaaaagaaagattcgaaagaaattgaaagtttgaagaggcaatatgcggcaataccaaaacaagaaaaanttagcatttaccagcagtaattgttattagctcttgtttatttgatttgggtaatatagataggtaccacggtaagcaggattttattacaaaagatntatctattgaagttntatttattcttctttanataatntaatttatataanataattacgcatcatctttcttgtttttcgtactttagaatttcataccgtatagcagtattgttatgagaaaaacatataacatctgaattgtaaacattaaaacatgtcacatgtatgaacttttgcgtgaagtatattgat

SEQ ID NO: 165991 - DNA, 463 bp, Glycine max
  unsure (1)..(463): unsure at all n locations
acacattactgtggcagtatacaaacatctntgaatcaacaattntctgccacggtaccaatccaactatagtgcagtatttcttctcccataagggtattccgtcctgccaatactcttacgagattgaaaaacaagacattcagtatattgactatataagttaaattggcaaggggcactgtaatgaataataaaatcatcatatcatcatagtaattactttctagaaatggctaaagcctcttgtgttgatagatcaatactcaacaaccacaaaagctatgcagattacttatatgaaanaatacaaaaacttctgaaatcttttataaatttctatcgaccagtaacctacagaaccaaaccaatgacaaaaggtagccaccaaaggacttctataagactaaaacaaccaatatatatgaattatattgaatatataaaatagttnttacagtag

SEQ ID NO: 165992 - DNA, 284 bp, Glycine max
  unsure (1)..(284): unsure at all n locations
ttacaagaaaatcttatcttaacataaaaatgacatgctaatccctctgantttaggacgaactcatgtaatctatttatgcacacgcgtatgtgtagaatatcctactatttatgccaacatacaaggacatccgacacattctaattgtcacacatacatatngcatttgaaaagaacatacacttttacgctcaaggcattgcgtcaaaatttacacttaattacatcctanacatttgctattacaaactacctacatatatttgaaatatatatcatac

SEQ ID NO: 165993 - DNA, 436 bp, Glycine max
  unsure (1)..(436): unsure at all n locations
ctaagctttcctgagcttaagattagccttacgtggttcatagtattgctcatgtcgctcccctcatctctaacgatctccgcttttttggctttgatgatgccaaacataaatacaacattgagtgcatttggagagtcaatcttgagaatggattagagactngatccttagtcttatcctagagaattcttaacacttaagaagagattaattcatcattatcatcatcatatatgtcaattcattatcctgtatcatatatataaataacaatgcaatgctcaatgctatgcaatgcattcaatatataatagtgtatattcttctcccncttntggcattaacaaggccaaaaagggtgagtancacagtacagaacataccaagtaaaagagaaatanaatcatatttcattaagcataaagcattacat

SEQ ID NO: 165994 - DNA, 323 bp, Glycine max
  unsure (1)..(323): unsure at all n locations
tctctctctgtctctctctagatggtgtatcaaaatgaattcanagagatgagctcaaggaccaaatacatgtgctatatatggcattctaccatcaagaaatgcattagtagtcattaccactcattanntggtgtataattcatagtggtcataccacccataacagtcattcaattggcttcaaaactgcgagcgtttaattttaaaatgtangacaaaatatacatttccagaccaacattgactaatgctcactttaaaatgaaaacaacataggaagtctctatacaagaatatcattatacaatctcattccagag

SEQ ID NO: 165995 - DNA, 368 bp, Glycine max
  unsure (1)..(368): unsure at all n locations
acaagctacatttntatactctacattgagttgtacagggagaggcattcttgtaagcttttctgattgtgtatgtctttgccagcaaatgctcttactcatgggattgaggccatgccatgtgtgtttgtttaagttatgtgatcataccaattgtgacatcactacccataggcttaggctagttgaatcattggtggaagacctttagaattgcaagcaatcaaatatatggtgtcataagagatgcgacacatgagatgttataacaagtctacaacttctgcttccctttagaattgttagcaatcaaatatatggtatcatcagacttagtattcgccatgtgaacgtggggaccatgttag

SEQ ID NO: 165996 - DNA, 361 bp, Glycine max
  unsure (1)..(361): unsure at all n locations
tctaaggcacttctctctttctcanattgctgaggaaaattattctcgtgaagaaaatccaagccgaggcgctttcgtaacgtttctgtaacgtntccatgagtaattacgcgaagattctcgaccgttcttcaagattcatcgttcgttctgcgttttcttcagtcttcaacgggtaagtacctcaaaccaagcttttcaattcattctatgtacccgtggtgggccacattnntgttcatgtanttttattctcactttcatntactctttataccccctgttgacgtgcttaagccatttatttaagtcatttctcgcttaatctanaaatagaataaatctccgccgatcgtttgaa

SEQ ID NO: 165997 - DNA, 548 bp, Glycine max
  unsure (1)..(548): unsure at all n locations
cactcttagatactcagcttagaccnagcacataaatcagggatccaaacccctcatttatggatgttcaatggttgagaagtgaaattgagaatgaggtaaatttgggccaaactctcacctcacacaagtctataacatcaatctaaacttgctcaaactggatttgcacctaaaattccaccgaatcaaaatttgacttcctcaacacccaatttaccctagaaatggctctntgttcactttggtcatttgtttttctctcttgcacaacccaagcttcctcataagtcctaaatgacatttcaaactatgattaactcactntaacctccaaataccactaaatccagatttggccttctgactctcaaaaactcactctntgtccactcataacaccatattctcactttctaaccctaggttaactctacccttcatccctagcagttntccataagcaatttcagcacaccaacattcaaagcatcatcataaaaaccctaaaactgaatgggtaagctaactcactcaacataacaagt

SEQ ID NO: 165998 - DNA, 183 bp, Glycine max
cctaataaactgttacttctagattgacttgatgttggatagtggtttgtatgtacagtgtggttctatgatttggctctgagctaatatgtaagtgctctaataattgttaagtctttaaaataaaaaaaaactatggataactataaaataaactgttccttgtaatactctttatttttt

SEQ ID NO: 165999 - DNA, 254 bp, Glycine max
  unsure (1)..(254): unsure at all n locations
agagaagatagtggaagaagaaaaatgaaacgagtttttatatttcataagctaaaattaaatcttcgttagctaaccattaactaactcctagagagtatcttaaataacttctctaaaagatgagaggacatcttcaaattagctaatgattagttaatgtagaactgatgttagcttatgaaggaacctattttaattnttcttttttcttttcctaaaagtagtttttgagaaagttacctaaacatacc

SEQ ID NO: 166000 - DNA, 480 bp, Glycine max
  unsure (1)..(480): unsure at all n locations
agcttgaagttagaaatcgtggccatgaaatcatgcctggttctcaatgttcttattagtctttaattagctatgatcatcaataaatgaagttgagcaaataacggccctggttcacaattctcacagaccataaaccactttcttgttaaatagataaccttttcttaccacaaaacattgaaaaactatacacgtctcttacttataagtaagtgtattcttagttactttacatccactccaaatgcaattctttttaaacttatgatcccaacattgtctcactggctgcatattccagaactatacaaacaccaaanatttaatgtaaggaaacatgtctctcttacaaatgattggtcgcaacatgttaagtttacctaccctgaaccagaaaacagataatggacaaggatccgttaaccctcttttctgagatgaaacanttattatcaacattgggtttacatcatggag

SEQ ID NO: 166001 - DNA, 367 bp, Glycine max
  unsure (1)..(367): unsure at all n locations
gtaccttaatggagcagcttcatcactattttgtatgtgacctaatatcatnttttaattggtggctacatgttgtatttgttagactggtgatgggatataaactcgacttgtacatgtgattatagattccttgaacataaactagctaattaagtaattataatgttgaatataactntatattcattttaatgcttaatatccatttttgaatttattctccctttctattaagtaactagatagtattacataaatttagagggtgattgtctttaaaaaatatatataaaaatatatttatattaatctttatattaataaaaaaaaaatataatcattcaaacgttcacaatatagaaat

SEQ ID NO: 166002 - DNA, 236 bp, Glycine max
ctcagctgagatgaggaagtgttgagggtgaaacttcctgctgatattgttgaccacagagtggtacctggagatatgtcgcgcgggtcacgagaccttgtggacgtcaagtggggtgctattgcccaaaaccaagcttgaccaatcccgacccaccccgggcatagtctgtcagtgagaacctgtgatgtacctaaacatgcgagctcctggcagtctactatataaatgaacaa

SEQ ID NO: 166003 - DNA, 409 bp, Glycine max
  unsure (1)..(409): unsure at all n locations
taattagttatatattatatactttaataaaaaataacatgatatttttattggaataaaaaaattaaacttaagaaaaaaagattttcatctctcttacaagagatttttcataagaaattaattaaaaaaatattttcaaaaaactttctttctcaaaaatattattnttttaaagtaaataacaaacatgagaaactagagtttctaacttataatttatgaaaaaaccgaaaattttctcctacccatcacccccttaatcattggtacttttttctgggttctaagatattactactgctctctcaactaccttagctggtncgcacctggcacctaacaaccgacgcaccatacccctgggtacgtncatggcgcaatgatgtgtggatatcatgattcatga

SEQ ID NO: 166004 - DNA, 513 bp, Glycine max
  unsure (1)..(513): unsure at all n locations
ctgcgagctgattgattgatttatttattgtgtcagccttatatgtttataaattaaagggaagatacaagatcatggtcactaaaagtgccactgatccagccagaataacaagtgcatgattgtattttctttcctccgttattgctcaaaaagattaaacaaaaacagaaaggactctcacgaggattagcattttgaaacgaaataggttcttttgtaacattgttgtacataaatggtaattaaattgtttaacgaccagattatctgtttggactcaaattcgaaacacttatcggtacctaaatactactactaataatggcatggatctcatgctcagcaataatataacacggtcatttaatttggaatgttaactagtgtttacaccttgnngttaaaaananactagcatttacacccgtgatatgcatgggattataactaanatgngatgtaaaanataaaaatacgacacaatgtagacataaattagaattggaattt

SEQ ID NO: 166005 - DNA, 452 bp, Glycine max
  unsure (1)..(452): unsure at all n locations
cagaantactaagtatttatatctatctttaactaaaataacttataacactacanaataaccataaatgggaggagttngatacaatntacataagttttatacacaaaagttaatcatattcaccgactaacaactccctaaagnttacagttttgcttgtcctcaagcaaataaagaacagagcattggttcccaagtgacaaaaatatgcagtgattatgtacaaaggtgtatgcaacanaagtcactaatggcatgatacaagaatgaagcanaatgctctcatcagttgtctntcacaaaatatgcagttattcaaagagaagaaataaatgtaacctgtacanatagatgaaagttggataagacaatataaggaaagagctanaccacaatctcacggtactggttactcagcacagtgttaagtatcataatacaactacagc

SEQ ID NO: 166006 - DNA, 457 bp, Glycine max
  unsure (1)..(457): unsure at all n locations
gctctatccaaggctcatctggtggtgaagctccttcttccatggcttattccctataggatggggcctgctctcacctcttcttctttgtcttccactgcatctccatggtggaatatcaccattaaaggacctcattgaagctcaaagatccagcctccatagaagccccacaagcaagcttccatcaagtggtatcagagcacaagagcttcaagtaggtgctccttaaacctccattaatttgtttctttaccttctcttccattggttgttcttcattttttctccatgtatctcctcacatgtcttgtgataaatgttcttaacatgattctttagagtttccaccgattaaacttgctatagaagctagatatgatattctatgggtcancattcttggtcttgttcttgacccatgaatgtgtgagttagntnctttgagttgtctgta

SEQ ID NO: 166007 - DNA, 265 bp, Glycine max
  unsure (1)..(265): unsure at all n locations
aatgctttatcttgggaggtatacgaagattccatatagtggaccagcttccttgaactttgagagcttctttgttcaccatagtctncattaaaatatgataatctgatcaaaccgagtatgtccccatggtactaactttcaaaatcaaaatatcagaatcatgaagattgaagagtggcatcatctttatttcttgggaatcttctttattgaaaaattgatcagtaacctcaatgttccaactatttgctttcacatcaat

SEQ ID NO: 166008 - DNA, 436 bp, Glycine max
  unsure (1)..(436): unsure at all n locations
taagctcttctcgcaacagccttcagggtagtctccctaactctccacttcttttactatccagtattgattcagcaggggaaccttagggtagtaaccttacgatagaagacgagaggggagaagacgagagtacgccgaataaaatggcggaaaaggtcgacggcggagtcttccggaagacccgttaggggttcttccggaagttccggaagaaccttntccggaagaagtgtacttccggaagtaaccaaacgtcttccggaaactttccggaaaaggttcttccggaagtttcagaagaagtggttcttcctgaagtttccggaagatgtggttctttcggaagatttccggaagacgcgctctcccgaaagaactttcaaattttcggaagaacttttcggaagaagtggtttttttgttttatgctttt

SEQ ID NO: 166009 - DNA, 342 bp, Glycine max
  unsure (1)..(342): unsure at all n locations
atccttgagtcacctgcngctgcagctaagctccttaactgcaaaggctcttaatattttaagagtatccttgnggaaccttcacccgacgaagaactgacaaaaacttatcttctccttnttggacaaagtatggcaggctgggggcaagtaaattttcttcccatcagaccttggatgcaactgtgatcgtatacccatatcagctagatcttgatgggtattcaagccatccttcgtcttgccttgtaatttaaggagtgtcccaatcacactgtcacanaacattttcttcacatgcataacatcaatacaatgtctaacatcaagatcacaccagta

SEQ ID NO: 166010 - DNA, 508 bp, Glycine max
  unsure (1)..(508): unsure at all n locations
tcttatccaaggctcatcttggtggtgaagctccttcttccatggcttattccttaatggatggcgcctcctctcacctnctttcctttgtcttccgctgcatctccatggtggaaaatcaccattaaaggaccccattgaagctcaaagatccagcctccatagaagctccacaagcaagcttccatcaagtggtatcagagcacaagagcttcaagtaggtgcaccttatnacctccattaatttttttctttaccttctcttccattgttgtttcttcatttttctccatgtatctcctcacatgtcttgttctaaatgttattaacatgattctttagagtttccaccgattaaacttgctatagaagttagatttgattttntatggttcaaaattcttgttcttgttcttgaaccatgaattgtgttgagtttaaggttcctttgagtttgtcttggtattttttgtggctgannacctaaccataaatcttacaaaatata

SEQ ID NO: 166011 - DNA, 258 bp, Glycine max
  unsure (1)..(258): unsure at all n locations
ataacaattagcaaaatatcttgtatgaaatggctataaaaaggggtaatgatgaaataaaaatatatgagaattattccctgcaatttagctnttcttttattccagttagctatcaactggtctgaccttagcttttcttttattccagttagctatcaacaaactaataggaaagaacaaaatactaaacatttatttaattaaatctaantaaaaaattacttcaatcacattatntaacaaaatacttgcaag

SEQ ID NO: 166012 - DNA, 426 bp, Glycine max
  unsure (1)..(426): unsure at all n locations
cgctctanattacattgatgttngtatttattggaggggtttgtatgccattnnttgtttaagggtagcatatcttggtaaaactaactntccaaatgtttgccttcgcaggaatggccccgaggaagcttgcctcanagaggtccaggaaggacaaggcggtcgaacgaactagttccgctccggagtatgacagtcaccgctttatgagcgctgtacaccaacagcgcttcgaggccatcaagggatggtcgtttctccgggagcgacgcgtccagctcanggacgacgagtatactgatttccaggaggaaatatggcgccggcggtggacatcactggttactcccatggccaagttcgatccagaaatagtccttgactttatgccaatgcttggccacagaggaaggcgtgcgtgacatg

SEQ ID NO: 166013 - DNA, 232 bp, Glycine max
  unsure (1)..(232): unsure at all n locations
ctacgtgggatacgtgagctcagtgaaggtaggcaactggggatggtgggcttatgtgtgatttgtggatgtggagaattgatttgcaccatcgcccgaccgccacctagtacaacatgtgatggataccccataatcctacaagcttgaactgaggaagtgtggaagggtgagacttcctacttttattcgttgaccacagagtggtacctggagatatgtngcgggggtc

SEQ ID NO: 166014 - DNA, 497 bp, Glycine max
  unsure (1)..(497): unsure at all n locations
ctaagctatgactctnggcaatntctntaanactagtcacttaataaagttgtgactntngaaagaatcttcanaaacaagtcactngaagaattgtaacttttggaaatgtatttttcgaaatcggtcactggtaattgattaccattaaggtgtaatcaattacacatcaatagatgtgactcttcattntgaattttgaaaattgaaacattcagaaacactgttaatcgatttcaagttttgtgcaatcgattacacaagtttaaaatgatttaaaactgttgaaatttgaaatctaacgttttaaaaacactggtaatcgattactagagagtaaaactctttggtaatgattntgtganaactatcttgtgctaatcaatgtttgaanaactnntttagtacttatcttgatngagtcttctcttgattgttgaatcttgtgtcttgaaacttgatcttgattattcgtgaaactngattcttngatcttg

SEQ ID NO: 166015 - DNA, 288 bp, Glycine max
  unsure (1)..(288): unsure at all n locations
atacacctttatttgggtctctatttggntcttaaccttctcatgcaacttctttacaaactctgacctagattccccttctttatgtataaaagaagtgtcaagtgggaggggaattangtctaagggtgttagaggattgaacccatagacaacctcaaaaggggattgcttggtggttctatgagcccncttcgtgaggaaaatttacatgaggaaatactcatcccagacttatnggtgcctttcaaagaacccttaaagggtggatagagacctattcactac

SEQ ID NO: 166016 - DNA, 427 bp, Glycine max
  unsure (1)..(427): unsure at all n locations
tttctntatccaaatctgattataaagcagatatcaagagagcagttgatgtagtggagatatttgaggtcttgttattgaagagctgcatgaaaaaataatgcctatgtgaaatcttcacgatgcgtttgaagcttgaaaatgaatccaacagtatgataaagctattgaagaaatcaaactatctttgctcaagctattgaagaaatcaaactatctacccatgaggatagagaaaaactagccaatgcaaggctagaaatgggtatgacagtnaatgatatgataagtcatttagaaaagcttattgctcaggaagaaagttcagaaagtattgctagctcaactntgtcctacttaaaataaactgaatgcaattcgtcaacaaattacagacattcgatcatctaaagagtcgaatgagaaa

SEQ ID NO: 166017 - DNA, 324 bp, Glycine max
  unsure (1)..(324): unsure at all n locations
acttgaattcctaattctgaattttatttccttcaattgtgcctaanaacattgntagcctttttcttggttaaccttttccttgtctctctctagccttaccctacacatattggtgaattgttctttgttgtggccataatctcttgagttgcctaagaactcaaggggaattatagtggtaaaaggcaagagtgntttcattagagaaaagccatagttgtgtgatacacttgagtggatgaggtattcaaacagcaactataattgtcttgttacgtctgatttgtttgtttgagatgtcaagtactaatcctaatgatg

SEQ ID NO: 166018 - DNA, 462 bp, Glycine max
  unsure (1)..(462): unsure at all n locations
acttcctgtgttngggaacctctccttcctcaggtgtacccaaactcaatcactctggttcaagcacgactatctttctggctttgttggcttgccttgcatagctcgcattcttcttttcaatttgaaccttcacttgctcatgcaacttcttcacatactcagctatagcctgtgcatccttatgcttaaacatagcaatgttaggcgtatgcaacacatcaagaggagtcaaaggattaaatccatacactatctcaaatggtgaacaattagatgtgctatggacagcccgattataagcaaactcaacatgaggcaaacaggcttcccaagattaaatattgttcttttcaacagtgctaagcagtgtgcctaaagtactattgactacctcagattgaccatcacatngtgggtgacaagtagtatataacaacaatatagtaccaatcttaccca

SEQ ID NO: 166019 - DNA, 281 bp, Glycine max
  unsure (1)..(281): unsure at all n locations
ctatgcatttctcttntataagcgccattcntttcttccttaagattcatcactatggntgatttggaagttgttgcaacctgtttaaatattctccattttgattccttgtgtgcaccaatccttcaattggctgaaatctttagaggggaaggttaagcatatcttatatatttatttatttgattggtggtgacacttgtgttcagaaagaaaaaatccttttcataagtggataacttttgagaaggttcatttctgtttatcctctagattttctc

SEQ ID NO: 166020 - DNA, 490 bp, Glycine max
  unsure (1)..(490): unsure at all n locations
atctcttgacataaaaacctcactcacttagaangaaaaatatacttaaatgggtcatattcatataccttcccacggaatggctctggcgacctgtaaatgtgactgtgcatttgtttccttttccatatggccattcctgagcatcaatgacagaaataaagttagtttatacaggagatggagtttcaaatgtgtatgatattcacatcgtttntcttttgcatgaaatatatagatgagtggatnntattttccttttcttttggtgagaaaaaacaaaaactcttcattcatgtatctatacagagaaaatactggttatngtaaaaacaagatcaataaataaatactactatattaagattgaaaagttcttanaatgagtactatttgcatgtntgtctaatatattgagccagagagacaggannagttagttgtaagtgtaatcttatgatgtgtttgtgagtgggagagaggagatcta

SEQ ID NO: 166021 - DNA, 243 bp, Glycine max
  unsure (1)..(243): unsure at all n locations
cttaacagaataatcatcactaaattgataaatactccataccaataaaatagtgataataaagaatatattatcaaattcaagaaatatatcaagcaaaagccaaccatttggaaaagtggnttttctttntcttttaattatatatatctttttacggaagccaataatccttgaatcagatggacaatgatattatgtgagaccaaatcaagtagaattaggacagataacaatttcatg

SEQ ID NO: 166022 - DNA, 378 bp, Glycine max
  unsure (1)..(378): unsure at all n locations
tctcatcactgctctctgcatcgctaggggagtcgtgtctgattcactaacnncttcgagtccttgagcccacgccattaaattntggcatatatcacggaagaagtagttgtgaacctggnatgatcctcatgatcacactntncaggggacnnccgcaagactcanggaattgaagaccttgatactttcttcttcntgctntctctggntnccgctccaccaccaccaacacctactccagcacccttcgacacttccatgcagagctcaaaccagatagtgccaatgctgtagagcctccaccatggcttatgcctggtgatgcagagtatacatgacttggctcaacataggcctgttatgagcatataggac

SEQ ID NO: 166023 - DNA, 383 bp, Glycine max
  unsure (1)..(383): unsure at all n locations
gctctagtntcagatgatgcagatgggtntgtagctacctcatgcactcttctaatgactatggcatcatttctggcgctaaactgctgggagttggaggccatcttctcaattaaatttctggcttcagcaggagtcatgtctccaagggctccaccactggcagcatctatcatacttctctccatattactgagtccttcataaaaatattggagaagaagctgttctcaaatctgatggtgagggcaactggcacatagtttcttaaatcgctcccagtactcatacaggctctctccactgagttgttaatacctgagatatctctcctgatggctgtggtcctggaagcacggaaaatgttttctaagaatactctc

SEQ ID NO: 166024 - DNA, 304 bp, Glycine max
  unsure (1)..(304): unsure at all n locations
atctctgagtcacctgccgcatgcagctcatgtctttggttcttaagaaactaagctctgttactcgggntncntactaatattcatgtnattcnagatgttggttagagaggaagaaattatagtggatggggaatcacctccacacgttcatgtatggngttgtgtggtttgttctgtttttcaatgaaatgaaagttgaattttcatgtataaggttcaacctctagctctataccataaatactcagctactttagtgagaagaanatgagtttctatatcaagtgggggcgatatgtgt

SEQ ID NO: 166025 - DNA, 485 bp, Glycine max
  unsure (1)..(485): unsure at all n locations
tgatcgcacttgactagagcttagtaatttatttgatgtgtgaggccaaagattatgcagtgggcgcagttctaacacaaaggcaagacaagaatatccatgccatttactatgctagcaaggtcctcaatgatgcataaatgaattatgccacaaaggagaaggagatgctagctattgcctttggcttggagaaattcaagtcatatttggtaaggtcgaaggtaataattttcaccgatcatactgctatcaaacaccttctcaccacagtagattccaaaccatgactgattagatgggtcctgcttatacaagagtttgatatagntatcaaagacaagaagggatctgggagcgtggtggctaatcacctctcccagttgaagaacgaaagagtaactaaagaagaaccgacagtaacgggagaatctccagatgagttcctctnacatgtcaccacaagaccttggttcgtaacatga

SEQ ID NO: 166026 - DNA, 366 bp, Glycine max
  unsure (1)..(366): unsure at all n locations
gagccatgttctcagtatanaaattagtagtggaatgttcaaaatcagaatcaccctcaacagaatgctcagaatgctcacaatgcacagaacgaccaagatgcacactatgtctaactaatctttgaaaggttctatctatttcacgatcaaagggttgtaaatcacctagatatagtcatgcactatatgcagcanataatgtgtttctcaacaagcacctaacaaggtggtaaaactacaactatactcaagcgatatcaaaatgagcttaaattgtgtgaggaacactctataatcatgaaaagatagcacacaaaatntcacacaaaaattcaaagtctaactatgaaaacgacctaagca

SEQ ID NO: 166027 - DNA, 184 bp, Glycine max
  unsure (1)..(184): unsure at all n locations
tgccccacattatttcatgacacaaatgcgcaaatgatgatttggaaactctatgcaaaactggtcatgcatgcgcctatgcggacgctcaagtgtcaaatntttatggtcatgtgatgctatggctcaagattcatttcctctattntaaatcaacccaatggttccaaaatatgttctttta

SEQ ID NO: 166028 - DNA, 408 bp, Glycine max
  unsure (1)..(408): unsure at all n locations
ctcagctntcacaagagtcctcacanataatatcatgaaacagataactagcaagactacccatcatatctcccaaaaccccatacccacgaaaatcaagagggaaagaagtccacccaaacctgaaatttcgaagtcccactcgtagacacgcacttcacgaccccgaaaatgccctcctttcacgaattggggcagaaatgatggccaaaggttgaagctntgtgtggagcttcaatggtggatgaggaagagagaaagctacgtgagagagggagagaaaaggcttctgaattnttttggggctgagtgaggagagagaacatagctctntggttttaaataaaagggttttctctttttctattattntatntaagcaatgccacatgtctnncattgagtgga

SEQ ID NO: 166029 - DNA, 382 bp, Glycine max
  unsure (1)..(382): unsure at all n locations
attcaaaaaaataagtttatctcttttatcttagtgagagtgattctcctaaattcttgagtgattcaagaacacccttgctgtatcaaaggactatcacaacctttgtgtgttgccctcgctggaaagagtgattctttccttccaatcatctccacccttgttctttcaaaccacaattccagaanatccacctctgcccaaaattatcttgtgaccataactcccatttaaacactcaaataagtgattttgagcctaattgaattcaaaacgagaccttcacctcgtttggagtacctcttnggaccctgtacttccgttatgcattttatattttgtcagccacacttaactacgtntacatccatcatcatttatg

SEQ ID NO: 166030 - DNA, 363 bp, Glycine max
  unsure (1)..(363): unsure at all n locations
agagaagttgaactatgagtcgcgtctcacaagactctcattcataagagttacaacatgtgttacacatgcacctatatatagactangtagctgctcaactatcttgagaaaactgtcttgagaagctagagcttagctacacacacctcctctcataactaagctcacctccttgagaagcttccttaagaagatttctaaagaagctagaacttatctacacatacctctctaatagctaagctcacctccttgagatgagaagctagagcttagctacacaccctctataatagctaagctcacccccatgacaaaaaacatgaaaatacanaaaaaagtccttactacatagactac

SEQ ID NO: 166031 - DNA, 189 bp, Glycine max
  unsure (1)..(189): unsure at all n locations
atcagagagaaactcgattgatgaagagattgatacttgatctgctagagcacacctgtaagcttcttgtgcatactatcccagggccgtgttgtgaatgagatttcggatctcgggcatgacacgattntgttgcacaacatgtggaataacagattgctctgagacacctcatgatgacgctcatgc

SEQ ID NO: 166032 - DNA, 191 bp, Glycine max
tctagcaactggagcatatgtttcctcatatctatacattcttcttggtggactaatcgaggccgtacccgaatcaaataaacatgaaaatgcagtaactaggaagtgatcctaggtcgtttcccaacgagcagtgacaaaccaaatgttcataatatacttgcagtgacagtaacgattagggggggggg

SEQ ID NO: 166033 - DNA, 439 bp, Glycine max
  unsure (1)..(439): unsure at all n locations
ctaagcttcctcggggccatctnctgcgaagggcaaacattggaaagttagttttacccagaaatgctactcttaaaacgaaaatggcatacaacctcctccaatacaaacatcaatgtaaatttagagcaaactcatgtacatacttccttacgaacattcactcgcacgagatattcttctaactaaggaaaaaaatacacccatgcacaatcaaggcatcctcgttacctagaccacatacatgcacctcctttgcaagatttacatacatgcatactcaaggtattttggctaccaaagattgcacacgtgcacattcgggtatttctagtacccatacatacaccaatttcataaggaatttcggccatctacaccataaggtattacatttcatgctcttttcaagtgttcgctacctaaagccgcatgcaaa

SEQ ID NO: 166034 - DNA, 469 bp, Glycine max
  unsure (1)..(469): unsure at all n locations
ctgcagcttatctaccagatncacagaagggtacaacataacctatttatttctaattatatgggccattaaatgtatcagtgttgacaataattgattagcccgtgaatntcctctagggctgaacacacttcggccatggcctntgctttggctagtagtcgtgggaggtcttgacttccatttaaggtcaaggcgaacctatccatccacatggtcgcttcttgatgcaatgcatcaatcacccttcctcttgcctccttctcggcatatgcttgtgcgaagtcttctactagcttttgctcatgagccaaagactggtttaactcctctttgtactggcctattatagctagcatgctttgctccgtggcttctaagtgttgggccaaacttctcttggatcttgacaagcagctaactcttctttagaccatgctatgtactcgtgattggttctctcttcctt

SEQ ID NO: 166035 - DNA, 361 bp, Glycine max
  unsure (1)..(361): unsure at all n locations
tgacatgaaggattgtttgatgggggtgggttggacttcttntctggaaaatnttagcatctggcactatggcccctatgctcttttccggngaacggctatgcaacatggattattgttgggacttatgtggtgatctctccaaccaccattgcttctatgnttgagtgtgctctatatggtctgaccatgagaaaagattgggagaagtcctatgaagaaaaatattgatccttatcaaaaggcgcattctgttgtggcaaatctgctatgatgaaanatatgactnttctactaaagtacaacacatgctagcacagtatggactntgcattgataagggacgtgcatttgatgcaag

SEQ ID NO: 166036 - DNA, 422 bp, Glycine max
  unsure (1)..(422): unsure at all n locations
agcttctcatatgtgacgctcctgaatcggncatccaggtgtaaagatatgatcatttgaatttctcaagagctntccntgttcaatatcgaacgtcttgatatattaagcacctgaatcggaccttcgagcgaaaagttatgaccatttgaatttctctagagctctctttgtttaattccgagcgtctcgatatattatgcgcctgacttggacctccgagggaaaagagatgaccattttaatttctcgagagcttgctgtgttcaatgtcgagcgtctctatatattatgcgcctgaatctgacctccgagtgaaaagatatgaatatttgaatttcaccagagcttccgttgttcaatttctagcgtgttgtatattatgcgcctgaatctgactctcaagtgataagatatgacca

SEQ ID NO: 166037 - DNA, 407 bp, Glycine max
  unsure (1)..(407): unsure at all n locations
gagaatctttctatgttcgtcgtgtgttaaggtcagaanattgagaggaaaaaaaaaaaggagattagttcagagttcaaactatgtttatctttaagttgaaaccattgtaaaaacagtccttgtgtgagaggataggaaccccgttttggaattggatacaacatggtatatagacatgttttcaatcaagcgacccacagtcccaaacaaacaagcacaaggtgttgggtgtgcaacatatgtgcagtggcggagtcaagaccctaagttagtgcggacaaattataaaaaataaaatcagtgggttcaactatataaatataaatggaatataatacaaaaatataagattttgtttacaattcttaattaacagaaaatttattggtgaatttaataaatga

SEQ ID NO: 166038 - DNA, 264 bp, Glycine max
agcttgtccccaaggcttcatgtagactcgtcctatatcgtgaagtaaatctcttatccctgtcggatacaatactgaaggaattccatgcaaccttactacttccttgatgtacaactccacgagtttctccattctatacttcatattcactgggataaaatgagcagatttggtgagtcgatttactatgacccacacagcatcatgtccacgactagtcttgggtaaactagatacaaaatccatagatatgctctccca

SEQ ID NO: 166039 - DNA, 207 bp, Glycine max
agagaatctacagtgttcaatgatagcttgttagatattagatgttcacaacaagctgtttagattcataagacagcctgcttaaacaagtgttcagacatgcagtcggtatcgatccaaaacaggtgagaaactgtgaaaagttgattgatttcactgtacgatccttgttgatcgtccacacgacttggaatcaatcaaagctat

SEQ ID NO: 166040 - DNA, 323 bp, Glycine max
  unsure (1)..(323): unsure at all n locations
gctccggagtacgacagtcacgctttaggagcgctgtacaccagcagcgcttcgaggccatcaagggatggttgtttctccgggagcgacgcgtccagctcanggacgacgagtatactgatttccaggaggaaatagggcaccggcggtggacatcactggttactcccatggccaagttcgatccagaaatagtccttgagtattatgccaatgcttggccaacagaggagggcgtgcgtgacatgagatcctgngtaaggggtcagtggatcccgttngatgccgacgctatcggccagctcctangatatccgttggtg

SEQ ID NO: 166041 - DNA, 421 bp, Glycine max
  unsure (1)..(421): unsure at all n locations
ccttgatctaagctctcccccatttctataatagggggagaagtgatgtagaanatggttcagccccttaggcacttctctctctttcngaattgcttggaacaattgtttccgagaagaaaatctaagccgaggcgcgttcgaaacgtttccgtaacgtattccgtgatgaatctcgcaaaggtttcaaccgttcttcgacgttcttcattcgttcttcatctgtcttcgatcttcaacgggtaaagtcctcgtaccatagctttcgattcattctatgtacccgtagtggttcacatagtgtttcgtgcatctttattctcgtattgttacttctcattacccctgttgacatgctttagccattttgttaagtcatgtctcgttaaacttataaatataatatatctccaccgaacat

SEQ ID NO: 166042 - DNA, 337 bp, Glycine max
  unsure (1)..(337): unsure at all n locations
ctctacatgctgatgagtgtgaatcactggagactgtattgttcccttccacggagntgaacaatttgaggaaaacaggaaacgagttgagttttggaattgcttaaagttggatgaattttctctgatggctattgagttaaatgcgcaaatcaatgtaattgaaattgcataccaacatttatcagcaccaatacttgatcatgtggaaaattacaatgattacaaggatctccatgattcttatcaagcagtgtacatgtatccaggaagcaatgttccagagtggttggcatataagactagaaagggatatgtaattattgatctctcttct

SEQ ID NO: 166043 - DNA, 414 bp, Glycine max
  unsure (1)..(414): unsure at all n locations
tacatgacagtttcaaaaaatattacagcaagaatataaactcaatttaaattaaacagaataaaaagggtaaacatttgatattctaaaataaaactagaaaccagttgttcacacaaaatgatacacaattaacagcaatcaaaatttggaatttgtttaagtccacttctggaccttgaactccaaggcccatgagttaagacgtcgatatttacatataattcccttccatcaggtaattctatagttntaaacaacaattntagcaaaaaactcanaactgatgtagttgagaagagataanaagaaaactatatttctcttttggtcatactttataattcatacaacacctttatatagtattttaaaaacattcaacggttgatatgctctgattcatacataagt

SEQ ID NO: 166044 - DNA, 390 bp, Glycine max
  unsure (1)..(390): unsure at all n locations
agtcacctgcggcatgcaagctatgaacgagatctattcatattgataactntattctatttataactattattatnttacatatttttatttacttattttatacaaaaagaaactaatgtgaaattaataagaaattaattatatgaatntaataatataaaatatatcattaaatcttatacattaattgtatttttgtaataaattgaataatacattaatggaagaaaagttgctcaagtaagacatatnctctttaaatcaatcattcctttcatattaaagtttcagctcgcataggtttgggataggtacatgtattgttttattgcatgaatcggaatgggtacaatagtacgcattctacaactgctcattgtcatccca

SEQ ID NO: 166045 - DNA, 475 bp, Glycine max
  unsure (1)..(475): unsure at all n locations
ctaagctccatctgccagatcatcaaagtgtacaacataacctaacggtttctaattatatgggccatcaaatctatcatgtgttgacagtagttgattagctcatgaatttcctcaggggctgtacacacttcagcgatggcctttgtcttggctaatagttgcgggaggtcttgacttccattcaaggtcaaggcgaacctatccatccacatggtcgcttcttgatgcaatgcatcaatcaccctccctcttgcttcattctcggcgtacgcttgtgcgaagtcctctactagctcttgttcatgggtcaacgactggtttaactcttccttgtatgccctatgatagctagcatgctntgctccgtggcttccaagtgttgagccaaactccttttggatctagagcaagcagctaactctttctttaagatcatgccatgcacccgtgacttgtccctttcctctctccg

SEQ ID NO: 166046 - DNA, 312 bp, Glycine max
gcataatttgctagagatctcacgttgattggtgatatgatcgatcaatacagtgtatataagatccttcatccaaagataacactgagaaatgagtgtataactagaaccgaacctcttctttcttatctatggagttgggctagggcttctcctcctcttggacctctttctcctcttgaggtttcgggatcggagaaagaagctcgacctgtctgtgactcttcctctgtattctctcctaaaccttgagcggatccgcttgctctgcctagcgaccaccttgtgagatttgcaatcggtgacaacatc

SEQ ID NO: 166047 - DNA, 323 bp, Glycine max
  unsure (1)..(323): unsure at all n locations
agctntataagtgcgggtctgggagacgaaggtcatgttgtctctatatgtgaagatgatgttccaagaactctgatttggtccgaccatgccctcctgatttccagctgggaaattggcgggtggaggaacgccccggcatttacacaacaagcataatgtaaacctttacggttttaaaagctctatagttgggcctaggctttagagttttcattntgttaaggctttgtgtcttttgtctntgagtttataatacaaagatctttcttcatctgttcctggtctctacccattctcattcattngcatgtttacttctt

SEQ ID NO: 166048 - DNA, 399 bp, Glycine max
  unsure (1)..(399): unsure at all n locations
tgactcaccatanaccttgacccagtgtgagaatgtcaatccttaccctcggaagcaaaaaagaatagaatgaaatattccaatcaaaaaagaatagaaggaaaatntccaatgaaagcaaaaaaagaaaagaaggaaaattccccattcaaagagtgggagaaagcaaaatgaaaagaaaggaaattcccaatcaaagaatgggagaaagtaaaaaaggaagatgagaaggaaagaaagctcctgatcagggatcgaaggaaaaacagaagaaatgtgcagagaggtctttataccagacaatatctgaacaatacagaattgtcaccaattgaacgaaaagaaggaaaggaaaccacgacctanaatggtcttctccctttgattaccaaccaaaat

SEQ ID NO: 166049 - DNA, 320 bp, Glycine max
  unsure (1)..(320): unsure at all n locations
tatgctcttgaccttgacttgaaagaacctctttttaagcgaatgtgtttgacttgatcccatgttttactaaagtgaacaaaaatcggtgcgaatcaaaactctggcatctatcatgagtggaatggatgaatgcatgaagaaatgcatatgacatagatgcaatntatgaatacgggagcccgggaaattgtctncttcttagatacaacatcttgnggtagcaaagtgcccgacttatgtatttatgaaggtggcacggaccctctgttggtttgcanacagaggggatcgaaacagaatccgtgcgtgatgcatat

SEQ ID NO: 166050 - DNA, 413 bp, Glycine max
  unsure (1)..(413): unsure at all n locations
ggtattagttntacgaaaagaagaaaaaanactatatcttgctggacatagcaccagcattgcccaatcaaggaaaaaaaaattcaatgtttaaaccttcacattctgaatgaatgtaaaagaatcatgaaaaatattcactgtaatctgattcanaaaatgaccagtgaaaatgcaaaaaagctagaagtgaatccacatgtgaaataaccatgaataccttgnttgcagcttcaacagttcccattagttgcaactaanaatgtgtttatctgtaaaggcaaaaattcacaaatatgtacaaagatgagtcanagagaaattatctacgtcaaggaatcatgcacctattatacaagtatattcgttttttctcattactcattaacacattccagaaaaaaacatcatat

SEQ ID NO: 166051 - DNA, 314 bp, Glycine max
  unsure (1)..(314): unsure at all n locations
agcttcttgaaaaacttccttgagatgctagagcttatctacacacacccctctcataacaagctcacctccttgagaagcttccttaagaagattcctaaagaagcttgagcttagctacacatacctctctaatagctaagctcacctccttgagatgagaagatagagcttagctacacaccccctataatagctaagctcaccccatgacaaanaacataanaatacccaaaaaagtccttattacaaaaactactcaaaatgccccgaaatacaaggctaaaaccctacactactagaatgaccaaaat

SEQ ID NO: 166052 - DNA, 476 bp, Glycine max
  unsure (1)..(476): unsure at all n locations
tcaactacanagagtagttcagacttagcgcaataggcgcgctaatcgcacttccaagaattcaaaanatagtaagagaatggcgcatagcgcttcctttcctgctaagcccagcttaaaagctcaagttacaaaattgatctggggcttaccttatgatagcgcgcttagcgctgctacaataaaaaattttccagagaagaagtggcgcttagcgcatcatccacgctaagcccactgcttaaggttcaattacagtgaagatgttgggcttagcaaagtgatgtgcgcttagctgaactattcagccaaccaatcaggggactctgcgcatagcgcgagcaagctcggcttagcgcatgaagattgagcgcttagtgcaaggtttgcgcttagcggatagacaatngcaaaataatntctgagtctttttttgctatatcttcacataagcttaanaccccttggtcattact

SEQ ID NO: 166053 - DNA, 337 bp, Glycine max
  unsure (1)..(337): unsure at all n locations
acccgagggggccacatttgtgttcgtgcattttattctcgttgtgttactttntaaccccctcttgacgtgcttaagccaatttacttaagtcatttctcgcttaacttaaaaataaaataaatttccaccgaacggttgaattgtattatcccgtaacttcggttaaaataaattccgaccggtcggtcgtgccgtaaccacgttggaaatcaagaaaagagggtaaanaataatataataatcaaaanaacatcttttagcaaaataaagcggaaaatcaatcggaccgtttctctttggggattctcattcttaatcgaattaattaataact

SEQ ID NO: 166054 - DNA, 414 bp, Glycine max
  unsure (1)..(414): unsure at all n locations
tctagatggatntatctatgcccattctaataccttaagtntgtcgagaaattttacaaacaagagggaattggtgagacatgctattactagacttgccacttcttatctaaccttggaaaggctccacaaagagaaagcaaatattagaaagatgtttacttctgatgaatggaccttgaacaagctatctaaggagcctaagggaaaagaagctgcaaaggtagttctcatgcctctcttttggaatagtgtggtttacattcttaaagtcatggctccacttgtgaaagtgcttcgtcttgtggatggtgaaaagaaaccagccatgggctatatttatgaagcaatggacaaggcaaaagaaacacattatcatgtttttaacagcaatgaaagcaagtacanagatgt

SEQ ID NO: 166055 - DNA, 343 bp, Glycine max
  unsure (1)..(343): unsure at all n locations
gcagctttattttcaattacagcgtctcgatatatatctggactcattcgtancaaccgagaanaaggtattgtcgcttgatgtgcttagcgcttgtggtttcaatttcgagcggctcgatatactactggacacaatcggacacccgagttaagagttattgtcgtttgaaattgctcatagcttctattttaaatacgagcgtctcgatatattctgggactcaatcggacaaccgagtaaaaagtattagcgtgtgatttgcttagagcttctcgtttcaattacgagcgtttcgatatactaccggacacaatctgacatccgagttaaaagttattgt

SEQ ID NO: 166056 - DNA, 387 bp, Glycine max
  unsure (1)..(387): unsure at all n locations
gtcccgtattatatcgagatgctcgnaattgaaaacagaagctctgagccaattcaaacgacaatagactttgactcggatgtccgattgtgtcccgtagtatatcgagacgctcgtaattgaatacagaagctctgagaaaattcaaacgacaataacttttaactcgggtgtctgattgtgtctcgtantatatcgagacgctcgtaattgaaacgggaagctctgagaaaaatcaaacgacaataactntntactcggatgtccgagtgagtcccataatatatcgagacgctcgtaattgaaaacagaagctctgagcaaaatcaacgacaataacttttgactcgggtgtccgatggtgtctcgtagtatatcgagacgctc

SEQ ID NO: 166057 - DNA, 526 bp, Glycine max
  unsure (1)..(526): unsure at all n locations
gcttattatgccctctcccctcagcggggatntcttcttcggcgaaggcgatatagttgttggcagtgatattattgaccagccctccgaaaccttctaccgagatgtcttgggccacatgggcctcatttataacttttactagcagagcccgatgaggctcggagctcatgagtaactccaacaatgagaccctggccggagttttgttgagctgttcgataaccttgaattcgctctgttgaattatacggaggaactcactggcttcctctagcggcacctcctttttctccggaagacctttcgccgaaatatctttattcgaagcatggggtgcttcaccatcttagtcctccaccacttttcctttcccatcgacgttcgcgggttggactggtaggtccggaggcgcaaacacacgaccgctacgggtcacaccactcagtcccgtgatatttgttaccttagccgacnacgagctgacatcggggcttcttctttcttctccctcggaggtgatatc

SEQ ID NO: 166058 - DNA, 498 bp, Glycine max
  unsure (1)..(498): unsure at all n locations
ctcagcttcaactacagtgagtgattcaggcttagcgccactacatgcgctaagggcacttccaatgattccaaaatagaatgatgttggcacttagcacatcctatcccgctaagctcagcttgaaagctcaacttacagaatgaatctggggcttagtgcangatggcgcgcttagcgcagctataataaattttcacagagaggaagtggcgcttagcgcatcatccacgctaagcccactgcttaaggtgcaagttacagtgaagatgttgggcttagcacaacgatgtgcacttagctgaaccattcagccaatcaatcangggtctttgcgcttagcgcgagcaagctcggcttagtgcgtgaagagatgacgcttagcgaataagcaatctcaaaattttctaagtatnttctgttatctcttacacataattaaaaccctttttgtcattccaaacaagctgaataaatacaatcacagcaaatgtctac

SEQ ID NO: 166059 - DNA, 278 bp, Glycine max
  unsure (1)..(278): unsure at all n locations
ggcaaaagatgaatcgagtacatcactgcttcgtctactgccaaacatatataggattggtgatgtccttgttacttccagcttcaccttgacaaagatgtcatggaccatgttgaaaatctaaaatgattcaaccccatatcctgtgtaaaattcgcaatacttcaactgtacatcattcncatacatccatgctcttcattggttgattgctcattgcattctttccttngaaaataaaataaaataaaataaaatgaacttaatcattggtataa

SEQ ID NO: 166060 - DNA, 427 bp, Glycine max
  unsure (1)..(427): unsure at all n locations
atctggtgaggccaagagatgggtgcattcattcaagggcaacaggttaaagacctgcatcttcattccatcagtttcctgatgaatctttgagtgaggcattagaaagattccgtagcttgctgcggaatactcccactcatggtgtttcagagcctatacagctgaacatcttcatttgatgggttacggccgcaatcaaagcagttactcgacgtttatgcatgaggagaaattaagttgaagaaacctaaagaagccatggacttaattgaaaatgctgctgccagtgaacatgcaattctgcatgataggagtcatattcctaccaagaagagtntattatagctttcatcacaagatgccttgttgcccacaataagttgatgtccatgcaacttgagctttactgaacactagtaagttt

SEQ ID NO: 166061 - DNA, 333 bp, Glycine max
  unsure (1)..(333): unsure at all n locations
acttatgaaagntagtgaanacttaatgattatcaagaactgaacgtagtctcattagtagagaccaatcaatataaaacgctcaatgtctgatctatttttcttatctgctttaatggaccaatggtttaaatttgattttgtatataaaagtggttgcaaaatctttaagtatcattaactatgtnntgttgtgaaaaccttattctttttcctttatatttttcaaacaatggttttctttgataaaaaggtttccaannaaaattaaatcacaattcaactcttccttcttgtgatatntacttntatagaaacttctcttctagtgta

SEQ ID NO: 166062 - DNA, 401 bp, Glycine max
  unsure (1)..(401): unsure at all n locations
tactcagctgccactgtgtagctcctnggagcttgtggcctagaatcttcttcatcaacggattcctttgcttcttggaagatgaatgacagtggaatggagaacgaagagagagaggagatgccacttcaaggagaagatgagtctagaagaagttcaccaccatatgaggccatggataagagcttggaggaagaaggaaatgaatgaatggaaagggagagaagagcacgaaattttgtgctccaaatgagctgtgaaatctgaagtttaatattcaaatgatcaaagttaaaaaaaatgcacacacatgacctctantatagcctaagtgtcacacaaaattggagggaagattgaatntcaattcaaatttcacttgagatttgaaattgaattgt

SEQ ID NO: 166063 - DNA, 368 bp, Glycine max
  unsure (1)..(368): unsure at all n locations
ggacactactcttaaacaaaaatgacatacaacctccttccataaatacaaacatcaatgtaaatttagagcaagcttatgcgcatatttccctacgaacgttcacttgcacaagacatcctattaactaagaaaaatgcacccatatacaatcaaggcagcnntcgtacctagattatntacatgtacttccaaggtgtattgttacttacatcacacacatctncttggctaaagttacatacatgcatactcaaagcattgtggtggtaccaaaaatgcacatgtgcacatcttggtatntctaatacctatacatacacaaacttcacgatgaatattgactatctacacaataaagtgctaca

SEQ ID NO: 166064 - DNA, 425 bp, Glycine max
  unsure (1)..(425): unsure at all n locations
agagaggaagcttaatggaggaagagaatgagagagagacggcctcctaaatgttggagcaacagagggagagaagtcgaactntgaagtgtgttncacaagtttcacattcatcaaagttgtgacaagtgtcacacatgtntctatttatatcctatgtcactgactatgtgaatttcattttcatttcatgtgaatctaagagaaatattccaaggatatgtcaaaggcatcttagcatattcctttagatgccatacgaatggaaggtgtgactctagcacattggaaaggaatatgccgcaagaatatctcaaaagaatattccaagaatatgccataggcatcttagtatattccttgagaagctagagaggggatactacacaccacttgatgcaatgctactccccaagggcattgga

SEQ ID NO: 166065 - DNA, 359 bp, Glycine max
  unsure (1)..(359): unsure at all n locations
attctagaagtttgtttgccgatgtatttcgcatgttaactatattctaaagtttcaaaattttcatttcctttgatgttgatgtattgtcttctctaagctgaagtgttttcaacaccttccaacttgtggggggattagagataaaattagtttaggtagttacaagttagttattaggtaagttacgtacaatttagtttagttagntacaccgttagctatataagactcaatgtactcgtgtaaaaaatgatttgctcattnttgagcattatcaagtaatacaaatagtaaggttaatttttcttcttcttctatctctctaccatgagtttaacacttagtgcaccttctcc

SEQ ID NO: 166066 - DNA, 393 bp, Glycine max
  unsure (1)..(393): unsure at all n locations
tatcaaactcgagagnttgtataaacttatataaactcatgcaaatttctgtaactcaactcataaattcgactggtaaaactgtaagaatnntattttattttttttaagttaaaaaatattaaaatacctataaataatataataattcgatgaccttatactttcctctntggtctaacattgttttcaacatggtgcangagaagatgggtaaatcagtgatggtgtgtcaactaaagcatgacgaagctaagctccaacagaaagctggtgctgggcctgatttggtttcctgtcttgaccaggcaatccaggaaaacatcaagtttctgccagatattaacaagctgaaagctgcctttggaattagtgacgatagctcgtagctta

SEQ ID NO: 166067 - DNA, 344 bp, Glycine max
  unsure (1)..(344): unsure at all n locations
gcttcttgagaggattctttgagaagctaaagtctttactacccactcccctctaataactaaactaacatcttgaaaataaaacaaggattaaacaacacaattaataaaattaaacatcaattattattactaataatattttatggtgttacaccaaccaattcagagaaagatcacttgttcttatctatgtcaagcaacaatgttgtgtcaccactaatatactnttaaacggngtcaagaacaaaatttcccncctgactaaccttcattcgaaaaggcatctntaacaaaccataaaaagcaattaaccccaaaatacattattattatcagtaaca

SEQ ID NO: 166068 - DNA, 193 bp, Glycine max
tatatttaaaaaagcccgatatacattcatacaggcaaacagcacaaactatttgtattgattctgagaccagcaaagcttaagaactaagaaagaagaaagaaagtgctacatcatctaccagattcgtcttaaaacaacctaaaggaacaccctcggaaagacgaaagattgaatcatatttcgcgaatta

SEQ ID NO: 166069 - DNA, 327 bp, Glycine max
  unsure (1)..(327): unsure at all n locations
agcttagaactccattgaagagggagcactcggtgcttatggctgatgaanatgcagagcatgctcaggctaatgtggcaatgaaatggatgaagcaagtgaccatgatgcctatgttgcgaaacggtcaaatggtaaaattcagaagcagagtaagccaaaaccaaacctcaagttgcctccttccaaaattgcaaaacgcaaagtctccactcccactttaactgtaaataaaaattcttggcccgtgaaagatgaacctttcgatgaagaagatagtgaagaaacagaagaggatcgtgacaatgttgaagatgggtggagata

SEQ ID NO: 166070 - DNA, 395 bp, Glycine max
  unsure (1)..(395): unsure at all n locations
taaaaatgaattacctgaggcaaanatgacaatgaagatggaggtgagtttcagcagtgcaatgtgtggattagccatctgctaatgccctcagtcactttgtctcttagttatgtgacatttgatgtggtgtgaagggttgtgttatttaagagtaagattgaagaggacaaaaggaagaatacgtgaggaagagagtttgtgtacactgacagcctaaacaagcttccttccttaatcaagcaaaaaataccttgcttgcccgcttatgtcaccctgatatcctaaaaaatcatatgttctgcacctttacgcacttttcactgatcttacaagcctttccttttttttcttttctttttattctatntttctcttgctntataagaatcaaa

SEQ ID NO: 166071 - DNA, 328 bp, Glycine max
  unsure (1)..(328): unsure at all n locations
tgaagaatgcacaaaataatttatagttgcatctcttaacaagattgcgaatgcacatataaactggcaccaggatgaatattccattaaaataaaataaaattctttatctgtgattggagcaatgaaggtgtttagtattatctacatagaagaatttcttctacaagcttatgcaaaatatagtanaaagtattcccaagtttagtctcagagcctttccattcaccacatacacacttccaagttgacttttaaagagaataacaagactatatntatactgtcagcttcatacagaataaatatgaacataaatctgttagat

SEQ ID NO: 166072 - DNA, 391 bp, Glycine max
  unsure (1)..(391): unsure at all n locations
ctatctttcgtatgcatgcttcttggtcgttcaacttagtctttctgattacgatcgtaaggatattggtatctaataatantgcaatatttaatcctttctttatagcatacatggtgccttgctggaaccactcaaagcgtgaaaggaacaaattcagatacatttcgcatatgttaatagagatcaaatttaacacatcatgtcgtgagtacaagagtgagctagatagatatgtgcatggtgtatcttanatttaacagtgtatatagttgcggtttttattctctatatttattgtttaaggattagaattctgaagacatgtgtgatttgatttcttggattctgttctcatgaaataaaaatagtgaagacttatgatatatta

SEQ ID NO: 166073 - DNA, 354 bp, Glycine max
  unsure (1)..(354): unsure at all n locations
agctgtggactataccttcgaccaaacacgggncgtgtttttctgtctcggcccggatnntaaagcggttgcagcaccgggctccgcttccctaactgtactggaggcggntgtcgtgactntatcctctatagttntctggagttttaacatgaccttcgagatggaagccatttgatcttttaaagccgatagatcggccttcatctgttcctgcacgcnctcttcattnatccattttctggatcgagtggtataggggtgccttggtgttttcttagttatgatgaaattcctaaagaaataaacaacagtgagtatgccaccaaacatgaatatgcaaatggatgatcg

SEQ ID NO: 166074 - DNA, 401 bp, Glycine max
  unsure (1)..(401): unsure at all n locations
cgtgatcgctgtcatactcgctaagcctaaatgtcgctgcactcagcgcatgatcatcgtcatacccgctaatcctagaagggcgcgcttagtgttaggtcgcatgaatnttaagctaccttagacctataaaaagagtaggaagcaaaggagaaggacacattgagacttagagctctctattgaatacacataaagtctgagcatctctaatagaggaaaccctctttctttaaccattctcccatcctccattatccatccctcttcttcttccatcctcatcaacccctaaggtgtaacgcctcttatggcattgagaggctaaacnncctattgtggagcctagcagctaatgcctttgtaatgtaaatctttcttactatccactanatgcaatg

SEQ ID NO: 166075 - DNA, 532 bp, Glycine max
  unsure (1)..(532): unsure at all n locations
tctaagcttaccttnttaggtagtannaaaatgtatgacatanagcanagagttctatagaatagagacaagatattttaagtgcaacttgcaatagaatgtggttgcaaagcttctccagtagttgacatgaaacaatttagatcgtacagaataaaaaacttaaactccctttcctcatgacaccattcagcaactttggaattgaagttcaaattgtgaaaactttcatagtagaccgtacaacccattttttatcattcaaaaagaaaaagtaggaaataaaaatacaaaatattttaaagaacattattattataagttacaaccaaatcttataccctaatagcatctccaacagtgaatgttagcaccgattgtaacaaggaaaaacatgaggaataatgttcgtctgttgaacanttgtagagatcgagcgatgttcgacactctgaaaactaataggaagttccattatttcaatgtagganacgantagaaaatgaagggtgaaaacattgaaactgtgaga

SEQ ID NO: 166076 - DNA, 346 bp, Glycine max
  unsure (1)..(346): unsure at all n locations
atatgttccatntactcgtgccaatgtactatgtgtttgggatattaccatgtcattccaacggattctgaaactgttagacacttaaagcagatgctgactacttgcttttcaagtttcattatgtctatggtgattccaaaactattagatagttaaagcaagtggtgctgtctcgggcttcctatttcattttgtctattataaatgcccttgatgtgtatgagacgtgctaatgcaggttcattcaagagatacaacctctaaaacaattcagagagatcttgaagagatntgacggaagtatgagccctatcagtttctggcgttctggtaaaatcaatat

SEQ ID NO: 166077 - DNA, 501 bp, Glycine max
  unsure (1)..(501): unsure at all n locations
tcccgcggtggcaaatgcctgttaagatatcaagttatatacacactcttttgtcacttcanaactgaatatttttaccttntcaaagctcatataataacaaatgaaaaccttgcactgntccaagatacaaaattaaagttttttttttatcctagtaaaagcaaactagtcaaattaaccctatcaagttgtgttgctaacctattttatagcacgtttcaagtggtgggcgacgagggaaaggttataatgatggtacaaacttcaaacttatacctcttgccactacttgcgttgaatactaaagctttgtggataatcatgttgaaggaaaatcctagcatatcaaagaattagaagttatactaaaatataatgcattatngacactttttaacatgaattttaagacaatacacaatgcaagatagttctatttatttcctgtttaagacctattttatgctgacagtgggtaacacaatttgtctgttcaaa

SEQ ID NO: 166078 - DNA, 279 bp, Glycine max
tatggcgcacccatcacatgttgtactaggtggcggactgtccatggtgctacacatttttcacatccacaaatcacgtattaacccaccatcccctgatgtccacctccaactgagctcacgtactctcacgtgtccttattctcgttcctctcagcgccgggtgctcatctaacctgtaaagctcccacgacatacaagaatatgcatacatcctatcattacaaactaacaaagcctagctatacatgccaaggctgaaaactctgcccagaacac

SEQ ID NO: 166079 - DNA, 486 bp, Glycine max
  unsure (1)..(486): unsure at all n locations
ctcagctagatggttatagagattatggacaccaaacttgctccatagtatttataaataagcgtctagacgcatganagctaatgatgttaactgacgagactattagagtgttaaaactattcaataagcttgacatgagactgatgaagccaactaaacaaaaatccacaacatggatcttgccttcaagaccacctattcagaagcaactagacanttaagtgcatcccaaccttcacaccaacatgtatcatagtagttctggaatggcagccttgtaacaaactctggatagaaaaaaaggtgacattggactcatattcttcatccaaagatgcaaaaattggagctggaaaatactaaatttaccaagctttggaaggcaggttntctagctattgaccttttctcctattcatctngngataccttgcccgaagaagaagaanagtatgacatatatggataagggaactagtgatc

SEQ ID NO: 166080 - DNA, 282 bp, Glycine max
  unsure (1)..(282): unsure at all n locations
tcaatccaattggattcatgccactcttcttttcaaaatgaatcacaaattntatttccttctttttattttcccccttttttttgaaggattgggatttacataaactactagctcttaattaaaattacatgaaagtgacctataactgttccaaattgatttttccaagtacttccccaaacttattcaacttaacacataattgcttgcatactctatgaagattatgtctgttcttaatagaataacaatgaaaaagtgagtagaacgtagtcatac

SEQ ID NO: 166081 - DNA, 291 bp, Glycine max
  unsure (1)..(291): unsure at all n locations
gttgagaagcacagatgggatccctcgcaagaagttgaaccttcaaagagtgaatttcaaaagaaggtgcatttgtggatgcctatcacaaaactattgccagtgcatccaactgatcataatctaacccaagaaaaatgcttatctcttggcaaccttcatgctcagatgtatgcaagagatcagcctactacttaccctccttgtctgcacatctcaagggccactaatgtcaagaatagttgtgacaacgtgtgtccatgtctccctgnttgggatgctgctaaaaac

SEQ ID NO: 166082 - DNA, 311 bp, Glycine max
  unsure (1)..(311): unsure at all n locations
taagagagtacaattatcttattcaagagttgaaaataactttcttgtgtcgccaagagcttttccaggcacctcaaatatttatatcgaaatgttaagtcacttngactctatctctaatgaattttctggaaatgtgcatcgcgaagagagattcaaggataggaattgggaaatgaaggaagaaaactaacggagtggttcaatctcaaccgtgtcctttgacctttcaattcgaattaatcttgaaaatctcgtgccttcaagtcacttgacaatgaacagattgataggaatggcattgatagtcg

SEQ ID NO: 166083 - DNA, 369 bp, Glycine max
ttgacttgggaacttgtgctggtgcaacatgtctatgtaataaacacaagctcctatcctacaaagcaaaaactaagcaaaggacactgaagctgaaccaacttttgatatccagtggtgctggactatcagtgtctttcttattatcatgagtaaattttcacatttaatacctacactgccataaacagatgcgtggataacaacaaaataagcaaaagggttatttcaaattttaataaaacgtgcccaaagacaaaataaagaggaacatgtttggatgattttaattattgggcatggattaatacatcatgaacatttatatataaacattcttaatataagttgtgcaggctataaggttga

SEQ ID NO: 166084 - DNA, 258 bp, Glycine max
  unsure (1)..(258): unsure at all n locations
atagttaaattggattatgatgtaaacatcgttttttatcttatgttcacgtcatgtttgtagtgctggatatatgagcactttcccaatgtgcatcagtgcgtcaccgatgatgcgtatgctgagatgaccccacgtgcctcccagtggctgactacgaaggctcacatgagagggatcacaagaacgccgtaccaggaacgtntagatgctttgacgatcacggacgtgtgctagatgccttatgctgaccactga

SEQ ID NO: 166085 - DNA, 397 bp, Glycine max
  unsure (1)..(397): unsure at all n locations
cacaagctatcacattctagctaaacagagcaaaggcagaatactctgctcaacacatcaaccaaaatcacagcttttctcacttaaagaccccagtaacaattccttcgatccaattcgttaaccggtggatcgactccaaaattntactggaagtctatagtgcataagcctacattgtgaccgttgggatcgactagcatacatccaggactcattctgtactactctntccacagccaaccacacacaagcattntctgcaccaagctaaaattctgctgcacctatnttgacagcaaaagtctgcataagtgcagaatttgaaaatcacacttcctctcatccaatcttgttcaaatcgattcctacaagtcccaaatcatgtatcaaacat

SEQ ID NO: 166086 - DNA, 204 bp, Glycine max
  unsure (1)..(204): unsure at all n locations
atgtattgatgatgagtagaaattnntaattctctacatgctttgttactcttttaatagctatatactatgtgcctctcatttgatgggatgatttcattcacanttagagttattctggaagcgtcctanatgatgngncggattggtctctctctctctctttgctactggcactcttgttaaacattttattggtacttc

SEQ ID NO: 166087 - DNA, 504 bp, Glycine max
  unsure (1)..(504): unsure at all n locations
atacttagacactaacacctcactctactactctcatatcttnctcataggcttccatctccatttggccaacagggccacattgaaaagaaaaatattcttcactcctaacccgctatttatcttactttgacaaatattatcctaactttccccaaaaaccttcctcctaccctactcacaacccaataaaaagttcctttggtaaccaataaaggcttcccctacatgtttagggactntaaaaaaaataggaaagaaaagagacaaagaagacaacaccaaatgaaacaggcacactctccccagaaatggcaaattcttatgtttccaccccaacaatntttttctaaaacttatcaacaataggcttccaagattccatactcctatggtttgaacctatcattatacctaaataatcaaaaggtaaagataacaatttacaattcaagaaataggcatacctctccatgaccccaaaaaactaattcanagcatcta

SEQ ID NO: 166088 - DNA, 204 bp, Glycine max
aatcatgacaaccaaggcaagagatgtgataacagatggaagaacaaaatggaccaattcgtcaaccaaatgagccaaaatgccacatatattacaacacttgaatattcagtctatcatgctagcccctagtcgatcgactaccacaatagatagaactaaatatcatgttgacgatgctcacggttgatcgtctcatgacat

SEQ ID NO: 166089 - DNA, 420 bp, Glycine max
  unsure (1)..(420): unsure at all n locations
catatggagaggttaatgaaacaacgatatgatgcgctccatgagatggtggatcaaatggagaatagagatcataatgaagaagaaaggaggagaagagggaatgatggtgttcctagacaaaaccgaattgatggtattaaactcaacattcctccatttaaaggaaagaatgatccggaggcctacttggagtgggagatgaaaatagagcatgttttctcatgccacaactatgaggaggaccagaaggtgaagcttgccgccacggagttttccgactatgctcttgtgtggtggaacaagctacaaaaggagagagcatgaaatgaagagccaatggttgatacatggacggagatganaaagatcatgaggaagcggtatgtgccggctagttactcaagggacttgaaattc

SEQ ID NO: 166090 - DNA, 296 bp, Glycine max
  unsure (1)..(296): unsure at all n locations
ctgcagctgagttaggagctagaatggaagtgaaaattcttgtacttattttagttagnggaacttcggagtttacaagaattggaagtagtcttggtgcttgagatggactaatataatttcctatgtctcatcttgtttattttctcttttgngctttaaactgacccagggttcgaatatgattntttcattcgaaaatctctaattattntacatgatctaaaactattatccaaatcantttgcaaaaatctaataattggtttcttacatattcaccaccagacaataat

SEQ ID NO: 166091 - DNA, 416 bp, Glycine max
  unsure (1)..(416): unsure at all n locations
gtcattcatccctatgagatgttgttgaagtattgtcgatcagaatngccattccttggattatagggttgaaccaagctcatgctnttacaaaaaggttcatcaagtcaagttgaaatatggaagtaaccgtcctgcaaaattggggcaaaagatgaattgagtcacatcactgcttcatctactgccaaacatatttaggattgttgatgtccttgttacttccagtttcaccttgacaaagatgtcatggaccatgttgaatatctaaattgattcaaccccatatcctgcgtaaaaattcgcaatacttcgactgtacatcattcgcatgcatccatgcttttcattggttgcattgctcattgcattctttccttgaaaaataaaataaaataaaataaaatgaacttatc

SEQ ID NO: 166092 - DNA, 227 bp, Glycine max
  unsure (1)..(227): unsure at all n locations
agtcgagcgtcttgctatattacgcgactcaatggaagcttcgagtgaaaaggtattggcgttagaatttgctacgatcttcgatttaaaattcgagcgtctaattattgtacgagactcaatcagacttccgagtgaaaagttattgtcgttcgaatntgctacaagctttcgatttttaaatntcgagcttcacgatatattacgcgactcaatcggacttccga

SEQ ID NO: 166093 - DNA, 437 bp, Glycine max
  unsure (1)..(437): unsure at all n locations
tgtagcanattcgaacgacaataacatttcactcggaagtccgattgtgtcccgtaatatatcgacacgctcaanattataaccgaaggtcgtcagcatatttaacgacaataacatttcactcggatctccgattgagtcccgtaatatatcgagacgctcgaaattaaaaccgaagctcgcagcagatgctaacgacaataacatttcactcggaagtccgattgagtcccgtaatatatcgagacgctcaaatttanaaccgaagctcgcagcacatgctaacgacaataacatttcactcggaagtccgattgagtcccgtaatatatcgagacgctcgaatattataaccgaagctcgcagcacattccaacgacaataacatttcactcggaagtcctattgagtcccgtaatatatcgagacgctcgaaa

SEQ ID NO: 166094 - DNA, 327 bp, Glycine max
  unsure (1)..(327): unsure at all n locations
agcttgagtataattcaatttttgtgttatgagcctacatcaaacaattggattatggatgttctgtcacaatcaagtgatagttgatgtctccatatgtgcgtacactgtngattatgtttcgtttctagaatntcattggagtatctattggtgattctagatgagtgatccttcttgatntaaaattattgtctcctaatcaatcgagtgttcatcttattattggctgctcatctctccaatcatgtctaagtaaatgcttgataatctttcttggtgttacttctaattcgaataaagagagacttcgcctttacaatcacg

SEQ ID NO: 166095 - DNA, 351 bp, Glycine max
gacatgacattcagagggtgtggcggaacattgacattgtccgcgtacgcttgacatttatggcatttcctcacatgggcgcaacaatcgctttccatagtgagccagtaataacctgctctaaggatcttcctggccatagcatgcccattggcatttgtcccaaatgaacccccgtggatttcctcaatcatgtagttcgcctctttggcatctatgcatcgcatgagggtcatgtcgtggtttcgtttgtacaggatggtaccactcacaaagaaaccagtagccaatctccttaatggttctttgccattgtcggaaatccctggtggatattcttttgtcttgaca

SEQ ID NO: 166096 - DNA, 368 bp, Glycine max
  unsure (1)..(368): unsure at all n locations
ctgcaagcttacttcacaaacacaccaaatgattatgatgatggatggctcaaattctcacaaaggaaacttatcacttncaagtgagctttcaaaactatcatgacatgtagaggaaaaacaaggacttcaaatcacaaaatgtcaagagacttttattttcaaaaaattacccatttcttgaacatatcctataattcaaagaaaaacatgcaaagttgtacatgcaaacagaatngacctaaaatattaaactaggaacccaacanaactaacccaaattaaaaattaacacaactaacaaanataacaaaaccaacaaaactagcanaaccaaagaacactcnctccatacttaaacaacacat

SEQ ID NO: 166097 - DNA, 487 bp, Glycine max
  unsure (1)..(487): unsure at all n locations
aagcttcctcaggatctctagcanaaaataacagcttcttccttaaccactntagggtgttgaacccaaacatcatcaaacttctattacatccaacatgagttgtgatcttgtgaatgataaaagttaaagatcatgattngtagacaataaataactactaagattaacaatttatcatggctgaaaatgcctaactcttggtgaacgtgaccctaagcagccaaataaatatgccctaataaatgcctaggataaatctagttttatattaaattcaaatgttcaaaaacataaactaatagaacaaaggcttcacaaaaggaatgtacctacaaagataacaacaccatcaacagacacctagcttttcttttattccagttacctatcaacaaactaatatgaaagaacaaaatactaaacatttatttaattaaatctaataaaaaatntacttcaataacattatntaacaaaatacttg

SEQ ID NO: 166098 - DNA, 455 bp, Glycine max
  unsure (1)..(455): unsure at all n locations
taagtcactcccgcattaaatctctggcatgctttgtatgttggtcctcgccttgggcacggggagccggaaggtccatatcaccttcttaatcgtacacatggggcactgcgcccccaaatgcgcaagtaagaatagataatattccgggctctcgtgtccgtaaaatgcattcatatcatgcatcgcataagcatctcttcataacatcataatggacatatcctgcatttgtccggtatcatattccggcctcacatattgcatgagtcatggcatcatcatgcatatgnncgtcaacaaacttttgatctgcaaattgcataccatttgtttcatgttggctcatctgtgttttctctaaaaacaaannacaaagggggaagcggaaacttacactacatcttatttcatgtgtatgaccacgaccaccatgtggatcataaccatttact

SEQ ID NO: 166099 - DNA, 495 bp, Glycine max
ctcagcttcattgagggtatggactcgtgtgacgtgagagatagcttcaaacatacctcattctttatatcactcttcaaacctagacaacccattgtattgatgggtgttggacacctagattctgtgttgctgcgctgtaaagcttgattttgggttagacatgattgatacatgatttgggacttgtatgaattgatctgggcaagattggatgagaggaaatgtgattttcgaaatctgcacttatgcagatatttgctgtcgaaataggtgctgcatgaatttggcctcgtgcataataatgcttgtgtgtgtgtgtgtgcgaaagactttgctaaagagttctgatgtatgtagtagatccaacggtcacactgtggcttatgtctatagacttcagtaaattttgagtcattcacggctacgtatggatgatgaattctctgggtcttactgaaaagctgtattggttgtgttgacaagattctctta

SEQ ID NO: 166100 - DNA, 345 bp, Glycine max
gaagttgttctgagagcttgagatgagtatgtgagtgattgttaggtcctatacatggaggagtgatcgaggccgtacccgaatcacataaacatgaaaatgcactaactaagaagtgatcctatctcgtttgccaactagcagtgacaaaccaaatgttcataatatactctcagtaacactaacaattgtggtgagggtctgcctgtacctgataactctgatgtacacaaacactgctatgcttagaatctaaggcaattaacgatgtcgccacatgttattatatttttgtgtgtcatcctcggtttccgcaaagattctcgtctatcgtatatatctcat

SEQ ID NO: 166101 - DNA, 204 bp, Glycine max
atatatttatttaatatatattaaaatttggaatacaaataaaatggtggcataataaatattttttatttttaaaaaaatatacgggttacataagcaaatgattattattcataattacatgtgcaataaatattggtatgatttaaattaaattcaattgcacaatatttattattcaaacttacatgcgcattaaatatg

SEQ ID NO: 166102 - DNA, 300 bp, Glycine max
  unsure (1)..(300): unsure at all n locations
atgaagtcgtggcgcgtgaaccatattggcatcacccagatgccatagcattatgcaatgcatgtcatctggtgtgtnttatagacaatacctacagaacaaacatgtacagactcccactacttgactttgttggggtgacacccacgacaatgacattctctgaagggtttgcatatctggaggctgacacgcgtaataatattgtatgggctttggaacgatatcaaggcctatatttaagaaacgaccgcctctctgtttgcatgtgcattgacagagacctagcactgatgaatg

SEQ ID NO: 166103 - DNA, 198 bp, Glycine max
acatatggggcactgcgcctcgcaatgcgcgagtaagaagagaaatcttacgggctctcgtgtctcgaaaatgcattcatgtcatgcaccgcatagacatctcttcagcatcattatgaacatgtcggtcctgcatttagtcgttatcacacttacatattgcatgagtgattgcatcatcatatgcgttcaacatac

SEQ ID NO: 166104 - DNA, 259 bp, Glycine max
  unsure (1)..(259): unsure at all n locations
catcccacttagccatacttaatctactttaacacgtaatgaagcacaacaagacgctccttcgtatcataaaatgacacagaaagaacatatcaactctttgaataacaagatgcatgatgtttgttgtcaagtaggataaaggtccaattttgcctaaaattgtctgtgacaactaattaatggttttgttaatgaactatataaaccttaacacctatgttgatgagattntcacataacaacgtctcaccataat

SEQ ID NO: 166105 - DNA, 289 bp, Glycine max
  unsure (1)..(289): unsure at all n locations
gatgaatattccagctctctttcagccatattttccaacttcaccaaccatccagaattgtcattcaaactattgtcctttttagtggagctcaagttttatgtttctttgttgagaataaatttcttgtnacaagctaaagcttgtaagcttaagctttagctcgaggggagtggtggaaatagaagtaatactctgattctagtattagtagagttataggaatattatatctttgattagaagaatatgcatctctattatgttaataatganatatctatataac

SEQ ID NO: 166106 - DNA, 342 bp, Glycine max
  unsure (1)..(342): unsure at all n locations
agcacaaggcacatcaaactagtctagatgtgaaaactggagactataccataatacaagtcacacggcataagtatattgtgtccaccgtacaaaacaacaaagaaatagagagatctaaaccatcggatttaagctaggtggttacactaatattctaaattaatcctagtgtattacagctggtataagccaagcccaatcaggctaataatattgtaagactcctaacacaataagaatccttatattctaacatgatggctaaagttatggtgttgcttgaatcatatgctttgnacatcgctacggtnttaaatgcaaagatattaaccaggattg

SEQ ID NO: 166107 - DNA, 283 bp, Glycine max
  unsure (1)..(283): unsure at all n locations
gcttcttatgtacggaataagtaaaaacctaagcgcttatattgctcttttagtcaaaaataaantaacatgaatctttcagttcctgattacacagctaatggtgttgaaaaggtgacagcttggatccttccngtcatattgagatcatatcactgttaatacgtaagttagaaactaaattcaaagtctgaaaatatattaaaaatttctccctcgctttctagtatcattgttttgattaatgccactttagcttcattctgaaaagtaaactaaaaac

SEQ ID NO: 166108 - DNA, 447 bp, Glycine max
  unsure (1)..(447): unsure at all n locations
tatccagaagctcttaantctataatatgtatttctcttacagagctctaaganattggaagaaatcttgacaaatgaaccaacacagataatgattgatattgcatagtaaacaaattgaggttgagaacctgcaaggtcatgatgtgtgtgggtgagcttgagccattccatgtgactgtagcctttctcaaaaggaactttggtccgaaccgttggcttcttaacggaattcttctgtgccggtgactctagagacgaaaagttagcctgagttggtactaactttgtggtggattcattaggccgactagaagctgtgctagttacagtgaaagacaaagaaccaacggtagcctacttctgattgggtaaagcattatcctgagcagtattagatgcatttgaagaatcttctgtaatggaaatatcagctatatctgaagc

SEQ ID NO: 166109 - DNA, 357 bp, Glycine max
  unsure (1)..(357): unsure at all n locations
agcttgtttcgnnggatattggaattcttactcatactcattctctncccaagtcatagtcatgatggcgggggngaatgttctgcttattatgtctatgtatgccctcttatttctgattattttcctttccccgtgtaatttatttaatttgggagatgaagtatcaataatagtgataaacctgggttcccacacttgcaaagtcggttatgctggcaaagatgctcccaaggttgtccttccctttgaactttctctcatcacctttttcatttgatttattctttgattgaagagaatctggacatacatgccatacttatgtgtgggctatgatacatgcatgatggatgt

SEQ ID NO: 166110 - DNA, 459 bp, Glycine max
  unsure (1)..(459): unsure at all n locations
gagctcaacaaggtcaatgcattttacaaggatcaggtggtagcatcccagcatggaagtaacccttttgagtaaacaaatggaggccttggttgcactaagggtaaaggtgaaaagtccagatacaggtaaatacaaaattcaaacagtagttntatagttatttaagcacatagttctattagtaggaggaattgcaagcttttagaggcaaaatttgagaaatgtgcatcaactagatgctntntatgttgggaggattgagaaaaaagatataggaataggatcacaatgtatttgaggccacattaagtaaaataaatgtacactcattatatgtttttctatgttgccatgcacatgtgaatatctgttgatttcattcaaaataactcactgacactcatagtnggcaattagatgctattaatcggtagaattaatttatctatagtaaat

SEQ ID NO: 166111 - DNA, 94 bp, Glycine max
ttgtgtggtctccactgtaaacacatacgccaccgctctgtgaacctgcataactatgatgtgcattgatagcctctctgtcacatatcactca

SEQ ID NO: 166112 - DNA, 303 bp, Glycine max
  unsure (1)..(303): unsure at all n locations
agctttgagttccacggatgaacacttttcttctatttttattctttatcccgtataactgggaagctggctntagaatctgtcacaaaattatttttcagtcaaactgggtacaaataaaacacttttaatttataccttaaaaattatgtcaaagatgatatctgattacttaaccatataaaaattaacttttagaattacactacatgtcaatcagactctaatntagtttggttgtatataaaatattatgaaaggaaaaacttataagccaacaacgtaccctagcccttttcttcc

SEQ ID NO: 166113 - DNA, 457 bp, Glycine max
  unsure (1)..(457): unsure at all n locations
ctaagcttgctactcagggtcatcaaatcacggatgataacgagttgagattatctaatatatcatgaaatcaagtatgagatgttactcttaaatggtgatattttagtgcaccaaggttcttacatctatagcagtgagcatacattaatcataattctttcctggtgcttcatccataataatgagattgtgattnttcttgcaggagggtctgcggaggacaattgaatcatacacacacttgaggatggataatgaatctttgtgtcctgaaaatgtaaaaaggatcatgttttaagacatacccataatgaatctttgtgttctgaaatntaatgatatttgaacttttctaataaaaggatcaaagagtatagaagccacatgtaatttctatttggtgaaagaccataatttattntcatggtagaatattgacttctgttagtaattt

SEQ ID NO: 166114 - DNA, 455 bp, Glycine max
  unsure (1)..(455): unsure at all n locations
gaggtccaggaagcacaaggcggccgaaggaactagtttcgctcctaagtatgacagtcaccgctttaggagcgctgtacaccagcagcgcttcaaggccatcaagggatggtcgtttctcttggagcaacgcgtccagctcagggacgacgagtatactgatttccaggaggaaatagggcgccggcggtggacatcactggttactcccatggccaagttcgatccagaaatagtccttgagttttatgccaatgcttggccaacagaggagggcgtgcgtgacatgagatcctgngtaaggggttagtggatcccgtttgatgccgacgctatcggccagctcctgggatatccgttagtgctggaagagggccaggagtgcgagtatggccacaggaggaaccggtctgatgggttcgatgaggaggctatcgcccagctgctatgtatac

SEQ ID NO: 166115 - DNA, 464 bp, Glycine max
  unsure (1)..(464): unsure at all n locations
gaactcagatctggatgctccttagtcttaattgatgaagaaagacattcggaaccaagaatgagagttntgcacaataatggtgaggaatcaagagaatgaatatcaagagcctcttaccaaagctgtgatggaagaagactcgagaacactcgtatgaagctcggaagaagaagaaaatggattcctctctctcccttgaagaacttgtgcacagcaatggagaatgaagggtccaagtttgattcttcggagaagtgaaaagataaggctttaaggcttgcgccaaatgaaacttgattaggcttaatgtcgataagatcaaattgacaacatgaatgaccatttgatagtcatggtggacgttccacatgctatcatatatggggatttngtctnttgaattttaaccataaatggcactatgttattcttacacagatgacacaccacatatacatagc

SEQ ID NO: 166116 - DNA, 507 bp, Glycine max
  unsure (1)..(507): unsure at all n locations
taaaccttgttcttgtaccctctccatagatacttatatatgggtgatgggttgtnaagctatctaatggacgaaaaatatccgataaactttgttctgttattgcgtntgaggggggattcacgtgatagatgaactgatcttcanaatagttctttcaagatttaatgatctgctgatgatttcaaagaanataaagatttaaactgttgttattatatataaaatgtctagaattacaatntattcatattattatcaattaatattgagtaaatcctcaatggctaaagatngctaaaaaaatatcaataatttttaagcgtcgcatcatggagtggacaagtagttgttattaatttgaattgaaattatgaaatacataataaactatattaaatgttntattaanntttgatactttntgtaacaatggtattgatttataaacttacgttattnctaattaagttatgaaagaagtcttttgatanagagaaaatattt

SEQ ID NO: 166117 - DNA, 271 bp, Glycine max
  unsure (1)..(271): unsure at all n locations
ttctttctctctgttcttctctatcacccttgttgcacaattctgtgtgtatgacatttctaatctgctgcattttctgctgctttcatgtatgatcctcatcactattataacagaaactatggaattcaagtntttgtcatcaagctgatgacgagttaacatggaatatcctcgcatagagaatcacatatgttatgaccaagctttggagagggtcttataaaatggaatatgtaaagccgaaactgaaacatattgggtggactca

SEQ ID NO: 166118 - DNA, 267 bp, Glycine max
  unsure (1)..(267): unsure at all n locations
tatcaactaagaaaaatcacccatatacaatcaaggtagcttcattacctagattatttacatgtacttccaaggtgtattttgtatttacatcacacacgcctncttggctgaatttacatacatacatactcaaagcattttggggtaccaaaaaatgcacatgcgctcatnctggtatttctaatacccatacatatacaaacttcacgatgaatcttgactacctacacaataaagtgctacatttcatgctttttttttttt

SEQ ID NO: 166119 - DNA, 429 bp, Glycine max
  unsure (1)..(429): unsure at all n locations
tctcagcttcctcaagtggtnatcagagcacaagagcttcaagtatgtgctccttaaacctccattaattgtttttctttaccttctcttccattgttgtttcttcatntttctccatgtatctcctcacatgtcttgttctaaattntgttaacatgaatctttagagtntccaccgattaaacttgctatagaaactagantttgatttctatggttcaaatttcttgttcttattcttgaaccatgaaattgtgtngagttgacgttcctttgagatttgtcttgttattttttgtgctgaaacctaaaccataaaattattacaaaaatattaaagttgaagaaaacctataanatctagagtgacttgttcacctattgtgagtttgtcatagaagtcatgtctagtcatgaaacttgtcacat

SEQ ID NO: 166120 - DNA, 118 bp, Glycine max
ctaagctatctaatactacacacctgttggcggaaatcaatcgtatacctgttgtgatacgagacattcaagatgaggaatgcctttatgtgcaacatgctctattatatccttcagt

SEQ ID NO: 166121 - DNA, 458 bp, Glycine max
  unsure (1)..(458): unsure at all n locations
accagagcagattttcagaaaatattctcaacagtcacatctttntatgtggttcttgaatggctatcacagacctatatatatgtgacttgagacaccgaattgctaagagttnttcagaacaaaaaggttttatcctcttaaaaagaaaaatcgttttatcctcttacaaattccttggccaaattacttgtgattcaataaggaattatttgagtgctcacaatgttcaatctatctttcaagagagatttcttcttttcttcttcttcattctgacaagggattaagagaccgagggtctcttgttgtgaaagaattctaaacacaaangaanggttgtccttgtgtgtttagtacttgtaaaaggaatntacaagatagtggaactctcaagcgggttgcttgnngactggacgtangcacaagggtgtggccgaaccagtataaatctgagt

SEQ ID NO: 166122 - DNA, 261 bp, Glycine max
  unsure (1)..(261): unsure at all n locations
cattttacaagaccacataaccgctaatcacacacacacacacaataaccaattcaatttatggaagaaanactaatctatataattcaaaaatgttttatataacaggaaagaaatataataaaactcagcttatataaaatgtcatttgttattattaattatcactaaacaccaaacatttcagctcaactatcttaattgattcatacaacataatcatgacacaaagcatacattatcatcgacaacatactttca

SEQ ID NO: 166123 - DNA, 392 bp, Glycine max
  unsure (1)..(392): unsure at all n locations
taagctcccagccaaatctgactaccatataccttgacccatggtgagaatgnctattcttaccctcggaagcacaaaaaaggtggagagggaatatntccaatccacgacgaagcacaaaatgagagaaggaaaatttccaatcaatggaataaaatagaggaaagggaattcccaatcaaagagtgggagatagctataagataagcatgaaattcccaatcaacgaatgggagaaagaaataagagaagaatatatggaagacagttcccgatcataataataatatgcagaaaggtcgtttgaccggacaatatctgatcaatacagaattgtcacacaatgaatatatagaagaaatgggaaccatgacctaaaatggtcttcccct

SEQ ID NO: 166124 - DNA, 145 bp, Glycine max
gccatgcatcggacataatagtacaaccatactttgaccattgctccctatgggcctttatcaaattttcagtatattcaacttccttcttcaagagtggaactctgatgtcatgatagctaggaatgggcaaatgtggcccata

SEQ ID NO: 166125 - DNA, 459 bp, Glycine max
  unsure (1)..(459): unsure at all n locations
accacattacatgatgaatgtgtgataaccaccttggatattgtntctccncatagatccagatcttcaacttcttcaagtgttctgaaggctgtagattctcgattacagtttcatccctttcttttgttgaatcatcagggttccagtctgaatcccattctaactacagcttgacaaggtgtgttttatttttcaaatccactgctaatgcatccganggactctcgacattctgcaggttctgaattgatagacttccatgaagattgagttctcctagctgctggatactgaactccctactattgccaaccttatacggactcattgatacctgaagatacttcagttntcccaaatgtgctggtacctgtctcactccagtgtttattaattcaaggcgatgcacatcagtgagtttatgtnnaattgatggcagctccttcaatttattac

SEQ ID NO: 166126 - DNA, 400 bp, Glycine max
  unsure (1)..(400): unsure at all n locations
agcttacatgctnnctatatatatatatatatatataatataaaacaagagattcacaattaaattaaatattctcattaacttctaacttaatttttgtcaatgctagtccaatgatttattatntaacccctatttgtatgcttctgttctcaatatcgaaataatgagtttttttttgtcaaaaaaaaaacttttaacttaatttcctatctattattcgacaaactgagagtatagngataatgtttatattaacagtatataaactatcacactatgattaaaaatataatattactaatattcacttaaaagacanggcttacagtaatattaatagattgtaaaaaattaaatatcatacaaataacaaaatagtgtcattgagtttattaac

SEQ ID NO: 166127 - DNA, 449 bp, Glycine max
  unsure (1)..(449): unsure at all n locations
gtcagctatatgaaaatgctcatgaatntatgccaaatattgggccttatctcgtggaactacgcccatatggcacatggctgatggcatcccttgccatgttcaccatacgatagcttcacatacgagggccccattaaccatttctgaatgtgaactgcatatcctccttttatagaatttaaaatcttcttcaaacaaacaaacaaaaaagctacaaattttctaaagaattaggagagaatgaaggcctaaactaaagcatgtgttcagtaaagttattttttcanaaaanaaagtcaagtatcttctttttgtaaaaaagagttaatttatatggaatgtaaaatatactaaatcgtatgaatccaaaaaataccaagatttactctttcatatctaacactctcactgatatgttaatacgtaacccacatatataatccaat

SEQ ID NO: 166128 - DNA, 358 bp, Glycine max
  unsure (1)..(358): unsure at all n locations
gttctcttttaatacgaggctaataaaggcttngaatgtcgattaagaaatatgccaatagcagaaaaattactggtgccataattaatggtccactagaaccttgggtagttatttttattttggtaattaaccaccttcggctcacaaggtgactccttttgtttgttttgtaatttaataccgcagcttgctttctttccccttaatcattagctgcctatgctcatttaagcaaacaaagccatcactttccatttactctgatagagatttatgcaaatagtcaccatgctatgcctagctatcttattatatgagctcgtcttgtcatttaatatgttccatntcacacttt

SEQ ID NO: 166129 - DNA, 315 bp, Glycine max
  unsure (1)..(315): unsure at all n locations
catgtgcctatatggagcaccttgaacatctgaaaagatatagcagctgtctttcacactacactgtagagaacaacacttagacttgcttcggaccactcatgacaatatttcaacttgtgaatntgagagatgccagagaataaacttttaatcgggagaccatggcccatatttaaatcatgagcttgcatgataaaatgggaccaataaagttataaaagtcatcttattatgattacgaacagaggaggtacgtcactttaaagagcaccacactaaaggttgtatcttctttgcagctatgtatctact

SEQ ID NO: 166130 - DNA, 389 bp, Glycine max
gcagctcctcagttcaaagttagccttatgttctcccctatcttaaatcgcttgacctacagaaaaaccttgagtgaaccctatagttcaacaacctttcttggttaccctaaccaagatcaaaatatatgatgatcaaagtaagatggaatgaatacgccttgttgtgaaaattgaaaatctctaagctcaatccatggaccatggtattcatcttatgacgttgaatgccaaatcttgtgtagatgatcttctttgaagaaatgccttcgtaaatctctatgagactctttctatctgatgtgtaatttttctctcaccaaagagtcacactaatgaaataacaagatgagtatttataataaaaacagttatcacctccataattg

SEQ ID NO: 166131 - DNA, 376 bp, Glycine max
  unsure (1)..(376): unsure at all n locations
cacatggacacactgatacactggatattttttaagttcataatattgtttcttgttatcgcagaatggccttgcaaatacatagctgtgaagtttatttcctacagtatgaaagagaagattatttgtatttgatagncgatactgagatctctgtgtttcccatgattacagacatatcttcaatctctcaccattaggcttgaggaaatgatagtcaaaaggcgtgattcataacagtggatgcaccatcgcttactccacaagatcttatagagcgtgtgagacggcttgaccaatataagtggctggcaacgcggcgtgtagatgaagaatattttntcagagtctaccaaacgatcctcggagagatatt

SEQ ID NO: 166132 - DNA, 386 bp, Glycine max
  unsure (1)..(386): unsure at all n locations
tcctcggcaccggtttcttaaaccaagaagactccatctctttggattttctaanccnntgatcgcgagtggggtcgagaagcttggtgacaagcttcctggcatcaagagagaaccagggtggacacttgaagtcccctctgtaaattcttttatacatggcaaccaaattatcatcctgaaagggtaaaagcctgcgaggagaacgtataggattacaccacatgaccatatatcagccttggcaccgtcatagccttttttcggtatcactctaagcgacacgtacgcacgcgtgccgcacgtggtgtgttacagcccgtccttcttgaggtgctcggagaaagcggtgagttccaagtctgagactttgaagttgccgtgtt

SEQ ID NO: 166133 - DNA, 424 bp, Glycine max
  unsure (1)..(424): unsure at all n locations
tgatcggagtgagaaacatgtgtttatttggtatgangcaagctcaaaaggctacatattgtacaatccaaacaatgaaaagacaattgtgagccgagatgtcgagttctatgaagaacgcacatggaattgggaggagaaagaagacacttatgatcttctcccgtactttgaaaaaatagatgaagaagccttgactccaaatgattcaactccagcactttcaccaactccttcaaccaatgaagcctcatcatcttccgaagggagttcaagtgaaaggccaagaagaatgagaaatattcaagaattatatgatgaaactgaagttataaatgatttggtttgtctttttgctgacaatgaacnccttaaactctgatgaagcaatgaaagacaaaacgtggagacatgccttggaaga

SEQ ID NO: 166134 - DNA, 414 bp, Glycine max
  unsure (1)..(414): unsure at all n locations
acactacgcatatcctaggttgttctatttgatctctttaaggtaaatgtttatgacccagtatgttagatgagtatgttatagcactgattagtcatgggctgtgagaaaaaaaaagttagaaactaagtagtagagattattgtgattttctcaaaaccctaggcttgctaaaattggggattttgtataatcccttgttctattatttaaatgcttaggttctgtggaaaatacagtggttgaccttcctaacagcggtagaagtcagtgattgcgttacttacgtaagtagctaatatacttagcaattntcttaaagttcatttatggagaagcaagtataccttccgacacatattgttggtgagcttcgaacttattttgagatctcgataatatataaggatggac

SEQ ID NO: 166135 - DNA, 301 bp, Glycine max
ccttaagtgtcatgggataatttcttcatttggctttgatgaaaaccctatggatcaatgcatataccacaaggtcagtgggagtaaaatatgttttcttgttttatatgtagatgatattttacttgtaggcaatgatcggggtttgctacatgaggtgaaacaatttctctctaagaattttgacatgaaggatatgggtgatgcatcttatgtcatcggcattaagattcatagagatagatctcgacgtattttgggtctatcacacgaaacctatattaacaaaattctagagaga

SEQ ID NO: 166136 - DNA, 401 bp, Glycine max
  unsure (1)..(401): unsure at all n locations
ctatacacaactcaagctntgcccctgaaaccctctgtgtaatatctcggagcctgtattttaccattttaangcactacagaagaagatcctaaggtaaatgactgattcccaaaaacacaattaaaaccaatgtgaaaactaaaaagacatgtcatatcccaaagacaccgtgacactatatagtgtatccaacaataaagggtatttccatgagtggaatataaatcaaaaggctccatatgccttgcaatgccctgtccttcccaaaagaagaaacttataagagaaaggcttaactgcataaatgatgaatccattctgaaaattgaggggagaaaaatgataatcctcactcgtgttatcattctgtattaggaacctgagtcacatatcttcat

SEQ ID NO: 166137 - DNA, 459 bp, Glycine max
  unsure (1)..(459): unsure at all n locations
tacctgccgcacgcaagcttangcaggaactataactgattattattttatattgcatncacttaagagctgatcttctttgttcagaaacttcttccaatagcttttatactgaggaattcctagatcaagccaaggtttcattctcccattatagtgtagcaccgaagcagtgttaatgggttgagtatcaattgtataatcatggcccagtccagacacaacccatgactcattgagtggatatatttcattctcaaaggttagcaagcttgctcgccatgcaataccctcaatagatccttcctgcatggtaaactacacaaggaaatagaaaaatcagacaatgtaaaagggaccaaaacatacaaatttccaaatgaattatntaaataacttgtaaaaaaattcaatagattggaacttaaaatagatatatgtttgtttaaatgatatttc

SEQ ID NO: 166138 - DNA, 452 bp, Glycine max
tgatgcatatgatttatatgctccagctcgacgcggattgttttatatccttgtatcttatctatattaggtagctctgttagtaagcttgttcagaagggcagcactgagttgtcactgtcattgcccttctctctccatcttgtactctatatatatgtcttttttgaaatgaataaagctgtgagagaaaggagagaatttctccttcagtttcaagtatacgaaaggaacccttcttgtagacttacgtttgatgctcacacaaagccttcactatgttcaattgtctaatccatttcccattccctcacttggtcatatgacccgttgtctaaaaattgaagaatatgtaactaagtaaccttgacatgatcattaatatgtacaacagccatacacctagtcaagtcaatgttcaactttttgtggtgactatggctacataatat

SEQ ID NO: 166139 - DNA, 397 bp, Glycine max
  unsure (1)..(397): unsure at all n locations
ctatgccatcttcaacaacttgtgtgatctgatatgataagaccgtcatcgattacaacaaagaagtttttcttctgaagaaagttttctaacttaaaaaattttcttctcactttctcatgatgatgcatgatgcacaanagatatgatatggactaagatgcaacatttcatataacaaccaatacaaatgtcactcaagggagttgggcatgtaaaagacaaaacatcttcagcttttgtccaacttcaagctctagtccacatgttgttcttggtgctccccctatctctaacatcatctcccaaccccaatccttaacatgagatccttatatgaaatactacacagaaccaggacccacccactttatctacactcctttggatgcctatg

SEQ ID NO: 166140 - DNA, 365 bp, Glycine max
tgaagggaatacagccgttgatttcatgttggaaagtctgattgcagcgcgataaaagtcattggaaagcggaagaaggtaccgtattttttcaagtttgaattttacactctccttctctctgtttctcgatatgtatgaagaattagtaaagctgattcctgcctgattcctattattttttggtgcaaaattgaaaaatactttcatattagtgatattacttttaagactataagtctagaatgaatggctttgtccctgttaatgatatcctttcattatttctcccagtgaattgagttgcacatttagcattaataactaaacttgtaacctgaatgaattcttaaccaaactttgat

SEQ ID NO: 166141 - DNA, 351 bp, Glycine max
accacacagcattcccatgagacaacactacctcagcaccattacaaagctcacagctgctccagcaccaagactctcatagcaaccaacccaataaaaaaaatatctaaagtgcaaattcagcttcctaaagcgcacaatactttagccaaaaagccttgaaataataccccaattaaaacccacatgatgaatttgcttaagcagccaattatgatattaaagaaggaaactttaccactccacgaaactggtgcttcctctaacataacttgttgagagtctgatcttcctcgcctgcatcacaaacccagatgtctacaacatataatgactttgagagagagagag

SEQ ID NO: 166142 - DNA, 388 bp, Glycine max
  unsure (1)..(388): unsure at all n locations
caatggaggattgacaatggtaattctatttatgcggcgcccaaccttggcttaagaatggcaataatttctatgtcttaactatccattctagcgacaactatgaccagaaagtacgagatttaattgatcacaacatttgtgcttggaagaaagatctcatgaaggaaaactttaatcaacttgatgctgaaaaaattcaatctctcccactcttgaacatgatgcaaaatgataacgtattctggaaattctccnctacagtgaatatatagttcggaaggcctatcacaatattatggagaacattctagataatacccatctaagatgccaacgagactggatgctcaattggaagcttccagcacctccaaaaataaacact

SEQ ID NO: 166143 - DNA, 235 bp, Glycine max
aaaacgtctgcacatgaattaacagaccttattgactgagaagcttaacttgggaggcatcataggggaagatactggtttagcttaagctcaaaggtctagttcaagaggtcccaaatgtatttaccttgaaaaagccaaaaagagtcattgccattctgactttaatgtcgaggaagtaattaagatcacccaactcttatagagaaaccagaattcagtctttgaatgtgag

SEQ ID NO: 166144 - DNA, 327 bp, Glycine max
acaacgactcacccgatggaccttgctatttattcagcttctcttgaatagttttcggactgtatctgcgaatcaaatgggtactaaccaacactggaaacattctgttatggtttgtgctccaatcacaacacatacaatctgtatttgatgagcagattgcgaaagacatgtattatgcaaaggcataatacgctgatatacgggaggatatgcttgactgcatcaccatctttcacccgtcatgaactccgaaccattctccaaaataagcctctaactgtgctcattgtttaaccagtccctcatatcatgtgaacgacctta

SEQ ID NO: 166145 - DNA, 418 bp, Glycine max
  unsure (1)..(418): unsure at all n locations
agcttaggttctcgaggggagnctttgnttttgcttaactgngcccttggcgaaatatatcacctaatgtttangccttccaaaacttctctcatccacggactgcatacatatatgttgctcttctcctccctcatcactgacttccagtcggccttgatctatcattcgctgcaacaattcctctactgccaaacatgtttccttgctatatagctcatcgggatgcaacaagcaagagtcctctttatgcccaccgtggggaatcacacccccttttcgagggcctcaaagataaactttctcagggcttgcacgtcctttacaggtttatacccactgcggcccatctgacccatgggcgttaaccgtccccttcatgattggcaaccggttgcttttaccttgcgccacccct

SEQ ID NO: 166146 - DNA, 408 bp, Glycine max
  unsure (1)..(408): unsure at all n locations
tagactaagttcagcctaccatgctcttactgatggnatatctgaacagaccattcggtcattggaggaccttttgagggcgtgtgtcttatagcagaagggacgctgggagagttttcttccattgatagagttcacttataacaacagttttcactctaccattggcatggctccttatgaaactttgtatggtagaaggtgtaggacacccctatgttggctagagcccggcgaaggcctcaccttaggatcgaaagtggtacaacaaaccaccgagaaagtcatgttaatccacgaaaggatgaggactactcaaagtacgcagaaaatttatcatgataagaggaggaaagaattggaattcgacggtggcgatcatgtattcttgagagtcactccgtggac

SEQ ID NO: 166147 - DNA, 293 bp, Glycine max
  unsure (1)..(293): unsure at all n locations
ctgcaacttggacacaccatatatacctatcacatngcacattactcttgactgggtccaacaataattcaaccaattcttcatcctccagtactgcaattctttgcatggtacatattgatgagttaattagaataatggtggaaaaggagtctcttgacattatattactactttcttcaagtaacaactgttctctatctgccagcttcaccttctcttttgcagtgtcaccattttcagacacatttgatcccattttattgttacagacaatggaaaggaatgaacgt

SEQ ID NO: 166148 - DNA, 442 bp, Glycine max
taacaacgctcacatctgattttaatctatatttagcttccgccaaaatcacttgacgttgaatctatacattctaaatgtatcttcatttcaatttttacaaaaatgagcaaatgctcaaatgcattatagccaaaattaatatatattttttccagcttgatcttttaacttttttgttataattaattctaagtcttctactctttagtaactaaaaaaagtatgtactatgtaatacaattgttgacgtattttataaacataaatctatagtttcgtattacgtttataaatgtaatgtatgacataactatttttgtattcatcccacaaaaatccacgtatgacttcaccagcgtgaatattcttctcaatcataaagaatgtttcacactacacctccatggttattgtgaccgatttttaagattttttattc

SEQ ID NO: 166149 - DNA, 415 bp, Glycine max
  unsure (1)..(415): unsure at all n locations
agctttcactatagatggatgagcttctttttaacnnggagaacgaaatccaatcgtgtatcattggaaaagaaatacatatccgaaaccatgtgcaaaaaagctttgataaataaatagatcacgaaggtgaaattttagagatggagaaagagtcagagggcggacctgcaaaggataatgcgttttctggattgtggcctcattttcagtggaaacagtctacatggttgaaggaagatcaggattacgctgtagctccaactatgttttgggtacatacaacattcaaaacaaagaagaaacactatacacaaatattttgtctcaccaaaacgtgctgcacatgggcagcctttttataaacatatcataactctgattttgggatagagttggttcaatgtaagcacct

SEQ ID NO: 166150 - DNA, 401 bp, Glycine max
  unsure (1)..(401): unsure at all n locations
aggtctattcagaaaagtagagtttatctcttttatcttagcgagagtgattctcctaaattcttgagtgattcaagaacactctggctgtatcaaaggactttcacaacctttgtgtgttgccctcgctggaaagagtgattctttccttactatcatctccacccttgttctttcaaaccacaattccagaaaatccacctctgcccaaaattatctcgtgaccataactcccatttacacactcaaattaagtgattcttgagcctaaattgaatttcaaacgagaccttcacctcgttttggaatcacctattcggagccctgtagcttccgttatgccatttctatatttctgccagccaccacttagcctancgtntacactccattcatccatt

SEQ ID NO: 166151 - DNA, 338 bp, Glycine max
  unsure (1)..(338): unsure at all n locations
tcaccattcggtacctcctcatagccactcgactgagatattatgctctattnncattctccactccaagtacgcctctggatcatccttttctttaaagggaggaatgttgagttcaataccatcaattcggttctgtctaggaacaccatcattccctcttctcntcctttctttttcattatgatctctattctccatttgatccaacctctcatagagcgcaccatctcgttgtttcattaacctctccaaatgttgcgtcaaaccttgtatctggaattgcgaaagccccactccatcattaggattagtaccctgcatctcaaacaaacaaa

SEQ ID NO: 166152 - DNA, 202 bp, Glycine max
ttctgcgcttcactatccatgttcacacattatagcagcttgtggttacgtgagcatgaactactaccaatatatagatgttgtttacaccaatgaacacatcttaaaagcatactccgcacagtggtggcctcttgggaatgaagcggcaattcctccttctgatgaggcatggacactaatccctgaccaactacaattc

SEQ ID NO: 166153 - DNA, 410 bp, Glycine max
  unsure (1)..(410): unsure at all n locations
ctntggttgcattgctagggtttccttctttggagaaaaggagaagggatnggaacctcaatttcattgtctctgggcaagggacatttctccctcaacagacattattttccaaatcccaactataggaatataagaaaatgagatccagaggtggtgtccaaatttcaggacgatccaacggttaatatgtccaggatcatagttttactgagacaagtttaggtgtatgtggaaaaaagagagggttttgggaaaggaagaaggtagaacgaacttggcaaaaagagagagtgtagaaatatatcataaatgtaaaaattgacctaatatatctctattataactagggtactctgagttaatattactctattttattcatctattatttataaaaatgaactgta

SEQ ID NO: 166154 - DNA, 416 bp, Glycine max
  unsure (1)..(416): unsure at all n locations
tcgagcgatggtgcaaaacgagtcttcacatgcacaaaataacgtataacccaccattcccttgttgccaccctcaactgagctcacgtagtcccacgtagcccttatccttcgttctctcaacaccaggtcctcatcaatccttccaagcttccacaacatccaggtaattccacatccaatcatcatggactaacaaaaccaagcaaaacagggcaaaggtagaaaactctgcccaaaacacaactcanaatcacagcttttcacatacaaataccccagtaacatttcattcgttccatttcgttaaccgttggatcgaactcgaaaatttactggaagtctctagtacataagtctacattntgaccgttgggatctactagcanatgtccaaaaccccatatgtactaccc

SEQ ID NO: 166155 - DNA, 341 bp, Glycine max
acttctcttgggattatggtggctacagattgcattcctcatttaaacttcttaaaattatttcgcatatttcctttgatagattaacactttggtctgactttgcttgatctcaactccaagaaaataagtcataagaccaagatcagtcatttcaaaagctcgcatcatttcttgcttgaactcctcaactatccttgcatcatctctagttactaaaagatcatcaacatagagagaaactataagaaagctatttcccttatatttcacataaagaatggactcatataagccttttgcaaagctatgctcaataagtgatcatttatcttgctata

SEQ ID NO: 166156 - DNA, 451 bp, Glycine max
tgtacgcacatcgttcgcgtgtatgatatccactccacattgtttgaagtagaggagaccttcaaccctataacgcaacgtggcggacaaaagtgggcagttaacttgaatggtcatcattgtcaatgcggaaggtattctgcgcttcactatccatgttcacacattattgcagctcgtggttacatgagcatgaactactaccaatatatagatgttgtttacacaaatgagcacatcttaaaagcttactccgcacaatggtggcctcttgggaatgaagcggttattcctccttctgatgacgcatggacacttatgcctgacccaactacaattcgtgcgaaaggtcggccaaaatcaacaaggataacgaatgagatggattgcgtcgaaccatctgagcaccgacaaaaatgtagtagatgtggagccgaacggcataacaggc

SEQ ID NO: 166157 - DNA, 456 bp, Glycine max
  unsure (1)..(456): unsure at all n locations
tgccgcatgcaagcttcaacttacagtgagttattcatgcttattgccattacttgccctaagtgcacttctaatgatttcaaaatagaatgatgttggtgcttagcgcatnctttcccgctaagcccaacttgaaagctcaacttacagaatgaatttggggcttagcgcaaaatggcgcacttagtgcagctataataaattttcatggagaggaagtggcgcttagcgcatcatccacgttaagcccactgcttaaggtgcaacttatagtgaagatgttgggcttagcgcagtgatgtgcgcttagatgaaccattcagcaaatcaatcaggggtctntgcgcttagcacgaacaagctcggcttagcgcgtgaagagatggcacttagcgcaaggttggcgcttagcgggatagcaatctgaaacttttctaagtcattttcatttatctc

SEQ ID NO: 166158 - DNA, 406 bp, Glycine max
  unsure (1)..(406): unsure at all n locations
tatggtaagatctgngacctaaccatggaagaggtctttactgatgccattgcctccctcgcccaatattatgaccagcctttgaggtgcttcacctttggggacttccagttaacacccatggtggaagagtttgaagagatcctgngatgccctctgggaggaaggaagccatacctcctctcgggattttatccctccttagctagaatttctaagacagtcaaaatctcgacacaggaattataccgcggaaagcaagtcgaaaatggggtggttggggtaccaaggaaatgtttggaagcaaaggcgagagtcttggcaagtcaaggcgaatgggccccgctcatggacattctggcactctngatcttcggagtggtccttatttcaaatgtggatgggt

SEQ ID NO: 166159 - DNA, 429 bp, Glycine max
  unsure (1)..(429): unsure at all n locations
gcatgaagcttgctctagatcatgaggatacatttntaagctagngacgctaaagaagcgcttcctgtgaggcaacccanctccttttcaattaatttcattaatcattgcatttagttaggtctcaacttgcttgtgattgcttgagcaagtcatcaacatgtgttgcataaaaaaatggggttgttaaagcttatttgaagctgtggatgaaaaataacttagaaaacttttcagtcatccactcgctcagtgcgctaagcgaatcattctttatgcgctgagcgagccccaactcgtgctaagcacatcaacccctacccattggctgaaggggtcttgctaagcgagacctgtgtgctaaacccaaaaacctctctgggaatgtatttctttggaattgggtaaacgagtcatcttgctaagcct

SEQ ID NO: 166160 - DNA, 178 bp, Glycine max
aactaccggacgtatgtcccagaacccaccacccacgacagtttatgtgagaacaagcctacccacacctgaaacgcgaagctccacaatggagaggtgcgctctacgactgcgacaatggcttatttacgcgaccaggagcaaagatggtgtaccaaggctggagctctgatggagc

SEQ ID NO: 166161 - DNA, 365 bp, Glycine max
  unsure (1)..(365): unsure at all n locations
aagagccgcgcatgggataatttattatatgttcaaccntccactacgccacctaatatcattgtttaaacaaaaataatgatcaaagacacagactatagccagttggattcatatgaagggctccggtaatcgatagttatatataaaaaaaatattcaagttcaaatactcttcaaatcttaaaatcatctcctaattacaatcttaaaattaaaaaaaatccaatccatattatcgtcctaattcttaaaatcaggggaatacataatataggagacactctttattatgacaagaaatctatacatgaaggagaaatctatacacactacccctgtgtgatgaaaaaatatacaccttct

SEQ ID NO: 166162 - DNA, 307 bp, Glycine max
  unsure (1)..(307): unsure at all n locations
tccccncagccaaatcagacaactcatctgacatcattttgcaataatggccgattggaatgttcatttgtctttgtaccctggctgattgcaaatgtatttcgaccggaagtacagcattatgcccataagtcagtcgaaatacggtagtattacgtgattccttacgagaatctctacatgcccatagaacttgatctaacgttttatttcaatttcttggcttttgggcaatgtgttttttaatcaagttaattacaatcttattggctgtttcgacctgaccatttgcttgcgcgtaatatgg

SEQ ID NO: 166163 - DNA, 402 bp, Glycine max
  unsure (1)..(402): unsure at all n locations
gatgttccctgagcaatggctactaaatgcattcttgatggtagaatgcctatatatatagcacatgtatttggtccctgagcaatgacctgtgtttctaacatttggtatcagagccacaattggctctgagaccggatctgcatatgggccaggtttgacccgctagaggttgaagatgatgaatagtgttaaaaaaaatgaaaaatcccatgtttttggctagatgggtgttgaactcgtgtagaatgttgtaatatgagcaaaccactaaatcactaaagcctttntgatatgcaatcgttttcataccttatatacttattctgctttaccaattatggaattttgatttaatctatgcatgaatatattctggaaaattctattctatgcatatat

SEQ ID NO: 166164 - DNA, 392 bp, Glycine max
ggctttatagagaagattcatcctctgatctaaagccatcttatcatcagaagacacattaccacaataaggaatttaacattgaaagcatcagaactatgaatatgactcgattttgctagcaataagctagttgtattaatgagtgggtaaatgatctttactcataatagctcagacaaaatcgccaacaacaaagtccactgattggcgcttctggtaagcttgtaactcgtaatttttagttgaaattgtcaattttacacatgcaatcttaattctcaacacactttttggatgagccttccaaggattgtgttgccttatctaacttttcttccttttccagtgataagggtaagctaaaaaactgagtctcccaatgtttgata

SEQ ID NO: 166165 - DNA, 406 bp, Glycine max
  unsure (1)..(406): unsure at all n locations
ntgagccaattcanacgacaataactgtntactctgnattttgattgagcccagtaatatatcgagaccgtcgaaattgaatgttgaacctcttagccaattcaaacgacaataacgttgtactcggatgtctgattgagtcccgtcatatatcgagacgctcgaaattgaatgttgaagctctgagcccattcaaacgacaataactttttactcggatgtctgattgagtcccatcatatatcgagacgctcgaaattgaatgttgaagctctgagccaattcaaacgacaataactttttactcggatgtgtgantgagtcccgtcatatatcgagacgctcgaaattgaatgttgaagctctgagccaattcaaacgacaataactttntagctcgatgtct

SEQ ID NO: 166166 - DNA, 437 bp, Glycine max
  unsure (1)..(437): unsure at all n locations
catgcaagcttggatggtcgctcagatctttattatatataactntctcgaaaaatgagtttatcccgtgtttttactccaaagatcagtgcgaatcaagtcactcccgtatgttatctctagcatgcattgtatgttgatcttgggaagccggaaggtccatatcaccttcttaactgtacacatggggcattgcgcccccaaatgcgcaagtaagaagagataatttttcgggctctcgtgtccataaatgcattcatatcatgcatcacataagcatctcttcatggcatcataatatcgttcgtgcattcgtccgttatcatattccaacatcacatattgcatgagtcattgcatcatcatgcatatgcgctcaacttactctttgttctacacactgcataccttttgttttcatgtcgctcatgcgtgat

SEQ ID NO: 166167 - DNA, 380 bp, Glycine max
  unsure (1)..(380): unsure at all n locations
ctaagcttggttctgtctattcacttttattgtgttatgtgngggagattgtgcgtacgtgggaaggaaccaagatacaacttggaatttaaacaaacttggttaatagccgcagttcatggtcatggtaatgcctgtcatatgtatcaagcatatttaccatgtgttatggaaggttctaaaacagcaatcgtaaagatctgcttaatcgaacatacaagagtctcttttatgagagattacgttatattatctttgtttttgatacaaaatattatctttgttgtttataaataaatgattaatatatttagctatgtaaatgagttttaaatagccttatatggttgatgacattaaacaattattttcacgattaa

SEQ ID NO: 166168 - DNA, 437 bp, Glycine max
agcttcttataagctgattattttattcttaacacaagttgagttgtattcagaaaattagagtttatctctcttatcttaccgagagtgattctcctaaattcttgagtgattcaagaacaccctggctgtatcaaaggactttttcacaacctttgtgtgttgccctcgctggaaaaagcgattctttccttcctatcatctccacccttgttctttcaaaccacaattccagaaaatccacctctgcccaaaattatctcgtgaccataactcccatttacacactcaaattaagtgattcttgagcctaaattgaatttcaaaacgagacctttcacctcgttttggaatcacctcatttggagccatgtagcttcccgtatcgccatttctatatttcttgtcagccaccacttaacctacgttctaccatc

SEQ ID NO: 166169 - DNA, 374 bp, Glycine max
acactatacaatactacagcttgagatgaggaagcgttgaatggtgaaactttctgcttttattgttgaccacagagtggtacctggagatatgtcgcgggggtcaggagaccttggggacgtcacgtggggtgctattgcccaaaaccaagcttgaccaatcccgacccaacccgggcatagtcggtcagtgagaacctgtgatgtacctaagcaggcgagctcctggcagtcaacagataaaaggaaaacaagaccacaaagcaaggaggcttgtggtggctggccacctgtgaattctgtgtaatatgtggattgtggcctctggtaatcgattaccaacggtgggtaatcgattaccaggcttaaaaatg

SEQ ID NO: 166170 - DNA, 431 bp, Glycine max
  unsure (1)..(431): unsure at all n locations
agcttggtgtcgttcactcacactgtctttgttatccgngcgaggcgagagactagagagatataaaagagttaacggtcggacaatatcgggctcgggagaccggcgagtcgctctggacattaacctcgttaataccccaccattaccaaatgccggagaaataataatcaaaatatattatattcagattaacaatataacaatagaataacgttgatgtaatttttcgttaataggacacaacatacagtttttttaccgtcactaatacctcatcatccacctacgcataaggagtaaaaattaaagataagacaacttaactactgtatgtactcacacagtcacacacaaacacaaattatgttcgttttctttgaattataatcaagttttgtgatcgtatagtataaaaaatcatgaaccat

SEQ ID NO: 166171 - DNA, 379 bp, Glycine max
  unsure (1)..(379): unsure at all n locations
ntactgcgatagcgccggcattttttctactctattctcttcaccaggggattatttggaagcctgcggtaacagtatggatccttcatccttgcgtgaagattttccagattggacccgcgtatcttatgcccgagtaaagttactacccagacgtacttcctctgatgagtatttctctctggaaagatgggggctcttctatatatagctcattttctcacaaaatattgccaatatccaatatccttcacagtcggttcttcaaccgtctatacaaataacaaaagtacactatacagtaaacttcgagaaaataatttgaagcacttggcgttccttacaggatgtgaatgacaatgtgcaacactagcgcatg

SEQ ID NO: 166172 - DNA, 420 bp, Glycine max
  unsure (1)..(420): unsure at all n locations
gatacgagagtatttnctaagagatggcatgtcccacttgtgcttttcctatctagtttccacccttgactcattaattgatttacctttctcatataagtcaagataggttgatgttgccattggatcggatgcttctttgcacttttccatgtcaaatttcataattagtcatgtacaatatttggtttgacataagaaggttccatgttccatttgcttgactagaagtccaaggaagaagttcaactctcctatcatagacatttcaaattctttctgcatacaactggaaaattccttacacaaggtttcattagtagcaccaaaaataatattatcaacatatatttgcacaactaacaacttcatttttaccctcttgaaaacaatttttgccaactgacctttacaaaagat

SEQ ID NO: 166173 - DNA, 472 bp, Glycine max
  unsure (1)..(472): unsure at all n locations
tcatacttcgaganaggaaaataactcaattaaacatattagcacaatctcattatagcaatcaaacaagacaaacaaataaaattatgttagtcatcatataaacaagttaaatgaaagaaaaatttcaaccaacttaatttaaaagataatggttctgattacccttttcatgattcaagtgcttagatctttaaagatgaaagtcaaacttttgtttttcttgcttaaacttcttgaaagatgttctcatcactttcaaagtccttggatagaaggttgatctccttctccgaaccatcggatgagtcattgtcatcccaagcaatatacgccttcttggatcttctttccttatagcttctcttctcattcttctccggccatgactttattgaggggcagttntcctttatgtgaccgggttgattgcacttatagcatctaagtgttcgagaaacttcttgagatc

SEQ ID NO: 166174 - DNA, 445 bp, Glycine max
gcttattattataccagcccgcgtatactatgttatctatgatattatcaactatatttctattcacattattcttgaaaacttcatcatttctatataaccacacctcgtaaagagtttcaggagtttagctttccaccctttctttccagtttctcgaatagcccacttgagttctacatcccaagttttaggttcatgagtaacttcaatccatttaagaatctgctcccatatggattttgttattttgcagtcaaaaaacagatgggcaatagattcctcagactccttacataaactacattgattttctttgatcattccaaatcttttcagcctatcttttgtggccattctaccatgacacgtcaaccataaattcactatatctcggcgccttgcaatggtatggttcagcaaaaatctctatgtacccaatcag

SEQ ID NO: 166175 - DNA, 466 bp, Glycine max
  unsure (1)..(466): unsure at all n locations
tgtanattcctttatgagcaaagatccacaagggatgttttctccactataacttatccacaagagatgtaccctctcttgttctcagtcacaacaacccaagtagatgtaccctctacttataccacaaaggatgtaccctccaatgtgttaagacaaagttctcaggcggttagtccttcgaaactttgtgaaaggggaaacaaaagaattctcaagcgtttagtcctttgaaatcttttgtttatgggaaagggaagaatcaaaagaattcccagactgtgtcgttttgaattctttgacaagggagaagggagacacaaacaaattcaggcggttagtccttcgttcttttggaaaagggagaagagagacacaaaaagaattcaggcggttagtccttggcgaattcttttatgcaaagggagaacggaatgaacaagatgaatagcacacagtttttaat

SEQ ID NO: 166176 - DNA, 389 bp, Glycine max
  unsure (1)..(389): unsure at all n locations
tgcgcatgaatagtttgtcttgaaccatattttgtagngaaacggntggagntaataggcagttaccgacaaaaatatctatcagtaattttttacagatgtatccattgaaaaaaggcttttggtatttccgatagatatatctgtaaaaaattatcgatggtctcttttcgatggatatatctgtcaaaaattatcgacggacataaaattccatcgattggtatttcctataaacattttaccgaacaatcttggtccgtcagaaatattaaatcactgtcagattttgggggttaccaatgaatttatgtcctcaaacatatcatcttttcgagcgaatgtgaatcattatatttaaccgctagcctaaatgaataacaatagta

SEQ ID NO: 166177 - DNA, 474 bp, Glycine max
  unsure (1)..(474): unsure at all n locations
tgcttctacattgaagccgttatctcttctaataattgtttaaatgaatttcaactgatcatttgtgtagtaatcttgtttaatcactattaaaataaaatccaaccgatcgttcacgttgtaacttcggttaaatcaaaaaaagcaaaataatgataaaataatcaaaatatcttcaaaaataataataataaaataatcaaaatatctagaaaagaaaataataaaataatcaaaaaaatcaatcggacgtttttctttgaaagtttccttgaatgaattgactaataatcaatgtgaaactaaggctaaaatcaactcacaagccaagctttgtccgcaaaagtcactcaaaaccgttttaatgttcaacgccttanaacggtcatctntgattctattggttaaaatggaccagtcaaagaataaaatcaacacataactttattctttcgcaagaaactacgtagtctg

SEQ ID NO: 166178 - DNA, 397 bp, Glycine max
gcttgcaagaattgtgccacaaaaggctaatcatgagtgttgagcagctcattgagcaggtggcctggcccggagctcgaccttcttttgttagagataatgtaagctctagagcccaagcacctcagcagcaaaagctagagccagaaaacgaccaatcctctgaagccactattcttggagcctttgatgtttcagaaggtagatcagagatgagatccgataaggctgcttatcctgagctagtaccagtaccagctgatccaccatctctagtggtggatccatcttttcccgcgccagaagtagctctcccatctacacctattattatatctaatgatcctacagtgcgaacacctgaatggattcctactcctccacgcacacctgagct

SEQ ID NO: 166179 - DNA, 468 bp, Glycine max
  unsure (1)..(468): unsure at all n locations
tggagaggatgcnttaatggagganaaganagacggatatatagagagatggggcagcatgaaattgaaggaagaaaaagggagagaagttgaactttgagttgtgtctcacaagactctcattcatcaaagttacaacaagtgttacacatgcttctatttatagactaggtagcttccttgagaagctttcttcagaaaacctccttgagaagctctcttgagaaaacttccttgagaagcttctttgagaaaacttccttgagaagctagatcttagctacacacacccctctcataactaagctcacctccttgagaagcttccttaagaagattcctaaagaagctagagcttagctacacacacctctctaatagctaagctcaccctcttgagatgagaagctagagcttagctacacaccccctattatagctaagctcaccccccattaaaaatacatg

SEQ ID NO: 166180 - DNA, 317 bp, Glycine max
  unsure (1)..(317): unsure at all n locations
agcttagcacaactctgcttggcgctcatacgttcatttaatactngnatatccggngcctcaaaagggggtgagtgttgtgatgcaatttgtatatccggtgccatctcgtgaggcctgtccaaagtattggttgattgtgacaccaatccccgcgactcgtactcaacctggatgcttgggtcggccaatagcaatgttcaatatgtcatgacaaccatgcagaacaaatgacacctacatcattngttcttctaaagagtcctgtgagcaacaaaacatggatggagggtccattgtcattgatgaattttagt

SEQ ID NO: 166181 - DNA, 407 bp, Glycine max
  unsure (1)..(407): unsure at all n locations
ctcaagcttggatattctcttagtanggaatctatccttcctaagatgtagccaaactctatcacccttattaagaactagctcttttcttcctctattgcctttagttgaatacacctttgtttggttctctatttggttcttaaccctctcatgcaacttctttacaaattctgacatagattccccttctttatgtataaaagaagtgtctagtgggaggggaatgaggtctaacggtgttaggggattgaacccatagacaacctcaaaaggggactgcttggtggttctatgaacccccctgttgtaggcaaattctacatgaggaagatactcatcccaagacttatggttgcctttcagaagagcccttataagggtggataaagacctattcactacct

SEQ ID NO: 166182 - DNA, 356 bp, Glycine max
  unsure (1)..(356): unsure at all n locations
catagccatcaaagtctgaagagagtatgatgaactaacggacgtcaatatggccaccgatgaagccttggaatgagaaaccaagaaggtccgaaaggaagaacaccaccaaaacaagtttcgaggggctttatagggcagcaatagtgagctcaagctccgaagaggtgaaaggaatcatcacgggtcaaaggcatgatcttgaacgacgagctaaaggtttgtcttatgtcgaaaagaaatttgttccaacagttaagcgagactgaacggaatatgtggcncatcatcgataagtgcacagagaagcttaatctatcggcgacttactagccaaggctagaggatgagtacgc

SEQ ID NO: 166183 - DNA, 301 bp, Glycine max
aacctgtcaagattaaaattacaacaccttaagccttaacatgttaaaggtgctcaaaccatctctatctttataattgtacaaataacttcaactccttaaacatacatgcgaaatttgaaaaaataaagaaaagaagacttctatgggaaattaaaaacgggagtgaaaatgaaaacctttggtattcaccagctaaacccttattacaaccaattacgctcgggtttaccctaagcctacttttaactattaacaccataatacattacttgtatcgaaaggaattcgaaatgattct

SEQ ID NO: 166184 - DNA, 427 bp, Glycine max
agacttattaaaatcgatgacacttttttactgctctggccgaaaagggagacttgaatcacacacgtctcatcttcatgccggggaatgcacaatcaccttggaagatgttgctcttcaactgggtttacgccttgatggaaaatcaactactagccccacatattatgatcaggaacatatgtgcacataatatataggtgctgttccccccacagaatgcattaatgggatcaacacttaaactaaaatggttaaaagaaaacatgctaacttttcacagaaaacccacaccacaataattctaaacccactatagagcatatattctacgactgattggacggtggtgatgccacacaagtcaccaacagaattcacctatgactcacctctgttagagatcttgatcggctgactggacact

SEQ ID NO: 166185 - DNA, 445 bp, Glycine max
  unsure (1)..(445): unsure at all n locations
ntatatagactctagaagcttgatgcgttatgagatcctaactagctgntggctaatagcttgagcgttctacataaggcgcattactctgcacagagagaatagggaccacaaatatcttcagggaagtataccttgctagtgtcgccttgtgcttagagctgactttcagcgtacaattcgaatacaacgttaacaacatatgtcaaaaggaataaagaatgtcaagacaagacaatttaagactttcctcttgtgcactattgcacaaattgcttactaaaccatatatggacgttactttatgatgattactttcagtacttgaggattgagtaactcttgctcaacttgtagcttaagcatgaaaggttaacaaataaaatttatactctgttaacatcaaaaccttagggactntactatttgcgatagtccaatgtga

SEQ ID NO: 166186 - DNA, 404 bp, Glycine max
  unsure (1)..(404): unsure at all n locations
catgcaagcttggtttttttagggtatactgatattggtgcaggaaattcanaaattcaatgacttgccccacgtactgtctcgtgggggttatgaacttcttgagaacaaacttatggatgagaagaggaagcgtcgagatcagcaagatgagtttactgaaaacccaacactcaacctcgaccctctatctccagtgtcgagacaccttaagtggaagatggtccgcacaaagtgttttggccaaatgacctctaaagcggcacaacaaattgcagaacaaaatgtgagttcattctgcattgcttacaatgattgtcaaataatcgttagctaacactcaacttgactttattgaaattcaacaaatatatatgcatgcaggattcattagaggaacaggc

SEQ ID NO: 166187 - DNA, 393 bp, Glycine max
  unsure (1)..(393): unsure at all n locations
actagcttgtaattttctacattaaaattttagaaattaactttctctaatgtgatagattacaataggagttatgtcatgacatcatattacagtaaaaatagacaaaatgactaaaatgtcggatgaaaagacaagttcgagaactttgactactcaataaaaagcttaagaactacacttagaaatatcacaaagttgagggattaaaaacatactttaccataacaacaacaagagtaataatataatactcaaaatgtacgggcacatataagcacactcagttttgttctggacatcttcttgatccttctaacgactnttctctgtttatctgaaccttattataacttagcgtctcactttgccaaatcctgtgcttttggatag

SEQ ID NO: 166188 - DNA, 458 bp, Glycine max
tagtcacctgccgcatgcaagcttccacaacatccaagtaattcaacttttctgcatcatgaactaacatagccaagaaaacagggcagaggcagaaaactctgcccaaaacacaaaccaacatcacagcttttcacactcaaataccacagtaatattctcctcgttccaattcattaaccgttggatcgactcgaaaattttactggaagtctctagcacataaatctacattatgaccgttgggatctgctagaaaacggccaaaacccactctgtactactctttcgacaaccagcaaatacacaacactttctacacaaagccaaaattctgctgcacctatttgacagcaaaattctgcatatagtgcagattgtcgaaatcacactttccgtcatccaatttgcccaaatggactctacaagtccccaatcatgtatcaatcatggttaac

SEQ ID NO: 166189 - DNA, 311 bp, Glycine max
gatgtacttgaccgggtccatcttgtttattttccacgtggtatggctcaacatcgtatgtcttataccgtgggacacccaaactaaagcacaactacgctctttctaacgcggagtagttcctctcacaggctgcgaactctctactacactagtagacgacgcactctcttttaccggactctttatgttgccctagcatataccccattaactcatacaaaatcgtgatatacaagaagagaggtcttccgggcacctgtggcataagcatgggagggttcatgaagcactgtttgatgctttcaaac

SEQ ID NO: 166190 - DNA, 331 bp, Glycine max
agctgcaacttacgcagattgtagaatatttctttatctagaattaaaataactgagtgccattaatctatggaattaaaaaaaacttaatggctgagtgtaactgaaattgtggcaaccaaaagtcaccctcaacagccaacaagtcagccaccatttggtctcccaaaaggctgatgcctaggttgccaattgggcccttattacaacttgaactaaacctaactaaagcccttttagttgattaacccaatacatatttttggtcagccaactttacaaggagtgggccattatttagacagactaaacactctaaaattgaaacaaa

SEQ ID NO: 166191 - DNA, 429 bp, Glycine max
  unsure (1)..(429): unsure at all n locations
ntaacttaatcaattcaaaagcctntttgtgcttgtttattctacccaaacgcacccttcttcaaacattcggtcataggacttgctatagtgctaaaattctggataaagcgtcgataaaatgatgcaagaccaaggaaagatctcacctccgaaactgttgtagggctcggccaagtcttgatagcatccacttttgtttgatcaacggatactccatctttagacaccacatatccaagaaacaccaccctttcaaccaagaaatcacacttttccctcttcccatagagtttttgtgctcttagggtctcaaatatttgtttcaaatgagtgaaatgctcctctatagaattgctatacaccaatatgtcatccagataaacaacaacaaacttacccaaaaaaggcttgagtacttcgttcatg

SEQ ID NO: 166192 - DNA, 320 bp, Glycine max
acagacccatgtatataccacgtaacttataaagtaagaacattcatttaaaacacttgcaatctaaagacggtgccaatgaataccgcccaggtccacttaaagaacaaaggcggtcttatactaaccatcgttaactctgtaaaaagttcctatacaacttaaaaatgtcaccgcgatattcactacatcggttttttaataaccgatgcaaatctgccgatgttaactcatgttcctggacgcctgcgtctcatacaaattatttcatcataattctcatatagagaagaaccgttatgaacacacactttataatt

SEQ ID NO: 166193 - DNA, 221 bp, Glycine max
gtctatatgacatctgaaggaaatagaagctaatctagtgagttctaagctcttcctcacaaaagtcacagctctaagtttggtataaaacagctcgtatctgccgctgtgcgacgagaccgtacaccatcacgccgtcgtccgcgcgccgacctgtttcattctggccaacattcaacccgggactgcaggcgtttgtgcgcctgaagagcgcaacccaa

SEQ ID NO: 166194 - DNA, 402 bp, Glycine max
ctatgaaactaagcttgaaatataaatggatttccttactttggcttgtaaattaggggatatgcatgcctactcgacaatagaataatgaatatgtcaataagactgcaaccacagactttaaacacatccacaactttattcatgcatatgataaatttattatcatattgagaaaactgttgcgtaacagaacgaatacaactcctaagtaaggccagcgaatggagcttctgtgagcactaagcaggtgactcagaatgttcattgataccaaacagagtactctaggccaataaatgcattatcccgaagaacagagctgtcataagcaacatgtaactaatgctatccaaatgcaagaatgatagatctctcctaatttatataggtggagtatca

SEQ ID NO: 166195 - DNA, 449 bp, Glycine max
ctgcagcttgtgataggtttactgaattttgtttgtgtaataatgatctctaaatagcaaaaactaattaaaagaagagtttaatgagctatattgtcttttttttttttatatacagaaaaacgtatattgttcttgtaattttttttcaaccaatcaatttttttttatacaacttctaagataattattttaaaaataaataaatctactatatatatgaatttataattggatgattatataataacctttacactcccaatatttctattatttagtcttaaaaaagtaaaaccaaaatttcaataaaattatattttaaaaattaaaatcagaaataaaaatttatttgatgaataaacaacttatagacatcacacaaaaataaaaatattatatcggactagttttgttaaactttaaaaaataattaagaaatattcttt

SEQ ID NO: 166196 - DNA, 469 bp, Glycine max
  unsure (1)..(469): unsure at all n locations
ttgcgccaccgtcccccatcgnctcttacgtgacgcctgtaccgcctccaacattgctttccgactgttgatctaactcaacttccctcgttctcgaagtatctgtgaatgttcaatcttccttttattctctcgttccttctcaaattctcaattctatctatggcctcatggaaacgattactgctgaagcgtgattagtggttaagataatcgaactcgtggaaaattgatttcgagtgtatatactttatgtaaaagtggttcaatagtcaaatttaaaaatgtatgattcctttctgacttatggattatgattgagtaaaccaccgatttagtttagatcctgaaagtgtacattgctatcacattagtctgtgaaactaagaaaattctaaataagttcctgaaagtacaattcgtcaatcacgtcgagtcaaaagaatttaataattatactaacatgtgt

SEQ ID NO: 166197 - DNA, 406 bp, Glycine max
  unsure (1)..(406): unsure at all n locations
gccgcatgcagcttggtttaattgtgtgcatctcgttatatacaggnctcaatcagacatccgagtaaaaagttattggtgttagaagttgcacagagccttagttttgcattctgagggtctcgatatattacgggactcaatcggacatctaagttaaaagttattgctggttgcatttgcttcgagctttcattttcaattacgagcgtctcgatatattacaggactcaatcggacatccgagtaaaaagttattgtcgttagaatttgctcatagcctctattttcaattctgagtgtgtcgatatattacgggactccgtcgtacatccgagtaaaaagtaattgtcgctagaactttctcaaagcttctgttttaatttcgagcgtctcgatatattac

SEQ ID NO: 166198 - DNA, 374 bp, Glycine max
taacctagaggagacggaccattccaagtgttggagtatatcaactacaatgcctacaagattgacttgcctagtgagtataatgtaagtgccactttcaatgtgtctgatctatctctttttgatgcagatggaggagccttggatttgaggacaaatccttttcaagaaggagggagtgatgaggacataaccaagggcaaggaccatgaagcacttgaaggtcccatgaccagaggcagacttaaacaagcccaacacgtcatagagacaaggctggtcatttgtatagctgccattgatgatgattgaaggcccaagtggagaaagatgaaggcccagaggcagaggcactaccaagactaccaattgtt

SEQ ID NO: 166199 - DNA, 439 bp, Glycine max
gcttacaaagaagcatcacgagaaagattctttgtgaagcctcacgagaaagcttctcaaggaagctgtctaagctgtcctgggaaaaatgctctcctgcattcgttaaccgttggatccttttgagatttggcctgaaggttcataagacatttgtggacgacctgaccgttgagatcggcgatacgacatccggcgtgtgagaaacgcttccttttccgagagcagaagaacttgagtgtgtcagcctttgtgattcgtgtagccttggaaaaacgccatttctttctccttccttcttccaaaaatatttccaacgtccaaagcttcttctacatcaccacactcactattagccaccacgaaccgccgtatttctctgttgaaacccacaccgagaggaacccttcaattgagccgaatctccaaacttgactac

SEQ ID NO: 166200 - DNA, 455 bp, Glycine max
  unsure (1)..(455): unsure at all n locations
tgccagttatggggtntgtgaatcggcttctctcattattctctagntntgnattatagtgcgcnggtttcactgaataaccattcattggtttatttgtagttttctttttactataaaaaaattgagtttttttatgtgtgtgtgtgtgggcgcgcgttttattttggccatatcattatctacaactccccctcaagccgaagacctgatactaatagcgtgaattttgcaagactggacattaataataatcactatgatagactctgataccattttaagatttggatttaagtctaacttaatcccaaaagctagctttatgaggcaaggatgtctcctacttctgtacaatattttggccggatcactagtcaatgtggaatcaacaacaaatgaactaataagtaatttgagttctacgtgtgttcccctgaggtatttactaatta

SEQ ID NO: 166201 - DNA, 403 bp, Glycine max
agctcgttcggtgatagctatggaacgttattttttttctctacaagagaatcatacatgggatatcgttccttgcccatcacgtgtcaaacccattggatgtaaatgggtctacactatcaaacttagagaaggactctcacatcagctacaatcattggcccagcaatcttaaatcagggcttgtgtattagttgtcgacagtacagtgcataggtgcaaaatactggtcacatgtaatctaggctctggtttccatcaagactacattagtttgacaacagaatcattggtctgtggtcttataatgcaccatttgtaaatctagtacctctggtacctcattaatatattatctatctttgctgagcaaaaaacaatcaaactcaaatctgatggttct

SEQ ID NO: 166202 - DNA, 284 bp, Glycine max
tctaactctgactctcgtcgaggccactacttaccacactatacgagagatgtgcatgcgcggggctcgaccaactggccgcccactcacttgtcaaaacagttatccaggacatcacacaagcttcctccacacaggacagtgttctgggacagtacacagatcgttcgtggaagataaaatgaacattgtggtattctacaatagttgcaggctaaaataacgcccaaaaatatgatataacacgagaataaatgcttgataataattgaatgctaaatata

SEQ ID NO: 166203 - DNA, 434 bp, Glycine max
agcttcaacattcaacttcgagcgtctcgttatattataggactcaattagacatccgagtaaaaacttattgtcgtttgaatttgctcagagcttcaacattcaatttcgagcgtctctatatattatgggactatatcagacatccgagtaaaaagttattgtcgcttggaattgctcagagcttcaacattcaatttcgagcgtctccatatattacgggactcaatcagacatccgagtaaaacgttattgtcgtttgaatttgctcagagcttcaacattcatcttcgagtgtctcgttatattacgggactcaatcagacattcgagttaaatgttattgtccgttgaatctgctcagagcttcaacattcaaattcgagcgtctcggtatactatacgacctaatcagacatccgaggtaaaagtta

SEQ ID NO: 166204 - DNA, 461 bp, Glycine max
  unsure (1)..(461): unsure at all n locations
ttgagcanattcaaacgacaataactgtctactcggatgtgtgattgagttccgtaataaatcgagacgctcaaaattgaatgttgaagctctgagccaattcaaacgacaataacgttttactcggatgattgattgagtcccgtaatataacgagacgctcgaaattgaatgttgaagctctgagccaattcaaacgacaataactttttactcggatgtctgattgagttccgtcatatatcgagacgctcgaaattgaatgttgaacctctgagccaattcaaacgacaataactttttactcggatgtctgagtgagtnccataatatatcgagacgctcgaaattgaatgttgaacctttgagccaattcaaacgacaataaccttttactcggatggtctattcagtgacgtaatatatcgggacgctggaaattgaatgttgcacctctgagc

SEQ ID NO: 166205 - DNA, 415 bp, Glycine max
  unsure (1)..(415): unsure at all n locations
tatttccagaaggaaattctatcaatagacctccaatctttaatggagagggttaccactactggaaaacccgaatgcaaatttttattgaggcaatagacttaagtatttgggaagccatagaaatagggccatatatacccaccacagtagaaagaattacaacagatggtagcacatcaagtgaaagcataacaatagaaaaacctagagatagatggtctgaagaagatagaagacgagttcaatacaatctaaaagccaaaaacataataacatctaccctgngaatggatgaatatttcagggtttcaaattgtaagagtgctaaggaaatgtgggacactctacaattaacacatgaaggaactacaaatgttaaaagatctatgataaacacactaacccatgagta

SEQ ID NO: 166206 - DNA, 433 bp, Glycine max
tcacgatactatccatcaattgtgagatatgcatctttctcacataacgtattaacaatctgtcttctattctagtgacactctgtttagaagaaagaggggagaaaacttttataaacttcaaacttttcttgcattaaatatctcctaaaactaaacatttattattttgaaaaactaaaaacatgtttaattaaaaaataaaatacaagataagctctaaattttttttttttttttaactctggtcacttttattctatctcccctagtctaaaactacttttcccatgtaacgggtttctatttgcttccaggatagggtttatttaatgcattcaattgagccgttattccttatgaaaatgtctttcaaaagaagaaaactatataaggaataaaacgaaatctatagtatgtgtgcaatattata

SEQ ID NO: 166207 - DNA, 442 bp, Glycine max
  unsure (1)..(442): unsure at all n locations
agcttcattagtggcaccaaaactatgtcatttcataaattttcacaagtagcaactcattgtgtaatcttttcataagcaatgttttgtcaacttaacctcttacaaaagattgcttgattcagaaatttcttaatctttcataccaagatctaagtgcttcttttaaaccatataatgcctttcttaacttgtaaacatgattaggaagatcaaagtcttcaaaacctgaaggctactccacatatacctcttattcaatgtatgcattgagataaacacttttcacattcatttgatataacatgagattcattatacaagcaaaagcaagcaacaacctaatagcttccaacctagcaacagaggcataagtctcatcatagtcaatgctatcctcttggttgatcctttagaaaccaatctggccttngttctaact

SEQ ID NO: 166208 - DNA, 400 bp, Glycine max
  unsure (1)..(400): unsure at all n locations
ntgcgaatntggtctttgccggcgaaagtatcgaaatgggtctggaaagaggcaaatctgatcatcctgctttgataaatgcaaaaactcgggcaaatgaagaggatgagaatgagggagaaacccttgttgtgactgcctttcctacacgaccaaatttcccatcagcccaacaatatcattactcagccaataacagtccctctcacccaatcatccacaaaggccatccctaaatcaaccacaaagcctgtctaccacacgtgcaatcacaaacaccacctttagcacgaaccacaacaccaacgaaggaagaaattttgcagaaaaaaaaaggcctataaaattcacccaaattccggtgtcatatgctaactcgctcccatatctattcgacaat

SEQ ID NO: 166209 - DNA, 428 bp, Glycine max
agcttgtagtagtagaggtagggttcacttgattccgaatggtctcatttggagaagtggactcatgattctcatctggtgcagtcacagtcatttcataatcatcaccttgaggagaagcaccgaggtgaagaaatggtagcaatcccactgagtaattaggccttgaagcataagaaccataagattccaaattgaagtactcagaaaccattttctggttctccttcatcacactaacatcaggaaattcaattctagaatactcaactgggtctgacatatcttgtgaaacttttggatcaagcaaaacaacttctgaagatatggatgaattagtaactggatgtgatatgggattcacagtggaactgattgagaatgatgtgtccaaagaaagtgtaattggacagttccagcacgacaat

SEQ ID NO: 166210 - DNA, 440 bp, Glycine max
  unsure (1)..(440): unsure at all n locations
tcacatangagctacatcatgtggtatcaagagcatcttcatctatgtgatattcttctgcttcctctatctttctgttcagacaatacactttaattccttgttcttcatcttattctacatgtatatcctccattgtcttgtggtttggtgctgtttaaagtagattgaaaaaaataaaccgattaaatcttagatctacacttgttcttgcatttctatggctcaaattctatagataaactcttgaatcatgtttttgtgttgattttaggttctatcatttttcagtcataatcttcttgtgctgaacctttagatctacaatttcttccaaaatattgattagaaaacaaacacacaaatctaagtgtaaatcacttaattcatgctgtcttagagtcatgtctaatcataataattcgcacattatgttctaa

SEQ ID NO: 166211 - DNA, 363 bp, Glycine max
  unsure (1)..(363): unsure at all n locations
agctnggagttaggagctctctctctcttattttagatccactcctnccccttatttgcttgcagatgccattgggggtaactctgctgctgcggccttagttctttttcattcttatgtgccaaaaaaagagtctctaacttacattacttccattgattcatagttttgtttggccctcttttccttaacttttttaaactctaatgtgacttgttggataatatatggagtagagtttggatttagccttgtgtcatctaaagagtgtgttattgcggcgttcaatatgcacgttccacttcgacgcttccattctcacgacagtaacgtaaaagtaacaatctcgtaggttaaaaatat

SEQ ID NO: 166212 - DNA, 425 bp, Glycine max
  unsure (1)..(425): unsure at all n locations
tgcataaagcttcgncaatggcttccttcttagtcttctgtacgcataacatatctactcgctcttttttcaccaaatttcatattgaggcccattttagacccctccccaagcctcttacattgtaggtttcaatcttcatgagtcacctacattgcttcccttcccctgatttatgcccttgtccctttcttccatgttgatcagttttcctataattgttccatcctgtttgctgaaattgactcctatgttttttgccatttccaaggtatttactgcctcttttaataattcatagcttctggatgttgaagctggaattgctgatgttgtggcctttctatccttggagtttccttcccaaatgacaactttcttcagcccactaccctgtttctgttatgggaagctggctgggtgat

SEQ ID NO: 166213 - DNA, 442 bp, Glycine max
  unsure (1)..(442): unsure at all n locations
agctgggttacctccttcttcactatattaagaatcaccgggttgagtcttctctgtggttgtcttactagtttagccccatcctctaaatttatccgatgcatacatgtggatgggctaataccaagaatgtttgccagggtccagcctatagccttcttatgctccttaagaactgataacagcttctcctcttgctcatcagcaagggaggcagatataattactggaaaacttttgctatcatccaagtaagcatattttaaatttgatggcagaggcttcaattctggtgtaggcggctggataatggtagaaagagatgatttctcatcctgtacctcataaagaaagtcagaggtatgtgtacttcctgaaacatggttagttctatctgactctataaaatcaatctcaagaggtanaacatcaccagacatgt

SEQ ID NO: 166214 - DNA, 331 bp, Glycine max
  unsure (1)..(331): unsure at all n locations
tcagcttgctgatttcattctcnccttttttttctaatttttattcttctgacatcgtcaaaatcttcatgatttacagcatttctatggctcaaacttcttgttcttggtcttcaaccatgaattgggttgagcttacgttaccttgagttctgtcttgctatttttgtggctgaaacctaaccataaaattcttacaaaaacatcacagtggaagaaaacctcaaaaatctagagggacttgttcacctattgtagatttttcatagaagtcatgtcttgtcatgaaacttgtcacataagatttcttatgctgtgctacaatttattt

SEQ ID NO: 166215 - DNA, 441 bp, Glycine max
agcttcatgatgatgaatcttgtattttttatgatgacaaaaaacccaaaataatgatttcaagattgagtcaacaagttcaagataaagattaatttcaagattcaagaaaagacatcaagaagaatcaagattcaagagaagatgcattcaagattcaagagaagaaatcaagaacaagtcaagacttcacaagggaagtattgaaaaggttttttcaaaaaccaaacatagcacagtttatttttacctggtaactgatgcaggagacgttcaaactatggaaaatgtgtgcctgaaattctattttttttttggattcttcaacgtcctaaaaatggaaaaagtgtgtcacgaatatcattaatgtgttggacataatttctaaaaaaaatgtagaacatgtgtacttaagcatagttgcaaaagtccaaatcatag

SEQ ID NO: 166216 - DNA, 380 bp, Glycine max
  unsure (1)..(380): unsure at all n locations
agcttcaacattcaagtttgagcgtnttgtaatattacgggactcaatcagacatccgagtaaaaattcattgtcgtttggattggctcagagattcaacattcaatttcgagcgtctcaatatattacgggactcattcaaacttccgagtaaaaagttattgtcgtttgaattagcttagagcttcaacaatcaatttcgagcgtctcgttatatcacgggactcaatcagacatccgagtaaaaagttattgtcgtttgaattggctcagagcttcaacattcaatctcgagcgtctcgatatatgacaggactcaatcacacatccgagtaaaaagttattgtcggttgaatctgctcagaggttcaacattcaat

SEQ ID NO: 166217 - DNA, 449 bp, Glycine max
  unsure (1)..(449): unsure at all n locations
ttgagccaattcaaacgacaataactctntactcggatgtttgatatagtctcgtgatataacgagacgctcgaaattgaatgttgaagctctgagctaattcaaacgacaataactttttactcggatgtctgattgagtcccgtcatatatcgagacgctcgaaattgaatgttgaagctctgagccaattcaaacgacaataactttttactcggatgtctgattgagtcccgtcatatatcgagacgctcgaaattgaatgttgaatatctgagccaattcaaacgacaataactttntactcggatgtctgattgagtccccgaatatatcgagacgctcaacattgaatgttgaagctctgagccaattcaaacgacaataactctttactccgatgtctgattgagccctgtatatatcgagacgctcgaaattgaatgttg

SEQ ID NO: 166218 - DNA, 399 bp, Glycine max
  unsure (1)..(399): unsure at all n locations
cagcatgcagctgnngtttaatttgagcatttttatttttctggacccaancggacatccgagcgatgattattgtcgcttgaattccctaagagcctctgttctgaatttcgagcgccttgatatactttaggacttaatcgaacatcggagtgaaaagttataatggtttgaatatccaacgagctttcgtttcaattacgagcgcctcgatatattatgggacctaacccgacatctaaccaaaaaaatatcgcctttcgaatctgctaccagctttcgttttcaatgacgagcgtttagatattctactcgacacaatcatccactccgagtacaaattatccgctctttaattatctaccaacctcttgtcttaatttcaaccctccttatcta

SEQ ID NO: 166219 - DNA, 445 bp, Glycine max
  unsure (1)..(445): unsure at all n locations
agctctgagggtgcgtagcccaccatctttttatttagagtatcgataatgtgtctaccatcacgattatcgtctccctttccattattgggggtaccacctgcgccgccagatccctccaccttttgggcgtgttctttgaaagatccgtccccctttttgcacatgttctgtagttgcatcctatccggaaccatatcaaaattgtactgatactgcctaacaaaggcaaccattangtccttccaagaatggactcgggaaggttccaagttagtgtaccaggtaacagctaccccagtaagactntcttggaaggaatgtatcagcaattcctcatcttttgcgtattcccccatcttctgacaatacatctntagatggttcttgagacaagtagccccctcgtacttgtcaaagtccagcaccttgaacttgggaatga

SEQ ID NO: 166220 - DNA, 460 bp, Glycine max
gtggatgcaagatgtaggtgatcatgtcctattatggaactgaatatacctctgaaaaatgtaacaagttttgtgtagatgcaggcattgaacatcaattgacagcaccatacactccacaacagaatggtgttgtcgagaggaaaaaccaaacaattatggagatgacaaggtgcttacttcatgacaaagggctgccaaaggaattttgggcagaggctacacacacaacaatttttttgctgaataggttgccaacaaaagcgttgcagaaaaagactccatttgaagcatggcacaactacaaaccaaagctaacaaatctgaagatatttggttgcctatgtttctcttacatacctcaagtaaagagagacaaacttgacaagaaagcagaaccctggaattttgaggttatagctcaacttcaaggcctacaaaatctacctaccacaaagca

SEQ ID NO: 166221 - DNA, 374 bp, Glycine max
gagatgtcacatatgtggaggaacacataagtcaggctcatgcatggaccaagacgacgcattcaatgaagctaactacatgggtagtcatactcatcaaggattccatcaaagaggaccaccaagattctatcagaacgataatcttttacatgaccacgattggagatattatccaaataataacctcaaccaagggggttcactctatcagcatcctatacatgggccgagtcatcaagagaagcccactaatatagaagaaatgtcaccttgaatgcatttgatccgcaagctaatgacgcttaagaagtgctactgggaggcacacccagatttctcacccatctttctttacgtaatcgcttatgtgt

SEQ ID NO: 166222 - DNA, 443 bp, Glycine max
  unsure (1)..(443): unsure at all n locations
agcttcatgatgaatcaagactgattctttgtgttttgatgataacaaagatgatgacaaaaagctcaaaagtcaagaacacttcatgataacaaagatgatgatatcaagaatcaaagaatgagttcaagattgaatcaagtacacttcaaggatcaagaggaaagttgaattcaagaatcaagaatcaagtttcaagattcaagttccaagaatcaagatcaagattcaagactcaagattcaagaatcaagaaaagactcaatcatgataagtattaaatttttttttcaaaaattgagtagtacatgaatttttctcacaaccttctaccaaagatnttttactctctggtaatcgattaccagtagcaaaatggttttcaaaaaactttcagactgaagttacaatgttccaattaatttcaaaatgttggattcaat

SEQ ID NO: 166223 - DNA, 469 bp, Glycine max
  unsure (1)..(469): unsure at all n locations
tgttatctattataccaaaattggtagctcttctttgttttttccgcctttccttttgatcttctggactaatgtcattctgtatgtattctaagattgacgtcatctagttttcttgcctttctatcatcatgaagaatcttggggtatgtatcatttgacatataacactttttatttctttgtgctcttcaatattagatacctttgacaaaagtcatctcttgcattttcttctcttggaatgtaggtgaactccatattttttaaatttttctttgattaccccaattttttgatgtatttttgcaagattggttctttgacttggtattctccattcaattggctgagcaacaagttacgttcgttggacacttttagcacttgaacctctatgttagttactatttctagacctcgtaggcacacctcacacttnttnntggtgttgtgagtangaatgcta

SEQ ID NO: 166224 - DNA, 429 bp, Glycine max
  unsure (1)..(429): unsure at all n locations
gcaagctngnagaagggctagacatgatacatgtcttgtgttggntnggntcaaggataaaagggatgccccacattatttccatgacacaaatgcaaaaatgatgatttggaaactttatgcaaaactggtcatgcatgcacctatgtggacgctcaagtgtcaaatttttatggtcatgtgatgctagggctcaggattcatttcctctattttaaatcaacccaatgtttccaaaatatgttcttttatcaatttgtgcattcatcctagtccatttcgggcgtccggggaaatntcacagcattcacccttcaggtgtagacacatttttcaaaaattggttatgatcaatgaatcttttttaaagaaaaggtggaaatcatctcttttcacaagcatgtcggtttttaactaaacaacttattt

SEQ ID NO: 166225 - DNA, 454 bp, Glycine max
  unsure (1)..(454): unsure at all n locations
tcacaagcaagctaccatcaagtggtaatcagagcactttattcttaagtaggtgctccttanaccaccattaattttttttctttaccttctctttcattcttgtttcttcatttttctccgtgtatctcctcacatctcttgtgctaaatgttgttaaaatgattctttaaagtttcaaccgattaaacttgctatagaagctagatttgattctctatggttcaaatttatttttcttgttcttgttcttgaaccatgaattgtgttgaatttacgttcctttgagttttttcttgttattttttgtggctgaaacctacaccataaaattcttacaaaaatattaaagtataagaaaacctcaaaaatcttgagtgacttgntcacctattgtagtcttgtcatataagtcatgtctagtcatgaaactcgtcacataagaattcatatg

SEQ ID NO: 166226 - DNA, 437 bp, Glycine max
agcttatcaccatttgcaccttttgtattttctaattcgtcactgagaggtgacagagacttgaataatccaagtaactaagcaagtgtgtcgtaatctccagaaccagttcctccatcatggacgatcccattcatcaacaccaccagccctggagtgggactgggcccaagcattttagtgcggccgccgttgaggtagggcacgacggcggcaccagaattggaggtgcaatcgcagtggtgaagggagaaaaaggatcttaggaaagagaaaagtgtgaaaaggaaacaaagcttatggtttcgagagagagaaagagggtactgagaagtgagcttgcgagggtcttatgtaaaaacccgaacatcgcgttgttgtttgagctttcacaacatcgatctttaaaaagcaatgtaaaatcattttgtaacatc

SEQ ID NO: 166227 - DNA, 428 bp, Glycine max
  unsure (1)..(428): unsure at all n locations
agcnnccttttagacagcgatctttcttttttcttggccgacgccgatcgccattgtgtttaaccaatatcggcgaataatattgtttctgccgaggtgggctaatgttttcctggccgaataaatgggaacatgccattttcggccgacacgaaacatccgttgagctcgcacgaaaatacctagccgacctacattgtaagttttttatgcaacaccgaaaaaaacaaaacttcccctgccgtaagaaaaaacattatcgggcagcgagcgtttttctaaaaaaaaaattgggcaatcgcggctgaaaaatatacgcggggccatttcacgaccgatgtcggctattgagtttctattcatccctgatgaaatttgatgacgcaatcacgagatgttgatcggactatccgtgatgctttttttaa

SEQ ID NO: 166228 - DNA, 419 bp, Glycine max
ctctttttctattatctcatttaaccaacgccgcatgtgtccatttgaccggagccaacacggcccactctccttctcgattgtgacccatactcagtcacacaagcgaggaaaatctgacctttgaaacgctaaaatcctgcctcggtctgcgtgccgtatctctggatccagttcctcgtgtttctctacgtccgttaaggccaattttccaaagtaccccatatatatatcagaacgctcagaatacaaccccaagcgtggttcacaggtcggcttcgtctaattctcctacacacgccacaccgatcattttcacactaattaattcggaattaagtcactaacctccaggtatggatttctcttcttactagttcacccgcatatttgtcccactttactactctacaagacat

SEQ ID NO: 166229 - DNA, 386 bp, Glycine max
  unsure (1)..(386): unsure at all n locations
agcttatgaccatattagattctgtagttcttccgnnctncatttcttaacatctctatatgtgatccgcctgaatcggacatccgagttaaaagttatgaccttttgaatttctcaagagcttccgttgttcaatttcaagcgcctcgatatattataagccagaattggacctcagtgtgaaaagttatgaccatttgaatttttcgagagcttccgttgttcattttcgagcgtctctatatgcgatgcaccttaatcggacatccgtttgataagttctgaccatttgaatttctcgagagccttctgggttcaagttcgagcatcggaacatattacgtgcccgatctgacctcgtgtgaaagtcatgaccactttgattt

SEQ ID NO: 166230 - DNA, 283 bp, Glycine max
aaagaacgtggcgttgaactcgagagaaaaacaagagcaagcctttgctccgcttaaagataagcttactaacggacctgttctatctcttcccaacttacataaaacatttcagctagaatgtgaagcctctggaccgggagctggagctgtttcgttgcaaggcgggcactctaatgctcatgtaaccgaaaaacttcatggtgcgacccttaactaccccacctatgataaagagctgtatgacttaataagagcactcgcaacctgcgaacattacctt

SEQ ID NO: 166231 - DNA, 424 bp, Glycine max
agcttcttagtttcagatgatgcatagttgttttagctacctcatgcactcctctaatgactatggcatcatttttggcactaaactgctgggagttggaggccatcttctcaattaaatttctggcttaacaggagtcatgtctccaagggctccaccactggcagcatctatcatacttctctccatattactgagtccttcataaaaatattggagaagaagctgttctgaaatctgatggtgggggcaactggcacatagtttcttaaatctctcccagtactcatacaggctctctccactgagttgtctaatacctgagatatcctctctgatggctgcggccctagaagaagggaaaaatatttctaaaatactctcttaatgtcatccaccccgtgatggaccttgaacaaggaat

SEQ ID NO: 166232 - DNA, 264 bp, Glycine max
atcggatatgcggcatacaagctttgtggctgatctaagggtggcctttgtggatgattacgtgatctccgctgataagatggtgggtaacgaaaacggatgacctcgcctcaacatctatatagtagagctcgagggacattccgccatgtaagaaccacagccaccacatgggttcctcaatccgttgtattctctgcctttgccctaagcgtactatacatctaagcacgaccataaaacttgtctcttctcacacccact

SEQ ID NO: 166233 - DNA, 458 bp, Glycine max
  unsure (1)..(458): unsure at all n locations
ttagtgacctgcggcatgcaagctnngcataagctattcatatattgtttcttttataactngnaatacgtatgttaaaaacatcttcatagctttttttttcaatcccaaataaattgactcgttcaatgttgtcctattataaagagtttgacaatgattttcaccataataattcaaatattgattttcattgcaacaatacactacacataaacatctcatccccttacatgtcgggttaaagtgatggaactctcacgccttatcactattctagctggatctcaccatgtttattgtactttcatgtcaaaaacaaatatactgtgacatttgactcatcataaacaaagataattaaatctacacctctttaactagtgttatagataatngttttctcctccttggttggataataattttgccttcacatgattaaaagtgggtctttt

SEQ ID NO: 166234 - DNA, 416 bp, Glycine max
gccttcttggtttcctcttcctcctctggaagtataattatgaggaaaaccattatttctacaacacttgtcaacaatgtgattgtctttaccacactaggtgcacaaatcttttgagttagatgaattagtgctgaccacattaatcagacttgtgtttctcattacatcattattggtaagttgtctttcttgctgagcaacatatgagaaaaccttagctatgctaggcaatggatccatcatcaatacattagatctaatagtgttaaattgataatttaggcttctaagaaattgcataaccccgatcttgtttcttcctctccataatactagtaagagcatcatacatacactctggatcaaatgaacacactggatcatgtttgtaacttgtctaatagatgtcatgt

SEQ ID NO: 166235 - DNA, 385 bp, Glycine max
agcttccaaatcagatctatttcttagctcataaatcaaatcaaacctagataagataagataagacaaaatctagatgaaacgatatctagatgaaacaacatctagataagataagatcagatctagatgaaataatatcttgatgagataaaatctagataagataagatctggtagaacaaaatactctgctctcttcaagtccaagcccaattctggattcaagcccaattgcttataattctcctaaaattaaattaaaaacacaaaattagtccaatacgcctaaatgataaaactgcataattaatttgacaattaaggctaactcagaattaaaatggtgacacaaaaacgttaagacatacgagacaatgatgac

SEQ ID NO: 166236 - DNA, 448 bp, Glycine max
tacgcttcggattgttgattgcaccattttccacaaatagtacttggttccacttgtgttgagtggtcttattagcatttcgctagttgaaataaacgcccaaacttgtgttaaagtggctgtcaattctcttgggatttgcaccacctatgagcttgttttaatttaaaaaaaattaaggtttaataaggtgaaaactctacgattgtggctgcctcttggctgaccaacgagttgcacaattttccatatgtttatgtgtcttaatcctagtcttaattaggcataatgacaccatccatcgtcctatcaattctagctctaactaaggtcaatgacaccataacttgtgtattggtgatcattcacttatgtaccaacttgatgcattctatttatcgctgcacatttctaatagaaataacctgaatttagttttatcccctct

SEQ ID NO: 166237 - DNA, 424 bp, Glycine max
agcttgaactcttgcaccttctttaagttcaaccatgccttctcccaaactgtggcttcataaaccttcttttgcccaccatcttttgcctccaaagtgatggtgtacaaggtaccagaaaccacttgctgttttgcacttactaccttttcaaactccaaaagggcattctgcataaccattaacaattcaataaaaataaaatagaagtcatatttaaattcccttaccacaaaatgaaaagataatagaaacccactagtgtttctataactacaaagaataaaaaattaacttcattattgaaattggcgccaccaacctatttattccttgacataatgaacatgcaaatttgtcgcaacaatcaattgaattttttggctaacaaaacattatgggaggaggaatgggccagtacaca

SEQ ID NO: 166238 - DNA, 188 bp, Glycine max
gctagacagactgctggtttataaacctctttttatataggctgcatacccagcagaaaattgtatatttctggagcgaattcaatacttatgcaatgaccgagattgtggagagaaaccataaacaccatcgcttatatttttttgtaggctggctaacatttcatagcagacctgctaattaccac

SEQ ID NO: 166239 - DNA, 276 bp, Glycine max
tgaactacggatgacgaacccacgcacataccgaaaaaaacattgctactctgaaggtcgagtcactaaatctcttcatacaaatattatcacattgatataatgcatttttatacatgtactaacatttaaaacatcccaaatgaccatcatgttttacgcatttataaaattcccgacaactatacaataatactaattataatttctatgctaaaatatgaaatttattttttaaaaccccttcttattaattttcaccttaacaacctaaat

SEQ ID NO: 166240 - DNA, 433 bp, Glycine max
  unsure (1)..(433): unsure at all n locations
gctatgttgtcattgcctcatacttattggtcatagaccattacttttgaaattggaggtgaataggggtcaaagtcagaaaaatcatccttttatattcatggatcactcattctggcttccaaagattntttagagcttattattgttggaaaaataaaataaaaaatgaaggaaaaataaatatgaagaagatgcacagtcttgaattaaataacaaaataacagtaacaaattaaatttaattgacagcacatgaataatgcattatcacatacaataagcacaagaaaaaaaattaagagaagaaagatatagcctgggttgaagcgcgtaaacgctatccttagagagaaaacgcccccagcacgggtaagaaattctgattgcgctcctcttccaagatacgacaancccgtggttccgatcgtgt

SEQ ID NO: 166241 - DNA, 463 bp, Glycine max
aactacgcttatgtggcagacgagttgtttgaccaagtcttattattaaaatggtactaagtatatttttgaataatcctcgatgatgtttatgatatacacgcctcatttgaagagttgaagccgctcacaatggcatttgagaggtttgtttattaatatttagagccttccaacaagctaaagattataatatatatgtataaataatgtaggcttgtttatataggtttctggttatttagaagaattaatttcaatgtgtcatatgcacagatgggatgacaaagaacttgaagaacttccagagtacatgaaaatttgcgtccatgcacttaaagatgtcacaaattgcttatgaacttggtagagaaaataactttcactcggtgttaccttatctaaataaagcggtactattactaattattataaccagcgatctttttctttcttttctttt

SEQ ID NO: 166242 - DNA, 447 bp, Glycine max
  unsure (1)..(447): unsure at all n locations
agctntgcatgattcctgatgggaaaactttaacctcatttacgttaatgcgttatgggctgttgcttgtcatcagtgctatctcgaccactcctttttcgacataaaggatgaagctctataggatttctgacaggtgaataattacttcattcatggattgaaatcttcaattcatagtaattttttttttgtttttggccacttcgttaatgcatttgaggaccgaatcgagacccaaaagttgtcttaatgacttcattgacatgaaaaatacgaaaatgaaacattattttaactaaaacagccaatacaaataacaatctaagtgccaaaagttatcttcatagattgaattttattgttttcatgtaattcatagcaccggttgagatcacatcaataatataaatgattcacattgagtcttaattaaatatgtcttat

SEQ ID NO: 166243 - DNA, 325 bp, Glycine max
  unsure (1)..(325): unsure at all n locations
ccagctataaccatgttatcttctaaagatccagccttttaacctcctatggaagngatgctaaagctataggccattatggatagactgcggccttcttggttgaccacgaccctcatgaattgaccatgattgtggtgagtttaccacaaccctcatcattgaagctattttgtggggttgttataattttatcgtggtcatgctacttaccacggtcatggtaaatgcgccatgaccgtgatcaagtgcagagtctcgaaatcttcatanaatcatacaacttccaactctttcactcaattgactgattgcacttctacaa

SEQ ID NO: 166244 - DNA, 464 bp, Glycine max
  unsure (1)..(464): unsure at all n locations
agtcacctgacgctgcaacttatctgatatattagcaaagatctcctctacctcagcagcaaaatcaaccacagcagaacaattatgacctctccagcaacagatacaaccctggatggaggaatcaccctaacctcagatggtccagccctcaggaacaacaacaacagcctgctccttccttacaaaatgctgctggcccaagcagaccatacattcctccaccaatccaacaatagcaacaaccccagaaacagccaacagttgaggcccctccacaaccttccctcgaagagcttgtgaggcaaatgactatgcaaaacatgcagtttcaacaagagaccagagcctncattcagagcttaaccaatcagatgggacaattggctacccaattgaatcaacaacagtcccagatttctgacaagctgccttctcaagctgtccaaaatcccaaaaatgtc

SEQ ID NO: 166245 - DNA, 467 bp, Glycine max
ttgagaacatggttgcagccattggtcaatatgggccttatttgcccattcctagctatcatgacatcagagttccactcttgaagaagaaagttgaatatactgaaaatttgatgaaaggccatagggagcaatgggtcaagtatggttgtactattatgtccgatgcatggactgatcggaaacaaagatgcatcattaattttttgattaactctcaagctggtaccatgtttttgaagtctgttgatggctctgattttgtaaagacaggtgaaaagctttttgagttgcttgatgccattgtggaggaagttggagaagagaatgttgttcaagttgtaaccgataatgggagcaactatgttttagcgggtaagttgttggaggagaaaaggaaacatatctattggactccttgtgcagctcattgtattgatctgatgcttgaagatattgggaagcat

SEQ ID NO: 166246 - DNA, 428 bp, Glycine max
  unsure (1)..(428): unsure at all n locations
gcaagctttagctgtttaccatatgagatattgttttgtcttgtcgnatatcatcctaactacatgccatgtcaagatatcactaatctgcttaatgtccacgatttctgttaagtttgggctacgtgaggtgactctgataccattattatgatgtactgttcatggacggcaactatgaattacttaaataagagttagttttaaaacactacaacttttttttaccataaatcattcaatgaaatgataatgctacttacatatatttaatcatttataaataatttttttttattttaaaatgtatattataactttaccactttctctcaaataaaacttttccactttatataagtatgtaatatggtgttaattgatatgtatcactaacccaaatctgcacgctttctatgtactacgtc

SEQ ID NO: 166247 - DNA, 453 bp, Glycine max
  unsure (1)..(453): unsure at all n locations
tgctcctgcatgtgaacagttgttctgaatggatcctanatcaaattcatccaaaccatcaaagaacccgtcaggtgacccatccaaaccaccctcactttccttcaccgccactgccactggggcctcctcttcaagcatcggcgaatgcccctcgaacagcgccacgtgtcccaacagcttgtccttcctcgaaaacgtagtcccgcatgagcacttccacgtggcctctccccgacactgctcgacgtggctcctcaagtccgacagcaccgcgaagctcttcttccgacaccgctggcacgacagcgttttgggacagtggctcctcttgaagtggttcctcagacagaacaccgacttcaacggcctgaacttcttgtgccgcttgtacggttgcacccctcaaggggcacgaaaaccgcgccgccttgaggcgcgcttcccaccccc

SEQ ID NO: 166248 - DNA, 430 bp, Glycine max
agcttatgcaacagttatgctaattcttatgcctatatgcaatgtggtaccatgtcagtgaaaaacctcgtcgagcgcctaggagtacatgacaagacaaaccacacactagcaagtcaagtcactctcactatgttttgcgagaatattccaaccatatgggatcaacataggcttaaaggagcactcaagtcgggtgacccccaaggcctacactctgaagagtccgtcagggcctctccctcctgattcaggtccaacccagaaaacattttagcatgcagactctatctatgaactatacaagacacatgactcatcaatcgttctcacatatttttaactcgctgccctttaaggggcttgacattaactcgtcgcccttaagggtctagcattaactcgtcgccttaaaggacttaacatactc

SEQ ID NO: 166249 - DNA, 455 bp, Glycine max
  unsure (1)..(455): unsure at all n locations
ctatccaaatactaagcttnatatgtcaactcatgagtcaagaganttcattctttaattaacatgtagctctttcttctttattgttactaatcattccatttcgcccttgactaattttctattaaggggtcgaagctggtgaagaaaactgaagatttgtacaaaacttattccctcttcaagggcatgtacgtaccatataccatgtatatttaatcaatagcttcataaaattcatctatacactaatgtatactttcttttttagtgaatttggtaacagttctttgaagcacatactaatattaactctgaaatgtatcttaaacagcttcgacgtcaagaatgctgaaagtttaagaatagtaacaaaggggttgctaatgtggatggtgaaattgactttgatccagagaacattaattggaaagactacatgatgaatgttcata

SEQ ID NO: 166250 - DNA, 443 bp, Glycine max
  unsure (1)..(443): unsure at all n locations
agctttgaaaagggttgctattcattttttcgcttagccaatctgttggcttagcgagtgtccgctaagcgcaacactcatgggctaagcacgaggaagactctggaagaagatgagttgtacaggtttgctaagtgcagcgcttcagtccatccgctaagcgagaaaggcacgcgctaagccaaaattcactaatgtgcgctaagcggtccataattgcgctaagcgcacgagcacaaacaaggccacctatttaagcctgaaatcagattttagagggggagtttggactgggattcaaagctttgcatgactagagattctagagagagaaaggtccaagttctagagagttttgagagattttgctgtgtgaagatntgcagagactagagcttgaagcaggagccggtttgagagcttgagatgagnttgtgagtgat

SEQ ID NO: 166251 - DNA, 257 bp, Glycine max
  unsure (1)..(257): unsure at all n locations
cgggatgaattcaaatcttcatattataggacaagaacatatttaggcttgatttagcttccgnggccttactaaggtattgggtaagaagaatctttaatttaattttaaagaactttactctaaaattttctgttcaaaataattaaagcaattcatgtgtcccgagttaaggaatacatatgttctttatttttaaaatacacatgttccttggattgagatatacacagttcttttgtttaaactaactatcc

SEQ ID NO: 166252 - DNA, 395 bp, Glycine max
agcttcagcctgattgctaagtgtctgttttattgtggctaagcgtgacctattgtcgccaagcgtaattccttacggccataattaaggtccatgatgctaagcaccaggcatggcagctaagcgagattcattgcggcaatatgagcgctaagcgagtccctctcagctaagcgcatgttcctctgtacttaagatgcattattttagctaagctggccagagcctggcttagcgagagttgcagcttttctaatctgcagacctcgctaagcggaagaatcaactcgctaagctaagccttctctgtgctaaaaaaaaaacattttgaatatgaaatgtccgaaaagcgagcgaattctctaagcaacatgttttgaaccaccaaacgtctc

SEQ ID NO: 166253 - DNA, 356 bp, Glycine max
gcaattcctgtctaccctaagaccgctgactctactaaacatttgattagatgtcttaaggagcgaagagacatctatggatgcactatcatgccccctgcatggactgatcattacgggcatgcagtgagtaatccagtgaaacctctcaggctggtaccatgttgatagaaacatgtagacggctctgattcttgcaagacaggtgacaatctttctgacttgctctgatcccattgtggaagaagccggagaatacaatgttgttcaacttgcaacccataatgggagcgcctatgttttagctggtaagctgtcttaggagaacaggaaacatatttataggactccttgcg

SEQ ID NO: 166254 - DNA, 346 bp, Glycine max
  unsure (1)..(346): unsure at all n locations
agctncctcaactgatttctggttatgttctattttagnnccaacggtttctcctaaaacttgtaaacatttgttggtataatctgcctgtctcattaggctcttaatgtctttagaggttacttcctcattaacatcttttgttttgaatggaacggccatgacatgcttattgttactgtctttgacattcggtagttgatattgtgttgcaggaggtaattccgattgaattaactcaccgtccttcatttgccagtttgttatgacatttgttgttgggtcacctatgatatcttatctccaaaggtaatctatatcctttctgatggtataagcatgaaac

SEQ ID NO: 166255 - DNA, 446 bp, Glycine max
ttcttgagaaaacttccttgagaagcttctttgagattacttccttgagaagctagagcttagctacacacacccctctcataactaagctcacctccttgagaaacttccttaagaagattcctaaagaagctagagcttagctacacatacctctctaatagctaagctcacctccttgagatgagaagctagagcttagctatacacaccctataatagctaagctcacccccatgacaaaaaacatgaaaatacaaaaaaaaaagtccttactacaaagactactcaaaatgccccgaaatacaaggctaaaaccctatactactagaatgggcaaaatacaaggcccagatgaaggaaaaacctattctaatatttacaaagataagcgggctcatacttagcccatgggctcgaaatctaccctaggctcatgagaacct

SEQ ID NO: 166256 - DNA, 373 bp, Glycine max
agcttaacagatagctgatccatattgtttttagatcaaagaatctcctcctgtcctcatagagcagaagtttctaaccctttagaccaaaccttataataattgagctcttctatcattacatgaacttgatcctcggccctctttaaggaggcatcttctcctcaattaactctatagggatgacgttacgcaacgatattattatattcagaacgctcttttcacctaaattaacatgagtgagatagcgcttgacccttatcaacatcaagatagttgaatccaactcggcaaggctactcttctgaatcatatcccagtattgcgaccaaataacatgatcaatctctctcgccaaagacatgcacga

SEQ ID NO: 166257 - DNA, 369 bp, Glycine max
  unsure (1)..(369): unsure at all n locations
ttgcaccnggatgctgagtgtgaagtttgtcttcctactcatttactggcgccgcagactgggtacgcgcccatcatacttccactattgccaccggatcggggaaaaatgtgcatgcgtggggaaccagacccacatgtaattctggaaactctctctgcgatcacactgttgagcattccaaagcttttgatatcaaagtaccacatcgccttccctactgtattgtgtggcattatgtggagtcaccgatccaatatagaaaactaccctgactctgagatgaacagagaatactctctatccctgcattacagactaggtgaagggacacactgcccagacattgtctcttcatctgtatcgaca

SEQ ID NO: 166258 - DNA, 426 bp, Glycine max
  unsure (1)..(426): unsure at all n locations
agctntgcttctacacccatcattttattatcaagtccaagattctccactaattgtgcttaggtgtcatgtggcatgtaaagcatgaaggacatgcacaaagtgactatatgatgtggcaatggggtgtagcaagcaaatgctcatctccctctctaaaatttaattggattgggcttctcccaatttaattaaatttctctcccaacaaacacatcagatagtgcacttaatgcatgtgaaattacaaaactacccctaatacaaaaactagtctaggtgccctaaaatacaagggctgaaaaatcctacatttgtagggtaccctacctacattatggagccctaattacaaggaccaaaaataatggaaatctaatctaatatgtacaaagatagtggaccatgggctcaaaaatctatcct

SEQ ID NO: 166259 - DNA, 448 bp, Glycine max
tattcacgggacagtcgatgatcgtatataactagcatgagttggctcacaacaggccaatcatatctatggagcactttctggaaaaagtggcttggcctgaagctcagctccctctggaaagatcccatgaggttgttcctcccacgcctgtagcatctaggactgttgttcctcccgggcctgtaccaactacgactattattcctcctgggcctgtaccagctacgactgagccaacatcagctgagccacaacctcctttagtagatccacctgcttttctagaacttgagatattgtctcctccaccactacctatgataatcatccccgatgacttagctgatgaagctgctgctcctcctgattcacaccgtcttgcaacatagacgatggttttgacttttctgacttgatggactgctgatgaaactgtgactcatac

SEQ ID NO: 166260 - DNA, 451 bp, Glycine max
  unsure (1)..(451): unsure at all n locations
agctntngaggatgagataagcactntcttaagctntgtaagaaaaaaattatgctgagaaggaagctaacaagtggtttctcattggtgattacttctacaaaaagctcactaaatgggagcctcatgtcacaacctacctcatgacgggacgacaacagcaaaatagataagccaaagtgttcgtctcctagggagaaaacgcgtggagtcgccaccaatgtttattcgaggaaaatgttagaaaaacgaaaaagaggtctgcaaatttcgaaaagaagggttcatgagttttttacgcatgaggaaggtattagcacccacgcacccgtcacaagggacggcagcctttaatcaagtgtgcacaacgtgacttcaaaattatttattcttcccctttatatttctttaattttttgggctcgacaagggggtgcccttgctcctacat

SEQ ID NO: 166261 - DNA, 444 bp, Glycine max
gcaagcttaacttgtagagagtggaacacacctcctattgtatcccaaaaggtatgtgtgcggttctgcaagttaaggaggttgaagtataacttctcaatggttcttttgaaaaattgcatttgtaggtgcaagaaagaaaaggactacctatataagcatgaagtttagccgcctcaagaagctgggactcggctctgatatgcttatgaaggatagggacacaggctagtaaattagtgtcgagcaagagtaatgttataaactattgtgcaaattatcttcatgtattcattatgaatagaaagggttcaatccttagtgacaccctgatattcgaatatttgaaacgtgtaatttgctaagatgaaattcaatcgttacgatatttcatctatccaggagttcgctgatgttatgacttccgtgatttgatcggaatta

SEQ ID NO: 166262 - DNA, 385 bp, Glycine max
agcttgaagagaggcttacaggtagcagttatctatgatatgaaccttgctatataattcaggtatcccaagacaacttagactcgtttctcggtgtgtggctcaggtatttcaaagatggacttcaccttgtcggggtccacctctatccctttctagcttatgataaagccgagcaattttcctgacttgaccccaaaagtatacttggctggattcatcttagccgatacttacgtagcctttcgaacaacttccgcaagttgatgagatgttctgatggaagctttcttgtggagcttctatgaagggtggatctttgagctctaatgagatccctcaatggtgatttgccaccatagagatgcagcgaaagacaaaggag

SEQ ID NO: 166263 - DNA, 375 bp, Glycine max
tgcctcacagaggtccacgaaggacaaggcggccgaatgaactagtttctctcctgagtacgacagtcaccgctttaggagcgctgtacaccagcagcgcttcgaagccatcaagggatggtcgtttctccgggagcgacgcgtccagctcagggacgacgagtatactgatttctatgacgaaatagggccccggccgtgggcaccactggttactcctatggccaagtttgatccagaaatagtccttgagttttacgccaatgcttggccaacagacgaaggcgtgcgtgacatgagatcctgggttatgggtcagtggatcccgttctatgccgactctatcattcagctcctgggacattcgatggcttt

SEQ ID NO: 166264 - DNA, 445 bp, Glycine max
  unsure (1)..(445): unsure at all n locations
agcttgtggtggaagggcaactggttattgtgtcatgagaagaagatatactagtgagttgtccatcctctacaccctatgtggaagctgcgaanaagtcattggaaacatcttttcaagcgctcgaaattgtgaacaatgcttatgtggaggctcctccggtgcaaccgcgtctatctggtggctccttgatggtggcctgagttatgttgagggatgggtatgaacccagaatgggtttaggttggaatggtgatggcacaacaagcttggtgaggttcgttgaaaaccatggaaggttcggtctaggttacgagcctacacaggccgacaagagaagggtccgcttataaaagatagaaagaagcataacccatctacaagggtggggaccacagatggagagggtccctatctgccacattagcaaaaatcttgtcaacgc

SEQ ID NO: 166265 - DNA, 472 bp, Glycine max
  unsure (1)..(472): unsure at all n locations
tcttatccaaggcactctcttggtggtgaagctccttcttccatgacttattccctagtggatgacgcctnctctcacctcttctcctttatcttctgctgcatcaccatggtggaaaatcaccattgaaggacctcattgaagttcaaagatccagcctccatagaagcttcacaagcaagcttacatcaagtggtaatcagagcacaagagcttcaagtaggtgctccttaaacctccattaattttcagctttagcttctcctccattgttgtttcttcatttttctccatgtatctcctcacatgtcttgtgctaaatgttgttaacatgattctttaaaatttccaccgattaaacttgctatagaagctagatttgattntctatggttcanatttcttgttcttgttcttgttcacctattggagctntttcatagaagtcatgtctagtcatgaaacttgtcac

SEQ ID NO: 166266 - DNA, 450 bp, Glycine max
agcttaaaaccaatatgtaactgtgttatctctttcaaaaataaggaaatcattaatggtccaatgccttaatgttttctcacttttcaaaagaatagaaagattatctaatggtccaatgccttaaatgacctttcattcaataaaaaacatatcttgcaaaaaaggataaaaaaataacttaaccaaaaagctttgttcacaaaagaactacgtaggtctgatttcctcatcacaattgaggaatacgtaggagcaaagggaaacacccttgtcgaccgcaaaaagataaaaacataaaaaggcctaaaaaagacataagaacataaaaagggaaaagaatataaatggaagtcatatcttcacatttgattaaaggctgccgtctcttgtgacggacgtgtggggtgctaatacctctcccgtgcttaaatacaactcccgaacctt

SEQ ID NO: 166267 - DNA, 433 bp, Glycine max
tctccaaaaggcatagctatttccagtttcctgaaaatgtctatgattctcgccagatggtggtccttatctttcttggatggtaccacgggatatcgcacttccatacccttatatgaagctttttctttcctctctactctttctctttcactcctactctattcttcatctttattttctctaactgtttcttttcattttcctacctctatcccgattttttggtcttttatttctttctcttccaccattatttgtttttcccccctctgactcattgcatctgttacctcatttctctttttaacactactgtcctttaaaggaacttgctccttcaaagcaacaacatcctcatgctcaaccgccacaagctttctgcttcttgttacaacaactctacactcttctttgcgattattctccatat

SEQ ID NO: 166268 - DNA, 266 bp, Glycine max
ctacagaagcagacaccttctggaggaagaatttggaaagccacagtggctcttgctgcgatctgtacccacagctttactaaatacacacctgccttgactgagtgatactttgtccggagagttgcgaaactttacgagattcgcaacgaagctcgttttctttctgtgatgatacgaaaccttagagattacgtaaacatcctttgtttacgtacactatctttacagattgcgcactaacagcttcttataatggacggtat

SEQ ID NO: 166269 - DNA, 375 bp, Glycine max
  unsure (1)..(375): unsure at all n locations
tatggatgcnnatctatcatgagatcataatgcccggattcttcaaccgagtgctgagactaatcaagaacattggagttgtagggtcgaactcatcgccatggactatagcaccacaatatcacctgccccatgtatatactgggatcatgaatgacaaaatcatggagaggttattctccactaagccacttgaatagagccgatacctaatgatatgccaataagaactggaatttgaaagattgcttgtacaatgagactcacatataccttcgaggcgaatgccattgtatgctgatgccctgcagacgcacggacaatatgaatacgctctcttctgaagtactgatatgacatgggtgcaaacatcat

SEQ ID NO: 166270 - DNA, 243 bp, Glycine max
agaacctgtgaggaacctaagcaagcgagctcccggcaatcaacagataaaaggaacaaagaccacacagcaaggaggctctggggggctgcccaactgtgaaacttgactgatatgtgaggcatggcctcagcgaatcgattaccaagggtgggtaatcgaatacaaggctcaaaaatgaacaccgggggctaacatggcctctgagaaagactaccaggggatagaatcgatcaccaggct

SEQ ID NO: 166271 - DNA, 389 bp, Glycine max
  unsure (1)..(389): unsure at all n locations
gtttcggaccttaaatctaagcttcatcaagtggtaatacagcacaagagcttcaagtttgtgctccttacacctccattattatttgtttctttaccttctcttccattgatgnttcttcatgttttctccatgtatatcctcacatgtcttgtgctaaatgtggttaacatgattctttagagcttccactgattaaacttgctatagaaggtagatttgattttctatgggtcaaatttcttgctcttgttcttgacccatgaatcgtgttgagtttaggatcctttgaggtatgtcttgttatttntttgtggctgaaacctaaaccataaaattcttaccaaaatattaaagtagaagaaaaccttcaaaatctagagcgactt

SEQ ID NO: 166272 - DNA, 237 bp, Glycine max
cttggacgaatgagaaaactggggcataagaatacgatgagaacgatggagaaacccatgctgcgactgccattcatatacggccaaaatccccacaagctcaacaccatcattactgagcctatatcagccatcctgattacccaccacccacttatctataaaggccatgcctagatcaacaacaaaacccacctaccacacaacgaatgcttaaaaccacctttattacaaacc

SEQ ID NO: 166273 - DNA, 340 bp, Glycine max
  unsure (1)..(340): unsure at all n locations
taaacaaaatanaacgcactctggacacgataagactcgaacggatgaaataaaatccggaccaaataaaatctagatgaaagacaatctggataagataagatctgataaaataaaaatatctattctctctaagtccaagcccaattcccaattcaagcccaattgcttataattctcctaatattaaattaaaaacacaaaattagtcacctacgcccaaatgatcaaaccgcataattaatttgacaagtcacgctaatcaatcattaaaatggtgacaaaacggcgtaagacatacgaaaaaataatgacccatcacttgcccatctcagatttg

SEQ ID NO: 166274 - DNA, 308 bp, Glycine max
  unsure (1)..(308): unsure at all n locations
cgaagcgactaacacttatcttggacatatcgctcgatatccaacaccaaagcctaccatcgttntcttcctctattaagcacaaatgcacaggcttgccacgacatctgaattccatgtatggcaaatctctgtgtgggctctactggaacatggatgctattgcggacagagtgttgaccatccgatatcttctctaggaacgagagtgaaaagatatgtcactaaagaatcccatcaaccttctgatggaacctgctaaggcaccaacttatcgtctctggtctccattcaccctctaacttatg

SEQ ID NO: 166275 - DNA, 226 bp, Glycine max
gacatttgagtgcttacactcttggaggatcatatcaacaacactgggggaatattttatgaaaattctttgaggcccttagtgagagatgatgtcaatacatattatgccgaatgcatcgtctattataaagataagctctaagacttaaacctgaatcgggtaccccttcgggtattccagctctacttggagtggatgatcatggatgttgtgttggcttcaa

SEQ ID NO: 166276 - DNA, 360 bp, Glycine max
agcttgaaggaggaagcctttgtattagattgaactctttgacaaggtcagcacatgaagattatgactgaaaaaatgatagaacctaaaatcaacacaaaaacatgattcaatagtagatctataaaatttgaaccatagaaaagcaagaacaattgtagatctaagatttaatcggtttatttttttgaatctactctaaaaagaaccaaaccacaatacaatggaggatatacatggagaataagatgaataacaatgaattaaagtgaattaaccaaacaaagagatagaggaagcaaaagaacatcacctagatgaagatgctcttgataccacatgatctagcaccattggagc

SEQ ID NO: 166277 - DNA, 453 bp, Glycine max
  unsure (1)..(453): unsure at all n locations
gtgcttctcacagccaactcctgaggtttatgcctcatgagtgccaacctggaataagcacaaaatactccccctattctagaatcactgaggtcttcagaaatgtgttcaaggtatcgtcatcaaatttctctagatgacctttcaccctcacaagcttacgtgatttatcctctgggtcatagaggttagcgtaaaattccttcacagtagcaatgtttatgctgctgtcagcaaaatcagtcaacttctcatcccagtgccttctctcgagttcctccttgaactcgtcaaacttagtgtaataaactaccacattcctttatggtagtagctntctaggcatgacaatatctgcatacctctccaagcctcttgagatgtgaactcggatctgtcatatctagcctgcgtaagagtagaacgagtctctcttttttagatgccatctga

SEQ ID NO: 166278 - DNA, 433 bp, Glycine max
  unsure (1)..(433): unsure at all n locations
agcttaacttgtgangttgatttatccttagtttcactntgcttattagccaattcaattaataaaaatcccaaagaaaagcgtccgattgattttttttgttattntattcagatatattgattattctattattattttgcctcttttggttttaaacgtggttacgacgtgaaagattggttgtaatttattttaacagagattaaacgatattacaactcaaatgatcggtggaaattcattttattattgattaggcgaaaaaatgcttaaataaatggttaaagcacgtcaaaagggggtacggaaaacaaacaaaatgaaaataaaagcacgcgatacaagtggggaccactacgggtacatagactgaattgaaggttcgattttgtgaacttatcgttgaagaccgaagaccaacgaagacgat

SEQ ID NO: 166279 - DNA, 335 bp, Glycine max
  unsure (1)..(335): unsure at all n locations
cttaaagaccccagtaacaattccttcgatccattactaaccggtggatcgactccaaaattttactggaagtctatagtgcacaagcaaacatccagaactcactctgcactgctcttttcacacacagtaaatacatagcatttttctgcacttgtgcaaaatcatgctgcacaatttcacagcaaaaatctgcacaaagtgcagatttcgaaaatcacactctctctcatncaatctttgccaaatcactttctacaagtcccaaatcatgcatcaatcatgtctaacccaaaccaagcttcaaacacagcacacagatctatgtgtccaca

SEQ ID NO: 166280 - DNA, 202 bp, Glycine max
agcttcgcgggagaccagttattgtatgtgcttgctggatggggaagctgatctgtgggattctacgtgatctattctggcgtcaccttgatgcagtgaagttattgcaatgcatgccatttgatgtttttgatagacaatgcctataaaacagacagggtcaaactctcactacttgactctgttggggtgacacccaccg

SEQ ID NO: 166281 - DNA, 457 bp, Glycine max
acccgcaccttacatcataagctatacatacccagtgttttattatttttcattcaatagcgcgcgtcaaatcctatctaaacacttactctcatcttatctttattattctctaaacctcaattctaaactatattcatcatatattcattatataatattgcacctttatcactattatataatattttgtattttcattcatgtgacaatgcgtcttaacgtacgttcatcattgatctcatgtgacactgaatcattgatgtacactttgattataacatgaatgaatgaactcaaaggaaagaaactatcatccaaagctttgctctgtgactaatgtgtataatatatgaagttagtgattaacatactcttaaatgcagtgtctcaccaatacaaccgcaaataatataatactataatgaaatcacactttatataatgattatatgcg

SEQ ID NO: 166282 - DNA, 450 bp, Glycine max
  unsure (1)..(450): unsure at all n locations
agcttccaccaccagcaatttcaacctataaatctagagtagtgtttatgttgcttaaggcttagatagttacaatttgtgtttgattatgctaaattatcttgaataacacaattcaagagagcttaagacttattntattcacaaatctagccacaactcagcaccacaactcaacttcatcataggcattatgtaggaaacttagaaaacaaaaaagagttcaacaacaagactacttctaggaattgatttagaacatgttatgaactaaataacatgcatgaattagactcaaaattaaaaagataggctaagaatgaacagaatacatgaacaaatgtatctagaattcaataaacaaaataataattcaacacaaacttagagcataatgtgacaattattatgactaaacatgactctaagacaacatggatgaagtgatta

SEQ ID NO: 166283 - DNA, 186 bp, Glycine max
aacttgaaaccaactattaacgcttctaattaagaagtaccctgtaatattatccttccgaagacagagggaaaccttccggagttatgctgccctactaatattgctacaaaatacaattaataataacttggaatcttaaaagccctgggtgaccgtgctcatttcattttaccgcaaaagcta

SEQ ID NO: 166284 - DNA, 437 bp, Glycine max
  unsure (1)..(437): unsure at all n locations
agctntggggggaggatagcatcattatggttgttatcggacatccgagtcaaaagttatagccattttaatttttcggaagcttctatgattaattttgagcgtattgatatattgtgagcattaaccagacaaccgagtcaaaatttatggccatctaaatttggcaggggattccttcatatattacaagcatctcaatattttatgggccttacttggtgatttgtgtcaacagttatggacgttggaatttccccaatacttccatatcgaattttgagcatctcgatatattatgggactcaatcagacatccatgtcaaaagttatcgacattagaattttccctaggcttcctcattgaaatttcatcttcttgatatattatgggcctcaatcaacatccaagtcaacaattatggtcgtttaatttg

SEQ ID NO: 166285 - DNA, 460 bp, Glycine max
  unsure (1)..(460): unsure at all n locations
acctgcacgcatgcaagctnngntcttcagagccctcttcttttgtgtctctttttgcgctgntgntgcactgcctccacttccatcccgcaatcaaccaaaacctagattacacaactccttttcttttcattgctacacatgtttgtgatttattattattgctttaaacaaggtaacattttatatttaaggaataaggatgtctttttttcaggccactatttattttattagtataattaaaataaaataaaaaatcacgtgaatagtagtataagatatagagaattcaatttttttattactttaatatatttaaaataaataaagataatttttatctttaatattcctaattatcactgtcatcttcgtttntaaattgaatttcaatatattttagaacaaatatcaatagttaaaaataaccttataactaaatataattcgttatcat

SEQ ID NO: 166286 - DNA, 460 bp, Glycine max
  unsure (1)..(460): unsure at all n locations
taacatggaacaaatagagcatcttacctgagccaaatcttaattgttctcaagattctagcataatctgttccaagcatttgaatgacaagatcagccaaaaacgttccccaaagcctgttccacaaaccaaataaaatgttcagaaatactcactaagtgtgcctcagatagtaccaaaatctgaaagtagaggtagtagaaatgccgctgaaaagtcctaatggtgcattgcatagaaaaagatatagctagtagaatttactaatcacttcataaaaagttgtctaatgactgttgataccagtggacaaaaaacttgctatattgtacactgaanaataaaagcaaagcttacatgtttctttatggtaaaacttaatcagtaatagtattattaaatagcggcaaggcgctgccatggcggaatggcgtggtggattttttttgcaactgccat

SEQ ID NO: 166287 - DNA, 439 bp, Glycine max
  unsure (1)..(439): unsure at all n locations
agcttgatatgttcaggtgcaggtgctgttactattggaggcacttcaatttggttgccatacctcaaggtgatggcactcatattttttggattctgcacagtctgtgaaagcaatttgtcaaaattttgggactgagcttggttcaactgagtagccatctgccccatcagatttgtcagactctgaatggaggctcttgtctcttactgaaattgcatattctggatggtcatttgccttactaactcctctgaggaaggttgagaaggggcctcaactgcttattgtctttngtgttgttgctgctgttgcattggaggaggaacatatggcctgcttggaccagcagcattctggaaaggagggacaggctcgtgttgttgtggaggacttgtccatctcagaattgtatgaattgttggatcaagtggccttg

SEQ ID NO: 166288 - DNA, 243 bp, Glycine max
aggcaccaacagccgcagcacccgttgtgattactacttcctggatagaggttgacgacggcctattgacagctatatcctggcccgcatggaacacaccctacacacgagcacgcgaatatagactggtaaccaccttaacaccacaagcaatgtggttctaagcagagcctatgaacatgttgcaaacactataaacttgcactcagccgtctgggcgaatctcgttatagattgagaacc

SEQ ID NO: 166289 - DNA, 395 bp, Glycine max
  unsure (1)..(395): unsure at all n locations
agctttgaacatatgccactctattctttatntgtaaaagatatgtcgacaaggaaaaacatatacatccaccaggagaatattgctgtggaaggcaactgcagtgctgtaatacagaaaattcttccaccaaaacataaagaccctggaagtgttactattccttgctcaatcggcgaagtcactgtgggaaaggctctcattgatttgggagccagtatcaacctaatgccgctcttcatgtgtagaaggttagaagagttggaaatcatgctcacgagaatgactntacaacttgctagccgatccatcacaagaccttatggngtaattaacgatgttctgagtagtgtgaaacatatggtctctccagctgatattgtggacatggatgt

SEQ ID NO: 166290 - DNA, 402 bp, Glycine max
  unsure (1)..(402): unsure at all n locations
tatgcaatgatgtcaacattgatacacnctctgatgatgtgtcaatgatgatggctcagatgaagataatcaattagctttcatctcaaggaagataaggaacttgtggaagaaaataaatggatcaaactggaatggatcccaaaaaaacacatagagaaagacagagaaaagctccatcgtatcctatgagtgcaagaaaccaggacatttcaagtcaaaatgtccaaattttgatatatcagcctataagaagaagtacttcgaaccaaaggacaagaaagtactaatgagcacgtgggagacatcatcaaatgaagaaagtcaacctctgtctgatggcagacactgcatcaaaaggatcaaattctgaatcagatgcagaggtaaatataaacaaca

SEQ ID NO: 166291 - DNA, 294 bp, Glycine max
gcggcatgcaagcttgattatgtatagaggatcttttctcccacactacttcacgttgtgtgtactttgttcactgactatatgaataaattcctatccctgaatgctatatcagccagatatccaagaacctgccttaaggcgagctggacgaaaaaccaagcctaaacccgaagacacaatctaggactggacatctcactggaccccacaccatctgttcgatgacaagcccaaactcagggctaggaagacccacattaaagcccaaaggtgcgcttagcgtgataacca

SEQ ID NO: 166292 - DNA, 397 bp, Glycine max
  unsure (1)..(397): unsure at all n locations
ntaactgttggatcgagtggcctcggaataattaagattgtgggtgaattaattattcctaaacctttactaattaaaaatttactcttctaagatttttacttatgttgttaagagaataaggagtagaagagaaacttaacagaaagtaaaaacggaaattaaatgcataacgaaaagtaaaagagtatggaaacaaacacacaagaatttttatactggtttggcaacaacctgtgcctacatccagtccccaagcgacctgcggtccttgagatttctttcaaccttgtaaaaatccttttacaagcaaagatccacaagggatgtacccttccttgttctctttgaacctagtggatgtattctgcactagaactaatccacaagagatgta

SEQ ID NO: 166293 - DNA, 432 bp, Glycine max
  unsure (1)..(432): unsure at all n locations
agcttaacatgatctcatntacttataatcttttacaaaggcattcctttagattatttcaaattatacatgataaacttttttttaaggttaacaacatccttccttacatggatacacaatataatatttcaagggcagttagtttgatatataagggatatcaatgtaatatttttaaacaaataaggaagttagtatagaaataggaaaaaaatattgtgtgcaatttcaaaaatctcaagatgtgcattataataatctaaaatctatttaaagatctgttttagataaaacttacaaattagtcaacaaacttttcagcccaaataaaccaagagtttaatagtgatatatcgataatataaaatcattttatattattcatatanagtacctttttcccattaaccaaaagcctattagtataaa

SEQ ID NO: 166294 - DNA, 145 bp, Glycine max
ttttgcggcactggaatggaatggaacaccatgattggacccagcaaccaacttatacataaacacccaattggtaccttctatatagcaaataacagtggcctctacatatgcgcccacataactattaacaacattttttacc

SEQ ID NO: 166295 - DNA, 440 bp, Glycine max
  unsure (1)..(440): unsure at all n locations
agctntaaaatgtgaattaaaacgttctttattattgtggtaatcaattaccatccatgcgtaatcaattacacattataaaatttgaattcaaatttctagtgactatgataaacattttcagctgctggtaatcgattaccagagagaaaatctcaatttgaaatgataaaattctttggtcaaaccttttgttttttcaatttggaaacttcttcctaaagattcttgagatcaacttgatcatatatcttgattttcttggattcttgtcttgaataaaacttagaagcactcgatcctttagcatcatcaagacatcanaacatcttgcttctacataggagtcatttgacttaatccatcaactaacagatccttcaactatttctcgtccttagaaaantccttttggtgcctctttcattcttcctcactat

SEQ ID NO: 166296 - DNA, 424 bp, Glycine max
  unsure (1)..(424): unsure at all n locations
tggttcgaggtacttacccgttgaatatcgaagactgatgattaacgaatgaagaacgtcgaagaacggttgaaacctttgcgagattcctcacggaaaacgttacggaaacgtttcggaagcgccttggcttagattttcttcacggaaacaatttttccaagcaaattcgaaagagagagaagtgcctaaggggctgaacattttgaaacagctccccctcccctatttatagaaaaaaaggaggtgcttgccgcccaaagacttaatgaagaagatttctaagcgcacccgaattactaagttcacccnccttttcgtattttacagaaaagttacggaagccttacggaactggtttcgaatntgaatttcatcttttttctcttccctttcaccaatgttaagtggaatatgctttacc

SEQ ID NO: 166297 - DNA, 244 bp, Glycine max
agtgtgactatatgtgatgcgccccacttggacattccacttaaatgttctgaccatttggattgctcaagagcttccgatgttcaacttctgagcgcttcggtctgtgactcgtctgaatcgcacattcgcgtgaatagctatgaccacttgaatttctcaacatcttccgatgatgacatcccagcctctaaccaaattactgcccccaatcggacatccttgtgcaaagctatgagcatat

SEQ ID NO: 166298 - DNA, 414 bp, Glycine max
  unsure (1)..(414): unsure at all n locations
agctntaactaactcagaatatactggttatttcacagacatgaatggaataagattggagttttcaaatgtttggaagcattcaaaattctcattacagaagaactccatatctatgaatctttggtctacaatggaactagaggaaaagaggtttgtgtaccgtgtatgctgttcctctgatgagaataatgacccagagggaatggagggaggaattgtgagcttctgtgacccagaatgccgctgactacgactcgaagttcctttgcgctttttcgatggttccgacatttgaagagtttttcggaattcaatccgtgaaatgaagagattgaaaaagatgagcttggctttgcgggagtgattggataagattgaatgaatatggctggaccacaattggggcgaagg

SEQ ID NO: 166299 - DNA, 295 bp, Glycine max
  unsure (1)..(295): unsure at all n locations
caagctgtggaaagctattccaaatggccccggaattgtattcttatgtctttaatgctcgtgctgtatccaagcttatgtgcctgcctagtatatttctatctttactgaaataatttgcgtttcgtgctgaagactgcgctgtaacaaactttgaatttggtgatcataacatacccaataatctatttcgaaaccaagaaaaacccagtccatggatctaaattnaacaattatcgcttctgaagatacgcatggactccatgccactgacattctggaccctgacttggat

SEQ ID NO: 166300 - DNA, 395 bp, Glycine max
agcttgcttgtggagcttctatggatgttggatctttgagcttcaattgccccaattcttgtagattggtaacctttatgtagtggaagataaaggagaagaggtgaggggaggcgccatccactagggaataagccatggaagaaggagcttcaccaccaagagagtgtcttggataagaagcttggagaaggtgctcaatggaggaaaagatagagagagagaaagagagaggggggagcacaaaattgaaggaagaaaagagggagagaagtcgaactttgaagtttgtctcacaagactctcattcatcaaagttacaacaaggggttacacatgctcttatttatagactaggtagctttcttgagaagctttcttgaaaaaaatccttg

SEQ ID NO: 166301 - DNA, 431 bp, Glycine max
ttgacacataaaatgcaataataatgccatgactcatgtttaattcagctgacaaaaaggatatactttcataattaattagcagttatgggtgcaattttaatgtcactggaatggaatggaacaccatgattggacccagcaaccaacttaacaaatagacttcttattgctactttctatatatctcataactctgtcatcttcatttggtaccacataactattaagtacttctttgtccaatacacgcgtcatatatatgaagtataagtttaatttagatcgtacttaaagaattttatgaggaaataattttgctttgtattttatgttttgttaaggcataaatatatataagaaagttataataaaatcttctaagattgagttatacatattgaatttttaaataaaacttctaagataca

SEQ ID NO: 166302 - DNA, 413 bp, Glycine max
  unsure (1)..(413): unsure at all n locations
atgcaagcttctgttattaatatccnanctcttctatatatcccaggactcaatccggcgggcgagttaaaagctattgtccttcgaatttgctaggagcttttggtttcaatttcgagcgtatcgatatattacgggactcaatcggacatccgagtcaaaaattatttgcggcgtgaatttgatatcggctctccttttcaatctccaccgtgtcgatatattacacgacatcatccgagccccgaatagcaattattgccgtttgcattatgtaccaactttcccttttactctcgacacccttatatattaccggaatcaatcatatatccgacacacacgcttccggttttgcattctctctcgatctttcgttctacattcataaccgtctccatctatcgcgggac

SEQ ID NO: 166303 - DNA, 438 bp, Glycine max
  unsure (1)..(438): unsure at all n locations
agctngcttctacaatgcataanacatatatcaaggaaagcagcttaaaccacagtgtcatggcttcagtttcactcaaacaacaatttttaagctattcatcaataacaactagcaagaggtccaatcgttgaacttcatctcaagccatgaagtcaaaaatgcataaatagaatcagaaggactttcactggcttgtagtgaggcttggctacaaaaataattggtttttctacgattcaaaggcttagattctaagagagcacaaatcctagacttattcaaatatttctctcaatacaattagcttatttactagcctttcactttaattcgtctttgaacttattacaacaacacacatttcctttgattactccttttttctaacacacaccttcatctgtcgtgtgtgatgatgctcctacttctactcta

SEQ ID NO: 166304 - DNA, 422 bp, Glycine max
  unsure (1)..(422): unsure at all n locations
tgcaagcttggtatctccttcttcactacattatgtatcaccgggttgagtctcttgtggggctgttttactggtttagctccatcttctaaatttattcgatgcatacatgtggatgggctaatacccggaatgtccgccaaggtccagcctatagccttcttatgcttcttgagaactgacaacaacttctcctcttgctcatcancaagggaggcagatataatcactggaaaactcttgctatcatccaagtaagcgtattttagatttgatggcagaggcttcaattctggtgtggtcggctggacagtggtagaaggagatggtttctcaccctttacctcataaagaaagttagacgtatgtgttcttcctgaaacatggttagtcctatctgactctataaaatcaatctcaag

SEQ ID NO: 166305 - DNA, 223 bp, Glycine max
ccccaagaagcagccacgccgcatatctcacaatctttctcaacaagcacctctgacaagcgacatccctatctacccacaccctttcattaactaaaacaacctccttcaaaataattacacatcaacataacaccacacaccataaaacatcacacataatcactaatatatctatatatatatatatatataacgctgtcacaaacaatctatccacaac

SEQ ID NO: 166306 - DNA, 329 bp, Glycine max
  unsure (1)..(329): unsure at all n locations
tgacaatagcatcatttctggcactcaactgttgggcagttgaagccatcttctcacataaatccgcggcctcagtcagggtcatgtctccagggctccaacactggcagcatctatcatactttcttcccatgcaccgagtcctccataaaaatattgcacaacaagctgctcacaaatccggtggtgagggcaactggtgcatacctttttaaatttcctccacgtttcatataagctctctccactaagctgcccaatgcctcgaatatctcttcctgatggtcgtggncctggacgccgcgaaaatctctttaagatatctcttt

SEQ ID NO: 166307 - DNA, 447 bp, Glycine max
gctcaaggagtctagccctttctctcaatgtataacttatttgaacaagaacgctaaaagggataacagccattactccaaaaatggctcaattatttgatgaccatttcgctatgaggaaggctccgtctccttgaacaatttgatgcttataccttatttttcctaagtcatcaattggttttcgaggcattaaactaccatttctattactaagtatcaaaatcccgattgctctttgaggcagctttaacaatcttatcttgatggtctacgtggcgatctctatttcatttatacttaccttatattcgcttacataatcttcgttgattgatgcaatatgccttgcagcatccggtctattatccataaccattttcaaacaacattttatatgaacggtcatccaatccgggacattgccatacttttactttttttcct

SEQ ID NO: 166308 - DNA, 341 bp, Glycine max
aactacctcatgcactcctgtggtgactatggcatcactcctggcactaaactgctgagagctggaagccatctcctcaattaaatctctggcttcagcaggagtcatgtctccaacggctccaccactgcaagcactctatcatacttctttccatattactgagtccttcatcaaaatattggagaagctgctccgaaatctgatggtgagggcaactggcacatcgctacctaaatcgctcccagtactcatacagactccttccactgagtttcccaatactcgagataccttcttctgatggctgcgggcctggacgcacggaaaacctcttctca

SEQ ID NO: 166309 - DNA, 401 bp, Glycine max
tcatgatgaatcaagattgattcacagagttctgatgattataaagaatatgaccaacagctcaaaagtcaagaacacttcattataaccaagatgatgatctcaagaatcaaagaatgagttcaagattgaagtaagtccactctaaggatcaagaggaaacgtgaattcaagaatcaagaatcaagttccaagaatcaagatcaagattcaagactcaagattcatgaatcacgagaagactcaatcaagataattatctaaaaggttctttaaaaaactgactagcacatgaagttttctcacaaccttttaccaaagagtggtactctctggtcatcattaccagattattgtaatgattacagcagccaaatggtttttaaaaaactttcatactg

SEQ ID NO: 166310 - DNA, 165 bp, Glycine max
ccccccgccgccggctgaccgaacccatccacaccccaaaaaaaaaataacttagcccacccaaaggacaaaaccccaacacccaaaacccaaaccccccaaacccagaacccaccaaaccacccacacacaaaccccccaaaccaacaaacacaccaaccaccc

SEQ ID NO: 166311 - DNA, 416 bp, Glycine max
catcaagcttctaatgaatcttttaaggattctatctatgctataaatagaagcatgtgtgacacttgttgtaactttgatgaatgagagtcttgtgagacacaactcaaagttcaacttctctccctcttttactccttcaatttcatgctccctcctctctctttctctctctctttcttttccttcattgaagcatcctctccaagcttcttatccaaggcacattcttagtggcgaagctccttcttccatggcttattccctagtggatggcacctcctctcacctctgcttctttgtctccgctgcatctccatggtggaaaatcaccattgaaggacctaattgaagctcaaagatccttcctccatagaagcttcacaagcaagctcccatcacactgtcttcttaac

SEQ ID NO: 166312 - DNA, 298 bp, Glycine max
agtcatgtctccaaggggctccaccactggcagcatttatcatactttctctcatattactgaagtcttcataaaaatattggagaagcagctgctctgaaatctgatggtgagggcaactggcacatagttctttaaatctctcccagtattcatacaggctctctccactgagttgtctaatacctgagatatccttcctgattggtgtgatcctggaagcacgtaaattttttctaagaatactctcttcaggtcatcccagctcgtgatggaccttggagcaagcttatacagc

SEQ ID NO: 166313 - DNA, 423 bp, Glycine max
accttcttactttcatactgatgaatattaattcgcggctacttcatgcactggtgtaatgacaatagcatcatttctggcactaaactgttgggagttggaagccatcttctcaattaaattcgtggcttcagtaggggtcatgtctccaagggctccaccactggcagcatctatcatacttctctccatgttaccgagtccttcataaaaatattggagaagaagctgctcagaaatctggtggtgagggcaactggcgcatagttttttaaatctctcccagtattcatataagctctctccactaagttgcctaatgcctgaaatatcctttctgatggtcgcggtcctggaggcagggaaaatttattctaagaatactcttttgaggtcatcccagctcgtgatggaccttagagc

SEQ ID NO: 166314 - DNA, 388 bp, Glycine max
tttaccatgcgttcatatgggatcttttatcggaggtaaatcgaaacggagaataagatcttcccacagacacagtccaacttttagcaacagagaagattacacagatcttacttcacacaagagcttcttgggagaaacagagaataactatagacaacaattgtttagtgcagataaataagcatttctcaagtatgaaagaagaattagatagcactctgtatatacaattgtgcacgaggcgtgtatattatatgtcatttctaagaacgttaacatactatcacgcagagtctactcacatgctctcggagatggtctctctgactttcttaaaaatcacatcccctatcaaatgtctatactcgtgacttttgacttttgc

SEQ ID NO: 166315 - DNA, 375 bp, Glycine max
  unsure (1)..(375): unsure at all n locations
ttgagaagattcctaaagaagctagagcttanctatctacacctctctaatagctaagctcaagtgcttgagatgagaagctagagcttagctacacactccctataatagctaagctcaccctcatgacaaaatacatgaaaatacaaaaaaaaaagtcccgactacaaaaactactcaaaatgccttgaaatacaaggctaaaaccctatactactagaatggctaaaatacaaggcccaaaagaagaaaaaaaaacctattctaatatttacaaagaagagtggacccaaccttggcccatgggctcagaaatctaccctgaggttcatgaganacctacggcgctttttagtagctctagcccaatcctcc

SEQ ID NO: 166316 - DNA, 383 bp, Glycine max
  unsure (1)..(383): unsure at all n locations
tagtgcgggtctgggagacgaatgttaagcgttttctatatgcgaagatgatgctccaagtgctgtggatttggtccgaccatgccctcctgatttccagctgggaaattggcgagtggaggaacgccccggcatttacgcaacgagcataatgtaaacctttacggttttaaaagctctatacttgggcctaggctttagagttttcattttgctaaggctttgtgtcttttgtttctgaatttataatacaaggatctttcttcatctgttcctggtctctacccattctcattcatttgcatgtttacttctttttctgaaacggcagattccatgacgagtcccccgaagtactaatacctgcgaccncgctatcaact

SEQ ID NO: 166317 - DNA, 419 bp, Glycine max
  unsure (1)..(419): unsure at all n locations
agcttctngattcctattattcattattttaagcttaccagctatttatatgcggatgggcaaccaagcttaatcataagtggttagttagctgatgccctaactaactactaatgctaacaactctaataaccacctctcccgcctaaagctattatgaatatgtccgcacttgtgccttctcagcccagctgatagtcgtcccaatacttgggcaacttcttcgattgcctcggtcgtccccgcgccgcgccttcatcttcaacctagaccctgtcctctacgttcataacatccccccgttcttcagataaaacctcgccctcaacgttgtgaagctccttaagctgttgccaatctttccacgatgcattctctaagggtaagccttcccactgaactaataacattcgctcggg

SEQ ID NO: 166318 - DNA, 475 bp, Glycine max
  unsure (1)..(475): unsure at all n locations
ngaagatatatcaatagcatgacacatataatcgcatgttatttataatcatcaaactgaattatgtttgctttatatcttgtccatgcttatagaagcaaacattgattcaaataacagttaatatatacagtcatcacaattaactaagccaagagtgggactgcatgtatacaattgaatacctctactgttaccagcattctcaccttccagcattttgccaaccccatcttgaaaatgttgtgagtcgcgtcctcctgcatgatcacaactatatttagataacgagaaaatatgtaactagcaaaatacatcctttttaataccaaacaaagtacacatcctacttacaagaaagagatatgagacaaaagaagaatatgagcctaccatcatcttactaccaatgaaaatgataattgactaagccaacagtgggactgcatggacatcatgttcagacagatataaa

SEQ ID NO: 166319 - DNA, 429 bp, Glycine max
  unsure (1)..(429): unsure at all n locations
gagttcaaaaaaccgacttcttctttaatctcagagatctcctctttatgtgcctcgttttcagcctccagatctgcaatgaccttcttcagttgtgcttcttgctgaagaatcttctcacttttgatgcataattctctataggatgtagcaagctcatcaaaagtgatttcactgtctgtatcacttgaatcttcagcagattcgaatctcccagtgagtgcattcacatctctgtcagagtcactttcttgttcactctctgtatcagatcgacatacagaaagtcctttcctctgcttcttgagatgagtgggacattcagctatgatgtgtccatagccttcacacccatggcattgaattcctttgctgtgactgggctttacatctgacctcttctgggatttactgcctttnctgatgtcg

SEQ ID NO: 166320 - DNA, 478 bp, Glycine max
  unsure (1)..(478): unsure at all n locations
tcaaactaagctgggcctggttanactgattggacatgattcgggacttgcntgtttttttcgggcaaaattggatgagggagagagtggttttcgaaatctgcactttatgcagaattttgctgctgaaatgtgcagcagaattttgtataagtgcagaaaaatgcttgtgtatggttggctgtggaaagggtagtgcacatggggttctggacattggatagtagatcccaacggccaaaatgtatgcttatgtactacagacttccagtaaaactctcgagtcgatccaatggttaacgacttggaacgaagaanagggtactgggatatttgtatgtgaaaagctgtgattctgagttgtgttttgggcagagttttttgcctttgccctcgtttgcttggttttgctagtccatgatgattggatgtcggaatttcttggatgtcgtgggagcttgagacgattgacggggac

SEQ ID NO: 166321 - DNA, 378 bp, Glycine max
agcttgaaaaggacctcagtgtgaaatgttattaccattttaatttcccgagagctggcgttgttcattttcgagggtctttatatgtgatgcgccttaatctaacatccgtgtgaaaagttatgaccatttgaatttctcaagagcttctgttgtataatttcgagcctcttgacatattatgtgctccaattggatatccgtgtgaaaatctatggccatctgaatttctccagagtctccgatgttcaattatgagcgtatcgatatattataagcctgaatcggacatcctggtgaaaagttatgaccatttgaatctcctcagagcttccgctgtccaattcctagcctctcgacatgttatgtgcctgactt

SEQ ID NO: 166322 - DNA, 363 bp, Glycine max
tgggaggatgtatatttcttttttgcccaagagtaatgtgccacagaaactaactttccaaatgtttgccttctcaagaatggcaccgaggaagctttgctcacagacgtccatgaacgacaaagcggcccaaggaactagttccgccccggagtacgacagtcaccgctttatgagccttgtacatcatcagcgcttctaagccatcaaaggatggtccgttcttcgggagcgacgcgtccagctcagggacgacgagtatactgatatccaggaggaaatatggcgcctgccgagggcaccactggttactcccatggccaaatttgattcacaaataatccttgaattttacgccaatgc

SEQ ID NO: 166323 - DNA, 443 bp, Glycine max
  unsure (1)..(443): unsure at all n locations
gctgcangcatgcaagcttctttagtgttgcaacctacccttcttatggagggcaacacgtgactcgcgggtgtgtcttccaggaaaggaatacgcgcggagtcgccaccaacgtttatttgaggaaaacgtcggaaaaaccagaaaagacgtggtctacgaactttaagtgaaaggttcaggagttgtatttacgtacgaggaaggtattagcacccaacacgtccgtcacaagggacgacagcttttaatcaaatgtgcaaacatgacttcaatttgtttcatgttccctctttagtcttcatgtctttcttgcaccttttatattctttttctttttgtggtcgacgagggtcgtttccttgctcctacgtattcctcaattgtgataaggaaatcacacctacgtagttctgtgagaactcaacggcgggtaattttgt

SEQ ID NO: 166324 - DNA, 413 bp, Glycine max
atgcaagcttgattaatattgcctgactatttattgagggtttactaatttaggcgacaatatagaacacacgagcacgattaattagacaaatatattcctatgcatcagcttatttgttagaaagacccaacatatctacctactgctgtcattttatttaccttgcattttataattttttgcatacaagtttaatttaaatcctatttgaaattatcacttatacatgttctctcaacaatgcttcgattctgaacttaattcacgctaataatagttccatgtgtctgatactcggattcatccattttaattttcaatacttgatgatccagcgcgctttccagtatacccccattgacaatttcttgagacataaatgtacgaaaggtaactcgaatgcggaacaa

SEQ ID NO: 166325 - DNA, 87 bp, Glycine max
cctcggactaaactaaccccaacaaacctataacccaccacaccacaacacaacaatcaactctacataacccactccacccacccc

SEQ ID NO: 166326 - DNA, 386 bp, Glycine max
gcagcatgcaactttcgcacagcttacgtttttctatgacctaccatggtacaaggctgacagaggccattgcttccctcgcacagtattatgatcagccgctgaggtgcttcacctttggggacttccagctatcatccatggcggaagaatttgaagacaccctacgatgtcctctagggggagggagaccatacctcttctcagggctctcatcctcattagctacaatttctcacatacgccaaatctcggcgcacgaattagaccacagaaagaaagctgaaaacggcgtggttgcaataccgccaaaatatttatagggcaaagccagaattttggccacaaaggcgagggggccccgttcatacacatgtatggcaagt

SEQ ID NO: 166327 - DNA, 443 bp, Glycine max
  unsure (1)..(443): unsure at all n locations
tgttgtaaagccataagtgacagtaaaaatacttgtaattttgttcaaagntactaaaaacttggtggattatcaagaatttggtatactctcaatgcgagagacgaactagtataaatctcattatgtcttatcattatctcttatctatttaattgactaagggtttgaattttattttgtttctaaaaagtgtttatgaaatttgttaagtattgtctatctttgtctatttgcaaaaacctcattttctatcttaaagctcttttagatgatagatttcttttaaagagaacgcttggaaaaaatttaaaatcacaattcaatcctccttcttgtgatatttgtctttataatctagatactaacaaaactatgccttatatcataatttgtactttctccccaaaaattgctaactctcccgattttgggtagttttc

SEQ ID NO: 166328 - DNA, 441 bp, Glycine max
atgcaagcttccacaacatccaagtaattcattatttaagcatcatgaactaacatagccaagattacatggcagaggcagaaaactctgcccaaaacacaaaccaacatcacagcttttcacactcaaataccacagtaatattctcctcgttccaattcattaaccgttggatcgactcgaaaattttactggaagtctctagcacataaatctacattatgaccgttgggatctgctagaaaacggccaaaacccactctgtactactctttcgacaaccagcaaatacacaacactttctacacaaagccaaaattctgctgcacctatttgacagcaaaattctgcataaagcgcagattttcgaaatcacactttccctcatccacatttgcccaaattgaatcctacaagtcccaaatcatgtatcaatcatgt

SEQ ID NO: 166329 - DNA, 414 bp, Glycine max
tgcatgcaagctttgaccttcaggtaaggtttaattatttgctgtctatttaagattcagtgcattagttactagcttgcttgaatcttatattactaaggatgaagttgaaccatctatgtcattggtgctcgagaataatgatgttattgacaatataagttatttggcgttactcatcaaatataaatcagacatgttgtatgactaattgaatacaaatcatattttggcgcagcaatgcttttcaactaatgctgagtctaatccatatttattgggatccaatacaccaactaagtgcaatttggccctgactattactcaattggatgacataccatttgaagatttatcattaatacaactatcctttatcagggcgaccaaacatactaagactgttgatgatga

SEQ ID NO: 166330 - DNA, 364 bp, Glycine max
tggagaagacacctttctgacaatgatgtgcaagttgttttcaggttcttggatgatatctcgcggagtcatattgatcgttggacatcaaactgctgggtttggaaaccagaacctaatggcaagttttctacaaggagtgcatactgtatgctactagaaggagcagcatatcagactatggatgacgctttagaggacctatggcagctcaaaatctctttaaaaccaacaacatttgcttggtgattgatcaaagatagaatcccaactaaagggaatctgtggagaagacagctggagaaaggcttttgccagccctacaactattggtttagtaatttatcaacatcatcttttgatt

SEQ ID NO: 166331 - DNA, 368 bp, Glycine max
  unsure (1)..(368): unsure at all n locations
cgacaggttcacgtgcaggtgctactactagtggaggttctttgaattggntgccagacctcaaggtgatggcactcacattttttggattctgcacagtttgtgaaggcaatttgtcataattttaggactgagcttggttcaactgagtagccatctgacctatctgatttgtcagactttgaatggaggctcttgtctcttgctcaaattgcatattctggatggtcattttccttactaactcttctaaggaaggttgaggaggagcctcagttgcttgttgtctttgttgtgactactgctgtattggaggaggaacatatggcttgcttggaccagcagcattatggaaaggagggacatgc

SEQ ID NO: 166332 - DNA, 382 bp, Glycine max
gctaaaaatcaaatatcttcctagcagatctatcaatgactcaaagcaagtatgtgcgtgaattgtttaataaaactaaaatgcttgaggacattttaatctccactcttatggttacaaactggcaaatatctaaacattgggcttgacttaatcaatggatcaacaattttataaatcagcggggtgccttgcagtatgctatccttactagaccagaaatcagctttgctgttaataaggtttgtcagtatatggttaatccctggattctcactaagctgtggttaaagaatgttgaatatctcaaggtacactgttcatggttacttcttaactgcctcatgtttaaacctattgcccttatgcttttgtgatgttg

SEQ ID NO: 166333 - DNA, 459 bp, Glycine max
agggcttagcattcattaaactcgatttattgtcgataagtacctttgcgatgacgtggtccatacatctcaccgacacatgtagagccttgttgtgtcctctcccctcaacgggaatctcttcttccgcaaacgcgatgttgttgttggtggttatatgattaacgatgccttcgaaaccctccactgagatatcatgtgctacatgggcatcgttaaggactttcatcaacagcgcacgataaggctcggagtttatgagtagttcaagcaaggagatccttgttggagttttattcacttgctcgactaccttaaactcgctttgctggatgaggcggaggaactcatgggccctcttcaaagtcactcgtttttcttgaagaccttcttctcgtaccactggaggatctacttctttccacgcggtggctatatctgtggactctgggaccatgg

SEQ ID NO: 166334 - DNA, 224 bp, Glycine max
atcacaccgccagtcatcgctcactctaaaacaaatcaagtcgcagctaactcaatgaaggacacacaagcccatacccttggtatagcacggtttaatgctgaaaccaggccacgggaacgatctcgcccactctttgcataaaccctgtaacacatccctgcagtcgtctgcagctatcatgcgcaatactgcgattattgtacgcactcacaccctcggcc

SEQ ID NO: 166335 - DNA, 428 bp, Glycine max
agctttgatggaataaccacatctccgacttttccccatcatcaaaaaaatttctccatcgccattgcatcatattttcctaggaagtttggaaagaaattttttcggcattctccttggtttgtcttgtccttcaaaatatcagatccattactcgtcttccttcgtcgattcatagtttccatgtttccatctcattcatgctcacacactgtttcattcacttactctctgtctctcacccgttttgtctcacactctctctactttctctctcatctctcaatcataatttcaaataagacttacacaaccatctattataatgtattttattggtttatctcttaagaaaataaaataatgttttataggtaaaacaaattggggatgtacctattacatacatgtgtaagttaattgggttc

SEQ ID NO: 166336 - DNA, 474 bp, Glycine max
  unsure (1)..(474): unsure at all n locations
actttgcttatacaactattgaaccatatgctatgcacatttatatttttgtttgcacccgcgtcctctagcgtgaggttcttcatagtcatccacctattcatctgctcccccaaacacaaagttcaagatcatcacaggattcacacacaaatagcaaaccgggagtgagttatcacattcctaactgctagagagagacaagacaagatataggagcccaatgcgattacttagcatatctcacattatctcatcgctgtgtcattcaaaattcacttttggaggatgaatgacaatacacatgaatcacacactgcgatcaagacataataacacatcaatttcataatcaacaattagcaagtgtatgcaacaattatgctaagactcaagcctatatgcaatgtggtaccatgtcagtaaaaaaccttgtcnggcgcctatgagtacatgacaagacaaaccacacac

SEQ ID NO: 166337 - DNA, 439 bp, Glycine max
ttaaggggggggggcatgcagcttgtaaacatctcctcacccactaaaaaagtattatcacctttcttcctttataagagtcttttaagatctttgcacagcaacaaagaaatacaatcaattttatcactcctcataaaatagttatgaagttacctattttaccctttttcctttttactgcacaataaatacacattagttattttctatctctgccttcacaataaatgtgaattaaataattaaaaattaggtggaaagtaaggaataatcgacaaaaaaaacaattaatgttatcttgaactgtgaaaataacagataaataggaacaaaagtttgtcaactaaacaacacttaaaaaaggaatagagttagttcgtttatcaaatgttaaaattgtagcttaaaaacaaacttatatcatgaaagtgttttt

SEQ ID NO: 166338 - DNA, 437 bp, Glycine max
  unsure (1)..(437): unsure at all n locations
acgcaancttaattatgaggattntntatttttggcagcnnatcctcatgactacgcgggtccagtttaaagtgagtaggagcttcatttcattgtacaacctaaacagtttgttatttaagaaactgtgtagatgctagatactcaaatgacaaatatgtttttcttttaagggcttcaatcttatgttaatctgtttgaatgtatttgagcacctagatttgatatattgtgtatgtttttgaatgtatttgagtacctcagtttgataatttaattactagaatttaattatggtgtttcttaatttaatttgtccttaattgtcccccagatatctggtgtattggctggcagaaaagtgtggcacacaccaagaacggaaaggacatgacccttcttggaggtacaatttagaattaaatggcgcttataaa

SEQ ID NO: 166339 - DNA, 407 bp, Glycine max
  unsure (1)..(407): unsure at all n locations
taataagcaacattntgttctacagtgggaagaagaggatgatcctgcatttcaaccagatccaccagacgaggttgagacagctggtgaccncagtttgcaagatcatcatttgtcttataatgctttaaaaggctcatcacgtcttggaataatgaagcttcaaggatcaataaatggattgcgagtgcagattctactagatagtgggagttcagataacttcctccagcctagactagctcaatgcctgaagttacctgtagaaccaattcctaatttgcaggttttggttggaaatggaaatgccttgactgctgaacgataattcaagacttggaggtgaaaatacaacgtcatacactgaagctaccagtttacctacttccaatttctcgtgctgatct

SEQ ID NO: 166340 - DNA, 392 bp, Glycine max
  unsure (1)..(392): unsure at all n locations
atgcaagctttttgctatctgtaagacnattttttcttatagcacgaagagactaagcgggtctactgcgcccttcgtcaatcgcggccgacaagcncgttaacacgcggagatatacgtcatcttccgcgctcacaagatctgtcatactgacttttgagtcacgctgacgggcggagatacccgagtggttatccgtataaaacttcttgctatctgtaagacgaaaagcctgatcgcacgaacagactaacgtcgtctactgcgcccttcgtcaatcgcggccgacaagcccgttgacacgcggagatttacgttatcttccacgcttacaagatctgccatactgacttttgagtcacgctgaccggcggacatacccgagtggctat

SEQ ID NO: 166341 - DNA, 402 bp, Glycine max
  unsure (1)..(402): unsure at all n locations
tcagcattacatgcaaacccgtttattgtcgattttaccccngcgacgacgtggtccatacatctcatcgacacatgtacagcctcgttgtgtcctctaccctcaacgggaatctcttcttccgcaaacgccatgttgctgttggtggctatatgattaacgaagccttccaaacacttcactgagatattctgtgctacatgggcatcgtttaggactttcatcaacagcgcacgataacgcttggagtctatgaattgttcaagcaaggagatccttgtcggacgtttattcagttgctcgactacctttaactcgctcttgtggatgaggaggaggaactcatgggcctctttcaaagtcactgtcttctcttgaagagctctctttcgtgcgcactgg

SEQ ID NO: 166342 - DNA, 434 bp, Glycine max
agcttacccattctgttttagggtttttatgatgatgcttgtgatgtttgtgtgctgaaattgcttatggaaaactgctagagatgaagggtagagttaacctacggttagaaagtgagaatgtggtgttatgagtggaaaaagagtgaggctttgagagttggaaggctaaatctggattcagtggtaattgggggttaaagtgagttaatcctagtttgaaatgtcatttaggacttaagagaaagcttaggctgtgcaaatgaggaatatgagtgaccaaagtgaaaacaagagccatttctagggtaaaattgggtgttgaggagtcaaattttgattcggtggaattctaggcgtaaaatcagtttgagcaagtttagattaatgttatagacttgtgtgaggtgagagtttgctccaaatttacccca

SEQ ID NO: 166343 - DNA, 359 bp, Glycine max
ctactcaaaatgccctgaaatacaaggctcaaatcctatactactagaatgaccaaaatacaaagcccaaaagaaggaaaaacttattataatatttacaaagaagagtggatccaaccttgactcatgggctcaaaaatctaccctaaggttcatgagaaccctagggtcttctttagtagctctagcccaagcctcttggagtcttctatccaataccattggggggtaggattgcatcatcccctccaccttggaaaggatttgacctcaaatcccgaggttcttcatactctgggctccttcccttgacacctcgtaaaagaataaaaacatatatattagtggtgttgggtatg

SEQ ID NO: 166344 - DNA, 433 bp, Glycine max
  unsure (1)..(433): unsure at all n locations
anctntgatggtcctgtgcagcattatgtattaacctctcttcatgggagatgccaatgctctaatcacacacacacacacacacacacacacacacacacagatgcttaaaatttaaattctaaaatatgctgtattcttgaaacgaggccttagctgtgcaagtttcttccgtgtgtacagtgcattagctgatatatgtttcgttgtggacaaatatcattacaattagagtaacagattataacatccacagaagctctgtgctttctggttcagttntgttacccaacatgttagttgatactgactgttaatttttgtcaaattaattatgtgtctcaggctttgcggaggaatgatacagcagataagttccaaaaagtaactgaaaaaattgaagctgtgctcagtgaaattccttactgcaaac

SEQ ID NO: 166345 - DNA, 375 bp, Glycine max
ctcgcataaaagtgaaatactcacagctataaaacgtgaccacaattaagataaaagcgttgggaagtttcctactgaaacttctcttgtcgcataaattttttttctctatttaacattattctaccgctcttacaccgagaaaatactcagaccatgattccttacatgaatgagcttaactcttttagctgttgttcttgattccttaacaaactcgctcttacagagttgcactaaacatacagtgtcaaatatagtagatcactgcactcccttcctagacatacatatttctagcttgctttatcaagttctaaggttttaaagcatcttccaatactaaaaagtctaactacacatacaaatgggtga

SEQ ID NO: 166346 - DNA, 394 bp, Glycine max
  unsure (1)..(394): unsure at all n locations
cctgangcatgcaagcttttctacagcttacggtaaaatttgtgacctagccatggtagaagtctgcacagaggccactgcctccctcgcccagtattatgatcagccactgaggtgcttcacctttggggacttccagctgtcacccatggtagaagaatttgaagagatcctaggatgtcctctagggggaaggagaccatacctcatctcagggttctatccctcattagctagaatttctaagatagtccaaatctcggcgcaggaattagaccacagaaagcaagtcaaaaatgaggtggttggaataccgagaaaatatttggaggcaaaagcaagaatcttggcaggtaaagcgcaatgggcctcgttcatagacattctcacactg

SEQ ID NO: 166347 - DNA, 364 bp, Glycine max
  unsure (1)..(364): unsure at all n locations
actacgcttgaagcccaagtttcttttcaagaaataggaatttaatggcagaaaataaatacgtgccataagtggtggtagaataataaattgacgcttaaaaaccaataattcttggctggataagtagaaagttttctaaggataattctatcttataaccctaatttttgagatcccagaaaaacccataattctttcattaagccaagccacattacaagcccataaaagtccttagtgatccaccaagtgtatgcaggataactctaactgagatgaagtgcacaattgggaacattaattgcaagtcatagaaatnttaaacactaatccaagacactcgtgcatagacagaaacact

SEQ ID NO: 166348 - DNA, 332 bp, Glycine max
cacaccacccggtaatattaggatataccacgcaagactaactcctctcatctactattaataaaaagaatcaggtatgatcgactattgaacctctgatctaaatcaataaacaattctttttcaaatttgaacatatgggctgaagtcaactcatcgtggtccatactaatgctaagaaaatatacatgtctggatttacaagtgagttttaatctcattcttgatagaaccacataattactgtacttcatctaaatggccaaacaagagctcgagtttctctcctcttctgagatcgccctacaattcctccatattacctctctaca

SEQ ID NO: 166349 - DNA, 430 bp, Glycine max
agctttgatccaaaatcctgactactataaaccttgacccagggtgagaatgtgaattcttaccctcggaagcaaacaaaaaggggagagggaaaattttcaatcaaagaggaagcaaacaaggagagaaggaaaatttccaatccaaggaaaaacagagaagaaagggaattcccaatcaaagagtgggagaaagccaaaagaaaagaaagaaaattcccaatcaaagaatgggagacagaaaaaagagaagaagaaagggaagaaagttcccgatcaaaaaaaaataatatgcaaaaaggtctttggaccggacaatatctgaacaatacagaattgtcaccaaatgaattaaaagaacgaaagggaaccatgacctaaaatggtcttcccctttagttgccaggcaaaatcttgtgcgctagcaacc

SEQ ID NO: 166350 - DNA, 362 bp, Glycine max
  unsure (1)..(362): unsure at all n locations
ctangacaaacagccttgcggaaaatgatgcaaactgcattcaacaaatatctctttcatgactaaagaaacagaacactgaacatcaaacatggttatcacaaaacccaaaccagcataaaggtgtctatttcccacgagaagacgaacgctcgagaaaaactttatttattggcagcctgctgcagaccaataatgggctccatcctccacttatgcagcgatacatgaaaaccgctgtatctcgactgctgtcctccttgaatccgttttcacatggctagaaaaccatgccatctactctccctactggagccgctaatggccctctttgcacaagtctcaaataaactcatcacatt

SEQ ID NO: 166351 - DNA, 444 bp, Glycine max
  unsure (1)..(444): unsure at all n locations
catgcaagcttgaactgagatacaaagcacatnttattttatggtgaanaagacattgaatgggaatttaattatgaagactgaaaatcgctaagaattgagcccctaaacaattgtccatagaggcagcaagcaaggatcaactctcttaaaaacttaaacatctaggcctagtgcagaacctaagcattgagccatggccttgaaaaccatcaaattatatggctaaaacaactacaatgagctaaagctcggtcaaacaggacaaattatattgctttcccttctttaacatgtatatattacatgtacccttttcatatatcctaccatgcaaaatcttgctaagatattgcttgatgaaaatgaaaaaaccatcatacattaaccaagctcttgagcagcttaaacgtctatccttgatatctagcgtcaaggatccta

SEQ ID NO: 166352 - DNA, 327 bp, Glycine max
gacaacaaggaatgattgtgctcctacacacaaccgaattgacggtattaaactcaacattccttcatttaaaggaaagaatgatcccgacgcctacgttgagtgggagatgaaaatagatcatgtcttctcatgccacaactatgaggaggaccacaaggtgaagctcgccgccaccgagtcttccgactatgctcttgtgtggtggaacacgctccaacacgagagagcacaacatgaacagccaatggttgatacatggacggagatcgaaaagatcatgatgaagcggcatgttcctgctacttactcaagggacttgaaatt

SEQ ID NO: 166353 - DNA, 286 bp, Glycine max
attgcattcttggatatgcgttaaccaactcatgcttttacaaaaagttcatcaagttaagttgtatatcgcagtaccatccgaaaatggggcaaagataatcgagtcacatactgcttcgttactgccaaatatttaggatatcgacgccttgcactccagatcacttgaaaagatgccatgaccatgtgaaaattaactgatcaccccatatgctggaaaaattcaatacttaactgacatattcgatacatcatgctttatggtgcattgtcatgcattcttc

SEQ ID NO: 166354 - DNA, 392 bp, Glycine max
  unsure (1)..(392): unsure at all n locations
gacgaccttgggagggcgtgtgtcttacacaaaaaaggaagttgggagaatttctctgcattgataaagtctcactacaacaatagctttcactctaccatcggcctggcttcctatgaagctttgtatggtacaaagtgtaagacacctctatgttggctagagcctggacaaaaccccaccttangacctgaagtggtatagctaaccaccaacaaggtgaacttgatccacgatacgatgaggactgctccaagtacacaccaaagttatctcgataagggaagaaagattcgcatccgagctgggaacatgtattttgagagtactccgggactgcggttggaaagcattgaaattccgaatactcacaccttgctctatcgaccctt

SEQ ID NO: 166355 - DNA, 421 bp, Glycine max
  unsure (1)..(421): unsure at all n locations
acctgangcatgcaagcttggagaggatgcttcaatgtatgttaacacagagggagagaaagagagaggggggagcacaaaattgaaggaagaaaaagggagagaagctgaccttcgagttgtgtttcacaagactctcatttatcacagttaccacaagtgttacacatgctcctatttataccctacgtcactaactaaatgaaagcttcctttataagcttccttgagaagctagagtttacctacacactccatctaatagcttagctcacctccttgagaagcatccttgagaagctagagcttatctacacacacccctctaacagataagctcaccccatgcccaaatacatgaaaatgcttagctacacacacccctttaatagcttagctcacccccatgcctcaatacatg

SEQ ID NO: 166356 - DNA, 296 bp, Glycine max
ggtgtaggccactataccactggctgcaccttattagcaaccatagtcactccttctcctgaaaatatatgtgccaagtactttatctccaatacatcaaaagagccattagacaacttatcaaacaacacatctttttttaacactttccatacaaccctctagatggcataagcggtcatcgcatgtggaactatataccaatatatcatcaaaaaacactaacacatctctccttatagcatgttggaaaatatcggtcacaaacattgaaaacaagcccgagcattggctaa

SEQ ID NO: 166357 - DNA, 379 bp, Glycine max
  unsure (1)..(379): unsure at all n locations
agccttgacggtgcgtagcacatcattttttcatancagagtaccgataatgtgtgtaccatcacgattatcgtctcccttttcgcacatgttctgcagctgcatcctatccggaaccatatcagaatacgactgatactgcctaacgaaggcaaccattacgtcctcccaagtatggactcgggaaggttccaagttcgcgtaccaggcaacagctcccccagtaagattctcttggaaggaatgcatcagccactcctcctcttttgcgtatgcccgcatcttccgacagtacatctttacatggtcctcggggcaagtaatccccttgtacttgtcaaactccatcacctgaacttgggcgggatgacgatattgg

SEQ ID NO: 166358 - DNA, 436 bp, Glycine max
  unsure (1)..(436): unsure at all n locations
catcaagctttgcacaaaagaagagaaaattatttatatgttcagcgcgtaaaataatcggattattatttaatcataaatcattataatcaactcattaacttttataataatctccttaaaaattataccaataataacttctgcttaattgactttgtaaaaactatcagttaatctatcaacattaaacttaaaatctactcgtaatanaaaaacttacaataagcacacagctcaaatggagacgtttaactttttttataagcaaatagacattattatattataaaacaagtacaagagatactcaaatccatataaaatgtacatggataaactacaacccttcaaagccacacagccaccgcagcgtattatgcattcaagcgtatcccacgacatattcatacacaatcaccataatccacatacg

SEQ ID NO: 166359 - DNA, 167 bp, Glycine max
ctttcgaaatgaacatcccatactcacataagagttgataacattttcacttttaacttactcaaaacacatcatatctctgcataacgtagttgactaatcaaaaaccttagacactacataaaccgactaactctaacatatatagtattcatgagaggattaac

SEQ ID NO: 166360 - DNA, 347 bp, Glycine max
  unsure (1)..(347): unsure at all n locations
cctcatgcatgctagctaggctgagagatacaatttacttcttataacctgcatataagaatcaagggttatacacttagcattggtggctatcaaacaagaccagtgaatacatggtcttgattttttctccctcctgcgaatgcatcggaataacatatattctgtgtcattattctagcattaataacttatgcccatgtgcccgatggaccttggttnccattcttgacaccgctatttttttttaaataaatcatggatcgttctttaagtttgagaagcttaagcataaaaacagcttagtaaaaatgaaacactctgttcaatgtttgctatttcaacac

SEQ ID NO: 166361 - DNA, 412 bp, Glycine max
gccaaagaatatatatggacgagcttcattgttgatcgcgaaccgttacatttacgggagctctagttagaaaataatttctccgcttatattaaccacacataaaccaatatctgaagctgttaatgcacaatttcaataaagcgtacacgtcattttaccggagacttgtctttgcgcacatacgcttgcggccttaaagtattgcaatctgcaacggatggcgtatctttttgaattttgagatagtaattattcaaactaccttctctcttacttttaggctggctctttctttcccatatcatgcaaagggtacccgacaactgtgtaacaaattaagtctcagcaaactcgcatgcctggatactggcattgattataacatgcacgacgcaacacgcaacttttt

SEQ ID NO: 166362 - DNA, 392 bp, Glycine max
  unsure (1)..(392): unsure at all n locations
ctagcctataaatagaaacatgtgtgacacttgttgtaactttgatgaatgacagtcttgtgagacataactcaaagttgaacttctcttcctttttcttccttcaatttcatgcctccccctctctctttctctccctctttcttttcctccattgaagcactcctctccaagcttttattcaaggctcatcttggtggtgaagctccttcttccaaggcttattccctactggatggcgccgcctcttacctcttctcctctgtcttccgctgcatcctcatggtggaaacatatcattgaagntcacagatccagcctcnatagaagctccacaagcaagcttccatcatcacctcccttcgaataccttcgtatgtgtctgctaacgt

SEQ ID NO: 166363 - DNA, 441 bp, Glycine max
  unsure (1)..(441): unsure at all n locations
atgcaagcttnntnnnaaccatttactgcaaatgttaatatctggaaagctagttttacgacggggacactactcttaaaacaaaaatgacatacaacctcctcccataaatacaaacatcaatgtaaatttagagcaagcttatgcgcatatttccctacgaatgttcacttgcacaagacatcctattaactaagaaaaatgcacccatatacaatcaaggtagcttcattacctagattatttacatgtacttccaaggtgtatctgttatttacatcacacacgcctccttggctaaatttacatacatgcatactcaaagcatttcggggtaccaaaaattgcacatgcgctcatctcggtattcctaatacctatacatatacaaacttcatgatgaatctcgactacctacgcaataacgcgctacatttcatg

SEQ ID NO: 166364 - DNA, 427 bp, Glycine max
  unsure (1)..(427): unsure at all n locations
taacagctcttaaaacgagtttttgcacgaaatttcaacatnactcagcggtaaactatatggttggccaaataacaagatgaacagtgaacgtttctaaacaacaattcttgacaaaaacaaaaaaaagctggttctagccaactaatcaaatcaacactcataatgagacatcataccagcactcctattcaaaaaatattcaaggatgagacctcaaaaaacgcaggatttttatgctacttatggacgaagtcacggttcgagagggagcaacaaaatgattgcgcttacaaaaaaaccgtccggggtcgaaaccaaacaagtgcccacaatgactttttcgtaacactgtcgcgttccatctcacttattaccaattcgcactgcttttactttgagacacctctcaaaatcgactttattg

SEQ ID NO: 166365 - DNA, 170 bp, Glycine max
gttaactgtgaaacctccagctcacaattgactcgtcacgcgacaactatggcagctacattatttttcacgtctgcgaaagttctctcccttccatgagacacaaattgtttgaatgcattccacttcgacagcaccaccagtacaatgaaatgttgctcccagaaatg

SEQ ID NO: 166366 - DNA, 319 bp, Glycine max
tctggtctattgggctagtttaattcaaagaaaaatctggtcgcaatgatattttgtgcccagcatgggattcaactcactctcctataatctgatttttctcccatcacccgaacaccaacattactaatgtccttgacagaacaatacaatactgtcgaagacaaaaaagaaagaggggaccaattactctatcaacattctgattataaatcactccagctgttacctacctaataacaatcttttgtcatgacatctcagctcttgcttgtcatgtcactcgagaccgttaacttcacgaactacatttatgaga

SEQ ID NO: 166367 - DNA, 443 bp, Glycine max
  unsure (1)..(443): unsure at all n locations
catgcaagcttgcttgtggagcttctacagangttgtttctttgagctctaatgaggtccttgaatggtgattttacaccatggagatgcagtacaagataaaggagaagaggtgagagaaggcgctatccactagggaataagccatggaaaaaggagcttcgccaccaagaatatgccttggataaaaagctcggagatgatgcttcaatggaggaaaagaaagagagagagaaagagagagaggggaggagcacgaaattgaaggaggaaaagggggagagaagctaaactttgagttgtgtctcacaagactctaattcattaaagttacaacaagtgttacacatacttctatttatagcctaggtagcttccttaagaaactttcttgaaaagctttcttgggaatctttctcgacaaacttccttgagaagcttct

SEQ ID NO: 166368 - DNA, 447 bp, Glycine max
  unsure (1)..(447): unsure at all n locations
tggcaaatgatcaagtttgttttttttattaanaccgacatcatgctttgatgaatgcaaaaaaaaaatacggccaatgaagagggtgagaatgacggagaaacccatgttatgactgtcattcctatacagccaacgtttccaccaacccaacaatgtcattactcaaccaataacaaaccttctccttacccaccacccagttatccacaaaggccatccctaaatcaaccacaaagcccgtctaccgcacttccaatgacgaacaccacctttagcacaaaccaaaacaccaaccaagaaatgaattttgccgcgaataagcctgtagaattcaccccaattccggtgtcctatgctgacttgctcccatatctacttgataattcaatggtagccataaccccagcaacgttcatcaacctccatttttccgagaatacgact

SEQ ID NO: 166369 - DNA, 438 bp, Glycine max
  unsure (1)..(438): unsure at all n locations
atagagagancnacatcatgcatgctaacgacagtaagcaactctanttctttttatcnnancattggataaagaatttggttatgactgatgatcatgcatatctttaaaaaatatttaattttttttgtcattatgatattggtgtaaaatattttctaattttattaaaaattaatcttcatcataaatctaattaatcatttttagtaaaaaaaaattattatattattcttacagactcaaagtaagatcttacctaagagatcaaacttagttatcactcgaattaactagttatggatttaagaggcttaaatataagaccttatttagttacaccaaatttaatttgactcttgacccttcaactactgtgcataataaaataatctcttaagcaacccatctcttctcttctcttttgctcgagtgggt

SEQ ID NO: 166370 - DNA, 464 bp, Glycine max
aacaatactacctggctgatggactgaaagacttcataagaaacttcaacatacatgaaggtgtattggtccattttgtttcacccgacaattatttcactttttatttggattttatgccaccgctgcataagcaatcatgtggaaggcctcccacaaccactaggaaatatgtgtttactgtcaataaaaccgacagtattatctccaaacctacaacattggtcaaaccttatgcatatgatgaagtagtcgtagtttgctgttaacaatagtatgacatgtgacttcctttgctgtcctgtagttgttgcctaccgaggctgtcgatattgttgatgcttcaaggccatgtataaccgtgcaacataggagtggcgtttgtcacatatggaccatctccatgcataatggtgtacaatatgtggatgacccttggcacagattcttaacggacaatgact

SEQ ID NO: 166371 - DNA, 445 bp, Glycine max
  unsure (1)..(445): unsure at all n locations
cacctgangcatgcaagcttgtatgtattgatggngactctttgttaagaggaacgaggataagggctacgtgggagtacgtgagctcagttgaaggtgggcaacttggggatggtggaattatgtgtgatttgtggatgtggatagtcgacttgcaccatcgcccgaccgccacctagtaccacatgtgacaggtacctcataatcctacaagcttgaagtgaggaagtgtggaagggtgagagttcctacttttattcgttgaccacagagtggtacctggagatatgtcgcgggggtcaggagaccttggggacgtcaggtggggtgctatttgccaaaaccaagcttgaccaatcctgacccaacccgggcatagtcagtcagtgagaacctgcgangtacctaaacacgcgagctcctggctgtcaactgataaaagaac

SEQ ID NO: 166372 - DNA, 404 bp, Glycine max
  unsure (1)..(404): unsure at all n locations
ctattacattttcccacactgctcatatctattgtctatatatctactgtgtatattaatgtgtgagaatgctaatattttttacggctacgcctatgattagacacgatggatggtaccattgggaaatcaaacgtcaccaaatatgcaagatattaattaaatggattatgatatctaatagtataataattacaatgcactgttatgggtacaccatactcaaaatggggttagaactaagtggcagcgattaacataggatagtagtggcggttgcctatcaatcaatgtcaaactccaacaatatcttctaaagggtaaactaccaagaatccaattgaccatgtcaaaatcaaacacataanattaataattaaactacgcataatccaattgaaatg

SEQ ID NO: 166373 - DNA, 193 bp, Glycine max
  unsure (1)..(193): unsure at all n locations
aactgtccagtccagngaggtataaatatgacacataaagaaaaatctactgtatagatatccatatagcatatgtcctattgacttgacatataataaaaacatgtggaacactccatgcgaagacatgttatggattagctagattttgacagagatacaaatggttatgccaaggcttagtaacttcttt

SEQ ID NO: 166374 - DNA, 431 bp, Glycine max
  unsure (1)..(431): unsure at all n locations
agcttaaaggagcactcaaaccctgttacttccaangcctacactccgaagagtctgtcagggtctctccctcctgattcatgtccaacccctaaaataatttttttgcatgcagacactgctcatgaattatacaatacccacaaccttacactcgtgttttaaacatgttcaacacaattgtgctacgatttaacactggttcctaaataggaaacctacattttctctttaacactgcgcatcaacgcttttctcaagataacactggtcgggttattgtacaattcatagcttacaacacaagtaattgtacatcaagtgttaactacacacttatccacaactaatactcactcacaatttcacatctcatagtgtcacaatccaccatcacatgtttacacgtatctcacaaattaacacatgtt

SEQ ID NO: 166375 - DNA, 306 bp, Glycine max
gcaccaagaagagttatgtctagccgtggaccacgagcataggattgcggacgaatatgctcaagtatacgcggaaaaagaggctagaggaagggtgatcgactctttacaccaagaggcaaccatgtggatggatcggtttgctcttaccttgaacgggagataagaacttccctgattgttagccaaggccaaggcgatggcagacacctactccgcccccgaagagattcatacgcttctcggctattgtcagcagatgatagacttaatggcccacataattagaaaacgctaggaaacttg

SEQ ID NO: 166376 - DNA, 452 bp, Glycine max
gtgtgaagcatgcaattctatttattattggcgctgcaaactgggtacccaccaatcatactttcactattgccacacgtttgggtaaatttctgtatgctgttggaaccaaatccaaatttaattttggaaactatatctttgatcaaactgttaagcattcagaatcttttgctatcaaattacccattgccttccctactgtattgtgtggcattatgttgagtcagcatcccaatatgttaaactacactgactctgtgatgaagagagaatctcctctattcctgcattacaaactgtttgaagggacacatgttccagacattgtctcgacatctgtctcgacatcacggaaagctgctgcttcaagtgctgtgtccaaagatgctctgattgctgaactcaaagacacatgcaaggtgctggaagcaaccatcaaagccaccaca

SEQ ID NO: 166377 - DNA, 369 bp, Glycine max
gatccttctcatgtccgtgcgcatatgctcatatcccaagccaaaccttctacgattctgtgtgaactctactagacttgctatgccattcccgtttcggcctaaacccatttcgggctcatattcgtgccccaacatcacccgagctaccatcaacgcaacactagttaagcgcggctataccaggggagactccacgtaagcatttctcacaacttccaatgcttgaaaggaagtttccaaggactcctccacagccttcacataaggcgtagaagaacgacaactcatgagtatgtcttcttctcccacaactataatcaattgcccatccaccacaaatttcaacttctcgtgtagtgttgaccg

SEQ ID NO: 166378 - DNA, 247 bp, Glycine max
  unsure (1)..(247): unsure at all n locations
aacataaggtaatttaaaactgagcttaacataaattaaaactggaagcttaacattaaatctaaataataaaaggtccttaagaactggataattattaaaactggncaaaaccaaaggaaataaaaaatcttgatcctgccaatgatcctgtgcagagtctatggcatgctcattcagatccagtgcaggagtgcctgatgatgaatcctgaggaaggggtangtctggcactggtgcagatgac

SEQ ID NO: 166379 - DNA, 391 bp, Glycine max
acaatgattggtttttcaggaggatctgctttaatcgattactaggtgatcataatcggttacttctctcttaaaagtatttttgaagtgatcaagaacattttaatctattacatcgaaaatctaatcgattaaattgttcttgaaagttctcccgattttgggaagaaaaatttaattgattgaaatgataatataattgattacttcttcgaaataatcgattatattgtatacttaattgattacaaacggttataactattctctttataaatagtcaccttgcgttctcactccagcgtgcgaacaaattaagcgtgaaatcatatgaactgaagttagtgataaagagaagaaacaaatgcttagatatagtgtgactcacaac

SEQ ID NO: 166380 - DNA, 375 bp, Glycine max
cccactcacgcacattcagcacaaatgcgtacctcatattgccatcgcgacgaaccaaccacttgaacaatgaacaacgaccccttcaccttcactgaagcttaccgatcgcgagaaaaaaacacaacctagagagaaaacgaagaaaatatggccaaacactaagcaccctacaactcttttaaaataacaacctttaaaagaaaaagacaacgaagggataattttgacacttttaaaaaatgctgggtgcatacgcaataatgcccgatgcacctagcattagcctattttgatgaggaaatactaagctcattaagggtcttatgtccacacaaccaaaaaagagaagtgtatgaagcactatgataaagt

SEQ ID NO: 166381 - DNA, 389 bp, Glycine max
  unsure (1)..(389): unsure at all n locations
agacacatataaaccttnggttattattataacattcagcttgatccttggtctacgataaggaatgttcaatcctgaaagttctctaattggagagaaacttactatactgagttccttattgagtcaaactctgatcttatcaaaagaccttgactcttgtggcaacctttctctttggcttactaatcctcttgaatcgcggcgcctcccttctattatcaaaatccccgctatttcttctattcatgtcggtagctatcaaacacacattttgtagctctcatagcacccacgatgcaacaacttatctttttcttgctccagcggcggaacccatttcgcctctgacttactcttactcggcccatcatgacccatcttttata

SEQ ID NO: 166382 - DNA, 394 bp, Glycine max
  unsure (1)..(394): unsure at all n locations
cccaaaaaaaagcacggccaatgaacacggtgagaatgagagagaagcccatgctgtgactgccattcctatacagccacagttttccaccaacccaacaatggcattactcagccaataacaaaccttcttcttacccaccgcccagttatccacaaaggcaatccctatatcaaccacaaagtctgtctaccgcacttccaatgacgaacaccacctttagcacaaaccaaaaacaccaaccaaaaaatgaattntgcancgagaaaaccttgaaaattcaccccaattcaaatgcctatgctgacttgcttcatatctaattgataattaatggtaccataaccctatccaagggtcatcaaccttcatttctccgagaatacgactcgaa

SEQ ID NO: 166383 - DNA, 388 bp, Glycine max
agcttaaaaaagtgatatttattgaatgcatttaccggtaaatatgggcaatctaaaatctttattgaaagacaatgaaagtgatatttcagtggcttttgagttacgaaggatgaaaaacaaagctctcataacatctccatgaggatctatgcatgatagtttataagaaatgactcgggagattgtccgtcaagagtccattgaagatcctggaagtcgcaatcatttgtgggatccacatgatatttatgaaacactaaaaaatgatcaagttaaagcataaccaaatgctatatctcttcgaatattcgaattctttctagtgaaacatcagaaatatggttttgatgatgttcaaaaaattgctctacattgatctcgctat

SEQ ID NO: 166384 - DNA, 418 bp, Glycine max
tgaaaaaatcttcagaaacaagtcacttgaagaatcttgacttttggaaatgtatttttcgaaatcagtcactactaatcgattaccattaaggtgtaatcgattacacatcaacaaatgtgactcttcattttgaattttgaaaattaaaatgtttagaagctttggtaattgattacaagtattgtgtaatcgattacacaagtttaaaatactttaaaactgtttaaacataagttataattcttgaaatctgaaatcttaatgttttaaaacactggtaactgattactaccttctggtaatcaattaccagagagtaaaactcttaaatatgattttgtgaaaacttcttgtgctactcaatattttgaagaaaaattttagtacttatcttgattgagtcttctctcgattc

SEQ ID NO: 166385 - DNA, 426 bp, Glycine max
  unsure (1)..(426): unsure at all n locations
ttagagtcacctgcngcatgcaagctntgcatcagacaaagatgataacataattcattttaggatatgttttcactgtaaatggtggtgcagtaagttggaaaagttccaagcaagctacggtagcagattcaactattgaagcaaaatatatagtggcaagtgaagccactaaagaagctatttggatgaaaaatgtcatatttgaacttggtgtggttccttcaatagaagagttggtcccattattgtcacacaataatggggctattgctcaagcaaaggaaccaacatcacaccagaagtccaaacatattttgtgaatgtatcactcgattagagagataatagaacatggtgaccttaagattgaaaaggtagatggaaaggagaatgcagcaaatcccttcaccaaggcgcttggca

SEQ ID NO: 166386 - DNA, 422 bp, Glycine max
acagcggaatggagaacgaagagagagagaggagatgccacttccacgagaagatgagtctagaaggagctcaccaccataagaggccatggataagagcttggaggaagaaggagataaatgaagggagaggaagagaagaacacgaaattttatgctttaaaagagctctaaaatctgaagtttaatttctcaatgatcaaagttcaaaaaaatacacacacatgacctctatttatagccaaagtgtcacacacaattggaggaaaatttgaatttctatttaaatttcacttaaatttgaaattaaatttgtggagcccaaatctcactaattatgattagtgaatgttagctatgggtcagtccactagtccaagatcaagtcccagattctccactaagtgtgcttaggtgtcatg

SEQ ID NO: 166387 - DNA, 449 bp, Glycine max
  unsure (1)..(449): unsure at all n locations
cctgangcatgcaagctntancatatagattcatgttgttgtcttcccctatctataacgcggaaagatcgtgactatcaaggccgaccaaaagcaagaacgaaagtgctatgtggaaaacctgaaagtggcactctatctcccacgaggaagcctgtccagcctcacctcatggtggatagataaaccagaatattaagggaaatggttactaggaacatgaataaacaaggcttcaagcagaaaatttcagagattacaacactactacaacaacatctttctacatcgattaaatggggcgttctagatcggtttacgaccgtcgtcataaaaaggggtagctattctacgacggtcacgtagaccgtcttagaatgtgtatatttctaagacggtcacgtgagaaggactgatgtagaaaacatttcattctacgacggtcacct

SEQ ID NO: 166388 - DNA, 380 bp, Glycine max
aacttttctgatgcttaacaatggccttgcatatcgatgtgctttttgtagtctttcatttgatgataggagctattcaagttgtcctactagatatacaatgggagagaggacaaaaaatgtgtgattatttgcatcctttctttcaaatcacagagatgatatatgatgtctcttacccaacatctaatttgtatttcatgcaagtgtggaaaattgaatgtatgttgcttcgaaatttgagttatgaagatgagttgagttgaaccataactattgatatgagaacaaagttcgtaaatattggagtgattatagcaatgtgctttactttgggtgcattctagatccacgctttagaatcaaacttttgatgtatt

SEQ ID NO: 166389 - DNA, 409 bp, Glycine max
  unsure (1)..(409): unsure at all n locations
accaaanattgtattgaaagaaaagaaatagaaagtgaatatgatgctggatacaaatggttgcattttgagatgataatacactggcttagtacttcaatttattctttagaaccaataaggagactgagtttttaaagtaaaaatatagaggacttccatattttggaaacatgaatgttgaaacaccgtggacatagcatggtcatgatgaatggcattgcttttgtaacatgttgaaattataggtactgggtggaaaactgaaaagagacaatatactttattttaccaataggactctatataattgctatattgtgataataaatcactaatgttattttcctatttatactaatattctagatcaattactagtgtgatactatgaattaatgcacactgc

SEQ ID NO: 166390 - DNA, 382 bp, Glycine max
  unsure (1)..(382): unsure at all n locations
catgcaagctngatttgtgagttgattttatctttanttcncactttgttattagtccattgatccaaggaaacttccaaagaaaaacgtccgattgattttttctattattttattcaaagatattttaattattttattattatttctcaaaatattttgatcattttattattattttgctctttttttgcttaacccacgttacagcgcgaacgattggttagattttgttctaacagtgattaaacgagaatacaacacaaatgatcggttgaaattcattttatcatttattatgcgagacaaccgcttaaacgatcggttaaagcttgttacaaactgaagaaaagacaaccccaaatgaaccaaatgaacatga

SEQ ID NO: 166391 - DNA, 450 bp, Glycine max
  unsure (1)..(450): unsure at all n locations
ctctatgagaatcacttatttctatttccatgaatgncacggcggcctgagcaatcattggggactttagtacagtcctctaataggatgatcgaaatggaggatcctctaatccttcctagagagaagcttctgattttcacgagatgatttcataagcaaaccttattaatgtaggctttcaaggaccaactttcacctgacatagaggtaaccttcatgaaagacttgaccatgttttgattaatttggaaagaacgattacgtttcagaatgctcttatccttcattcacctttctttaaatttgatcatatggtggttgtaattaaaatgttntgcaaaaaaggagaaaacagaaggagactttttagattcctggtttcctatatgtgtgcataacggattngagtattttattaaagatctatgggagaatgatggtgtttgc

SEQ ID NO: 166392 - DNA, 316 bp, Glycine max
atattctattttttttgcaataagcgactacacggtgtttacaatcgttgatatccataccaaggcctccatcgtttcttttatacaagcatcaatgcaaggcttgccacgcatctgaattcatcgatggcaaactctggtgggctacctggacacggatcctatgggccacaagtcgaactttattcctctctaccacctaccaaaagatatgtctcaaagaattccatcacttcctgagtaagctggtacgcactcattatggctctggtctccattcacccttaaccatgaataccaagccactccctatatt

SEQ ID NO: 166393 - DNA, 324 bp, Glycine max
ttggactcttgtcggatcatatcaaccagactttggacattcttcatgagatcttcttttggtctacaatgaaacatgacgtaataaatactatgccacatgcattgtatatcataaagctaagtctaaggtcttaaaccatgaattgtataccccctctgctattcccacctctccttgaactaacatatccatggactttgctcttggtcttccaacgtccacgagaccgtaaaattctatctttgctatggctgacacgctctcaatgatggctcacttcattccttgccatacagtggatgatatatgcgtgataacaaa

SEQ ID NO: 166394 - DNA, 465 bp, Glycine max
acaacatccaagccaaacaacatactaacagcactttctatcacagcccagcaaaacagagcaaggcagagaactctgctcaacacaccaactaaaatcacagcttttctcacttaaagaccccagtaacaattccttcgatccaattcactaaccgttggatcgactccaaaattttactggaagtctatagtgcacaagcaaacatccagaactcactctgcactgctctttccacacacagtaaatacatagcatttttctgcacttgtgcaaaatcatgctgcacaatttcacagcaaaaatctgcacaaagtgcagatttcgaaaatcacacttcctctcatccaatcttgcccaaatcacttcctacaagtcccaaatcatgcatcaatcatgtctaacccaaaaccaagcttcaaaacacagcaacacagaatctaggtggtcaacacccctccattc

SEQ ID NO: 166395 - DNA, 166 bp, Glycine max
ggcacccgcgcaagcaccgacgcaccccaccccgacgcgcggccaccccaccaccagcgcccaccccgccaccgccccccaaacccccaacccgcaccccgacccgacccgccccgcccccccaacgcccgccgccccccccccccgcaccccccccccccccccc

SEQ ID NO: 166396 - DNA, 355 bp, Glycine max
actacccgaaacatgaaccataatagtaagctagattactctatttgttcaagcccttcgggaatggattgacgaatgtacaacacttcgtccgcctttgcctcataatagtctcttgaattcaactttttcttttatacacgaacatcctcaagctctatatagacttcggagcttcgatccattgagagatctcaactagccaattgctaataaactatgcacttgacacgaggtcgctactgtgcagaaagaaagaatgggaccaaacatgctttctacaacatatctttagagaagtacagcttgtcagtgtcacctagtgcttatagctgacttttattcgttgaatcaa

SEQ ID NO: 166397 - DNA, 382 bp, Glycine max
atgcccgaagaaacaccattggctagttaaccatgcattaggtaccatgttcaattatcttgtttttaagtgaaacgggtttatgatcccaacatggttggctcgtggcgcctaacacatgacactaagaatgtagtatgaagttctacgcttcccccttttttgtttttgctttgtagaggacaacgccaggatgagcaaacatgaaaacaaatggcatcgcattttgcagatcaaaaagtttgttgaacgcatatgcatgatgatgccatgactcatcgcaaatgtgaggctggaatatgatcatcgacaaatgccggatatgtccatttcgacgttatgaagagatgctcatgcgatgcatgatatgaatgcattttac

SEQ ID NO: 166398 - DNA, 253 bp, Glycine max
ttaacacctttcgtgcattttacagtggcaagaaagctccctgaattaccactctatagttacattttaaaaatcttccactttcactattaaaaaacacccactcatcatattaaaggagggtcataaaaacaatacccaaaacaaatgtatcaaccttaccaaagagatccgctagacccaatacaaaaaacttggtagcgagagctagtgaaaaggctgatagggttagatattgggtgctgcattcatc

SEQ ID NO: 166399 - DNA, 424 bp, Glycine max
agcttgtcccagaactggaataaagattaataaatacattccgagaatcatagcttagtcaggaggttccttggcctcgaatcaaggaaaacgcgtctctctccgttactctcaccttcttcctcctttctcctctaaccagcgcataaccaatggtccgacctaccgcccatggctgcctctacccctactccggctatgccataacacaccaccctcccgaggagccatcccttccgtctcagctcccaccctgcccttatatacatccagctcaatccctcgggattgatttcgagagtacccggatccacttgctagccttgtgcgatactcggatgccatggtttccttcttcggtgcagccaccactaccgccgccgacgtcgatgctgtcaactattgattccgcgagtacctaaca

SEQ ID NO: 166400 - DNA, 384 bp, Glycine max
  unsure (1)..(384): unsure at all n locations
catgcaagctagnctacctgtaacttggaccctatttttgtgcacacacacagctcggtaaggaggctcttcagtcacgagcacttgtgccttgccgatgtgctgcgcaaaaatatatacctgtctgcctggcaaccatgtgacatgctacgaatccaccccgaataatctgccacaaacttgctatctacctctaggctaaaccaatatcacacaaaaaaaggaagatggaagaagagcagtgcaaaaccgccaaagaagaagtcgacaagctactttgtgccaacttcatcagagaggtcagatttttcacctggcttgccaaactcattctggtccaaaaggccatcgcgtaatggccattatagatcgactacactgatc

SEQ ID NO: 166401 - DNA, 428 bp, Glycine max
  unsure (1)..(428): unsure at all n locations
aacttttttccgataaagngacaatcaatttctatatgcttggtctgctcatgaaagaaggggatttgagacaatatgtaaagttgctttgattataataaatcagctttatatgatcaatattttcaaatcttaactcactaagtagctattttacctatacctgctcacaagtgaccattgctcaacncttgacctntatantnnaccaantgaccatattttgcttcttacttttccaggacacaaggtcaccctaacaaaatcatggtagactgccattcgtttggaaaaccaccctaatctgcatcaaaatacctccacaatcacagcttttcctttgtccttgataacaacccctcactcacaacataactagtgtattgcaagatctctattaaagtattctatttagaccccatgtcaac

SEQ ID NO: 166402 - DNA, 346 bp, Glycine max
catgcaacttcccgcttgcttttcatgatttaatcttgcatttaacttcatgctgcgttgtcgactcattccttctaaatagtaagttagtaacacaataatttcagctgaggaaaagggaatattcggatttgctctagaatggagtgctctcttcctttgaagttatagtgtgatacctataatttgttgctctaaaagtgagtgcatatacatgggataacatggatggattctgcgttgggcgctatttaactttatttgtacaactagatgccctaaactaaattaatcaatgatcaacaaattatgaaagggacttctaacaatatttaattgcctcata

SEQ ID NO: 166403 - DNA, 262 bp, Glycine max
  unsure (1)..(262): unsure at all n locations
cgcagcatgcaagcttataagcgctgatctcncatattaatgtcaagcggccgccatatacgaagatgatgttccgagtacattggatttggtacgaccatgccctcctgatttccagctgggaaactggcgagtggaggaatgcccccgcatttacgcaacgagcataatgctcacctttacagccttaaaagctctatacttgggcttacgctctagagctttccctttggctacggctctgtgtcttctgcttttgaat

SEQ ID NO: 166404 - DNA, 420 bp, Glycine max
  unsure (1)..(420): unsure at all n locations
ggctcaagtcgagggagattgtttgatgttcgggataataaccttgacaagtaagatggtgacgagtttgttgaacccctaagcatggacaaaaattgtccaatgtcgagagtggtaacctcgacaagtgcaagagttgcaggtcagcgaggcttgtcaaagccccctagcctagacaagtgttgtccaagctccttctgtcaaattgtctagggtggacatgttctttggctttgcaagcgaggtctaatgtgtcagatgagggaagtctctgtatttgacgattatgacctttntctaacagttggagagtgcattgaagacaaacgttatattntgtcttttgttcagacgtgtgcagtgcaagcgcagtactcttgcatagtgtaacttgtggactgggcacgtactatagacatg

SEQ ID NO: 166405 - DNA, 374 bp, Glycine max
  unsure (1)..(374): unsure at all n locations
catgcaagctntataaaatataatantaatgcatatatngaataattttacaattcccccctatgtctgaaaccctgcgtgccttcctgccaacgagctcaacccatcacgaattggtgagttggctcatcaaaattttaaaaataataaaatcaataacatttttctcatgttcacatttcatactgcaaaaatgaaccgaaacgaactcgtttgtttcagatccaataatgtttctttctttctttctgcattaagctgcatcagcttattatattaagctgtgttagcttattctctcttcttttttgttgaaaccgtaaaatgaagccgttgagctttttctttttttctaagttgttaatctacgcggg

SEQ ID NO: 166406 - DNA, 422 bp, Glycine max
  unsure (1)..(422): unsure at all n locations
agctntgaagttctagtcattatttacttttcaactttgttccatatattctcggcattttctattttattctcttaaaaaaatcccaaataacaataactacacatttattcatattaaaagtgaattgaggtgtttgtagaattaattttgaattaacatggttctatagaatcgattgtaagtaaacataagtctgtagtatataatatgattattgtttggaaatttgctaccaaaactgattttgtgggcaattactaaaatgacttgagttcaagagtacacattgaacaaatagcatgactaataatacgactcaagttagtgttgattcaaaagctatttctaagagctttacattcaatgataagtctaaaacttagaatcatgttcttaaaacaatgctgaattaaattcat

SEQ ID NO: 166407 - DNA, 355 bp, Glycine max
  unsure (1)..(355): unsure at all n locations
catgcaancttgcttctgcaatctctctttttttgatgatgacaacttctgaaatcaagagacacatacacacacacacacacacactctttcctagtcgatcactcacataaatctccattatcccccattgtttttgaatttatgcttctcttaaaattaagttgattactcatgtgagttcttgatttaatcactatttctcttcccctctggcatcaacaaaaactcaaactgcttcacatgttccaaacatacaaatacaactaagcatccatacaccattcatggaaaaatataaaccaaattatcaaccacgaaccatgaatagatcaaatatataagaaccaccatt

SEQ ID NO: 166408 - DNA, 454 bp, Glycine max
tacgaacccaaacttgtagcttcaatgctaggaaacatgtttatggctaggaatccaaaatatggttttagaattagaaaaacatgaaaattaggatttgcttgtgagagtttttgctcgaatttgggctgccccatgtttgatactttacatagaggtagcgtggaaaacaccttacaatagtgtgtatacataggtaaatataaggagcatgaaattcctagccaagtgtgaatgattgtcttcctaaatgaatgtatgatagtgtggaatgcctttttgaatgcaaatatgtgcacgatgtaattagctctccaatacgcatataaataaatatgagtgaaacacgtaaaatttgtatggtgtacttcaaatgtatgtaagtagtttgtgatagcaaatgtttatgatatacattacgtgtaaagtttgacgtcacactttgagcatgaaa

SEQ ID NO: 166409 - DNA, 85 bp, Glycine max
tcttaccaatccaggctctcatacaaactgtcactcatcaacccctttcgacaaccccagaaattgaaaaagcttatcccatccg

SEQ ID NO: 166410 - DNA, 412 bp, Glycine max
  unsure (1)..(412): unsure at all n locations
cagctgtaccgttctcttgttcggaggactgggagtnacatcaatgctgttgtcctcaagcgccttatcatgagcaaggtcaacaagcccccgctatccctctctagattgatccgttacaccaagggaaaggtacctaccngtctctttacttcaatatcacttacatttggcctgtgagatgataacgaatatagtcatcgatgttttcgccttggattaactcattaagaggataacataacctgggctgttgggccgtgacaatgacatatcggttatgaatccctgctcttaagaactgactgacgtcactgaactgcacactaaattgaaagctgtgggagtgcctactttataactgctttagactccttggccaaaccgctggtttgcacattttttttatata

SEQ ID NO: 166411 - DNA, 253 bp, Glycine max
  unsure (1)..(253): unsure at all n locations
agcacaaagcgaggatcgggaccttaaccgtactttcttntaaaagacgacgatgagataattacagaggacaggaatccctgtgggaaactcataagaacatactaaagattaaaacatggggtgacttccttaattgccccagatcttaagcgtagtatcgcttgacacacgtctgagttcacgggtgaaggtggctcctcgtcatccatgttggcgagcaccatggtgccttcggagaaagcccttttac

SEQ ID NO: 166412 - DNA, 238 bp, Glycine max
ttaagggtttcttttatccagaatccagagggctgtttaaggggtactacttcttcagattttaaaactttagactccttttatgacacttcctggtattataagaactgaaccactaatactcttctttttcttatatctcttttttttcttttttccttggtactactttagatttagactttaagggactttaagggtgcacttcttagaattcttacttagacctgttatacct

SEQ ID NO: 166413 - DNA, 408 bp, Glycine max
gcatcatactgagcatgaatggttggcacgatggactgatgatgaattgttgtgggtatgtgttggactaataaattgtttgtgtgcacttatgatatttgttaatggtttctatttataatgaactcacccttgcattttgtaccgtgtgggtgatacttgtgatgatcatgaatccttattcgtgggagcagaatgacagcggtagaggacgaggagtgagattcttctgtggagccaccgagccgatgtgatgacattgggaattatttgggagagagttgtgtttgttaataactcctcatacctggtctgtattcttttgtgattgggatgtaatcataattattatatgtacaacaattacctttatttgtgaagatgatactgactacttactatgtgttg

SEQ ID NO: 166414 - DNA, 345 bp, Glycine max
agcagaggagcacaaaccacaaactcttgcgacaggaacaaatttctgattcaagaccagctgggttaccaagttaaccaatgcatccagtttgccttcaagcttcttagtttcagatgatgcagatggatttgtagctacctcatgcactcctctaatgactgtggcatcatttctggcgcctaactactgggagttggaagccatcttctcaattaatatcttggcttcagcaggagtcatgtcttcaagggcttcaccactgacagcatctatcatacttctctccatattactgagtccttcataaaaatattggagaagaagctgctctgtaatctgatg

SEQ ID NO: 166415 - DNA, 130 bp, Glycine max
ttgtcttctgactttttcacaatcttattctgccaaaaactttttctttctaattttcacaaaaagccatgcaactttccataataacctgtatgaacttctaactcactaagtattaaataatcctcaa

SEQ ID NO: 166416 - DNA, 392 bp, Glycine max
  unsure (1)..(392): unsure at all n locations
tctcataatgctctgaatgcaaagatagtatccatgacaattaataccataatataattggagaaaaaaagaagattcaacacaaggaaatttattatggttcactcgggcacaaacccaacgctacgtccaatcctcactttccaagtgagaatttctcctaatcaacaaacaactgaccatcattagcttaacaacagcaacatcaataggttcaacactccatagagctaaaaccgacctattggagaaacgcttgaatataagccactcctggctttacaacanaacaacttcctcaccacaacaccacacttgatcttggccgtgggagaagagaatcttgtattctttacctctttagactacacaagtattattttttgtaaatc

SEQ ID NO: 166417 - DNA, 357 bp, Glycine max
  unsure (1)..(357): unsure at all n locations
tttatagtgcanatccatgatgtgcctcttatgtacgtgcaataatgggtcttgcagattttacactatgatntaataaaattattatttgaatttattctaaatttaaatntgaaacaaagttatatgaaaattcttgttttaacgtgacgggttttaaaatntaaactagttntaaaanaaaaactaaaataatgtttaaaatatgattagtttcaaataaactcattttgaaagtttaatatcatataaaattagtntacaaagttttctgtgtggtagtgagacaatggtgatggtggtgatgtcatcagcaacaacgacgataaatatattagtggtgattatagtggtagt

SEQ ID NO: 166418 - DNA, 247 bp, Glycine max
  unsure (1)..(247): unsure at all n locations
aaatcattgtgatcaacaatcatgtcaaactagatggcattaaaaacaccaggacacactacattgatctctgagatggagcctaaacacattgacgaggcaatgcacaacaacaactatgtgaaagtgatgcaagaataactcgaccaatttcaaagaatgatgtctggaagctcattgaactaccanaaggtaagaaggcaactggagcaaaatgggtattccgcaacaaactggacaaatatgg

SEQ ID NO: 166419 - DNA, 505 bp, Glycine max
  unsure (1)..(505): unsure at all n locations
ttcacagacaatgtgtactctaacatagtctgaatgctaagaanataaggataaaatgtgtgaattaacctctnttcttgtaatgaagcaataagtaaaactgatcttcatctgagggtgtgttgcaaatagtagctntcttcgttccattaaatttcacatttccaagaaccttttggaggatggtgtattcagtgatgagaattctatgcttgttgcattttctgttaacttggtatctgtcaatctctgcttgtgggttctgagtcccaggaacaaactatactacttgctatcatacaagagctcagagtttctgcatggaatgccaacaattcagattgctgttcctgngaagggttcactcacttgtggagaagctcattctcatcagactcaaagctctgaagtgcttgaactntcaaataatgagtttcataggatgactccacctgctcttggaaataatatattttatcttgaatatctagacttatatttaaac

SEQ ID NO: 166420 - DNA, 323 bp, Glycine max
tgctggaggaccatatgagagcgtgcgtattataacaaaaagggagttgggagagttttctattgttgatagagttcacctataacaatagtgtttattataccattggcatgactccctatgaagctctgtatggtagaatgtgtaggacacctctgtgctagctagaacccagagagaacctcaccttaagacctaaatgatgtagctccatgtagtgctcgtaggccttggatcttcttcatctatggagtcctttgcttcttgaagatcaatggcagcgaaatggagaaagaggaaagggtattggagacactacttca

SEQ ID NO: 166421 - DNA, 271 bp, Glycine max
  unsure (1)..(271): unsure at all n locations
atgggcttgtacgtgaagacccacacaaacatctgaaagaattccatattntctgaaggcctcttcatattctctatagggagtggcgaaggactggctatattaccttgcttcaaggtccatcacgagctgggatgacctcaagagagtattcttataaaaaaaantttcctgcttccaggaccacgtccatcagaaaggatatttcaggcattaagcaactcagtggagagaacttatatgaatactgggagagatataaaaattatgt

SEQ ID NO: 166422 - DNA, 312 bp, Glycine max
  unsure (1)..(312): unsure at all n locations
gtatagcctttgcagataatttccgacttatagatgatagtcgggatcttgtagataatggtagatataaactatagcttagagataaaagctactaaataattgtaccttgtagataatgtgtggctttgtagataattagctacctgccaatagataagatattcanatatattcaaatattaataggttagagataacctgtcagttatgaagcccggctgctaaggggtcggtgttcgtgctcctgttgcaggctgacgtgaagggttacacatgtcttaaattgcatgtaggatgcatatgtatttt

SEQ ID NO: 166423 - DNA, 417 bp, Glycine max
  unsure (1)..(417): unsure at all n locations
atcctcttagtcacctgcggcatgcaagcttgaaagtagaaggggcttcttagagttccactattaacacaacagatgatgtcagtgtggatacaagtaaagtaattgaagaaaaatgtgttgcttcaagaacgcacatccgattacacaattctaaattgctctagctattattatcatagtatattttgaatgcaaaatgcaaaatttatcctattattgtgttgcaagtgttaagaacattcatttataactatcaacaacaatacttngtactctgctattaaaattggtcaccgtatgaaccaattttgattattaataaaagtgttcttaccaaatgtactagccgacgtatctaatcttctctttcatctagtgttagtatgatctttgatcctcttcttactgtgcgat

SEQ ID NO: 166424 - DNA, 191 bp, Glycine max
tctcaacttcagtgaggactgcacaccttatatgttaacgccatacttggatggaatagttagcaaactacttgtacttctttatgtatatttaatacagtgttattcttaagaataatgttattatggtcatttttctgaattatcatatgaatgaattattctctcaccctaatttggatattctatac

SEQ ID NO: 166425 - DNA, 426 bp, Glycine max
  unsure (1)..(426): unsure at all n locations
ccttcacctgacgaatacactgtacaaaacttatcttctncttcttggacaaagtatggcanggctggggcaagtataatttcttcccatcagaccttggatgcaactgtgctcttatacccatatcagctagatcttgacgggtatacaagccatccttcgtcttgccttgaatgttaaggagcgtcccaataacactgtcacaaacatttntcttcacatgcataacatcaatacaatgtctaacgtcaagatcacaccagtacggaagatcaaagaaaatggacctcttccttcatatgcaactctgacttttattcttctcttgtgtcgttccaaatacagtagtcaggtgttgaacaccgtgatatacctgctcaccagtccacaggatgcgcgtaatatcatgctcttgacttccattaa

SEQ ID NO: 166426 - DNA, 418 bp, Glycine max
  unsure (1)..(418): unsure at all n locations
ttataaaagcctaaaatcaacacatagtgtcgcaacctacccttcggcgggagggcgacgcgtgactcgcgggatgcgtgttccatgaaaggaatacgcgcggagtcgccaccaacgtttatttgaggaaaacgtcggagaaaccagataagacgcgatctacgaactnttaagtgaaaggctcgggagttgtatttactcacgggtaatgtattagcaccccacacgttcgtcacaagggacgacgagccttaatcgaatgtcaaacatgactctgatatttttctatttttgggcgacaaggtggttccctttgctctcatatacctcattgcgataggagacagcctacgtagtcttttatgcggaatcaatactcttttacttgaatggatcatttacgcgtggacctataatg

SEQ ID NO: 166427 - DNA, 332 bp, Glycine max
  unsure (1)..(332): unsure at all n locations
tgttgctgcaagctctggtgactgggaacaagtattctcgtgtttttcagatcgttncttctncaggactgcgtatatgtgtatgtgtgtattatattcgntggtctggttggtggttggatattgtttgcgcagaagaaaaaagaagaagtcgagatgagagtcgtcatcacggaaagggcaggacggacgaaatcagtgtcctatctttgctttcctcttatcttcgatgagagggaaagtaagaagggcaactgtcataccctaattacgtncggggattactacttgatgacgtgcaataaatgaagtcctgagacgtctcataaatc

SEQ ID NO: 166428 - DNA, 400 bp, Glycine max
  unsure (1)..(400): unsure at all n locations
tatcttctagtgtagggcctataggacactacgaatactccaatggagtgtgtgaatattccctggaaagatagaaaaagagcttcaattntgttacaaattagcttgggcccattctatcantttgagggtcaaattgggattggaagttagaacctctgcacttgaatatatggactgtgaatttgggtnttgctttgtgtaattagtttaattaggtagattagatgagcctaatcaaggctcatcccttccttctaagtaataactgtatatatattagnggaatctatctagttagttacactatctttgaccaaaataggttagttacttgttggcaaagttatgaaactaattgtcttcatcttctcctctnttccttctgtcttcgtttttc

SEQ ID NO: 166429 - DNA, 255 bp, Glycine max
tctctctcattcaagtgtagaaacactgccaaagtcattgtgtaatttatacaatctgcaaactgtgaagttgtctaatcgcagaaaactgaccaagttgcctagtgacatgtgcaatcttgttaacttgcgtcatcttgagatacgtcaaacccctattaaagagatgtcgagaggaatgagtaaattaaatcatttacaacgtctggatttcattgttgtgggcaagcacgaagagaatggaatcaaagaatt

SEQ ID NO: 166430 - DNA, 322 bp, Glycine max
  unsure (1)..(322): unsure at all n locations
cagtttggaattaatgccgattcttgtgaattagctacaattattctactatggtgcgagctngactaagagaaagtctacatatatctactttgtaaaactgagttgagtgtctaaactctaaaggggcttgactatgagtggaagtccatgacttggccttcacgagagcataatagaacgtgaatgattgtcacctggtgaaagcttaacagtatacctacagagaagtaggggtaacacaatcttgtactccataaaagtcagattccttcctacacacattgctcctcaccgcttctaagaatctcacatagatact

SEQ ID NO: 166431 - DNA, 253 bp, Glycine max
  unsure (1)..(253): unsure at all n locations
cctaatgtatctaactaaactgcacaaggattctctttcctctccaatagctctgcgagngtataaatgcctcataatacagcataaatgactgcgagaattggcatcacgatggtactatttttctcctcaggctacaaccttcttatataacttcattgcactccattaatggcctgccactaatcattcctatactgcctcactctgttatctcattatataagatatacgcgtagttttaaatacgaat

SEQ ID NO: 166432 - DNA, 316 bp, Glycine max
gcacatcaaagggaattttatttttttcccgagaccggcacttcctgtcctcatctgcgaagggcaatcacaagtagataatgatgtcaactttaccgctaattataagtgaaaaaccaaagcgtagtcatcattgactaagtgtaatatattagataattggtttaagaatgacttctgaagttttatattatatatattttccaatattgctctcatactcttataacatataagttatgagaaactccactttacatctaatatttatcctatctaatgcatgctccttcctgataatttagcagtcctactt

SEQ ID NO: 166433 - DNA, 441 bp, Glycine max
  unsure (1)..(441): unsure at all n locations
gcttgactgagtcataagagatataatatgtgccatggtntgtgttaacaaaaaatcaatcaagaatcatcaatcatctttgaatcatctatctttcaatcttntttcatcatcatccttcaacaatctttcaatatcttctttcatctctttcaacactttcaatagaactttctaattcatttctcttncatctttctaaaagttttgatcaacactttctcttccaagaaaaatctntggtcanaaacttgngttattaatctttnttattctcttctcccctttccaaaagaacgaaggactaaccgcctgaattcttntgattcttcccttccccttaagcaaaagaattcaaagggactaaccgctgagatatcttttggttcccttacanagattcnanggactaaccgctgagaattctttgtccaacacatt

SEQ ID NO: 166434 - DNA, 409 bp, Glycine max
  unsure (1)..(409): unsure at all n locations
acaatattatcatttcttgcactgaattgttgggagttggaagccatcttctcaatcaaattcctagcttcagcaagggttatatcaccaagagctccaccatnggcagcatcaatcatactcctctccatgttgctaagtccctcatagaaatattgaagaaagagttgctcagaaatctggtgggggggacaactngcacacaatttcttgaatctttcctgatgcctaanatntctnttctgatggcagtggtcctagatgcacggaagaatatctccaagaacactctcttaatgtcaacccagctgaaaatagatctgggagcaaggtagtatagccaatcttttgtcactccctccagagaatgaagaaaagtctctagaaagatatgatcttcttggacgtc

SEQ ID NO: 166435 - DNA, 253 bp, Glycine max
  unsure (1)..(253): unsure at all n locations
agatatgtcgcgggggtcaggagaccttgtggatgtcaagtggggtgctatttgccaaaaccaagcttgaccaattccgacccaacccgggcatagtcaatcagtgagaacctatgatgtacctaaacaggcgagctcctggcagtcaaccgataaaagaacaaagaccacaaagcanggaggcttgtgtggtggctggccagcaatgagtcttgagtgagatttgggatatggcctctggtaatcgattacc

SEQ ID NO: 166436 - DNA, 399 bp, Glycine max
  unsure (1)..(399): unsure at all n locations
gttctcagaatgttaaaattattatgctcaaaatcaccaataacagaatgctcatgatgctcaaaaggtactaaatgattgttaactaatctataaaatgtcctatctatcctcangatcaaatggttgttagacacatggattttctcttgtcatacactaatatcaacatgcatattagctgccttcttattcataatacattgtaggtttgaactacagctaccatcaaatgatgtccaaatgaccttgtaatttgtgagaaaccttattaaatgatgatacgatatcacatatgaattcaaatcaataatcaaagtctaactatagaagctaaaattgtgagttaaaaaaataaagaataaacttggaaataaaaactttgacgaatactttttt

SEQ ID NO: 166437 - DNA, 437 bp, Glycine max
  unsure (1)..(437): unsure at all n locations
tgggctcgtgcacttagcgcaattctgaaccgcttagcgcgcattagtgaatntcggcttagcgcggcttttctcgctcagcgaatggactgaagcggtgcgcttaacaagatgacccttngctcagcaaacatgcataactcatccttcttccagaatcatcctcgcgcttaaccgaggattgttgcgctcagcggatggctcgctaagccaacagattggcttagcgagggtgaaaatcagcacttcaaaacttgcctaattaacctaaaattgagagaaaaatgttattatacacacaanatggaagtactaagtatttattacccatctntaacaannaagtaatacaacactacanaataaccatatattggaggagttgatacaattacacaagttaatacacatagttagtcatatcaccgactacaact

SEQ ID NO: 166438 - DNA, 306 bp, Glycine max
  unsure (1)..(306): unsure at all n locations
tctgagagaccatgcaagatctctatgatatctatttgtgggccattagtctatatatctgacaatagccgaaagcccatgaatctctttgtggcggantatggtctgccatcgtctctgcccttgctaacaatcggggtagttgctgtattccgttcaaggtaagaggcaactcgatcatccacatgggtgcctcttggtgtaaagagtcgagtatcctacctctagcctctatttctggatatacttgggcatacatatactcgactctattcttgtgggcctggcttgtctccacatctattg

SEQ ID NO: 166439 - DNA, 439 bp, Glycine max
  unsure (1)..(439): unsure at all n locations
gctgcactgcttgtcttgacangaagaaaggaagattatgttgtacatctatctttagtaaaaccaaaagaaaataagtgttggaaaggcgtgcaatcagaaatgcattggctattgaaatctttgaagaaaagggttatgaagttgagaaaatttgatggcaatttagcagtctatacctgctaaagaactgtagttatgtagggaggggtggtatgntttgtttggctattgttctttcataacanagaaaatatcattatgcaatgaatatttggatagtggttgaaacaacaagttttagacaagatttgttgatggttgacactgatgtactctggataggttgcattggaaactcaacaagatgtacaatatcaacaattgaattctccccagtccttttagcaacaccctcaatttgtaatacaaaaagtta

SEQ ID NO: 166440 - DNA, 427 bp, Glycine max
  unsure (1)..(427): unsure at all n locations
gctcctataagctgaaccatttatcaataaacacaagttgtgttttattcataatattagagtttatctctnttatcttaatgagagtgattctcctaaattctcgagtgattcaagaacaccctggctgtatcaaaggactttcacaacctctgtgtgttgccctcgtcggaaagagtgattctatccttcctttcatcttcaaccttgttctttcaaaccacaattccagaagatccatgtctgcccagaattttctcgtggccattacttccatcttacacactcacattgagtgattcttgagcctcaattgaatttcaaaatgagaccttctacctcctcttggaatcacatcattcggaccctcgtagcgttgagttattgtcatttctatattttctgacaagcaccacttaactctcat

SEQ ID NO: 166441 - DNA, 401 bp, Glycine max
  unsure (1)..(401): unsure at all n locations
catcaanctaaaagagttggaagtgacgaactgtaataggatggagtatttattgaaatgctcaactgccaaaagtttgttgcaacttgagagcctatctataagtgaatgtgaatcaatgaaggaaatagtaaaaaaagaagaagaagatgcttctgatgagatcacanttggaagcctcagaagaantaatgtggattcattaccaaggctagtaagggtttattcanggaatgccactttgcatttcaagtgnttggaagaagccacgattgcagaatgccagaatatgaaaacattctcagaaggaataatagatgcgccattattagaggggattaaaacttcaacagaggatactgatcacttaacctnccaccatgatctcaacaccacaatcg

SEQ ID NO: 166442 - DNA, 364 bp, Glycine max
  unsure (1)..(364): unsure at all n locations
acatccagatccacctgtntcttaacacangcttaaacaaaagatcagaaacaagtaaatgtacaacagcgattaccacacacgttcaagtgcttttaactggtcattnntttgacatttttaccgtcaattattataaccggccgctacaaacattntttttaatgtcggagtgtcttttttgcactaataataatactaataataaataaataaataaataaatagcataatttacctgactggttangctgctggtggtggtcggagatgaagaagtgagtggttggttcacttacgcataataatatatatgctatgaacggagatgaagtanaactataagagatgaagaatggtgcgt

SEQ ID NO: 166443 - DNA, 242 bp, Glycine max
  unsure (1)..(242): unsure at all n locations
ttgcttcaagaaaagcttactaaggcacctgttctaactcttcctgaattttctaaaacttntgataatattagggacttgtatgctttagatgaacatttctnctccatttacgaaagttgtgggaaaaaggcccaaaatggattctatttggctaaggggtatttgttcaaagagggaaagctttgataccccaggatccattangaaatacttgtaaagataccatgagggtggctcat

SEQ ID NO: 166444 - DNA, 514 bp, Glycine max
  unsure (1)..(514): unsure at all n locations
cttcatactcagcttagctctaaggaagtttctcacgagcttctcaggaagttgtctaagatagcttctanaggaagatacctaatgagagtctngtgagacacaactcaaagttcaacttctctctctttntcttccttcaatttcgtgctcgcgcctctctcttgttctctctcattcttttgcttcattgaagcatcctctccaagcttcttatccaaggctcatcttggtggtgaaactccatcttccatggcttattccttaatggatggcgcctcctctcacctctcttcctttgtcttccgctgcatctccatggtggaaaatcatcattaaaggatctcaattgagctcaaagatccagcctccatagaagccgcacaagcaagcttccatcaactnctatgcatntctctctattaatatttggtggaagatagtggaagtttgattcatcatcttcagtctaacaattcatatactctaataccgctatctctgcaatctaatt

SEQ ID NO: 166445 - DNA, 311 bp, Glycine max
tctaggaagatctgtgattatacataaacaattctgatagatcaattctgaatgttttttatatttttttcataccatgacactggattatgtactgactcactaatggaaagacttgtacactgtgtcttattttttggttttttcatctatttctaaataaaaatttatttatgctgcacctactaacctctgaacggctggagtggatgataagtactcaacataatactgataaatccaatgactgttatcatgactaacccgttgggaagctgtgtgatcaaattttgcaattgatgtctatttgg

SEQ ID NO: 166446 - DNA, 488 bp, Glycine max
  unsure (1)..(488): unsure at all n locations
ctaagcttgctcatcctagacacaaactattaggtggtcctctccatntctaagttcataagtatnttccaatgacaattcaaaccgcaacatcaagcataatgcgataaagccaaagcaagtattaatgcatagaaaataacacttaataatgaacaataaacagattaataataaaaaagtaaacataaggatgagttcaactacatccaccctcaaaatgggcaaacctaactatatgagtacaagaagaaaagaagaaaatgaatgaccaanaggatgagaaatggtaggaaagctatggaggttaagggagagcttctcagctataacctagaaccctagatagttntctaaccaaaattgtctactattcacatccttggtgcttaaataggaataaacacgttgcactcatcgttctacnataatgagctattcgcttaacacacacantgcttgttgaagcggcatacaaaagttacact

SEQ ID NO: 166447 - DNA, 382 bp, Glycine max
  unsure (1)..(382): unsure at all n locations
gcagcttctgagaagcctttatgagcttctgatgtatctcatggagctgcttgtaaaaacgcttgcaagccttcgttaactggtggatcttctcgaaatttggtctacagcttcacaagacacttgtccacgatctgaccgttgggatctttgagcagatgtgtggagtgtgctcgatgcttccgttcccgagagcacctcttatttaagcattntagcctttgctttcgtgtagcttaggaaaaacgtcatttattctcctttctttcttccaaagccatttctaacatcccaagcactatctccatcacccatagccaccattagccaccacanaccatcgttgttctccattgaaacctcacaccgagaggaacccttc

SEQ ID NO: 166448 - DNA, 489 bp, Glycine max
  unsure (1)..(489): unsure at all n locations
acccccctatatagcttagctcacccctatgtcaaaatacatgaaaatatattaaaaaagtccctaatacaaagactactcaaaatgccctgaaatacaaggcttaaaccctatactactagaatggccaaaatacaaggcctaaaagaaggaaaaatctattctaatatttacaaagaagagaggacccaacctttgtccatgggctcaaaaatctaccctgggattcatgagaaccccaaggccttctttagaagctctagcccaatcctcttggagtcttctatccaataccctngcggggtaggattgcatcaattaataagtacgattctatgntttntttataatattaagatattatatttatgaatataagttgaaaccttttccaactcaagtaaaagttgactttctttgacttttttnntggcaatttcttaagttaagactataattcagtcatgtcgaaatactaactaatgtata

SEQ ID NO: 166449 - DNA, 365 bp, Glycine max
tcggagccaaggtatcccttgcgttctaaatttcaaccatatgtgatagtcgcctatgacaccattgctacttcccctaagttctttatcttttcttcccactttattccatgccttacagatcctctgaagtatcttcgcattagcttcatcgaaacctcgcattatgaaaggcgatggtctcctctgatggcgcacctctcatatggtatcctaactgccttacagcctacatgagattataattaatacaacctctctgtcctatcaaagggacattcgttaatcattcacatgagcataacactcttgccccttcttcttaccactgtgggaaccaactaatggacgctcacgtcatgcct

SEQ ID NO: 166450 - DNA, 356 bp, Glycine max
  unsure (1)..(356): unsure at all n locations
acctcatctcaattaatctgcaccattcaactgggcaagaatagtattaaattcattaatatgatcagctacagagataccttctctcatcttgagggtgaacaaatcgcacatctagtatactttgttggctgtcgacgacttctcgtacatatctgataacgccttcattaagcctgtagtagtcttcttgtntatgatgttgaacgccacattcttggctaatgtcaatctgatcacgccaagagcctgtcgatccaacaagttccatatcttttgcttcatgtcgtctggcttaacccctaataatggctgatacagcctattcttatatagatgagtctctatgtgcatct

SEQ ID NO: 166451 - DNA, 317 bp, Glycine max
  unsure (1)..(317): unsure at all n locations
acctagaacttcagtatctctattnntactcaatctttcaccacaatcacgtncgcgtaaagcccaaatctttctctttttcactcctctttcacttccaccgatcaaaatccagaaaaacttcatcaaatggcagagccatcaaagaagagaaagggatcattctncaccgctaccgctactgtccatcgccgtcactgcccatcctgagcacccacagcacctatgtctccttctttgcatctncagatcatcaacactgntttatccgatgatcaacgtctgcggacctttctcaattttcttctagaataatc

SEQ ID NO: 166452 - DNA, 245 bp, Glycine max
  unsure (1)..(245): unsure at all n locations
tcgaggtacttacccgttgaagatcgaagaacgatgaagaacgtatgattatcgtctaagaacgggtcanacctntgcgagattcctcacggaaaacgttacggaaacgtttctgaagcgcctcggcttatattatcttcacggaaacaatatatccaagcaaattcgaaagagagagaagtgcctaaggggctggaccccttccttcttgctttcctcccctatttatagcaaaatatgggagg

SEQ ID NO: 166453 - DNA, 363 bp, Glycine max
cacacaatcatcacagatctcacaaaaaggagcaacacccagatcacataaaccacccattatttcaaatgtcaaaactctccacaacaaaattaataaacaccacatggggtagcacccagatcatcatccactaacagatatagaaacggagaataacacaggaatgagagtagaaaataacttacgaattggcaagcgatgaagcgaagaagaacgagaaaacacgaagactagatagagaaatttttcacacacagaagagatggaaaatggtagttctcagatttagatttggactctacacactttctctgtatatatatcagacgcggtttatgcatgaattatttgatcaactct

SEQ ID NO: 166454 - DNA, 317 bp, Glycine max
  unsure (1)..(317): unsure at all n locations
tcagctgcagagtaacttgattanagttatggagagagtattagttctattaatctgataaaaggggagatggataaatgatcaatttattttaacaacttgataataaatattattcttctcatatcttttgaactatttttcccaaattaaaatcatgtaaaacagaattgaactaaatataccccttcagagagttgtattaaaaataaattattatcaattattaaagaaatttaagtaaaccttattatgcttacaaactagcacttaggttttctattttaatacgctcgaattctatcatgctgctgtcc

SEQ ID NO: 166455 - DNA, 371 bp, Glycine max
  unsure (1)..(371): unsure at all n locations
tcagctccatatgctttgacaacttgatcatatggtccagctcatccttgcagcttaagtgagtggtgcggtgtcttttaggctggcattttcatcccaacttcttgaaatgttcttgcatacttgcttgtgagaggaacataagtcttcatctgcttacttggagtccaaaaataagtagctctccacaagactcattcaaatcagattgcatctgtgacaaaatgtcgancatctcattcgacatcctccaacacaatgtcataacatatatctgtctatcatcaagttttacatcttgttgacaaagagagcttgtaattcctccttctatcccttgtgagaaggaatctgtagcctttataccagct

SEQ ID NO: 166456 - DNA, 350 bp, Glycine max
  unsure (1)..(350): unsure at all n locations
tatgctgaacttgatcctatatctacttgataattcaatggtagccataaccctagccaaagttcatcaaccttcatttcttcgagaatacgactcgaacgcaacgtgtgcttgtcacggagaagccccggggcgtttcattgagcattgtatggctctgaagtgtacggtgcgaggtctaattgatgctggctgatatntgaggaggatcgtgttgtaatcctgacattgacaagagatgccacacatggggcaattttgaagctgtgttagatgtctctataactcaccggattttaactttcatcgaattggggcagccattggttattttgtaagcgcctgtgaca

SEQ ID NO: 166457 - DNA, 324 bp, Glycine max
cccattatttcatgaccaatgcaaaatgatgattggaacttctgcaaatggctgcatgccattgggcctcaggcaatttatgcatggatgctagctagatcatttctctttttaatcacccatgttccaaatatgtctttatcattgtgcttcatcatccattcggcgtcggaaatcacactcaccttcaggaacacatttcaaattggttgacatgattttcaaaaagtggaatcttttcaaactgcgtttcacaacactatatcttttccattttctactgtctttctatgcccttcatcatttcttctattattactgatt

SEQ ID NO: 166458 - DNA, 477 bp, Glycine max
  unsure (1)..(477): unsure at all n locations
attggtatcgattaccagtgtatgtttctgaataaaatcaaaagatgtaactcttcacaatagttttgactttttcacattggatgtcttgaccaaacatgaagagtctattaaagcaaggctgtgttttgcatttcaagaaatcttgaataagttttaatcaatctcttacaatcctttacaagtcttgaatctctttgaacttcttcttcttctttgtaccacaagctttctgaagttttctggttttctaaaccttgaaaacttgtgctattcatcttttcattctcttcttcctttgccaaaaagaattcgccaaggactaaccgcctgaattctttttgtgtctctcttctccctcttccaaaagaacaaaggactaaccgcctgaattctcttgtgtctcccttctcnctcgtcaaagaattcacaacgacacaatctgagaattcttttgatcttctcattcccttatac

SEQ ID NO: 166459 - DNA, 470 bp, Glycine max
  unsure (1)..(470): unsure at all n locations
gtgtgccatgttntcaaagcccgtactaaggcatacaacttcttatcataagttgaatagttaagggtaggaccacttaacttttcactaaaataagcaattggatgaccttcnttcattaacactgccccaatcccaacatttgaagcatcacactcaatttcataagatttttgaaagtttggcaatgcaagtatgggggcattagttagcttttgcttaagaacatngaaagcttcttcttgtttctcttcccatttgaaaccaacattnttcttgagcacttcattgagaggtgctgccaatgtgctanaatccttcacaaatcgtctattaaaaacttgctagccatgaaaactcctcacctcgatcacggacttanngtgtatgccattcttgatagccctaacctttctctcatcaacttgcacttcttttgaactcacaacaaacccagaaaacacacatgg

SEQ ID NO: 166460 - DNA, 425 bp, Glycine max
  unsure (1)..(425): unsure at all n locations
tctcggctcatgctgagaacgcctctagctcaacacccgtgcagcctattgcacccacccagagtgaaactccncaagttccaactccgaacgcgactcgaccggccggtatattcaacacgacaaggaacttcccttcgaggctgttgccggaattcaccccgctcccaatgacgtacgaagatcttctaccatccctcatcgccaatcatttggccgtggtaactcccggaagggtcctcgaaccacctttcccgaagtggtatgaccctaatgcaacttgcaagtaccatgggggtgccccggggcattccatcgaaaaatgcttggcccttaaatacaaggtccaacatctaatggatgccggatggctgacttttcaagaggatcggcccaatgtgaggaccaacccgctcgccaatcat

SEQ ID NO: 166461 - DNA, 499 bp, Glycine max
  unsure (1)..(499): unsure at all n locations
agctngacataatgcttaacaaccatggtcttattatatcatgcttaccacataaaaggaaaaagcaaaccaattacaaatacttaaccaccataaaggcaaaagaaacaaatggcaaatgcttaaccatccacgataaaagcttgacataatgcttaaccaacatagatagaagcaaacatgcttaaccacttaaaaggaacaagttggcctatgacaaatgctaaaccaccatataggtggaagcaacaaagcttaaccaccaatattagaatctacacatgatgcttaactactcaagatagaagcaaacaaatggcaagtgcttaaccaccatatcggaagaagcaacanatcttaaccatcaagagcagaagctaaatatggtgcttaaccacttaagaacaaaaaaaacacaatattngaatgcttaaccccatagaggagaccaacacaccacacttaccatctatgaaaatattattcatgctaacatatg

SEQ ID NO: 166462 - DNA, 406 bp, Glycine max
  unsure (1)..(406): unsure at all n locations
tcttttgactgtgattgcgtaaagctacgtgaattatgaatacacttatcgactaaagaatacctttagaaaattaataatgaataaatatgggaaattcttaaaggagttttttaaagtaaaacaagaagatttcaaacaatgtctaaaataaaataaaaaaaatagaaattcaagtgtcaagtatgtttgtcttaatgtctttcatggtctcagtgggaattcttagccgaaaactagctnttatatgaattctgttggaaaataatatacaagagaaaaatatcaatccaagacaaattgaattaattgttaacggaatatttaaaataaagtaaattcagtgcttccaattcatataattaataaagaaataacaaatcaattaaatggatgctattttgat

SEQ ID NO: 166463 - DNA, 391 bp, Glycine max
  unsure (1)..(391): unsure at all n locations
tcgaacgaactattaagttgctggaggaccatntgagagcgtgcgtattataacaaaaagggagttgggagagttttctattgttgatagagttcacctataacaatagttttcattataccattggcatgactccctatgaagctctgtatggtagaatgtgtaggacacctctgtgctagctagaacccagagagaacctcaccttangacctaaatgatgtagctccatgtagtgcttgtaggccttggatcttcttcattaatggagtcctttgcttcttgaagatcaatggcagcgaaatggagaaagaggaaaggttattggagacactacttcaaggagaagacatgtcaagaacaagctcaccatcatatgaagccatggata

SEQ ID NO: 166464 - DNA, 322 bp, Glycine max
  unsure (1)..(322): unsure at all n locations
ctaccgctgctatcatagtctttgttaaatcttgaaacttagaagcaactcttatgcttgagttcttgtataattaatatacgttattaatattcactttattcttcttctagaaaaatgtaaaattattaattaaaagttataacaatgtagattcaatgtcttaccatatattatatcatgttcttaatattttatagcattggtatcttctatagaacttttataataaaaactttaaaaaactgtttttttaacttaaaagagaaaataatatgngcgtatatatatatatatatatatatatatatatatatatata

SEQ ID NO: 166465 - DNA, 330 bp, Glycine max
  unsure (1)..(330): unsure at all n locations
gaaccttcacccgacaaagacactgacaaaaacttatctttttcttcttggacaaagtatggcatgcagggggcaagtaaatattcttcccatcagaccttggatgcaactgtgatcgtatacccatatcagttagatcttgacgggtattcaagccatccttcgtcttgccttgaatgttaaggagcgtcccaatcacactgtcacannacattttctccacatgcataacatcaatacaatgtctaacgttaagatcacaccacgtcggaagataaaagagaatggacctcttctgtcattatgcaactctgactttatccttctttt

SEQ ID NO: 166466 - DNA, 363 bp, Glycine max
  unsure (1)..(363): unsure at all n locations
tcattgtcatcacatttttcacctaccttgcattgataagtggctgatcaagcatggttcttgcccattatgcagaagggatctgttattttgtatctgcaaagtatacaaaccgtaaaaatagctaggttaactctttcattntttatatataaagggaatctactttaggaatgtacactatggataaatgtagtcggaactaggaaccaaccatnccatgtcattcatgagtggcataattgtaataagttactagaaagaaaagtttgacataaatcagctgctatttcttgtatatggactatntttctggcctnggagtaaagaacatgaaacagtagactanggagcacaaatctt

SEQ ID NO: 166467 - DNA, 459 bp, Glycine max
  unsure (1)..(459): unsure at all n locations
ctaagctcacgatccatagcaatcgtcaggcgaggggtttggggtcctacaaataccaccgtgtgttcaccaaattcaccggcgacaacatcaaaagactcttatagaaaaccctagtattcttcttcccataatacccatgcgcagaaccaccaccaccaccgtcaccacaaccacaaccactctttctggtgtgaaaaaacgccactctctttnttccgagatcggtgcagcaacacttactagctccaccaccactcgaacctgaagaagcttggagcaccgaagctgagccagagctccgggcctgaggtacttggtcttnccggagcttcgaaccttaaccttncaacctttctctttcggcgacacacttcccattattatgtcttctcttgttcccataaacgacaaaattggaaaataaaactaacataagaaatgaggaatgaaattgat

SEQ ID NO: 166468 - DNA, 406 bp, Glycine max
  unsure (1)..(406): unsure at all n locations
ctctggcagaatcacgggtaataagttgtcatgcaaatacttaatttggccccaagttggttagtgttgcaaagaatcttgggatgatgggaactgggtatgtcttgatagccactgctttcctctctgctctncttgatatcaacagtcccctctcttcagattcattggatgacattcaaggagttcttacaccgcgtatgtacataccggattcacagctcanaaggaggtttgcttctaggtggaaaaacttgactagtggaaatactggctatgccaccttggattgactntntnctcttatgcttacgacactgtgttgtgttgctcatgcactgatgcattttcaagcaaggtaccaaatacattctaactgatcaaagtatctactacatggagacac

SEQ ID NO: 166469 - DNA, 392 bp, Glycine max
  unsure (1)..(392): unsure at all n locations
ctaagctgtccaagaatcgttctaatcggttctgagggggttgtgatattccgtctcttgccccaactgctgctgctgctactactactacttctagaaagttcaacgtagagaaagaacgttctgaattggtcactcgagatgacagttatgtgaagaaagccaaatcatcgttctactccaatgggtatggatttgagcccactatcccatcanaagctagtatcttggattcatcgttaaaacctacatcaactgcaggtatccgtatataacatgccactcaacattcaattcagntatttatttatttgtttctttgtcggccttttatttagttattgagtccgatatagtgtgttccatgtagtcaaacctcatctggtataatg

SEQ ID NO: 166470 - DNA, 362 bp, Glycine max
  unsure (1)..(362): unsure at all n locations
tctctcttatcttagtgagagtgattctcctaaattcttgagtgattcaagaacaccctggctgtatcaaaggactttcacaacctttgtgtgttgccctcgctggaaagagtgattctttccttcctttcatcttcacccttgttctttcaaaccacaattccagaaaatccacctctgcccagaattatctcgtggccataactcccattttacgcactcaaattaagtgattcttgagcctaaattgactttcanaacgagacctttcacctcgtgttggaatcacctcatttggagccctgtagctctcagtattgccatatctatatttctgtccagcaccactttacctacattta

SEQ ID NO: 166471 - DNA, 383 bp, Glycine max
attccctggtggccaccttcaactgagctcacgtactcccacgtagcccttatcctcgttcctctcaacgccgggtccccatcaatccttccaagcttgcacaacatccaggttattgcacatccaatcatcatggactcacaaaaccaagcaaaacagggcaaaggcagaaaactctgcccaaaacacaaaccaatatcacagcttttcacatacaaataccccagtaacatttccttcggtccaattcgttaaccggtggatcgactcgaaaaatttactggaagtctctagtacataagtctacatatttaccgttgggatctgctagcaaatgttcataaccccatatgtactacccttttcacaaccagccatacact

SEQ ID NO: 166472 - DNA, 401 bp, Glycine max
  unsure (1)..(401): unsure at all n locations
ataaaagcatccaaactttaaaaatagattttcacaaggacagtttttataaaattttgtgcgtacaaagataagtctgaagcaatgcaaaataagcaagttatgacataagctactggtaaaacacaatgttcatactagttcactcaacatgagttacatctcgttctctttctcaagttccactaatcacaattgattagaaaggagattntactctatcactcttggctacaacaagtattgtctatgtcacttctgatacactcttaatctccccttgagataanaacacccaagtattcttttatcaccaagccacttctgactttccaaacaacagtgtgaatgaatacaatattcaaatatctcanagagaggatatacaattaaacttgaat

SEQ ID NO: 166473 - DNA, 503 bp, Glycine max
  unsure (1)..(503): unsure at all n locations
taattattaaaagatagatgcttgtccaaacactgcatgtntatttgtgatattatgaaaaaaggttggatgctngtaagcattgtggtacatctagatgganacccaacaagaagaagaanatagctgcaaaggttntacgttactttccattgaaaccaagattgcaaagattgttcacatgtcataagactgcaaaagatatgagatggcatgttttggaagacaataaagatgggttgttaaggcatccaagagatggagaggcatggaagacatttgatttaatccatcctaagttttcttcagatcctcgaaatgttcgcttaggccttgctactgatggttntaatcctgctaggaccttgagttctacctatagcatctggccagtgttcttaattccatataatcttccaccttggatatgtatgaaccacacttccttcattctatcaatgatcattccaggcanacaatctcttggaataacatagatgtgt

SEQ ID NO: 166474 - DNA, 257 bp, Glycine max
  unsure (1)..(257): unsure at all n locations
atttgcacccccatttttactaaatacaccccaactttttttgtgggcttcttttttcgtaaagttacggaaacttatgaatttcgtaacgatacttggggtttttttccgtgatggtacggaacctcgcggatttcataatcatcccttttttgacttacggaacgttacggaacctcacgaattctgcaacgatgcttnctttntgattntcggtatgtcacggaaccttacggattgtgcatcaatactttctt

SEQ ID NO: 166475 - DNA, 450 bp, Glycine max
  unsure (1)..(450): unsure at all n locations
gagatgctgctatcgctgtcacaatacacacgtgaacccgcttagaggtaagggatgagtttatcgcaattggggttagaatgaacatgtgtagggatccttataggattaaattgggtttattttggaatggttattgaatttttcctttatgattataaatacaatattgatgtcttgatgtgaattggtgtgataaaatgagttctcttggtgttttcattcttcatacctatgattntgattaattgattttgatataattatgcgcaaatttttgagggggtttacttcccatgttgtgataaaccttttgtataaattgctatattgagattatgaaattgtgattcacatcgtgagtatgtgataaatngaacctgtgatgaaagtgaatacatgtgtttaagatgtgattgagtgtagctataactgtgcatacacaatgta

SEQ ID NO: 166476 - DNA, 313 bp, Glycine max
  unsure (1)..(313): unsure at all n locations
tttgaaaatgattcaagaaacaagttgaatgttnttnttttacatgtgagaatagtggttcatagcttgaattgtggattcattggtttctttgaagaggttaagtcttgtgttctgacaatttcaaattcaatgacttatatatatatatatatattcacgaaatcacttcaactggagtcacgagaggtgaaatatatttggccgatgtcagcactaaggtgaagaacaagaacatcacaactgatgtcaaagtggacactaactcaaatgtgagttaaaaattcttgctcggatagttntgacttataac

SEQ ID NO: 166477 - DNA, 437 bp, Glycine max
  unsure (1)..(437): unsure at all n locations
tctannagtgaatcacacaccatacatattactctctgttttcccacacttaatgctccatatataattatctacactctaaatctgaactatgtatngcttctggttaatttgaccaaggcaggtactagttgctgcttcacttaacagttgcttcaacagtagaaattccagcagtgcagtggtgaacatgacttcaagcccttcaaatccacactcaggtagtagaaaacaacaagcagggaaagaagcttctaatacaacaaacaaggaacctgaagccctaacaaacacactcaaattcctcaacaaagcagctgatcagaacaacaacaaccctatctattcatcgatagaatgcacagtggagcaagtagaggatgtgaagatagtgcttaaagtgctccccatattcgcatgcaccatcatgctaaact

SEQ ID NO: 166478 - DNA, 362 bp, Glycine max
  unsure (1)..(362): unsure at all n locations
aactctctacttcaaccattttcttttntagttcatcctacataaatacaccaaataaattattacattgcatcaatatccttaatacttcaatgccactaaacaaaactcatctcctcattagttactccccctacaccataaccctctattagaaaatngagcaaaacaaagagaaagtattgaaataaaaattaaaattcttacggctacaggagcagccttttcagaacaatggcttccatcttttgagttcaagtgtcaatatatatatatacttaagacgggtgcactccttagcctttgtggctaacatatgtataaaatcaatcaacctattgtctangcaataaatattaaaa

SEQ ID NO: 166479 - DNA, 481 bp, Glycine max
  unsure (1)..(481): unsure at all n locations
ctgtattaaacgtggcccttaatttcaccatacatgttggctgttttttacatgaaagaaaaatttgaatcaaagntgtatgaagaagggttatggcctcttacaactcttactttatcatagattcatagtaataatgcatttggtttattaggctaactcaaatctctaacaaatggccatgcattgaaactgtaggctgatgttgataacagtgggacaatngattacggcgagttccttgctgcaacattgcaccgcaacaaaattgaaagagaagataatctatttgcagccttttcttactttgataaagatggaagtggctatattactcacgaagaacttcaacaggcttgtgatgagtttggcataaaagatgtccgcctggaggagataatcaaggaaatngatgaagacaatgtaagtgccttacaattctgtatggttcctcttctactcatttcacttgagtacaaat

SEQ ID NO: 166480 - DNA, 406 bp, Glycine max
  unsure (1)..(406): unsure at all n locations
tgccgctgcaagctatctatggctngctccggacttactcccttgtcccttctaagatttaagccaagcccctcactttgaggggcaactcccgccttatgacgactatcccgggcaagatgatgaggaaggagatacccatctcggccccctgctccacctcaaagatccatccccacatgaactaccccaaccaaacatagtccggcatattccggcctcacccacacccgtanaagaatctgttcccttcgcggaagataagggaaagatagaggcgcttganaagaggttaagagcagtngagggccttggcaattacccattctcggatttagcggatntatgtctcgtgcccaatatcgtcattccttccaagttcaaagtgtcggacttttgatagtac

SEQ ID NO: 166481 - DNA, 332 bp, Glycine max
gcccttttctcactggttcctttatgggaacatcttctaatgtggccaactcatccctcttagaacactctttttcttattgccttatgaaacacttgttggtcttattgggtttaccctctatgcaactttttacaaactctgacctaattccttattatgttaaagaaggtcagtggaaggatgagtctaggtgtaaggattgaccctaacaactctaagggatgtggggttttgacccctgtgttgcaatctactgagagatctcttccaacttatgtgctttaacaaccctaaaggggtaagactttactccctgttgccatcatttt

SEQ ID NO: 166482 - DNA, 509 bp, Glycine max
  unsure (1)..(509): unsure at all n locations
tcagagcataatagcttatttcgtgctccttaaacctccattaatgttttgctttaccttctcttccattggtgtntcttcatttttctccatgtatctcctcacatgtcttgtgctaaatgttgttaacatgattctntagagtttccaccgattaaacttgctatagaggctatgatttattntctatggttcaaatttcttgttcttgttcttgaaccatgaattgtgttgagtttaggttcctttgagttttgtcttgtntatttttgtggctgaaacctaaaccataaaattcttngcaaaatattaaagtagaagaaaaactcanaaatctagagtgacttgttcacctattgtagttntgtcatagaagtcatgtctagtcatgaaacntgtcacataagaatactttatgtgngtngaatttatttcttgttctttgctaactcatctgtcatgagtgatgaaaatctttagcctatatttgattgagcacatctttatgt

SEQ ID NO: 166483 - DNA, 211 bp, Glycine max
ctagcctgataaatgccaaaggaaatcatgggaagtatgggttaggctataagcccactcaggcagatataaagagaaacatagcgggaaggaagagcggtagtcaaaactcgcggttgagacaagaaggtgaaggaagcccaccctgccacataagtaggagctttataagcgcgggtctgggggacgaaggtcaagtggtcgcgatata

SEQ ID NO: 166484 - DNA, 280 bp, Glycine max
tggggtggcatactagtgttgtttggtggatgaacgatgtaaatctaaattgtttgttgatgatggatgtagtgttgtggaggttgcgaattggagtggacgaatgatctagtgctctgttgtggtggctatggagtctgcacaacatgacaaatgttgagaaaatgtgttgttgaatgcattctaaagatagtagcacgtttagtcatcgctattttatattaattatgttagaatttaacacaatactaatgttgtctaatggaataagaagaaatga

SEQ ID NO: 166485 - DNA, 316 bp, Glycine max
gaattatatatgtgcagctgggtgatgccattttaagtgacaggtcttaatttgtggggctggtgctgtaaaaagtaagttgagggtgattatatgaagcttgtggcgggtactactaccagcgctttatttctcataagttaagggtaggcgttctgttattcggccgtaaaataagattctgttacataagagataagataattactttctaaagggtgggacactattagaaacactctattatagtaagcattgtaatgctactatacttatttgaggtcataaatcaaattatacttcttctcattttttt

SEQ ID NO: 166486 - DNA, 358 bp, Glycine max
acatagcacacttctgcactaaaatgatggagtctgaagccatcttctcaattaaatctattgcttcatcacgggtcatgtctcctaaggctccaccactggtagcatctatcatacttttcatgttactgagtccttcattaaaatattggaggagaagctgctcacaaatctggtggtgagggcaactggcacatcagttcttaaatctctcccagtatctatataagctctctccactgaggtgtctaatgccagaaatatcctttctgatggtcgtggtcctggaagtagggaaaattgttttctaagaatactctcttgaggtcattctagctcatgatggatcgtggagcaa

SEQ ID NO: 166487 - DNA, 220 bp, Glycine max
aaacaaaattaactaacataacaaaatgaaaacaaaaaaaaaaaaaaaaagaaaaaaaaaaaaaaaaggaaaaaaaaaaaaagaaaaaaaaaaaaaaaaagaaaaaaaaaaaaaaaaaaaaaaaaaaaaagaaaaaaaaaaaaaaagaaaaataaaaaaaaaaaaaaaaaaaaaaaaaaaaagaaaaaaaaaaaaaaaaaaaaaaaaaaaaaaaaaaaaa

SEQ ID NO: 166488 - DNA, 407 bp, Glycine max
  unsure (1)..(407): unsure at all n locations
acacagatacattgaatagtctgtcaccgtantccacagcagatcttcatgatggaaagtaattaaacaaagcttaggtaaaggaaacaaattatgctaatatacatgcataccgtgcagcatattctgagaaatgtctcccaggctgtcgctgccgtaaagtgtgaagatcaccgtccggacaatattccattaccaaacacaagaatcggtcagtctcaaaatgtgtatacaaagttggtagaaacggatggtccagcaactgcaatatctctctctctgtctgtgctctagtcagcttctttctgcttgctagcgatgccttatccataactgtcattgcataataacacctatgttcactcagctctgagaggacacactttcaatatcaccacattctagtc

SEQ ID NO: 166489 - DNA, 354 bp, Glycine max
  unsure (1)..(354): unsure at all n locations
agaatcataatctaatttggattcattttttttctggtctgtggagtatatgcgtaacaaagaanaaaagaataagtaccttgtcatcatgaggcagagcaagagctgtggcaagaagagaatagccagcgaatactctaattttgactggtttcttcacattcaggattttaagcaaaatacgtatgaattgtgcttcctccgcaagaatactcaacatataacccctgctgacatatatataaattatacatccttcacaaaaataatttctaatatactatatcaataacataagtatcataccttaatcaagatgaaaattcagaggtcacatagacatatattataaac

SEQ ID NO: 166490 - DNA, 456 bp, Glycine max
  unsure (1)..(456): unsure at all n locations
gcttcttcttatatagccttcatctctaagcatgtgttgtctctcattatttggatcttcacttggctctctgtctaaggtcttaagtccattgaagctnttaatgcttgcattaaatgcacgtcccttcttcatgccaagtccaagcttatatgatagtgtaccttgcacttcaccaggagagtcacttctttcatcataccaggtctgcaacaataaagtgcttcttttgatgaggattaacatcttccgaactgtgggattcttttattcttcataggactatgacaaatcctaggagaatatttcatgcttgagagaatctcagacatagagtattaaatgaatgtcttanatatactacttaaatgatatatcatatcctcttatgagtgcatcatntgaanatcagaacacagagacnactatgatctgatatatatcnacactacttta

SEQ ID NO: 166491 - DNA, 419 bp, Glycine max
  unsure (1)..(419): unsure at all n locations
acgtgctcagatcgcagcgatcctcaattgccacccacaaacttggtctcgacggatagagaagcaattcgcgaacgtggcttgaacatcgcaagagtcccacgacaccaaacatgtatatatagagccggaggggagacccctacgtacatttttcattgatcccacacatagacacataaacaccttagagcacgcactgacttgctcgtgagagtcccttttgcatgtacctccccccacttcaacaccggagattggagattctattgagaacgaaaggaccaaatagttaagttggacccctcagaaactaaacatgaacatttggcgcccactgacagaatntcctactgccacaaaatggtagcaaccaagagaagcgatcccagttcatctgcatgctcctcacaagtcga

SEQ ID NO: 166492 - DNA, 486 bp, Glycine max
  unsure (1)..(486): unsure at all n locations
atcctcttagtcacctgccgcatgcaagctgtngctacattacaaccatgcattgtgcttttcaccatgagaaattcacacaaaanactgaattagtgagacatggagttacaagaattgctaccactttcttaactttgcaaagattgcataagcaaaaggccaatcttagaaggatgtctacttcagatgaatggttgaagtctaaggcagctaaagagcccaaggtgaagcacgcaacagatgttgttcttatgccatcattttggaatgatgttgattatgctttataggctatggngcctcttgtagggtgtaaggttggtggatatgaaaaaaaaacctgcatgggttcattatgaagcatggatggcgcaaaagcatcaaaagcttcataacatgaaggagttaggattcctgcatcattgtaaagatggatgcaactcccaccttgcatcgcggtatattaatcaagtctttcccatc

SEQ ID NO: 166493 - DNA, 392 bp, Glycine max
cccggcatagtcagtcagtgagaacctgtgtcgtacctaaacattcgagctcctggcagtcaaacgataaaagaacaaataccacatagcacggaggctcgtgtggtggctggccatctatgaatcttgagtgatatttagaatatggcctctagtaatcgattaccacaggtgtgtaatcgattacaaggcttaaatatgaagacaggaagttaagatgacctctggtaatcgattaccaagggtgtgtaatcgattaccaggcctacaaatggggtcaggaagctgagatggcctctggtaatcgattaccatggggtgtaatctattaccatgcttataaatagagacagtattgtgaggaagcctctggtgatcgattaccaatactg

SEQ ID NO: 166494 - DNA, 446 bp, Glycine max
  unsure (1)..(446): unsure at all n locations
cttatgcttctcttgaaaaaccttanacaaagagactntgtaaacgttatccttacatgaaatgcatgttattttcgtaacctacagtgaacccttggcacatgggcacggntggtagatacaactgatgnntctttggaaaactcgaaatgctctcagctctttcatgtagtgatgtgggtgtttgacccanagcactggtactagctttgttttctgaaatccatactcaagtctccttcgttttggatgggataggctggcatggaatcaacgagcaanggacaaaaggaatcttcaattacacgacgaggaatctgtggggagctcacataggaaggggagtttattataaattaccgtttaacaccatagtaatgggtgtgaatataatatatttattatatatataatataataatcataatatatataatggtggttat

SEQ ID NO: 166495 - DNA, 443 bp, Glycine max
  unsure (1)..(443): unsure at all n locations
cttctcatctaaggaggggagcttagttattagagatgtgttatatctaagctctagcttctctaggaatcttctcaaggaagcttctcaagaaagtttcttaaggaagcttctcaaggaggtaggcttagttattagagtggtgtttgtagctaagctctagcctctcaaggaagttttctcacagaagcttctcaaggaagttttctcaagaaaacttctcaaggaagctatctagtctataaatagaagcatgtgtaacactttntgtaactttgatgaatgagagtcttgtgagacacaactcanagttcaacttctcttccccttttcctccttcaatttcatgttcccccctctctctttcttttcctccattgaagcatactttccaagcttcttatccaaagcacattcttggtggcgaagctccttcttccatg

SEQ ID NO: 166496 - DNA, 427 bp, Glycine max
  unsure (1)..(427): unsure at all n locations
cgatctcttagtcacctgccgcatcaagctngatagttggcttgcctctgtactngctttatttaaaccatatctcccctctaccaagaaacagtattaattgtnttttacttcttgggaagaccagttggctaataagctgggattgcagccgtggcaggtgtttctgtggtttcagaacctcanggctcgagaagaaccaggtgtgcctcatatttattntatctcatgatttatgaaatctatatccttccactatctcatgaggtgttntagtttagccttatttaaattggaacattcagctgactaatggtgatgaccttanggcacttngtgtgctgcgccattaataaaaagttacaagggggccagtaaacaatagtgaagaaatagaaataaaaagaaagtatatacttcaagttac

SEQ ID NO: 166497 - DNA, 382 bp, Glycine max
  unsure (1)..(382): unsure at all n locations
taagcttcgcgatggaagagtctgaaatccacttcgaatttactctatactacaacagcccagttgtgaagtcagcataaaatggaggataatcataaatggaacaaaaatagtnacatggagcataaagttatataaatatcaaatacaaaatcatgttaagaaacactattnaaaatacactntaacatcggtattagaacattctacattggnctaaaattgatgtgaaagtgagatgtgaatgatgaatgtaacatccgtttggaaaccgatgttacatacatatgaaacatcggttcctaataaccgatgtaacacaatgacaacgctaaaaagtgtcaatgtgaacgtgacatagtttcactaaaccgagtatatg

SEQ ID NO: 166498 - DNA, 488 bp, Glycine max
  unsure (1)..(488): unsure at all n locations
cgcatgccaagctttgtgcanacttcatgtgctgactcaatgtttttaactctctagcacttatcttgagtgagtcttctcttgattcttgaatcttgagtcttgaatcttgatcttgattcttgaatcttgaaatcaaatctctcttgattcttgaattgttcttgactcaatcttgaaatcattctcttgggaattgttcttgactcaatcttgaaatcattatcttgggccgtttgtatcatctttgtatcgtctaacaacttgaataatcttgattcatatcatcatgaagcttacttctacaataatngattatttggaacanaattaaactaattctatgttaaaaaccagtaaaatgcaagtaagtaaaattgacagcagtgggtaaagatngtgggtctttctaacggaccagctgatgtatataaagatgtntctctaatcaatcatgctntngtgttctatgttgaagcctaaatact

SEQ ID NO: 166499 - DNA, 373 bp, Glycine max
  unsure (1)..(373): unsure at all n locations
tgactcaccatataccttgacccagggtgagaatgtcaatccttaccctcggaagcaaaaaacgaagagaaggaaaatntccaatcaaagganaaaggagaagggaaatctccaatcaaagaggaagcaaaataagggagagaaggataatttccaatcaaacgaaaaaagagaggaaaggaaattcccaatcaaagagtgtgagaacagtaaaaaggaagagagaaaaggaaagaaagctcctgatcaatgatcgaaagaaaacagaagatatatgcagaaaggtctttggaccagacaatatctgaacatatacagaatngtcaccanatgaacaaaaaaagaaagagaggaaccatgacctanagtagtc

SEQ ID NO: 166500 - DNA, 355 bp, Glycine max
  unsure (1)..(355): unsure at all n locations
tgagagaccatacaagtttcctaacgatttctaattatgtgggccattaagtctatcatatgctgacaatagccgagaagcccatgaatctcttcgggggtggagtaggtgtctgccatcgccttggccttggctaacaatcggggaagttcttgactcccgttcaatgtaagagcaaaccggtccatccacatggttgcctcttggtgtaaagagtcgatcacccttcctctagcctctttttccgcatatacttgagcatactcatccgcgattctatgctcgtgggccatggctaactcttctctgtacttggcgatgatagctagcatgtnggtctccgtctcgcataaac

SEQ ID NO: 166501 - DNA, 481 bp, Glycine max
  unsure (1)..(481): unsure at all n locations
taagctatctcgccaacttaagatctatntcttagctttccagtgactactcacacgcttcatttggagttttgtagtgtcctataggacttgcacaaggcaaataggtcaagtaagcacaaaaatccaaaaataaaccacaattatcaattaagctcaatcatttgcctaagaccaaaactaagttaacgtgagaaaataagggtcaaagagatgttaattgagatgagaataatagaaaaaaatattaaactacaaatgctgaatcaaattcccccatagtttgtcttttgcactcctgngcaaaactaaaagaatgattaagaanaagaaatcaaactaaaaataaccacaactaanagaaaggtatgaacaaggcacacatatntntcaatggatcctatcaatgcacacaattgagagagatggaaaatggaagaatggtctcaagttaacaagcaatccatgaacacataatcac

SEQ ID NO: 166502 - DNA, 330 bp, Glycine max
  unsure (1)..(330): unsure at all n locations
atgangaaaaactggggcaaatgaagagggtgagaatgagggagaaactcatgttgtgactgccattcctatacagccaaagttcccaccagccaaacaacgtcattacttagccaatatcagcccttctcactacccaccacctagttattcacaaaggccattcctagatcaaccacaaagtcggtctacttgcaattcaatgacgaacaccacctttagcacanaccataacaccaaccaagaaaggatatttacggcgaanaagcctgtagaactcaccccaattccgtgtcctatgtgacttgctcctatctactgataatcaat

SEQ ID NO: 166503 - DNA, 428 bp, Glycine max
  unsure (1)..(428): unsure at all n locations
gctaagacttcaagatctgaactccttattcctttgtcttttcgtgtaagctnnatcaacgcaaggggggtctntccacttcttgaaccctaacnncttgtttggaagctaggcttcattgcatgttgtattgatgtttaaaattatgtatatgttgccatgactaanactgtgtaatatgttttttttttcttgaattcttaaggttaaaatgagttttttgggtattaaaacttatggttagccctaagtttcccttatatcaaagttntctagcaaaagttatgaataaaacacagttaaggacttnttgtatgaaatttctgatactgggacagatgtcgtaccggatgtcacgacatcacgccttagaacatgtcagattgtattgactgtntgaacagacttaaacaagtaataacacaaga

SEQ ID NO: 166504 - DNA, 478 bp, Glycine max
  unsure (1)..(478): unsure at all n locations
gatgacatcttaatatgatgacaaaggtgatgacanaaagctcaaaggtcaatcaaagaatgagttcaagaggttcaaataaatcaagacacttaagattaagaggaaagctgaattcaagaatcaagaatcaagattgaagagatcaaggttcaagactcaagattcaagaatcaagaaaaagcttaatcaagataagtatgaaaaggttgtttcaaaaactgagaagcacatgtgattttctcataacatgtttaccaaagagtttttactctctggtaatcgattaccagtagcacaatggatgtgaaaaacgtttcaaatgaatntacaacgttccaattaatttcatanagctgtaatcaattacaatgtgttggtaatcgattaccagtgtctttgaacgttgaattaaaatcaaatgtgagagcacatccttccataaagcctgtgtatcgatacctgactggtatcgata

SEQ ID NO: 166505 - DNA, 319 bp, Glycine max
  unsure (1)..(319): unsure at all n locations
ctgatcttaatttgatggcacttccgccctgccacatgtatgcatatgtctgaactatatttaaaattttctttgagaattcccgtctcgacatatataatgttgataattttaactcttatcttcttcaattttatgtagcacaagggtgagtaattattgtcaatttaccaagtgattacagatgcgggcctgtgcattccatataatatatgcttttacgccctcctaacatgcatgattgctcatgtttgtgggatgcanactattgaagcattcatgatagacttacatatgtagcaaatgaacaaatgttatg

SEQ ID NO: 166506 - DNA, 325 bp, Glycine max
  unsure (1)..(325): unsure at all n locations
atccattcagaaacaagtgatatgtgttggagactcacaagtcccacaattaatataaaataactataaaattatacatggcgttgcaaattcaagatgccagaattacaatcttgtctagcgggggtgtattcaatcctgaattttaaaacgtttctattaaaaaaattacaattctttatctaacttttaaataataaaaataagtcttattgctacaaagtcataacttctaagtcacaaatattntagaaatacatatcatgtgacgattaagacttatctgtaaagcttacagaaaatggtctaagaaatcatattttgg

SEQ ID NO: 166507 - DNA, 392 bp, Glycine max
  unsure (1)..(392): unsure at all n locations
catgggtaaatatctaataattatctggctcatcactcatgagtaatttttattttattaaaaatacgattatatattagttaataaataattgaccacttataagtctaagacgaataaagtataaagttaagaaaaaagatgcatttgtcgttcatttaagcaagatataatatgaatatatatgttaaaattcattatatatacacctatttttcacattatatattattcacttcgaactataatattaaattccgtcgtaatattataattctcagattaagcttaagttataaaaactagagctgcgcccatgacatatgagtattatactgatcggatcaatacatttgtgctgtatgcttatagaccanatctattgaaaaacg

SEQ ID NO: 166508 - DNA, 455 bp, Glycine max
  unsure (1)..(455): unsure at all n locations
tgatactctctgaaaaaatattacagatatgtcttcattcttatgtgaccaaagcacagctgcatanttgaccactntagatgtatcacacaatcaaataaaggggcaactcccagaatgttggaaatcagtatagcaattagtgattcttgatttaagcaacaataaattgtcagggaagaatcctatgtccatgggcgccctcattaatatgaatgccttggttatacgaaacaatggtttaatgggtgagttgccttcttctttgaagaattgcagcaatttatttatgctggacctgagtgaaaatatgttgtcgggtccaataccatcatggattggagaaagtatgcatcanttgataatcttgaacatgcgacggagtcanctctcangaaatctaccattcatcttgttatttgaacgattcaattgtggatctttcatgaaaactt

SEQ ID NO: 166509 - DNA, 500 bp, Glycine max
  unsure (1)..(500): unsure at all n locations
gcttgtgcagccttaaagctcactacatctttttttttttctatgaaaattaaaatgaagagcaatgtatntcttcttcttattattattattaattaaaataataaatggtgaaactaactcattatataaaattaagtcaatagcatgataactctntcactttctgttcttctacaaattttggatgtatttatttcactttcaggacgagacgtagacttctgtcttttccctcttccttttttctttttttctttttaaaatggtttaaagaaaatgttcttcgctaagtacgccttangtgttaggactactctaattagaccatctacacgtgcacaacaccttttaagaatagaatcatgttcattgctcatattgcatcaaatgatattcctttattgccaagtcacttctcaataaatattntanaggggtaaatcatatttttcttaacaatctaactngaagttgctatgtaataattttatagtcat

SEQ ID NO: 166510 - DNA, 448 bp, Glycine max
ccgcttgtttaatccatatatagatcgtgaactggcagacttcattacaatctaccaatgatgtgaatcctttagggtgtgtcatgtacacatccacttgccatatccattaaggaaagatgttttcacatccatttgccatatctcataatcatagtatgctgctatggcaagtagaatccaaattggattgagcattgccacacgagaaaatgtttcgtcataatctattccttcctgttgacgatatcctctagcaacaaggcgagctttataggtctcgacctttccatctgctccaatatttttctttaccatggtttccttctacaagaaaatctctttccaaaaagggtgctcctcttgccacaaacactttatggttagaaggttggtagaaataatatcccatattttctttatgataaccaatgaatctacacttatc

SEQ ID NO: 166511 - DNA, 427 bp, Glycine max
  unsure (1)..(427): unsure at all n locations
ttaatctaaaaaatatggcttaaaacaacaaaactaaccacttaagcccaagactagccaatgactatgaaggtgtttaccatgcacatgggcagcaaccaataacatcaagcattccaattatcgcacatggatatctcactatgacatatntaacaagaaaaggatgtgatgacatgttatggtctttcaaatgctctctcaaacagttcctacagagtagaatagaatgctataaatgatgatgtaaacaatcaaaagaccatagaaacaatcaggataaaaattgacatagctcttatctgtcaataggttagagtatgatctggagccaaatataatgaagaacatacaatgactaagcaatgcgagttgtggtgcccacggagggaggatgtttaaacagataatgatttttatatactct

SEQ ID NO: 166512 - DNA, 442 bp, Glycine max
  unsure (1)..(442): unsure at all n locations
gcttatagcttgaaagtcatgnaccttgaaaataaacatcttatttatcttccccttggcgaaatgtaatgtaatcatgcaactatgtatgatgggaagaacgcatgttgtataaccaagccaattttgaatcataccaatgcttcaaaccatagacatgatatgatcagtgtgtgttgctaattccaaagattaagtgagctcaatggcattcagtattaaagcataatactaatgaaattaccttaaaattattaaaaatattatgtggcagagcactttgcatttctaatttaacataatatctaaaaccttaccaatgtacaataatttgattatgcctgtgccaccatctgtagacatgacaatcaagtataaagaaatgattgcaatctaaggattatgtgcccatcggactcaatttaaagctaattgcctggat

SEQ ID NO: 166513 - DNA, 349 bp, Glycine max
  unsure (1)..(349): unsure at all n locations
atcctcttagncacctgcggcatgcaagcttaacataaaccacttcagattttggtactactttcatgactcgacggggcctatgcaagttgaatgccttggaggaaagaggtatgcctatgttgttgtggatgatatctccagaattacctgggtcaactttatcagagagaaatcagacacctttgaagtattcaaagagttgagtctaagacttcaaagagaaaaagactgtgtcatcaagagaattatgagtgaccatggcagagagttgaaaacagcaagtttactgaattctgcacatctgaaggcatcactcatgagttctctgcagccatcacaccacaac

SEQ ID NO: 166514 - DNA, 420 bp, Glycine max
  unsure (1)..(420): unsure at all n locations
tcacagatatgtcatttatcaactttgcaagtcatgtaccatcaaagcaaagataatgtgcatcatcatcatggatcaatangactttttaacattggacttctaagaaattttggctgtggatgctctggtctatccttgtcttttggtgtgagtaagagagcatgcataaagatttggttattcacttaaaccggtgatcactatctattccatcacgtcttgaccaaggtactataggatcccttcttttgtactctataccacaactctatacatggttcacacattatatgttccaaagaacttgtatttcttttacattttctcttgctactatacatattgattgagttttactttcttctttgattctttaatattcgttagttcctttctctctctttccttaatgaacat

SEQ ID NO: 166515 - DNA, 136 bp, Glycine max
  unsure (1)..(136): unsure at all n locations
tgagaagtgaaattgagaatgaggtaaatttggagcaaactctcacctcacacaagtctataacatcaatttaaacttgctcaaactggatttacacctaanattccaccgaatcaaaatttgacttctcaacacc

SEQ ID NO: 166516 - DNA, 241 bp, Glycine max
tggtactctttatgtagaacccactttggaggctctacctatcctattagattttgctacgtgtgaacaattttttatagctcattatatcttttagtaataatgattacagtgttgtagaattggtttccatctttgttgaagtttgcctccaatctacaacattggaatctttctcctgtaaaaaactttttagtttgaaagattttccaatatctactgtgcttttttaaaaaacctt

SEQ ID NO: 166517 - DNA, 390 bp, Glycine max
  unsure (1)..(390): unsure at all n locations
tataaatagaagcatgtgtaacacttgttgtaactttgatgaatgagagtcttgtgagacacaactcanagttcaacttctctccctttntcttccttcaatttcgatctcccacctctctctttctctccctctntcttttcctccattgaagcatcctctccaagcttcttatccaaggctcatcttggtggtgaagctccttcttccatggcttattccctagtggatgggcgcctctctcacctcttctnctttgtcttctgctacatctccatggtggaaaatcaccattaaaggacctcatttgagctcatagatctagccttcatagaaagcccatagccagcttcatcatgacagaggcgagaaattgctctggcattatca

SEQ ID NO: 166518 - DNA, 331 bp, Glycine max
  unsure (1)..(331): unsure at all n locations
gacatactccatgttaaacattaacaagccattctgatacctgaacgcacacctgatatgcatcttcatatttcatagcaacggactgaggttcatcatctacaccagcttttcaggtcctcaaaagaagcataatgatttggcttccacaaatcttccacctatttatttgctgtgcacttattgggcgagccactaacttgctcctgttcagatgggatctgcaccagataacaagatgttcctaagacagatggacaaaacttatannaataattaataacacagaggaacatagtaaccctgacaagcactgaagatacacctatca

SEQ ID NO: 166519 - DNA, 348 bp, Glycine max
atagctcggtgtatcgctcgaggtagccaccatatagtgagtcaatcttgttaacacatcctcgtgaccctactatcaatttgaattatggaagaatctccatataggagaattataatcgtgtgctctcattactacctttaattactaagtgcctatcttaactttacgaagcgggaaagactgagtttctccacaaagtagaacatttacttatgcaactatacttaacaccctccataaattataatgcataaaggacaaaaaaaacactatgttgggtggccttcagacacataattactgtattaaaacacacattctgctaatacttactcattagtgaat

SEQ ID NO: 166520 - DNA, 356 bp, Glycine max
  unsure (1)..(356): unsure at all n locations
gcttggtatcgantacacacatactgtaatcgattaccatagaaagtntttatgaaaattctcaacagtcacatctttgtacttgattcttgaatggctgtcaaaggcctatatatgtgtgacttgggacacgaatttgcttagagtttttcagaacaaaaaggtattatcctcttaataagcaaatcgtnttatcctctcacaaattccttggccaaattacttgtgagtcaataaggaattatttgagtgctcaaattgttcaatctatctctttcaagagagatttcttcttcttcattctgaanagggattaagagaccgagggtctcttgttgtgaaagaattctaaacac

SEQ ID NO: 166521 - DNA, 382 bp, Glycine max
  unsure (1)..(382): unsure at all n locations
acttctggctttattggtgaccacagagtggtacctggagatatgtcgcgggggtcaggagaccttggggacgtcaggtggggtgctattgcccaaaaccaagcttgaccaatcccgacccaacccgggcatagtcggtcagtgagaacctgtgatgtacctaagcaggcgagctcctggcagtcaacagataaaaggaacaaagaccacacagcaaggaggcttgtggtggctggccagctgtgaactntgattgatatgtgggttatggcctctagtaatcaattaccaagggtgggtaatcgattacaaggcttaaaaatgaagacaggaggcttagatggtctctggtaatcgattaccaggggatgtaatcgattac

SEQ ID NO: 166522 - DNA, 370 bp, Glycine max
  unsure (1)..(370): unsure at all n locations
taatagttaatggtttagtggttgctaaacaacaaaagtttagcaagaataacctaaaggctatgaaggtgttcttggaacaaagcttgaagganactccaaaagtgggcgtgaaagccataaacaagagaaaacaaaaagagggtggccaagtccattggtgatgaagaccttggtctgaacaactttggcatttcaaggaaaattaaaaagatcatggttgaaaaacataagaagaacataaccagaggacaatctcaaagggatgaagaagaaaaggaaatataggcaaagaagcatangaccanaagaaggcatgagtctattacgttcgctcttacttgtccacccaccgtgaacccaatcgcac

SEQ ID NO: 166523 - DNA, 467 bp, Glycine max
  unsure (1)..(467): unsure at all n locations
gaagaagacccaaaaaagaaagttcccgatcaagggtctgaagaaagcaaaagaagaaaactcccaatcaaagattgtgagaatagcaaaaaagaaagaatattcccgatcaaagatcggaagaaaacaaaaganatatgcagaaaggtctttgggccagacaatatctgaacaatacagaattgtcaccaccaaataatgaaagaaaggaaaccacgacctcgagtggtcctcgtctctttgattgccaaccaaaatcctgtgcgtcagtgactgtttcacctcgcactaaacacaaatagataaggaaaaggccaaaacactcagagccaaaatcccctccacaaacactatgccccaaganaaagtccaattgatccatgatcacgcatataatctttgatttgaaggaaatgatttgcnaaattagtcatgacatatctatggttcggaatatgatgaaacac

SEQ ID NO: 166524 - DNA, 178 bp, Glycine max
ttttttcccaggaccggaaatgtgcgggtagaactgggatcagggggctttgcaacactgacatccaccaccggcttcagcataaacttactactacagcactctgacacgtaaacaaaccaactgagtggtggctgcacttatttataattcaatgcttgaccaaccaagggatcat

SEQ ID NO: 166525 - DNA, 306 bp, Glycine max
tgatacatatacaagccaactactttcaattccccaagatgaagttaacagagaaatcttggagatgccagcattatatttggatcacaaggatcaaatgttttcaaatgttcaattctagtaatgagctggttgaagatccattggcagttgagagagaaggagttatgatcaaccattggacattataggagagaaatattttctccaagaaattggcagcctttgaaaaagaatttcaaaaaattactttctttcttgaccacaagacaactgctgactgtgttgactctactcaaagatcat

SEQ ID NO: 166526 - DNA, 279 bp, Glycine max
actatcaaggccgaccaaaagcaataacgaaagtgctatgtggaaaacctgaaagtggcactctatctcccacgaggaagcctgtccagcctcacctcatggtggatagataaaccagaatattaagggaaatggttactaggaacatgaataaacataggcttcagcagaaaatttagaagatacaacactactacaacaacatctttctacatcgattaaatggggcgttctagatcggtttacgaccgtcgtcataaagaggggtagctattctac

SEQ ID NO: 166527 - DNA, 259 bp, Glycine max
gtgttcatacaaagatgggtttgcgcttatatgtcacttactaagtggaattcaacgtttcctgcgcttaacagtggccgcgcatatcgatgtgcttcttgtaggctctcatttgatgatacgagctatgcttgttgtccgactggtctacaatggtatagaggacacaaagtgtgtgattacatgcatcctttctgtcatatcacaccgttgacctgtgatgactcttaccccacgtcctatctgtatttcatgcatg

SEQ ID NO: 166528 - DNA, 224 bp, Glycine max
  unsure (1)..(224): unsure at all n locations
agcaccgccgctgcagctanagccttcatgtctatgctgcgagcctaatcatgccactcctgaatatgcagagctngcaagatgtggtcttgcaacgaccagttatgagcatggaggaagttctgcagaatggtgcctatccaggagtccagccttcttctttgggagggggtgaggcctctgcaacccatgagcctcagccggaccaagaggattgatgagaa

SEQ ID NO: 166529 - DNA, 421 bp, Glycine max
  unsure (1)..(421): unsure at all n locations
ctcagctcaagggtggtgtaatgggttacaagaaaggattggagccatttgtaatgtganacctacaaagctngccttggtgccaagggatattgtcaaaaggaaggtataaattatgacaaaacttttctccgtggcaatgcttaaatcaatttagattctttttgctatagtagcatactatgatcatgaaatgtgaaatggatgtggaaaatgactntccttaatggtgggctaaaagaatatgtgtatatgacacaacctgagggattcacatgcttgtctgatcataataagtgtgtagaagttgaagcattcattgtaacaagataattgaatggttcaatcttgttagctatgaagaactctgtgagtacaaaaagggtcgtgggagcattacatttatatgtagatgacatat

SEQ ID NO: 166530 - DNA, 442 bp, Glycine max
  unsure (1)..(442): unsure at all n locations
tatgcatgtgaattattaagcatcaacaagaatcaagccaaggctattgtgcaagcaatcaatggggaaaaacacaccaaatgattatgatgatggatggctcacattctcacaaaggtaaacttatcacttccaaattgagctttcaaaactatcatgacatgtagaggaaaaacaaggacttcaaatcacaaaatgtcaagagactnttattttcaaaaaattacccatttcttgaacatatcctataattcaaagaanaacatgcaaagttgtacatgcaaacagaattgacctaacatattaaactaggaacccaacaaaacttaacaaaataacaaattaacacaactatacaaaataacaaaaccaacanaactatgcaaaccaaagaacattcccnccatacttaaacaacacattatcctcaatgtagcacaat

SEQ ID NO: 166531 - DNA, 142 bp, Glycine max
  unsure (1)..(142): unsure at all n locations
gttcttcatcagctatatgtatagcattgattggctcacagtatatgtnattcatccttataatgtgatctatatgtatatgcatgctctaacgaatgttgaatcactatggtgtcgcacatatatatctctgagtgtgtgt

SEQ ID NO: 166532 - DNA, 289 bp, Glycine max
  unsure (1)..(289): unsure at all n locations
agcttacctcgaacncaaacagtgacaatgtactgtgttattatacaaaatgnngcatgaaactntaagctntccttcgtacctcaatcaacaatactgcaactgaagacgtattattattattatcatcaataaaacatgaacacccaaggaaacttagcatacacgaatttgacctacgtatctcgcggagaaagcttagacctttgagcactcacgagtgtttcagcaccctagtagcaacagtgtatgtagggttttcttcgagcgaggacaatgtgggttctgt

SEQ ID NO: 166533 - DNA, 274 bp, Glycine max
ctcaacttaaataagtataattcaaaagaagggggagaagagatagttgtctgttaacacaactgtatgttcctcttgattcaggattgtcatcatcaaaagaggaaattgggaagcatgacttcaagttattttgtgatgccaagaatcaaagttaataatttcaagattcagaatcaagttcaagattcagaacaatcagatcaagattcacactcagattaagaataagagagactcatccagatagtctaaaaagttttcaaacattgag

SEQ ID NO: 166534 - DNA, 348 bp, Glycine max
  unsure (1)..(348): unsure at all n locations
ctgcagctaactnggagttgatttagcccttagttcactttcttattagtcaattcaattaataaaaatcccaaagaaaagcgtccgattgatnntttttggtattttattcagatatatngattattntattattattctgcctcttttggttttaaacgtggntacgacgtgaaagaatggttgaattttattntaacagagattaaacgatattacaactcanatgatcggtggaaattcattttatttattgataggcgaaaaaatgcttaaataaatggttaaagcacgtcaaaagggggtacggaaaacaaacaaaatgaaaataaaacacgcgaaacaagt

SEQ ID NO: 166535 - DNA, 460 bp, Glycine max
  unsure (1)..(460): unsure at all n locations
gcaaaacaacatacaaactgtacaagctgtcacttcctagcaaaacagagcaaggcagagaactctgctcaacacaccaactaaaatcacagcttttctcacttaaagaccccagtaacaattccttcgatccaattcactaaccgctggatcgactccaaaatattactggaagtctatagtgcacaagcaaacatccagaactcactctgcactgctctttccacacacagtaaatacatagcatttttctgcacttgtgcaaaatcatgctgcacaatttcacagcaaaaatctgcacatagtgcagatttcgaaaatcacactatctctcatgcaatcttgcccaaatcacttcctacaagtcccaaatcatgcatcaatcatgtctaacccanaaccaagctttaaaacacagcaacacagaatctaggtgtccaacacctctgcattcaatggg

SEQ ID NO: 166536 - DNA, 239 bp, Glycine max
  unsure (1)..(239): unsure at all n locations
aatgtattaacaactnttcatccctagagtgcgcccccatcttgcgccaatacatcgtgagatggtgtttaagacaagtcgtacctttatacttgtcgaaantgggcactttgaattttgggggatgacacatctggtccaacaaaatccgtatgtccgcaacggatgtcaccgaaccttaacaactctaatctttcttgggagacgagttcctctttctcgtcgacgggtggcctttg

SEQ ID NO: 166537 - DNA, 490 bp, Glycine max
  unsure (1)..(490): unsure at all n locations
acctgtgctgcagctatataataatcttgtacacactttcttttattatctcatgatactttatttgacattctggtaaactaagatcaccatcggcagtaatacataagagccatgaagtaaaaattccagctccatttgctgcttcattttcacctagaggtccaaatacaggatctcaacatattctgaaggtactaagtaccacaagctgcaaattttctccattatatagttagtggacttatttttgatcttcttgtaaactaaccatatagttagtatttaagaaactaagtgagtttataatctnattgatgcagcgtgatgttgcagctcctggcattaacatcttggcatcttatacaactatgaagtcaattactggtcagaaaggggatacccaattntcagaatntacacttatgtctggaacttctatgtcatgccctcatgtngctggagtagtagcatatgtgaagtcatttca

SEQ ID NO: 166538 - DNA, 177 bp, Glycine max
  unsure (1)..(177): unsure at all n locations
gaattttcaagggacgagaaatagttgaaggattttttcagttgacgggttaagtcaaatgactcctatacttgataacttacttctctcntaaaatttccggaatgataaaatgaggtcacatgaacgtctatatttntacttgaaaacacagtcaatcaaatgcctttttctttt

SEQ ID NO: 166539 - DNA, 329 bp, Glycine max
  unsure (1)..(329): unsure at all n locations
gtggggatgattcaaggggtaagtattgctccttgctggtttcaaagaaatagtggttcctggctgcgtgctttatcatggcatgaattgccatgcaatatttggtaatgagtgtatagatcaatatcttgtgcaggctgcaggtataaatggataccagctgangttgggtgcttcttagaagtttgcatctaaaaagaaattatttactcagtgatcagaacaatgagtggtcaactttgtaattgtaaaaatgcttcctagctgctcctgatcaaatgcatactaangtcctacaacaccgtttcgctgtatgggtagtctccatt

SEQ ID NO: 166540 - DNA, 326 bp, Glycine max
  unsure (1)..(326): unsure at all n locations
cttgagcactatctctggaagctctgtgtgcttcttttctctgtggncancaccttctattcttcttccttgatctccgcaaatatatagaacattaattagatatagcaaagatgtgattgacaaatctccaccatgtgtagaactagagtatatatatatgtgtgtgtgtgtgtgtgtggcatgcattacttgataatgatgccaccatatacatcatataacagacattatatacaaaagatcataaaagtgtataaaacacgatcctagtcccgtggtgtaagtagttttcaaagcacaagttgtcgaaaaaaggaaagaga

SEQ ID NO: 166541 - DNA, 399 bp, Glycine max
  unsure (1)..(399): unsure at all n locations
tctgacgaggaacacaatatgcgtgcatattcttcataaactctcttgaacttgacaaaggatacttttctctcttgaccgaacagctnctggactcaacaaacaaggcaaaatcgtaaagggaccatattgcaaatgaatctactccgaatttaaagggatatcctactagtgggactttcctagtttgaatggtaaaaataaatgattctctgactcttatccctcagcagatacaaagtcccccctaagtgtcataacaaaactttaaattaatgtaagtattatcatggctgaatgtgatagcagtaaattaattagaccacaacatcatntaactcctgtctattatgtataatgatttaacacgagcacacatacattataacatgcattaat

SEQ ID NO: 166542 - DNA, 356 bp, Glycine max
  unsure (1)..(356): unsure at all n locations
tgattntctcaagtttcacttggaacccatttctaccaacttacaaacctaagaaaactatattatctacacaaaaggtacacttctctatatttgcatagagggtgtttctcctaaagattgaaagaactcgcctgagatgtcccaagtgatcatctangctcctactgtacactaaaatatcatcaaaataaacaactacanatctacctatgaaatcccttaagacataatgcataagcctcataaacgtgcttggtgcattagtgagcccaaaaggcatcactagccattcatacaaaccaaacttgtgtcttgaagcgtttntccactcatcaccctttntcatccctgat

SEQ ID NO: 166543 - DNA, 402 bp, Glycine max
  unsure (1)..(402): unsure at all n locations
gcttatacccatccttatcatgactcgagccaccatcaaagaggtatcagacatactcgattgtatcggaggagactccacataagcatngntcacaatttctcttgcctaatatgacatttctagtgactcctccactacttcaacataaggagtataagacagatgactagctagtatgtcctcctcgcctgatactataacaagctaacccctcaccacaaatgtcaatttttgatgcagagactatgggaccaccccagtagaatggatccaggggtgacctaacaaacaattataagcaggagttatatctatgacttggaaggtgatntgaaacgtgcacgagccaatctgaatcaggagatcaatnttcnctctcacatcacgccaactatcatc

SEQ ID NO: 166544 - DNA, 337 bp, Glycine max
  unsure (1)..(337): unsure at all n locations
tcgtaaacctgccacctttgtaacccgtggatcttctagaaatatgttcttcaacttcacaagatacttgtccataatctgaccgttgggatctttgagaagaggttnggagtgtgttagaagcctcttaatgaagcttctggaggaagcctcttaatgaagcttctagagaaaactacatgcagctgcctcggtaaaaacgctgcccaacctttgttaaccgttggatcttctcgaaatatggtttgcaacttcacaagacactgtttcatgatctaaccgttgggatctttgagaagatgtctggagtgtctagaagctttccgtcccgagagca

SEQ ID NO: 166545 - DNA, 426 bp, Glycine max
  unsure (1)..(426): unsure at all n locations
tgtcgacggagatngtttgatgtcngggatagtatccttgacaagtatgatggagacgagtttgttgaacccctaagcatggacaanaatatgtcagtgtcgagagtggtaacctctacaagtgcaagagttgcaggtcatcgaagcttgtctaagccccctatcctatacaagtgttgtccaagctccttctgtcatattgtctaaggtggacatgttctatggctatgcaagcgatgtctaatgtgtcagatgagggaagtctttgtatttgactattatgacctctttctaacagttggagagtgcattgtagacaaacgttatataatgtcttttgttgcacacgtgtgcagtgcaagcgcagtactcttgcatagtgtaacttgtggatgtgcacgtactanagacatgaagcatatgtga

SEQ ID NO: 166546 - DNA, 289 bp, Glycine max
  unsure (1)..(289): unsure at all n locations
ctttcttgagaatctatagctnagctacacacacccctctaatgactaagcttacctccttgagaagcttccttgagaagattcctacagatgctagagcttagctacacacacctctcttatagctaagctcacctgcttgagatgagaagctagagcttagctacaccccttatagtaactaaggtgacccccatgccaaaatacatgaaaatatgaaaaaaagacctactacaaagactactcaagacttcttgaaatacaaggctaaaaccctatactactagca

SEQ ID NO: 166547 - DNA, 162 bp, Glycine max
tggaagtgaatatggaaagcgagccacacagtatatggagaagggacagttggtccctgacgaaattgttgtgatggtatgtatgtatgtatgtcgcgactaaattctcttcaattcttggttctcatatcatatcccttggtttttttatgctatatagat

SEQ ID NO: 166548 - DNA, 311 bp, Glycine max
  unsure (1)..(311): unsure at all n locations
gcagcatggtcgtataaagccactaataggtccacatatcgggatttngtgaaagcaaactatcttatccatgggcaatcctgacgaatnnggatggggactcgctccaagcatgcttggttcgcaggctactcgatcatctttcatcttctctncaataaaaaattgagtttagttagtatgtaagttttgattctgtcatacatggcggggtatggagccaagtatcctgagaagatacaccaccggctgtggatgtgaacccacaacatatccagtgtcgtgaaggagaccaatattccaaaacttac

SEQ ID NO: 166549 - DNA, 427 bp, Glycine max
  unsure (1)..(427): unsure at all n locations
caagcttcatcatntangctatatgcatggcagtgtntatcggcacgcaccatgttcgctctgtgcccctattntanggacctaaatgggaggaactaaaaggctcttagtgataattcccaaggtggtcatatctctcttgatggtttctagaggtatcatcctcttcgaaaaacatatngtggcaatagggactaccagcaacaatatgttatcaaagagaaaaactctagatgagggctcactattatcaagcaagtcggagacctagcatgaccacagatntacctccactccttatgttcctatggacccgagtataaggccctttntcaactcaccatgtgtgcaaaaagggtgtggtgttatgtgcatcaaatgaatacatatntatctcatgcatacattaanacacgcatacaacatc

SEQ ID NO: 166550 - DNA, 378 bp, Glycine max
  unsure (1)..(378): unsure at all n locations
taagctctaagtgtaatgagatattgcatatggtgtacttggtatcattttcggatgagatcattctcccactnttagagtggcatatgaatatggtgtatccgcagtaagtgttcagaaagcttagtacttgaaacctgggcgctccatcgactagcctgttgatactaggcagagggtatgcatcctatggacacgccctgttcagatcaatgtagtcagtgcatagtttactgtggcctttttgaccatgacngagttggcgagccaagagaaatacataacttctctaatgaatatggctatgaggagcttgtccatctcttcggggaatcgtttgcatcattcttctactatcttcctcttcttctatgacac

SEQ ID NO: 166551 - DNA, 404 bp, Glycine max
  unsure (1)..(404): unsure at all n locations
agcttcattagtggcaccaaatactatgtcatcaacattattctcacaagtagcaactcattgngtaatcttttcataagcaatgttntgtcaacttaacctcttacaaaagattgcttgattcagaaatntcttaatctttcataccaagatctaagtgcttcttttaaaccatataatgcctttcttaacttgtaaacatgattaggaagatcaaagtcttcanaacctgaaggctactccacatatacctcttattcaatgtatgcattgagataaacactnttcacattcatttgatataacatgagattcattatacaagcaaaagcaagcaacaacctaatagcttccaacctagcaacagaggcataagtctcatcatagtcaatgctatcctcttg

SEQ ID NO: 166552 - DNA, 384 bp, Glycine max
  unsure (1)..(384): unsure at all n locations
tctcaagaacatacataataacttcttattgatactctaaggatcctcacacatgtccattttaatcccagttgcaataaactcatcccttatctcttaatcnggctcactgatgctactggcagggatatacaacagtcttagtggttacctaagaattactgaaaatacttccctttgattgctttggtagggttaccaagtgttataaagatggagataaaattggaacctcctattcactgtatatgttcaatgagaatttctcccttcatagacattactttacaaatcccaacactagacatgtgtataaattatttcctaaggtggtggtcaaattttactaggatccaacatctaacaatatcgggtatcattata

SEQ ID NO: 166553 - DNA, 410 bp, Glycine max
agcatcaaacatttcttagttgtcgtttccattggttaatacaacaacaccttggcaaccacaaaacatggatgatgtggagattgtttggtttccctaccaattgaacaggtcatatggagattttttaaaatgggtcttattaaagccctatttatgatatagcatgtagtattaacgggcttagcccaaaaatattttggaagaggagtatcatttataaagttatagcaatttttccatagacctatttgtcctttaacaactccattatattgagggggtctatgtgtagaaaagatatgttcaatgccatgctcatcactaaataaatcaaattctttattttcaaactacccccatgatcactcctaatagaaataatattgatattttcttattatgaataa

SEQ ID NO: 166554 - DNA, 365 bp, Glycine max
  unsure (1)..(365): unsure at all n locations
ctttcatcttgactcatgaagtgtacgagattctatctcgaatatctcgaactcattcttacgattgaccattgaactttntgccatcacctatgtcatccatctaatgtgatcatcaaaacatctcttgatgcctctctgttgaccatgaaggcttttcatctacaaaagaatgcatcctgaagttcatcaaagtaaacacatgaatcatggtttgcagatgttacctcatattcgctttcatagatctctggccctaaagcttaaatatacaattatgtgttctgaacctcttgatgaatccaagccctcatgataccaagaaggtctttcacatcctgactatatatagtttgaaatataca

SEQ ID NO: 166555 - DNA, 271 bp, Glycine max
  unsure (1)..(271): unsure at all n locations
attcttgatgagggtattgggcttatcacatgaaaagtgcttaacgcctccttccagccactattcaagggtctaagcgcttaccggagctaggctccttacacgtgagactggcgttagcgaagggctgcacttagcggatggacaactgtaaaaactnttttctgacttttcctgtccacctctttacaaaaatttaaacctcttctttcatattcatcaagctgaaatcacacgttatcacaagcctaccactagactatatgcaaac

SEQ ID NO: 166556 - DNA, 286 bp, Glycine max
catggtttttgtacattaacacgagaatgatacttcagaatgaatttttatggcttttatgcggcagttttttgtctaacgggaatttgagagttgagaatgaacgactatatgatttctaggaccacactctatacttgcacatcattttatcttttaagggaattatgtggttatgagttacattcccgtaagtgatcttcgtgaaaagtatgttcatgttgatgcgtctttcttaccagctgtaatggatgttggactacttctttctttgacttataagcaa

SEQ ID NO: 166557 - DNA, 318 bp, Glycine max
ttattaatccgaaattttgctatcatcctttcattctcttcgcctttgcccaaaagattctccaaggcttactcgctgagtctttttgggcactttttcttcatcttcaaaaaacatagactaaccgtctgaattcttttgtgtttccctttccctttgcaagagattcatccacacaatctggatgaccttgattcttccattcccaatacaaaagtgttcaaggtttaaccgctgaaaatcttttgaatcccattcacaagcatatatgttaacacctgagactttgcttacacattgggggacatcctttgtgtc

SEQ ID NO: 166558 - DNA, 368 bp, Glycine max
  unsure (1)..(368): unsure at all n locations
atggcttattccctaagggagggcgccttcccttcccatttcttctttgtttcgcttcatctccatggggggaaatcaccattgaatgacttcattgtagctcaaagatccagnctccatagaagctctataagcaagcttccatcaagtggtatcaaagcacaagagcttcaagttggtgctccttaaacctccattaatantttgctttaccttctcttccatagttaggtcctcataattttctccatgtatctcctcacatgtcttgtactaaatgtttttaacatgattctttatagtttccaccaattatacttgctatagaagctagatttgatattctatggttcaaattcctattcttg

SEQ ID NO: 166559 - DNA, 153 bp, Glycine max
tattccattttatggatgagagaccctttagacctttcacacactatctacattaacattctactaaacatgaatactcttggtggagaggaccacatatactatgccacccttttcaacaaactactttgtgataccatatctgcatgtttc

SEQ ID NO: 166560 - DNA, 316 bp, Glycine max
taaagtgcggattgcagataaaccacatattaattaatctttagatactatagatcaagaggtatgaacttataattctactttttccacgatttaactttggattgataattttccaaagagaaaatatttttctaatttaggtacctacaaatggttctaccagtataaatcatcaaactacaaacaatcttaactagaggtgagttgaaattatatggtatgacaatgcccccaacgactattgtatttctgaacgtgatttatggaatgaaatgtgagccgggacaaatgtcaaggttggtttacttggcat

SEQ ID NO: 166561 - DNA, 355 bp, Glycine max
aactatttggatttctaagcttactctactacacacatgctactaagatctctggatggtacctaaaataagaaacacatcatatggtcacagccccaaatctaggtgtactacaagttctcatattacatgttatgccaccacgaacttatcccaaagctatgatggacatgttgtcttacagggattttaaaacaatcttaagagatatcacaatggaatgaaaccaaaaaggtttaatcgttgagtctttcaaattttcatgggctgaaatgcaactctcagaacttaaatatggtaatcatatggcaggtttgaatacaggtccgataggcaattttcttaatgtacaaca

SEQ ID NO: 166562 - DNA, 422 bp, Glycine max
  unsure (1)..(422): unsure at all n locations
agcgtgaaacatattcagaagatgatggcagttttgggggatatggttgacttggacgacgatgtggaggataaacggcgcttgtgacaaacaaaggtgctcatcaagaccccatggcggccgatgatacaacacaccatcaacgtagtcattcgtggtgaaacttttaaggtacatgtagctgaagagttcgggggcgtatgccgngaccataacgagcacatacgaatcataggaggatcgtcggaggagatcaactccgacgacatccacctggactgcaacacactcgcctcgccggaaaaggggtgtttcgaggagcttcagcaccgtcaaaagggggactggtcggtgatgaatgaaatctaaaaccagtggacaactggtttacccacgggtcgaagcaattgcacatacccact

SEQ ID NO: 166563 - DNA, 385 bp, Glycine max
  unsure (1)..(385): unsure at all n locations
aacctgatgctgagaggaacgttgataagggctacgtttgagtacgtgagctcanttgaaggtgggcaactggggatggtacgttaatgtttgacttgtggaagtgggagagttgatttgcgccatcgcccgatcgccacatatgaagggtaccccataatccaacaagcttgatgtgagatagcgtggaagagtcactctttctacttttgtttgttgaccacaaagtggtacctggagatatgtcacgagggtcaggagaccttgtggacattaggtggtgtgctattgtccataaccaagcttgaccaatcccgacccaacccgggcatagtcagtcagtgagaacctgtgacgtacctaaacaagcgagctcctgacagtc

SEQ ID NO: 166564 - DNA, 138 bp, Glycine max
cacttggaagaaattcaagatctctttacgtcaaataccatttgtttacgtgggcatactgcttgggcttggcttcatcccgcgttgaaagggatgtccaatagaaatagaacgttcaacagaccaatattgggtttg

SEQ ID NO: 166565 - DNA, 316 bp, Glycine max
ttgtagatctgtgcatcgaggtatttacaatgacactacgatgcagtagtctccgctacactacactctgttgcatagggtctccaatccataagtcgagctgtcacttcatgtgtgtgtgaatgttctcatatatgccactatgagtttcacgataacagaggagagcccgcatagtctgatattccctccatttatgacaactcgtagtttgacaccacatacacttgcaatgagggaagatttgctacttggaataggcatgtatgaggccttaaactctacatgttgccttggagacatgcaccagaactgt

SEQ ID NO: 166566 - DNA, 263 bp, Glycine max
gagatatatttttgatcagatagacagcccattatcctcatggactaaacccaatacctgctccaattttttctgctctaaaacttagattgcctacatattcatatcaaaaattgttacataaaaccttgagtttgctaataataattgattccattatctattatgagttggacaaattatgaactctctccctttcaatacttggttgatgaacttgtgtcaatcagagtcgaattggataagtgcgaaatgaaatggca

SEQ ID NO: 166567 - DNA, 151 bp, Glycine max
gtctcacgtctcattgtttatcgattcgcttaccggagtcctaataaatttcattatcttgccctagggcctatgttactgctcattcatcatacttcctccctttgctgctaccttataagattctgttacaaaaaaaaattcccacgtg

SEQ ID NO: 166568 - DNA, 402 bp, Glycine max
agcttattaccacagcaacacaaaatctatgtgtccatttattttcaatttaagggattctctatgcttgagaagtgtttttaataatgggacaaattagaagtcaaactctcacctctcaccaatatataacataaatttatacttgcttaaactgcgattacgctaagaatctcaccgaatcaaaattctacttctcaacacccaaatttaccctacaaatgactctcggtcactttgccatttgttttttttctacacagccttaaccttttataagtcctaaatggatttcaagctaaataactcactcaacccttaaatactaccaattcagattggccttccaccctatagaattactctgttttactcatacaccacattctcactatctaacct

SEQ ID NO: 166569 - DNA, 197 bp, Glycine max
gatggtcttgatattctcacggaccacttggaccccagttttaccaacttccgaccctaaaactactatagtatctacacgaaagggacacttctgtattggtgcaatgatggtgagtagtccatatattatagaaaatttgcctgatataaaatatgagagcatataagctcctactgttcacttaaactgtatga

SEQ ID NO: 166570 - DNA, 378 bp, Glycine max
  unsure (1)..(378): unsure at all n locations
atattcattgaatttttctcgctcctcaaaggctctctctcaaattttccgattactctcttgtttagatgcaaattngattgtggtgtgttaaaaatcacatacccttgattatatgtctcgctgatttattccatagacaaacgtttttgtttttaattaaatgttaaagtctactactatgaaaatggtatgtgacatctttaaattggtagaatagcatagcaaccccacatgtctaacgctgtagtgtcaaaatcactctagatatatgactgttaaaataattttacgcagtgtaaaaaaagcctctaaatgatcatggtgattgtatgaatgtaaaattgaaaagaaaaaaaaacaaaagttcaacgacct

SEQ ID NO: 166571 - DNA, 457 bp, Glycine max
tgtagaaggttgctgaagatcttgtggaagtttgctctatgctacgagcctctaaatgctgacaagagaacgattcctttgtgaataaaaacgaagaagtttcagctcgtttacaagggcgaggaccatgggtggagagggttcctattttccacatcaactagagctttgtaagcgcaaggtggatgcatgaagatcaaagtgttgtgttggactataaaaccaattaagatcacccacactgggtgcagccatgttccctgagctttgaattgaaaacttggcagatcatggagccacccgagatttctgtgtcaatccaatgcattaagtagtttggaccctattgttagcctacgctttattgtttgcttctctttgtgggcatactttcctctaatgatccaacaattattaatattcaaccttttattgggatgctccctcttgcaccttt

SEQ ID NO: 166572 - DNA, 274 bp, Glycine max
tacggacatactgtgggtcatttcatacatcttcatggaatggtccattaattatgttataatctattcttaggaccaattactctcagaatatgcatatcttaatatcgttatacactgaaacagcctcaatcttttgtattgtgttctaatacattataaagttgaaagttgatcaatcaagctcaccaatacgaatactagacgtgttagatcctgatccgtgtgtggtgaatactattagctgatcatgactgggcctatgtgaacaatc

SEQ ID NO: 166573 - DNA, 409 bp, Glycine max
  unsure (1)..(409): unsure at all n locations
ctgcagctgaattaaattttcttccaatccaattattgtatttcacaatanaatgaaccaagtaactatactttaacaaaataaccatatgaaagggttttcatatttgtgacttcattgtcattccaagaacgaaccatttaagaaaacatgcattgcattaacaaactagcagacaacccaaaaaggttcaacctctttatttgatattaactcttataaatttattgtattattagcattattataatatgttgttttataatatatatatatatatatatatatatatatatatatatatatatatatatatatatatanatgagtggcctactataagcttttttacaagcttaagtgtgacttatataaaaaatatattttctaaaaataaataaatctttta

SEQ ID NO: 166574 - DNA, 405 bp, Glycine max
  unsure (1)..(405): unsure at all n locations
tatcacgctattggcgggtacgcatcaaatggactgttataccttngccaaaaaggttaagtcatgccacagaggattcatgggagagccagatgagatgagacctgtacgacgtgtaattcatgaatttccaagctcttgcgtgtgcaggagaccatatgtggatgaagaacttcacaaagaggtattccgttcccctaaactcgttgcaattaaccttactgcataagcttattccttgtcgaatggaattagaagatgcaggacatgatgcagtagttaccttgaacctggaggttatatctagcggcgcgaaagaaaatcagtgttgtctctcgctctgtaatgccaactgacctcaattgaaattgatggcttgcatgcgtcatttcacacattgatctt

SEQ ID NO: 166575 - DNA, 342 bp, Glycine max
ggactaatacatttgctggccaagtttcacgggcttgcaggtgaagatcctcataagcatcctaaagagttccatattgtttgttccaccatgaagccccctgatgtccaggaagaacatatctttctaaaggctcttccttattctctagagggagtggcaaaagattggcctgactaccttgcttctatgttcatttccagtggggatgaccttaagagggtgttcttggagaaattcttccctgcatctacgaccactgccatcagaaaagacatttcatgcatcacgctacttatcggagagaacttgtatgactattgggaaagactcaagatattg

SEQ ID NO: 166576 - DNA, 268 bp, Glycine max
tcaagtcaatgatggaggcattcccgagcgcatgtcaacacgattcgcgcaatctagaaatttaggcaaatcaggtcaatacccttaacccagacttccattccttatgtgcaagcttactttccccactttaccccattgttcaccattgagattatcactgaatattcgccaaaaattaacacttaaatggaatgaggatgagtcaatcttaaaactacaatgaaagccctaatgagtcaaatcctgtatgaatacttgatgcctc

SEQ ID NO: 166577 - DNA, 447 bp, Glycine max
tgcaagctatggtggaatgtaattctattatagtagtacattttttgtataatactaacttattttcttataaggtaagaaattgatgaatcaattgcattatgaaaacaaaaaatatgcaattgttagttgcacacatatgctaagaaagcaatactcgtgtaaatcttcttcccttcgatcatgcttcctttatcatcattatgttggagggattcagattcaattccttctttttgttaaacataattctatagaaatagaaattgtttattaaactataggtctaaatagttttgttttgatagcatgggttcttgctccccatgtattataccttctctctttctctttttggtaataatatctttctggccatttggtaggtatctagaggagtgtcaatctaattacgatcaatctagctactattcatctatgtatgcc

SEQ ID NO: 166578 - DNA, 324 bp, Glycine max
cttatgccagacaattttcatgttgtatgtcggagaggtatctttccgggcatatttgcgcaaaatctctcgagctaagaagatgttggccatcatctttctgtttttaatgaaagcagtgtgagttttcacaataatagtcctaagcactggggctatgccggtggccagaattttagatacagtcttttataacataatacaacaagatatgggtctaaaatgtgtaacctgggaggcctgatcatgcttatgaataagcacaataatagcatggttgagttgctttataatttttccagttgtgagaattcatttaccgct

SEQ ID NO: 166579 - DNA, 238 bp, Glycine max
ccaatccctacccaacccgggcatattctgtcactgagaacctgtgatgtacctaaacatgcgagctcctatctgttactaattaatggaacaaagaccactaatctaggaggcttgtggtggcttgccatctgagaattatgtgtgatatgtgaattatggcctccgggtaattactaccaagggtgggtaatctattacaggcttaaaaatgaagacagaggctacgatgttctct

SEQ ID NO: 166580 - DNA, 354 bp, Glycine max
  unsure (1)..(354): unsure at all n locations
ttctagcatgccttcctatagcaaaactcaccaaataactcctcatcccaaaccattacaagggcatgggcanaactctgcaaacattttagcatcatagtttgcaacatcattggagtggactcttccagattttacatcatcgtaattatctacatcatacaccatttaataatgcgatataggtgatatcaaatttttattatccgacaacacaaacatataaaggtgcttgaaagttaccataaactcaaacaaattgtcatcatattgaaaagaaatataattagtgctaatatttacacgaatgacacactattaccgaagcaacccatttagaataaaacaaaatct

SEQ ID NO: 166581 - DNA, 409 bp, Glycine max
  unsure (1)..(409): unsure at all n locations
agtgggtcccaattggcttcctaattttcagctttcctatttggatgggagatcataggaagtacgtcccagttttccatcgtggattctgtcacaaaacaaacttctatatttagacatgtctaacacagggattattgattctattcccacacagatgtgggaagcactttctcaggatttgtatntaaacctctctcataatcatatccatggggagattgggactacattaaagaatccaatatctatcgacaatactgatctaagctcaaatcacttgtgtggtaaataccctatctttcaagtgatgtgtgtcggttagatctttcaagcaatncattctctgaatccatgcatgactttntatgtaacaatcaggacaagccaatgcgaatagaaattctga

SEQ ID NO: 166582 - DNA, 395 bp, Glycine max
  unsure (1)..(395): unsure at all n locations
atactngatacccattctacatattcagcanatttatgttcgacaacagaatgaccttcaatgccaagatagaccaaattggagagattcccaatctgagatggaatcttccccatgaatccattaccagagaggtcgaggtgagtcaaggaggtcattgcacaaaggatagaaggaattgacataccttctccaaggaattcattgccgctcaagtcaagatatcgaagcttacagagattcccgatctgagagggtactgttccgttggcaacaacaaaactcatgtcaagatacaccaaatttgagagatatccaatctgatgaggaatcttcccgtggattccagtatcatagaaggctttgtgagtcaaggagctcattgcacaaaggaa

SEQ ID NO: 166583 - DNA, 447 bp, Glycine max
  unsure (1)..(447): unsure at all n locations
atatacgtaaaattagatgcattattacttccaggggaaaaaattattgcaactagaatgaatgtctcattaatgcatgataactacatctgttgaaaccacaaatataagctaaatgaactgaataacttaaaaagaaaaagagaaacaactttcgacaaataaaaatgcagtataaaaatcacaattgcaagtttacatacggaagcaaatgttttaataaaagcaaatataatttaatcaggatacaaattcatccaattctaactaccatgacgtgcaatacctgtaggtgggtatcagaaaattagtaatacaatataattaaatcgctaagggtgggtttggtcatatctcgatcangagaagaagaataatagaagggtttcattattgaagtgaaagcctaagtcccacgccaagtggtcctgtatgcatatntacaca

SEQ ID NO: 166584 - DNA, 442 bp, Glycine max
ttctgatgtcgtatgctaacttactctcatatccactctttaatgcaatgatagccataatcccaacaaagactcctcaacctctgtttcccaaatgatacaaccccaacgcgacatgtgcttatcataagggaggttcagagcatgccattgaccattgtatgaccctaaaacataaggtgcaaagtctaattgatgtaggttggctaaaattcaaggaggacaattgcttgtgaattctaacattgtcgagcgatactatgcatgatacttggggaaatatgaatgttgttgttagatgtctccaatgactcattatgaatttcatgtgtatgccattattgtaaacaacagtgacaatgctcataatatggataaaattgatggtcttgtctctcattctctcacatttcatctttgatatttattaacattactggat

SEQ ID NO: 166585 - DNA, 304 bp, Glycine max
ggatcgaggttagaatttaggctcctcataaaacacaaagcctgatcgatagagaacatctttatttactcagttggttgttagaaagatccacgtctttcctactgctgcaatcttaataattgcattttacattttagccctaacctagttaaatccgtctcatcatcattatcaatgttctttcacaatgcctatttataatttaaccctgtcaagactagttcctgagttgatagccgattcatcatttaatttaaaacttgacattcggtgcgcttcggcaaccaaattccttgacata

SEQ ID NO: 166586 - DNA, 365 bp, Glycine max
agttctagagagagataggtcttattttcacataggtctgagagatcttgtcgtgtgaacatctgcatagactctaggtcgtagcggatgccgttttgagagattgagatgatgttgggagtgattgtgagatcctgtaggtgaaggagacatcctcaccacttgttgcttttgcaggctttcatctaagatcttctcctttgatggaaaggaggtgtccggacgatggaaagctaaatcctctgttggatcttccctgtagggtccttatgtgaatatatttctatctatgtaatgatggtttgtgtgttctctgcgctatttgctattcatttcagcgtgccttttctcttgtcacgttgatg

SEQ ID NO: 166587 - DNA, 454 bp, Glycine max
  unsure (1)..(454): unsure at all n locations
gctgtaatcgattaaacctatatgagagacttctcttttagctacaaacacttgtgtatttaataatgatccagatggaaccgatgagaatagtgttntaaaccttgaagaaatttcttactttaaacctttcttcttagtcctacatgatgatgcatgatgcacgtatgaaatgatagagactaagatgctacacacaatacaacaatcaatacaaacgccactctagagagttgggcatgtaaaagacaaaacttcttcaagttcttctttaagctctaaggccaagtctttattttgctccccttatctctaacaatcttccccttctgtggctgtgatgatgccaaacttgaattttccatttgagtgcatntggagagtcttaagagtagagactcttcttagacaaacctgaatgtttctgacactaagagaagatcaattatatcat

SEQ ID NO: 166588 - DNA, 448 bp, Glycine max
  unsure (1)..(448): unsure at all n locations
gttatgcgagacagagaccaacatgctatctatcatcgacaagttctataagagttgggtctagccacggcccacgagcatagaatcgcggatgagtatgccctagtgtatgcggaaatagaggctagaggaagggtgatccactctttacactcagaggcaaccatgtggatggatccgtttgctcttaccttgaacgggagtcaagaacttccccgattgttagccaaggccaatgcgatggcagactccttctccgcccccgaagagattcatgggcttctcggctattgtcagcgtatgataaacataatggctcacatatatagaaatcgtgaggaaacttgtgtggtctctcagagcttgactagattcgactnactttatgaaaaaaatggattgtccccgtgtctactccaaaacttgtgcaatcatgcactccaccttt

SEQ ID NO: 166589 - DNA, 319 bp, Glycine max
ttgagaagctttctcaagaggcttctttgagaagctagatccttatctatccacccctctattaactaaattaacttccttaaaaataattacggatgaaaataacgcaaccaataatcaaacatccaacataattactaataatatatagatatatatatcagggtgttacaactctcccacccttttagaaatttcgtcctcgatatttaccttactcaaaaaaggatgggtgagcttcttgcatctgactttctaattcccacatggcatgttcttctgatgcacctcctcatatcaccttgaccaacggaatctc

SEQ ID NO: 166590 - DNA, 236 bp, Glycine max
tttttaatagatcacccacacaccctgttctttcgacgtccataattcatctcccttggtttgattgagctcactgaaaaagtaatattatgtgagtctgattgaaacctatttctcttccctattggcataacggaaaaggcaagggcgtatcaagatgaaatgttcaatacatctatcattacacaacaatcatggaataaattaaactagacatgaagccaagagacatgact

SEQ ID NO: 166591 - DNA, 349 bp, Glycine max
gcatggctccctatctggagcagcttacagggatctactaaatctaatcttgatctcattatacgaataagccctaagattggcagatctctcagcccaaatcttacctgacatgaccgaaatggagatgatcacaactctggttgattcctttcccactttccactatgaaaaggtgatacgctatgtacctgctaactttgcagatctccttctcaccggaaaaagattgaaactggctactaaaggctattttgagttgctgccatatggccccacaacaaccaacacccctctggggggctagaaaaggatgtaaaccctccatctccgcgcctatatgttaatc

SEQ ID NO: 166592 - DNA, 418 bp, Glycine max
  unsure (1)..(418): unsure at all n locations
agtttattcaaatatgcgaacanaggattaatgtactttgtttttcttctatttaagcagtatctatctttactgctgaattagccatacagaacaaaagaaaactttctttctttctctcctcatgaaccgatgataaactactattaattgcattgtcacatgaaaccacaatatagcatagctaactgaaaatttcactatagctagtagtgccaccattgcacagaaaactgattacacatttcacacaactacatatgataagataaccaacactatgtgaagccaaactccaattccaatacaaacaatgtgaacaattataaatgatgcatgtagttgaataaaggtatattntcagtttcaagatttactggatgctgctaaggaacgcacatagttgatgccaaagctg

SEQ ID NO: 166593 - DNA, 411 bp, Glycine max
cttggaacataatgaatggttgttaaggttctaacaatttcatcatcctattggatttgcatagaacctatcccaatagtcttgcaatggtcattgttatccatcagaacattacgactagatttcttctcataggtcacgaaccaacttctgtgtggacatatatgataagaacaaccgaagtccattatcaacttcttagagaggttgttttgttgatcaacaacagaaagtaccaaatcaatttccaatgaagattcattatgattagtggctacaataaattctctttattttcttgggacattcttttcttcaataaccaagagtcttggagtaatacaaatatcccattgtgtaaccttgccctcatatttccatgattttctcttttctagcctttttattaat

SEQ ID NO: 166594 - DNA, 386 bp, Glycine max
gtcgcgcctcgtctaccatatatgcggctccttcggcgacgcctccgtcatacttcgtacgctctccggcctctaccacccccgcaaccgctacgtgctgcacctagaccgcgactcctccccggatgaccggcgccctttaacccaccacgtcgaccgccatctcaccttccagaagttccgcaacgtcagggtcggtaccaatgtcaacctctgtacctaccgcgggcccaccatggtcggcaacactcttcacgccgccgatattgcgctcactgagagcgaagactgggattggtcattaatctcatagcctcgactaccccctcggtacccaagacagatcgtcacttctcactactatatatgaatttttgtgttctatc

SEQ ID NO: 166595 - DNA, 351 bp, Glycine max
tacagtgagtgattcatgcttagcgcctctacctgcgctaagcgcacttcccatggcttcaaaacaaaatgatgttggcgcttaacgcatcctttcctactaagctcagcttgaaaactcaacttatagaatgtatctagagcttagtgcacgatggcgcgcttagtgcagctataatataatttcacatagaggaagtggcgcttagcgccttatccacgctaagcccactgcttaaggtgcacactacaatgaagatgttgggcttaacacagtgatgtgcgcttagttgaatcattcaaccaatcaatcaggggtctttgcgcttagcgcgagctagctcgacttaac

SEQ ID NO: 166596 - DNA, 361 bp, Glycine max
  unsure (1)..(361): unsure at all n locations
tatgcgcatatntccgtacgaacgttctctttgcacatacattctattaactaaagaaaatgcacccatatacaatcaatgcagcttcgtcacctagattatttatacgtacttccaacgtgtatttgttacttacatcacacacatctccttggctaaaattacatacacgcatactcaaagcatttttggggtaccaaaaattgcacatgtgcacatcttgtgatttctaatacctatacatacacaaacttcatgatgaatcttgactatctacacaataaggtgctacattccatgctcttttcaagttttgctacctaaagccgcatgcaaattcaagtataatttcctttgctgc

SEQ ID NO: 166597 - DNA, 449 bp, Glycine max
agaagaagaagaagttcacagagattttatgcttgtaaaggattgtattacattgattggattcattttaaaatgccaaacaaagccttgcttttatagactcttcatgtctggtcaagagggccatttagaagagttatgactcttagaaatacttaaaaccaatttgaaaaagtcaaaaaccatttgaagaagtacatcttttgaattattcagaaacaatcacttgtaatcgactaccaaatcagtgtaatcaattacacaaagcttttatgtgaaaggatgtgactcttcacatttgaatttgaatttcaacgttcaaaggcactggtaatcgaataccaaaacattgttatcgattaccagctttttgaaatcaatcgaacattgtaaattcatttaaaacttcttcaatcattttgctctggtattgatacaacatctatatc

SEQ ID NO: 166598 - DNA, 298 bp, Glycine max
caatgatgagtactaacgatgatgaccaaggtgatgactaacagctcaaagattaatctagaacatttccagagttcaagattagaggcgcgaagaattcgcgactcatgacgagagtctagagactagaatcttgattcaagggtcaagatctcacgaatcatgatcaagattgcgggctatgattcatgaatgaagagaagactcggtctcgatatgtcttaaacagctttttccaaactttgactagcacatgagtttttgactggaccttttaccagatagttatttactctct

SEQ ID NO: 166599 - DNA, 283 bp, Glycine max
ctattttttagaagtgaaaaaaacattttttctattgtgctctttgtaggcttaaattggaagaaaaaaaattatactttgaatgggggtaactatctaaaactattaacttatatcttcattattatataaagtaacagaatacttatatttctttttgcactacaataaaaaaaagtgaattctctccttttttttggaccaaaaagaactttctttttctccattaattctccctttttttaatcgccacgataaagtctatatttttaactactttaaa

SEQ ID NO: 166600 - DNA, 428 bp, Glycine max
gatatgaaaatgcaatccttcttgtggggtcttttatacttctatttatattgttgattgacttagattttacgtagtttatctctacaaagttgttcatgcttatatgtatgttttgaggaaattcgatttattatggggtagtgtgtgtgtgtctatatatatatattatgtcatgtgttaatatggaattgagcattttatcctttgggacttcgaaatgcaaaaagtttataagtattctaataatcaaattaattgaagagttttaaatgaattaaaatgaatgtcttccacttaagttaattgctaggttcatgtaacgggaacgggtcggcacaaacacatcaatcgacacatcaaattcagattaagtgcataatcatcaaggcggatgattaacaaaggattattattatttgaagcat

SEQ ID NO: 166601 - DNA, 379 bp, Glycine max
  unsure (1)..(379): unsure at all n locations
cttattactcacgctcgacaatcgagtggtattntgtttcacataacagggatattgagcatctatccatgtatggngacaccaaaactgctcgaagcattatgttgatagaactgaataaactcatataggccaatcctcnttttcgtgataagcagatcttccctacccttaagtcatcaagactgcgaactttgatcaatcaaaggcatgtgtgattaatttctaccaactttatctatctattttgccatgctctttcattcacatagttgggctctgctttttgacccatatgtcgttatgggaaaaatgaaaagtaaatcatgttgatttctggacatgtagtatagttcatattttgtcaatggtaaatgat

SEQ ID NO: 166602 - DNA, 381 bp, Glycine max
  unsure (1)..(381): unsure at all n locations
acattaatttcatgacacaaatgcaaaaatgatgattggaaattttatgcaaaactggtcatgcatgcacctatgtggaccctcaagtggcaaatttttatggtcatgtgatgctatggctcaggattcatntcctctatnttaaatcaacccagtgttttcaaaatatgttcttttatcaatttgtgcattcatcctattccatttcgggcgtccggggaaatttcacagcattcacccttcaggtgtagacacatttntcaaaaattggttatgatcaatgaatttttttcaacaaaagttggaaatcatctcttttcataagcatgtcggttttagctagaaacttatatctcttttacacccttttttacttgcttc

SEQ ID NO: 166603 - DNA, 416 bp, Glycine max
  unsure (1)..(416): unsure at all n locations
agtggtgatcagagcacttgagcttctagtaggttctccttaaaccaccattaantntttntctttaccttctctttcattcttgtttcttcatttttctccgcgtatctcctcacatcttttgtgctaaatgttgttaaaatgattctttatagtttcaaccgattaaacttgctataaaagctagatttgattttctatggttcacatatatttttcttgttcttgttcttgaaccatgaattgtgttgaatctaggttcctttgagttttttcttgttatcttttgtggctgaaacctataccataaaattcttaccaaaatattatagtagaagacaacctcaacaatcttgaatgacttgttcacctattgtagttgtgtcatataagtcatgtctaatcatgaaacttgt

SEQ ID NO: 166604 - DNA, 186 bp, Glycine max
ctttttcttaactccttacagaatactatgctgggcctttaattaatgatgaataaggaattccgatttcgcaaaccgggatccagacaaaatattttaataaaaaaaaacgcttgagtgaacatcatgatactttgggagaaccggccacctttatgaccccatggaaccttaacaaattaaata

SEQ ID NO: 166605 - DNA, 53 bp, Glycine max
tttagccttcagtgttttatcaaaaaacggttcaactggtaaattctaaaaat

SEQ ID NO: 166606 - DNA, 257 bp, Glycine max
  unsure (1)..(257): unsure at all n locations
agttttcatatacccattgtccaaccttgactgttggcatcctcgtaaaactctatgtgttcttgcgccttaacaaaatgacgatggcgttatgcgtgaatnatatcacacatgagtaacagggaattcataggcttataatgggggagccaaaaacctcttgagggatggatgggggaggttttcccattatgaccttataaagagataccctgtcgctcaaatgcattgtatgttttatatcgaccattcaacta

SEQ ID NO: 166607 - DNA, 149 bp, Glycine max
cttgacaatttacacatactttactctttttggctgatccctatatatacgacgcactcatgaatgttgagctatagcaaataaacacaataccttttctccgagtctgattgaatccgtatatttcgagaccttgaaatgaatgtgaa

SEQ ID NO: 166608 - DNA, 319 bp, Glycine max
tatgataatcaccgctttatgagtgctgtacttcaccaacgcttcgaggccatcaagggatggttcgttctccgggagcgacgcgttcaactcaaggacgacgagtatactgatttccaagaggaaatagggcgccggcggtgggcatcactggttactcccattgccaagtttgatccagaaatagtccttgagttttatgccaatgcttggccaacagaggagggcgtgcgtgacatgagatcctgtgtaaggggtcagtggatcccgtttgatgccgacgctatcggccaactcctatgatatccgttggtgttgg

SEQ ID NO: 166609 - DNA, 370 bp, Glycine max
  unsure (1)..(370): unsure at all n locations
tcatctagagattttctcttttagtgatgcattgacgctgatagtccctatcgccacaatgtattacctaagaggatgatatctctataagccagtaaagttacatgaaataaccctcgggagttgtcactataaggagacttttggatcctttccattaggttcctaaattatgggggcacattgcaaactcactctggcttattccttgatcgcatcatgcatctcttcatggcatcataatggatatatcattcctgcatttatcattntcatattcatgcattgcatttcatgaggtcatgcattatcatacattcttatttaacatgcttttgtttaccaactgcatacatttattttcatcggt

SEQ ID NO: 166610 - DNA, 452 bp, Glycine max
  unsure (1)..(452): unsure at all n locations
cacctgccgcatgcaagcttttcgcanagcttacggttaaatttgggacttattcttggttgaagtctcctataggccattgcctccctcgcccagtattatgatcatccattgaggtgcttcacctttggggacttccaactatcacctatggtagaagaatttgaagagatcctatgatgccctctagggggaaggaaaccataccttttctcaaggttctatctgatgtaagctccattggagctcgtacgcctaggatcttcttcatcaatggattcctttgcttcttggaagataaatggcagcagaatggagaaggaagagaaagaggagacgccacttcaaggagaagatgagtctagaagaagctcaccaccatatgaggccatggataatagcttggaggaagaaggagatgaatgaacggagagggagagaagagcacgaaa

SEQ ID NO: 166611 - DNA, 360 bp, Glycine max
  unsure (1)..(360): unsure at all n locations
ngcataccattggattggtataagattcaaaccctataatttgttgcatgcacacctcctcttcaagaatgccattacgaagtggtaacccataagtgatagcttatgagagaagaagtcttactattatggacttgataataggtgagaaagtctctatataatcaattctatactactgatgaaatctcttggtcactaatttggcttattactttttgaccgagccatctatgttttctttaaccttgaaaattgacttacagtcaataggaactctattagggggcaagggaacaagcaaccaagtgtcattnttaatcaatgcatcatattcaactttcatggcaactaaccatg

SEQ ID NO: 166612 - DNA, 399 bp, Glycine max
  unsure (1)..(399): unsure at all n locations
gcttggattatcttttagtatggaatctatccctcctaagaggagccaaaccctatcacccttattaagaactagctcttttctttctctattgcctttaattgaatacacctttgttgggttctctatatggttcgaaccctctcatgcagcttctttacaaactctgacctaaattccccttctttatgtataaaaagaagtgtctagtgggaggggaatgacgtctaacggtgttaggggattaaacccatanacaacctcaaaaggggactgcttggtggttctatgaacccccctattgtagcaaattctacatgaggaagattctcatcccaagacttatggttgcctttcagaagaaccctttaaagggtggataaagacctattcactacc

SEQ ID NO: 166613 - DNA, 451 bp, Glycine max
  unsure (1)..(451): unsure at all n locations
tntcttaaaagttacttgttcaagattatatgatatattatctattaaacaaagaaaacttgttatattgaatattagattcaaacaattatgcataaataaccatttatacaaaatagttcacaactttagaaagcaaatccagactggtagactcaggtctcataccgttttcaccccaagcaagcagcatcagtccataagaattttcaatcaacaggagcagatttaataaacaaaagagaatgttctactcacactaagtcattctaatggccacccacaataccctgcatgatgatgatggcttgtctcaaggatagttggtgtcggtgagctgcttcctgttgcttcatcattactgctagaatgagaagaacgaaaggccacaaaaaggaaaaatggatgtctcttccatggctctccctacactactacttaaacttgcact

SEQ ID NO: 166614 - DNA, 238 bp, Glycine max
  unsure (1)..(238): unsure at all n locations
cacgacacccacagaaacccgctccgtgccgagctccaacaagcgtaactgaacaaacccatattagcgtctccaacatctaggattgatacgccttactgtcacgaacctgtattttgagacatacatcaacgagtgatatacatatcagaagtgaaaatatntgctcttgacattgcacaatgacaatctacagctttagcctggaagctaagcaaaccatacacatagcacaaga

SEQ ID NO: 166615 - DNA, 288 bp, Glycine max
ccaccttcaactgagctcacgtactttcacggtgcccatatgcctgtttatatcagaccgggtccccatcaatctctccaaagcttctctacatttcatgtaattctacaaatctaacaacacaaaccatcacagccaggaaaacagggcatatgcagaaaactgtgtccaaaacaccaaccaatatcacaggtgttctgacttagagaccctagaaacacatcactcgttccagatcgttaaccggtggaacgactcgtaaattttactggaagtgtctagtacata

SEQ ID NO: 166616 - DNA, 262 bp, Glycine max
tacttcttcttattaactatcatccccaccccgttcctgtttctatacttaaaccagtcaccccctatattcgccatacctacaatgaaatcaaccttaatgcatgaccataatagactgagtttattctacaactgcgattaaaagaatgtgcgtggccatatgtgtagtgcgaagcattttctcctgctgatggtcgaggatgatgcagattctaaaaccattgacccacctactcctaacccaccccccttgatgacca

SEQ ID NO: 166617 - DNA, 390 bp, Glycine max
cagctccacttgatactgcaccatataaaaactttcttgttttccctctcgcggattgttccttgatccaagtgaaccaccgaatttttggttgtgttctttctctcctttcttctctttcaattctgctgcaatattgtgtgtatgacatttctggtatggtgaaatttctgctgctctcttgcttggtcttcatcacttccataacaaactggtatcaagagctctagttgcgatcaagggaattcaagattctcgtctgaatacaaagatcaagttgtaggagtctcgtatctggttctatcgctgcttcttggtgatcaagaacactcaagagattatgtcacacacacttccttattgagaaattcaatggaaagaacagcttca

SEQ ID NO: 166618 - DNA, 372 bp, Glycine max
cttaaactcagcttaactatctctgagcggacctacacaagacacactgttttttgggttgagtgctttctatcaacattaagacaaatggtgtttctcgtaagagggcactatctgaaattacatctcatgccatatgaattaatgcttgactcgatagtttcttcaaaacttattgcattcataattaagctctttttccagcttggtgattttcatcatcatttcacaatcagaccccaatgctccattgaagacacagaagtttctccattgccaaataagatccaacacaatgccaaatttcctctgccaataatgatgatacatggcacctgcatcgagattcatcattagccatccagatttatc

SEQ ID NO: 166619 - DNA, 227 bp, Glycine max
tcttttctaaaagaaatcgccatggccttaccgcctgaattcttttagtgtctctcttaccccttcttaaaagaacaaatgacataccgccctaacttattaaggtctcccttctccctttgccaaaaattcacaatcgacacaccctgagaatcttgtgagtctcctctttcccatatacataacactcctatggacttatcccgctgaaaatctttcgtttctcc

SEQ ID NO: 166620 - DNA, 446 bp, Glycine max
acgagatgcatgcttttcagcatcttcttcattacatgcgactttgtttttatccacccccccaatgcataatttctacttcaagaagaaatattgatacctaaggacgctgtatccttcgagaggtgggaagatattactaagtgccagttgtatagacatagaaatcattcccatggggaaggagagtaagtcaatgatcactgaaaatatctaaggttgatcatcagatacattcattcacactctgatcaagatcttacaggctaaggtctacatcactgacagctcaagcttcaagaagttagttcaagagctaactgtgcatggaagccccaccactatgtcttcaccacctttggaagccaacatggatgaaaagtttccccttattggaactgatgctcatagtgaccctcaaactagtcctgatgatagttaatctc

SEQ ID NO: 166621 - DNA, 483 bp, Glycine max
  unsure (1)..(483): unsure at all n locations
cactccacccatatctggctatgatattaacctatgtctagaaaagaatgtattccaacttgtcatcggggtttggaataattccctttccagaggtaacacaaccatagtgaatactctctttatgtcagtcatattgctcgaaggcaaaaaaaatatatcttatcanacatctctccttccttgattgttagtgattccaatttaataaattctttactttatatgaaaaacatcaatttttagttcattaattaacattgagcttcatacatatagtaaacataattttcaattttaaatatagcatatacgggtttaagcacaaacctttctttattttggctgccctacacactaataaatcacctaatgcgcaattgtcttggtaattaagaccagttttgaacattattatatctttacatagacatataattcattctaaattatagatttaattcgcagccaaaataattttaa

SEQ ID NO: 166622 - DNA, 208 bp, Glycine max
ctctagttacatcatccacggcggcgagtcctcagatcctcacataggcgcttcgatgagacgtgtgcgtccaaagataagatcgaaacaacgaagagtatgcaaggtactgatcgaagcgagagcgagaacggatgggtgatactagttcactcaacccgagcgacatccaattctccgttacgagtaataaagggggccactaatc

SEQ ID NO: 166623 - DNA, 307 bp, Glycine max
aatatttaatgattaatctaagtctattaatatcttaacgatacttcttaagatttctataaccttcgatcacacagacattcattatttccaacatgcttctatgacacctttgggatgctctctttaataaggatccttgagtgaaggagattactacactccagggttggaaaaattggcttaaaatactaaaagtgattgggctattgaagactagttatcataaagataattatatctttgtacaactttgctatatactctttgagcaagcctattatattaattcagtaatcttagaaac

SEQ ID NO: 166624 - DNA, 229 bp, Glycine max
cctctatcgtggtcaacgaataataagtaagatgactgactctttcctcactttctcacttcaagctctgcacgactatgaggatacccagtctatgtcgtactaagcggcgaaccaactgatgggtgcaagtatatcctcttcatattgcacaaattacactttaattcaccatccgcatatgcctcacctataaatgagctcacctactctcacatttcccttatac

SEQ ID NO: 166625 - DNA, 372 bp, Glycine max
  unsure (1)..(372): unsure at all n locations
aaccgcagcagcagcttaacccttttcttcaagtcttagattttttccaatccaanccctgtgtccggactctcagccacttatgatagccgccgatgatcccattactgctatccctaagctctctgttctttcttcacgccgcatccaatgccttgcgaactccttggagtactctcccattgtggtcacttgaaccttcggcggtgaaaggcgtgatgctttcgcttgatagcacttctctaatgggacattcttcgcatgaagatagaatcctgagtcttccttcttctagcgaggaaccattaacagacgccctccatgctaccaagagtggtgccaacaacatacttgcgccgttttcacatcccg

SEQ ID NO: 166626 - DNA, 314 bp, Glycine max
cccccggttgttttggtttacccagggtttgctacatgtccattttcatgatggtaacatgagtctttataatttgcatcaattaacttgcttagaagctcatttaattcctctatgcaatttttgctctggtctgaccataatggttgagtagtccttgacgtatatgaatttgtcggccgactaaccataaatctttaaaaattaggggaaaacctcaatctaaagcctgtccctttgagtttgataaaggtgttgctttaactgcaataatccttgtggttaaattattttgttttgcaacattttttaag

SEQ ID NO: 166627 - DNA, 364 bp, Glycine max
aagacttgagggctccttcattctttcaattaaatttttattaataagcactttccgtacttttgatgtttcctaatcttaataaattcttaatatatattaaatttcgctacctcggcgctatggttatagcaattgttcttttccttatgaaggtacagtctttcagataaatgctattgatctgaaaatgcccacatgaaaggaaaatacgaaaaaaagaacaagcattactaaccaccagtgaatttctccttattctcctcatagacagccattgtattgatattatggctaaagagaggagaagcatagaccaccagagactcttgggacatgctatcacaatgaccaacatttaaca

SEQ ID NO: 166628 - DNA, 398 bp, Glycine max
tctaaacttatacaagaatgaagctctgattccacttgttggacaagtggcctcagatatctcaagaagaacgggggttgaattaagatatcacacacttttcctaattataagatctattttgattctaacccagattccaagatttctttcaaaatgaactcctaaataattatgcacattaaacttattgaatagaagcaataagcaatatacaacaaaagactttaagggaagaaagaatgcaaactaagatttatactagttcggcgccatccctttgccctaatctatcgcaatatgatcctctggaagactctcttcgcggaaatccctttactactacataacttaccatgtcaactcttcctggcagtcaaattgtcgtgcacatatat

SEQ ID NO: 166629 - DNA, 413 bp, Glycine max
  unsure (1)..(413): unsure at all n locations
tatgagaaggttcattcacctctacgatgcctttttttttttcatgagatgattcattttcctcttccatgccaattgtggtgaattttgtttaacttgtgacccgttttaatcctaaatttattactaccacaaattattatatgtaagtttaaatttactaaaatattatttgggaccaaaattttacatattttaattttattaggacaaaaaaaaattctataggaacaaaanttaatttttttctattttataaagaataaaacatattttaacctattatntataatacctatattgggtatcccatgaatagtttcctatttnttatggcttagaggtcaacatgagagagggtgtagtattgtattgttttggtcaaagcaatgcttcttttaatataanttttt

SEQ ID NO: 166630 - DNA, 457 bp, Glycine max
  unsure (1)..(457): unsure at all n locations
ngagatgtagttntgatcatcttaaacattntcatttcacattgtctgctacatggccaaatacatctttgatatggtatcagagctcttccaatgaagagctctgctgcgcactcaccttatctttcatccttctatcaactctaaatcattcgtcatgaatgaagccacactcagaaacatggagagctacctgtacctgcatctgagtgagaacccaaccattgccctcgtctctctagttctggatgcaactaattaccattcaaggagcaggtccatgatcattgcgttaagcgccaagaataaagtggaatttgtagatggaagcgcacttgaaccattgaagactgatagaacgtatgaagtgtggcgtcgatgtaacaacatggtagtttcttggatggacactcagtagcaacctttatcaggcaagcatattatgatggacaagctg

SEQ ID NO: 166631 - DNA, 443 bp, Glycine max
cccatcacatgtggtactatgtggcggtcgggcgatggtgcacaacaagtttttccacatccacaatgcgcgcataaacccaccatcccctgttgcccacctccaactgagctcacgtactcccacgtagcccatatcctcgtttctctcaacaccgggtccccatcaatcctcccaagcttccacaacatccaagcaaaacaacattcacacagcacaagctatcacagccaagcaaaacagagcaaaggcagaaaactctgccaaaacaccaaccaaaaatcacagcttttcccactcaaagaccccagtaacaattccttcgatccaattctgtaaccgttggatcgactccaaaattttactggaagtctatagtgcataaacctacattttgaccgtttggatctactatcaaacattcaaaaactcttctacattac

SEQ ID NO: 166632 - DNA, 292 bp, Glycine max
tgaaaataacataccagtacttggtccacactatcaagtcaattccgatgaacacacagagttaattgtagaagagaaacatgcaaagcttttgcttccatgatacgcatgttgtcaactagtgcttctatcacttgcaaccaaacgcaggttatatggtcttgaattacaacttcataatccatacaataaggtataactagtatttagtacgcacaaagaagggataatgggatatcactcctttctttctctgtacttttcttcccatcaaatcaaatgactataatca

SEQ ID NO: 166633 - DNA, 408 bp, Glycine max
  unsure (1)..(408): unsure at all n locations
cttacgcnctagagatattgttctagtataacaatccttttgtttgtttatttaattttcccatctatattattattagtaggaggatcattattattaggagtaacaaaatataaatctatattgcctttaaaagatgaataaattgtcgtctacaatctaaggggagacttatttgtattataattaataaagtgcaagatttttaagattctcattatcccaaatatggatcttataaaagatttgacaataattactttgaagtgtcaaaagttacattatgtacatgaagtccaaatattttactacttgaaggctcaaatatatttgatgacattgaattgaacttgtattacacatgtgacacacactattacaaatagttggtttaacatcggcttatta

SEQ ID NO: 166634 - DNA, 354 bp, Glycine max
ctaacctgcgcgaaattccttgacggaaaactgtttggaaacgttttcgaagcgcctcggcttatatgttcgtcaccgaaacgagtattcaagaaaattctaaagagaaagaagtgccttaggggctgaaccctttttctttccacttgctcccctatttatagcaaaatatgggagatggttgtcgcccagctcgcccaggcgagacaagttgtcttctccataacaacagccttctgaggaatctttggcccagtgggcctggttgttgtttcacccccttctaactaataaccccgtgcttttttgtgagtcttttctaaagccagaactttgaattcgtacgatcttgtt

SEQ ID NO: 166635 - DNA, 415 bp, Glycine max
  unsure (1)..(415): unsure at all n locations
aactcaacttgatttcaccccgcgcccatatctaacttatttttatattattagtactttgattntcagccttgtattttggctatattattatgggatttgaacaatttactatttccttatttgcatggtatgggtgaacaagtatgttatttgactatgtggatttcataattagtctatttatgattgttgcttcatgggtcttacttcatgatttgattgatgggttttcatgaatgcagtatgaatgtntagttatatttgcatactcaaatttactatgcactttggctttttgttgatgcccaagggggagagaaatgagattaaaatcaagaacttacatgagggatcaaattaattttaagaatgcacaaattccaaaacaaatggggagaacttatgtgagtga

SEQ ID NO: 166636 - DNA, 255 bp, Glycine max
accgcgatctctaagcacctgagctgcagctgcccccattctccagtgagcaggggctttctcaaacacaccttggagaggccaggggctgtgctttgcaccccatttactaatagacccccttgcctttattggagattctttttctaagttctgaactaccgatttgcacgaacttgttttttccgaatgtaccggaccttgcgattacatatcatcccttttttacttacggaaggtacggaccttataatt

SEQ ID NO: 166637 - DNA, 414 bp, Glycine max
  unsure (1)..(414): unsure at all n locations
gacctataaatctcagcttatgagatgaacaagttgttgtagtcgtntgattatgacaaagatgatgaacaatagtccaatgaatgatttctagattgagtcaacaagttcaagatcacgattaatttcaagtttcatgagaagaaatcaagaaaattcaagattcaagggaagtttgatttcaagattccagagaagatgaattcataattcaagagaagaaatcaagaagacttctcaagggaagtgttgaaaagatttttcaaaaaacaaacatatcataggtttgtttttcaaaagagtatttctcaaaattttctaagttggcagaggttctactctctgtgtatcgattaccaattacctgttatcgattaccagtggcatagtttgttttcaaagctcttaactaaa

SEQ ID NO: 166638 - DNA, 321 bp, Glycine max
gctatctatggctagccttgtaggacactgatttgttggtctctctaaacgcaagggccaagcttagagagacaaccactattgaaccttcataactttcgcatgtaacttgaaattgaagcgtaatttatattaaactcaataagaaggcttctactgagcacaaatgaagactgaagcgacagacgtttaccatcctaccaaaaaataaccataaattgggagatttattcacattttggaaactcctctatacaaaaaccagtcgtaaacgacgactaacaaactaccccagatatatagtcttgcgttgcctcaatc

SEQ ID NO: 166639 - DNA, 362 bp, Glycine max
  unsure (1)..(362): unsure at all n locations
gcttcaactcctaaacaatccaaaatttttggcttctggtgttatgtcaatacatcaaaatcttaatgtttacttgtgtcatcatgtaatgcttcctctactatngattccataaaacagaaaaaaaaacactaaaaaatgaaacctaatatcatcaacaacataaaccaaaatttttggctgctggttttgtgcccattccccacatttgatcttcgatgatccaatctacaaatctcccccccgccccccataaaaatgaataaaagaaagaaaataaaagaaacttctgaaaccagttcagaaagaaaaaagcgctaaatttaaaatccaattgaaaaattaaatatgaagaanaatga

SEQ ID NO: 166640 - DNA, 386 bp, Glycine max
  unsure (1)..(386): unsure at all n locations
gagtgtcttcattntcctttgcagatgcctctttgctagcataataaatatatacaggtatgttcatccttttctcttagtagcttaaaatttatttggcataatnttatcatctgctttaagtcagttttcacaattgaacagaagacctattgtaaattaattaagattcaggattttcttaattagtctaatatattagaacgaatgtttgcatttagtaaattgtaggtttggtttcattctaaaaattatttttattctatcaacttttaaataaaagttcttacatcgacaaggagatcaaaccacgtccatgtgggatataagtaatccctaccaaatggacctaacattgttgcctcactacctctacctcattaatt

SEQ ID NO: 166641 - DNA, 373 bp, Glycine max
  unsure (1)..(373): unsure at all n locations
tatcttggaacaactcttactattccgaagagaagttcatgttcatatccatcaatatctgaatagagtattatgaactaatggacgtcaatatggcccccgctgtagccttggatcgagaaaccaagaaaggccgtaaggaagaacacgtgccagcaaaggtatgaggggctttatagggcagcaatagtaagctcaagctccgaagaggtgaaaggaatcatcacgggtcaaaggcatgatcatgaaggacgagctacaggcttaccttatgtcagaaagaaatttgtccancagctaagcgagactgatgggaatatgtgggccgtcctcgatgagtgctaagagaaataaatctatcggcactcacgag

SEQ ID NO: 166642 - DNA, 459 bp, Glycine max
ttcataaatgaaatcaggtgtatccatctccctaagagtcctctcacgagggggagggtgagccatgttctcagtatgaaaattagtatgtgaatgctcaaaatcagaatattcagaatcaccaacaacataatactcaaaatgcttaaaatgcacaaaatgatcaggatgcacactatgcctaactaatcaatgaaaggttctatctatttcaggatcaaagggttgtaaatcacctggattgcccctagtcatgcactatatgcaacaaataatgtgttctcaaacaagcacctaacaatgtggtaaaactacaactatggtcaaacgatatccacaataagctgaagattagtgagcaacaccctataatcatgaaaagatagcacaatagattcaacaaaaattaatagtctaactatgaaaactacctatacccaatttaaaagatatagacaa

SEQ ID NO: 166643 - DNA, 406 bp, Glycine max
tcttcaggggtattccttctcatctctttgaagggcttatattcatgatgaagacagctgtagacactgtctctccccacaagtacttgtgcagactcttgcctttcaacatgctccttaccatattcattatggttctgtctattctttctgcagctacattattgtgacgtgtgtatggaggagtcacttcatgaattatgccttcttgatcacaaaattcttgaaattctgtcaaaacatattcaccaccaccatttgttctcaatatcttgatcaatgagccactttgcctttctgtcatattttataacctctcaaaaacatcaaagacataactcttcctttctattatggtaacgcatacttttctattcaattcattaataaaggatatgaaagatct

SEQ ID NO: 166644 - DNA, 289 bp, Glycine max
  unsure (1)..(289): unsure at all n locations
agcttaaccttgatttgaattcaatgattggtagaaatgattgacatgacccgtggatagttngaaaattgcatttttttagacataattgaggttttggggatgacttgtggaccatggttgaccttatagtgaactgatttatgaaagttgacattttgctgaatctaaattcccatataaccgagagtgaacttaacgagtagagctcgtaacttaggcaagcaaagctctagagggcggatgatactcgtgcaaatcctcacttaagtaaggactttttgcttaa

SEQ ID NO: 166645 - DNA, 291 bp, Glycine max
tcccaacgatgtgagcgtagctattatatgggtgtgtgtaactcagctctaccttctcaggaagttttctcaaagaagcttctcaaggaagatctctcaagaaagcttctcaaggaagctacatagtctataaattaaaacatgtgtcacactcgttgtcactttgatgaatgagatgtcttgtgagacacaactcaaagttcaacttctctccctcttttattccttcaatttcgggctcccccctctctctttctcttcctctttcttttcctcattgaacatcctctc

SEQ ID NO: 166646 - DNA, 409 bp, Glycine max
agcatctgagctgcagcttctaatatattatgcgcccgaatcagacttccgtttctaaagttatggccatatgaatttctcgagagccttcgttgctcaatttcgagccgctcgatataatctgcgcgttaatcggacttccgggtgacaaggtatgaccatttgaatttcttcggggccttcggttttcaatttcaagcttctcgatatattatgcgcctgaatcagacttccgttcaaaagttatgaccatattgatttctcgagagccttcgttgttcaatttcagcgtctgatatagtatgcgccctgatcggacttccgtgtgataagtatgaccatttgaatttgtcgagagccttcgatttcaatttagagcctttcgattattataacctgatccgacttc

SEQ ID NO: 166647 - DNA, 428 bp, Glycine max
  unsure (1)..(428): unsure at all n locations
ctcagcttctcgatatattatgcgcctgatcggacttccgngtatctgttatgaccatttgaatttctcgacagcatacgttgttcaatttcgagcgtctcgatatattatgcgcctgaatcggacgtccgtgtgacaagttatgaccatttgagtttctcgagagctttcggtggtcaatttccaacttctcgatatattatgcgcctgaataggacttccgtgtgacaagttatgaccattggaatttctcgagagcttccgatgttctatttcgagcgtctcgatatattatgcacctgaatcggactttcgtgtgacatggtatgaccattggagattctcgagagcttctgttgtcaatttcgagcttctcatatattatgtggctgatcggacttcgtttgaaagtatgacaattgaatttt

SEQ ID NO: 166648 - DNA, 186 bp, Glycine max
tttttgtgatatacctgatgccttttataattcttcttttgacagggtttcactgcttgggcttccgatagtggccgatcggatggtgatatcgttcgaacgaaattagtgtctttatctttacttcccttttatttccaataaaagataagtaaagaggggcaactgtcatacgctaatttcgtc

SEQ ID NO: 166649 - DNA, 422 bp, Glycine max
  unsure (1)..(422): unsure at all n locations
tacgtgacactataattctcagcttctccncaatttttataatagcgggagaagtgaattataaaagggttcagccccttatgcacttctctctctttcgagattgcttagaaaaattgtttccgtgaagaaaatccaagccgaggcgcttccgtaacgtttccgtaacgtttccgtgagtgatttancgaaggtgtttccttgctacctctatgcaaagtatcaaacacggggcagcccaaattcaaataaaaactctcacaagcaagtcctaattttcatgcttttctaattctaaaaccaaattttggattcctagccatgactatgtcttcttgcattgaagctaaaaagattgggttcctaagcttaaaattgcatctgggcacctattttgactctcctatgctttctctgcatat

SEQ ID NO: 166650 - DNA, 476 bp, Glycine max
  unsure (1)..(476): unsure at all n locations
gcttctatcctggccactctgggtggagctcttcttcaagcttatccctttttttggcgcccnctctcacctcttctcctttggtttctactgcaccctcattgtggaaaatcacccttttgagtgaccctcatttgaagcttacaagatcccatccttctatagaagccctcagagagcaaagctttccatcaacctatttgcaataagttcttcctctttggtngtagatgacctcaccctccttcactatcgaatatctattacttctaaaaccgcgtaaatttccaattatttaatgaaaactctattaattcgcttatgaaaaatgagggtaaatttttgccatatacgttcaccaaacaacgcacatatacttaaatgaatacatatagatagatatattaactcagtacacattattcacatgacggagagtagattagtcatacatattaataaatctgtgattacat

SEQ ID NO: 166651 - DNA, 408 bp, Glycine max
  unsure (1)..(408): unsure at all n locations
accttttcccctttggaacatttatagccaaagaactttggtatcaacacagatataacaaaggagtagaaagatataaagatcagagtataaagcataaccatccaaactcacaaacaagaaataatcaatccagaatccaaataactcaaaatgtctacaaccacacaatgtctaagcagaaaaagtctgaaatcttattaccacannataaatttgcgaagtacttaacgtaataattgaaactctaagaaacttaaacagccaaaatacacggcttattaaagacttataattagaaactaaaatctaagaagacggaggtggtggtggaagatcgatactctgacgaatgtatccgacatcctcttcaagctgtgtgaagtgaatgtcataccgcatagcgtg

SEQ ID NO: 166652 - DNA, 375 bp, Glycine max
gaccgcgacttaagcatctgagctgcaactgctacccagaagctctaatatctctctttttttgggcggcccattcctggatgccttgatttctcaaggccacttggaacccatatttaccaactacaaattctaagaaaactatattatttacacaagaggtacactcttctatattggcctagaaagtgtttttcataagaactgaaagaacttgccctagatgtcctaagtgatcatctaggctcctattgtacactaaaatatcatcaaaataaacaactaccaatctacctatgaaaccccttaagacatgatgcataagccttataaaggtgcttggtgcattagtgagcccaaaatgttggatcgagt

SEQ ID NO: 166653 - DNA, 442 bp, Glycine max
  unsure (1)..(442): unsure at all n locations
agctttagtagtgattttaaactccaacagtattctttttgttntaaaaatatgagagatgccttcttccgtaactcaatacttaatatgcacaaacatgtgggaaatttctacttaccctcatctgtcatatcaatgaaatctaccacaatgatgccttcaatattccgtagtcgcaactcccttgaatctgtacacattgtttctattaaaaaattataccgctttacatgaattaatgttgcaaaagaaaacaaaggcacaaaattattttttttacttaataaaagaaaatcagaaaaatgaaatagaatcaataatgaaatatataactccatgaattatcttacaagatngtcagggttaatatagaatttctctaattgtatgtaatgccacangtataaatatccattctatccatttatctacttaagttaaa

SEQ ID NO: 166654 - DNA, 429 bp, Glycine max
  unsure (1)..(429): unsure at all n locations
ntnntcttgatatatagctagcaatctatactntgtatatatngtagaatgcacaatgcaaaccaagtaggagggggcaaccttataaagaggtattctctgttgtaatgtcattctaataagttggttgaagaaatacttaagacataataagtacaataaaataataatgtgaactgtctacacccaatagacaaaaattaaagatggccagaaagttctattatttttcttgtgtatcacataaagtagccagttatccatcaactaagatatcttttgaagctaagaatcatagtttgagtttaagggtgatttatttatttattttcttctttgcgatggactaggtggtcacatcaagatactgggtttggtctaaccatattgngtgaagtataacgattctcagcttacatatgccaattg

SEQ ID NO: 166655 - DNA, 281 bp, Glycine max
  unsure (1)..(281): unsure at all n locations
taaagacctaaaaccaacacatacgctttgtcacctttttcaaaaaagaaagagatcattaatggtccaatgccttaatattttctcttctttcaaaagaatcgaaagatcgtttaatggtccaacgccttaaaatgacctttcattcaatcaatatatatcttgcaaaaaaggataaaaacaatttaaccaacgtttagttctcaaagaactacgtaggtctgatttccttatcacaattgaggaatacgtangagcaatggaaacacccttgtcgacca

SEQ ID NO: 166656 - DNA, 409 bp, Glycine max
cggaaggatgcttcaatggaggtaaagtaaagagggggttatatatagaggggggagcactatattgcacgaattaaagaaggagagaattgtgacttttgaatatgtctcacaagactcttattccttcaaagtacaacatgtgttacacatacttttatttatatgctacgtatcttccttgataagctctcttaagaaaacttcctcgagaaccttctctgagaaaactctcttgagaagctagagcttatctacacacacccctctcataactaagctcacctgcttgagaagcttccttaagaatattcataaagaagctatagcttaaccacacttacctctctaatagctaatctcacctccttgagatgagaagctagagcttagcttcacaaccccctat

SEQ ID NO: 166657 - DNA, 381 bp, Glycine max
  unsure (1)..(381): unsure at all n locations
agcacacaacattttagtcgagggttttgaaggcattgtttatcacataactactaataactatctcgcgtttgtggaaaaaaagaatccatntgaggggagagggcacaacaaagctctacatgtgtctgtcagatgcatggaccatgtcgtcgctaaggcactcatcgataatggctcaagtttaaatgtgatgccagagaccaccttggagaaacttccttttaatgcgtcacgtctaaaacccaagtcgatggtagtatgagctatctacggtagtccgcgggaggtgatgggggaaattgacatccccattcagataggcccccacactcgcaatgtggttttccaagtgatggacataaatcccgcctacagctg

SEQ ID NO: 166658 - DNA, 350 bp, Glycine max
tcatgtccttcacgtaggaatatatattatgacgaatttcgtccctcgaagcagaatatgataatttatacacataaacacgcacactccatcaactgagccaaagaacaaaactaagagagtctaaactaactcaccacactgtctactgaaacacccaatatctcagtatttagtgcctcgaactctgcatgccggtcactgaaagcagtgatttctgtggacaagtagcagatgttattattacggagttaaggatagaacgtttggtgaatccttcttcagagaaataacagtttcttttatttttttttcagaaactttcttattaaaccaacaaataaactatt

SEQ ID NO: 166659 - DNA, 419 bp, Glycine max
  unsure (1)..(419): unsure at all n locations
ataacttaatgccattaacctagggaattaaaaaaaacttaatggctgagtgtaactgaaattgtggcaaccaaaagtcacccccaacagccaacaagtcaaccaccatttggtctcccaaaaggctgatgcctaagttgccaattgggcccttattacaacttgaactaaacctaactaaagcccttttagttgattaacccaaaacatatttttggtcagccaactttacaaggattgggccattatttatacaaactaaacactctaaaattgagacaaggtggtgtcatttagtcctcctccatttgggccatgatacaactcacaaccttggactttttctcttganacttgngcttgtattcaaatagtatggacagcacttgttgaagagctatcttggctttccttgctct

SEQ ID NO: 166660 - DNA, 368 bp, Glycine max
tacatcataattctagagaaaagattctagccatattttgagattgagacaaatgctccagattaagctactcttcccaagaactctcatgagtgtgaaaaataactataagatcttcataataatttgaaggagccgtatgaacgtcatgattatcaaaaagaaaaaagatttgatctatggatagaatgtgcacactatcaccaagatcattaagatctcaaaatgcgtcaacataatctttgggtggaatgggaagaacacaaaagatctgtgaaattcttgaacgaaaagcttttgaagaatcaaaaagttatggggcaacctcaagatgttgtcaaactttctgaagacattaaaaccttgaa

SEQ ID NO: 166661 - DNA, 407 bp, Glycine max
ctgcagcacaatcatatatatttaatcgatatatttcacgagtttgatgattaacgaccaaagaagcacaaacacttcatgattgtatacacaaatgtttttttgtttattaacaaatgttaattgttagtgtttcttgagacatgtgagatatgtatctatgttggacactctactgactacatagtacaaacactttgaatactcttatgtcttaaccatattttgcaactatagggatcaaaaggccctaaattctttcttttcatttaagatttgtcttaagttaattttatactttgttataaccaattaaccatagaacttgttgtatactcatctccatgttgtgtcatatctatgccacatttctaggaatcaattagcatacttattctttcactaag

SEQ ID NO: 166662 - DNA, 419 bp, Glycine max
  unsure (1)..(419): unsure at all n locations
agccgcactgtttacctatacaactttgtaaaactcttattaatcatcacccttatcttttaaccttttggntaaagtctttttcaaaatgatattttcttttaacttatccaattgaacaagaatattatatgaaagaaaggatagatcccgagaagatgttctccaatttttatactggttcactctgtctctagagaagctacttctagtatttagtttcatcaaaacttgattattatgagaaagaaagataagatcaagagaagatgtgctcctaattttatactggttcactctctatcattagagaagctactccagctatctaattcaatctgaacaagaatttcactctgcanatagaattcttacaagcaattagagtcaatctcagtttctcccaagaaaaagagact

SEQ ID NO: 166663 - DNA, 437 bp, Glycine max
tttgcacgtttaggaagttctagagagagaaaggtccttgttccaaagagttctgttagattctgttgtgtgaagatctgcagagatgtgagtgcgaaccgaacgccattctgagaacttgagatgactctgtgagtgattgtgagatcctagcagtgaaggagacatcttgatgagaatcctgaaacttgccaaatacaggctaaaggcccaagtggagaagaacaatggcccatatggagaaggacaaagcccccaagtggagaaggatgaatgcccttaggcagagacattatcaagactgttaattgttgttgaaggcccagattaatttgaaggcccataataaatatgttctaattttttatttataatttttttggcccaaactggtttagaggcccatgtctattttatctttttgttcgatacactat

SEQ ID NO: 166664 - DNA, 352 bp, Glycine max
acatgagactgatgaagccaactaaacaagaatccttatcatggatctagctttttataccacctattcagaagcaacttgacatttaagtgcatcccaaccttcacaccgaattgtatcatagtagttctggaatggcaacctggtaacaaactctggaaagaaaaaaggtgacatttgaacttatattcttcatccaaagatgcaaaaattggagctggataaactaaattttaccaagctttggaaggcaggttttctagctattgaccttttctcctattcattttgggataccttgcccgaagaagaagataagtatgacatatatggataagggaactagtgatca

SEQ ID NO: 166665 - DNA, 309 bp, Glycine max
gcctctcgacatattatgcgcccgaatcggacattcgtgtgaaaatgtatgaccatttgaatttctcgagagtctccgatgttgaatatcgagcggatcgatatattataagccttaatcggacctccgtgcgaaaagttatgaccatttgaatttctcgagagcttccgttgtgtattttcgagcgtctctatatgtgatgcgcctcaatcggaccttcgcgtgaaaagttatgaccattggaatttctcaagagcttccgttgttcaatttcgagcgtttcgatatattatgcgcctgaatcggaca

SEQ ID NO: 166666 - DNA, 334 bp, Glycine max
catgagccatgaatttctgatatttttagtgaaggggggtggggtatatattgagtgtctttctgttataagtcaacacctttggtgtgctaacaaggattagtggactactattttgtttgcgtgcagaaaaacttaagattcaccttagacttggagactacaaacctattataatgcgttcaaagccatttaggagtctcctaattggaaacacttagtgatggtctcaaatgtatactacacagaaagttatcaagatgtcttgttgcagtgctattcttgtgatgtgaatttattagagtactgccatgtttctcatgctaaaagttgc

SEQ ID NO: 166667 - DNA, 400 bp, Glycine max
  unsure (1)..(400): unsure at all n locations
ctataaaactcagctgcgtttgtgcatgccttattgttacaacattgttgactgatatcgntgtcactgccttaaaaataacagcacgtctgtgtctttaattcctatgaatgaaactattgtttccgttcatataaaagtctagagaaacccaggaaggttcgtcaaaatggaataatgacaaagaaaaagaatagagacctaccgacgatgttgaagttgaaggtgaaggtgggcatataagaagaagtgacttagggctttggagcggttatggcaaggcacgtttagagaggtgactaataatagaaaatcgctgaagacaagaatcagatctttgaatactttgagttaaacaatcttcagtttacatatgggagtataaataaaaattatttat

SEQ ID NO: 166668 - DNA, 354 bp, Glycine max
  unsure (1)..(354): unsure at all n locations
gctttagtgtagcttatgaaaaatgtcatttcttctcctttctttcttccaaatccatttctaacgtgccaagcactatctccatcacccacaggcgccattagccaccacacaccatcggtgttctccattgagaccccacaccgagaagaacccttcaacccaagcggaatcttccaactagacttgcggtttcgggagagaacgaaaccctaatctgacctttcattttctttcgaggtaaccatgggtctatgctnttatcttgtagatacatcctgtctttgcatcatttttggacttggaaccgccattgcatgtcttatgcttgctttgaaaaccctagagaaagag

SEQ ID NO: 166669 - DNA, 414 bp, Glycine max
  unsure (1)..(414): unsure at all n locations
ntncaatgtattctatgtcttcgtggtggtccccattttgttatacgtgcttcttattttcattctatttactttgcgtacccacttttgacgtgctttaatcatttgcttaagtcattgtctcatctaatcaaaaaataaaataaatttccaccaatcatttaaattgttaaatccgctagtttctattaaaatgaaatccgaccgttcggtcatgccgtaactacgttggaagccaaaaaaaaaaagagggtgaaatagtaatataataataaaaaatatctcttagtaaaataaatcataaagaatcaatcagacattttcctttgggatttctctgtcttaatcgaatcgactaataaccaaaagtgaaactaatggctaaatcgattcataaaccaaacttgttgacgt

SEQ ID NO: 166670 - DNA, 358 bp, Glycine max
  unsure (1)..(358): unsure at all n locations
ctcgctaagtgccaagtattcatacgctaagcgagcccctgctcacgctaagcgcttaaaccccttattagtggctggatggtagcgctaagcccaattatctctctagaatctgaatttctcgaattacgcttagcaaggtgatgcgctaaacacaatttcctctctattttggaaatctttggaatagcactaagcgcaagccatcactgcatggaggagcatgtntatgcgctaagccccacctttagcagctaagcgcagagcgcaggtcctcgcgctaagcctaaaaacctctctggaatttgtaaattgtgaattgggcttatcatgagaggtcacgctaagtgcttgagcc

SEQ ID NO: 166671 - DNA, 429 bp, Glycine max
  unsure (1)..(429): unsure at all n locations
tagcttttatcattaaggactanctagaggtccgatctcttatcttcatcttatgtcataaaggcagaaaagcacaaattgaatcatatagacttttattggcttgtgatgaggctgggctacacaaatattggtttttctaagattcaaaggcttaaattctaagagagcacacatcctaaacttaaccaggatgtcacaatactcccaccctttaaggaattatgtccgcgaaattaactactctatgaacaaacatgggtacaattctctcaccctatcctctaactcccaggttgaatcaccctcgtcgggtccccactgcactttcaccaacgcaatctacttccctctcaacgactcattcttcgatcagtaatcttctgatgttgagctctataggtgagggtatccttcaactgtacctcg

SEQ ID NO: 166672 - DNA, 326 bp, Glycine max
caagtgtggtaaaagtagcgtaaaagaacacttaaaccaatagcttaagagagaagagaaacactacgtttatgttgggttcactcatacacagccacattcaattctccttttgagaaattacaaagggttccactactcataacttgattacaaacaagtattttatcctgtcactcctggatatacaagtattctcttggaccactacacgcacacccttagacttcccatgaatctaagaacacccaagtattgttaacactaagcactattggatatcacaaatagatgtttgaataaatacaatgattcaataacactca

SEQ ID NO: 166673 - DNA, 396 bp, Glycine max
  unsure (1)..(396): unsure at all n locations
ctgnnntctaacactcacttagctcaacagctgatttgtctttgggagttccaaaagcttctagacattgttcttctgaaactggtccacctctacttgcattgctttgacccaatgttcatcaaacatagcatcatctatgtgttttggctcaatctttgatagtagcactgtatgcttgagagagttccttgttttcactttgtccttaagatcaccaatgatttgaggctttggatgatgttttgttagcaagggtcctattggttctctgactattttaggttgatcatccactggtctgttggacgcaagctcatcttggctagacgcagaagaacacttgacgatattttctattctcatctctggagaagaatatccagctctaacatt

SEQ ID NO: 166674 - DNA, 325 bp, Glycine max
aagtaacatgtatagccttatggtacaactgtatatgagaacaaagttgatgactgaagaatatacatgtcaatagcactaaagcctatgcctactcagatcaaatacattttaaagaaaatgtctttaaactcaaagcagtcatctctaacacccaacttaatgtggaaactacacaaaagcataagttaataggcgtcttaacataacaaagatacccaaggaagtgatccacgcctgtagtcatgtcgggtatccaccttcctgaagtgcattcatcctcaagatggagtgttggctcctcgcccaccatctgatcctaaat

SEQ ID NO: 166675 - DNA, 424 bp, Glycine max
  unsure (1)..(424): unsure at all n locations
tattggattatggggcacccgtcatatgtgtgactatgtgacggtcgggcgatggcaccaatcaactatcccatttgcacaagccagacataagcacaccattcccaattgcccaccttttaatttagctcacgtgcatgtacgtagccttctgctcgttcctctcagaccgagtgcccatcaaccccgccaaactttcacaacatccaaacaattcaatttcatttgtcatgaaactgccttaaacaaagaaaaacagagtggaggcagaaatctttgcacaagattcattcaaattccacagagtttttcctaccctcatacctcagcanaatcctctttggttccgattcggttaccattggatcggcttgaaaataactcgggggttcaatacatatatctaaattttgaccgtgggatc

SEQ ID NO: 166676 - DNA, 81 bp, Glycine max
ctttaatggacatgataaaagtatgagaagtaataaaaacttcctcaatcttgtggattgaacattaagacggtgatatat

SEQ ID NO: 166677 - DNA, 450 bp, Glycine max
  unsure (1)..(450): unsure at all n locations
tggagacgatgcttcaatggaggaaaagaaagagggagagttagagagaggggggagcacaaaattgaaggaagaaaaaggtagagaagttgaactttgagttgtgtctcataagactttcattcatcanagttacaacaagtgttacacatgcttctatttataaacaaggtagcttccttgagaagcttccttaagaaaacttccttgagaagcttctttgagaaaacttccttgagatgctagagcttagctacacacacccatctaaaaactaagctcacctccttgagaagcttccttgagaagctagagcttagctacacacccatataaaaactaagctcacctccttgacaaaatacatgaaaatacaaaataaaaagtccctactacaaaaactactcaaaatgccctgaaatacaacgctaaaaccctatactactagaa

SEQ ID NO: 166678 - DNA, 331 bp, Glycine max
gtacatatgttctcaacacgagaacgtttgaggtatctaataagcatgtctgcaagttggtcaccggagttgacaaagtcaatgatgatttctcctgagagcaccttttctctcacaaagtgacagtcaatttctatttggttagtctgctcatggaagatcggatttgatgcaacgtggagagcaacttgattgtcgcatagtatcttgagtgtctccaaattttagttggtggagaaattgcctagccatgtaaccttggatgcaatagctgccatagcatgacacttagcttcaacactggatatagcaattgtttctgcttcttact

SEQ ID NO: 166679 - DNA, 446 bp, Glycine max
  unsure (1)..(446): unsure at all n locations
tgcctcanagaggtccaggaaggacaaggcggccgaaggaactagttccgctccggagtacgacagtcaccgctttatgagcgctgtacaccagcagcgcttcgaagccatcaagggatggtcgtttctccgggagcgacgcgtccagctcatggacgacgagtatactgattttcaggaggaaatatggcgccggcggtgggcaccactggttactcctatggccaagtttgatccagaaatagtccttgaattttatgccaatgcttggccaacagaggagggcgtgcgtgatatgagatcctgngttaggggtcagtggatcccgttcgatgccgacgctatcatccagctcctgggatatccgatggtgttggaagagggccaggaatgcgagtatggccagaggaggaaccggtctgatgggttcgatgaggaggccatcg

SEQ ID NO: 166680 - DNA, 136 bp, Glycine max
atacgcctgaatcaacatccgtgtgaaaagttatgaccatttgaatgtttcgaaagcttcctttgttcaatggcgagcatatagacataatgagagcccgaatctgaccaccgtgtgaaaagttatgaccatttga

SEQ ID NO: 166681 - DNA, 415 bp, Glycine max
tagcccaagaggcgatggaccttttcaggtcttggagaggatcaataataatgcctataggttggacctcccaagagagtatggagtcagcaccacttttaatatttctgatttaattccttttgcaggtggagctgatatagaggaggaggaaccaataaatttgaggtcaaatcctcttcaagggggaggggatgatgcaatcctccctaggaaaggaccagttaccagagccatgagcaagaggctccaagaggattgggctagagttgattaagaaggccttatggttctcatgaaccttagggtagatttttgagcccatgggccaaggttgggtccactcttctttgtaaatagtagaataggttgttttcttcttttgggccttgtattctggccattctagtagtat

SEQ ID NO: 166682 - DNA, 205 bp, Glycine max
  unsure (1)..(205): unsure at all n locations
ctcacaaatgccaagttacctttcaaataatggacattaaccccccctacagctgtctgttggggtgtccgtggatccactcagtgggagttgttccctctacacanccaccaaaagtgaaattcgtagtggaagggcatctggtcatcgtatcangcgaggaagacatcttggtgagctgcccatcctctatgccttatgtgga

SEQ ID NO: 166683 - DNA, 453 bp, Glycine max
  unsure (1)..(453): unsure at all n locations
ntaganacttgttntaaagatgtaccctcttctggttgcttcctcttctaagagggaattggatccttgtatgactgactctntgtccttgccatctacaaattacaacataagaaagatatgcaatttctatctcgttagcaaagaaggagcattgaaaaaaaaatctagaggagtggaagaatgacatattctgcatcaaatgggtaggtctcaccatggcaaaattgagccctgaaactcattgaagcttctggaagtgcatttgccatggagatttggacccatgtagttgagatagcctctggaggtcatttcactttggcaaatgataacctcattgtagctgaatagatcttgaaacaaaagaatatctttggaagtcctttcgccttggcaagatgaatttttgccatgatgaanagttacccgtagagaattcttggtctctat

SEQ ID NO: 166684 - DNA, 448 bp, Glycine max
  unsure (1)..(448): unsure at all n locations
agcttggaacatataaactgaatcctagttcctcttaaggacttagtcaaaatgtctgctggctgatcattagaattgatgaactcagtggtaatctccttggacaataatttttctcgaatgaagtgacaatcaatctctatgtgcttggtcctctcatgaaagactggatttgatccaatgtggagggctgcctgattgtcacaaaataacttcattcgtgtaacttcacaaaacttcaattcttgaagaagttgcttaatccacataagttcacatgtgaccaaagtcatagatcggtactcagcctctgcgctggatcgagcaacaacagtttgtttcttgcttttccaagagataagatttcctccaatgaaaacacagtagcctgaagtagatntcctatcaataggacaaccagcccaatctgcatacaatatccagatac

SEQ ID NO: 166685 - DNA, 450 bp, Glycine max
tcgcctttgccttttcctaaactactgtaggaatattagggtatggacgaatgggttagggtgttggggcacataaagttgggatgcaaatggttagcgtggcggtgtttgggttgggacgcaaagaagactgacggacgagaatgagtacaacataagaaggggaagggtttggggtgtcttgcgacgatgcaaaggacggtagggggtgggtttggggtgtcttgcggcgatgcaaaggacggtagggggtgggttgggagtgttgagtctttggctctaaaagggaatttttttcatgcaggaagcaaatagggaggtgtgggaagtaaaatcctaattttatcggtattgacatatacaactaaaattgtttaaggacattgttatcactaccataattgctattgacactatgaagtcttggcagtggccattttaaccttttga

SEQ ID NO: 166686 - DNA, 211 bp, Glycine max
catgtctgcagctgcagattcaccatttcctataatctaaagttttatctaaatagctctgagtaagtattctgacaaagggtggagtcttaattaaacttgttgaaggagatatgttattgagagaaattgtgttaatgcgctgcatacttgatctcttatttatgacttgattacaatcgaccaatgccataatcaagagcttaattag

SEQ ID NO: 166687 - DNA, 449 bp, Glycine max
tatgagagtcacaggctatatttataagttcaaatatgctcttctaatgctttcttaatataaaaccatttatgtgtcttcaccttatagcttaagctttttggggttgtagttcatgagatgatatcagagcctctatgaccaacttgtctagagttcaattcttgctgcccacactcttataaaaaagttgaattactgcacaaggtaggtggacttgtgcattatccatgctaaggttcttgtgtgagggggtgttggagatgtaatataaaactgtttgtatgctttcaccaaacaatttaaccttttgggattgttggtgatacaactattttttcaaacacatccctccattggtagtttggtacttctattttcacttcaatgtagcttgcagttgcagtgtttaatattccaactatttgcaattaccatttcctttccta

SEQ ID NO: 166688 - DNA, 191 bp, Glycine max
agcttcaccaccaagatgagccttggataaaaagcttggagaagatgcttcaatggaggaaaagacagagggagagaaagagagaggggggagcacgaaattgaaggaataaaagaggtatagaagtggaactttgaagtatgtctcacaagactctcattcatcaaaagtacaaccaagtgtacacatgc

SEQ ID NO: 166689 - DNA, 453 bp, Glycine max
  unsure (1)..(453): unsure at all n locations
tgtaggattatggcgtacccatcacatgtggtactatgtggtggccgggcgatggtgcacaataagttttccacatgcacaatgcacgcataaacccaccatcccctgttgcccacctccaactgagctcacgtactcccacgtagctcatatccatctttctctcaacaccaggaccccatcaatcctcccaagcttgcccaacatcaaagttatacaacattcacacagcacaagctatcacagctaatcaaaacagggcaaatgcagaacactctgcccagaacaccaaccaaaatcacagcttttcacatacaaataccccaganacattttcttcgttccaattcgttaaccgttggatcgactcgaaaattttactgcaagactctagtacttaagcctaaattgagaccgttgggatctactatcaaacatgcagagctcattctg

SEQ ID NO: 166690 - DNA, 401 bp, Glycine max
agcttgaacgtatgtaagacacatcttcttaacctttgtgattctggactccatttcattgaagcgcatatccacttgtaattccaaatcgtcaaacctctcaccaacaaaggtttgaagaccatcaaacctgtctaaaatctgaaaggagagatgaatcctctccatcatgtccttcttcaccaacatggcgagtacctttcttcacccaagagccatcatgctccttttgataaccaaaagatgctatgactaaagtgcctataaggaaagatctcttgattggaacataaggtttagaatcaagagggatgttgaagtgttgaaggaaaagggtaacaagatgagggtaaggcaatggagcattcaatcgcaatgccttatgcatgcaatatctaaca

SEQ ID NO: 166691 - DNA, 445 bp, Glycine max
tcaacctagaggagacggaccattccaagtgttggataatatcaacgacaatgcctacaagattgacttgcctagtgagtataatgtaagtgccactttcaatgtgtctgatctatctctttttgatgcagatggaggggccttgtatttgaggacaaatccttttcaagaaggagggagtgatgatgacataaccaagggcaaggaccatgaagcacttgaagggcccatgaccagaggcagacttaaacaagcccaacacgtcatagagacaaggctggtcatttgtatagctaccattgatgatgattgaaggcccaagtggagaaagatgaatgcccacaggcataggcactaccaagactactaattgttgctgaacgcccaagttaaataagtttttagttataatttatttttattgtaactttggcccaaactgttt

SEQ ID NO: 166692 - DNA, 433 bp, Glycine max
  unsure (1)..(433): unsure at all n locations
agctntaacctcatcgtccctcacagtctttatatttgggagccaatccaatccttgtgttcggactctcaaccacttatgatagccgccgatgatcccattactgcttcccctaagctctctgttctttcttcacgccgcatcccatgccttgcaaactccttggagtaccctcgcgttgtggtcactaaaaccctgtgcgatgaaaggcgtgatgctttcgtctaatggcgctcctctcatggggtagccaagctgtcttatggtgagaacgggattataattaatacaaccccttgttcccatcaagggaacatttggacatccttcgcatgaagatagaatcctgattcttccttccttctagcgagggaaccaattaacagatgcccccccatgctagccaggagttggtcccaattcgccttttctt

SEQ ID NO: 166693 - DNA, 450 bp, Glycine max
tataagaacaaaattgccttaatcatttccaaatatgcatgtgaattaagacgcatcaacaagaatcaagccaaggctattgtgcaagcaatcaatggggcaaaacacaccaaatgattataatgatggatggctcaaattctcacaaaggtaaaaccatcactttcaaattgagctttcaaaactatcatgacatgtagagaagaatcaaggatttcaagtcacaaaatgtcaagaacttttattttcaaaacaattacccatttcttgaacctatcctataattcaaagaaaaacatgcaaagtcgtacgtgcacacgaaattgacccaaaatattaaactgaaaatccgacgaaactaacaacattaacaaattaacacaactaacaaattaacaaaaccatcataactagcataaccaaagaacactccccccccccccatactta

SEQ ID NO: 166694 - DNA, 410 bp, Glycine max
  unsure (1)..(410): unsure at all n locations
agctntaacttgagtcttcaagagattataattatgtgaccatggcatgaatttacttatcaatcatataatctatctttcaatatcttctttcatctctttcaacactttcaatagatctttctgatctatttctcttcatctttctaaaagtttttgttcaaacactttctcttccaaaaaaagttctttgttcaaaaacttgtgctattcatattttttattctcttctccctttgccaaaagaatagaaggactaaccgcctgaattcttttgtgtctcctttctgtcttacaaaagattcaaaggactaaccgcctgagaattcttttgatttttcccttccccttaagcaaaagatgtcaaaggactaaccgcctgagaattctttgtcccaacacattggagg

SEQ ID NO: 166695 - DNA, 441 bp, Glycine max
  unsure (1)..(441): unsure at all n locations
ctctcttaagtcctaaatgacatttcatactaggattaactcactttaacccccaattaccactgaatccagatttagccttccaactctcaaagcctcactctttttccactcataacaccacattctcactttctaaccctaggttaactctacccttcatctctagcagttttccataagcaatttcagcacacaaacatcacaagcatcatcataaaaaccctaaaacagaatgggtaagcttgactcacaccaaacatgacaagtttaacatgctttcatcaaatctcttcacaaataactatcataaagcataaacctagtaaaactacccatcatatctcccagccccatacccacgaaaatcatgtgagaaagaagtctacccaacctgaaatntcgaagtcccacacgtagagatgcgcttcacgactccga

SEQ ID NO: 166696 - DNA, 375 bp, Glycine max
  unsure (1)..(375): unsure at all n locations
taatatccaagcacttttgctntacttgcttgctttgctctttaatttgntttctattttcagtttcatgctccatgtaggtgaattgttctgttttattttctgtggagtttttttctatttacttggtgcatggtttttcagttatgtcaacacttgcattgcttttcagtttcatgcaaccatggcatgatttacattgcaaaattgaaggccgtgctgcatatgatatactcactaattntgagcagcgctggagaaaagccaccaaatggtctgagatgggtcggaaactcaagagagtatctaacttgaacgatgattctttgatcaagatagaacacatttcttggattcttagtctttcgaattact

SEQ ID NO: 166697 - DNA, 335 bp, Glycine max
ttttatattatctaatggacaggcaataccttagcatctcttactacttttttatagaccgtttaccacactatccctcttcctttcttaagctctcctggggcttacacagagtaatctattactcatcgagacatgctactatcaatatctatgtttttgcacgaccctcaatatttcttagaagctaataatttattgactcaacaaattgcaccacatagtacaagctcaaccgccataggtacatgcgcacacatgcataacccaaccatgttgggccagcaatgaagtgtgtcacacgatactgtgacacttcacttgtgctattaatc

SEQ ID NO: 166698 - DNA, 425 bp, Glycine max
  unsure (1)..(425): unsure at all n locations
agcttanagtatgcccgagtcattcatccctatgagatgttgttgaagtattggcgatcagaattgccattccttggattatagggttgaaccaagctcatgcttttacaaaaaggttcatcaagtcaagttgaaatatggaagtaaccgtcttgcaaaattggggcaaaagatgaattgagtcacatcactgcttcgtctactgccaaacatatttaggattgttgatgtccttgttacttccagtttcaccttgacaaagatgtcatggaccatgttgaaaatctaaattgattcaaccccatatcttgcgtaaaaattcgcaatacttcaactgtacatcattcgcatggcatccatgctttcattagttgcattgctcgctgcattctttccttgaaaaataaaataaaatgaacttaatc

SEQ ID NO: 166699 - DNA, 439 bp, Glycine max
ttcatctagccaaggttatacagaggtgttacaagagaacctaacgattcctaattatatgggccatcaaatctatcatgtgctgacagtaattgattagcccatggatctcctcggtggtagtacacacttcggccatggcttttgctttggctaacaaacgcgggaggtcttgacttccattcaaggtcaaggcgaatctatccatccacatagtcgcttcttgatgcagcgcatcaatcaccctccctctagcttctttttcggcatacacttgtgcagaatcctccactagcttttgttcatgggccatggactggttcaattcttcctggtattgcctatgatggctagcatgctttgctccgtggcttccacgtgttgagccaaactccttttggaccttgcgcaagcaactaactcttcttttaagatcatg

SEQ ID NO: 166700 - DNA, 253 bp, Glycine max
tcacatctcgtattcacgtcatactgatcttagtataaatgtaatcaacctacacagtatagatgaggatgtcatgagtaatgtttgtaagagttcagcgagatgatgaaaaccagaaaagtctagtgacaaatcttgtgcaactatgatcagacaatggttcattcgttatacaagcatattatatctagaccattttgtgttgggatatacagtctactgaactcaacatgagacctctagtttaagaccg

SEQ ID NO: 166701 - DNA, 363 bp, Glycine max
ctctaacagctttgaaccatatacttggcctttatttaactggctctgggcttggcgggcaccctcaacaaaggactttcgacacctattggacgttgatttgacccatggtggtatgggaatggtgcgaccatcccttcaaaccttattgatacattctgaaaggttgggtggcatgtggccatatcgacgtccttctctatcataagccatcgtccatttttcctttgaaatgccatcaattcattgtgctatggctggactcaattcacgaaatttttctaaattttgatcaaaatgttcttgcaggagtgaggctgctaaaatagttatgaataacaatttagtatatatgaagtaaat

SEQ ID NO: 166702 - DNA, 449 bp, Glycine max
  unsure (1)..(449): unsure at all n locations
ttatgtganaggatgggactcttcacactttgaattgaatttcaatgttcaaaggcacttgtaatcgattaccaaaacattgtaatcgattacaactttttgaaattaattggaacgttgtaaattcaatttgaaaactttttcaaaacaatttagctactggtaatcgattacagcaatctggtaatcgattaccagagagtaaaaactctttggttaacatgttttgagaaaaaaatttcatacttatcttgattaagtcttctcttgattcttgagatcttaaaccttgattcttgattcttgactctaaactttcttcttgtgtcttgaattcttcttgattcttatcttgaactcttgaattgttcttgattcacttgagttgtgctttgattgatctttgattcacttgagttgttatttgattgatctttgagctttttgtc

SEQ ID NO: 166703 - DNA, 445 bp, Glycine max
gcttaataatcctgagctggagtgagccatgtgatcccagtcctctgtgccgtagtgacggctactacataatcatcgtcaatatctggctttgctgcgcctgaaactccttcctcagcagcctccactggtgtgtcctgagcctctgcctctgcctttggggtatccttagcctccccaacctctggagtgtcttcagcggcctgtgtttgtggctcctgggccacaagagcctcacccccccaaaaggaaggctggactccagaccaagctacctgtgccaagaagtcctccatgctcatgatcagccgctgctgagataaattctgcatactctgcatgaccaggaaaaggtcgtgatgaatggcttgtagcatgggcacgataacagcactgctatgtacgaaggggccggttggagctgaaataggtgtgggaggtggag

SEQ ID NO: 166704 - DNA, 451 bp, Glycine max
  unsure (1)..(451): unsure at all n locations
ntcccatagaccatctaaaatggtgatattccaatgggagtcttgaaggtagtcctgtaagcccatagggcatcatccaacttcacaaccaatccttccttgaggatgcaacaatattctccagaattttcttcaattctttgttggatacctcggcctggccatttttctgaggatgataaggtgaaactaccttacgtttgacattataatgcccaataccttctacaactatctattgcagaaatgtgaaccctatcactgattatcactctggagaccccgaagcgggagaaaatgtttctcttcaggaatttgatgacaatcttggcatcattctttgaggcaaccacaacttccacccacttggacacttaatcaacaaccaccaagatgtactcattcccataagaggatggtagagggcccacaaaataaataccccaacagt

SEQ ID NO: 166705 - DNA, 370 bp, Glycine max
tcacaactatctatgggagaactaacttcatatattctaattataacattctacaaccatttctctttttctttctctcccagatattctaaatgaataaccaaataaaggaaatcagatgccgttactggacaagtacactgtaaatacacatgcagacacatttaaaaaatgcaacaaattttggtaatatagcaagcaacaaataaacattgtattattgtatcacacatctgttaatatgtatcataattctgccgtggtccacaatacagaaatataaccatgtagctgtatttcaacagtataaacataaaagtttcttccccatttgtctttcactctctttttaaaacaagcagaacctata

SEQ ID NO: 166706 - DNA, 452 bp, Glycine max
  unsure (1)..(452): unsure at all n locations
tgatgaggtgatattgataaagcanaccgaggggtttgaagctagaggtaaagaggattatgtttgcaaattaaacaaatccttgtatggtttgaaacaatcctctaggcaatggaataagagatttggtgaatttatggctcatataaagtttcatagaagtcaccatgatagctgtgtttacttcaaattttcttctaaagctgagtttgtgatattgctactatgtgttgatgatatcttgatagcaagtaataacaagagtgaagttgaaaaattgaaatgtaggatttgggaacaactaggaggatattgggaatagaaatcaaacaggacagaaaaaggaaattgttatatttgtcttaagagttatatatcagaaaagttcttgaaaggtttggaatgtcaaattccaaacctgtaactactcctatgtcttagcagtttaagct

SEQ ID NO: 166707 - DNA, 367 bp, Glycine max
agcttacttttaaataatagaagtagaatattataaataacaaatatctaaattatgaaatatataaattcacgtaagcttttccttgagtaaagtaagttatgcagccttaggtacaactgtatataagaacaaagtagataaatgaatatacatataaataaaaggactaaagcctaagccaacccagaccaaatacatataataggaaatgccctagacataaagtaatcatctctaacacccaactcagtgtgaaaattacgcaaaaacataagtcaataggtgttcgcccataacagagatacctaagggagtaatccatgcctttggtcacgtcgggtatccatcacctccaagtgcactc

SEQ ID NO: 166708 - DNA, 459 bp, Glycine max
  unsure (1)..(459): unsure at all n locations
actcagcttatcatagttggtagttacatgaataattaagaaattatatacattnttcgcgttaattaagtgttctatttggggctctagcccctcgttaacaccaaaaaaagtgttctttcatgaaatcctattataaaattaacctgcttcttttttttttttttcttctttgctgcctcactgttttttgctcggtcttttaccaaaaaaaaaaaaaggaaacttctttaatttttttttctgcttacaattagtcaatcattactgtgatgagttaaaaataaaagaaaaatcgcatcgcgtgctatattttaagatcaacgaaacgtgaaataagttatatttatgttttaaggttggaaaaaaatgaataagcataaatgatacttacacatcactgaaacataaatggagtaatatttagatagaagtattttacatatgtgaaacgtgaat

SEQ ID NO: 166709 - DNA, 356 bp, Glycine max
  unsure (1)..(356): unsure at all n locations
aatggagagaaagagagataggggagcacgaaattgaaggaagaaaaagggagagaagttgaactttgagttgtgtctcacaagactctcattcatcaaaggtacaacaagtgttacacatgcttntatttatagacttgggagcttccttgagaagctttcttaagaaaaattccttgagaagcttctttgagaaaactttcttgagaagctagagcttagctacacacaccccactcataactaagctcacctccttgagaagctctcttaagaagattcctaaagatgctagagcttagctacacacacctctctatagctaagctcacctccttgagatgagaagctagagc

SEQ ID NO: 166710 - DNA, 450 bp, Glycine max
  unsure (1)..(450): unsure at all n locations
tatgctgcanatatttacaatagacctcctcaacctcagcagcaaaatcaaccacagcagagcaattatgacctctccagcaacagatacaatcctggatggaggaatcaccctaacctcagatggtccagccctcagcaacaacaacagcagcctgctccttccttccaaaatgctgctggcccaagcagaccatacattcctccaccaatccagcaacagcaacaaccccagaaacagccaacagttgaggcccctccacaaccttccctcgaagaacttgtgaggcaaatgactatgcagaacatgcagtttcagcaagagaccagagcctccattcagagcttaaccaatcagatgggacaattggctacccaattgaatcaacaacagtcccagaattctgacaagctgccttctcaagctgtccaaaatcccaaaaatgtcagt

SEQ ID NO: 166711 - DNA, 304 bp, Glycine max
  unsure (1)..(304): unsure at all n locations
ctctggggatctctctctaatataaccaacagtgcaaagtgtatcaattttcagaattttttttggttcttgtagctagctgctactattggtaattaataaatgaaaatgaaaacgaaagtgattacaccacgatttgggtgataatggtgcccaccgtcgcgatcctaatcacatttctcgtttgccattactggtcttattatatatatgattggatatccttcttttctttatttcttgatcattnttaatccagctttttggagtgtatgctactctngttggcataacatgggctcga

SEQ ID NO: 166712 - DNA, 451 bp, Glycine max
  unsure (1)..(451): unsure at all n locations
tcttctatttatagccttcaactntaagtatttgttgtccctcagcggatggttcttcactatattcttcattaaagtcttgaagctcttggagcatttaatgcatgtctcttcttcatgcaaagtctatgctaatagctaggttgacatgtcttatacttcaacaagaaagtcacttcttccatcagagcaggtatgcaccagcaaagtgcgtctttcgatgaagatcaacactttcaaactatggactttatttattattcataggatttaatagattctaggagaatgttttccgcaacaaagaatctcatacataaaatattaaatgtaggtattaattaaatgcactacttaatgttatgacaagatcatcttatattgatgtaacatcagaaaactcanacccagaaatacaaaccataatctgataacacatcanacacaattt

SEQ ID NO: 166713 - DNA, 372 bp, Glycine max
  unsure (1)..(372): unsure at all n locations
gcgttctataattattaagaagactatgctactatacaagtgtttaggcatcttggaattaaatcatgtaagttgcctgaagcaactttctgagcaaagatttataggcttcatttaatcatgacacagaataagctggccaagaaagaattgcattcttagcagcttcaaccagtaggtttcgggttttttgtttttttttttggtttggccaaacatactttgtttgaaataaaatagaataacanatttataaatttgccgaaagatttctgacttggttgttgtgttacaagttaatcgacacctacaggaatcaattccatgggtttaatcannaccagtgctactacgaaaacttcagtaactgat

SEQ ID NO: 166714 - DNA, 411 bp, Glycine max
gttgcttcgtttattctgttagcgtttccaagcgtttgagataagaagagattgtagcctccattgtactgtcaacgtgcgaggctgatttctctctacaggaacattatttcgcaaatctcaatggtgagactatgctgaaatgacatacaaaggtggtctccaaatgtcgtgatgatccaacaattaatgagttggggatcatagttttactcggacatgtttgggtgtatgcgggaaaagagaaagctcagtgtaagggacatttctttcaccagagacattatctcaaaactcccaacggtgtgtgtgtgcgaaaataatgtttgaaactcgtgttcaaatttcacgacaatccaacggttaacaagtatgagatcattcgtctattgagataggtttgagtgtata

SEQ ID NO: 166715 - DNA, 459 bp, Glycine max
  unsure (1)..(459): unsure at all n locations
atgagcctttgtagaccgggnaccttaagtcacctgagcatgcagctatacactgtattccatccancgatcttggaagagaaaaccaaccaccacaaggggttgaacttggcgggagacttngttggctaattggtaaacacaaacacacatttggcctaaaaaaatattgccataatgtggggtaatgccaattggaggtcccaacattggtgggtaaataaacactcttcaaaaacaacaattattccttcctcccaaagaaatgagaatcatcaagaggcactgttgaaaaatactactaaatactataaataagttatattttataattttcattctataaaaaatattgtgtcatcttatattcttggaagttggattttagattttgacctttgaatatttatttattttaatcctataaattaagaattctgatttagtgatgaaactaaa

SEQ ID NO: 166716 - DNA, 96 bp, Glycine max
cgttatctaagaattgtcgaggtcacggactctctatattgcgtggtatctcagcccctatgaggccatccagtatacccacgcttgcatctttag

SEQ ID NO: 166717 - DNA, 418 bp, Glycine max
  unsure (1)..(418): unsure at all n locations
agctnggcatggtttttaatagctntanaagcgttacttttagaagatatgaataaagtccaggtatatctagagtagtcatctacaataaccgaagcataataatttcctctaatacttatgggtctagaagaaccaaaaagatcttaacgtaaaagttcaagcactctcgaggtagaaactgcatttttagatttgaaagatactctatttgttttcccttttgacatgcattacataatccatccttttgaaattttagctttgggagacctttaactaattccttatagactagcttatttagttgatccatgaggatatgagttattctcctatgccaaagccaagagagatcatcattacttcttaaacaagccatgtngaagtgagatgcactttctacattaagcatata

SEQ ID NO: 166718 - DNA, 451 bp, Glycine max
  unsure (1)..(451): unsure at all n locations
nggattgatttagcctaactagggatcgaggtttagttatttatgcaacaacatagaacacaaagcataattgattagagaaacatctttatatacatcaacttgtttgttagaaagacccaacacttttacctactgcttgcattttactgtttttagcctagacttagtttaattttgttctaaaccatcaattatcaatgtttctttcaacaatgccttatttttgaatttaaccctgtttaatactagttccctgagttcgatacttggattcatccgttttaattttaaatacttgacgatccggtgtgctttccggcgaatcggatttcccttgaacatatttgtataaagattggaccaaaaagtaactacaggggaaatccaacaaccatctagctcattctctgcttctgatgaggaacataatgacaaatcattcaacaac

SEQ ID NO: 166719 - DNA, 403 bp, Glycine max
  unsure (1)..(403): unsure at all n locations
actcaaagtttttaaaagacatgttgacaaggaagcacaagtacattcaccaggaaaatatatntgtggagggtaattgcagtgctatgattcanaaaattcttccaccaaagcacaaagactctgggagtttgaccattccttgctgaataagtgaaggtacagtgggaaaagttctcattgacttgggagccagtatcaatctgatgccactctccatgtgcagaagactgggagaagtgaaaatcatgcccactagaatgactttacagttggttgaccactccattaccagaccatatggagtaattgaagatggtttgtcagagtaaaacattttattcttccagcagacttttgtgtaatggatacctatgaagatatgacattccctaatcttgag

SEQ ID NO: 166720 - DNA, 233 bp, Glycine max
tagaaaggaagcttcaatggtggaagtgaatgagagagagagagaggagggcgtgggaattgaaggagattatggagataagttgaactttgaagtgtgtctcataaatttctcattcatcaaatttatgacaagtgttacacatgtttttatttaaagcctagcacatgggaagctcccttgggaagcaagaaaggtagcttccttggaaagctagaggggggctactcaca

SEQ ID NO: 166721 - DNA, 364 bp, Glycine max
  unsure (1)..(364): unsure at all n locations
ctcttggttcttgattcacaactcttgtttttttgcacttggttggcattgttctttaatccttgatgtccgatttataggtagataaaagctcgtaattatggagagtatcttcaagattgaataatatggtcaatgtgtagattgatcttatttccttgaataagtggatcctacatgtttttgtctgatatgattagaactttccatanttgtcattcataactcaatatgaccattagacttataaaaggaaatataagatttattcgcagatatgctccttttaaacaaaatcatatanactgataaatcaaataaaatgcatattcaaaatgttgtttggatggactggacgagtact

SEQ ID NO: 166722 - DNA, 401 bp, Glycine max
  unsure (1)..(401): unsure at all n locations
ntgtatcctagggaggggattcgagctaaatgctgatggtcagcccttanagatattaaggaagaacatgaccactttagctaagacatggagtgttctttccttctctaatttgattcctacctcccacacatctgatgtcacattggatagagccaagtaaatctatggcattattatgaagatggatatgaatgtggggtacctaatctcccaccagatctttctaacaacatagcatgattcatccagagttggattccctgccttgatcatagctctatgcaaggccagaggagtccaatcatattctagatccctggagagcctgagccctgccattaacttggcatatattaagaagaactgttggaatctagatgatccaacagtgacattta

SEQ ID NO: 166723 - DNA, 331 bp, Glycine max
gagaatactcgccagtgcctagacgctgaatgtcaaaatgtgacctgggatgtcttccagagggtatctttggagaaatatttccctgaggatgttaggaataagaaagagatggagttcttggagctcaaggagggaaacatgattgtggctgaatacgcagccatgttcgagaaagtggtgaggtactttccccattatcaaggtagagatggcgaaagttccaaatgtgtgaaagttctgaacagttcgtgacttgaagtgaagcaagcagtgaattaccaaggtggtcgtcagtatccactcttggttaacatgtgtccgatttggg

SEQ ID NO: 166724 - DNA, 441 bp, Glycine max
atataagcgcggctctgggagacaaaggtcaagcgttcgtgatatgctaggatgatattccgagcactttggatttggtacgaccatgccctcctgatttccagctgggaaattggcgagtggaggaacgctccgacatttacgcgacgagcataatgtaaacctttacggttttaaaagctctatagttgggcctacgctttagagcttttccttttgttaaggctatgagtcttttgtttttgaatctataatacaaggatctctcttcatctgatcctggactctacccattctcattcatttgcatgtttacttgtttatctgaaacggcagatacgatgacgagtcccccgaaggtactaatacctgggacccgcctatcgacttcgagcaagagatgaatcaaacggaagatgaaggaaatgaggatgtaggact

SEQ ID NO: 166725 - DNA, 311 bp, Glycine max
  unsure (1)..(311): unsure at all n locations
cttgtctttaaatctttctgactttgtaaccgncattgcatgtcttatgcttgcttcgaaaaaccttatagaaagagactttgcgaatgttatcctttcatgaaatgcgtgttattttcgtaacctacactgaaccctggacacattggcgtggtcggaatttccaaatgatgttcctttggaaaacctgaaatgctcccatctctttcatgaagagatgtgggtgtttgacccacagcactgttactagctttgttttgtgaaatccatactaagtctccttcattttggcatggtagaggcttgcgtgg

SEQ ID NO: 166726 - DNA, 462 bp, Glycine max
actaagcttcttatccaggcacattcttggtggtgaaactccttcttccatggcttattcccttgtggatggagcctcccctctcctcttctcctttgccttccgctgcatctccatggtggaaaatcaccattgaagctcaaagatccagcctccatagaagcttcacatgcaagcttccatcagagttagtgcaactcgatgtcaaaacaacctttctccatggaagattggaggaagacattttgatgcaacaacctgaaggttttgaaatggaagggaagaaaaattatgtatgtaggttgaaaaggtttatatatgggttgaaacaatctccaaggaagtggtaccagagattcgatgagttcattattactcatgggtacaacagaagtgcctatgattcatgtatctattatagtaaggtgggggatggttttcgcatctaggtgctactctatg

SEQ ID NO: 166727 - DNA, 359 bp, Glycine max
ctcatctcttctttggttgagctttgtgcaaatggagaaaaaagaacttcaatttggtttttaaagagacatgatgatgagggttaaaggttaaggtgacaagcttaattgaccacctgaatgacttataaccagcccatgggtaacgtgcccagccatgcaattttagtgcattatgccttttgaaaatttaagccaaaatggctaaagtaggtttaaaccaaaaaatggaaatttctgcttttgctaaaactagtaaaccctatcctaatcccctagatggacgtgttaccctttcttggattaagcgtaatcaaagtggacgttgcacaaagttcactctcacagaaactaaatac

SEQ ID NO: 166728 - DNA, 448 bp, Glycine max
  unsure (1)..(448): unsure at all n locations
tccttgagaagctagagcttatctacacacacccatctaataactaagctcacctccttgagaagctttcttgagaagctagagcttagctacacacccctataatagctaagctcacccccatgacaaagaaacatgataatacaaaaaaaatcctactacaaagactactcaaaatgccctgaaatacaaggctaaaaccctatactactagaatggccaaaatacaaggcccaaaataagaaaacaacctattctactatttacaaagaagagtggacccaaccttggcccatgggctcaaaaatctaccctaaggtttatgagaaccctaaggccttctttatcaactctagcccaatcctcttggagcctcttgctcatggctctggtaactggtcctttcctagggaggattgcatcactntataacagaacgtcccccaca

SEQ ID NO: 166729 - DNA, 441 bp, Glycine max
  unsure (1)..(441): unsure at all n locations
gtcgcttcacccaaatcgtgtcttcaagttcaccanagccaatactgttgacaaccttgtgaaacctgtgcacctaggatacaaaggcaacttgaaatcattttctagtttgtcataaaaaagggcatgtgctcgactaaatccctcttggcctagatcgtgaatcatttcttctatacaatttcccatgtctacatccacagtctgagtgtcagcaactgatggtggctgttctggaaattccccatgccatatccatttagtgtaagttttaatgatcccgtgacatataagatgtgatcttatctcacttataggctgatgtctcccatttgcacatttgacacacggacagaaatatttttcccacacagatgaaacattgagttcagtaaaatgggaggaattgttcaanctccattctcatactcctcactaatg

SEQ ID NO: 166730 - DNA, 457 bp, Glycine max
  unsure (1)..(457): unsure at all n locations
tctgggggacatcttgacttgctttccaatctgacattctccacagattctgccttcttctattntcagattgggaatgcctctaacagcacctttgtcaatgattttcttcatgcctcttaagtgcagatgtccaaatctttgatgccatattctgacttcatcttctttggaggatagacatgtggaggagtaactggtttcttgaggtgtccataggtaacagttgtcctttgatctgctgcccttcattagaacttcactcttctcatttgtcaccaagcattctgactttgtgaagtttacattgaatccttcatcacacagctgactgatgctgatcaagtttgcagtcagtcccttcaccagcagtactttgtccagactaggaagtccatcatggactagctttcccattccagtgatctttcctttagagccatctccaaatgtcaca

SEQ ID NO: 166731 - DNA, 542 bp, Glycine max
  unsure (1)..(542): unsure at all n locations
ctctactctacattcacntacttctatctaatgtatcgtctattnntnacttaatcccctnaaccncacnacgnnttttgacccttgatttgcnancttcntgnaccgggatccatanagacgacctgangcatgcaagcttctcaggaagtgtcctaatattatagggncgcggaactaaactctaacttctcaaagaagatttctcaaaaaaacctctcaaggaagctacctaatctataataaaacagtgaacacttgtgaactttgagaagaaatctggaacacactcaaggtaacttctctccctttttcttccttcaatttccggctccccctctctctttctctccctctttcttttcctccattgaaacatcctcttcaagcttcttatccaaggctcatcttggtggtgaagctccttcttccatgacttattccttaatcgatggcgcctctttcacctttttcctttgtcttcgctgcattccatggtggaaatcccataaaggacccattgagctaaaaaccagctcatg

SEQ ID NO: 166732 - DNA, 451 bp, Glycine max
taccctcaagaacagtacgttgtagggcacgtcaacactcataagggcacgatgaccctaggttgcggtggtgcgaacaacacatgatgcggaggtagcggaggcgctgacaatgtatgcttccttttgcggagctcacggtggtgcaagggagattgagggcaataggagacatcggctaatagcacaattttcaaacagtgatttcgaggtacgcgtgttcaattaacgcacaaaagggaggatatatgaaagcatgttaacgacggtgtagttgtaaacccgtctttgatactcaatatttctacgatggtgtttacaaatacaccgtctttaataagctccggcctaacctacaaagacagtgttagcacaaaacgtcgttgtagacatcatgtgtcgtgcacatgcccagtaaaaatgtcatatatttacgtaaatgccactgatc

SEQ ID NO: 166733 - DNA, 302 bp, Glycine max
  unsure (1)..(302): unsure at all n locations
ttattcgntgaccacagagtggtacctggagatatgtcgcgggggtcaggagaccttggggacgtcaggtggggtgctattgcccacaaacaagcttgaccaatcccgacccaacccgggcatagtcagtcagtgagaacctgtgatgtacctaagcaggcgagctcctgacagtcaatagataaaaagaactaagaccacaaagcaaggaggcttgtgtggtggctggccaactgtgaactttgattgatatatgggatatggcctctggtaatcgattaccaagggtgggtaatcgatta

SEQ ID NO: 166734 - DNA, 466 bp, Glycine max
  unsure (1)..(466): unsure at all n locations
acggaccttgaaactaagcttgaatcgatacacaaggcttgtaatcaattaccagatgttttaaacattttataacaaccttctgaaatttgaatttaaattttaaagacctgtaatcgattacaacttgtgtgtaatcgattaccagacatgaaaattcaaatttcaaatctaaagagttacaactcttcagaatctaactgtgtaatcaattacaatagttatgtaatcgattaccagtaaggaatttttgaaaataactcccaagagtcacaattattcaaaacgttntttggatggtcatcaaaggcctataaataggtgacttgnggtacaaaattccttagatttttcctgaacaaattttcttatcctctcaataccaaattgtcttataagtctaaaaaaagaattctttggccaaaacacttgcaaattcagtaaggaatcttgagtgatgttcaat

SEQ ID NO: 166735 - DNA, 402 bp, Glycine max
  unsure (1)..(402): unsure at all n locations
ttgtggataactgggtggngggtaaagagaaggtttgtattggctgagtaatgacattggtgggttggtgggttggccgtataagaatggtaatcacaagatgggtttcttcctttttcttacccttttcatttggcccagtcttctcaatcggcctaggaggatgatcaaatttgcctcttttcggacccacatcgatcctttcactggcgaagaccaaatccggaaagctntgagggtgtgcagcccaccatcttttcatagtagagtatcgataatgtgtctaccatcacgattatcgtctcccttccatcattgnggatacaccctgngccgcagatcccttcaccttttgggcgtgttctttgaaagatccgncccctttttgcacatgttttgatg

SEQ ID NO: 166736 - DNA, 443 bp, Glycine max
  unsure (1)..(443): unsure at all n locations
tcctcttatgagtgcatagctctttcanaaatttagcatatcttggaatttgctttattgcatccagtagaggtatgtttacctctactcttctaaatgtttccaagatctccttctccgcctcttccattttcttgttggaaattgctcttggtgggaatggaagagggatatgctactactgtaagtcagaattaccagtagaagattcacctgcatagaaattgttaggcaacttactctttaaatttttgtcatcatctttttctggagttgagtgacgttgggcaggttcatttgcagatgaggaagatgctactagttgaggtccttgatactgttttcccaacctcaatgtaattgcactcacattcttgggattctgtacagattgagaaggtaatctgtcagaattctgggactggttttgatttaactatgta

SEQ ID NO: 166737 - DNA, 596 bp, Glycine max
  unsure (1)..(596): unsure at all n locations
atcctctctctgcgaacgagcagttctacnattcgctcttccnntatcactcatattatntatcgnaagcccaatntnactatgactcacacntattcgaagccgtatgatttgaaaccatcttgacccgtgatctcttagtcgactgcagcatgaagcttggcttcatncattctataagcttatttgaaccatttacatgaatattggtcatcatatatcataaggaatattacttatgagttaactaacaaagagattgtgtaattcacatttacttaacatcatcacgcaacttgtagtatagatatgtttcaacactttgtcacctgatattatttcagctacatctgcatgtataatgaaaaacgatgcttgtacattangaatacccaattttgtctcattccacgacaactcaacaagctttagtaaacatcaaacacgttcttaatcaattctcccaatggatcaactctaagtactatatttgacctttcaaaagctccactcggtcttggcacacaatatgtgaattctatttgggtaatcgacaataacaattaggctatatttatgatacaattttaacactn

SEQ ID NO: 166738 - DNA, 472 bp, Glycine max
  unsure (1)..(472): unsure at all n locations
tcacggaactatgaaactcagctatgactcttggcaatttctttaaaactagtcacttaaaattttgtgacttttgaaaaaatcttcagaaacaagtcacttgaagaattgtgacttttggaaatgtatttttcgaaatcagtcactggtaatcaattaccattaaggtgtaatcgattacacatcaacagatgtgacttttcattntgaattttgaaaattaaaacgtttagaagctctggtaatcgattacaagtgttgcgtaattgattacacaagtttaaaatgatttaaaactgttaaacacaagttgtaactcttgaaatttgaaatcttaacgttttaaaacactggtaattgattactaccttctgctaatcgattaccagagtgtaaaactctttggtaatgatnttgtgaaaactntntgtgctactcaatattntgaaaaacttttctagtacttatgttg

SEQ ID NO: 166739 - DNA, 437 bp, Glycine max
agcttatgcgcatattttcttacgaacgtttacttgcacgagacatcctatcaactaagaaaaatgcacccatatacaatcaaggtagcttcattacctagattatttacatgtacttgcaaggtgtatttgttatttacatcacacacgcctccttggctgaatttacatacatgcatactcaaagcattttggggtaccaaaaactgcacatgcgctcatcttggtatttctaatacccctacatatacaaacttcacgatgaatcttgactacctacacaataaggtgctacatttcatgctttttttcaagtttttgctacctaaagccacatgcaaattcaagcatatatttctttgctgactaaaaactgattcaaaatagaacggattatattttttgtaatatgttttcctcacataacatgcaacata

SEQ ID NO: 166740 - DNA, 428 bp, Glycine max
ggatcaatacaattatctaatcattccaatccactcttatatacaattgctcattcaaatcattctcaaacactcatttcataccaaacaatccactgcatatcatttccaatcaattcactgttcaaacacacttttggtacaagcaaataactcaaagtgctgaaatttaaataactgaaatttaaagaactgaaaatgttcatgctttgcagaaattaaactaaacacaatttaaacatgctgctcatcctgtggctgatcttcattaagatccagtgttggcactgctgatgaatcctggataggctgctctggctccgtgactggtgtagctggctgggtctcctcgggaacaggtgcaagagatggcttaggtatctaatctatggaagtcccctcctcttgatccatgtgtgcatatgcat

SEQ ID NO: 166741 - DNA, 423 bp, Glycine max
  unsure (1)..(423): unsure at all n locations
ctgcagcttgttctttgataattgtgcataacgtctgtgaattatttattatgaaattggtgagtggtggtacatcttgactcgagtgtgtgattcatgtgtaatgtgattggtgattgaaaaatgatatttaaatgatatagtagtgaggtgacatggattgtattaagtcgagctatgttataaatattactataacgcatttttcttatatctttgcttatctataatttatttaagaatttgataacttactccctatgtattgtttgtgtttggattctatgatgatcttgaaccttgtatttgtgggagaagatgattangtggatgacttctaagaatcttgtgctagaggacgctgagacactatgctctaataggatgtgacattggggcattgggttttgttttaatcgcatg

SEQ ID NO: 166742 - DNA, 443 bp, Glycine max
  unsure (1)..(443): unsure at all n locations
ntgcagcagatgccactctactctaaattntttaaagatatgttaacaaggaagaacaaatacattcatcaggaaaacatcagagtggaaggaaattgcagtgctgtgatccagaagatccttccacccaagcataaagatcctaggagtgtaacgattccttgttcaattggagaagtcaatgtgggaaaagctcttattgacctgcgagccagtatcaatttgatgccattctccatgtgcggaagattgggagagttggaaataatgcccactcgaatgactntacaattagctgaccgctccattaccaggccatatagagtaattgaagatgttntggtcagagtaaaacattttaacttcccggcagactttgtggtaatggatatctctgaagatactgacacccctgtattattgggaaggctattcatgttgac

SEQ ID NO: 166743 - DNA, 424 bp, Glycine max
  unsure (1)..(424): unsure at all n locations
agcttaananaacaagaaatgaattgaaagtctcggattcaaaaacttacccgttgaagaacgaagaacggatgaagaacggtgaagaacggacgaaaaccttcacggacttgcttacggaaacatctcggaagcgttacggaagcacctcggcttggattttcttcacggaaacaatttttttcacccaaaacagctgaaatacatagccaggggcctgaggcatccttagaacagcccccttcagcctataaaagcaatctagcttcaaaaaaacattctggaaggcccaatccaaaatttcgaaattgctatttgcacccccccaattttgataagttcacccccttctttcgtaatttacgggaaagttacggaagccttacggaagcatataggacttgattttattctntttttctct

SEQ ID NO: 166744 - DNA, 361 bp, Glycine max
  unsure (1)..(361): unsure at all n locations
tgagatgaggaagtgttgaagggtgattctttctgctnttattgttgaccacagagtggtacctggagatatgtcgcggnggtcacgagaccttggggacgtcaggtggggtgctattgcccaaaaccaagcttgaccaatcccgacccaacccgggcatagtcggtcagtgagaacctgtgatgtacctaagcaggcgagctcctggcagtcaacagataaaaggaaaacaagaccacaaagcacggaggcttgtggtggctggccagctgtgaattttgtgtaatatgtggattgtggtctctggtaatcgattaccaaaggtgagtaatcgattacaaggcttaaaatngaagacagg

SEQ ID NO: 166745 - DNA, 493 bp, Glycine max
  unsure (1)..(493): unsure at all n locations
nttgaaacatgagtaccgncatctntagaccgacctgaggcatgcaggctgaccaaaaccggtgagagtgtgactttaactattagtggacgactaactgtgaagaataatctttggcttcatctctggattttaaaatggagtggttaaatgaggacatgatgaagggcatgattatgcctacaccagcctttttgacaaaaaagttaccttgaattataattggattctttgcacccttttatgagctttcaaaatggaaccctgaacttacatgattatctccagaaaccttgcttagattctaggagagcatatggttcaaggcaaatttacccaaaatttgggggagtggagttaattgggatgtaaagaaaaagggtaaagcatcatcacacacacaatannataaatggtgtgttaaaaaaaacaatgaaagggaaggtgggctgatataataagggtcaaagcaaatgaaagtgaaaagctagtg

SEQ ID NO: 166746 - DNA, 365 bp, Glycine max
ttcgcacatcgttcgcgtgtatcatatccactccacaatgtttgaagttgatgagaccttcaatcctattacgcaacgtggcggacaaaagtgggcatttaacttgaatggtcattattgtcaatgcggaaggtattctgcgcttcactatccatgtttacacattattgcagctcgtggttatgtgagcatgaactactaccaatatatacatgttcgctacacaaatgaacacattttttaagctttctatcgcacaatgagggctctcttaggaatgaagccgctattactcctcctaatgacgcatggacacttatccctgactcaactataattcttgcgaaaggtgtgccaaatcaaca

SEQ ID NO: 166747 - DNA, 189 bp, Glycine max
aaaaataggtatattatgattctgtaaccggagagatgggaggataagtgccacaacttgactggctttgagaacaaaaatcttgctcatgtagtttcacaaactctgataatgctaacctcacggatttttgctataatcaactttggtctcaatcaacatttatgctattaattctccttttcctgt

SEQ ID NO: 166748 - DNA, 450 bp, Glycine max
  unsure (1)..(450): unsure at all n locations
tagaaatcaagtgatcatcaattccaaaacatagggggagtgatcgtaaattntatatatatacattgcttgcttgaatcttgatttcaggacttatattgtcatcatcaaaaagggggagattgtagaagcaaatgcctttggtgttttgatgatgatcatgatgagttgatgcaaatgatgcaaatgggcttttcaagtttaaattcaagacaatgattcaagaatgcaagccacaacatcaagatgatcactattattttaggaagggaattcctaattgatatagcaaaaggtttggccaagtaatttaagttaaaaaagtgttttttcaaaagatttactctctggtaatcgactaccagaggatgtaatcgattaccagtggccaaaaacgctttacaacagctactaaatatttgaattcaaactttagactgtgtaatcgat

SEQ ID NO: 166749 - DNA, 180 bp, Glycine max
aatgaagtgaaatccaacatctatatgcttggttctatcatgatgaacctgatccctggccatgtatataacactaaggctatcacagtagatattaacatactcttgattaataccgagatcatttatcagacctcttagccaaattccttcctttggcagcttcagtaagagtcatat

SEQ ID NO: 166750 - DNA, 455 bp, Glycine max
ggatccatcatacaattgttaattgtatcaggtatttaatgcctacaaaaatggtgagttgcaatgaagttgtaattgcaagttgagagacagactaagtaacagcgagttagtgatatacaaatgctaatatatcaattatggtcaataattcgtctttagtcctttaaaagtgaaaatactataatatagtagatgtatcttgttgtcccttaaatttatacaaatcaaacaaatcctaattgtcttattcttactggtttctaaactttatttaggtttgtggttgcattcagagaggaattctataagttgtagttgccgactttgggtgacatcaaggaaagggtaagatttaagctaggattgcctattttgagcattatttaacttttttatgcactttaagtatattccttgtttaattccactttaagttggcaccaagtaaactg

SEQ ID NO: 166751 - DNA, 343 bp, Glycine max
  unsure (1)..(343): unsure at all n locations
attcaattaagaaagagaaatccccaagagaaacgttccattggttttttgggttattttactaaaagaaattttttgattattatattaatattttacctctttttggtttccaacgtggttaccgcatgaccgaacgattggatttcattttaacagaaattaacggatattacaattcaaatgatcagtggaagtttattttattttttgattangcgagaaaacggcttaaacgatcagttaaagcttcgtcaaaacggaagaaaagaaatcaaaattgaacgaaataaaaatgaaagcccagaaacaataaataaattaaaagtctcagatttggaac

SEQ ID NO: 166752 - DNA, 436 bp, Glycine max
  unsure (1)..(436): unsure at all n locations
tttctaaaagctgttacaaactatttaaactttnggtaatcaattacataccttgtgtaatcgattacatccttttaaaatcaaattcgaaatttgtaaaactgtttcagaaatcaatttggtcactggtaatcgattacatcctctggtaatcaatcagagagaaaatatcatatttttgaaatctcaaaaagcttttgtaaaatatcctttagccaaatctgtgcaacatcaattaaggaatctttctaagatcctaggaactaagtacattgttcttcttgaatttatggattcttgacttgaatcgcactcatctttagcatcattgaaacttcacatcatatatgcttctacaatctccccctttntgatgatgacaataatctaaaatcaagataaacgatatacaatttgataatgcgtgctcacaacc

SEQ ID NO: 166753 - DNA, 422 bp, Glycine max
  unsure (1)..(422): unsure at all n locations
ctcctctctctaaaatctgattntaggcttaaataggtggccttgttcgtgctcgtgcgcttagcgtaattatggaccgcttancacacattaatgaatttcggcttagcgcgtgcctttgtcgcttagcggatgaactaaagcaatgcgcttagtgagatgaagcagtgcacttagcgaacctgtacaactcatcttcttccagagtcttcctcgcgcttagcccatgagtgttgcgcttagcgaaagctcactaagccagcagattggctaagcaagaaggtgaaaaacaacacttttcaaagcttgcctaattaacctgaaagtgggagaaaataattattaaacacacaaaatggaagtactaagtatttattacctatacttaacagaanatacttataacactacaaaataaccat

SEQ ID NO: 166754 - DNA, 469 bp, Glycine max
  unsure (1)..(469): unsure at all n locations
tactcagctttgcaagctggaatcatttatcctatcttcgacagccaatgtgtgagtcccgtctaggtattcccgaagaaaatctgcctcaccgtgataaaaaatgagaaggatgagctgattcctactcgagtgcagaacagttggagagtatgcattgactataggaggctgaaccaggttaccaaaaaggaccatttttcactgccattcattgaccagatgcttgaacgcctggcaagtaaatctcactactgtttccttgatggtttttctggttatatgaaaatcactattgctcctgaggatcaggaaaagaccacattcacctaccccttggacactttagcttataggaggatgcctttcggcctgtgcaatgcccctggtaccttccagcggagcatgattagtatttttagtgattntttagaannatgcatagaggtgtttatggatgatttcactg

SEQ ID NO: 166755 - DNA, 358 bp, Glycine max
  unsure (1)..(358): unsure at all n locations
ctggtaatcgattaccgaaacattgtaatcgattacaacattttgaaattaattggaaccgttgaaattcaatttgaaaactttttcaaaacaattttgctactggtaatcgatcacaacaatccggtaatcgattaccagaagagaaaaactctctggtaaaagggtttgtcaaaaactcatgtgctattcaaaagttttgaaaaactttttaatacttatcttgattgagtcttctcttcattcttgaatcttgatcctcattcttgacatctngaaccctgaatcttgantcttgactttagactttcttcttgagtcttgaattcttcttgattcttatcttgaactcttgaat

SEQ ID NO: 166756 - DNA, 449 bp, Glycine max
  unsure (1)..(449): unsure at all n locations
ntgngaagtacgggcggcccccatgatgtgaaaattcaaaacgagcacgccttcctgccatatggcttgcctctcaactatacgccacccaatgtggcgtacactcccaatgagaatgtcaataacttcactcctatacccattgagagccaacaaccccaaactgatcatgcacatgtctcttaaaccgtaggggagacacatgaaattccccaccacaatctagccgacttcgagccttgcctcggatatgccactgaagggcaagcagttggtggtatacccctacaaaaccctttggagggccctcagtatcacccccagctacacctcttgcattccacaacaagtaaaaaccctcgtgctatgacagaaatgggaaagttggatcatctagaggaaaggctcanggccattgaaggaggtgaagattatgcctttgctaacct

SEQ ID NO: 166757 - DNA, 405 bp, Glycine max
  unsure (1)..(405): unsure at all n locations
gcatctatggaggctgtatctttgagcttcaatggtgattntccaccatggagatgcagcggaaggcaaaggagaagagaagaggggaggcaccatccacaagggaataaaccatggaagaaggagcttcaccaccaagaatgtgccttagataaaaagcttgaagaggatgctttaatggaggaaaagaaagagagaaggggggagcacggaattgaaggaataaaagagggagagaagtggaactttgaagtgtgtctcataagacttttattcatcaaagttacaacaagtgttacacatgcttctatttatagactaggtagattccttgagaagcttctttgagaaaacttccttgagaagctagagcttagctactcatatccctctcataactaagct

SEQ ID NO: 166758 - DNA, 467 bp, Glycine max
  unsure (1)..(467): unsure at all n locations
acggacctataaaactcagcttaagggacaacaccccatgatctgcttctgattgacacctctgattccttctctggcttgttgttgttcacaataggatgccttctcttgatggttgcttttgttaaggacatagactttcagagtttctttgcctaagggtgtgtgatgcttcacatttccattgcagtgtggagattcttctttgagaggaagcttggggatcttgcacatgagtggcctaggcatgctgttggggacattgcattggccatttcatgggtcttttttcttgtgtacacatggagagagtaatatgattagttaatttatttaataactttgtaagtttttggtgcttgtggttgtagaaacaacatggcccanattggccttgtgaatgctcagattcttgacataaatggagaaccattatatgagttctgttcttcttcaaagagagaatg

SEQ ID NO: 166759 - DNA, 421 bp, Glycine max
  unsure (1)..(421): unsure at all n locations
agcttatcgccatctttcatggcggcaccctttcttctcgccattgcagatggcggaacagccatcccgccattaccacttgcgggatccattgaaaaaacagacccccaatggtaaaatcgaccctgaatggtaaatagtttttaaaactaaccccctacagtaaatttggcttggctaagtcgcaaattcttaggtctgagagaaaccccaatctttctcggggagttggcaccagccaagcaaaaactgggtggcgcataggtctctctaanaacacattactattggttcctactaaattactcttgacctttaccggtcaataataattatcaaactacacttcttcaccttacccaaaatactccctcaatttctggccctttttcattcattcattctctctccctaatctctt

SEQ ID NO: 166760 - DNA, 444 bp, Glycine max
  unsure (1)..(444): unsure at all n locations
nggagtcgttgacttcgaagactntgtcagatctcttttgttttccacccaaatgcttcattaaaagacaagatagcttgtaagttaaagttcatatccttagcccatgatttattggaaatactttactgtaatctaagttgttgatacattacgttggtttggtatcttgtttcagtttcatttaggctctatgatttgcacaatactggctttatagagcgccctgaggtaagatggtgattntcctttctaccttcttcatttaccaccagaccaaccttataattgttagttgttgaagtgcttattgctacaaatacaaatacaataagtgctaacctacacgtacgtagagatagggctttgatgtgatgggatgatctcattntggctcggtgtatttttttcatggcatctatcttcagtggttgtgcactccta

SEQ ID NO: 166761 - DNA, 415 bp, Glycine max
  unsure (1)..(415): unsure at all n locations
cattctnatgaagattgaccacatcatctaattcttctcatagnagaagattaagggtatgaaccagcgatggggcgancgcaccccnncncccnccctctttctccccccccatccccccccccctattcccccctcccctctttaccttctcctccctcctcttcccctctcctctcattctctccctccttcccctcttcctctcctccactcttcctcctcctattctcttctctctcttctcttcctctccctttatctctccctcccttctctctatctctcctcctcctctctcctcccttcccctctcctgcctcctctcctttcctctccttcttctcctctttccctcctcctttctccatcccttcttctctctcccccccttccctcttcacccacctccccc

SEQ ID NO: 166762 - DNA, 438 bp, Glycine max
  unsure (1)..(438): unsure at all n locations
nttcgactcttttctctcaatgaactgatgggtcatctattntgtgtaaaatcagccaagtcaacccaagtccattgcattttcaatctagtatgttgctcagtttggccatatgtagggttcctaggccaactggttcgattgactgatctgagctagttctaataacattaagcgccccggaggcaacaatttgggggtaagaactaaacatatataagtattttgtttaataaaattttattaaattattattattatgaattaaaaggtattttaaatattaaattaaacaaaatgcaaacttgtcaactaaattgtgtcatgtcacaacatccttaacaagtggcaactgcaaagtagacaagtgtacatacatgccattagttaatgacctangcaacaaggactcaaaaattntttgatagagaaaagtgt

SEQ ID NO: 166763 - DNA, 386 bp, Glycine max
agcttatgcgcaagatccagtccgtctagtgtgaatgacgactgtcaagtggcattccccccgtgcttatgtcgttggtgcccaggagaccccttatcctatacatgactgtgttggatgggtcgatggggtgtatgctggggaagcatgtcgtgtccggaaagagggaacgggttgtctactacttgagcaagaagttcaacacctgtgagatgaactactctttgcttgaaaagacatgttgtgccttggtgtgggcggcacatcgtctaatgcagtacatgctgagccacaccacttggttggtatccaagatggacccagtcaagtacatttttgaaaagcccgtccttaccggacggatcgcccagtggcaggttctgcta

SEQ ID NO: 166764 - DNA, 431 bp, Glycine max
  unsure (1)..(431): unsure at all n locations
tgtgcgaatcanatcactcctgcattntatctctagcatgcattttttctttctttacccactcctcacgttaggttttttagggaaaaacaccataactaaacgcgccacaaggcatccctatcgcaccagatccaaatctagaacgatgggtgatcaagaggagacacaagaacaaatgaaagccgacatgtcgactctgaaagaacagatggcttccatgatggaggccatgttgggaatgaggtagctcatggagaaaaacgtgggcaccgctgccgctgttagttcggctgccgaagcagacccaactctcttggcaaccgcgcaccattcttcctcaaacatagtaggacggtgaagggacacactgtggcacgatggcgacccttatggattgccacccaactactcaccacccatcctacaag

SEQ ID NO: 166765 - DNA, 422 bp, Glycine max
agcttcaacaattgtttaatatagataaaacaatttgtaggtaagacaatgttcatgaattgtttaatagagataaaacaacaaccaagccttttcccactagagagaatgaataacaacccttgttataacccagcaagggtcctaagatattgctactaactttccagcacattaaccttgaatgtattgagcttgaatatttaatttaatggattaaaaaggtacttcatatcaccaccaaatcagtggctaagacaatccatcatcaaatttctcattaaaaaagaaatcttgacattaatgaaatggataaactttcaatcatatgagctattcaataaagtatatgtggttccaaggtgctaatatgactggattttgataatttaaggtatcgtttgtgattataaatacatgac

SEQ ID NO: 166766 - DNA, 436 bp, Glycine max
tcaggttgctcattgactccatattgttgcaaagaaggacacatatctgaatggtgatctgcggaagaacatagaccacagactcttgcaataggtgtagattttttattcatggcaagctgagttactaggttgaccaaggcaacaagttttccttcaagatttttattttcagtagatgaagatgaatctgtggccacctcatggactcctctaaggacaatagcatcatttcttgcactgaattgttgggagttggaagccatcttctcaatcaaattcctagcttcagcatgggtcatatcaccaagagctccaccactggcagcatcaatcatactcctctccatgtttctaagtccctcatagaaatattgaagaaggagttgctcataaatctggtggtgaggacagctagcacacaatttcttgaatc

SEQ ID NO: 166767 - DNA, 424 bp, Glycine max
  unsure (1)..(424): unsure at all n locations
agcttcaaccctttcccaaaactcggcaaggtacgcgaaatgttattcccactcagatccaacaatgtcaaagatttcaaactagtccaattactcggtatcgtaccactaatatcattacctcccaaccttatctcaacaagagaatctaacttggcaacagaaggactcaaagtcccactaagattaaacttttccaaaataatcatgtccacctttccgtccccattgcaccttatccccaaccatggcccgtgacaagggtcatttccactccaagaatcaaccaaaatccaaggataccccaaccctccaagaaactccaacaacaccatcacttcaaaagcacacataaccccggcctttgcctcacaaaattcattgttctcataactcactttactcgctgcanattccgggatcg

SEQ ID NO: 166768 - DNA, 419 bp, Glycine max
tgttaaagaacttagagaagatcaagtataagcttgctctcacatcgttcgtgtgtatgatatctactcgacaaggtttgaagtagaggagaccttcaatcctatcacgcaacgtggcggaaaaaagtggacagtaaacttgaatgaccattattgtcaatgcggaaagtattctgtgcttcactattcatgttcacacattattgcagcttatggttacgtgagcatgaactactaccaatatatagatgttgtttacacgaatgagcacatcttacaagcttactccgcacaatggtggcctctcatgaatgaagcgacaattctccttctaatgacgcatggacacttatccctgacccaactacaattctttcgaaaggtcggccgaaatccacaatgataaagaatgagatgga

SEQ ID NO: 166769 - DNA, 311 bp, Glycine max
tgatagcagcgtaatggagaaggagaagggtgattggagatgccacttcaaggagaagatgagtctagaagaagctcaccaccataggaagccatggataagagcttgaaggtaagaaaagatgaatggagggagagggagaaagggagcatgaaatttaatgcctctaaagaagtttgaactttgaaagttaattctcaaatgatcaaagttgaaaaaatgcacacacatagcctctatttatagcctaagtgtcacacaaaattggagggaaatttgaatttctattcaaatcttactagaaatttgaa

SEQ ID NO: 166770 - DNA, 455 bp, Glycine max
  unsure (1)..(455): unsure at all n locations
nttgataatgattgaatgttttgttaatgaatataatttgttggtgtggattgtggaaagtatatattgaacttcaatgctagaaaacataggaaaaggaaaaagttagtatccaattgtatgtctatgagcacgtgttgcaaatatactatgcatccaattgacagtcgaataacttgggcctcgaatctcaagtgtgcaaaaatgatataagagttaaccaataatcattaagttttggaattaaagccaaccattatgcacattaaaaacaatgacaaagaagcaaacatgtactttgatgattaggagcctaagatcaacggacttttcacattctgaatcccaaaagaaagattttgaattaaacttgttgtgataaacttcatcttcaactgttccgaatttattaaattgcgtatgaaaataaagcaaagactacaatatttaatata

SEQ ID NO: 166771 - DNA, 447 bp, Glycine max
  unsure (1)..(447): unsure at all n locations
agctnttatgtgaaaggatgtgactcttcatatttgaatttgaatttccacgttcaaagggactggtaatcgattaccaaaacattgtaatcgattacagctttttgaaattaattggaacgttgtaaattcaatttgaaaactttttcaaatccattttgctactggtaatcgattacaacaatatggtaatcaattaccagagagtaaaaactctttggtaaacatgttttgagaaaaaccatgtgctattcaatttttgagaaaaaccttttcatacttatcttgattaagccttctcttgattcttgaatcttgagtcttgaatcttgatattgattcttgagatcttgaaccttgaatcttgattcttgactctaaactttcttcttgattcttatattgaactcttgaaatgttcttgattcacttgagttgttctttgat

SEQ ID NO: 166772 - DNA, 474 bp, Glycine max
ttacggaccttaaaactaagcttagacacttgttgaatcgattacatgaggttgtaatttattaaaacaaagagcttttgtctctgaagaattttttttaacttagaaaattttcttcacacacactatgatgattgttagttctttggcaagtgtaccaaatcgctcgtagtaataatttctcgataagccgagtgtcgtaccacatggattttgttacacttatatgaagtacttttcagtttgcaaattgtaaatttagtgtataaaattaaagggaaatttaaatctaagaaaaactcaagcaataaataaagaataaagtctataaaatattactaaatctaataatcctaaatacctactcctaaataaaataggggatactacttctaagaaaacccaacaataaaataaggaataactacttctaagaaacccaacaataaaataagaaacttcatacaataaaat

SEQ ID NO: 166773 - DNA, 349 bp, Glycine max
  unsure (1)..(349): unsure at all n locations
catatggccttggcatctctgttagatntacatgatctgctaactccatggatgaacatacaactacactcagacacttcttagtattcgggctggtataagataataagctaatattactcctttgaggtacccctttgacggaagtttagatattctctcaagaaattaaagaaaagaaaaagttactgaaaaatgtggatcacataattaatgcatctaaaagatattttataatctaaagataaaaaaaaatgacanattattgatgaagtgttaggttctaaaatatgaaatcctgattacctgaacaacataaataggaaatattaacatgattatatttccc

SEQ ID NO: 166774 - DNA, 454 bp, Glycine max
  unsure (1)..(454): unsure at all n locations
tgtccttagatggtttactaattctgaatgctntagattgtgctttagacccttttatgctatactaattctgaatgcttttagcttgtgcctctgaaatagtgaaatgtgtgcatgaattcaaaaaatggtgtaaacccatcagtcattttaatttactggctaagaatctttgaccgtgtgctaaatatgaaagaaatgaagaaggtgaacggaagctgcaaatggtgaagtgaatggagaaggagatgaaggctaactatgaaggagaggttgcatgaaggaagagaatatggatttctaaaaccccaaattccattactggngaaatatatgtttctagtcatgttacatgttagcaaaacaaatggaggattaacaaaacttacgcatagggagctgataaaggatccaattacaaaatattatagtttaagaacctaattatacaaat

SEQ ID NO: 166775 - DNA, 435 bp, Glycine max
  unsure (1)..(435): unsure at all n locations
agcttggactcgattgcgccaactggactgttcctgtctattccgatctttcaaagtgtgtttgttnttttgtttttttgttagattaaattaaaatgttctcttgattatgcgtgtatgtatgttcgtatgtgtgattgaatttaacttgccaaatttgcctttgggttcgagtaaatcaatgcgttgaaattctttttgaaatctcttttggtcgttacatgtttgagtgtttttactatttacagtgctgcaagttaatttcagtgaatgtccacgtttcttataaactgttttctaatgactttccaggagaagtgctggagatgaggaaaagatggtgtntctgtattttaatcgtgtaagctgttcgtcttttgtctgtggtaggaaattttttaaagaaaggggtaagggtagtggtacattatttat

SEQ ID NO: 166776 - DNA, 456 bp, Glycine max
  unsure (1)..(456): unsure at all n locations
gggaagcaagtgagatagtcgacaattntcctaatgaagttgattaattctctaacatctttttattgaatttcctaatcctaatactgatggtcttaatttaaccatattaaaaaaacaactaaaatttaagcaaattaacctttacatgatcacatcacaacaataaaccacataagattttttaatgatgcaacggctatacttcatttatacaaccgtgcatcatgcgttgttgggttatgcgatttcaagaggaatcttacaccagtttaaatttagtaatttagaatttcttttttacgaatttgtcttaactcttaaccaaaggcaatttttattttgtggtccctccctcatattctcttagatgccatgttcttgagcagatattgaacggtggtgttcatatatatcatcatatatatgcgcagcaagctntcacattaacattat

SEQ ID NO: 166777 - DNA, 322 bp, Glycine max
gcaaaccaatagcagcagaataattatgaccttttaagaaacagatacaatccaggttggaggaatcatccaaatccgagatggacaagtccttcacaacaacaacagcctatccctcctttccagaatggtgctggtccaagcaagccatatgttcctcctccaatgcagcaacagcaacaacaacaaagacaacaagcaactgaggcccctcctcaacctttcttagaagagttagtgaggcaaatgaccatccagaatatgcaattttagcaagagacaaaagcctccattcagagtctaacaaatcagatggggctga

SEQ ID NO: 166778 - DNA, 450 bp, Glycine max
tagtggacatgaaaaggttgttgtcaacttaataagtattatatcaaatcacttatctacttttgtggttttgttattgacaattttattttttaatttaacaggaaggatattgtgttacagttgcaaccactaaaaagttgttggtagccaatggatggagctatgaaggttgtccaaatgtaatagaaaagctggagacaccacactttcattcatttgctaagagtgtaggaatgaaaattcaatgtttaggtgatcaatgatatacattgtatctcttttatatactttaaatccataggtaatataagatgaaatctatatgaaatactaccatattttgtaagaattttttttctttttttggaaataacgtatttatattctgcaagacattttgtatccaattcttgtgagtttgtatgtttatggatatgttaagatgga

SEQ ID NO: 166779 - DNA, 326 bp, Glycine max
tattcctttattaatatatatgcgaggggtagaaggtgtcacaaatgatgccattttttttttgttggagctagttgaggaacctggaaaaaggatttgacaatccttttcatcaatggtcaagccatatcagagattaatttgtattatagctccacagatagggatcaccaatatatacttaaaagtttggttctttattccatcacgattagtttgtattatggaaccaaacctccacatgggagacttcattgatgattgtaaaaatcacagtacgacttatactaaaacttacctaatatataatattatttttgcggata

SEQ ID NO: 166780 - DNA, 445 bp, Glycine max
tgttgacggcttcctcgagacgcttgagtgatgtattgtgtatggtatgctccgacatggtgtcaccgagcatagagcaggttagactagaattgttatgactggactactatactacgaattaacaagctaagaggtaatttcttcttgctgattttactcaattcactggtatttatagacacaacaatagttgcaaggctaaaaaaccactaattggccaactgtgctaataactgactagtagtggagctaacataatttgtttttgatcactaagaaactctggtagtggaattaacagaaattggtaaaatatatgattgagtatcctaacacctagcacgacaagaatagcataagcaattcacacgaagtcctgtaatgggccggtttcctcatattcctcttaggcctgctattgacttgtgccctcttgctatca

SEQ ID NO: 166781 - DNA, 272 bp, Glycine max
atgggaggagggtatatgccatttttgctttaaggatagtgtcccactggtaaaattaactttccaaatggttgccttcgcaggaatggccccgaagaagcttgcctcaaagaggtccaagaaagacaaggcggccgaaggaactagttccgctccggagtacgacagtcaccgctttaggagcgctgtacaccaacagcgcttcgaagccatcaagggatggtcgtttctccgggagcgacgcgtccagctcagggacgacgagtatactg

SEQ ID NO: 166782 - DNA, 451 bp, Glycine max
  unsure (1)..(451): unsure at all n locations
tgtggtattcannaattgtaaacatttgaagttatttgatgaanagttcaggaaacattttgcaattttgcagcagtcattttgttgcattttttgtgtgaaggaatatttgtattttttaactcttatttttctatacacttttcaaaaggggagattctgaatggccaaagctgcaagagaaaccacctattggatgatgtcaacctattcaagaagttaaaaataaacgaggacaagtcaggcaagttcggcatttctcacccttaattctacccttcacatttggctttgttttctttagttttctcattaacttttattgcaatgtgtggtctcttgaccaaagatgaacttttcaagccttctccctccccttcctaagaaaattcttttcttatctgtctgcatctgcctcaacattaacacatttaatgaactcttcacagat

SEQ ID NO: 166783 - DNA, 432 bp, Glycine max
  unsure (1)..(432): unsure at all n locations
agcttatcanagaattttgtctcgcgtggtctttaaacaagaacaaagtgtgtgtaaaattaaatgtaactttgaaaaagtaaacaacaacatcagaagctgttaaaaaactgttnaggcccgatatcctgacccataaaagtaaacaaactccaaaatgaaatcacaaatccattaccagatttaaaccatgacaagtgtcacgtcctatgaaatataggtttgaaatataattnttttagtcagntttcttattatattttctttttttacatctaaaataaaaataaattttaattttaagtattaaactagtaattttgtggaaattattatttattaaatatttctaacataaatatttaaataattttttttaaaaaatgagtttccttcaatagatttccggatctgtcccgaattaaaaataca

SEQ ID NO: 166784 - DNA, 436 bp, Glycine max
  unsure (1)..(436): unsure at all n locations
tccattggtgtcttgaaacctaaggctgatgaaggacatctattaatcaaatatgttgttgtgtttgcagcttctccccaaaaagcctttggcagtcctgcacttagaagcatgcaccttactctttccaaaatggtcctgttcattctttctgccaaaccattctgttgtggagtgtgagggactgttttgtgccttttgatgcctattttcctgcaaaactcattgaactgctctgaaacaaactccaggccattgtcagttcttaaaacttttaattttgtaccaagttgatttccaacaagagtatgtcattctctgaatttttgaaaagcttccgacttatttttcanaacatacagccatactcttcttgagaaatcatctatgatggtgagaaagtatgagcttccaccatgagttttcactctagatg

SEQ ID NO: 166785 - DNA, 359 bp, Glycine max
  unsure (1)..(359): unsure at all n locations
agcttgctctanatttacattgatgtttgtatttatgggaggaggttgtatgccatttttgttttaagagtagtgtcccactggtaaaactaactttccaaatgtttgccttcgcaggaaatggccccgaggaagcttgcctcanagaggtccaggaaggacaaggcagccgaaggaactagttccgctccggagtatgacagtcaccgctttaggagcgctgtacaccagcagcgcttcgaggccatcaagggatggtcgtttctccgggagcgacgcgtccagctcagggacgacgagtatgctgatttccaggaggaaatagggcgccggcggtgggcatcactggttacttccat

SEQ ID NO: 166786 - DNA, 400 bp, Glycine max
  unsure (1)..(400): unsure at all n locations
ctggaaaatgttgttnttcaccttctcgctaagccaatctgctggcttagggagcgtccgctaagcgcaacattcatgggctaaacgcgaggaagactctggaagaagatgagttgtacaggttcgctaagcgcaccacttcatctcactaagcgcaccgcttcagttcatccgctaagtgagaaaggcacttgctaagccaaaattcactaatgtgcgctaagcggtccataattgcgctaagcgcatgagcacgaacaaggccatctatttaagcctgaaattagattttagaggaagagtttggactgggattcagagctgtgcatgtctagagtttctagagagagaaaggtccaagttctagaaagttgtgagagattttgttgtgtgaagatct

SEQ ID NO: 166787 - DNA, 416 bp, Glycine max
  unsure (1)..(416): unsure at all n locations
agcttcatgcttaactatgtatggcaaaacttcattactggtggtcaagacatacaagtgagcttgtaacaaatcttctacacttggagtgatcacatgcagtcctcttgaacccttaccacccactctgtcatcatgtcgagactcaagaagcccaacaggtttaaccttctctaagtattctgaacaaaaatcaatggcttcttctacaatgtacctctcaacaatagatgcttctggacgatatagattctntgtatacccttttaagatctttatgtatcgctcaaccgggtacatccaccgtagataaacaggaccacaacattngatttctctaaccagatgcacaatcaagtgaatcatgatngtcaagaaaganggggaaaatacatctncactggcacagtataatt

SEQ ID NO: 166788 - DNA, 428 bp, Glycine max
  unsure (1)..(428): unsure at all n locations
tgtgattgaatgaattatcccttgtacccagtttgagcttaatgaattaattgattgattgaacctggagcctattcagttgtatcttctgctaccttattttaggttgtaggagagcatcatccacagaagatggttcaaggaaaatttgtcccaaatttgggggaggtattatcaaggtaaatttgttccaaatttggggaaggcactcggtaaggattgaaatggtcaaagaaaatagtatatacacactggttctattttctgtgttaaaaaaaaaccaaaaaaaaactgtaagtataaataaagttaataagtgtgtatgctataaattcaggcatgaaagctaagtgcctaagaaaaagggcaagtacggcgaaggaatgaatgaatgaaaaaaanatgaaggttattctatggatgaatgt

SEQ ID NO: 166789 - DNA, 414 bp, Glycine max
  unsure (1)..(414): unsure at all n locations
agcttgagatgaggaagtgttgaagggtgaaacttcctgcttttattgttgaccacagagtggtacctggagatatgtcgcggnggtcaggagaccttggggacgtcaggtggggtgctattgcccaaaaccaagcttgaccaatcccgacccaacccgggcatagtcggtcagtgagaacctgtgatgtacctaaacaggcgagctcctagcagtcaacagataaaaggaacaaagaccacaaagcaaggaggcttgtggtggctggctagctgtgaaacttgattgatatgtgagatatggtctctggtaatcgattaccaagggtgggtaatcgattacaaggcttanaaatgaagacaggaggctaagatggtctctggtaaatcgataccacggngtgtaatcgattac

SEQ ID NO: 166790 - DNA, 413 bp, Glycine max
  unsure (1)..(413): unsure at all n locations
tcggtactctatttaaatntacaataggttttaatatatatattagtttgctactaaaaaaattatctagttaaaaattataaattacacaaaataaaatataaaatcatatatataaaaagtttatttgtaaataatgtttggagtggagtagcccaaatttggggtagcccaacacactttttgtaatacctctagttttcgacttctcagtggctcacacactactacacttcacgtggtgatactttactgaactgctcgttggtcataaccctcccactggtcagaatcctctataggtaactcttttcgagacctcgataatcatcccttactgctttcaggatcaatgactatccccacaaaccaacacaagattttntagcatactttgtcctcactcacacaca

SEQ ID NO: 166791 - DNA, 459 bp, Glycine max
actaagctatgctgctacatttatataaacctccacagcagcatatcctttatcagataaataattatgacctttcaagcaacagatacaatccatgttgaaggaatcatccaaatctgagatggacaagtcctccacaacaacaacagcctgtccctcctttctagaatgttgctggtccaagcaagccatatgttcctccttcaatgcagcaatatcaacagcatcaacaaagacaacaagcagttgaggctcctcctcaaccttccttagaagagttagtgaggcaaataaccatccagaatatgcaatttcagcaagagataagagcctccattcagagtctgacaaataagatggggcagatggctactcagatgaaccaagcccagtcccaacattctaacaaatagtcttcacaaactgtgcagaatctgaaaaatgtgagtgccatcacct

SEQ ID NO: 166792 - DNA, 333 bp, Glycine max
  unsure (1)..(333): unsure at all n locations
aagatatgggcctgcctatctgatcttctatgctttaataggtggaaagaagaattgagttcaagaggaacctcactcttatgatgaggtcataagcaacaaggacaattcaaaatggattgaagctatggaagaagaaatgtcttttctaaaaaagaattgtcctaaagggcagtaaattgttggatgcagatggctattcaagaggaaagaaggttttgaaggagttcaaagtgtaaggttcaaagctaggctagtagcctgtgggtttactcaaaaggaaggagtagattntgtagaaatcttctcacctatggtaaaacatagttcaat

SEQ ID NO: 166793 - DNA, 456 bp, Glycine max
  unsure (1)..(456): unsure at all n locations
tcttggtggttntgcgtggtcatgtgaaacaagggcaattttgtataagagaagttttcttcgataagttaaattaaataaatatattataaccaaatatgttgacaagtgtcactaatcaatatttcaaaagatgtttcggttacctttggtcttttgtggtagattttagcttcagtatttaaatattattaacggtgataactttaaaccaattgaaggaatattatgaatcatcttaaaaggataaaacaactaaaataaattcttaaaagaaacgatcaaataaaaaaaataagataaaaaataaaataatcatttagtcaaatatagaatacgtggaaagtaatattcaaacatttcatggatgttcgattcgatttctcttanataatcgattattttcattaatatcatgaaaattaaaaaaaatacaattatctttataaatntatg

SEQ ID NO: 166794 - DNA, 390 bp, Glycine max
  unsure (1)..(390): unsure at all n locations
cctgcggcatgcaagcttctataaaggaagtttattaagtntcccatcattggaggaatttgtcagaatctcttgcgagtggatggaaacattatgtccaggtaccctaaaagcagacaagttggttcaagttcaacttgaaccaaattggaggcacttagatcatatacaacaacatcgccttatcttactaagtggggtcggcgactggcactcaaatcctatcaaattggaaaatgacctgaactctaccatgcgggaggcatttagggaaaaggtatgttttcaattattttgattagatatgattgatattggtgtatgttggtgttataatgcaaaatatacaccgctaattaggttaattagattcatcttcaaattaacttt

SEQ ID NO: 166795 - DNA, 455 bp, Glycine max
  unsure (1)..(455): unsure at all n locations
tctgagctntgataattctttaagtttcaaacaattgagatgctgaaatattatctcattctcgtgattcatccccttccttagacactatctcttcaatttaatcacaccaacttatctcaattgttttgagttgacccaaacttttgggtgttgaggatgtgaacaaatatagcagtgttgcaattttttacttccaaaaatgtcaaattcgagaagggcactgtgcatggttccaaattatgcaacactccgcttttatgaaaattcgtagcattattcttcgaataatacaccacaacctattcataaattctctcattctatttcatccccttggttaaagatgatggaacacaagacttacccaaaataaaataaaacatgccagaatagttgaattggatacctttaaactaaaagtctaaaacataaccttttgtgtttgtgtgttg

SEQ ID NO: 166796 - DNA, 339 bp, Glycine max
gcccatagggcatcatccaacttcacaaccaatccttccttgaggatgcaacaatattctccagaattttcttcaattctttggtggatacctcggcctggccatttttctgaggatgataaggtgaaactaccttacgtttgacattataatgcccaataccttctacaactatctattgcagaaatgtgaaccctatcactgattatcactctggagaccccgaagcgggagaaaatgtttctcttcaggaatttgatgacaatcttggcatcattctttgaggcaaccacaacttccacccacttggacacttaatcaacaaccaccaagatgtac

SEQ ID NO: 166797 - DNA, 442 bp, Glycine max
ctcagcttaataatcctgagctggagtgagccatggatcccaagttccctgtgccgtagtgacggctactacataatcatcgtcaatatctgcctttgctgcgcctgaaactccttcctcagcagcctccactggtgtgtcctgagcctctgcctctgcctttggggtatccttagcctccccagcctctggagtgtcttcagcggcctgtgtttgtggctcctgggccacaagagcctcacccccccaaaaggaaggctggactccagaccaagctacctgtgccaagaagtcctccatgctcatgatcagccgctgctgagataaattctgcatactctgcatgaccaggaaaaggtcgtgatgaatgctttgtagcatgggcacgatagcagcactgctaggtacgaaggggccggttggagctgaaataggtgtggga

SEQ ID NO: 166798 - DNA, 461 bp, Glycine max
cttagagccacctgcctgcatgcaagctcgcctcaaagagatctaggaaggataaatgcggtgaaggaaccagttccgctcccgaatatgacagcctccattttaggagcgctgagcaccagcagcgcttcgaggccatcaagggatggtcatttctccgggagcgacgcgttcagctcagggacgacgagtatacccactttcaggaggagatagttcgccggcgttgggcatcactggttacccccatggccaagttcgacccagacatagtcctcgaattttatgctaatgcttggcctacagaggagggcgtgcgagatatgcgatcctgggtgaggggtcagtggatcccgttcgatgcagatgctctcagccagttcctgggataccctttagtgctggaggagggccaggaatgtgagtatggccagaggaggaaccggtccgatgggttcgat

SEQ ID NO: 166799 - DNA, 454 bp, Glycine max
  unsure (1)..(454): unsure at all n locations
tctacatgtctagggttttctagagagagaaaggtccatgttccatagagtttgaaagattttgctgtgtgaagacctgcagagaaccgagcttgaagaggaagctgtcctgagagcttgagatgagtttgtgagtgattgtgaggttctaaaggtggaggagacatccttaccacttgtatttcttcaatccttcatgtttctcttctctttgttgcaaaggaagtttcccagttatggagagctaaatcctttgttggntcttccttgtaggtacttggtgtaaatacctgtatatctatttaatgatgctttgtgtgttcactgtgctatcaaaacttcattctaccatgcttttgccttgatcacgtagatgcatgtgtttttaggatcattcatcagtggaaactggtctgattcttagaacttgataggacggcgctagtttatcata

SEQ ID NO: 166800 - DNA, 271 bp, Glycine max
agctttgagtaataatttttccatcaatctctgaaatttagaatgaaatgtatgaatgaggactgttagtcagcgaataccactaacttttgtgataaaacttgtgtaaattgtatcaaactcttccaatttatggttattttgtagtgttataagtattttctgttaaatataggtaataaatacttagtacttccattttgtgtggtaataatcattttctctcatttcaggttaattaggcaagctttgaaaagtgctaattttcacc

SEQ ID NO: 166801 - DNA, 444 bp, Glycine max
  unsure (1)..(444): unsure at all n locations
tcattcagatggattaaaaggctcaatgttcacatgtctttcatgattgggtcacgattctcatgcctttcatgataatagtagataagcctatgttgtatcaaaaggctaactgctataagggcaacgagattcttattgaagatgatgtgtagatgctcctccaattagataagagagcttgtcttggaaggttgttcaaacataagcttgaatctcttaagcagaaaattgagcacactagtatggattggtgtgttataaagaggttctataaactgaaagctcactattaaggtctggaaccatttatgttgtaaggcgtttatcatgcagaaagcgtttatcacgcagtaaggcgttattatcatactctaaaccatttatgctctactgaggagatttctttcaacatggtttgcccatggactanggagtttcatg

SEQ ID NO: 166802 - DNA, 411 bp, Glycine max
  unsure (1)..(411): unsure at all n locations
caagctacncttcaatctgcctatacatatattaatatgcaactactccacagncaccgattcaaaattggggatcagtggggtcctttgacttcaatcttttggtgatgattgaaatgcaaattcgcaatcatcaaagttatcacctgaccaaagaatggggccatgcacctagatcttaattcaggacggatgtaatcagttcaagacttcaaatacgttctagtatttgaaagttagattagacgtgcatgtccatcacatgttagaacatagttttcaggtaaggaaacaaattanaacaaatcttgtgcgaatcttaatgaatatgaagccgggtttctacggtcattagtggacattccgtagtcggcaccttatttactttttgaaatttgggttcacttttat

SEQ ID NO: 166803 - DNA, 437 bp, Glycine max
tgcgaattgctgctggtctgataacaacatcaattctatgtttttatttgcaattcctcccattacgcgaatggcactctcacgtgatacttggataaccgtattatgcagaaaattgagagattggtggcaatgggtaattaaacatttttttaaaagcaaagcacgctgataattcagaattcagaataatataacattttgcagtttcaagagctaatatgaaaatggaattcaaatgcaggttgctgatggggatcttcctattgttgcttcacatgggtaagtaatcagttagtcttgcaatatctaaaatccactttatgtgtttaccaagtctcatgttatgctgatatggcagaatggaggttgaagtatataaatcacttgatccaggggttcgtgtggtcatcttaaaagcattatgtgacattcgt

SEQ ID NO: 166804 - DNA, 427 bp, Glycine max
  unsure (1)..(427): unsure at all n locations
agcttctcaagcaagctttcattaagtggtatatagcacaagagcttcaagtaggtgctctttaaacatccattaattntcagctttaccttctcctgcattgttgnttcttcatatttctccatgtatctcctcacatgtctagtgttgaatgttgttaacaatgaattttagaatttccaccgattaaacttgctatagaagctagatttgattttctatgattcaaatttcttgttcttgctcttgaatcatgaattgtgttgagtttagattcctttgagttttgtattgttattcgttctggctgaaacctaaaccatataattcttacagaaacattaaagtataagacaacctcanaaatctagagtgacatgttcatctattatagttntgtcgtagacgtcatgtctagtcatgaaac

SEQ ID NO: 166805 - DNA, 429 bp, Glycine max
tgagtgagagagtgcaagtgggttcgagggtcacatctgttaacacaaaggcaaacacacttttaagcagaaattctatgagggtcatagaaagtcgaacagaaatataaaactaagcgaggtttgagggagtcattgaattcaaaccttcgagggaatccacaacttggacaaagatgaacgtaagtaaataagaaggttacactcgattgatacgaagctaattaatgattttgggaataataagtaagattattcaaagacggtcttatataaaaatcgtctttgtactagcaatacaattatgacgggttttgtcaacctggtcgtgtactccttgttcaaaggttaaactcactattgaaaatggatattcaataatacgcatcatatacattcgttaaaagtactacactatcaccacctata

SEQ ID NO: 166806 - DNA, 278 bp, Glycine max
  unsure (1)..(278): unsure at all n locations
acacatgcttctatttatagactaggtaggcttcttgagaagctntcttaagaaaacttccttgagaagcttctttgagaaaaattccttgagaagctagagtttagctacacacacccatctaaaaactaagctcacctncttgagaagcttccttgagaagctagagcttagctacacacccctataatagctaagctcacccccgtgacaaanaaacatgaaaatacaaaaaaaatcctactacaaagactactcanaatgccctaaaatacaag

SEQ ID NO: 166807 - DNA, 434 bp, Glycine max
  unsure (1)..(434): unsure at all n locations
ntctcccaagtcctaaatgacatttcaagctagtattaactcactntaacctccatttaccacagaattcagacttaaccttccaactctcaaagcctcactctttttccactcataacatcacattctcactttctaaccctaggttaactctaccattcatctctaacagttttccataagcaatttcagcatataaacatcacaaacatcatcacaaaaaccctaaaacagaatgggtatatctaactcatccaaacatggcaatttcaacaagctttcaacaaatgtcttcacaaataatcatcacacagcagaaacctagcaagactacccatcatatctccccaaaccccatacccacgaaaattaaaggagaaagaagtccacccaaacctgaattttcgaagtcccactcgtagccacgcacttca

SEQ ID NO: 166808 - DNA, 434 bp, Glycine max
  unsure (1)..(434): unsure at all n locations
agcttcgggagttgtatttacgcatggggaaggtattagcaccccacacgtctgtcacaagggacgacagcctttaatcaaatgtgcaaacatgacttcaatttttatgttcccttttacgtctttatttctttttgtactttttatatttttatctttttgtggncgacgagggtgtttcccttgctcctacgtattcctcaattgtgataaggaaatcagacctacgtagttcttttgtgaacaaagcgttttggttaagttatttttttatccttttttgcaagatatgttnttattgaatgaaaggtcatttaaggcgttggaccattaaacaatctttcgtttcttttaanaagtgagaaaacattaaggcattggaccattaatgatttctttatttttgaaagaagtacacaggtacatatcgattt

SEQ ID NO: 166809 - DNA, 412 bp, Glycine max
  unsure (1)..(412): unsure at all n locations
tcactgaattgctggtcttattgaagaacatgcttctctgatcaaaacacttttccgaanaatcactacgaggccaaaaagattttgtgtccagtgggaatggagtacaagaagatccatgcatgccctaatgattgcatattgtatagaaatgagtatgcagaactacggcaatgccccacgtgtggggtatcatgatacaaagtgcaacatgatgaattaactgatgatgcaggaaccaaaaattgtcgtcctgccaaggtgtgttggtatcttccaataataccaaggtttaagcgattgtttgctaatacacatgatgcaaaaaacctttcatggcattcggatgaccgaaaatctgatggattactgtgacatcctgccgattcgccgcagtggaagacaattgatc

SEQ ID NO: 166810 - DNA, 423 bp, Glycine max
  unsure (1)..(423): unsure at all n locations
agcttatgcggcattntctacatgagtatgactttgtttgctntatttcaatatatatttatgttaaattatagcttttaattaagcacaaagctaacatgcttgttgaaggtgttttcacaatataccaaatgacatgctatgcctttatcacccgtctttttcaatatgttcgtgagtttgaataaattccacaatgtgttttatgtataaagtaactactatcaatatcaaagaggtaataaaaattaatgggacacattttggtatgttccatagttaaaactagtgttacttatatctgccccaaaatagtgcaatgtcttgagtatctattccaactttgctatacaatgtacttgtattgaatttgccactttcatattctttgaagccataattttatgtgcctcttaatatttc

SEQ ID NO: 166811 - DNA, 447 bp, Glycine max
  unsure (1)..(447): unsure at all n locations
ncgcttcgtgaccaggtggtcttcgtaatagaagagacatttggctataagcctgtgcttgtttggagagatcgtcataaatgattaaagtgtgacgttcatggtacataaaatattcaaccagagctactcctgtctaaggggcgaagtattataatgtagttggagaatccactgtttcagctactacaatagtgtattccattgctcctcttttttgtaaggtattcaccacttgagccacaaaagatgctttttgaccaatagctacataaatacatattacattttgtccctgttgactgagaatagtatctgtggctactactgtttaacctgtttgtctatctccaataattagttctcgttggccacgtcctatggggatcatcgaatcaataaaataagtcctgttggagaagctcatatatggaacgtctcgaatan

SEQ ID NO: 166812 - DNA, 273 bp, Glycine max
  unsure (1)..(273): unsure at all n locations
catggggaatgcagcaataggtggtgttattccgtgttaaaatcggaagatgcttcattactcaagctaaactttgagccattgtgcttggcattcaagttgaaatatccagaggctttactgagttattagtggaatgtgattcaaagtttgctatttctctcattcgagatggttgtccttctacacacttatgttatcagggggttgcaataatcaatatattcgtgaatgatggcggagtnttccctcgatcccttttttagtcaggca

SEQ ID NO: 166813 - DNA, 457 bp, Glycine max
ctcagcttcttatccaggctcatcttggtggtgaagctccttcttctatggcttattctctagtggatggcacctcctctcacctcttctcatttgtcttccgctgcatctccatggtggaaaatcaccattaaaggacctaattgaagctcaaagatccagcctccatagaagccacacaagcaagcttccatcaagtggtaatcagagcacaagagcttcaagtaggtgctccttaaacctccattaatttttttgctttaccttctcttccattgttgtttcttcatttttcaccatgtatctcctcacatatcttgtgctaaatgttgttaacatgattctttagagtttccaccgattaaacttgctatagaagctagatttgattttctatggttcaaatttcttgttcttgttcttgaaccatgaattgtgttgagtttaggttcctttg

SEQ ID NO: 166814 - DNA, 241 bp, Glycine max
  unsure (1)..(241): unsure at all n locations
atgaattccaccccctacaaccacaattccagcatgaatggtggaccttgcatgtggacaactcctctaatcaacatggaagtggagctaggataattttgaagggacccaaccacataactttaggataatcactacactttgattntcaaagccagatgtaatcaggtcaaatacaaagctcacctagaaagcttaagattggctaaagaagttggaggtcgtanggttaactaccaaa

SEQ ID NO: 166815 - DNA, 453 bp, Glycine max
  unsure (1)..(453): unsure at all n locations
ntgcgagattcctcacggaaaacgttacggaaacgtttctgaagcgcctcggcttagattttcttcacggaaacaatttttccaagcaaattcgaaagagagagaagtgcctaaggggctggacccttttcttcttcacttcctcccctatttatagcaaaataggggaggtggttgccgcccagctcgcccaggcgagctcagctcgcccaggcgagcagggttgcttcctccagaagcaaccgccttctggaggaatcttctggagggcccaaatgggcctgggtgctatttgcacccccatttttactaagtacacccccctctgctattttttggtgattcttttttcgtaaagttacggaaacttacgaatttcgtaacgatacttgttttctttccgtaatgttacggaaccttgcggattacataatcatcccctttntgacttac

SEQ ID NO: 166816 - DNA, 418 bp, Glycine max
  unsure (1)..(418): unsure at all n locations
gattacatagagggtttcagggacttagctttgatttacattntgaatttcatccaaatttttgacaagtcattgttacttccatcaatattgatattggatcatgcttaattatatgcgtttgcttattctgatcattgtgtgttgggtgattatttcttccatgcaggtacatgattcctatttgttgtgagagtgaaatgatgggcagcagcaccaactgaggtgagtgtatatttccttttttttttgtctttatctttgctagtttgctatatattttttattttatatgtttgagttttaaatgtgtaaaaaatagaaatagaaaggtttgctatcattctttgaatgccatcatctacctttaatgattgacatctaaattggtccctgtttaatcgaattaattagttat

SEQ ID NO: 166817 - DNA, 455 bp, Glycine max
  unsure (1)..(455): unsure at all n locations
ngtctctacagaagaaagaaacaaaaataagagtagattcattgtagataattctttgcagtgatcaagaataattatgaaccaaccaatcaatcaacaagcataaattgaaaattggtcccacattctaaaaatggtcatctcagtgcttcaaaaaaatttctcaaaagaaatagaaagtacaaaatcatacataaaagcttagaagcaaagtttgagggttttatcttacttttgatatcctgtgtccacacctttgctggggatgaaccaatttcttcatctcccagagtgttattccaattggcactttctttcttcaaatgaccaagctcgctcaacaaatattcaacattgatgtaatggcattccctccgagtcttccagaaaaggagttccacaaacaagagggggtgctttttcattntctttagcatctttctgaccaaacaagt

SEQ ID NO: 166818 - DNA, 446 bp, Glycine max
  unsure (1)..(446): unsure at all n locations
gcttctgtcagcccagctttgcctcttgttattgttacgattgctgagatgtgtgcgtcacgtatcaaacaaatccatggacactgatcacttgatttgccactaattttgaaagaaggtcgtcatgactcattcattcttcacgaaaccacctccttcagccacctggcagtttatcatcaactgtgggggtcccgctcttcaatttttaaggtgtcaaatgctgatcaaacatcacactaattaattaattactactcgagtcgattgctataacctaattggcggtgtttaaatgttggaagcaagggtattgaaacttgattcatttatatcctcaacaaatcaacttcccatcaaattaaaaagaanataatatattttacaccaaanaagaaaaggaagggacaacgtatgagtttgagcagtatcatcaatttcattca

SEQ ID NO: 166819 - DNA, 473 bp, Glycine max
cggacctatgatactcagcttgattaatatgctaattgaaatagtgtgtttataagttattattcaattttttttctattaatttcaaaaagtggcatttttttaccatcaaactaatatcttcatttaactttcttttttttatgaaatatactttacataataataataatgaaggtcgattgtattatctaaagagattgtttggttgaaaaaagaagataataattatgtttttacattttcaaaaacataaatatccagggaatagtttatttatttatttatttattaaaaacctaaaataacaataatgagatgaaaactggcttcatatttggctataagtatgtggcagcagcagaggcaataaagttaggaaagcccttggacccttcctgcttcctgtttggaatttggataccttactcggccgacagtggtattcatttattactcgatagaattattat

SEQ ID NO: 166820 - DNA, 402 bp, Glycine max
  unsure (1)..(402): unsure at all n locations
catgcaagcttgagagctattcttcgaggaggctngattaaagataaggtataaatagggagggcagtgaggacagaattgatgagagtaacctttccagccatggataanattttctggttccatttagacaatttatcttcatatttcctgatcagcggttcccacaccatgctgttggtggacttttccccaatgggaatgcccagataatagaaaggaatctccatatgtctatagttcaaaaattctgctgcctcatgaatccagttgacctcagctccaaagatcccaacttgactttttgcaaagttaatcttcaatctagatgccaattcagaacccctcagcatagacttcaaagcaataacattatcccatgaaacatgccccacaaatact

SEQ ID NO: 166821 - DNA, 411 bp, Glycine max
catgtgtggcctcattgagtgcttgcgcaatagccttggcttgattcttgttgatgctgtcctaattcacaagcatatttggaaatgaactatgcaatattgatcttataaacttctagccaaatggacttaccttgaattaaattctttgatagcccctttgagcctatgctcccctttctttgttctgaagctcattacaagccttcagtgaaaaaccatgatatcaccttacccttaaagaactttggagctttggaattatcttgggaactagatgggactaagtgcggcggagggtatgtttcattgcaagatatacaatgtggccatgcttaacgttatattttggccatgcttgatgtactatgatatcgactagatcttgctttaatcgtcaatggacgactg

SEQ ID NO: 166822 - DNA, 361 bp, Glycine max
aaagccatatcttgaggatcataaaaaaagactttacctagcttattttcaattggcaaatatgactatgctctattcacttatatttcagaattctctttcgaaaaaaaaaaaatgatagtgaaatcacgaaatactaacatgaagagataatgtagaagtaattttgctcaatttcttatcatatacttacgaattcggaaacagtcttgttgcatatgcacgggtaaaggttatgtacaatgaacctcctccatacctttgcatataccagttttataccaattgattttgcatgaacggatttcatccattagttaattacccaactatgggctatatatgaaatatgtgaaaagct

SEQ ID NO: 166823 - DNA, 429 bp, Glycine max
  unsure (1)..(429): unsure at all n locations
tatctgccaatccttgtggngggactctactgcctcttttatattgttccctcagtccacacatctggtggtttgctttgcatgtggaacaactcagtttttgaggtggataggagggcgaaaggtacaaatttcttaatgcttgatgggaggtgggctaaggataatcagacgctgtacattgttaatgtatacgccccttgtgaccttgctgggaagagagttatgtgggaagaattgaggcagttaaaggtttctaaccctgatggactatggcgcttccttggagatttcaacagcatcacatgtcacgaagaaggaattggttcatcccaaaggaatgctgacacctatgacatctctgctttcaatgactggatatctgacatatagcttcaagaaattaaatgctttggtagcaggtttact

SEQ ID NO: 166824 - DNA, 402 bp, Glycine max
  unsure (1)..(402): unsure at all n locations
agctngngcgttgacttataaactaanattttaggcttgaatattngngcattagcataagactgaaactagtatagtcataaacatgtaccacatggaaggttatcttcaagtttacttactactatcttcgaagtctattgaagccttagccaacttagttgcccacaaggctaaagccataatagtagatactagtcaacgtgatcattgaccttgccatctcctccaccagaagggtgtcctagctccctgtgaatgaggaggtgtaagagtatcaagcattgtttccttctcttttggggtcaatggaacacctctaacaagggttaaagccatgatatggacattagtcttttgtttatgcctgttgtaagcccatactcctgcagctgacctgca

SEQ ID NO: 166825 - DNA, 446 bp, Glycine max
tgaactctagtgtgtgtgtgtgatgtgtgcaaggtttccatcttgtaagagttatgtacacttagggtgcgtttgacctattcaactctccccttccttttattttttattgtattgctttggaatgtgtaaaacctccgtccagtcatgctgaaacgggtttccaaacacacacttatccactaacaagtgatatagtttcctgagtgtaagtctaatttagttaatacagatcaaatttcattttcttccattatatcgcttcaaaacaattgtgttgacgtacacacttgaatccaaaaacaattgtattgacgcattcttacgtgtatctttgaaagggaaataaagagatccgtcaacactgaggacgcgttcggcaacggagatatctttttatatttgaaaaataccatttgtgagacagtctatctatcggaatcttg

SEQ ID NO: 166826 - DNA, 378 bp, Glycine max
  unsure (1)..(378): unsure at all n locations
agctntaaaggaaatctatattngnctcttgtcctatnttccttgcaatggaattttgttggattgctgctcactcctttgagtattttgcaattggtatctctatttagatattttctgagagaagaggtcaatggaaggcagcagctcaatcccaggaatttattcgaacactacagcgttattataacaacacatatttagatggtgataagcaaaaagcaattaacttgtaagtcaaataagccaattttttatttgtatttacaactgttttcatatgtaatatggtttacagcaaacacaagttatgtatatatgtgattgcattataatgatttactaattggtgggtctgattttgtttggttcacactc

SEQ ID NO: 166827 - DNA, 438 bp, Glycine max
tcaacgcagataatcacttcctaacattacgcagggttatacttatattggcttcaaaatcatcaacttatcatttaacaataactaatgttttgcattaaagaaatgcacactgcacaatatcatcgggatttcagagaaatggtgaacaacaaggaatgacttaaccaaattatagtgatataggaatatctctaacttgcatttacaaaccctatagatactcactatattaacctatacattatctgcatggataggcagtctgcgcctgttcatgaaagtttacaaataaaaaagaccatcaactgatccaatatatgtcatttgatgatagaccatctggttataataattctatttgacaacaaaatactacatattaaccataggttacacaaactaacactagcacaaaataagcttaaatttcaaagt

SEQ ID NO: 166828 - DNA, 428 bp, Glycine max
  unsure (1)..(428): unsure at all n locations
agcttgtgtgatgaatataaacgaactagatacaacccccatatgtttgactntcttctttcgtggatcaagatgacaccaccatattacggtcttgctaggcctgtcgagatntatcaagtgttgtccaattttgatgtccagtcggaggattntaaggagactttacctgctgccaagtcacctatgaccgtgctcacggtaactcgcactttcccattagggactagatgtcctctagtgctagagattgctgtgaaacagggtacatcgtctgaagtagggattcgagcttattatttgaaggaccaaaaggatccagagctgatggaggaggacacagaggagactcctaacggcgatcttgctaggagttcagtgtagtttgattgtttgagtttgatgggttagacagtgcggtacaatgg

SEQ ID NO: 166829 - DNA, 456 bp, Glycine max
  unsure (1)..(456): unsure at all n locations
tgtaggattatggggtacccatcacatgtggtactaggtgtcggtcgggcgatggtgcacaacaagttttccaaatccacaatgcgcgcataaacccaccatcccctgtagcccacctccaactgagctcacgtactcccacgtagcccatatcctcgtttctctcaacaccgggtccccatcaatcctcccaaacttccccaacatcaaagcaatacaacattcaaacagcaaaaactatcacagccaagaaaacagagcaaaggcagaaaactctgccaaaacaccaaccaaaatcacagcttttctcacttaaagaccccagtaacaattccttcgttccaattcgttaaccgttggatcgactccaaatttttactggaagtctctagtacataagcctacattntgaccgttgggatctactagcaaacatccagaactcattctgcactg

SEQ ID NO: 166830 - DNA, 420 bp, Glycine max
  unsure (1)..(420): unsure at all n locations
agctntgaccaaaccccagtagcagttgttttcttagagacttgcctcagcaccttgtctctgagattaaggataattgcattgtgttccttctgcaatagtgctttcttatccccatcagccatcatcttttcgagtttggcttctccatcaagtgcttccaccaggccctgctgaacaagaaaagctctcatcttcaatcgccataacccanaatcattttgccctgtgaatttttcaacctcatacttggccgagcccatttcttgaatcgaactcaaaatcgatccacactcaccgcaccaatttgttgtgccaagatcagattttacttcacaaaagaatgagtttcttgtatgaacaagaataagcaaaatgcagaaaaatgaaccataaactgcacagaactcacaacagtca

SEQ ID NO: 166831 - DNA, 397 bp, Glycine max
  unsure (1)..(397): unsure at all n locations
tgctcaagattccttattgaatttgcaagttttttgaccaatgaatattttgaaagttataagacaatttggttttgagaggataagacaatgttgttcagaaaaactctaaggaatttcgtgtcccaagtcacctatttataggcctttgatggtcattcaaaagctntctgaacagttgtgactcttgggagttatttttgaaaattccttactggtaatcgattacataactgttgtaatcgattacacagttagtttttgaagagttgtgactcttcaaacttgaaatttgaatttttatgtctggtaatcgattacacaaatggtgtaatcgattacaggcttttaaaatttaaatttaaatttctaanagttggtacaaatagtttaaact

SEQ ID NO: 166832 - DNA, 420 bp, Glycine max
  unsure (1)..(420): unsure at all n locations
agcttatcattaanataaatctaaatggntgatgatgccatgatctatatctttcaatttttgtatgattacttctatgatatgtctaaaaagatttgattgattgctcatgattttcaaaactattatattctattttcaaataaaattattttgatatattaaaactttctatgttaaacaaaaattcatcttggtaagtgttgatattttttttacacttagtttttagaaaaaagtgtctagtaatcgattaccttcacatgtaatcgatacaggcagttaggttaagtgtaatcgattacaacattccttgaatcgattacagagtgtctgtgtctataaatcaaaatttcagaaattgcgagaacgcgatttctccacaacacgaccctaaaattctaaacttagaactcgatt

SEQ ID NO: 166833 - DNA, 440 bp, Glycine max
  unsure (1)..(440): unsure at all n locations
ctntagggtttccaaactgtgttgtcactgcaattatggtcagattagcttcatttatttataatttttcatttcaaatttacaattgtgaccactatttaatttctcaattggagtgactatttaaaattttctagtaaagatattcgtgatctcatgcatcatgattggaacatcttcttccagcatatttatagaaaaagaaatcagtgcgttggttggcttgctaaacatgaagccacatctaatgatagtttcaagtttttgagtgtttgaacttcccctcttgcctccgtgtgtttggtagatgctacgagggtctttaagttttctgtttctgttttgtttcctcctttcctatgtgtatatataaaaaaaaagttgttggagggactatagtttcagcacttctcaatttttaaactataagttttgaactt

SEQ ID NO: 166834 - DNA, 421 bp, Glycine max
  unsure (1)..(421): unsure at all n locations
agctntanacaagaatatataacaagacattatgaacaactgtggcagtgaacttcccgtttacatgatgataaaagtattgaagagaaaataagacaaaaattcgaagacaataaacaggtaataatgaactaaccaaaatgaaaaaaaaaaaatgatgaatgaacaaaatagagagctgaggttgggcttcggggccttgcagatgcaaagaagatggtgctaagccagcagctgagtctgtgatttggttaacgagatggtagtatacatggggaataggttgcatgatcagtgactgagaggggcagactcgagatttaatgattcgggccaaatatgaaaattaaaatttatttaataaatatattaattagcatcagaattcatatattatgtatttaattatgtgttcttcaaa

SEQ ID NO: 166835 - DNA, 436 bp, Glycine max
  unsure (1)..(436): unsure at all n locations
ntactttgtgctgcatcgctacatgaatactttatgtttgataacaatatatacatttcaatgtattaaaaaatattgcttatgtttctcacctacacatatcgcctcctattggttacaggtaatactatttgagaggcattggaaggtaacgcacatttctctgggtgttgcttcagtgaagatacattcatacagtttttaagctagcatcaccgcactacgggtttgtatgttggcattttacttaattggatattagaattgtgttaatatatgaattatgattattatcaaattgtatgcattatgagtgaacctagcttcctgtttgaggttcaatatagtgagtaatatggacaagttgcgataatcattgtttcgatattgaatttccattggacaggttggaacacttattttttacttattctag

SEQ ID NO: 166836 - DNA, 397 bp, Glycine max
  unsure (1)..(397): unsure at all n locations
gaagctctaatatcttccacactttttggtgtgggccattcttggatggccttgattttctcagggtccacttggaccccatttctaccaactaccaaacctaaaaaaactatattatctacacaaaaggtacacttctctatatttgcataaaaggtgtttttcctaaggactgaaagaacttgtctgagatggtctaagtgatcatctagcctcctactatacactaaaatatcatcaaaataaacaactacaaatctacctatgaaatcccttaagacatgatgcataagcctcataaaggtgcttggtgcattagtgagcccaaaaggcatcactagccattcatacaaaccaaacttggtcttgaaagcagntttccactcatcaccctttt

SEQ ID NO: 166837 - DNA, 415 bp, Glycine max
ggcctgtccgatgcagcagtaatgatggcccgagttatgtttgttaacggttacgaacccggaatgggtttaggcaaagacaacagcggcataactagcttgataaatgcctaaggaaatcgtgggaagtatggtttatgctataaacccactcaggcggatataaagagaagcatcgcggaaagaaagagcggtggtcaaagctcgcggttgaggcaagaaagggaaagaagcccgccctgccacatgagtagaagctttgttagcacgggtctgggagacgaaggtcaactggtcgcgatatacgaagatgaggatccgagtacattggatgtgagacaaccatgccctgctgaattctagctgggaaaatggcgagtggaggaacgcccctgcgtctacgcaacgagcataa

SEQ ID NO: 166838 - DNA, 394 bp, Glycine max
ttaattgggcaccttaaaattggaggcttaaggttggaatccaaggagaagatgatgagaggactaccctttattaacccccgtgaataactttgggaaggatggttacttggaaagcaatttaaaatgaggttttccaaggaagcaaacttatgagctaagaagccacccgagctaatacatgctgacatctgggggccaatcaagccaagctcactaggtaaaaataactatttccttcttttcattgatgatttttcaagaaaaacatgggtttatttcttaaagcaaaaattaaaagtcttttcttgcttcaagaagttcaaagctgcagtggagaaagaaaatgatcaagatatcaaagccatgaggactgatcgaggaggataattca

SEQ ID NO: 166839 - DNA, 453 bp, Glycine max
tcggaagaaagtgatgaggtacaagccctaaaggcagagcttgttagagtccgagtagtcgaagagaagttcaagtccatagccatcaaaagtctgaaaagagtatgatgaactaagggacgtcaatatggccaccgctgatgccttggaacgagaaaccaagaaggcccaaaaggaagaacacgtgccagcaaagttttgaggggctttatagggcagcaatagtaagctcaagctccgaagaggtgaaaggaatcatcacgggtcaaaggcatgatcttgaaggacgagctaaaggcttaccttatgtcgaaaagaaatttgtcccaacagttaagcgagactgaagggaatatgtgggccgtcatcgatgagtgcaaagagaagctaaatctagcggcgactcacgagcaaaggctagaggatgagtacgccaagatatcagcagaaagc

SEQ ID NO: 166840 - DNA, 369 bp, Glycine max
  unsure (1)..(369): unsure at all n locations
agcttcttatccaaggcttatcttggnggngaagctccttcttcgatggcttattccctagnggatgacgcctcctctcacctcttctcctttggcttctgctatatctccatggtggaaaatcaccattaaaggactttattgaagttcaaagatccaacctccatagaagctccacaagcaagcttccatcaggaggtacgctagggaagttactttgtttgtgggctggtttaggcctaacaatattaatgtctgaagcagtaagcgagtgtgtgattcgtgccacgaaactgaacggccaaggagaggagtgggtgtgtgacccgcatcgtggagcaatcaagggaggtgttaaagacggtggcg

SEQ ID NO: 166841 - DNA, 370 bp, Glycine max
  unsure (1)..(370): unsure at all n locations
tcttgcgtagccgctcttgggctcagaaatctanaaacaaatccctcttattactagcttttttgaattctttagttcctgaatgtacaaccttcaaattgttgttcattgtaaacagcacaaagtggaccttgtctgtctccaagaaaccaaaagggagaaatttaataaaagtatttgccaggccatttggggggactcgactgcccattaggattatgttctttctgtgcaggctgctggtggcctattatgtttgtggaataactccatttttgaggtggataggagagagaaaggtagaagttttttaatgcttgaaaggacatgtattagtaataatcagaggatgatgattggcaatggctat

SEQ ID NO: 166842 - DNA, 370 bp, Glycine max
atttgacagagcaacgccacacactggatctcctataagactgaaaagcatgagggacacctcagataatcatgcattataaatgaaacagcttacacagaatcacattgaagcctaaattttatctcacatcaatatattttcgcattgcgaacggcatgttactgaggaaatctcattgtcttgcaaatctacaagctgcaatcggggacaaatgttgtcacccaagtccaaagcaatgtacaatgcattgcttcggagtttcctgtcgaaatatgaaaactatgacgactatcattctattgctcgataactacttatgatcaccaaaaagatacggacttacacctgctggatttgaggaatgcca

SEQ ID NO: 166843 - DNA, 447 bp, Glycine max
tgccacccagctcgcccaggtgagctaggttgcttcctctagaagcaaccgccttctagaggaatattctggaaggcccaagtgggcctggttgctatttgaacccccatttttactaaatacacctcttgctcttttttggtgattcttttaccgtaacgttatgaaattttacaaatttcgtaacgatgcttgttttctttccgtaatgttacgaaaccttacggattacgtaatcatccctttttttccttccggaacgttacgaaactttacggattgcgcactaacacttccttttcaatttccggcatgtcacggaacttcacggattgtgctacaatgccttcttttgacttccgggatgtcacggaacttcacgaattgcctaacgatgggtggtcaaacgagggtcgcatcccaacaacggatggtccccggacaaaa

SEQ ID NO: 166844 - DNA, 424 bp, Glycine max
agctttgcggatatggtcttcgccggcaaaatgatcgaagtgggcttgcaaagaagcaaatttggtcatcctgctccgataaaaactggggcaaatgaagaggatgagaatgagggagaaacccatgctgtgacagccattcctatatggccaagtttcccaccagcccaacaatgtcattactcagccaataacaaaccttctccttacccaccactcagttatccacaaaggccatccctaaatcaaccacaaagcccacctaccgcacttccaatgacgaacaccacctttagcacaaaccaaaacaccaaccaagaaatgatatttgcagcgaaaaagcctgcagaattcaccccaattccggtggcctatgctgacttgctcccatatctacttgataatgcaatggtagctataaccc

SEQ ID NO: 166845 - DNA, 446 bp, Glycine max
  unsure (1)..(446): unsure at all n locations
tagtanagctaagcactaacaatctctctctttggcaaattntgtctaaaacatacttagacacttcctgagcaggtacgagcagttatgcaagtgggatcagcaactttcattatcagagtaatcaagcacagcggtatctgtagtggcgacagcaaaattctgcaagttgcaagtcgtttcccggatgtcaagacatctcacgtgacatcagctttctgctccccctgtctccatgctcttactgctgtgaagcagttcactgcagcatcttctatcagctactagtcttttccaggatgtcaagacatctcatgtgacatcagctttttgctccccctgtctccatgctcgtactgcatcttctatcagctactagtttcagtagcttacatcaatcatcatcagcagcagcagtctgcccctagaatcatatacatacaact

SEQ ID NO: 166846 - DNA, 229 bp, Glycine max
  unsure (1)..(229): unsure at all n locations
tccgtactgtctcatgcattaattcacttgtgtcataagatttgtggtgttaatattaaaatcttttggtgtgggaagtggagaaaggacaaaacaactaggtttccttttccttttctgcattggagtgagaggtgctgactctcccanaatagaacagtagagctttccatttttactgttgttggcaattgccagcttttccgtaacttttttccccctcgacatc

SEQ ID NO: 166847 - DNA, 448 bp, Glycine max
  unsure (1)..(448): unsure at all n locations
tgtaattggcatcgtanagtttgatattntaaaaaattgtttatatctgttgtacgtgccctttcttacctgcaatcaacaatttgttttgtgaaatattatcacattctgcctcaattgtgattttcctctgcttatctcaaaattaggaggcaaaccattattgaatatagtgtgacctcaaaaatcactgcaaaattatgatatttctgcgctgattgagaagctgagctaaatatacactgattagttgcaaatataagatttaaagttcgttcaattacaaacaaaatgcatcattgtgtcaaatgaattggatctctctcttgcaaattaattatctgtattttttatttttcttcttaatagtattgcagggctcttcaggatgggacaagaattggagtttgatctgaatgacaagtcttccgtgggtctcagttccgat

SEQ ID NO: 166848 - DNA, 433 bp, Glycine max
  unsure (1)..(433): unsure at all n locations
agcttgtgcanatcanatcactcctacgttttatctctagcatgcattntctttctttctttacccactcctcacgtttggttttttaaggaaaaacaccataactaaacgcgccacaaggcatccctatcgcaccagatccaaatctagaacgatgggtgatcaagaggagacacaggaacagatgaaagccgacatgtcggctctgaaagaacaaatggcctccatgatggaggccatgttaggaatgaggcagctcatggaaaagaatacggccaccgctgccgcgttcagttcggctgccgaagcagacccaactctcttggcaactgcgcaccatcctccctcanacatagtangacggngaagggacacgctggggcatgatggcaaccctcacctgggatacaaccgagcggcttacccttatgga

SEQ ID NO: 166849 - DNA, 449 bp, Glycine max
tgtcagttataataataccgtgttgagacatcaagacaaacaatataccataataacaaggttttttttccaaacatcagtcacttggaggatatttctagtgcaatcaaatagggtcaaaagtcacaacaacaataatctctcaaccaaaacatcaagataaaacaataggataatgcataataattttaagataaaagcttctcataaactagatacttaagtcaagagtggatcccgtcatgcagtatgtagtaaattccaattaacactaggtggatttattaaacatcatcatacattctgtttaaaagccacctaagtactttcttccagaagatgagtcttcaaagttggcaatcctactgggacaaaaaagacaaaacgatgcctcaaaaggacatatctattaatttccacctcctcctaacatatgaagaggggaagga

SEQ ID NO: 166850 - DNA, 417 bp, Glycine max
agcttgtggttgttccttaagtttcagagtatacattttttttcttccttagttaagtaattaggaaaattttattagtaggagtattagtagtacaactatgatggaatagaattcatggccagcgagttcccaccttaatctgttggataactgaagctagttatgttcacaaaagcttcaatctaagaagaccatattatcccgctaaaatggcccattaagtgtgattggaaacataggcacatgcaaatttcatgtgttttagttaacaacaacttagttatctttagtcttgtctaagcaatatgacagaaacatgagtgtctaaagaagatccaagcccatataaccttgaagttttagagaataataaagaatgagagagttatatggcttttaaaaattgtgaaagga

SEQ ID NO: 166851 - DNA, 439 bp, Glycine max
  unsure (1)..(439): unsure at all n locations
tgtgtgaatcanatcactcctgcattntatctctagcatgcattcattcttctttacctactcctcacgtttggttttttaggaaaaacaccataactaaacgcgctacaaggcatccctatcgcaccagatccaaatctagaacgatgggtgatcaagaggagacacaggaacagatgaaagccgacatgtcggctctgaaagaacaaatggcttccatgatggaggccatgttaggaatgaggcagctcatggagaaaaacgtggccgccgctgtcagttcgactgccgaagcagacccaactctcttggctaccgcgcgccatcctccctcaaacacagtaggacggngaaggtacacgctggggcacgacggcaaccctcatctgggatacaaccgaacggcttacccttatggattgcacctaattactcacca

SEQ ID NO: 166852 - DNA, 413 bp, Glycine max
  unsure (1)..(413): unsure at all n locations
agcttatcaaatatgattttgggcccaataatatctggtggcccaattacaaaaatacaacccaaaaacgaaataaaataaaactggacgacaaataaaattgtctgctctcttcaagtccaagccggttcagcccaattgcttgtaattctcctgaaattaaattaaaacacagaattagtcaagtaggcccaaatgataaaactgcataatttatttgacaattaaggctaatcagtaattaaaatggtgacagaaaggggtaagaaataggagaaaataatgacacatcagagagcaggcacaaagatttggttagtaacttaaacgagcgataactccctatccnctcatgtcttaaccaagttactatcgtttcccctcctttttactctttacaacaactctgtaca

SEQ ID NO: 166853 - DNA, 397 bp, Glycine max
tccttgagaagattccttgagaagattcctaaagaagctagagcttagctacatacacctctctaataggaaagctcaccttcttgagatgagaagctagagcttagctacaccccctataatagctaagctcacccctatcccaaaaatacatgaaaatacaaaaaaaaagtccctactacaaagactactcaaaatgccctgaaatacaaggctaaaactctatactactagaatggccaaaatacaaggcccgaaagaaggaaaaacctattctaatatgtacaaagataagcaggctcatacttagctcatgggctcgaaatctatcctaaggctaatgagaaccctagggccttcccttggatctctggcccaatctacttggagtcttcta

SEQ ID NO: 166854 - DNA, 425 bp, Glycine max
  unsure (1)..(425): unsure at all n locations
agctntgagccaaaatcctatctcaccatattaaagagaaggaaatttccaatcatagagaaagcaaaaaaaaaaaaaagagaaggaaaatttccaatcaaaggaaaaaggagaggaaaggaaattcccaatcaaagagtgggagaaagaaaaaaaaaagaaagaaaattcccaaccaaagaatgggagaaagtaaaaaaaaaagaaagctcctggtcaaagaaaccagaaaaaatgtgcagagaggtctttggaccagacaatatctgaacaatacagaattgtcaccaaatgaacaaaagaaagaaaaggaaaccataacctaaaagtggtcttctccctttgattaccagccaaaatcctgtgcgtcggtgacttgctcgcctcgcgtcaaacaaaaacagaaaaggaaaagctcaaacaca

SEQ ID NO: 166855 - DNA, 421 bp, Glycine max
  unsure (1)..(421): unsure at all n locations
ntgatattggtaagtaaatgcctcanaacttctattatatttcctgtttctgaagtacgttntttctcactaacatctctttttataacattaatctctttaatcctctcatttgtactaattactttatcttacatttttcttccttttcttctcatctccttttctattaaaaaagttgcccgattttgttatataaatgcaatttctcttttcattntaccaaactctatataaagatattttatttgtttcaccaggacatatttgctgctggaactgatacttcagcatcaacactagagtgggctatggcagaaatgatgagaaatccaagagtgagggagaaagcacaagctgaattgagacaagctcttcgagaaaaggaaataattcatgaaagtgatctagagcaacttac

SEQ ID NO: 166856 - DNA, 411 bp, Glycine max
  unsure (1)..(411): unsure at all n locations
agcttgangattatggngtacccatcatatgtggtactaggtggcggncgggcgatggtgcacaacaagttttccacatccacaaagcgcacataaacccaccatcccttgttgcccacctccaactgagctcacgtactcccacgtagcccataacctcgtttctctcaacaccgggtccccatcaatcctcccaagcttccccaacatcaaagtaatacaacattcaaacagcacaagctatcacagccaagcaaaacagggcaaaggcagaaaactctgcccaaaacaccaaccaaaatcacagcttttcacatacaaataccccagaaacatttccttcgttctcattcgttaaccgttggatcaactcgaaattttactggaagtctctagtacataattctacat

SEQ ID NO: 166857 - DNA, 437 bp, Glycine max
  unsure (1)..(437): unsure at all n locations
tcaacatcagaccacttccagggtgctggatctacttcacatggacttgatggggcctatgcaagttgaaagccttggaggaaaaaggtatgcctatgttgttgtggatgatttctccagatttacctgngtcaactttatcagagagaaatcggacacctttgaagtattcaaggagttgagtctaagacttcaaagagaaaaagactgtgtcatcaagagaatcangagtgaccatggcagagagtttgaaaactgcaagtttactgaattctgcacatctgaaggcatcactcatgagttctctgcagccattacaccacaacaaaatggcatagttgaaaggaaaaacaggactttgcaagaagctgctatggtcatgcttcatgccaaagaactttcctatgatctctgggctgaagccatgaacacagcat

SEQ ID NO: 166858 - DNA, 442 bp, Glycine max
  unsure (1)..(442): unsure at all n locations
agcttaggaacccaagctcttaacttcaatgcttggaagcatgacttatgcctaanaatctaagttttggttntgaaagtggaaaggcatgaaaattaggacatgcttgagagggttttttactaaaatttggctgccccatgagggatactttgcatctaggtagcatggaaaatacctttcaatgtgtcataccctaatttcgtccggngacctttgcttgatgacatgcgacctttctttggtccttgtgaggtgcttgacacccatcattaggcagtttgtgaaattccaggacatgtcggaaaatcaaaaaaatattgatgcacaatccgtaagtttccgtgacacaccggaaatcaaatggaagcatcgttgcataattaagtgaggttccgtaacattccgtaagtcaaaaaggggatggttatgtaatccgcaa

SEQ ID NO: 166859 - DNA, 385 bp, Glycine max
  unsure (1)..(385): unsure at all n locations
ggacccaagtgcactgtcactgganagagggttcatggtgtatgtatgcgatttccaataaagatctttataatgctgcttttgtatgtgagaagcaaaagtacgcgtgagtgtgaatatgattaccttgcgtgagaattcatcttaaggatacatgatagtagatataataagaatgaagatgaggaagcataattaaacgggattatagactcaaatgctgaagtgtgcttatcatttcaaattatcaatttcccttaatgtgtctaaaaggctgaggcaacaaatgaagcaattttgcgctctgagacagtctggtgtgtggntttctattggattatttctgccttttgtgtgcctgtttttcttctactggtgaaaatat

SEQ ID NO: 166860 - DNA, 371 bp, Glycine max
gctggaatcatttatcctatctccgaccgccgatgtgtgagtcccattctttagtcttgaagaataccggcctcgtagtgatgaacaatgagacggaggagctgattcctactctggtgcagaacagttggagagtctgcatcgactataggaagctgtaccacgttaccacaaaggaccatcttcccctatcattcattgaccacatgcttgaacgcctggcaggaaaatctcactactgtttccttgatggatgttctggtcatatgcagattactattgctactgaggatcacgataaaaccacattcacctgccccttcagtacttttgcctatatgaagatgcctttccgactgcgcaaaggccct

SEQ ID NO: 166861 - DNA, 459 bp, Glycine max
  unsure (1)..(459): unsure at all n locations
ctcgtacccggtatcctcagagtcacctgctgcatgcatgcttctgcattcaatttcgagcatctcaatatattacgggacttaatcggacatccgagttaaaagttattgttgtttgcatttgctacgagcttccgttttcaattacgagcgtctcgatatattacgggactcaatccaacctccgagttaaaagttattgtcatttgaatttgctacgagcttccgttntcaatttctagtgtattgatatattacgggacttgatcgaacattcgagttaaaagttattgtcatttgcatttactcacagctttcgttttcaatgacgagtgtttcgatatattacgggactcatccgagttgaaagttagtgtcatttgaatttgccacgagcttctgttttcaattntaagtttcttgatatatttcgggactcaatcggacatccgagttaaa

SEQ ID NO: 166862 - DNA, 452 bp, Glycine max
tcattgcctaacaagccaacttacaacagcaagccccaagagactcagcataaggatgcacagaccaaagttgcgtatgtaaaaaaattgtatgaccaagtgaaggtgcaaattgcaaagaagaatgaaagctatgccaagcaagcccaaaagaaaaggaaggaagtggtacttgaacccggtgatgatcttggacatttgaggacaaatgttttccaagaaggagggaatgatgagaatcatgaaacaggccaaatacagtctaaaggcccaagtggagaaggacgaaggcccaagtggagaaggacaaagcccccgagtggagaaggatgaaggcccaagtggagaaggatgaaggcccataggcagagacactatcaagactattaattgatgctgaaggccaagattaatttgaaggcccataataaatatgttctatctagttataa

SEQ ID NO: 166863 - DNA, 442 bp, Glycine max
  unsure (1)..(442): unsure at all n locations
agcttgcctcanagaggtccaggaaggacaagtcagccgaaggaactagttccgctccggagtatgatagtcaccgctttaggagtgctgtacaccagcagcgcttcgaggccatcaagggatggtcgtttcttcgggagcgacgcgtccagctcagggacgacgagtatactgatttccaggaggaaatatggcgccggcggtgggcaccactggttactcctatggccaagtttgatccagaaatagtccttgagttntatgccaatgcttggccaacagaggagggcgtgcgtgacatgagatcctgggtaaggggtcagtggatcccgtttgatgccgacgctatcaaccaactcctaggatatccgttggtgttggaagagggccaggaatgtgagtatggccagaggaggaaccggtctgatgggttcgatgagga

SEQ ID NO: 166864 - DNA, 395 bp, Glycine max
gctgtatgaagcgacactgacctaggtccgcttatgataactattagttggctgcggcattatcaatacaacactggcggccgtgtctgttaagacgaaagtgagccacttattcagatcatatagaggctgagacaatgattgcaccagcggatgaccacacggagtctaccatactgtatagcaatacaacactggcgggcgtatacctatgtggagtgacggatggcattctacaccacacagcggacattctgctttatattgaacttacccgagattatcctggagtgtattttggataggactgaagagggatgtgatgagacttgtacagaagtgtgatatatgccaacgacataaataccgtcccactgctcctgtgggtttactac

SEQ ID NO: 166865 - DNA, 405 bp, Glycine max
agcttggaaatgaacaacagaagctcacgagatactacaatggtcataacatgtcacacgaaagtccgattcaggtgcataatatatcgagacgctcgaaatagaacatcggaagctctcgagaaattccaatggtcataacttttcacacggaagtcctattcaggcgcataatatatcgagaagctggaaattgaacaacgaaagctctcgagagactcaaatggtcataacttgtcacacggacgtccgattcaggcgcataatatatcgagacgctcgaaattgaacaacgtatggtgtcgagatattcaaatggtcataacttgtcacacggaagttcgattcaggcgcataatatatcgagacgcttgaaatgaacaacggaagccttgagaaactcaa

SEQ ID NO: 166866 - DNA, 454 bp, Glycine max
  unsure (1)..(454): unsure at all n locations
tganattgaacaacggaagctctcgagaaattcaaatgatcataacttttcaaacgaaagtccgattcaggtgcataatatatcgggaagcttgaaattgaacaacggaagctcttgagaaattcaaatggtcataacttatcacacaaaagtccgattcaggcgcataatatatctagacactcgaaattgaacaacggaagctctcgagaaattcaaatggttataacttatcacaccgaagtccgattcaggcgcataatatatcgagacgctcgaaattgaacaacggaagctctcgagaaattcaaatggtcataacttatcacacggaggtccgattccggcgcatagtatatcgagacgctcataattgaacaacgaaagctctcgagaaattcaaatgctcataacttatcccacggaaggtcgattcatgcgcatgatatatcta

SEQ ID NO: 166867 - DNA, 374 bp, Glycine max
  unsure (1)..(374): unsure at all n locations
atactgtgtcactttntgtaccattatacatgtattttcttggcagaactcacgtttggacactagttttgtatttcaaaagcacaactcctcaattaagtgaaaagagtttaaaattgcacaattttatgaagatttcaagactctacacttgatcacgaacttggtacaattaccaaagctatggtaatcaacatgaccacacttagatgataacatccctcctagaacaatgtcaaagatttgacaatagtcgtggtatacttaccacgaccataatggtcaagagcttcaacatcatttctaaccagtcatggtggatttaccacaaccgtagtgcgctattcatgcaaatatctntagaaagctatata

SEQ ID NO: 166868 - DNA, 426 bp, Glycine max
  unsure (1)..(426): unsure at all n locations
agcttccatgtgcaggttacgccatattctcttatcttcaggtaacctaatgcctgttggtttgagtaggtcaactggggtttcatttttgaatcagcttcctagtgatccaagtatgacaacagacaacatatctggcaagtatgatgtgaagaagaaagaaaatataccaattacaattgcaggtgatattgatggtggaatgcttgatggccaccttaatgcccctgttggtgtttggcgcacattangagcttcaaaagttgtaaaaccttcaaattcacctaacatggaagntgttccttcctttcctcataattctttcaatgaagagggtatcctttcttatggtctaaggaaaccacttcaggagcttcttgatgggatagcattactcgtccaacaagctatttcctttgttgatct

SEQ ID NO: 166869 - DNA, 364 bp, Glycine max
  unsure (1)..(364): unsure at all n locations
tgtagaatgtganataaatatatggagtctctacggcttgtggaggagactacagatttgggatatgacagatattacaaggacctgtaactcaaacaatgggagaaaagatttcactggtttcctatttgttgcaccacttccccataacccatctgaaacaatatggggtggcgtagcatgcaggcataccatgtacctgtgcgtcgcctcatccactgtcgtaattgaaaggaacatagttccatttggattcaaattcattttgatcaatctatatgagaggagtagtactcaataatggcacttaattaattgagccaatgagagagtgtaattgaatatatatttgtcacgacacgta

SEQ ID NO: 166870 - DNA, 367 bp, Glycine max
  unsure (1)..(367): unsure at all n locations
agcttagggatggaacacttacttggtggtgatgaacaaaagtgcaaaacggaatcaaaaaatgcgnaaaaggatgaccctagggctgcaaactcgtcaatcccgtgggtatggcttttgaaaggggggaaaagatagttttgaatgtaaaaacgccccccctttcgtcattcttataatttggtgcaggggtggctcgcccagctcgcccaggcgagctaacctgcacacattnttttttttttttttgaggggaacattaaccatgtcccctcccttctcatggattagcatcttgcctaacttgaacttacttaggttagaattaggcgttgattacttattcttaccaatagtaaaagaaagc

SEQ ID NO: 166871 - DNA, 392 bp, Glycine max
  unsure (1)..(392): unsure at all n locations
ntcctctntatttcgttcattntcgatttcttttcttccgtctttaacgcgcttttaccgtttatttaagccgttttctcacctaataaatgataaaatgaatttcaaccgatcatttgtgttgtaatctcatttaatcacttttaaaatgaaatctaaccgatcgttcacgctataacctcggttaaacaaaaaaaagtaaaataataataaaataatcaaaatatcttgaaaaataataataaaatgaacaaaatatctttgaataaaataaaacaaaaaaatcaatcggacgttttttctttggaagtttccttgaatgaattgattaataaccaaagtgaaactaagactaanatagactcacaaatcaagttttgtccgaaaatcac

SEQ ID NO: 166872 - DNA, 423 bp, Glycine max
  unsure (1)..(423): unsure at all n locations
agctntntcatgtttagagatntctagagagagaaaggtccaagtttcaaagagtttcgagagtgtttactatgcaaagactggcagagaactgagagtgaagaggaagccatcctgagagcatgagatgagtctatgagtgattatgagtgattagaggtggaggagagatccccactacttgcatttcttcaatccttaatttttctcttctctttgttggaaaggaagcttcctagatatggagagctaaatcctctgttggttcttgcttgtaggtgcttgatgtaaatacatgtatatctatttaatgatggtttatgtgttctctgtgctatcagtatgtcattcaatattggaaactggtctgattcttaaatcttgataggacatgcgctagttatcgtattatcacgacggatc

SEQ ID NO: 166873 - DNA, 370 bp, Glycine max
tgaaggtgtgtagcccaccatcttttcatagtagaatactagtagtgtgtctactattattgtcatcatttttttctccgtcattgaggtgccacttgagctgccaggtctctccacctttgggcgtattcttttgaagaattcgtgccccctttttgcacatgttttgtagttgcatcctatccgaagccattataccgacactgcctaacgaaggcaaccattaggtcctcccaggaatggactcgtgaaggttccaagttagtgtaccaggtaacaactaccccagtaagactttcttggaaggaatgtatcaacaattcctcatcttttgcgtatgcccccatcttccgacaatacatctttagat

SEQ ID NO: 166874 - DNA, 372 bp, Glycine max
agcttattacttttttataatttataaattgattcagatatacattaatcaaggttccaataaactaattgcaaatgtcgaacagaatattgcaggcaatatggccaggtctcagaattttggtaatttatgtaggcaaagaaactaaaagtgtaaccataacctgtattttgactgaagcaccttgcattcctccaagtgaatttctttttggtaacaactaaattcttttgtagatataataatagactcaccctcccagtgagtatcttttcggtttatctggtttgctgcttcttggctgcttctagtaagggtaacaacgtctggatcatcataaaataatctaggctgtcaaactatattacaaca

SEQ ID NO: 166875 - DNA, 430 bp, Glycine max
ctacaatggattaggtatcccatttcaacaaaaaagatttacttaacagattaaattctgcaaaaatattttccaagtttgacatgaaatccggatttttgcaaatccaaatacaagaatcggataggtacaaattgcttttacaataccttttgggcaatatgagtggaatgttatgccattcagtctgaagaacgccccttcaacttttcagaaaattatgaatgatattttcaatccttattataatttatcattgtctacatgtggaagcaatgccttccaagattattttgatgatgccaaagaatcaagagtcatacaagtttcaagaatcaagatcaagattcaagattcaagattcaagaataatcatgatcaagattcaagattcaaataaagaatcaaaactcaagattcaagaatcaag

SEQ ID NO: 166876 - DNA, 412 bp, Glycine max
  unsure (1)..(412): unsure at all n locations
agcttcaccacgcttatgagccttggataataagcttggagaggatgcttcaatggaggagaagaaagagggagagcaagagagaggggggagcacgaaatttaaggaagataaagggagagaagttgaactttgagttgtgtctcacaagactctcattcatcaaagntacaacaagtgttacacatgcttctatntatagactaggtagcttccttgagaaaacttccttgagaaacttctttgagaaaacttccttcggaagctagagcttagctacacacacccctctcataactaagctcacctccttgagaagcctccttgagaagattcctaaagaagctagagcttagctacacacacctttctaatagctaagctcaccttcttgagatgagaagctagacct

SEQ ID NO: 166877 - DNA, 365 bp, Glycine max
  unsure (1)..(365): unsure at all n locations
ntacaaagtttacagtttgaggccacagacatatggttccatatcagacttatgtagtcatgacaagaaccgaaagcctatagatcgacatccctgttttctgcatctatgtactgtacaatcaccatctaacagactatcgctgatctaagattactcgaccattggttgtagcttgtcccgaagtccctctctaaacttcgaagccacgaccaaagtagaaaggatgcgtcgtccatgattttgttggcatcaaatgtgtcgttggagaagagtatcttattccgttgctgccaaatagaccatgtgagagccagccaccaccacctncacctgttgccccttacttcctgagcaactcaaaa

SEQ ID NO: 166878 - DNA, 318 bp, Glycine max
  unsure (1)..(318): unsure at all n locations
agcttcgtggcaagccagtggatggaggacatggctagatggtgaaattgattngtggcattcataatcatgaattggccaagtcattatttggacatccatatgtcgggcgattgactaaagctgaaaagatagttattgctgacatgacgaagtcaatggtcaaaccaagaaacattctgctgactctaaaagagcacaatgccaatagttgtacgacaattaaacaaatatacaatgcacaaagtgcatatcggtcttccataagaggagatgataccgaaatgcaacatctaatgaagcttcttggaacggatc

SEQ ID NO: 166879 - DNA, 293 bp, Glycine max
  unsure (1)..(293): unsure at all n locations
ggaaggtgcgtaccccaccattttttcatagtaaaacactgataatgtgtctactattattgtgataatctctttctctgtcattggaggtgccacttgagttgccaggtctctcctcctttgngtgtattctttgaaagatttgtgcccctatttgcacatattctatagttgcatcctatctggagtcatatcagaattgtactattactgcctaatgaaggcaaccattatgtcctttcaagaatggactcgagaaagttccaagttagtgtaccaagtaacagctaccc

SEQ ID NO: 166880 - DNA, 410 bp, Glycine max
  unsure (1)..(410): unsure at all n locations
gtctcacgattgaacatgctcatgcaacaattgttagtcgtggctatacgagacatcttgccaaacaaagttaggttagcgataactcgcctgtgattnttcttccatgctatatgtagcaaagtcattgatccagtcaagtttgatgagttggaaaatgaggccgcaattatactgtgccagttggagatgtattttccccccgctttctttaacatcatgattcacttgattgtgcatctggtcagagaaatcaaatactgtggtcctgtttatctacggtggatgtacccggttgagcgatacatgaagatcttaaaagggtatacaaagaatctatatcatccagaagcatttattgttgagaggtacattgttgaagaagccattgaattttgttcagaatactt

SEQ ID NO: 166881 - DNA, 393 bp, Glycine max
  unsure (1)..(393): unsure at all n locations
ttggtctctgccagtgaaaggatcgatgtgggtctgaaaaaaaagggcttatttgatcatcatactatgatgactgagaaaactggggcaaataatgagggtgagaaagagggagaaacccatgctatgactgccattcctatacggccaagtttcccaccaacccaacaatgtcattactcagccaataacaaaccttctccttacctaccacccagttatccacaaaggccatccctaaatctaccacaaagtctgtctaccgcacttacaatgacgaacaccaccttttgctcataccataaacaccaaccaagaagtgaattttgctgcgagaaagcctgtanaattcaccccaattgcagtgtgctatgctgactagcacccatatct

SEQ ID NO: 166882 - DNA, 409 bp, Glycine max
  unsure (1)..(409): unsure at all n locations
gcaagcttgttgaaattgccatgtttgggtgagttatacatacccattctgttttatggttntgtgatgatgtttgtcatgtttgtatgctgaaattgcccatggaaaactgttagagatgaaatatagagttaacctagggttggaaagtgagaatgtggtgttatgagtggaaaaagagtgaggctttgagagttggaaggctaagtctgaattctgtggtaaatggaggttaaagtgagttaatactagcttgaaatgtcatttangacttgggagaaagcttggactgtgctagagagaaaaacaaatgatcaaagtgaataaagagccatttctagggcaaaattgggtgttgaagagtcaaattttgattcggtggaattttaggtgtaaattcagtttgagc

SEQ ID NO: 166883 - DNA, 445 bp, Glycine max
  unsure (1)..(445): unsure at all n locations
gtgtaatcgattacactaatttggtaatcgattaccagtgtttgtttctgaatatatcaaaagatgtaactcttaaaaatgatttttgactctttcaaattggttttaagtttttctaaaagttataactcttctaaatggtcctcttggccaaacatgaagagtctataaaagcaaggctttgatttgcttttcaatacacttttacacttattcaatcaatcctttacaagccttgaatatctttgaacttcttcctcttctttgtaccaaaagctttctgaagtttttcggctttctaaaccttgaaaacttgtgctattcatcctcttcattctcttctctctttgccgaaaagaattcatcaaggactaaccgcctgaattctttntgtgtctctcttctcccttttccaaaagaacaaaggactaaacgcctaaattat

SEQ ID NO: 166884 - DNA, 408 bp, Glycine max
  unsure (1)..(408): unsure at all n locations
agttgctcatctcggtgttgaggggtggacaacatcctgcaacatggtggtgatgaatcctcttttgcacagaattaaggaggcaatgaagggtgaacctcaaatatatataaaacaaaatctatgtacacacacttanaaagaagtggaatttggtgtggtcacaaacgtgtatatgttcctcaacttgaaggtgactaaaaacaataatattgcatgcttaggaaattaaagccttaaaaaggattaatttttttctaaaaaagaaaacaaattaaagacatcaagaaggtgacataaaaagaaagtagtagagagagagaaagtgtgtatgctgtgttgtgttagctaagatgatggngtgtatgagggtgtcaaaaacagagaaagttagttatgtgcatatat

SEQ ID NO: 166885 - DNA, 435 bp, Glycine max
  unsure (1)..(435): unsure at all n locations
ntgatggtgttgagaagaaatcacatgtttgtcatcatcattaaggggaagaatgtgaatgtatgtatacatgattttgatgatgtcaaaagaagaatcaaacaaggctcgcttcaagattaatacaagattgtttcaacaaacaaagccttgattcaagatttcttcaagatcaagccttgcctcacaatgaaaggtttcaagtcattcaaggcacatgtaatcgattaccaatggcttgaaagtgtgtaatcgattacacatcatatgtaatcgattaccagagactctgaacgttgggaattcaaattttaaatgaagggtcacaactgttcaagagaaacaactgtgtaatcgattacactaattctgtaatcgattactagagaggattttcaagagatatcgccaacagtcacatcttatcatttggat

SEQ ID NO: 166886 - DNA, 270 bp, Glycine max
  unsure (1)..(270): unsure at all n locations
catgcaagcttataccaatcaagttgacccgtatgttgatattacacatatggatcttcttgatccgtataagctttacggatcaacttgatccatatggtttactcatgctcatccagctntatggatcaacatgatccgtatgactcatagggatcaacttgatccatatgactcattcggatcaacttgagtgaatggtatgtttgcccatttagttaaaatgatgagcgcaccaacaaaaacgctaggtgcacctacaatcaccct

SEQ ID NO: 166887 - DNA, 162 bp, Glycine max
  unsure (1)..(162): unsure at all n locations
gcttccatcacgtgtggtccgcggtgcggtgacggaccaatttatttggcctgtgtaatatagcggngtggactggcccggtccgctgccaatgcgggcttatgcaggcgggccttatgaaggacgggctggtccgtttgcccacccctagatatacttggg

SEQ ID NO: 166888 - DNA, 283 bp, Glycine max
  unsure (1)..(283): unsure at all n locations
cgatgcataatttgtgtctgggagtttagtaccatggtaagtcttacntaataaacatgcctgtggctttatgaccttttcctactccatgcttacaaggtatatatcttctctaaaatatccctctttaacgagactttagaatctactctcccactaccctcattgggtcctacttagcaactaacacagaaggacttacttatttttgcctccttcaactataccacttctactacttgtcccttatcttactatcttcctccaactcctggttgcttcc

SEQ ID NO: 166889 - DNA, 332 bp, Glycine max
  unsure (1)..(332): unsure at all n locations
cgtcatcactttcttccgaagctntaacctcattgtctctcacagtctttagattggggagccaatccaatccttgtgtccggactctcagccacttatgatagccgccgatgatcccattactgcttcccctaagctctctgtcctttcttcacgccgcatcccatgccttgcgaactccttggagtaccctagcattgtggtcactgaaacctcgtgcgatgaaaggcgtgatgctttcgtctgatggtactcctctcatgggacatccttcgcatgaagatagaatcctgattcttccttccttctagcgagggaaccatttaacagac

SEQ ID NO: 166890 - DNA, 413 bp, Glycine max
  unsure (1)..(413): unsure at all n locations
tgacattgcatttgggcacctattttgaatttcctatgctgtctctacatacataanacagtcccaccatcccaatcttgcaaaaccatattcatatatcattgnggcatttcaccgagcacttggtgggcgcaagtttggacataaattgcaagagaatgggggcaatgtggcatgccccattgcttcagaatacaacatatgcctaaggccttctcattcaaatcctcaactcaagaagtcaagcataaaaacaaaccaaaattgccccacanatataagcacgttctcacaatttatagcaccaaaagatgaagaaaatactccaatgggaagcaaaaaaaactcaaggattgaatacttgttggagtgagtagaaacaccaaaaatgaaagcaaaatgcaaccaaaagt

SEQ ID NO: 166891 - DNA, 356 bp, Glycine max
  unsure (1)..(356): unsure at all n locations
tttgatctcctgttggggctctatattgtgggagtgtgctcanatatatggggcaattttggtttgttttcttgcttgattaggttgaattaggggttggtatgggatggccctaggcctataatgcattntgaaacaatgggacatgccacattgtccccgttctcttgttattgacgcctaaacgcgcgcccaccaagtgttcggtgtaatgcctcaatggcattagcgcgtgacttttgtaaggaaacaacccgcggggcattttggtttgacatattttctattcttggaatatgtattcattcccgaaaaaggctatagatattgcccacatatattctaagcctagaaac

SEQ ID NO: 166892 - DNA, 319 bp, Glycine max
  unsure (1)..(319): unsure at all n locations
tgaaaacactntttattntaaatcacttggccaaacctttgctaattcttttatgaattccctccctaatattctagtgatcatcttgatgttgggactcgtaatcttgaagaatggacccgaattttaatcttgaaaagcccatttgcatcaattgcaacacatcatcatgatcatcatcaaaacatcaaagccaatggcatctacacatgtgtcctccaccttccagattggagctatgtctcacgattgcctaattgcggaccctaaacgcaaaacgacattctccccttttttttcagagacccatgaatgatat

SEQ ID NO: 166893 - DNA, 418 bp, Glycine max
agcttggggatacccaactttcttctatactctctcttttgtcacaaacagctcctagcacacttccttctcaaactaaaattaacccaaagaagaaacatgtcagggctataatgacaagaagcaagaaagctagagagaatatgaagcaaaatgggggatccacttcagatgccacaaaggaggtttttactaaagagaacctagtgccagaaaaaaaggtagaggaaagggagatactaacatctcccaaggtaagtattcctttccctcaaagggtaaaaaataagcaataagatgagcagtttaaaaagtttattgatgtaatgaagagactgcacatcaacatttctttaattgagattatttcacaaatgccaaaatatgtcaagtacttataagacatactttatagtaa

SEQ ID NO: 166894 - DNA, 433 bp, Glycine max
  unsure (1)..(433): unsure at all n locations
cgagatgaggaagtgttgaagggtgaaacttcctgcttttattgttgaccacagagtggtacctggagatatgtcgcggcggtcaggagaccttggggacgtcaggtggggtgctattgcccaaaaccaagcttgaccaatcccgacccaacccgggcatagtcggtcagtgagaacctgtgatgtacctaagcaggcgagctcctggcagtcaacagataaaaggaacaaagaccacaaagcaaggaggcttgtggtggctggccagctgtgaactttgattgatatgtgggttatggcctctggtaatcgattaccaagggtgggtaatcgattacaaggcttanaaatgaagacagggggctaagatggtctctggtaatcgattaccacgggatgtaatcgattaccaggcttgaaaacggagtcagga

SEQ ID NO: 166895 - DNA, 411 bp, Glycine max
  unsure (1)..(411): unsure at all n locations
agcttgcggtgaacaaatataaaaatcctttgtgcactnttttctttttctttcctttactttgctttgcacaaatttaaaaattgttttttgtccaaatcattaaatctatcatcttacccaaattaacaaaaaaaaccaaacattattttaccaaaagcttttattaagcaactatctttgaaacaaaagtcttaaattgcaaaagaattattctttcagaactgttgcattttcattatgagcaacttttcattatgaactcgcctatatgaattatcttcagaaacatttgttttaaaagaaacctataaaaagttttcaaaaaccaatttaaccccccttcttgtggtatttgtgtcacttcaagtaaaaggattgcctangaatttgtgaaaactgatcttcact

SEQ ID NO: 166896 - DNA, 414 bp, Glycine max
  unsure (1)..(414): unsure at all n locations
cctcgcttctacaatctcccnctttttgatgatgacaaacctataatcaagaatcgcatacaagctctatcttctaatcaatcactcacttaattccgcccctttgtttttgaatntaagcttcacttgaaattaagttagagttcttgatttaatcccaactttctctccccctttggtatcaacaaaaaggccaaagtgtgttgtgacataaaatcatacacaaatgtattcatgcaagagaaaaggagaaactgttagacatgtggtctcaataagttaagagggataagcttagaatgcagaagaagtagcaatcaatttaataatattctttaaacatgcaagacaaaatttgatgcaataaaatgaatgagataagggaagagagaatgcaaacacagtttttatact

SEQ ID NO: 166897 - DNA, 347 bp, Glycine max
  unsure (1)..(347): unsure at all n locations
agcttacccctcattgtaccaacaagtgtccttatgaggttctctttggctccaaacccgattgccataatctntgtgtttttgggagtctatgttatccatggctacgcccttactcaaataaaagcatgccatgtgtgtttctaggtccctctccccaacaccatgcatacgaatgctatcatattctaactcaaaaaatatacctctctagacatgttgtctttcatgaatcaatcttcccctcactacgcctcatttggtccctaccttcccaacctcaaaccatgatatgaccttacttatctcttgccatcctctcatactacaacaactccatacaaaca

SEQ ID NO: 166898 - DNA, 441 bp, Glycine max
  unsure (1)..(441): unsure at all n locations
ntcgtaggtgaaatcaggtgcagccatttcccttagagtcctctcacggngtggaggttgtgccatgttctcagaatgtgcaaaatcagaatgctcagaatcagaatgctcaaaattataatgctcaagatcaggatgttcaaaatcaccaataacagaatgcacagattcaccagtaatggaatgctcagaatgatcaaaaggtataaaatgatgcctaactaatctatgaaatgtcctatctatctcaggatcaaagggttgtaagtcagatggattgcctctagtcatacactacattcagaaagcacacaactagttgccttgtcatgtaaataaaggtgtaggtttgaactacagctaccctcaaatgatatccaaatgacttgaaattttgtgagcaaccttatataatgatgagaagatagcacanaaaatttc

SEQ ID NO: 166899 - DNA, 349 bp, Glycine max
agcttgagaatggagaattgcactaagcaatctctacgcatagctccaaactcgaaggtggaggacacatgaacgaaaacacaattcatggtgctccgaaaaaggggttgagaatggagaattacactaagcaatcactacgcatagctccaaacttgaaagtggaggacacatgaacgataacgctattcatggtgctccgacaagattgagaatggagaattgcactacgcaatcactacgcatagctccaaacgcgaaggtggaggacacatgaatgaaaacgctattcatggtgcttcgaaaagattgagaatggagaaatgcactaagcaatcactacgcatag

SEQ ID NO: 166900 - DNA, 346 bp, Glycine max
  unsure (1)..(346): unsure at all n locations
nnttggtcttaaataaaaggttttcctctttttctattattttattcaagctctaccacatgtccctatttgattggagcaaaaagggcccactttctctttttgactgtgacccatactcagtcacaaaagtgagaaaaatctgacctttgaaacgctaaaatcctgcctcggtttgcgtgccgtttctctggttccagtttctcgcgtttctctgcgtccgtcggggccagttttcgaaagcaagcaatatgtatatcaaaacgctcagaatgaaaccccgagcgtggtttagaggttggtttcgttaaattttaagtcgcacgcaaaacgatgatctttaact

SEQ ID NO: 166901 - DNA, 403 bp, Glycine max
  unsure (1)..(403): unsure at all n locations
ncaagcttgagcaaattcaaacgacaataacntttcactcggatgtctgattgagtcccgtaatatatcgagactctcaaaatggaatttcgaagctctgagcaaattcaaacgacaataactttttactcgtatgtctgattgagtcctgcattatatcgagaccctcgaaattgaataccgaagctctgatccaattcaaacgacaataactttttactcggatgtctgattgagtcccgtaatatatcgagaacgctcgaattgaatattgaagctctgaacaaattcaaattacaataactttttcctcggatgtctgattcagtctcgtaatatatcgagacgcttggactagattgccgaagctttgagcaaattcaaacgacaatatacttttact

SEQ ID NO: 166902 - DNA, 412 bp, Glycine max
tctattctgaatttcaagcgtctcgatatactatgggactttatcgaacatccgagtaaaaagttattatcgttggaatttgctaagaacatccgttttcaattacgagcgtctcgatatactacgggacataatcggatatctgagtaaaaagttattgtcgtttcaattttctaagagcatctatttcaattttgagtgtctcgatatattacgggaatcaatcggcatctgagttaaaagttattgtcatttgaatttgctacgagcatatgttctcagttacgagcgtctcgatataccacgggacacaatcaaagatccgagtaaaaagttattgtcgtttgaatttgcacagagcttctgttttcagtttcgagcatctcgatatattacaggactcaatcggaca

SEQ ID NO: 166903 - DNA, 302 bp, Glycine max
  unsure (1)..(302): unsure at all n locations
agagaaaatgtccgattgatttttgtgcttcattttactaaaagatatatttttttattattatattattattttacctctttntttttatttccaacgtggttatggcacgaccaaacggtgggaattcattttaacaaaaattaacgaatactacaattcaaatgatcggtggaaatttatttttttagattacgcgcgaaatgacttaaataaatgactgaagcacgtcaaaaggtggtacgaaaagaaaatgaaacgagaataaaagtacacaaaataaatggggaccaccacgggta

SEQ ID NO: 166904 - DNA, 447 bp, Glycine max
  unsure (1)..(447): unsure at all n locations
ntgaatgcactattcaatggagttgacaagaacatcttctgtctgatcaacacttgcacagtggctttagatgcatgggagatcctgaaaatcactcatgaaggaacctgcaaagtgaagatgtccagattgcaactcttggctacaaaattcgaatatctgaagatgaaggatgaagagtgtattcatgacttccacatgaacattcttgaaattgccaatgcttgcactgccttgggagagaggataacagatgaaaagctggtgagaaagatcctcagatccttgcctaagagatttgacatgacagtcactgcaatagaggaggcccaagacatttgcaacatgagagttgatgaactcattggttctcttcaaacctttgagctaagactctcngatagggctgaaaagaagagcaagaatctagctttcgtgtccaatgat

SEQ ID NO: 166905 - DNA, 424 bp, Glycine max
  unsure (1)..(424): unsure at all n locations
gcttgacttggcgaatatgatttagccttatgtttcactttagttattagtcaattcaattaagaatgagaaatcccaaagagaacatgtccgattgatttttgtgcttcattttactaaaagatatatttttttattattatattattattttacctctttttttttatttccaacgtggttatggcacgaccaaacggcgggaattcattntaacaaaaattaacgaatactacaattcaaatgatcggcggaaatttatttttttagattaggcgcgaaatgacttaaataaatgactgaagcacgtcaaaaggtggtacgaaaagaaaatgaaacgagaataaaagtacacaaaaaaaatggggaccaccacgggtacagagaatgaattgaaaaagcttgattcggaaacttacccgtt

SEQ ID NO: 166906 - DNA, 377 bp, Glycine max
tgcttgaatgcactattcaatggagttgacaagaacatcttcttattgatcaacacttgtttagtggccattgatgcatgggagatcctgaaaatcactcatgaaggaacctccaaagcgatgatgttcacattgcaactcttggctacaaaattcgaatatctgaacatgaaggaggaagagtgtattcatgacttccacatgaacattctatgaaattgccaatgcttgcactgccttgggagagaggataacagatgaaaagctggtgagaaagatcctcagatacttgcctaagagatctgacatgaaagacactgctatatatgaggcccaagacatttgcaacatgagagttatgaactcattggttctct

SEQ ID NO: 166907 - DNA, 431 bp, Glycine max
  unsure (1)..(431): unsure at all n locations
acgttcaatatctgctggtaatcgattactcatatatgtgtaatcgattacacagtgcaaatntttgaattcaaattttaatagctgttgtaaatcagttttggccactggtaatcgattaccagagagtaaatttattgtaaaagactttttaacttaaatttcttggccaaaccttttgctacttcaattgaaattcccttcctatttaatataccctttctaagattctagagactgtcttgatcatccatcttgaatatctttgatttctttgtcttgaataaagctttgtgaaacatgtaaccctttggcatcatcaaaacatcagcttgatcctttgtctacacagacgacgtcaagtcctatgaagcacatacaaggacattgagtcctataaaagacaaaagacattgaagtctttgaaatgt

SEQ ID NO: 166908 - DNA, 417 bp, Glycine max
gattgagtcatgaatcaagattgactcatgatgatgaatcgagattgatttttgtgatttgatgataacaaagatgatgacaataagcccaagagaatgacttctagattgagtcaagaacaattcaagaattaagaattaagtttcaagtttcaagtttcaagaatcaagaatcaagaataatcaagatcaagattcaagactcaagattcaagaatcaagaaaagactcaatcaagataagtactaaaaagtttttcagaacatggagtagcacatgaattcacaaaagcttttaccaaagagtttttactctttggtaatcgattaccagtttactgtaatcaattaccagtagcaaagtttggtttcaaaagctgtcagactgaatttacaacgttccaattaatttcaaaat

SEQ ID NO: 166909 - DNA, 436 bp, Glycine max
tgcaagctttaacatcaaggtgtttcccatgaagtacgaatcttcatctgagggtttgttgcaaatagtacctttcttggttccatacattttcacatttccaagaagagttttttggaggatggtgtattaagtgatgatgagaatatctgccatcaagcaagagcttagagtttctggatgaaatgccaacaactcagaatattgctgctgggaaggtgccacctgtggctatcatcatctctcatcagaatcttggaggtgatgtaagttcaattttcagtacaccttacaaggcaatcatatgccctctgggacagtcttacttgtaaggaaactgatctctatggacatgaaaataatgcactaccagagcaagatagttatagttatagagcttcgaaggctgagaaaactaagtcatgaaaatgtaatg

SEQ ID NO: 166910 - DNA, 444 bp, Glycine max
tgtgtaggctccatctatccatgttgtctctccctaatctcatgcatttgtattcaagtggccgtagaatgtagagagattgaaatccttaatgttcattcaaaatctttgtgacccaaaccatagtagaattctgagtctacactggaagagagggtctgggcacttcatgtttcttcttcatccgttgctcctctataacaattttttcctcctccttttgttgatgggcaggctttttggtttggacctttcccttatgctccctaaggatccttttaaccttcatagcaaggccaaaagtttccaaagccttgtctttattagcaatagccttggccagtttcttctgcctcttttgccgaatgtcatcctagttcactagaggaataagtatgttcctcttgatgtcaaccttcattaccttcaggtttacaacactga

SEQ ID NO: 166911 - DNA, 443 bp, Glycine max
  unsure (1)..(443): unsure at all n locations
catgcaagcttgcccaagaaacaaagatagcgtggattaagctcagagctgtatagtaacgttacacccgattgtaaaggcctttcttgaactatacagctgctatataaaaaacctccaccgccagtatctgacagagattatttatgtgtgctttaagaattattaataaatcttcttgttcttacgtttgctttcttgtgtgcatttgtttcattgtctacctttctttntttcctcttctggatgcagagtttcatactttgttttttaaaaagaaaatcgttcattatgctttattttacatctagcagtacacaaacagaaagagctaatgtgttttttaatgctacgtggttgtctcacctactgatactatatntgtcgcaggagtggtgttttgttgagagccacaacttgaagctcaacaaccttcgatcatg

SEQ ID NO: 166912 - DNA, 410 bp, Glycine max
  unsure (1)..(410): unsure at all n locations
catcacatgccattgcttcgttgatgaggttgctgtgatcgagatttgcggcattatagcgccacacgtcttcaccgtgagcctttgcaaatgaggggttgccattggccatgacgcgagcactcagactgtgccaaggtgccagcattacaggactactctccagcaagagaaaactagccatgctgtgttcgccgtttctcatcaatcgacgagacagagctgattgagaatagcccctgctgcacccgtcgcctttgaatatctttctttgcaccaagaacctcatgatgcgcttcagatgtgaagtatcacaccctaaacttgatgatatctccgatagtgtcatgggacttccatgcttctctatggcttcagctatgccaagctcaatcgcacattntatcact

SEQ ID NO: 166913 - DNA, 279 bp, Glycine max
  unsure (1)..(279): unsure at all n locations
agcttctccatattctgtaatccataagattatgtaattttctctcagctctccatttatgataaataagaattctctacattatatttggcattatatctggatcaactacaatgacagtacaaatgaggataaaagtcataaaacaaacaatgaggagcatactgagggacaagacaaacatattgtgcagaanagcaatctgatgttacctcctccaaacttctagaccagagtgatttttctttanatgcctaatttgcttcttttgaattttta

SEQ ID NO: 166914 - DNA, 295 bp, Glycine max
attgagcgaatgaaatcggtgattgaaattgcgacactcatttgcaaacatggctaagaccaaaggattatgtcgggccttatgtcacgatactggcagatgtaggggcataggagaacgggatgatttcgatgatgctctgcagcgttgaccgcctactgcattcgcacggaggcaacgagtacctgtgactgtggcgcacgatgaactattgaaccctacgccagatgtttatgatgacccgatggaggcaccaactggtgtaaggacattgtggcagacatttctgtggaca

SEQ ID NO: 166915 - DNA, 359 bp, Glycine max
agcttctttggaccttgaacaagcaattaacttctctttcagaaccatgctatgtgctcgtgactggtccatttcttcccttcgcaacttgagttcgctattgctaccccatagagctcggcgaaatttatcccggccatactcttccttgcgagccctcttggtctcttgttcaagggctcttgcggtaattgcattctcttcccgtaacccggcacactccttccaaaatgtgtgttgcggccaacttgaacttttcctcggctaatttcgcctttcctaactcgcttttgagaagctggacttcttcgtcctcttcccgtgcttcaaaactttcttcgctgacgacttttaacttg

SEQ ID NO: 166916 - DNA, 448 bp, Glycine max
  unsure (1)..(448): unsure at all n locations
tgtaggattatggngtacccatcacatgtggtactaggtgtcggtcgggctatggtgcacaacaagttttccacatccacaaagcacacataaacccaccatcccctgttgcccacctccaactgaggtcacgtactcccacgtagcccatatcctcttttctctcaacaccgggtccccatcaatcctcccaagcttccccaacatcaaagtaatacaacattcgcacagcacaagctatcacagccaagcaaaacagggcaaaggcagaaaactctgctcaaaacaccaaccaaaatcacagcttttcttacttaaagactccagtaacaattccttcgttccaattcgttaaccgttggatcgactcgaanattttactggaagtctctagtacttaagcctacattgtgaccgttgggatctactaagcaacatccagaacaca

SEQ ID NO: 166917 - DNA, 397 bp, Glycine max
agcttcaagattaagatggcctcagcaaattccttatttccggaagggaattctatcaatagacctccaatctttaatggagagggttaccactactggaaaacccgaatgcaaatttttatcgaggcaatagatctaaatatctgggaagccatagaaatagggccttatatacccaccacagtagaaagagtttcaatagatgatagttcatcaagtgaaagcataaccatagaaaaacctaaagatagatggtctgaagaggatagaaaaagagtacaatacaacttaaaagccaaaaacataataacatctgccctaggaatggatgaatatttcacggtttcaaattgtaagagtgctaaggaaatgtgggacactcttcgattaacacatg

SEQ ID NO: 166918 - DNA, 421 bp, Glycine max
  unsure (1)..(421): unsure at all n locations
tgaaccaaaaccggtgagagtgtgaccttaaactgtgagtgaacgactagctatgagtagtaatctttgcatgaatctctgaattttagaatgagatgcataaattaggatatgatgaaggccatgattgtacatacacacaagccttttgaccaaaaagcttaccttgaatgataattatatcctttgcacccattttgagctgaatgatattgtcaaaaatttgaaccctgaatttaaataaatatctctagataccttgcttagattctaggagagcatatcgttcaaggcaaatttaccccaaatttgggggagtggaactaattgggatgcaaagaanaagagaaagcgtcagcacatacaacaaataagttgtatgctaaaaagagagagaagaaaagaataaagtgtgctgatg

SEQ ID NO: 166919 - DNA, 340 bp, Glycine max
agcttcttagtttcagatgatactgctgagtttgtagctacctcatgcactcctctaatgactatagcatcatttatggcgctaaactgctgggagttggaagccatcttctcaattaaatttctggcttcagcaggagtcatgtctccaagggctccaccactggcagcatctatcatacttctctccatattactgagtccttcataaaaatattgaagaagaagctgctccgaaatctgatggtgggggcaactggcacatagttttttaaatcgctcccagtactcatacaggctctctccactgagttgtctaatacctgagatatctttcctga

SEQ ID NO: 166920 - DNA, 439 bp, Glycine max
  unsure (1)..(439): unsure at all n locations
tctcaaggaagctacctagtatatatataaaagcatgtgtaacactngctataactttgatgaatgagagtcttgtgagacacaactcaaagttcaacttctgtccctttatcttccttcaatttcatgctcccccctctctctttctctccctctttcttttcctccattgaagcatcctctccaagcttcttatccaaggctcatcttggtggtgaagctccttcttccatggcttattccctagtggatggcgcctcctctcacctcttctcctttgtcttccgctgcatctccatggtggaaaatcaccattaaaggacctcattgaagctcaaagatccagcctccatagaagccccataagcaagctttcatcaagtggtaatcagagcacaagagcttcaagaggtgctccttaaacctccattaatttttg

SEQ ID NO: 166921 - DNA, 400 bp, Glycine max
  unsure (1)..(400): unsure at all n locations
agcttattacttgttgatgattataacacatatatatgtatatgaatcttanaataaattaggaattaatagttcaaataataaaattaaattgaaggaaattattatattaagattcaatgataaatacttttaatttattttttagtttaattatttattaactctttgtaattaaaaataatatagttcgatttaatatatacatgttgtgtgccatgtaaatattaatactatgtcatgtgtatataattcatgagatgtgataacatgttgctttgggattataacattatgactaagattgggtgtatgtgataaattgagtatgtgttgaatggtaagatacgtgtattgagatngtatacgcattaagctatgaactgtacaatcacataac

SEQ ID NO: 166922 - DNA, 428 bp, Glycine max
  unsure (1)..(428): unsure at all n locations
tggagaggatgcttcaatggaggataagaaagagggagagttagagagaggggcgagcacgaaattgaaggaagataaagggagagaatttgaactttgagttgtgtctcacaagactctcattcatcaaagttaccacaagtgttacacatgcttctatttatagactaggtagcttccttgaaaagctttcttgagaaaacttccttaagaaaacttccttgagaagctagagcttaactacacacacccctctcataactaagctcacctccttgagaagcttccttaagaagattcctaaagaagctagagcttagctacacacacctctctaatagctaagctcaccttcttgagatgagaagctagagcttagctacacaccccctataatagctaagttcacccncatgacanaatacatg

SEQ ID NO: 166923 - DNA, 435 bp, Glycine max
  unsure (1)..(435): unsure at all n locations
atgacccttgggaccgtttgatcatgcaccctggacctttcgtccggaccttatcactgttctgcagcgggagctttgagtgactaactacataactgcggtggctgatgcccgctttcgtcgggaaactgccggccgactgattaatgatggctcacgcgaacacctggggcgccctcgctgtaaacaggctatgaagctatctgacatggaagaagacacacgatctctagtacaaatgtcaggacttattctcaagctaaacccctttttgagctttcctatattccacaaaccttgcaatgtcgacgtctgtgaaattgatccacatattacctgatagttcccaaactacgccttagaacttacatcgctacagataacacactgcgcatttgcatacttagacctgcccccctatgtaacaacatgccn

SEQ ID NO: 166924 - DNA, 499 bp, Glycine max
  unsure (1)..(499): unsure at all n locations
aggacaatgtgcnaatgataccctgcacnnatgaaacctttgatcccattgaacacncaatnaccantcggaacctatggggagcgagtgtataacgtgcagaacttataaactcttatccgctcaatgagccgacagcagactttggatggaaatactaccgtcagtgtggacgcatgcaagtgatgatacgtagtcccacggtgtccaactgattattatgtcaaaccggcatcatgttaatgtgtaatcatgaattttcgtctgtcggtccgatagatttattattgaacattgctacaaccccagatgaaaggcaaacgtacttgaaactgctatgacccctactcaagatgccgtgctttttaacaatgtgaggtggaacatgtcattgccatatgatttttgaccgttggatcgatacgaaaatatcctgaaagctttatacttaacccatgaccatagatgaagtgtaagatgcaacaaaacaagtgcgccg

SEQ ID NO: 166925 - DNA, 386 bp, Glycine max
gcttgagaaatatactaccccatgaagtttatcaattagttcatcaacagcgggaataggaaagttatctttgattgtgatggcattcaaggccctgtaatctgtgccaaatctccaagggccatccttctttttgacaagaatgattggaggtgaaaaatggcttctgctaggggcaataatcccttccttgagcatgtcagctatcattaattacttcaatctgatccttccggctgtgaggatacctatatggcttgacttttactggtccagcaccttcaaccaatgggattgaatgaatgtgagttcttctagggggtaatcctgatggcaccatcaagactgttctataagtgtaaagtaaacagttccgcaatggcatg

SEQ ID NO: 166926 - DNA, 348 bp, Glycine max
  unsure (1)..(348): unsure at all n locations
cggagatgcaatagtgctaaggtttctggttttagttactctatattgtggacaattaacttgnggtcctgtctttatgatatttaagtttaatgtgccaacctgttacaagttggtctttggcaaatgtgttaaaagatatgcatgttgattaataggaacgattcaacacctataggatatgaagagactctaattttggtgtattgctaaaatagtgatttctgaatctgatgcaaggctaactcgatgatatctactccaatatatatgatatacagtcctcgaacatagaggggttttggctataaaaatatcaaatattgaaatattatctcattaatatcc

SEQ ID NO: 166927 - DNA, 461 bp, Glycine max
  unsure (1)..(461): unsure at all n locations
agcttataagaacanaattgccttaatcatttccaaatatgcatgtgaattatgacgcatcaacaagaatcaagccaaggctattgtgcaagcaatcaatggggcaaaacacaccaaatgattataatgatggatggctcaaattctcacaaaggtaaaatcatcactttcaaattgagctttcaaaactatcatgacatgtaaagaagaatcaaggatttcaagtcacaaaatgtcaagaacttttattttcaaaacaattacccatttcttgaacatatcctataattcaaagaaaaacatgcaaagtcgtacgtgcacatgaaattgacccaaaatattaaactgaaaatccgacgaaactaacaacattaacaaattaacacaactaacaaattaacaaaaccaacaaaactagcaaaaccaaagaacactccccccccatacttaaacaacacatt

SEQ ID NO: 166928 - DNA, 430 bp, Glycine max
  unsure (1)..(430): unsure at all n locations
tccacttcaattcccattcgagtacctaacgggtgtgattttcaaacgttaaaaaccagaatacacaatacccttaagttaaccgacaagcaacttttggatgaaatttactaccggcagcgtttcacgtatgcaggtaatcaatttcagtttcaatgtatgcaactgaaagatgatgctgatgttaacataatgttaatgtgtaatcatgaattttcgtttgttggtccgattgagttattatgtagcattgctagaaccccatatgatattntaaacttacttgaaactactatgacccctactcatgatgccctgctatattacaatgtgaggtggaacatgtcatgccaaaatgagtttgttggttactcgttcacaggaaaaaatcccaaaaactatgacattcccacctgatgtaccatggatg

SEQ ID NO: 166929 - DNA, 433 bp, Glycine max
agcttgtaggattatgggatacccatcacatgtggtactaggtggcggtcgtgcgatggtgcacaacaagttttccacgtccacaaatcgcgcataaacccaccatcccctgttgcccacctccaactgagctcacgtactcccacgtagctcatatcctcgtttctctcaacaccgggtccccatcaatcctcccaagcttccccaacatccaagtaactcaacattcaaacagcaaaaattatcacagccaaacaaaacagggcaaaggcataaaactctgcccaaaacaccaaccaaaatcacagcttttctcatttaaagaccccagtaataattccttcgttccacttcgttaaccggtggatcgactcgaaaagtttactggaagtctctagtacttaagcctacattgtgaccgttgggatctact

SEQ ID NO: 166930 - DNA, 454 bp, Glycine max
  unsure (1)..(454): unsure at all n locations
gtatgcccgagtcattcatccctatgagatgttgatgtagtattggcgatcatattttccattccttggattatagggttgaaccaagctcatgcttttacaaaaaggttcatcaagtcaagttgaaatatggaagtaaccatcctgcataattggggcaaaagatgaattgagtcacatcactgcttcgtctactgccaaacatatntacgattgttgatgtccttgctacttccagtttcaccttgacaaagatgtcatggaccatgttgaaaatctaaattgattcaaccccatatcctgcgtaaaaattcgcaatcttcaactgtacatcattcgcatacatccatgcttttcattggttgcattgctcattgcattctttccttggaaaatataataaaataaaattaaatgaacttaataattgttatcaaaaaaaataaaaaaacat

SEQ ID NO: 166931 - DNA, 416 bp, Glycine max
  unsure (1)..(416): unsure at all n locations
agcttttgtgtagcgaatcttctattcctttataatacaagttggtcacaaggtgttcaattcaacaatgggaaggaattgtccattagctatttggccacgaaaagaacacaaagtacagtccatataaatataattgtacagcacaacagaaacaaagattgattagcatatgcatatacactagtttttttaattgatttgtagcatatatattagttgaatagtcaagtagtcgcaaaaaaaaaggggaaaagaaagaaaggataaacggaaagtggtggtggaaattatataactaaaccaaccccacatcctacaaaaataaaagcattttgataaactttggagttttttctgaaggtgtttcccatggtggtggngtacagaaatcttttacggcaatttttaaaaat

SEQ ID NO: 166932 - DNA, 454 bp, Glycine max
  unsure (1)..(454): unsure at all n locations
tccagagagtgggttgccgacgacgtcgttcagtttccaatgtgccacgaaggctctagttaccatgtccctctgggaggccacggagcaccagagacggcacacgcagctcgcacgtgcgagatcgatgattggaaggttctcgaagatgaggcggaggatgtcggtggaggatagcgcagagaaatgagaattcatcggtgagattacagtgcaggaagaagaggtggaggaggaagaagaggggaaattggaattcatgaggtgcctgaaaatgtcaccgtcgtcttcgtcgcaacaacaacccattggaagtggagttaagttacgggagaaaagtagatcttttagaggataaactttcattttggtcttacagaacgtgaggcaatgaanattttaactttagttttcanatatgtaaaaaactgtgaaaagttgataagtatatgag

SEQ ID NO: 166933 - DNA, 448 bp, Glycine max
  unsure (1)..(448): unsure at all n locations
agcttacccattatgttntagggtttttatgatgatgcttgtgatgtttgtgtgctgaaattgcttatggaaaactgttagagatgaagggtagagttaacctatgattagaaagtgagaatgtggtgttatgagtggaaaaagagtgaggctttgagagttggaaggctaaatctggattcagtggtaaatataggttaaaatgagttaatcctagttttaaatgtcatttaggacttatgagaaagcttgggctgtgcaagagagaaaaacaaatgaccaaagtgaaggcaagagccatttctagggtaaaattgggtgttgaggagtcaaattttgattcggtagagttttcgtcgtaaaaccagtttgagcaagtttagattgatgagatagacttgtttgaggtgagaagttgctccatatttaccccatgctcattttcact

SEQ ID NO: 166934 - DNA, 445 bp, Glycine max
  unsure (1)..(445): unsure at all n locations
tgactntggtttacacatgattgatacatgatatgggacttgtgtgatctgatttgtgcaagattggatgagaggaaatgtggttttcgaaatctgcactttatgcagaattttgttgtgaaattgtgtagcagaattttgcataagtgcagaaaaatgctatgcgtttgctggttgcggaaagagtagtgcagaatgagttctggatgtttgctagtagatcccaacggtaaaaatgtacgcttatgcactatagacttccagtaaaactttcgagtcgatccaacggttaacgagctggaacgaaggaattgttactggggtctttaagtgagaaaagctgtgattttggttggtgttttgggcagggttttctgcctttgcccggctttcttggctgtgatagtttgtgctgagtgaatgttggattacttggatgttgggg

SEQ ID NO: 166935 - DNA, 358 bp, Glycine max
  unsure (1)..(358): unsure at all n locations
agctagagagaaaagattttttgatacaatgaatganattatgtatgtcgaatcaatgctgaaagttgtatagatgggtatatatataatcagttacaacaataattaacttccaaccaactaaactaactttcaactaactaactaactaccactagttctaaccaactaaactaactagttaactaacaccaagaccacttgaaacaatgccttgtgctctctacatatatatccctctatcatgcacgaggaggaggctagataactttatcacgagggtagagaagaaagaacaatgcaagacagaggaatgctgatgaggaactttgagatatgtctcagctgttcttttata

SEQ ID NO: 166936 - DNA, 247 bp, Glycine max
  unsure (1)..(247): unsure at all n locations
tatcacctttaccagcgattgaaaaaaactnttagcgaatgtcaagaacatgaaagtgcaccgatactattaattggtcagcagattcttaagcgggttgaggacattaatacgatatttcgaaagacccaaaagaaaaaagtaaaacttgcatatggaataagaggtcgatattctatgatcttccatattggtctaatctagatgtcacacactgtattgatgttatgcatgtggagaaaaatgt

SEQ ID NO: 166937 - DNA, 377 bp, Glycine max
  unsure (1)..(377): unsure at all n locations
agcttggatgttgttcttgcattatttgcgaagatatgttactccgcaaccaaatttatgtattatatcagacaggggaaccagtttgctagcagctttacaatctgaacgtcttggttggaatgaaccagatgtttcgtctgtgtattgcattcgccacattgcatcaaatttcaacaaacagtttaaaaatgttgacttataaaaacaagtaatcaatatgggtatgtttcttcctatttcatgcatcatattcttgctttattacatgtttactatttattactcattnttctatcttttcgcacatggtatgagatgaggaaactacgatttgagctaagttgctcgctatgcgagcaaagtttccacaagca

SEQ ID NO: 166938 - DNA, 372 bp, Glycine max
ttgaatctcagctatagatgcccagcattcatacctatagatggagttgtagtattggcgatcataatttacattccttggattatatggctgaaccaagctcatgcttctacattaaggtacatgaagtgaggatgaaatatggacaggaccatcctgcataagtggggcatatgatgaattgagtcacatcactgcttggtctactgccgaacagtactaggattgttgatgtcctcgatacttccagtttcaccatgacataagatgtcatggaccatgtcgaaaatctaaattgattacgccccatatcctgcgtggaagtttgtattcttcaacagcacatcattcgcatacattcatgcttttgat

SEQ ID NO: 166939 - DNA, 438 bp, Glycine max
tgaactcgctaagctcatataacttagacaattttttttatttttgccttgcgctaagcgcctcacttttgcactaagcgttattcattgcggtttgtataaggctaagcgagacttgctcgctaagcccaatagcgtctagtagtcgagtcgcgctaagcgagcacctctcgctaagcgcatgtttaaaactgtttttccctgagctaagagagtgcctatctcgctaagccaattatgcagaaaagattttctgtcataactcgctaagcctatgagttatttctcataaggcacgctaagcgagcatgatctcgttgagcgcccactgtgtttttcagtttttaatgcatgctttcaatttaaataaaagttagctaatatagttttaatggttcttttgtcacaaatggcttcaagaaaaaggaaaagcactac

SEQ ID NO: 166940 - DNA, 436 bp, Glycine max
  unsure (1)..(436): unsure at all n locations
agctntggactattcaactcanaatctatgtatccaaaacccctcaatttaatggattctcaagggttgagaagtgaanatgagaatggggtaaatttggagcaaactctcacctcacacaagtctataacatcaatctaaacttgctcaaactggttntacgcctaanattctgccgaatcaaaatttgactcctcaacacccaattttaccctagaaatggctcttgccttcactttggtcatttgtttttctctcttgcacaagccaaactttctcataagtcctaaatgacatttcaaactaggaataactccctttaaccttcaaatacccactaattcagatttggcctttccactctcaagtctcactctttttcactcatacactacatctcacttttaaccctangtcactatacccttcatcccta

SEQ ID NO: 166941 - DNA, 427 bp, Glycine max
  unsure (1)..(427): unsure at all n locations
tctttgatgctgtaaggttgttatattgtatgcatgagatatatatgtattcatttgatgcacacaacaccaacaccctttttgcacacacggtgagttgaaaaggggccctatactcaggccatgggaacataacgagtggaagtgaatctatggtcatgctgggtctccgacttgcttgataacagtgaaccctcatctagagtttttctctttgataacatattgttgctggtagtccctactgtcgtaatatgtttgtcgaaggggatgatacctctagaaaccatcaagagagatatgaccaccttgggaattatcactaaaagccttttagttcctcctgtttaggtccctaanataggggcacaaagcgaacacgctgcgtgatatttacatactgccatgcatatanatgtcatgtaca

SEQ ID NO: 166942 - DNA, 420 bp, Glycine max
  unsure (1)..(420): unsure at all n locations
agcttgaaggactacgttacacggatgaaggatggtcagaaggacatttactacatcacaggagagagcangaaggcagtggagaactctcccttcttggagagactcaagaagaagggctatgaagttcttttcatggtggatgcaattgatgagtatgctgttggacaactcaaggagtacgatggcaagaaattggtttcagctacaaaggaagggttgaagctagatgatgagactgaggaagagaaaaagaagagagaggagaagaagaagtcatttgatgaactctgcaaggtcatcaaggacattctgggagacaaagtggagaaggttgttgtctctgacagaattggtgattccccttgctgtttggcgactggtgaatatggatggagcgcacacatggagaggatcatg

SEQ ID NO: 166943 - DNA, 427 bp, Glycine max
  unsure (1)..(427): unsure at all n locations
tgtgtttcttcatcgcaatctccattttcgatgccttttgtgattctgaattntttgtatctggcctttattgtgtcccgaatatcgaatttcctggctattgtggagtttttgcaatggtggtatcaacattggcatcagtttttgactctgtcagtntggtcgtgttcttctggtgttgcttcccacctatgtgtttattatacatgtccttgctattacattcacaaattacagttttatcataccttgcttttctttgcaggattactcgaatgaccagccccattattggatatccttaaagaacaatggtcaactttcctaccttaactcttttcttgcataacatgaggtgaaacaaaactcaacaggtgcaacttagccaaaagaaattattgaatatacaacaacttgagtggtctat

SEQ ID NO: 166944 - DNA, 332 bp, Glycine max
  unsure (1)..(332): unsure at all n locations
agcttgccacttatctcgcccaggcgagctcatttagcccaggcgagtatggttgcttcctccacacgcaacagccttctggaggaatcttctggaggccccaagtgggcctggttgctatttgcacccgcatttttactaaggacaccccccgtttctatttttttggaactctttttccgtaacgntacgaaactttacgaacttcgtaacgatacttaatttttcttccgcaaggttatgaacccttacgacttatgtatttactcttttttagctttcgaagaagttacggaaacttacggattgcgcaaaaacacctctttttgact

SEQ ID NO: 166945 - DNA, 399 bp, Glycine max
  unsure (1)..(399): unsure at all n locations
tgcctcanagaggtccaggaaggacaaggcggccgaaggaactagttccgctccggagtacgacagtcaccgctttatgagcgctgtacaccagcagcgcttcgaagccatcaagggatggtcgtttctccgggagcgacgcgtccagctcagggacgacgagtatactgattttcatgaggaaatagggcgccggcggtgggcaccactggttactcctatggccaagtttgatccagaaatagtccttgagttttatgccaatgcttggccaacagaggagggcgtgcgtgacatgaagtcctgtgttaggggtcagtggatcccgttcgatgccgacgctatcagccagctcctgtgatatccgatggtgttggaagagggccaggaatgcgagta

SEQ ID NO: 166946 - DNA, 482 bp, Glycine max
  unsure (1)..(482): unsure at all n locations
gctttgggttgaacctganatgaacnatgatacatgaatacggacctatgaaataaccttgtgttattttctctgatggttcattgctcttaacgaagttgagcgttaaattcgcttgtacagaagactatactgagctcacgtagaatgtgcaaatgcatgtacacgccttgagcgattgactcatctacttactagagccccacaagcttatatatagcatgtcccagccgatatcaaaggtacttttacacgatgacatgtgatgcacgagagcccactctactacatctgccttgacagtgtaccgcactgtgaatgaggaagaacacatttcctactagcactagaaagaaacatagatagaatctgtaagcgaaaatacctgaaagaacctccgcatgcttgctgacatatgtatggtagatcgcacatgtactccatggtacaccgtgaatgatgaccctcccatatgatcttct

SEQ ID NO: 166947 - DNA, 331 bp, Glycine max
  unsure (1)..(331): unsure at all n locations
agcttccctgcacatatntaattattaaatataaagaaccaatgcacaagtatgctagacaatccaaataattgccaccacttanacctcccaattattcttcaatttataattataaccaacatacagtataaatatgatgattaatacatttctatgtagtattttatgacttaaaaagataattttaatgagatattagaaaaagttctattgctaatttaaggtatttttaaagaactaaggagctaggaatcattagtagtggaccctaagctaagggtgtattagactaagtgtagtgggtataagcaagataatataatacatg

SEQ ID NO: 166948 - DNA, 220 bp, Glycine max
cctttgctttgaaagattgaagaaatctagatctagtattgttatgaacatttcaactcaacaacttaatcccagctggtttgaaataataataatacttgtcactcataaaaatattaatgcaagttgcatgacattcttgtctgtctcactatgaattaccttaatgacctctgcataagctggttgaaaaagatctgtaaacagatttgagttatat

SEQ ID NO: 166949 - DNA, 399 bp, Glycine max
agcttgtacttagttgaaataaacattttatagtcatgtatcgttttgaatatggcaattttgcattattttccccctcatattggttcctaggagtgtttttaagtggaacagaaatagtaggcaaattgtatattgacatggaaacttaactgtttttgtcgccgtttatctggtcctacaatgtctgaacccatttgtttggttagatcatagattaatgtttttgggtgtcatgcattactatatgttcagtttgtttgtttttttaaagtatattttcagtttgtgttagtgatgcaatgaaaaattaatgattgaataaaactaatgagaacaaaattgtatctcaatgactgtgggttgcggctacggaatagcctcgactccattagaaca

SEQ ID NO: 166950 - DNA, 405 bp, Glycine max
  unsure (1)..(405): unsure at all n locations
tgtgcccncctctctccaactcacttgagntttacttaagcatataccttgcttgttctcttcactcatattcttacttgagcgtcagagtcttctattttgcaccctctctccagctcacttgagttttacataagcatatacttgttttgttctcttcactcatattcttacttgagcgtcagagtcttctattttgcaggtcccccctcctatcaaaggtacctctccaagatgacatgtgaagttcgagaccccactcaactacgtctgccttgacgtgtcatggttttggattttggtaagaacacaaccctcacttgaacttgaaagaaagatagagaaaatagataaggaaaaatacctaaatgaacctttgcttgcttgcttagatgtgaatggaac

SEQ ID NO: 166951 - DNA, 450 bp, Glycine max
  unsure (1)..(450): unsure at all n locations
agcttgtccatggtttagacatgattgatacatgatttaggacttgtaggattcaatttgggaaaaattggatgagggcaaatgtgatttcgaaaatctgcactttatgcagaattttgctgtcaaatatgtgcagcagaattttggctttgtgcataaaatgttgtgtatttgctggttgtggaaagagtagtacagattgtgttctggatgttttctagcagatcccaacggtcacaatgtagacttatgtgctagagacttccagtaaaattttcgagtcgatccaatggttaacgaattggaacgaagagaatgttactggggtatttaagtgagaaaagttgtgatattggtttgtgttgggcagagttttctgcctctgccctattnttccttggtttgatatttcatgatgtttgggatgttgaattgctcggatgttgtgga

SEQ ID NO: 166952 - DNA, 407 bp, Glycine max
  unsure (1)..(407): unsure at all n locations
gaaatgacaataactntatacacggatgttctgttgagtcccgtttatatcgagacgctcaaaatttagatccgaagctctgaaaaaattgaattgacaataactttatacatggatgtccggctgagtcctgtaatatatcgagacgctgcaaattgaaaacggaagctcgtaggaaattcaaacgacaataactttttactcggatgttcgattgaatcgggtaatatatcgagacgctcaaaattgagactagaagctctgagcaaatttaaataacaataactttgtacacggatgtccggctgagtcccgtaatatatcgagaggctccacattgagaacggagactcttagaaaattcaaacgacactatacttttactcggatgcccgacagagtgtcgt

SEQ ID NO: 166953 - DNA, 407 bp, Glycine max
agcttcaggctgctcgattgctccaggttgctgcatggaagggcaaaggtctgtatggtggtcagcagaggagcacaaaccacaaacccttgcaacaggtacaaatttctgattcaaggccagctgggttaccaagttaaccaatgcatccagtttgccttcaagcttcttagtctcagatgatgcagctgagtttgtagctacctcatgcactcctctaatgactatggcatcatttctggcgctaaactgctgagagttggaagccattttctcaattaaatttctggcttcagcaggagtcatgtctccaagggctccaccactggcagcatatatcatacttctctccatattactgagtccttcataaaaatattggagaagaagctgctccgaaatctgat

SEQ ID NO: 166954 - DNA, 454 bp, Glycine max
tgcttgtggagcttctatggaggctggatctttgagcttcaatgaggtcctctaatggtgattttccaccatggagatgcagcggaagacaaaggagaagaggtaagaggtggcgccatccattagggaataagccatggaagaaggagcttcaccaccaagatgagcattggataagaagcttggagaggatgcttcaatggaggaaaagaaagagggagagaaagagagaggggggagcacgaaattgaaggaagaaaaagggagagaagttgaactttgagttgtgctcacaagactctcattcatcaaagttacaacaagtgttacacatgcttctatttatagactaggtagcttccttgagaagatttcttgagaaaacttccttgagaaacttctttgagaaaacttccttgagaagctagagcttagctacacacacccctctcat

SEQ ID NO: 166955 - DNA, 435 bp, Glycine max
  unsure (1)..(435): unsure at all n locations
agcttgagcttggtcaaccccgtaatccaatgaatggaaattctgattgccaatacttcaacaacatctcatagggatgaatgactcgggcatactttaagcttatgcacggaaaatgtaattatgaaattgagatgcccgaagaaacaccatttcctagttaaccatgcattaggtaccatgttcaattattttgttttggtgttgtgtgtgttttttttttagaaatgggtttatgatcccaacatggttggctcatggtgcctaacacatgcaactaagaatgtagtgtgaagtttcacgcttccccttttttgttttggtttgtagaggaaaacgcaaggatgagcaaacatganaacaaatggtatccaattntgcagatcaaaaagtttgttgaacgcatatgcatgatgatgccatgactcatgcaaa

SEQ ID NO: 166956 - DNA, 432 bp, Glycine max
tcaagtgaactagggagcagataagaagttctcacccggtatgtcgaaagctagaaagaggagcctaggcaaaagttagggaaataaaaaaggaaaaaaaaaataggggcgtgttatcaaaggttttgtccaaaatctaaattgtaaaagtctctagtcaatatttgaaatgacacatggtcatgcttcattatcccaaacactaatttatcccttgttaccccttctgagccaaagcatatttgttttcttttaaaacaacaacaacaacaacaaaaacccgtagtagcaaccaccgctgagccggcgggaagagcaaggcaaacatcatatgcatgaggtaagctctatgttgggcaacaatgatgttaaggaaaaaaagcagaaagcatatctgccaaaggcgagcaaagcaaaaagagacaaaagatc

SEQ ID NO: 166957 - DNA, 369 bp, Glycine max
  unsure (1)..(369): unsure at all n locations
agctttcanattaaagtaccaaagtacacaacataaactaatacctactaaatataaattagtcatatccaactacacatcctaataacaaaataaaacaagaaatgagtcttcacttttcttcatttttatactagatctttattagcagccttccttctagtgaaccttggtgttggcatgaaaagtaagggtgctgttggtgggccatccacaacaggtgcgtctactgttgaagtgtctgaaatgttcttttgtttgggtcttcttatgtttagcttataccttgctactggtggaacatcaacaataggtgtagggacctacatgcaaatgccaaacatgaataacacttgcaatatatataaa

SEQ ID NO: 166958 - DNA, 441 bp, Glycine max
tgtaatggtaagaaaagagcaacacacacaatcatctaatatgcagcaagtattaaaaaaaatagtaagtataaaataaaagtgtgtgctgccaattaagaaaaagaaaagctaagtgcggaaaagcaagtaatagagctggaataaaaagaaaaaggttgatctaaggatgaatgctctcctagaacctaagcttttgcatcctagaaaaaccatgaattgtttgcagcccagcctcgttacaagcctacaaaagtccttcgaattcagtttgtgtgttcttgactgtatggcatgagatgaattgcaaagattgagacttttgttagttgtggattgttgaataagcctaaacacttgtgcttgagggaaacaatgactgtgaggatttggttaacgatccttccttgatatctgtcatgcttaccagcttatttcagc

SEQ ID NO: 166959 - DNA, 267 bp, Glycine max
  unsure (1)..(267): unsure at all n locations
aaataggactaattaatttgggagacgctaacctataccaacatacatatcattaagcggcaactgtaaccataattgattgatgtaaccaccagttgcaattattgatggttattccaagtattgaccaataanatcacagtctataattgcgaataattcctcaatatttcccagcacatatgattgttaattggtacgtggcactaaattcttacttttccttcccttgcctactttgacttgtgcttgtgcaacaagtgatga

SEQ ID NO: 166960 - DNA, 431 bp, Glycine max
tgaaggattataactgtttcagtattatgatggacaacatgcttcaagtatcatagcttacaacattttctttttctggatgcagcgtgaactttaagcaatgtatactcgtaccataaaaaaaaaagttggactgtcttcggaaaatgaggcacaaaaccttgaggcactgtttgagtccataatcagattcagatgcctccctggaccaattattgacgaagataaagcactacaaatgtctgttaatgttgtttgttatatcacttttcttgatattgcttatttcagtgttctgatggatgggtttttttacattcccaattttctgtatagtgctatcatgccaactcattagccatgtaacaattagtatcatgtactagtactaaagctagttcttattaccatggacatgctcaaatgaaatc

SEQ ID NO: 166961 - DNA, 386 bp, Glycine max
tgaaggtttgtacatgaccaaatctttagttaatcttctttacctaaagcagtctttgtattcatttaaaatgcatgaagatagatcagtaggagaacaattggatttgtttaataagttgattctagatcttgaaaatatcaatgtcaccattgatgatgaggatcaagctttgctattgttgtgctctttgcctaagagttactctcatttcaaagagactctactgtttggaagagacttcatttctcttgatgaagtgcaagctactctgaattcaaagcaattgaatgaaagaaaggaaaagaagtcctctacaagtggtgaagggctgacagcaagaggcaagaccttcaagaaagatattatatctgataagaagaagc

SEQ ID NO: 166962 - DNA, 341 bp, Glycine max
  unsure (1)..(341): unsure at all n locations
agcttgtagtttattcaaacgacaataactttatacaaggatgtccgattgagtgccgtaatatatcgagacgctccanattgaaaatggaaactcgtagcaaattcgaacgacaataactttttactcggatgtccgattgagccccgtaatatatcgacatggtccaaattgaaaacggaagctcgtacaaaattcaaacgactataacttttcactcagatgtccgattgagtcccgtaatatatcgagatgctccaaattgagaacgggagctcatagcaaattcaaacgaccataactttttacttggatgtccgatggagtcccgtaatatatcg

SEQ ID NO: 166963 - DNA, 401 bp, Glycine max
cttgagcaaattgaaatgacaataactttatacacggatgttcggttgagtcccgtaatacatcgagacgctccaaattgaaaacggaaactcttataaaattcaaacaacaataactttttactcggatgcccgacagattgtcgtaatttatcgagagatgctccaaattgaaaacagaagctcgtatcaaattcaaacgacaataactttttactagtatgtctgattgagtcccgtaatatatcgagacgctcaaaattatgatccgaagttctgagaaaattgaattgacaataactttatacatggatgaccggttgagtccctgtatatattgagacgctcgcaactgataatggaagctcgtatgaaatgtaaacgacaataactttttactt

SEQ ID NO: 166964 - DNA, 168 bp, Glycine max
tgcgtttatacgatgcgtgcgccttcttgccccgagacggagccacaacaccttttattcatgccgactgctcaggccatgcctacggtgacgtccatgccagctccgttacacaccccgcacccgtgcaaccaagatccgaattactaccggatccactgcccatgc

SEQ ID NO: 166965 - DNA, 296 bp, Glycine max
gctttgaatatataaataaataatgacctgtaacatcaacaaagacatcatcactttttcgccagtgctttcgatggtgtcgatacgtaaagatagccccaagacacagaatgcaaatgcccacacttgctaacgacattttgcaatttgatttgtgggctgaagctgcaagaagaggcaaactttaaagagctacctagctaatcgtttttattttcattttatttctagatcttattcttcaagttaaattacacattctttaatatgtaccataacataattacaccctcctt

SEQ ID NO: 166966 - DNA, 314 bp, Glycine max
  unsure (1)..(314): unsure at all n locations
taactgtaatgaattataacttcatactacgagtgcgagtttattattcccatattttctctactatgatgttctatattcagctagtacatatttcaatgttcttcaagtgcatttatccctaattgtgggatcattcattattggaaaatttggaatactgaaaaaagtttgctacttacaggaaaaccaccattcatgtataacatgggacggcttgctgaatactgcagtgtgccaacctatggagtgtctgtattaccagactcattgccatatacagagtctgcaattctaagatgtgctgtgnttac

SEQ ID NO: 166967 - DNA, 503 bp, Glycine max
  unsure (1)..(503): unsure at all n locations
attgaaccccttgagaccccgngatcctcagagtcacctgtggctgcagctncatggaatcaactagatgccctacttctaaaaatggctaatccgatnaccaaccaacaatacccatctttttccttcgtgcaagcaccatcggccgcttcggtttctagggtgggtgcgccttctttgcccgtgccggtgcaacaacaccaattatccatgccgacttcttttgccatgcctacttttgccgccatgccaactccgtttccacaccccgcacccttgcaaccaagtcccgcatcattaccggctccacttcccatgccagctctgcatcttcccgctctcgatcacgtttgtgctgctattcccattttcgacaacctcttcagtactgtccttcgttatggccatacaacagctcctcatgccaagcatggagaaaatatagacatcgtgctggttgagctgggacctggatntttgggactatatggctcatgcaagcg

SEQ ID NO: 166968 - DNA, 462 bp, Glycine max
  unsure (1)..(462): unsure at all n locations
actcagctgcttctacaatctcccnctttntgatgatgacaacttctgttatcacgaagcactttcacacacacacacactnttcctagtcgatcactctcataaatttccattctccccctttgtttttgaatttatgcttctcttaaaattaagttgattactcatgtgacttcttgatttaatccctatttctctccccctttggcatcaacaaaaagccaaagtgcgtaacaaatttgaagcatgcaaatacaactaagcatccacacaacattcatgaaaaatataaaccaaatcatgaagcaagaactatgaggcaagaaccacgaatataaaatccacgtagtcaaataacataattaatatttgttcaaacatactatgcaaataaagaaatagtaaattgttcaaatatcatcataatatagattatttggataagtcactgacatctattag

SEQ ID NO: 166969 - DNA, 417 bp, Glycine max
  unsure (1)..(417): unsure at all n locations
catgcaagctttataggtgaaatcaggtgcagccattttccttagagtgtaacagtgtangtttgaactacagctacccttanatgatatccaaatgacttgaaattttgtgagcaacaccctaaaaccatgaaaagatagcacaaaattttcagacaaaaattcaaagtctaactatggaaactacctaaggaaagtttagaaaaataaaacaataaaacttgaaaaaaaaaactggtaaacaggtgattttggctagctagagacctcagccaaactttggctggctgcagcagtatgggaaatttttttctaccccaaatacatatataataatagtcattctgatacccggagcaaaagttatggccgtttgaagttntggtaaacacaagttctcaaatttttttgaatctc

SEQ ID NO: 166970 - DNA, 426 bp, Glycine max
  unsure (1)..(426): unsure at all n locations
tcntatttaaatttcgaacgtcttgatatattacgggactctataagacatccgagttaaaagttaatgtcctttgaattttctcggagcttttgttttcaatttggagtgtctcgatatattacgggactcaatcggacatccgagtaaaatgttattgtcgtttgaatttgctcagagtttcttttttaaatttcgagcgtctcgatatattatgggactcaattggacatcggagtaaaaagttattgtcgtttgaatttgctcagagcttctgttttaaatttcgagcgtctcgatatataacgagactcaataagacatccgaggaaaaagttaatgtcatttgaatttcttcgaagcttctgttttcaattttgagcgtctcgatattttacaggactcaatcggacatccgagtaaaat

SEQ ID NO: 166971 - DNA, 364 bp, Glycine max
  unsure (1)..(364): unsure at all n locations
ctcggatggatctcatgctatgatttatcgnattggtgattcaaagtcagtctcataccattggtggttcgaactcaaatcgtggtactccaggttcgtctaacggcattccggttactttgattatgacagtttctgcaattcgagacatttctttgggttttccgcattttgatggcaatacaccggtcttggagtggatcttcaaagcagagaagttcttcaattatcataacactccagatctggatcgagttgatattgcttctattcattttgagaaggatgtgattccttagtttcagatgttgcaacggatgcaagttgtgagcatttgggctgagttaacacgtgctttggaaac

SEQ ID NO: 166972 - DNA, 456 bp, Glycine max
gcttatcccctaatgcacctattccattcctcccatggtcatcatcaccataaacagcaataacctctctccagccaaagtagttaacaaagtctgctattgcagtcatttcataaatgtcactaaaagcagttctaataaagaatgggaattgaagtgaagaaagagtagggtcagtggctgtaaatgatagtagaggaacttggagctcgttcgctatatgagatatgacatgagctgttgtagacgtctggggaccgattatagccacagtttgtgttgccatgagctgcaaggctattacacacaatttatgtaaaccaagagtaataatctgccaaactttgaagtaacttgtctaatagaaaaaaagatgcttttaaagttttaacacataaaaaagatgggaatattgtgaaggacgtaccctcggcaatgctcagaaaacctctgtat

SEQ ID NO: 166973 - DNA, 398 bp, Glycine max
ttcttaatcaaaactcaatagtcattattaaaataatatctatctagttgatccgtcattgtgttttgtggttgaacttgttcttcttgtattcaaggatctgttgtgcaataagatccaactcattctggggatggccattgttaacatttctatattcatccatttgataagatgaactatgtaagttgaactactgcatatgttgtggttgtgcatttcatgtggctgcactacaaaatttggaggaggaggtaaaacccaattatgttgattaatgtagggagtaacaatcatgtcaatgtcttttaaggttgtgtcatggatgcttcttcttttcctctttttctttgaggcattcttgccgttaaaagtacttttgagcatgacttgtaact

SEQ ID NO: 166974 - DNA, 449 bp, Glycine max
  unsure (1)..(449): unsure at all n locations
tctgcaagctggaaccatttatcctatctccgacagccaatgggtgagtcccgtctctgtagtcccgaagaaaaccggcctcaccgtgataaaaaatgagaaggaggagttgattcctactcgggggcagaacagttggagagtctgcatcgactataggaggctgaaccaggttaccaaaaaggaccattttcccctaccattcattgaccaaatgctcgaatgcctggcaggtaaatctcactactgtttccttgatggtttttctggttatatgcaaatcactattgctcctgaggatctggaaaagaccacattcacctgccccttcggcacttttgcctataggaggatgcctttcggcctgtggaatgcccctggtaccttccagcggtgcatgatcaatatttttagtgattttttacaanattgcatagaggtgtttatgg

SEQ ID NO: 166975 - DNA, 142 bp, Glycine max
  unsure (1)..(142): unsure at all n locations
gctgcanaatcccttnttgttggtgtgtgtttttttttggtttgtgctaaaggtggtcttcgtcattggaagtgcggtagacaggctttgtggttgatttagggatggcctttgtggataactgggtggtgggtaaggagga

SEQ ID NO: 166976 - DNA, 448 bp, Glycine max
tagagttaagtctcgtatcggtttaatcgattatcgatatctcataattgattacactgctgtttgagacaatgattgatttagtcaggagtctccactttaatcgattaccaagtggattaatcgattacttctctctcgttcatgtgttcagaggtgaaaaagaacactttaatcgattacataggtcatctactcgattatattgtccttgagttgttttctagatgttggatgaacactttaattcattacttagataatctaatcgattactttgttaaaataatcgattaccttatagatttaatcgattactgacaattataattgttttctctataaataaccttatgttagaccttgtggcctcaataatcttaagagggatagacttagaatgctgaagaagcagcaacaatcaatttaataatgttctttaaacatg

SEQ ID NO: 166977 - DNA, 361 bp, Glycine max
agcttgccactgtagcagttaagggaacaaatgaagtgttattaactaataagatttcctgcatgttattaactaataagatttcgttactgctttcagccctttgatgatgattatcgtagccatcatgggtgccttcatcctttcagaaaaaatatatcttggagggtaagtactcaatactcatattcactcccaatgaacatatcttgttttaggcacaaagaaagaagcttaaacgttttaattgactcactcttgtagcataaactaaaagtttggtgtttcttacataaaagttgaaacatgacaatcttaaaaagctatagtcattagagcatgttaggaactgggctgattt

SEQ ID NO: 166978 - DNA, 413 bp, Glycine max
  unsure (1)..(413): unsure at all n locations
tgacatgctattgaacaagcagttatatactctgcttcacttgtagagagtgcaacaacatcctgtttcttagagcaccaggagatgggagcacctccaaacaataaaacatgccccattatgctttttctgtcaagaacatctccaccacagtctgagtctgaataagccacaagttgtggctcaaccttctctttctaatgtggaaatagaacaccaaagtctagtgtgctctcaagtatctcagtatccttttagctaccatcatatgtgaatgtcttggatcactcataaacctactgataactcccacattgaaagtgatttctggtctggaatgacaaatgaatctgagactcccaacaatntgcctatacaaggtacaatccactacaggttcagctttacattta

SEQ ID NO: 166979 - DNA, 361 bp, Glycine max
  unsure (1)..(361): unsure at all n locations
agcttgcttgtggagcttctatggaggctggatctttgagctntaatgaggtccttcaatggtgattttccaccatggagattcagtggaagacaaaggagaagaggtgagaggaggcaccatccactagggaataagccatggaagaaggagcttcaccaccaagatgagccttggataagaagcttagagaggatgcttcaatggaggaaaagaaagagagagagagagaaagagagaggggggagcacgaaattgaaggaggaaaagggggagagaagttgaactttgagttgtgtctcacaagactctcattcatcaaagttacaaaaagtgttacacatgcttctatttatagact

SEQ ID NO: 166980 - DNA, 399 bp, Glycine max
  unsure (1)..(399): unsure at all n locations
tgtgtgcattgtatacgctagaatatgttctgttnttggatgctacatttctaattgcaactgctatgaaatcaatgatgttgacaacaacaacaacaattgttgttgcctcttggaacaccgcgagttgtacaagaaaaattattgtctttatgaagaatcacttcagaagcgtgtcacaagatcaggtcctattcccaaggctagtaataacaacaaaaccggtgtgatacggttcttgaaccgtgacggtgaagttgataggccaaagagtagcgttaataatagggttttgaggctggcgccgccatcgacggtgggcggngcggngctggcggtgaagtatgcggaggtgattttgtccgcagagcagtggttgcacgctccggcaacggtggg

SEQ ID NO: 166981 - DNA, 330 bp, Glycine max
  unsure (1)..(330): unsure at all n locations
agccaaaaactttaacaatgaccanagcaagacatctacattcaacttcagtacttgagtgtgcaacaacaaattgcttcttagaccactaacagatgagattggggctgaagaagacacaagcgtcgaaggtggaccatctgtaatctgggtcagacgcctagtcagcatcacagaaagtcacaatagaaaaaaggtgcagaagcaagcttgaaatgcgagccccacgagatggttcccttgagataccgcggtatccccttatggtatcatagtgtaacgccctgaaatttcgctaactggaaatcgattttaatgtatttctcatct

SEQ ID NO: 166982 - DNA, 426 bp, Glycine max
  unsure (1)..(426): unsure at all n locations
acattntagcttcaatgcgagaagacatactcatggctaggaatccaaaatttggttttagagttagaaaagcatgaaaattaggacttgcttgtgagagtttttactcgaatttgggctgccccatgatcgatactttgcacctaagtgacgtgggaaatgcttttcaatggtatgtggatatatgtggggcatgaaattccttgccaagtgtgaatgattattttcctaaatgaatgtatgatagcacgtaattcccttttgaatgcaagtgtgtgcataatgtaaatagcttgccaatatgaataaatgtgagtgaaacaataaaatttgtatgatatatatttcanatatatgtangtagttggtaatagcaaatgtttaggatataaattaggtgtgaattttgacgcaatgccttgagcg

SEQ ID NO: 166983 - DNA, 226 bp, Glycine max
aaaacccagccgaggcgcttcccgaacgtttctggtacgtttccgggagtaattacgcgaagattctcgaccgttcttcaacattcatcgttcggtcttcgttttcttcagcttcaacgggtaagtacctctaaccgagcttttctattattttatgtacccgtgggggccacaatttgttcatgtattttattctcgagtcattcgttttattccccctttgacg

SEQ ID NO: 166984 - DNA, 420 bp, Glycine max
tctagaaccctagcttgttccaaaaatcaaaccacatgttgattaagttatataaaatattttttatttaactacatgtctttaaatttaaatcttaaatatataatcatattaaatatttagagaaagaattttaccgtgtataataactctatcgtctatgattttaattcacaaaagatttcaatcctaagagcaacttaatagaaatacactacactacccaaatatacatggtggtatctagctcgacagatatttatcaaaataataataatacatgtcgtcttaatcttagattattattgattatgtaggctctagcttctcttaatatttttcctatcatgcatgtttcctttgttgggtgtgttggtggtgttattattattattattaatattattatcatagaatatg

SEQ ID NO: 166985 - DNA, 372 bp, Glycine max
  unsure (1)..(372): unsure at all n locations
agctatgcatctcatatctcttccgcaggccttctctcttgccgagctacatgaggataagttggaggaccattgccgcccttaccgacctcgtcacacacccatcaccaccactgcgctaccagagcgagctatcttaccttcaccacccaacctggcctgcaccccttcccattccagaccccaagttaaacatctaaccccatgagaaagggcccgcgaacgcgaacaaggcctatgctataactgtgacgacaaataagggcccaaccatcgntgtcgcgctcatttctttntggtgattgccgacaatcctagcaccactatcccactcgaaacctatgttaccanaccacctatcccaccttcttt

SEQ ID NO: 166986 - DNA, 403 bp, Glycine max
tcaagtaagaaccttgaacgaaaatgaggaagatataagacgaaaaaagaggtttaagggcttcttaccaaggctttgagagaacaagtctcaaaacactaagatagagctcgcattacgacgaaaatggtggcctttccctccttgagtatctcgtgaaaatggaacagaatgacagtccaagttgtgatttttggaaagaaaatggtgagaaacgatggaaaatgatgcaaggctattgatgtattagattgacaagcttaaatgaccatagtataggccatcttggacatgtcaatgctagccataagtaagtagtttaggttttgaatttttagccaacaatggtaaaaaattggttttaatgaaatagataaatcatatcttaaatgtctagaataac

SEQ ID NO: 166987 - DNA, 298 bp, Glycine max
  unsure (1)..(298): unsure at all n locations
agcttcanaggactaaccgcctgagatatcttttgtttccccttcacaaagtttcaaaggactaaccgcctgagaactttgtcgtaacacattggagggtacatcctttgtggtacaagtagagggtacatctactgggttgttgtgactgagaacaagagagggtacatctcttgtggattagttcaagtggagggtacatccacttggttgttcaaagagaacaagggaggggacatcccttgtggatcttttgcttgaaaggatattaccaggttgaaaagaaatctcaatgact

SEQ ID NO: 166988 - DNA, 248 bp, Glycine max
tctaaggaggtgagcttagttatgagaggtgtgtatgtatctaagctctagcttctcaaagaagtattctctaagaagctactcaaggaatgtttctcaagatagcttctcaaggaagctacctagtctataaatagaagcatgtgtaacacttgttgtaactttgatgaatgaaagccttatgagatacacttcacagttccacttctttccctcttttattccttcaatatcgtgctccccccttc

SEQ ID NO: 166989 - DNA, 357 bp, Glycine max
ctttagctatgtgtgctgatgttggctacacagatagagcatctgaaattttttatgaaatgaaaagttctgggacttgccagcctgacagttggacattttcatccatgattaccatgtattcccgcagtggtaaagtttcagaggcagaagggatgttgaatgaaatgatccaatctggatttcaacctactatttttgttatgacatcactcatctgctgctatggaaaagcaaagcgaactgatgatgttgtgaagatatttaaacagctcctggatgtgggcattgttccaaatgatcacttctgctgttctcttctaaatgttctgactcaaacaccaaaagaagagcttg

SEQ ID NO: 166990 - DNA, 459 bp, Glycine max
  unsure (1)..(459): unsure at all n locations
agctngcagctattagaagagaaagaacatgtgattagaaatatgacagaatatgttagttagtttgtcagatggattgtgaaggaatgcattaaccacatcccgatgagagtgtgatccttaaattntgagagcaacaactattatttagtactgatttttgcatgaatctttgaagtatagactgaatgcatgaattgaggatgatgaaggccatgttttgattgtgatagctacttagccaaaaagatgaccttgtgcttgaatgaattatcccttatttgagttgaatgaattattgattggttgaaccttgagcctatacagtgttatctcctactaccttgtcttaggttgtaggagagcatcatcaacaaaaagcttggttcaaagaanatttgtcccanatttggnggaaaatactgggtaagaattgaaatggtccaagtaaatagcatg

SEQ ID NO: 166991 - DNA, 456 bp, Glycine max
  unsure (1)..(456): unsure at all n locations
ataacgctttcatctcttccaccaatgtagagaacactcttgctgtatgtatgtgtgtatattntgttnttctttntaaaaatttatatatatatatatatatatatatatatatatatatatatatatatatatatatatatatatatataaatctatgaaaaattgtacaatccacaggtttatcggcttgaacggtggaaaagctgaaccgctctataataaaaaaaatattaaaaaagtcaaagcaagatattggattcaaatgtggtgtacatacacgacaaattttcaactgcacttcgctcttttaatgacacttttctatgtgtctgttacccgcaaattaagcgcgaaaatgacatagagcgtgtgaatataaattattttgttttgctttatacaacattgaaaagaccaacataggttatcatgtatgtatctttgagatataag

SEQ ID NO: 166992 - DNA, 430 bp, Glycine max
tgatttctatacaaaagtgattcatgtaaagcgactaacatactcccccaaatttacaattttacttgtcctcaatcaaagaaagaacagttcacttgtcctcaagtgacaaagacaatggccaatcaaaagaaaatggtgtttgattcatcaaggacgtcaaccatatgaactgaataccatggaatgcttaaatcaattacttctcacaagcatgcagttttttcaaagataagagcacaagtattagagtcacagctgaaataagctagtaagcatgagaaatcaaggaaggatcatcaaccaaaacctcacagtcattgtttcactcaaactcttttttggcttattccatcataaacaaccagcacgagttccaaccttttgcattaatctcctatcatacagtaatgaacacacaaaaatgaat

SEQ ID NO: 166993 - DNA, 445 bp, Glycine max
tgaaggtaaactagatgccttggttaacctggtaacccaactggccatgaatcaaatatctgcacctgtcaccagactctgtggtttatgctcctctgccgaccaccacacagacctttgtccttctgtgcaacaatctgaagcaattgaacagcctgaagcttatgctgcaaacatctacaatagacctcctcaacctcaacaggaaaatcagtcacaacagaacaattatgacctctccagcaacaggtacaatcccgggtggaggaatgatcccaaccttagatggttgaatccttcacaacaacagcaacaacaaccttattttcagaatgctgctagcccaagcagaccatatgttcctccaccaatccagcatcaacaacaataacaacaacaaccccagaaacagcaaacaattgaggctcttccgcaatcttccctt

SEQ ID NO: 166994 - DNA, 474 bp, Glycine max
  unsure (1)..(474): unsure at all n locations
acccgctgcatgcctgctntgtccgcanatccctcatttaagactacacccaatttagacaaccctcttaggtttagactaacttaaactgagttntgtccgcagatccctcatgtaagactagactcagctcaggtagcttactaaagtttagcctaagctgtgttcgcagatccctcatgtaagactaggcttaaactaaacagcataattggaacaacataattaanaccaaaacttaacacgcagatccctcatgtaaggctaagtttcaatactacttcaatcaagttctaaagcaacagtacactttccaatgctaaagtcacctaactgtgcacacaaatgggtgatcagaccaaaagcatacaaacattaagcattgaacaaagaagacataatanattagatattaggtatttacatcattnggtcattagaaatccctaactatgggggttagctagccattac

SEQ ID NO: 166995 - DNA, 447 bp, Glycine max
gactcaaggagagacttagaatggctttatagtagagtttaaaaaaactataaaaaaaaagactcaacaaacctctagctttggcccttgtttttcacactaattttcaatttaaatttaggaactaagattggtataaaataggaaccaattatagaataaattgtgagccaaaacaacaagcacacttccctttcactttttttttcatggatactgatttttctgctaaattgtgtgatttttagtattttttccttttattcaaatcacttggttcttttattatgactttttttcggatgtctagaaaattcagtaaaactttcagctccaaattcaaagtaaccaattctcagtaatttttacaagtttgtatgtcccagttgccagcacgagtgattttttttttaagcatggtatattgattgccttgggcttactttc

SEQ ID NO: 166996 - DNA, 400 bp, Glycine max
  unsure (1)..(400): unsure at all n locations
catgcaagctntntcacagtcaactgtgaagaccatgcaaggattgcttctggatntagcttcagctataacctcattagcaatcaacacaccatgaagaatatgccttcctttcagaacagcagtttgcctttcatcaatgaggtgagggaaaacaagagccagcctattagccagaattttggacactattntataaacacaccctataagagagatgggtctataatcattaagagattgagggttaatgatcttggggataagggctatgaaggaagcattgcttcctttggggtataagccattgatgaagaactcatccaagaaccgaataaagtcaggttttagaatctcccanaacttcttgataaaattaaagttcaagccatccgagcca

SEQ ID NO: 166997 - DNA, 453 bp, Glycine max
tcctagcggtttctaattatatgggccattagatctatcatatgttgacaatagccgagaagtccatggatctcctcgggggcggagtaggtgtccgccattgctttggccttggctagcaatcggggaagttcttgactcccgttcaaggtaagagcaaatcggtccatccatatcgttgcctcttgatgtaacgagtcgatcacccttcctctagcctccttttccgcgtacacttgggcgtactcgtccgccactctatgctcatgggctggggctagatttagttcttcttggtacttggtgatgatagctaacatgttggtctctgtttcgcataaccgctgagacaagtttcttttggaccttgagcaaaccttcaactcatctttcaagatcaaactgtctactcgtgattggtccctttcctctctccggagcttaagctcgctg

SEQ ID NO: 166998 - DNA, 270 bp, Glycine max
  unsure (1)..(270): unsure at all n locations
agcttgngcatatcanatcactcctacatctcatctctagcatgcattntctttctttacccactcctcacgtttggttttttaggggaaaaacaccataactaaacgcgccgcaagggatccctatcgaaccagatccaaatctagaacgatgggtgatcaagaggagacacaggaacagatgaaagccgacatgtcggctctgaaagaacaaatggcctccatgatggaggccatgttaggtatgaagcagatcatggagaagaacgc

SEQ ID NO: 166999 - DNA, 427 bp, Glycine max
  unsure (1)..(427): unsure at all n locations
ntcataggtgaaatcaggtgcaaccatttcccttagagtcctctcacgaggtggaggttgtgccatgttctcagaatgtgcaaaatcagaatgctcagaatcagaatgctcaaaattataatgctcaagatcaggatgttcaaaatcaccaataacagaatgcacagattcaccagttatggaatgctcagaatgatcaaaaggtataaaatgatgcctaactaatctatgaaatgtcctatctatctcaggatcaaagggttgtaagtcagatggattgcctctagtcatacactacattcagcatgcacacaactagttgctttgtcatgtaaataaaggtgtaggtttgaactacagctaccctcaaatgatatccaaatgactttgaaatttgtgagcaaccttataaaatgatgagaagata

SEQ ID NO: 167000 - DNA, 422 bp, Glycine max
  unsure (1)..(422): unsure at all n locations
agctngacctttgcccatgctacccatgtctaaagccaatggtgcaactccaactggngcatcaaaggtagtctgtaaaagtataaaaaggacgtgactttaactgcatctcaaaagggtccctttttcttgcatttataccaacttatcaatatatggtaaccatttcttagtacaatctcatcaattatttttttcttctagctcatatttgtctaatagtaaaaataagtttcatgaagtacggatgaccccagaatgaatggaaagaagaaaaagtattttgcggaagtagtcaagatttaattcgtaaaagggtagcaaaaatatggagggttgacaaatgaaaagaaaataggggtagtttaatctccacaatgaaaactttacatttctaccgctagtatatatgaatagaaatt

SEQ ID NO: 167001 - DNA, 443 bp, Glycine max
  unsure (1)..(443): unsure at all n locations
nttcaaagttntctggttntctaaaccttgaaaacttgtgttattcatcttttcattctcttctccctttgccaaaaagaattcgccaaggactaaccgcctgaattctttttgtgtctctcttctcccttttccaaaagaacaaaggactaaccgcctaaattcttttgtgtctcccttctcccttgtcaaagaattcaaaacgacacagtctgagaattcttttgattcttccctttccctaatacaaaagtgttcaaaggactaaccgcctgagaattcttttgtatccccattcacaaagtatcaaaggtttaatagcttgagatctttgtcttaacacattggagggtgcatcctttgtggtacaagtagagggtacatctacttgtatttgactgagaacaagaaagggtacatctcttgtgaatcagttctagtgg

SEQ ID NO: 167002 - DNA, 295 bp, Glycine max
  unsure (1)..(295): unsure at all n locations
agcttcaagattaggccaaactccacttctatatctgatntcaagcttacataggcgtctttgttcgcgctcgagtgcttagcgcacttctgaaccgcttagcgcgtgtcataccctaatttcgttcggggaccattgtttgatggcatgcaacctttgcttgaccgcttcgaggtacttggcacccattggtgcacaatacgtgaagttccataacgtgcccgaagtcaaaagaaagcattgttgcacgatccgtgaagttccgtaacatgccgaaaatcaaaaggaagcattg

SEQ ID NO: 167003 - DNA, 435 bp, Glycine max
tcatcctcagatccctcttgttggactaggctcaacttatgtagcccttgtaggtttagactaatttaaacaaagcttcatccgcagatccctcatttaagactaggctcagcttaaccagcttacgtaagcttagactaatttaacctaagcttcgtccgcagatccctcttgttgtactaggcttaaattaaatagcattatcatcacagcatattaagaaagctaaaacttaatcctcaaatcccttttgttgttctaaggtaacagtacatttcccaatgctaaagtcacctaactggacatacaaatgggtgatcagaccaagagcatgcagaaattaagcattgaaagaagcattgaacacaggaaacacaatcaattagatattaaagtaattacatcagttgttccttagaaattcctaacaagagt

SEQ ID NO: 167004 - DNA, 249 bp, Glycine max
  unsure (1)..(249): unsure at all n locations
agcttgagatgaagaagtgttgaagggtgaaacttcctgcttttattgttgaccacagagtggtacctggagatatgtcgcggnggtcaggagaccttgnggacgtcaggtggggtgctattgcccaaaaccaagcttgaccaatcccgacccaacccgggcatagtcggtcagtgagaacctgtgatgtacctaaacaggagagctcctggcagtcaacggataaaaggaacaaagaccacaaagcaa

SEQ ID NO: 167005 - DNA, 443 bp, Glycine max
tcaagaaaaatggcctcagcaaacttcttatttccagaatgaaattcaatcaatagacctccaatctttaatggagagggttaccactaccggaaaacccaaatgcaaatttttattgaggcaatagacttaaatatttgggaagccatagaaatagggccttatatacccaccacagtagaaagaattgcaatagatggaagcacatcaagtgaaagcataacaatagaaaaacctagagatagatggtctgaagaggatagaagacgagtacaatacaattgaaaagccaaaaacataataacatctgccctgtgaatggatgaatatttcagggtttcaaattgtaatagtgctaaggaaatgtgggacactctacaattaacacatgaaggaactacagatgttaaaagatctatgataaacacattaactcatgaata

SEQ ID NO: 167006 - DNA, 294 bp, Glycine max
  unsure (1)..(294): unsure at all n locations
naagcttgatgatatggtcttcgccggcaaattgatcgaagtgggtctgaaaagaggcaaatctgatcatcttgctttgataaatgcaaaaaaaaaaaaaaaaaaaaagctggggcaaataaagagggtgaggatgaaggagaagcccgtgctgtgactgccattcctatacagcccagtttcccaccaacccaacaatgtcattaactcagccataaccaacctttttcttacccaccgcccagttatccacaaaggccatccctataacaaccacaaagtctgtctaccgca

SEQ ID NO: 167007 - DNA, 403 bp, Glycine max
  unsure (1)..(403): unsure at all n locations
tctcaaggaggtgagcttagttatgagaggtgtgtgtgtatctaagctctancttctcaaggaagttttctcacagaagcttctcatggaagttttctcaagaaagcttctcaaggaagctacctagtctataaatagaagcatgtgtaacacttgttgtaactttgatgaatgagagtcttgtgagacacaactcaaagttcaacttctctacctttatttcttccttcaatatcgtgctcccccctctctctttctctccctctttcttttcctccattgaagcatccttgcaagcttcttatccaaggctcatcttggtggagaagctccttcttccatggcttattccctagtggatggcgcctgctctccgctcgtctcctttgtcttccgctgcatc

SEQ ID NO: 167008 - DNA, 389 bp, Glycine max
  unsure (1)..(389): unsure at all n locations
atcatccccatctacaccaatgtccatctcatcagcaatcaaagattttgaactctggccaacaatattgtgtttaaatttttctacactcaaaccacccttgttcagaaattcgttatcatgttcttttgcaagaacagaacccaagcaagcttgttcaggacaatcctgcaccttggtgcaaaggcttgccatctggcacgacccatcattgattgccatagatnttgaatcttcactgtaatcaactgaagaaacattggttntcttcaattttccctccaacttaattgaaaaattctcaccttcactacaaggtgcgggtggtactgagaatgcatcttgagtaacaggcacggcgtcttttatagtacttttaggtgcatcaa

SEQ ID NO: 167009 - DNA, 315 bp, Glycine max
  unsure (1)..(315): unsure at all n locations
tatcaagtanactggcttgacacactatgcatcagcaacatcacagtntatacaaagccaaacattatttggcaaaaggtacgcaagttaaaaataaaaacattagtgttacaataaccaaaccaaatatctattcctgtgaataatcgcaccatattttatcaaggcatttacattcacaagttgcaagttataaaaaaggatactggttatcacaaagtcctcatctaatagtaatttcaataacaagttgctttgtgcgggtatttaaaatttcaagcacttctggcaaggggataaaacacgatataaaaa

SEQ ID NO: 167010 - DNA, 264 bp, Glycine max
agcttgcctcatatagatctatgaaggacgcttcggccgcaaggactaatgtcgcttccgagtttgatagccatcgtttcaggagcactgaacaccagcagcgtttcgaagtcatcaagggatggtccttccactgagagagacacatccagctcagggacgacgagtacacgaatttccaggaggagatagctcgccggcgttggacatcgctggtcactcccatggccaagttcgatccagatgtagtcctcgagttttatg

SEQ ID NO: 167011 - DNA, 266 bp, Glycine max
tgtctcagcgtatatgcgagacggagaccaacatgctagctatgatcgccaagtaccaagaagagttagggctatccactgcccacgagcatatgatacgggacgagtatgctcaagtatacgcggaacaagaggctagaggaaggatgatcgactctttacaccaagaggcaaccatgtggatggatcggcttgctcttaccttgaacgggaggtaagaactgtccctcttgttagccaaagccaacgcgatggcagacacctac

SEQ ID NO: 167012 - DNA, 339 bp, Glycine max
  unsure (1)..(339): unsure at all n locations
ttggggacctcattgaaactcanagatccagcctccatagaagtttcacaagtaagcttccatcatatcctcttaggcaacaacactgtggcagtagggactaccagcgacaatgcatcaccaaaagaagaaaactctagatgaggcttcactgtcatcaagtgagttagagacccagcatgaccacagatcgacctccactccttatggctcacatagacccgggtataaggcctaatatctcaacatgtgtgcgaggtttaagtgccatgtgtgcgtanaaaaaatatttctaactatgaatgtantcgataaacaaacacacaccaaacacgacaa

SEQ ID NO: 167013 - DNA, 141 bp, Glycine max
tcacacgtctgatatccacaatggagtgggaaaagtttttgtctcgttacaagaggagaaggatgccatatatgaatattccgaagccactttaatatataagcatttgatctaagtattagtgaagactgcttaatcagg

SEQ ID NO: 167014 - DNA, 437 bp, Glycine max
  unsure (1)..(437): unsure at all n locations
agctntctcccttatttgctataaataggggtagaagtgaagaagaaaatgtttaaccccttaggcacttctctctctttcgaatttgcttggaaaaattgtttccgtgaagaaaatctaagccgaggcgcttccgaaacgtttccgtaaggaatttcgcgaaggtttcgactgttcttcaacgttcttcattcgttcttcatcgntcttcgatcttcaacgggtaagtacctcgaaccaagcttttcaattcactctatgtacccgtggtggtccacatttcgtttcatgtatttttattctcgtttccatttactttttatacccttttttgacgtgcttaagccatttatttaagtcatttcttgcttaatgtaaaaataanataaatttccaccgatcgtttgaattgtatcatcccgtaattttggttaaat

SEQ ID NO: 167015 - DNA, 431 bp, Glycine max
tgagccaaaatcctgactcaccataaaccttgacccattgtgagaatgtcaatccttaccctcagaagcaaaaaaagggagagggaaaatttccaatcaaagagaaagcaaataatgaaagaaagaaaatttccaatcaaaagagaaaagagaggaaaggaaattcccaatcaaagaatgggagaaagcaaaaagaaaagatagaaaattcccaatcaaagaatgggagaaagaaaaaagagaaggagaagaatgaaagaaagctcctgatcaaggatcgaaagaaaacagaagaaatgtgcagagaggtctctggaccaaacaatatctgaacaaatacggaattgtcaccaaatgaacaaaagaaagaataggaaaccctaacctaaaagtggtcttctccctttgattaccaaccaaaatcctgtgcg

SEQ ID NO: 167016 - DNA, 362 bp, Glycine max
cctctgagtcacctgctgcatgcatgctaggaccgtgcccaagttgagcctccaatatatccaccgttgggaaatattagactttgagaactttagctactattatatcttggttggtcatattctctagccttgcttccctaccacgacaagggtaaaagcatgcagttgtctaaaccacataccttcatgttcctttttcattatcatcttgacccacataagccaattgattccttgtctttgtggattagagtcccaccaaaaagaattcatcatctgctacaattcatcttcaagagtggaaggaaacatatacacactcatgtaataagtgggtatagatcgagcaacagatttta

SEQ ID NO: 167017 - DNA, 456 bp, Glycine max
  unsure (1)..(456): unsure at all n locations
ntagtatagattactttaatttaatgcatgattnttgtagttggccgacattgtacgtgttaatttggttaccataaacttagccacatgatatgtttctttttgtagaaacctcataagactttttttttttatttaaaaaattatcgtcaaacaactcttttttttgtctttttttgtttaattaattatccgcctgatatgtacattgtcaggaaaaatgttgaggatcttgtctttcttggtactttatattctacttctaggctttgcaaaattgttttttaattagatgttgcaaatgatgaagtattagacaagtaatctgctttcaattttcaaattgcatggtatttgtgtggttgctaaaatatatatttccattttcctgatctgttctgtaatctgagtaaatgacaatatacatgcatatcttctcacctatcgaaaataaaa

SEQ ID NO: 167018 - DNA, 432 bp, Glycine max
  unsure (1)..(432): unsure at all n locations
catgcaagcttccacaatatccaagcaattcaatntccaatctcaagaactaccctttaccaaganaacagggcagaggcagaaaactctgcccaaaacacattcacatattacagcttcccttactcaaataccccagtaacattctcttcgttccgattcgttaaccgttggatcgacttgaaaattttactggaggttccaagtacatgagtttacantttgaccgttgggatctgctagaaaatgtccagaacccaatatgtactacctttcccaaaaccagcaatgcacaagcatttttctgcacatttgatcaaattggctgcacaatttgacagctnnttgctgcacaatttggcagattagaaatccatctacccacatcaatttgctcaatcggatctacaagtctaaatatgataaatcata

SEQ ID NO: 167019 - DNA, 435 bp, Glycine max
  unsure (1)..(435): unsure at all n locations
tccatcaagtggtaatcagagcacaagagcttcaagtaggtgctccttaaacctccattaattntttgctttaccttctcttccattgttgtttcttcattttttctccaagtatctcctcaaatgtcttgtgataaatgttttaaacatgattctttagagtttccaccgattaaacttgctatagaagctagatttgattttctatggttcanatttcttgttcttgttcttgaaccatgaattgtgttgagtttacgttcctttgagttttgtcttgttattttttgtggctgaaacctaaaccataaaattcttacaaaaatattaaagtagtagaaaacctcaaaaatctagagtgacttgttcacctattgtagttttgtcatagaagtcatgtctagtcaagaaacttgtcacataagatttcttatg

SEQ ID NO: 167020 - DNA, 386 bp, Glycine max
ttgtttgcaagcttgccacccatctcgcccagatgagctttgttgcttcctccagaaggcaccacaatgatgcttgttttgcacaacaatgctctttttgacttccagaatgttgcgaaactttacggattgcgcaacaatgcttgttaaacatttcagaatgttacggaactttatggattgcacaacaattcttgctaaacattttgaggcggtcaagagaaggtcgtatgccaacacataatgtccccttgacgaaattagggtatgacagtcgtccctctttacttatcttttattggagataaaagtgaagtatagataagacactaatttcgttcgagtggaacatgatttgcgcgatcaatatccctacccgcggacct

SEQ ID NO: 167021 - DNA, 430 bp, Glycine max
cgcttggaaaatgatttctatacaaaagttagtcgtataaagcgactaacaaatcttcagtaatatcccgccaaacccagaaaactcctaatctcacacacagacttaagactctcccacttaagtacaacttctatcttagaaggatctatatctatactgccttaggatatcacatgtcctagaaaactaactttatctaaccagaactcacacttggacaacttagcataaagttgtcggttcctaagggtgtgcaacacaatcctcaagtgctcttcatgctcctttctagtctttgagtataccaaaatatcatctatgaaaactaccacagaactatcaagatatgggtgaaagatcctattcatgtaaactataaacacaccaggggcattagtcacaccaatgggcatgacatactcatagt

SEQ ID NO: 167022 - DNA, 445 bp, Glycine max
  unsure (1)..(445): unsure at all n locations
agctntntatttttagtagatgaagatgaattcgtggccacctcatggactcctctaagaacaatagcatcatttcttgaactgaattgttgggagttagaagccatcttctcaatcaaattcctagcttcagtaggggtcatatcaccaagagctccaccactggtagcatcaatcatactcctctccatgttgctaagtccctcatagaaatattgaagaaggagttgctcagaaatctggtggtgaaggcagcttgcacacaatttcttgaatctttcctagtactcatacaagctctctccactaagttgcctgatgcctgaaatgtcttttttgatggcagtggtccaagatgaagggaagaatttctccaagaacaccctcttaaggtcatcccagctgaanatggacctgagagcaaggtagtatagccaatcttttg

SEQ ID NO: 167023 - DNA, 429 bp, Glycine max
  unsure (1)..(429): unsure at all n locations
tgtaggattatggngtacccatcacatgtggtactaggtgttggtcgggcgatggtgcacaacaagttgtccacatccacaatgcgcgcataaacccaccatcccctgttgcccacctccaactgagctcacgtactcccacgtagcccatatcctcgtttctctcaacaccgggtccccatcaatcctcccaagcttccacaacatccaagcaaaacaacattcacacagcacaagctatcacagccaagcaaaacaaagcaaaggcagaaaactctgccaaaacaccaaccaaaaatcacagcttttcccactcaaagaccccagtaacaattccttcgatccaatttgttaaccgttggatcgaactccaaaatttactggaagtccatagtgcataagcctacantttgaccgttgggatctact

SEQ ID NO: 167024 - DNA, 197 bp, Glycine max
tagagagaggaagactaaagatttggatccagtacagtgcgctaaggatgaagaaggcaaagtcttattgcctgaaaaagatatcaaggaaaggtggaaggcgtatttccacaacttacttaatgatggatatggatatgactctagcagtctagacacaagagaagaggaccggaactataagtactattgtcgga

SEQ ID NO: 167025 - DNA, 429 bp, Glycine max
tcaattccttctacgtctcattgatgtttgggaactctattggagtagtcggaggaaaaactggaggaatctcagggaatcgctagagatgccgctatcgctgtcagaagacatgtgagtccgcttagaggtaagggatgagttattcacaattgggggttagtattgagaacatgtgtagggatccttagaggattaaattggggttttattttgggatgtttattaaattgcaatttttcctttatgatcataaataaaatattgatgttacgatgagaatttcttgataaattgtgctcttgatatttgtatattttgacctatgattttgatataattgtgtaatattatttgagaggttttagtccccaggttgtgatagtcttttgtataaactgttatattgaggatataaaattatgattc

SEQ ID NO: 167026 - DNA, 339 bp, Glycine max
  unsure (1)..(339): unsure at all n locations
agctngcatacattattctccttgcctgcatcttanaaccttctggttgggtcatatagatgtcttcctctaaatccccatgcaagaatgtagttttaacatctaactgctccaagtgaagattctctgcagctactatgctcagaataactctgatggtagtcatctttacaactggagagaagatctctgtgaaatcaattccttgtttctgctgaaaccctttcaccacaagtctcgccttgtatcttcttctaccgtcagattcttcctttagcctatagacccacctattctgtaatgccttctttccttctggcaatttaattaaagaccacg

SEQ ID NO: 167027 - DNA, 433 bp, Glycine max
tctccgtctattccctataaatatgtgtcatagggaagattatagacgttcaaccttcctggtatctgaggatcacttgaaattagtgaaaaaaaatcgtttccgtgaagaaaatccaagccgaggcgcttccgtaacgcgtctgaaacgtttccgtgggtgattccgtgaagattttccgccatctatcgttcgttcttcatagatcttgttcgtgctgcggacttaaaccgataagtacccgaaatcgaacttttcaattcattctatgtacccttggggggttccacttgtttcgcgtactttaattttcatttcatttactttctgtatccccttttgacgagcgttagtcatttatttaagtcattttctcccctaatcaagaaataaaataaacttgcaccgatcatttaaattggtacagttgata

SEQ ID NO: 167028 - DNA, 365 bp, Glycine max
agcttgtgtgatgaagataaacgaactagatacaacccccagatgtttgactttcttctttcgtggatcaagatgacaccaccatattacggtcttgctaggcctgtcgagattatcaagttgttgtccaattttgatgtcaagccggaggattttaaggagactttacctgctgccaagtcacctaagaccgtgctcacggtaactcgcactttcccattagggactagatgtcctctagtgctagagattgctgtgaaacagggtacatcgtctgaagtagggattcgagcttattagttgaaggaccataaggatccatagctgatggaggaggacacagaggagactcctaacggcgatct

SEQ ID NO: 167029 - DNA, 444 bp, Glycine max
  unsure (1)..(444): unsure at all n locations
gtcaacagatgtcttcacaaataatcatcacacagcagatatctaacaaaactacccctcatatctcccagaaccccatacccacgaaaatcaagagggaaagaagtccacccaaacctgaaatttcgaagtcccactcgtagccacgcacttcacgactccaaaaatgctctcctttcacgatttggggcagaaatggtggccaaaggttgaagctatgcttgaagcttcaatggagaatgaagaagaagacagctacgtgagagagggagagaaaaggcttctgaatttctgctttggctgagtgaggagagagaacagctntttggtttaaaaataaaaaggggtttccctttttccattattatattcaagctttgccacatgtcccctattgattggagcaaaagggcccactttctctttttgactgtgatccatact

SEQ ID NO: 167030 - DNA, 414 bp, Glycine max
gcttgatgattatggtgcacccatcacatgtggtactaggtggcggccgggcgatggtgcacaacaagttttccacatccacaaagcgcgcataaacccaccattccctgttgcccacctccatctgagctcacgtactcccacgtagcccatatcctcgtttctctcaacaccgggtccccatcaattcttccaagcttccacaacatccaagcgaaacaacattcaaacagcacagctatcacagccaagcaaaacaaagcaaaggccgataactctgccacaacaccaaccaaaatcacagcttttctcatttataagccccagtaacaattccttcgatccaattcgttaaccggtggatcgactccacaatttactggaagctatagaacactagcctacattgtgacc

SEQ ID NO: 167031 - DNA, 328 bp, Glycine max
  unsure (1)..(328): unsure at all n locations
tccatcaagtggttatcagagcataagagcttcaagtatgtgctccttaaacctccattaattttttgctttaccttctcttccattgctgtttcttcattttttctccatgtatctcctcacatgtcttgtcttaaattttgttaacatgattatttagagtttccaccgattaaacttgctatataagctagatttgattctctatggttcaaatttcttcttgttgttcttgaaccatgaaatgtgttgagtcttgggtcctttgagatattgtcttgatatttattgtggctgaaaccctaaccatnaaacttcttaaaaaata

SEQ ID NO: 167032 - DNA, 417 bp, Glycine max
  unsure (1)..(417): unsure at all n locations
gatgtttatgaattaattngacattatgttatatntattgatgatcaacttgatagtaaattaaaaaaatgtgaactcaattggcataagctatacaatagaataaaattatgcactttntacacatcactgactaaataaaaaaaatgttgtaacataaactaatttatcatcactttacatttctcaagaacaaaagtgtttatttacaccttcttttatctaatgaaattcatgtcaaattcattagttaaggaataaaactcattaaataattaataagtgatactacataatttactgaattttacgtgattgtaatttaataataaaaatgttaataatatattaatatatatttatgaaccttnttcattgcccaataaaaataaaaaagttaaataattattgtaatcc

SEQ ID NO: 167033 - DNA, 410 bp, Glycine max
  unsure (1)..(410): unsure at all n locations
cctgtntattccttaacaagggtcaaaatatgacacaaactnttttctattgtgtgaattntaaaattgattgaaatatctataaaagataattaagtttaattttatgaaaagaaaattaattaatatttatgtttattatttagtgtaaatttcaatagaaaattctactattatcgagactgtgttgcatgctgatagtgttagaatacattgtataagagaacaaaccatcgataaaaaaaataaaggatttaattataaatagtctctaatgattataattagattcctgttaaaaaataaataaaatattcataaaatctattattaaatatgtagtaatctaaaaataataataacaacaattaggcaacaaaatagcttacatacaaacaataaccaataat

SEQ ID NO: 167034 - DNA, 268 bp, Glycine max
  unsure (1)..(268): unsure at all n locations
agcttcccagattcgatcatggaaggacttgtcaactgctttcattaggcaataccagtacaatacggatatggctcccgatcggaaccagcttcagagtatgactaagcgggagcatgagtccattaaggaatatgcccaaagatggagagatctcgcggcccaagtcgtaccgcccatgacggagagggagatgatcacaattatggtagatacgttacccacgttctactatgaanagctgataggctacatgccagctaacttt

SEQ ID NO: 167035 - DNA, 375 bp, Glycine max
ggtgcacatggtaatgtttctcctgattataaatccagctgctcgcatcacataaaccttttcatttataaatccattcagaaacacactctgtagaatagaaagagagtggtccaaaattaccatgaatgtatgccaaagggaattgttcgtcagttaatggctctctaggagctgcccttttgaacttataaaggtgttatggaaatggacgtggatgcggtcgtggagtttgtgcacacttgcacagtggtgtgtgaggagagtcatcaatggattcatcttcaaatgaggaaaaagctagatctatcttggttctggtgaaggaaatacccattctttgtcctaatttttggttggccttgagcccttgtc

SEQ ID NO: 167036 - DNA, 367 bp, Glycine max
  unsure (1)..(367): unsure at all n locations
agcttgtggcagataatgctagggtggattcctggcatgttagatggttgtcaagcaaataggtctgtgttcctatgtaagacatcaactatgcgtctgtgctcatggctggtgaggtccctgttgagctacatgcactacccgagtttgggtccgagttgtagcttgacgagttcttcagtaggctttgggcctctatcagaagtgtcgntgcacgaatctacattgaatatgttgtctaggctttcttggtagactgtcagggctcagactggagacccttcgtccacactcatgatttgagtggtaccatctgctgtggngtaaagcttggcaggctccctggtgggaggatagagtgccactt

SEQ ID NO: 167037 - DNA, 445 bp, Glycine max
  unsure (1)..(445): unsure at all n locations
atcccacatggttgaagcattctcgcanaacaacatgtccctaactggtctccctataattntacctagtgaaagtgacttgacttaccactgtgtggtttgtcttgtcatgtactcctaggcgctcaactaaattntttactaatatggtaccacattgtatataagattgaatcttagtgtacctgttgcataatatttgtgtaatgatcattgcgagttattacatgatggtgggtaataaattgtgtgagtgttagatgctatgttgtacttgagatgtgttgttttaaacatgtgattaatgtgaaggtgtggaatgtgattctgtgaataataccttgagacaagtgatgttacaaacatgagtagtaaatgatgcgaattgtgatactaagttgagcttggtatacttatatatgngcttnntattatctctaccctg

SEQ ID NO: 167038 - DNA, 418 bp, Glycine max
  unsure (1)..(418): unsure at all n locations
agcttattggttntgataatatcactagagaaaatacagcattaaaagtaatttanacgtaaaataatcatcaatctttatactatgtctctttcttgtcagatctcattcctggtgattttattcatgttattggggatgctcatatttaccgcaatcacgtgaggcctttgcaggagcagctccataaccagccaaagccttttccagtatgtgtaatgtttagcacttctttaagtttatcttttgactctcttacttngttaccccctaatgtacttcattgcagactttgaagataaatccaaagaagaaagatatagattcttttgtggctgctgatttcaagctcataggctatgatcctcaccagaagaatgatatgaagctgtctgtctaanatctggggattctcact

SEQ ID NO: 167039 - DNA, 477 bp, Glycine max
  unsure (1)..(477): unsure at all n locations
tcaccacgganagcgtaaactaactgataaaataattatttcagttagtttaattntcatatatnttgggtgtaaatattcttatattaattttaaatttaattaactattaaaataattacttcctttattctttaggaccaaaccggctattaaatggaatggataattttttatgattataatttttataaagtagttaattttgttattatttatctaagtaattagtattcttttatttccaacactgtaaaatgttttttcactttaatattttcacatcactcgataccaagttaataattattaataagaataaatcttggacaatagtaataagtattcttaactaaaatgaaaatctagataacttaaatctaagtggaaataataaataaatataaaaaacatagatctatattgaaaaataatttgtaatctaacacttaaaaatattatataaaaagaatatag

SEQ ID NO: 167040 - DNA, 389 bp, Glycine max
  unsure (1)..(389): unsure at all n locations
agcttcttagtttcagatgatgcagatgggtttgtagctacctcatgcgctcctctaatgactatggcatcatttctggcgctaaactgctgggagttggaggccatcttctcaattaaatttctggcttcagcaggagtcatgtctccaagggctccaccactggcagcatctatcatacttctctccatattactgagtccttcataaaaatattggagaagaagttgttctgaaatctgatggtggnggcaactggcacatagtttcttaaatctctcccagtactcatacaggctctctccactgagttgtctaatacctgagatatccttcctgatggctgtggtcctggaagcagggaannatntttctaagaatactctctt

SEQ ID NO: 167041 - DNA, 489 bp, Glycine max
  unsure (1)..(489): unsure at all n locations
tcttcatgtctctcctcgtatctctaacatctaggactcatgtgtttatcatagtaaggtggaagatggttcccacatctatctactactttacacggatgacatgcttatagcatcccaaaatttgttgccaattttgaggatgaagttactactctataatgaatttgatatgaaggacatgggagttgctgaaaagattctgggcaaggagaataagatggatgaagtccagaagatgatcttctgtgtcagaaggaatacattcaaaaattgctaaattgttttgggatggcatccgcaaaaatagtatgtactcccctaataacgtccattcgtttatctatactcaatactactcagtcaaatntagagaaggaatacatgtcgtgtgttccttatgcaagtgttgtagctagtctcatgtatgctacaccanaccanacctaacacaagaagtaatggtgtgagtaagtatattggtattct

SEQ ID NO: 167042 - DNA, 472 bp, Glycine max
  unsure (1)..(472): unsure at all n locations
tcttactgtttattgcaggcctatagagctctacaacataattaagagtcgtactaaaaaaaaggtaaaatctattaagagagtcttactgtttatgtcataatttataacttttattaggaattgggatatatatatatatatatatatatatatatatatatatatatatatatatatatatatatatatattttgcgtgagacataacctcataggggctgattntattattggtattattattgtatattattgtgaaaattgtctctttctctacctgttgttttaggagaatatcttatactatttacttctctttagtaagacttatcgcttccttttttattttagctcttgataatatcatcgcgtgtcgttctaataatatacatgtctgtcttatagccactataccttcggagatgtatggactaccatataaacgctaagcgcaagaagaagtataccg

SEQ ID NO: 167043 - DNA, 504 bp, Glycine max
cgaatcgtttcagttggaaaaaatcccttgtgcatgaagatcaaaggatatgaacacacaaagatacatcaccaaagaaataaaataatgaaagatataaatttaaagcagatatcttttatctacattcacacaaacatctaaacaatattcactatctcaaattttaatttgacaatgaattacatttatcctctatttaataatgtcaaaataacaataaattgatatcttgacagaactataattataataagagtttaaaataattgtacattatcatctactcatcaatcattgttgttatgatttttaaaataatttttatcaaagtcaacaaacttatatcatagatgatgattgaatgataatgtaatcttacattatataatactttttctcttataataacctatagcaaggataaatgcacacattgatccgatgcacagattattaggatcattatatagtatggattcattgggatgatcgatgatgctg

SEQ ID NO: 167044 - DNA, 138 bp, Glycine max
taactccggagcactttaatagtgacattacattccgacgaatacaggcaaaggtatggattacaggagcctttttctactcgcgcatttaagaatccccatttggctgctggggcgatatcgaatatgtatcatcgt

SEQ ID NO: 167045 - DNA, 351 bp, Glycine max
  unsure (1)..(351): unsure at all n locations
agctntatagcgcaacaacacagaatctaggcgtccaacacccctcaattcaatgggttttctaggtttgaaaagtgaaattgagaatgaggtaaacttgaagcaaactctcacctcacacaagtccataacatcaatctaaacttgctcaaactgaatttacacctaaaattccaccgaatcanaatttgactcctcaacacccaattntgccctagaaatagctgcttgntcattttgatcatattgtcttctctctagcacagtccaagctttctcccaagtcctaaatgacatttcaagctagtattaactcactttaacctccatttaccacagaattcagactta

SEQ ID NO: 167046 - DNA, 378 bp, Glycine max
  unsure (1)..(378): unsure at all n locations
tcttatccaggcacattcttggtggtgaagctccttcttccatggcttattcccttgtggatggtgcctcccctctcctcttctcctttgccttccgctgcatctccatggtggaaaaccaccattgaagctcaaagatccagcctccatagaagcttcacaagcaagctaccatcaagtggtaatcagagcacaagagcttcaagtaggtgctccttaaaccaccattaattttttttctttaccttctctttcattcttgtttcttcatttttctccgcgtatctcctcacatctcttgtgctaaatgttgttaaaatgaatctntagagtttcaaccgattaaacttgctatagaagctagatttgaatttctat

SEQ ID NO: 167047 - DNA, 343 bp, Glycine max
agcttgcacatgcatgatgttcttttcctgtacattgaactacttatatttccctaatcagctcattcaatgaaatggaggtgttattgataccaatgcacaagttattttgttttctcaagcgagattagttctatcttggttcgttcaatttcccttctttgtgatagtgaagaaaaacttgatggtgaatctagttaccactaacaacttaggcaaaattatatgtagaaatgagttagcctataatataaaccagaaaccaaaagacagcatcagaaaacattcagactgctattcaaactcatacatttaaatgtaccttgtaaagcgttaatgaaca

SEQ ID NO: 167048 - DNA, 292 bp, Glycine max
  unsure (1)..(292): unsure at all n locations
ctgcatggttngttattnttcaatcataatagtagcaggtntgatatctcttcatcatttgaaaaattgtaaccagagattatgggggcagagaagtaggataactatctttccaaagtcttggaaggcaaataagcctttggtctggattttatgtcatgatcctgacatgtaagtgtatcgagtttgagctccaattataagctcaacaagctttgcttgtacatacattggaaaaacagatcagatgcttaaagcagtctatcaagctgaaatgatgatgaccagaaag

SEQ ID NO: 167049 - DNA, 305 bp, Glycine max
agcttgtaggattatggtgtacccatcacatgtggtactatgaggaggacgggcgaaggtgcacaacaattctccacatccacaaatcacgtataaaaccaccatcccctgttgcccacctccaactgagctcacgtactgccacgtagccctcatgctcatttctctcaacgccgggtccccatgaatcctcccaagctttcacaacatacaagaaatttcacatcccatcatgatagactaacagaaccaagcataacagagcataggcagataactctgtccaaaacacaaaccaaaatcac

SEQ ID NO: 167050 - DNA, 479 bp, Glycine max
  unsure (1)..(479): unsure at all n locations
ntcatgttactagttattcttgcaatttcaacaattgtctgaaactgattttagtgctccctaatatctccctaaggtttttctacgttctaaaaccagttnttagcttaaaattactaagataagtcgtctcctatctaaaattaagctgctgtttangttttcaaagattccctcctaaacttaatttcgattttctaagtgttccgggaattggtttttcataaattttacatgctacactatattttcacacctaanaactcanttttgaagtcaaatatttaagaanaacagttcatacaaccataacaacctatggtaagttccaaaaccctagtcttggtaggactaattaggctctgataccactaaatgtaacatcctaatttctaagactggaattatatctntgttatttcatttatatattttataaatctcattaatccatttgatttcacaatcatctaacacag

SEQ ID NO: 167051 - DNA, 397 bp, Glycine max
  unsure (1)..(397): unsure at all n locations
agctntataagcgcgggtctgggagacaaaggtcaagtggtcgcgatatgcgaagaggatgttccgagtacattggatttggtacgaccatgccctcctgatttccagctgggaaattggcgagtggaggaacgccccggcatttacgcaacgagcaaatgtaaacctttacggttttaaaagctctatagttgggcctaggctttagagntttttccttttgttaaggcgtttgtgtctttcgtttttgaatttataatacgaggacctttcttcatctgttcctacgtctctacccattctcattcatttgcatgttcacttctttttctgaaacggcagatccgatgacgagtccccccgaggtactaatacctgggacccgctatcgacttcg

SEQ ID NO: 167052 - DNA, 416 bp, Glycine max
  unsure (1)..(416): unsure at all n locations
ctangagagaccataagaactaaggtagttcctaaacaaaaatcaattgaggaaacttcgccaagaatccccattgaaaaacctttattcaaacctttcaaagttagtgagaaggctaaaagaaaaattagggaacttagaaaaactaaatccttaattgaaggcgtaggtgacaaccatagtgaattactaaacaagattggtagtttacttaaagtcattccagataccccccaagcctctgaaaatacttccaaaatggtaacaagaagtacctccaaattaatcaatgttattaatgaagatagtgaccaaaactcagataacacaactgagataggatcagtgtcagagaagaatataaatccaattaattccaaacactggaagacacccttcaaattatattatcaacg

SEQ ID NO: 167053 - DNA, 552 bp, Glycine max
  unsure (1)..(552): unsure at all n locations
ctggattagaaacccttggtagnaaccgttagtatacctagctattacctgacactatagcatactctagcttaagagagtgcatcttttatgatacacaaagtactcatgagagattacaacttcattgtagatcactctctgagtcttgttgagaatctctaactctatatcaaacttatggtcgtgaaagccacgagaggctttataaccaaacaatacttgtgtgttttagatacaggggagtttaaaggttgtgctagctatgaccttgagaatacttatccaccaaaagtggtagaaaagaactcttgctataatcaaggctgattaatggaacactgatttggtaaggaaaactacacgctactcaggttgagtgaattcattataacgaagcactttattactcttcttatttaccttaccagaatatttagagtctattattgatacattttgctcacctggtttcattgggaatataaattttatcatcattggatgacaatccttntaatcactggacgaggccttataaacatattattn

SEQ ID NO: 167054 - DNA, 184 bp, Glycine max
  unsure (1)..(184): unsure at all n locations
tctttctcattctctcaaccacaggtgaaagaaagaagagagtgagagaagagaaggtgctcctcatctcaccgctctgtagttcttcttccttcaaaactcgaatgacccatttctatgtttntcgcactcttgccacttctgaagtaaagatacaagctttgctcttttctcactggatcgg

SEQ ID NO: 167055 - DNA, 446 bp, Glycine max
  unsure (1)..(446): unsure at all n locations
ntccacttggcttctaactnttcgactcttaacttataacttataagcttttaattaagtttataagctaattgtactaaatataatcttaatagttaatttggtttgataaatttatcttaaatttacattttattttaaaagagtaataacattttaacaccctttttttctctccatctctttcttcttattaaatcatattacctatcttagatatactgtatactnttctttcttctctctcttctttactcgaagtgttccataaaacatgaatctctctntattntttattctntataaaaatgtcattattattaatattcttttctcttatgagtctcaatataacctcttttgtcatttaattaggagtattttatttaacaataattaatataattaaatatgagagacattcgccacttttaattttatcttat

SEQ ID NO: 167056 - DNA, 60 bp, Glycine max
ctttggatttgaggtcatattcatttcaaggaggagggaatgatgcaatcctacctctta

SEQ ID NO: 167057 - DNA, 190 bp, Glycine max
  unsure (1)..(190): unsure at all n locations
taatttctactccanattgcaaaaggaagccattctcggagtcgtgaagcgcacctctacgttgtgggacttcgaatttcaggtttgggtggacttcttctcacattaatttcgtgggtattgggtttttgggagatatgatgggcacttttactaggttaatgccttatggtagttatttgtgaaggaa

SEQ ID NO: 167058 - DNA, 368 bp, Glycine max
  unsure (1)..(368): unsure at all n locations
agctttgcggntggtaccgtgacttgtgtccctcacattaactctgtcccgctttttgttgcttagcatttatcgtagttaagcataacctaactcgtgaatatgcttggtatacaaacatataatttctacattatattttcctatctctttattatttttttgtcacattatttatcttatttcttattttctttcttctctcngtttcttttctttctatcgcgtacataaagattacagatatagcatttaattaaaaatatctgttgtaagattttgaanagattatagacgggtaagaatcctccattattaattaacaatgtcagtacacattcccagacaaacaatgctgatcatttaac

SEQ ID NO: 167059 - DNA, 417 bp, Glycine max
  unsure (1)..(417): unsure at all n locations
ntaatgagtaganaanataaaagagaagataataagaaggaagcacatgcataatttatttctaaccaagtaaccatggtcatggtcatggtcattagtctcattcaacagtctcatttgtatgtacatcacatcattcatctagcagaagttcaagagaaagctcanagcagtgcaattataacctagcgatgctaacttatacatgtggttgattattatctattatctcacatactatntaaatttaaataataaaaaaaagcacgactgattactatgcaaaaatgaagtagggggaggaacatagctgcaagcctcacagaagttttctctcttttccggttaatgcatgattgtgcatcatattggaatccatatcctcatatgacacctgttcattctttagcgctaatc

SEQ ID NO: 167060 - DNA, 387 bp, Glycine max
  unsure (1)..(387): unsure at all n locations
agcttcatgttgccttttcgaaagatgttctggctaagaacgttgtcatcgtagcagttccaggcgtcctcagaggtgaatctgtcagtgtcatagtgaggctagggcctggaagctgtggctttccttttcctagaagccatctgcacaaaagaaacatataaaccaagttaacacaggttgtatttgaaatgacangctaanaaataaaactgaaattcagattgggcgcttatagtgacaaatgcgcgccttattaaaaattactcaagcacttagcgtgatagccacacacttagcgagttgacacaaatcagaattatcagcagaaaccaaattgcgcttagcacagctagacacgcttagcgcgacaatagtaatggacat

SEQ ID NO: 167061 - DNA, 485 bp, Glycine max
  unsure (1)..(485): unsure at all n locations
ggttctctnttctattattntatcttaagctatgccacatgtctccatttgagtggagcaaaagggcccactttttctcttgatgtgactcatgctcagccacatgaagagaaaaatctgaccttttgaaatgccaaaatcttgcctcggtttgcatgccgttcctctggttccagtccctcgcgtttctctgcgcccgtcagggccagttttcgaaagtaggcaatatatatataaaaatgctcagaatgaaaccccgagcgtggttcagaggttggttttgttaaattctaagttgcacacaaaacgatgatttttagactaattaattaagaattaacctataaccttccagttatggatttctcttccataattagcctaacccgcgtatcttgcccncactattcctacttctaccaggaacatatatgcatatacactaaataatacttataaatatatataatcattcanaatacacc

SEQ ID NO: 167062 - DNA, 312 bp, Glycine max
agcttgttggccgcgaatgacaaatggtgcggaagacgacgctagtctctgcatgctatcatgcgttgagtcttagagatagcaaaagaatgtttatagggataactacttgggaatttccgcctgccccctaactttatgggttagttcttgacaaaggtagtctgcgcggaacacgacataaatctactcatgtcaacggtcttgttggccgcgattgacaaaggatgcaaaagacgacgttagtctctgcatactatcatgcgttgagtcttataggtagcaaaggaatgtttatgcggataacaactt

SEQ ID NO: 167063 - DNA, 489 bp, Glycine max
  unsure (1)..(489): unsure at all n locations
tgtaggattatggggtacccatcacatgtggtcctaggtggcggtcgggcgatggtgcagaacaagttttccatatccacaaagcgcgcataaacccaccatcccctgttgcccacctccatctgagctcacgtactcccacgtagcccatatcctcgtttctctcaacaccgggtccccatcaatcctcccaagcttccaaaacatccaaacaaaacgacattcaaaccgcacaagctatcacagccaagcaaaacagagcataggcagaaaactctgccaaaacaccaaccaaatcacagcttttctcacttaaagaccccagtaacaattccttcgttccggttcattaaccattggatcgactcgaaaattntactggaaatctctaatacttaagcctacantttgaccgttgggatctactagcaaacatccagaactcattctgcactaccctttccacagccaaccacgacacaagcattt

SEQ ID NO: 167064 - DNA, 474 bp, Glycine max
  unsure (1)..(474): unsure at all n locations
gcttactccaggtttcacttgacgtcttctttctatgcaatgacgttctctaacgtgaacactnntctttttatttattttaattntttatgattttatctaatgttatggaatgtcttaatttgttaatatttattattaaatttcttattatatttaagtgaagaaattaatgatatatgtaaagtgataattatatttgatttagaattaattntacataagccaaatgagtgcaacttgtgcatagtgcatacccctaatttcttagttntaataattaattatttntgtcgacaatcgattgtcttatgtaaaaaaatcaattttataacataatcgttgattatcaaattgattgtaaaaaaattatttatcatctcctttnttctttntttcaaacgtactatatttctcacttgttgttattcattggattctatttttttttcttaatttcatctaacttgttct

SEQ ID NO: 167065 - DNA, 499 bp, Glycine max
  unsure (1)..(499): unsure at all n locations
cgcatcttttactaaggcagttntataaaatcgtccttgttttagtgtcatataatctcacttttggagtagtgccaattgcaatctatgtttctattgaagatccttggccctttgaaatattttcttggcttagaaatagctaaatccaatagaggtatctcactctcccaaagaaaatacactatatctcttttagaagatacaagtttcttggcatgcaaaccttccaatcttccaatggatccaaacttgaagctcaatcttcatgatggagacttactccttgatcccttagtgtataaaacgttaattggtagattaatttatctaaccatatcacgtcccgatataacatttggtgtaaatcacttgagtcaatatatgaaagaacatagagtntgtcacctaaatgttgtccatcatcttctgcagtatctcacatctactccaggacaaggtttattttccctgctcataactctctcaaattcactgc

SEQ ID NO: 167066 - DNA, 412 bp, Glycine max
  unsure (1)..(412): unsure at all n locations
agctatgagtccaataataaaaaaatatttgtttttaattcttataaagtaaaaaaaatcaaatttattagaacaatatttcatatattaataaaaagtccaacacataatcctcttatttaaaataaaaagtatttctcttaaaatttacattaaaatttacttattcaatcagaccttattaaaaataaatatattatgtgtaagataaaactctctcaacacccacatcattttacttgtacttgacacacctacctagagaggaatgaggttaaactttaccatanaagaaaaagaattatggggatatacttggggtgccaattatggtgtttctaagttaattctttttaaacaaaaggctaaaagttttagtggtttttttatgttataatgtgaagatattact

SEQ ID NO: 167067 - DNA, 427 bp, Glycine max
tctatccatggcgttctatggtggtgagcttattcttgactcatcttctttatgaagtggcgtctgcaatcacctttccactttctccattccgctgccattgatcttcaagaagtaaaggactccattgatgaagaagatccaaggcctaaaagctcaacatggagctacatcactagtagtacttgttctttcctcctccctaagcctaactctcaaaaggagtagttctatttgttgcctatactcttcaacactcatactcccttttctaagcctttggagcttggccataagctccctttcatagtaggaggggatgcacctcttcctaagggtagctttcaagtcattccaatactctactagaggatcccatgaatccttcttttcctaacaagtgaagtccacccatagagggcatacc

SEQ ID NO: 167068 - DNA, 271 bp, Glycine max
  unsure (1)..(271): unsure at all n locations
agcttccagattagtgtaccanatgaccgcggctccagccaagctatcttggaaaaagtgcattaacaacttttcatccctagaatgcgcccccatctcgcgacaatacatcttgagatggtttttaggacatgtcgtccctttgtacttgtcaaaatcaggtaccttgaattttgggggatgacgacatccgataccaagcaaagatctgccatgtctgcgaacggatagttgccaaagccttcaacagctctcaatctctcttcgatga

SEQ ID NO: 167069 - DNA, 468 bp, Glycine max
  unsure (1)..(468): unsure at all n locations
tcatggtgaatcanaggtgattcanaggttntntgatgataacaatgatgataacaaaagatgatgacaaaggagatgacaaanagctcanagatcaatcaaagaacaactcaagtgaatcaagaacaattcaagagttcaagataagaatcaagaagaattcaagactcaagaagaaagtttagagtcaagaatcaagattcaaggttcaagatctcaagaatcaagatcaagattcaagactcaagattcaagaatcaagagaaggcttaatcaagataagtatgaaaagtttttctcanaaatggagtagcacatgattnttctcanaatatgtttactaaagagtntttactctctggtaatcgattaccagattgctgtaatcgattaccagtagcaaaattggtttgaaaagttntcanattgatttacacgttctattaatnntcaaagtgaatcgataca

SEQ ID NO: 167070 - DNA, 322 bp, Glycine max
  unsure (1)..(322): unsure at all n locations
agcttccgttcccgagagcatctcttatttaagcatttcagcctttgctttcgtgtagcttaagaaaaacgtcatttcttcttctttctttcttccaaggccatttctaaagttccaagaactttctccatcacccacagccaccattagccaccacaaaccattggtgttctccacaccgagaggaacccttcaaccgaagcggaatcttccaacttggcttggcggttcggtagagaatgaaaccctaatctgacctttcgttntctttcgagggaaccatggttctacgcttggttcttggtagtttcatcttatcttt

SEQ ID NO: 167071 - DNA, 454 bp, Glycine max
gggttcgaggtacttacccgttgaagatcgaagaacgatgaagaacgaatgaagaacgtcgaagaacggttgaaacctttgcgagattcctcacggaaaacgttacggaaacgtttcggaagcgcctcggcttagattttcttcacggaaacaatttttccaagcaaattcgaaagagagagaagtgcctaaggggctggacccctttcttcttcacttcctcccctatttatagcaaaataggggaggtggttgccgcccagctcgcccaggcgagctcagctcgcccaggcgagcagggttgcttcctccagaagcaaccgccttctggaggaatcttctggagggcccaaatgggcctgggtgctatttgcaccccccattttactaagtacaccccccctctgctggtttttggagatcttttttcgtaatgtacggaaacttacgaatt

SEQ ID NO: 167072 - DNA, 453 bp, Glycine max
  unsure (1)..(453): unsure at all n locations
tctctctttcacacactataggtngtgatatttctgacaagcggtaaatgttatgaaagaagatatattttctaaggaacactcacgcactctagggacctgtgttgaattaccaaaggggtgttagagagctggttgntagtgggatttgattactatactggactcttattgtatccttgaacagtgcaatgctagacttgttgctaatgtacttacttagaaagatggcattgattatatagagacggtatnactgatcttacgaaatgattgtttcaagaattatgttgacattatgttgtccatttatgacttcggagttacatcactctggatggtgactactctcctatcttaactgtgatattagaggagaattgtcgtattgacctaccgatggtgttctctagttgatggataggacatctcggtgcgatactaataaaatcg

SEQ ID NO: 167073 - DNA, 442 bp, Glycine max
ggcactaccatgtttattaattagatttccgattaccaacatttaatcgatgcactctataatttaaagttttttagaattaattgtctcccacaatatttctatcttgctccattatttttcatctgagttatgggtttaactagaaaatcttgttagttctattgctcctaatctgaagtacattgttaaatttagattttcgtttatcgataaatattaatttttgttatgaatgtcagttaaaaaaaaatgaaccactaatctcttccttctgcttcctccctttactttttctcaacaactcacctattcttatacctccaaattcttagaaattaaacttaagcaccatggacataagtgctcgacgatggaatatataatcacacatctcatgctatatttatatgtgatcaattaagctttacgaacatgatat

SEQ ID NO: 167074 - DNA, 434 bp, Glycine max
  unsure (1)..(434): unsure at all n locations
agctagaagaagttttggcttttacttgcccaactcctttgagtgacatttgtattggttgttatcttgattgatgcatcttantacatttgttatctgctttgcatcctgcatcatcatggttagtatcaagaaaagtttctaagttaaaaaaatttcttcagaggtaaaaactctctattttaatcgattacagagttgtcgtaatcgattacaacaagctgtttgaagcttacagaagtaagtctcatatcggtttaatcgattacaatagtattttaattgatttcactggtgttagaccatgactgatctttttcaggagtctcaactctaatcaattaccaagtggattaatcgattacttctctctcgttcaagtgttcaaaggagaactagaacactctaatcgattatattggtcttgagttatt

SEQ ID NO: 167075 - DNA, 408 bp, Glycine max
  unsure (1)..(408): unsure at all n locations
tggcccttctccttttatgtttcacaaagtgttgctagaacatgttaactatgaaaaggttattgaaaaacgttggagccattaattagttggttgtcctatgtttgtcttaatatgcaagctgaaagtcataattatgaatctaaataaatctctctttggtgatattcatgataaagttaattcttgttataaacctattgaagttatccaatatgaaattagncatgttgcattttgtgatgctcggaaggacaatgaggctaaagccctattagatcttgatcaagctctctcttgcatgagactttatggaaggaaaatgctttgcgaaatggaattgccattgtaatacattctattgtcacatgactcaagtgcatcaaacatcaaaacggtttatatact

SEQ ID NO: 167076 - DNA, 253 bp, Glycine max
agcttccttgataagctagagcttaactacacacacccctctgataactaagctcaccttcttgagaaactttcttgaaaagcttccttgagaagattcctagagaagctagagcttagctacacacacgctcttaataactaagcgtcaccttcttgaaatgagaaggtagagcttagctttttgtatcaagtgacgccagaatagttaagaggagggggctgaattaattactcgctaacctttactaatt

SEQ ID NO: 167077 - DNA, 380 bp, Glycine max
tgtgacatttgtcagcatcagatgtatagcgctatctcacctgtaggattgctgcaacctcttgctattccggaacaggtctgggaggatgtatctattgattttatcacagggttgccttgttccagaggctatgaagctattctggttgttgcggacaggctgaccaaatatagccattctgttccattgaaacacccttatactgccaaaggaattgttgagattttctctgggaagtactgatgctacatggagttccacaatctctcgcgagtgatagagatcctttatttatgagtttgtcttggaacgaactatttaatttacacgcgacaatgctcaagatgagtacaacttaccttccgcagactgatgga

SEQ ID NO: 167078 - DNA, 423 bp, Glycine max
  unsure (1)..(423): unsure at all n locations
agcttctatagaagggttcttcctaatttctcaacaattgcctcacctctcaatgagctggtgaagaagaaggtggcatttacttggggtgaaagacaagagtaagcctttgctttgctcaaagaaaagcttactaaggcacctattctagctcttcctgactnttctaaaacttttgagctagaatgtgatgcctatggagtgggagttagagctgtattgttacaaggtgggcactctattgcttattttagtgaanaacttcatggtgccaccctcaactaccccacctatgataaaaagctntatgccttaataagagccctccaaacttgggaacattaccttggtgtcaagggaatttgcattcatagtgatcatgaatcacttaagtacattagagggcaaagcaagttaaacaaa

SEQ ID NO: 167079 - DNA, 480 bp, Glycine max
taacataaggcatgtgaagtgggtggaattcctagagcaattcccttatgttatcaaacataaaaagggaaaaggtaatattgtagccgatgctctttctcggcgtcatgcattactttctatgcttgaaacataattgattggtcttgaatgtttgaaaagcatgtatgaaaatgatgaaacttttggagaaatctttaaaaattgtgaaaatttttcagaaaatggttactttagacatgaaggctttcttttcaaagaaaacaaattgtgtgtgcctaaatgttctacaagaaatttgtcttgttgtgaagcacatgaatgaggtttaatggggcattttggggtccaaaagactctagaaacattacaagaacattcttataggcctcatatgaaaaaggatgtgcataaattttgtgaacattgcattgtatgtaaaaaggcaaagtctaaggtaaagcctcatggactgatact

SEQ ID NO: 167080 - DNA, 257 bp, Glycine max
agagagaggtgaggtgagcatactaatgattgaggaaaagagagagagaagctgaactctgaaatgtgtctcacaagactctcattcttcaaagatacaacaagcgtcacacatgcttggatatatagactaggtagctttcgtgagaagcttctactataagctcccttgagaggctacagcttagctacacacacccctctactagctaagcttacctccttgagaagcttccttgagaagcttacgtaagaaac

SEQ ID NO: 167081 - DNA, 502 bp, Glycine max
  unsure (1)..(502): unsure at all n locations
tcanaccacagcaacacagaatctaggtgtccaaaacccctcatatcaatgggttttctaggtttgaaaagtgaaatttagaatgaggtaaanttgaagcaaactctcacctcacacaagtccataacatcaatctaaacttgcccaaactggatttacacctaaaattccaccaaatcaaaatttgactcttcaacacccaattttgccctagaaatggctcttggttcactttggtcatttgtttttctctctagctcagcctaacctttctcacatgttctaaatgaaatttcaagctagtattaactcactctaacctccatttaccacagaattcagacttagccttccaactctcaaagtctcactctttttccactcataacatcacattctcactttctaaccttgggttagttctacccttcatctctaacagatgttcatcagcaatttcagcatataaacatcacanacatcattacataaaccctaaaca

SEQ ID NO: 167082 - DNA, 404 bp, Glycine max
  unsure (1)..(404): unsure at all n locations
agcttctatgttcaatttcgagcgtttcaatatattatgtgcctgaatcggacattcgtgtgaaaagttacgaccatttgaatttcttgagaacttctattnttcaagttcaagtgcctttatatatcatgggcctcaatcgtatatccatctcaaaagttatggtcgtctgaattggacaagagctttcgtgttgaatttcgagcgtctcgatatattgtggacctgaatcggacatccgagtaaaactttatgaccatttgaatttccctataacttccagtattaaatatggagccgtttgatatatcatgggacttaatcgtacattcatgttaatagttatggccgtctgaattggactaaagcttctgcgttcaattttgagcgtcctgatatattat

SEQ ID NO: 167083 - DNA, 422 bp, Glycine max
  unsure (1)..(422): unsure at all n locations
tcatggagaatcaaaggtgattcanaggtggtttgatgataacataagatgatgacaaaggtgatgacaaaaagctcanagatcaatcaaagaacaactcaagtgaatcaagaacaattcaagagttcaagataagaatcaagaagaattcaagactcaagaagaaagtttagaatcaagaatcaagattcaaggttcaagatctcaagaatcaagatcaagattcaagactcaagattcaagaatcaagagaaggcttaatcaagataagtatgaaaaggtttttctcacaaattgaatagcacatggtttttctcaagacatgtttaccaaagagtttttactctctggtaatcgattaccatattgttgtaatcgattaccagtagcacaatggagttgaaaagttttaaattgaatta

SEQ ID NO: 167084 - DNA, 325 bp, Glycine max
gatctactttagggctagggttagggttattggccgatacgtcttgttcgtctcttcgatacgatctaagttattctatcatccacaacattccggcaccgtcatacacatctaggagtatgaatttaactattagtatttatttatttcgtgataaacgatttgctcgatagacaaccttcgtgaagaggcatcctactggtgaattctataagaaatatgaacgtgagactctttctctataactttattattactaactttttaatttggtatatcttattcttttgtagactatgcttactccgaaccagcgaccattggt

SEQ ID NO: 167085 - DNA, 495 bp, Glycine max
  unsure (1)..(495): unsure at all n locations
tatacatactcaagctcgcacaggagtgtgaggtgatactgagtattcttttcaacaatgactggccttcaattagtggggattctgaggaagatgaatatggctccacgactggaaatgaaagcaaagcgacgctgatgcatgttccaaaagaacttgctgaaattgacaacatggagaacacgttcaccaaactaactctatcagcactgcgtagcttggaagaaattatgggtagaagctcaactgttagcattttctcattgcctactttgcataactaggctttgcaactgcaagaggattggaaaataaaatgactgcactagcgactgcaaccaaataggtcctcaggataacatagatcttctcgtgtttatcttcacatctatcttaatgtttattagaanagaaatagacacagaatttagacatgagtngccatttatacaagaggatccatctccctgtttaatggtagatttcatatgaaac

SEQ ID NO: 167086 - DNA, 399 bp, Glycine max
  unsure (1)..(399): unsure at all n locations
agcttcttatccaagacactctcctggnggtgaaacttctcatttcatggcttattctctaatggatggcgtctcatcgcaccttttctcctttatcttccgctgctactccatggctgaaaagcaccattgaaggaccttattgaagctcaaagattcagcctccatagaagcttctcaagcaagcttccatcaacacatttgcatgtaggaggaatagtgaattgtgaagatgacatttcaggacctcgcattcttgctctctctctctcccacgtaagtttctcctctctctctttattttattttatcaaaatggttgggattaggtggaaaatcccattttcgtaggcccacatngtgttttctaatgggagttgataatggtccctactaaaa

SEQ ID NO: 167087 - DNA, 491 bp, Glycine max
  unsure (1)..(491): unsure at all n locations
nggattgattcagtctaactagggatcgaggtttagtaatttaggctacaacgtagtacacagaatcatgattgattagagaaacatctctatatacatcagctggtttgttagaaagacccaacacctttacctactgctgtcaatcttacttacttgcatttttactatttttagccaagacttagtttaattctgttctaaatcatcaattatcaatgtttctttcaacaatgccttatttctgaatttaaccctgtctaatactagttccctgagttcgatactcgaattcatccgttttaattttaaatacttgacaatccggtgcactttccggcaaaccggatttcccttgaacatatttgtataaagaaaaaatggaccaaaaagtaactacagggtaaatccaacaaagtatttatggcgctcgtgctggcgatctagattcattagaagagtttatgttcagtttacgacattgctttata

SEQ ID NO: 167088 - DNA, 357 bp, Glycine max
  unsure (1)..(357): unsure at all n locations
actcattttatatatagcttaaggtgtgtttggtttgtattttcattttttgttttcatttcctgttntcagnttctgacactactaggaaataaggtttttacatcaattatttaagactttcaacatcggttattaaccgatgttgaaagtcccgatgttgaaagtaatatcgttaacatctgtttttcaaaatcgatggtaactaataaatacaacatttggtatttaaatagccaatgttacatgataagaattttgaanaaagaaatttataaatttacatatcaacatcgcgttatttaaaaaccgatgttaactagcactaaaagtcaatgttaactgtcactaacaaca

SEQ ID NO: 167089 - DNA, 415 bp, Glycine max
atacactactcaagcttcttatccaaggcaactcttggtggtgaagctccttcttccttgtcttattccctagtggatggtgcctcccctatactcttctcctttgccttccgctgcatctccatggtgaaaaatcaccattgaaggacctcattgaagctcaaagatccagcctccatagaagctccacaagcaagcttccatcacattcctcacaaatccctccttagtggatgtagtggtggaggagacctccttacttcaccctacttctcttccgccatgacttagggagatatctttcttttgtcttcttctttacttttatgtgacttgtccaaatatattgattgctttgattgttcatgatcttatgattgtgctacattgaggacaatgtgttgtttaagtgtga

SEQ ID NO: 167090 - DNA, 267 bp, Glycine max
gtgactcgcgggatgcgtgttccacgaaaggaatacgcgcggagtcgccaccaacgtttatttgacgaaaacgtcggatagaccggaagagacgcgatctacgaactttttaagtgaaaggttcgggagttgtatttacgcacgtagaaggtattagcactccgcatgcccgtcccatgggactggtagcctttcaatcgaatgtgcaaacatgactttgatttttatgttcccttttatgttcttatatccttgatacccttttta

SEQ ID NO: 167091 - DNA, 364 bp, Glycine max
  unsure (1)..(364): unsure at all n locations
tgtaatcgattacacaagtcttgtaatcgattaccagagtatattttcagaanataatttccaagagtcacatctattcaaatggtttatgaatggccatcaaaggtctatttatatgtgacttggaaacacgaattatgagagagatttcattgcccaaaaagttttatcctctcataagattaagagagtttttctgaattgaaatgtcttatcctctcaaaaagataccttggtcaaacacttgcatattcgataaggaattttgattgatcttcattgtataatctatctctttcaagggagatatcttcttctcttcttcttatttctggaaaaaagggattaagagaccgacggtctc

SEQ ID NO: 167092 - DNA, 317 bp, Glycine max
tggatgatacgactgattgtattagggtctctctctccacgaaagagacgtgtctttgtttccactttgctagctttctctcacatttggtgataataggatcccacaactcacaccgcctatggtttgtccaattggatacccaaaaaatgaatggtaggacaacaactgcagttatgtatgttgcaacttcttcttcagagatcggttcccaatgcccaaacaactcttcgagaatttatttgaggcttgatacaagtcaagctcctcaaatggctttggtgcctaacattttcattggtgctcaccgaaaatat

SEQ ID NO: 167093 - DNA, 325 bp, Glycine max
  unsure (1)..(325): unsure at all n locations
nggcatctgcaatgggagctntgttcttgccttgtttgtagcatgctagaaacaactgaaaaaggatgataggctaataggttattagaaacagtgatatggtggtgtataatactcaatccaacacataacaatggaaacaaaaatttatgtgttctctctctagactctgctatcaaatgtcgntgttatgaaacttatttttctgcttctttgtctcgatgccgactaaaacaaaataatcaaatcgtgagatttgtttctattggttaatttgcaaattgactttgtttcaaaattcaatctgatattatatttctttatc

SEQ ID NO: 167094 - DNA, 411 bp, Glycine max
  unsure (1)..(411): unsure at all n locations
agcttctttccggcaaggtgtttagcaatgtgtgcgagcgcaagcatcttcttcttctccttctctgcctcgctgtcactccccatctctctctgcgatcttaattggagaagaagaaagaagcttcagagctttaaaccctctcctctagctagggtttaatttaggattcacacgctatggcgccgcgcgtgacttatcaaatgtttattactcgccccactccatgattngatcacacccagcctcatatcggccttaaaacttgggcctatctaatggaccagaaagcgctatgcgattccaacccaatattttgctatattcacattatatnttgtgttatttctgtttctgaaaatacccccacctttccgttatacaatatacacaaagtggttccgttgtata

SEQ ID NO: 167095 - DNA, 481 bp, Glycine max
  unsure (1)..(481): unsure at all n locations
tagccaactagatggattaccatnttcttcatatnntcctntttgttagtctatgccactatgttctctagagttggagaattatatccaatgatagtgtgttcctttgggtatattagttcaagtatagaaaaatatgtgctctgggtggctcatttattcatgtatgaaattaaatttgaagagtttatatttgccaacaatctctttggtctttcagatgatggcgatgggggatatgatgatgatntggaagaactgatggataattcggtaagcatgaaataatctgtactagctatggtgtgtgtatacatatttgaggagggatcaagttattccaagagtaactttaaggtgggcacttgatagatgggaaatttttactatcccaganatcttaaagtggaaaactatgattctcatgtttggtatgcacataataaagaagactgtcaagaaactatgatttccgtgaatc

SEQ ID NO: 167096 - DNA, 311 bp, Glycine max
  unsure (1)..(311): unsure at all n locations
catgcaagcttgaatcattctatgcacccttaggcgttcattcttgctttgtatgttatcatcttcatctcgtctactttcagtattctttttttacgttttaaacgagtctcgaccgatcgtttaagccgtatcctcacttaactaatgataacacgaatctccatcgatcgtttgtgttgtaaagttgtgtaatcaccttttaaatgaatatcaaccaatcatttgcgttgtaatcccgtttaattcatcntgagataccttaatttcgtccggggatcattgcttgttggtatgagactatcgcttga

SEQ ID NO: 167097 - DNA, 442 bp, Glycine max
  unsure (1)..(442): unsure at all n locations
ntntattgtaatcttgagattcaggacagcactctgatttctgaaatatttgggataaaaatggtcattgaccagtcccttttccatgacttaaccaaattacccagtgacggtgtaccatttgaaggtacactgaatgacgactgaaaatttgatttctctgcccatgatgcccgccagttggtttgcaccaacaatgcggatatgaccggacgtcttcttgccgggtcattggcttttgaaagccgcatccttcactatttaattgtgcgtattttgcttccacggtcttccaaccttgcccaggtttctgaggaagatctaattatcatgtgggcctttcatacagggtgtcaacttgactgggcacacttagtcagatatcgcatgcataaggcattgcgaataaatgctccattaccatatccacagcttgtcactc

SEQ ID NO: 167098 - DNA, 558 bp, Glycine max
  unsure (1)..(558): unsure at all n locations
gggttgaaccattgagatcaaggccctttcgaagccgggatactgtatagtgacctgcatgcatgtcagcttggaaggtagtcatacctcacaanatatatatatatatatatatatatatatatatatatatatatatacatatatatatatatatatgcgtgccgaggtagccagataccttggatatgcatgtatatagcacaaatacctcacaaaatatatatatgtatgtgtaggtagcataatacctcgtgagaaataaacgatcaaaaaacatggtgagagcataaaatatctctgtcgtgtgataagccaacactgcttcgtagagagataactcttagctcttctttgaaagatgaatcatctgatcatagccatgtctttttgaaanactatatgtgtatacaccctgaaggtgtgaatgcgtgtggacattctttccgaacacccacagatggacttggatgaatgcatgatttgatataagaacatattctataaacactgggtcgcttaaataaggacaaagaatcctgaccctcacgttcatcg

SEQ ID NO: 167099 - DNA, 417 bp, Glycine max
taacatcatatgaagccatggataagagcttgtatgaggagatgatgaggggaaggagaacgagagaatgagcacgaaattttgtgcctcacatgaggtctgaactttgaagcgttattcccaaatgatcaaagttaaaaaaatgcacacgcatgacctctatttatagcctaagtgtcacacaaaattggagggaaatttgaaattctattcaaaatttacttgaatttgaaattgaatttgtggagcaaaattttggagccaaaatttcactaattatgattaggggaatttagctatggttcagcccactaatacaagatcaagtccaagattctccactaagtgtgtttaggtgtcatgagacatgtaaagcatgaaggacatgcgcaaagtgtgactatatgatatgacaat

SEQ ID NO: 167100 - DNA, 416 bp, Glycine max
tagcttgaactatatgagatttgaatctaattttacttggatcaacaatataatatatatttaatttatagttgaaaatacggaaaaacaagaattttgatctattgataacatcatatttacctccatcgcaatgttataatacgttctagaacatgctcatattggtttcgtaatagttgatattgatttactcatagagctgaatataagaacaattgtcggttttaaagtacgtgatattctttataaaataaaacggtggttatagttaatggaaataataaaattaagaaatgtactttattaagctcgcgaatcaatagctgtatttaaaacaatatgtctattacttgttgcataacttgccacgtctgtcttctaactgtacttgaatatctaatgacggatatagt

SEQ ID NO: 167101 - DNA, 612 bp, Glycine max
  unsure (1)..(612): unsure at all n locations
cactgtgtcacantcaaacactatcgttcttactatatancntatattanannccgggccccaggatttgaacctgtagtagccttgtatcgatactaagctgtggacaatagactctgccgctagtataactatgacaggcatcttgtattcctatacaagagagtataaactctgatgaagaatatgacagtgctatgcttgaatgtattagcaacatgcttttcagtactcccgtagagaagtctgatcgatctccttctattggaggatcactcaagacatctacatgttgacatcgtgaaagcataggttctctttattatcgcaccggtgtggacacgaatgttgaaatcaatcacttgcgagtaatgttatctctttctgtgccagtgcaacaactagtgatcatcttgcttccacatcttgaatgtggcgcctacatagatataatatcaccaggtttcagcctgggttatgaagaatagccttgatttatggtaagatatttatgatgatcgtgatcggataaccgctccttcaaacatcgaccatataccgctgacagattaggtaattactgtgcccacagttctgttcatcactccttcn

SEQ ID NO: 167102 - DNA, 446 bp, Glycine max
  unsure (1)..(446): unsure at all n locations
agcttctgtcttgtaacctatagaattgcttttgaaaatctttnttttttttatggcagacattatttaactatactttgcttcattcacatgatgctgcttcttttgtcaattaaatgaaaagggtgggtagcatttgatccttatgattccagatctagttgaaagttgtgccagaatttttctaaaaatattttaactgataacattcaaatgaagtagcttcatttgacaattaaatgaaacgagtgggcagcacttgatccttatgatttcagatttaattgtacgtgttgcttgaagtttttataaaaagtatattttgtctttttaactgatatgtcattcacatggtggtacttcactttgtcagtaaatgaaagggggtggtagcatttgatttgattattccagatctagttgatagtggtaccctaaagtttcta

SEQ ID NO: 167103 - DNA, 484 bp, Glycine max
  unsure (1)..(484): unsure at all n locations
tctttnggaccttgaacaggcaactaactcctctttcanaaccatgctatgtgctcgcgaatggtccctctcttcccttcgcagcttgagttcattgttgctaccccacagagctccacgaaatttattccggccatactcttccttgcgagccctcttggtctcttgttcaagggctcttgcagtagttgcattctcttcccgtaacccggcacactccttccgaatgtgtgtagcgtccaacttgaacttctccttggcaagtttcgcctttcctaactcgcttttgagagcttggacttcttcgtcctcttccggtgcttcaaaactttcttcgctgacgacttttaacttggtgagccaatctaaacctcgtacatgaacttttaaccattcatggtacccaccaatgatgccattacgaatgcccctaagttcttgatcttttcttaacgggggttcccatgccttatggattctttgg

SEQ ID NO: 167104 - DNA, 368 bp, Glycine max
  unsure (1)..(368): unsure at all n locations
agcttccttgagaagcaaggaaggtagcatccttgagaagctacaggggggctactcacacctctccattagcaaagctcgcccccatgccaaaatacatgaaaatacaatggtaagcttccttgagaagcaaggaaggtagctttctttggaagcaaggaagaaagcttccttgagaagctagaggggggctactcacacccctccaatagctaagctcacccccatgccaaaatacatgaanatacaaaaaaagtctttactacaaagactactcataatgccctgaaatacaaggctagaaccctatactactagggtacccctaacttgtacccttaatctgtagagtaccctacatacctaaa

SEQ ID NO: 167105 - DNA, 434 bp, Glycine max
  unsure (1)..(434): unsure at all n locations
ntngaaaacanactntgccattggtaatcgattacaggaatctggtaatcaattacaagagagtaaaaactctgatgaanaataaaattgtgctatgtttgttttttttgaaaaatcttttcaatacttcccttgtgaagtcttcttgatttcttctcttgaaagatcttgaattcatcttctcttgaatcttgaaatcaaatttctcttgattcttgaattgttcttgactcaatcttgaaatcattctcttgggatttttgtcatcacctttgttatcatcaaaacaacttgaatcaatcttgattcaacatcatgaagcttgcttctacagaaattagttatgagttggttttatcttggnttatgtgtattaacctttaatcttttttaaagataactcgcggcactaatgatcggttaaaacctacttt

SEQ ID NO: 167106 - DNA, 421 bp, Glycine max
  unsure (1)..(421): unsure at all n locations
agcttagcatattgcaattggatgcttcccgccaccagtgatcaagcctctttgatagccttaaacatctttctttcatcaatgtgcacactataatgttctctgaaatgttcatgtggctccacatgatttaggtttggatgaaacctaagcttatcagccacccttttttccatccatttcattgtagcttgtttatttttgaagacccttccatatatgtgctcctccaaaaaagtgttgatttgaaagcttcttgtaacttcgaaccatgaacaataaatntcccatgaacatccaacttggttacaacgcgctctagcttgaatgttgtcaacttttacccatttcagatctctgccatggaaaatagttaagtctctaacaacttcaataaacattttgatgctatcaaactcca

SEQ ID NO: 167107 - DNA, 470 bp, Glycine max
  unsure (1)..(470): unsure at all n locations
tcatgatgaatcaagattgattaaaagagtnttgatgataacatagatgatgacaaatagctcanaagtcaagaacacttcatgttaacaaagatgatgacttcaagaatcaaagaatgagttcaagattgaatcaagaacacttcaaggatcaaaaggaaatttgatttcaagaatcaagaatcaagtttcaagattcaagttccaagaatcaagatcaagattcaagactcaagattcaagaatcaagagaagattcaatcacgataagtattaaaaagattnttcaaaaactgagtagcacatgaatttttctcacaaaccttttaccacagagtttttactctctggtaatcgattaccagattggttgtatcgattaccagtagcacaatgcttttcaaaaagctttcaactgaattacaatgttcaattgatttaaaatctgtatcgatatatgatttgtaatc

SEQ ID NO: 167108 - DNA, 468 bp, Glycine max
agctcttagatgcatgtgcgcaccatatttactatactccgatcaactaatgcaatctattgattgaaaagataatccatactactcttctaatgtagtctacaattaaaaaattaatctcacagaaaatagtgcttaagccattcaaatcaagtcaacatgacggtggcaacacaacagcaaagtgggatcgacagagagagggagaaggaagcttcctagaacaaaaaatggaaatgtagaaatgaggtgaggttgctctacatgcagttggaatggaaacacataaatcagctgaggttgtaatgaaaacgcaaaaatgatatttggttggtgttgcttgttgacgtgcagaagcttccttgtccaatgacatgacctcataggtattgaggtgcagaagtacctcggacagaggaagaaaaccgtatatgtgatttttgaaatgtaaaatttacaaaagccccg

SEQ ID NO: 167109 - DNA, 484 bp, Glycine max
  unsure (1)..(484): unsure at all n locations
cgctataatccatntgtactaaacctttctcaattttaatacaagcctaattttcagctntatactcttttctctcaattctcacttttgaaccataaattctaacatgctataaaagtactaccacccacctgaaattttttgcaactcctttaattttcttttcttttcttaatcgttttctttccattttattttcgagaaaatccaagccctcaccgttcaagtttttcttttcactcttttctttagttctttttcagtttcaagttcttgagttaacctatttcaatttcaatttttaaatatttcaaactatattcttgagacaacctanatcaacaattaattcctataattgttttatataanaataattaatttataaacaccaatagagataataagtaatttaagtttaattaataatattatacattttttaaaaaaaataaagtttttatagtatttaagtagtaattat

SEQ ID NO: 167110 - DNA, 427 bp, Glycine max
  unsure (1)..(427): unsure at all n locations
agcttctatataagctgaaccattttatcagtaaacacaagttgagttttattcagaaaattagagtttatctcttttatcttagtgagagtgattctcctaaattcttgagtgattcaagaacaccctggctgtatcaaaggactttcacaacctttgtgtgttgccctcgctggaaagagtgattctttccttcctttcatcttcacccttgttctttcaaaccacaattccagaaaatccacctctgcccagaattatctcgtggccataactcccattttatgcactcaaantaagtgattcttgagcctaaattgactttcanaacgagacctttcacctcgttttggaatcacctcatttggagccctgtagcnttcagtattgccatttctatatttctgtccagccaccacttaaccta

SEQ ID NO: 167111 - DNA, 443 bp, Glycine max
agatggcctcaggatattccttatatccagactggaatacgatcaatagacctcctatctttaatggagagggttgccgctactggaacacccgaatgcaggtttttatcgcggcaatagatctaaatatctgggaagccattgaaatagggccttatatacccaccacagtacaaagagacacaatatgaaggagctgatcaagtgaaagcatagccatagataaacctagagatagatgggctgaagaggatagaagacgagtacaatacagcctaaaagccaaaaacataatagcatctgccctacgaatggatgaatatagcacagctccacattgcaagagtgctagcgaaatgtgggacactgttcgagtaacacactgaaggaactacagatgttcatagatctaggataaatgcactaactcatgagtatgaatt

SEQ ID NO: 167112 - DNA, 318 bp, Glycine max
gtttttgcccaaatggagacactggatgtctgcctgtctcaagtcagctagcatttctattcttatcaatggcagtcctacaaaggatattgctcctactagaggtttgaggcaaggggatcctttagcccccttactctttaatatagttggagaaggcatcacaggattgatgagggaagcagttcagaagaacttatatataagctatatggctggaaagaaaaaggaacccattaatattttgcagtatgcggatgacacagtttttgtgggtgaggctgagtgggagaatgttattgttttgaggctatgctc

SEQ ID NO: 167113 - DNA, 374 bp, Glycine max
  unsure (1)..(374): unsure at all n locations
tctcccctattatgctataaatatggggagaagtgaagaagaaaagggttcagccccttagacacttctctctctttcgaatttgctgaggaaaattagttctgtgaagaanattcgagccgaggcgcttccgtaacgtttccgtgagtagttacgtgaagattctcgaccgttcttcanagattcatcgttcgttcttcgttttcttcagtcttcaacgggtaagtacctcaaaccaagcttttcaattcactctatgtacccgtggtggtccacattntggttcatgtatttttattctcggtttcatttactttttatacccccttttgacgtgcttaagccatttatttaagtcatttctcgcttaatct

SEQ ID NO: 167114 - DNA, 419 bp, Glycine max
ctaagtagcactcaaaccaggtgtatgtaccttcaaggcctacactccgaagagtccgtcaagatctctccctcctgatttatgaccaacccctacaataatatttgcatgcagacaccgctcatgaattatacaatactcacgacctcccacctgttgtttacacacgttcaacataattgcactataatttaacactggttcctaaattaaaaacctacatttttcctttaacattgcgcataataaattttctcaagataaacactggtcaggctattgtacaattcacaactcacgacacaagtaatgttacatcaagtattaaccacacacttattcataactaaaactcatgttcacaatttcacatctcttaatatcacaatccaccatcacatgtttacatgtatatcaca

SEQ ID NO: 167115 - DNA, 492 bp, Glycine max
gggaaggtagtcatacctcacaaaatatatgtatggtgtgttaagtagcgaacataccttggatatgcatgtatgtaatttaggtggcaaaaaaaatacctcaaaatatatatgtgtgtgtgtgtgtgtgtgtgtgtgtgtgtgtgtgtatgtttaagtactaagataccttggatatgcatgtgtatagcacaaatacctcacaaaacatatatatgtatgtttatgtagcaagataccttggatacacatgtatatagcaataataccctccataaatattctcatgtgtatgtagctaaatacctcatcgatgaaaataacacaggcgaccatgaagcataaatatatctttcggctgaagagacagcacacttttgagtgagataacttccagctttttcttgaacagattcaccgactattacaccccttttgtcaaaaattgtgttgcaccctgagggtgagccattatttgttaataacatttcg

SEQ ID NO: 167116 - DNA, 384 bp, Glycine max
gcaagcttcgaagatagtgatgaggtacaagccctataggcagagcttgaaagagtccgagtagtcgaagagaagttcaagtccatagccatcaaaagtctgaaaagagtatgatgaactaagggacgtcaatatggccaccgctgaagccttggaacgagaaaccaagaaggcccgataggaagaacacgaccaaagcaaagttttgagggggcttatagggcagcaatagtgagctcacgctccaaagaggtgaaaggaatcatcacgggtcataggcatgatctggaaggacgagctataggtttgccttatgtcgaaaagaaaattgtcccaacagttaaaccgagactgaatggaatatgtgggccatcatcgataagt

SEQ ID NO: 167117 - DNA, 486 bp, Glycine max
  unsure (1)..(486): unsure at all n locations
tatgcgcatatttccttacaaacgttctcttgcacaagaacattctattaaccgaaaaaatgcacccatatacaatcaaggcagcttcgttacctagattatttacacgtacttccaaggtgtatttgttacttacatcacacacctccttggctaaattcacatacatgcatactcaaagcattttggggtaccaaaaattgcacatgtgcacatcttggtatttctaatacctatacatacacaaacttcatgatgaatcttgactatctacacaataaggtgctacattntatgctcttttcaagtttttgctacctaaagccgcatccaaattcaagtatattttcctttgctgaactaaaatgtattcaaattaaaaggtatacattntttggtaatgtatcttctttacataacatgcaacatatttatgtatattnttttgtgagacattntgactaccaaaaattatatgtacataca

SEQ ID NO: 167118 - DNA, 433 bp, Glycine max
  unsure (1)..(433): unsure at all n locations
agcattgcaataatttcaatagttctatcgaacatatcaatagacacgtcgttttttcaaatattttgtgtaggtaactgttacacgtcaattcttgtccccaaagattatggattagagattttaatttaggattcctataaataatattataaagttagaaacattaaaacaattgatttcagaaattaatgtgaaagagattatgccaaaattttgttctggaacctggataagattgctatattttaaagtaaattatattgtaaaataatatcatataaaggtaattttttatttggtaacatgaaaactntatatgcaagtcaaaatccaaatttaaacatcttgtttctcaaataataataaactatattccaattttattaaggggatacccttctgggatatatatatatatatatatatatat

SEQ ID NO: 167119 - DNA, 432 bp, Glycine max
  unsure (1)..(432): unsure at all n locations
ggctctanatntacattgatgtttgtatttattggaggaggttgtatgccatttttgttttaagggtagcatttcttggtaaaaactaactttccaaatgtttgccttcgcaggaatggccccgaggaagcttgcctcaaagaggtccaggaaggacaaggcggccgaaggaactagttccgctccggagtacgacagtcaccgctttatgagcgctgtacaccagcagcgcttcgaggccatcaagggatggtcgtttctccgggagcgacgcgtccagctcagggacgacgagtatactgatttccaggaggaaatagggcgccggcggtgggcatcactggttactcccatggccaagttcgatccagaaatagtccttgagttttatgccaatgcttgcgcaacagaggagggcgtgcgtgacatgag

SEQ ID NO: 167120 - DNA, 187 bp, Glycine max
  unsure (1)..(187): unsure at all n locations
gagagnttgattatagttttagntgggaganatattatgnatnnggaggggattgagntattanttnntgtttntttgaagaaaatgagaaaatatnaaaaggaaaggtaaaaagataagttgaagtagttnttatataattagaatatntaagngaataagtatgagaatataaatgaagagtgaa

SEQ ID NO: 167121 - DNA, 416 bp, Glycine max
  unsure (1)..(416): unsure at all n locations
tactcaagccccgactggggacattggtgagggacgaaagatggngatggatgtggagccatgttaganaaatgctcacacatggcatcaactatgctggccagctcggagtgtttctcggcgagggtggagatggcttcttcgagtctatccgtggtggtacaacgggttccgtgttctgccatggtagcaagtcggaccagctgttaagagctgatgagagagagagagagagagattactacactaagctaatactaggaaatgatttctttgctttattcatgagtgagctgtccttctatacacaggtcttacattgctatggcttacaatggcaccaactaccttgcaataacagaataaccaccctattgtaactaactaacggtatccctaactaactggtatccatg

SEQ ID NO: 167122 - DNA, 225 bp, Glycine max
agcttttcactcggatgtccgattccggagcataatatatcgagacgctcgaaattgagcaacggaagctcttgagaaattcaaatggtcataactttccacatggatgtctgattaagacgcataatatatcaagatgttcgaaattgaacaacgaaagctctcgagaaattcaaatagtcataacttttcactcggagggtccgatcatgcgcataatatatc

SEQ ID NO: 167123 - DNA, 362 bp, Glycine max
ctgcctttgccctgatatatcttgaggactcatggtcactatgaatgacaaagtccttgggataaaggtagtgttgccatcgtttcaaagcccgtactaacgcatacaacttcttatcataaggtgaatagttaacggtatgaccacttaacatttcactaaaataagcaatcggatggccttcttgcatcaacacaggcccaattcccacatttgaagcatcacactcaatctccaaagattcttgaaagtttggcaacgcaagtatggcggcattagttagctcttgcttaagaacattgaaagcttcttcttggttctctccccatttgaaaccaacaattttcttgaacacttcattg

SEQ ID NO: 167124 - DNA, 378 bp, Glycine max
  unsure (1)..(378): unsure at all n locations
agcttcacaccatgtgcatttctgttctttagacagtctcagcatagttgcggttgagacacaatgcaactttgtatcacaaacaaaccttcctttgcagttatatttaactgcgcagattctgctgctgtccatatatntattaatttgtacttgattnttaagcttaaactgaaacgaggccctagagaacaaaagacatcttctctgtacaatggcagagaataaatataattatatataattgttgggggaatttcggtacctccctatgcggtagacacgcgacactattcagcgatctctcgcaaacaacgaaatttccaaagacctatactgacattccaatatccaagtcaataaatatgtgagatgagt

SEQ ID NO: 167125 - DNA, 484 bp, Glycine max
  unsure (1)..(484): unsure at all n locations
ngctataatattagttaaaaaatagtttatgaaatttatcacatattatttttataaaataatcatacaaacattcatgtcataagataaaatacttacaaataaatctcaaacatatataattttgtctttataattaataatttatgctattgatttatgaaagtttgtgtatatgtaacctaacttaatcttaaattcatcaattacaactatatttgataagacatttcagttaatttttaatttttttcactagctaaaaaatttgtttgactatttagaaaacaagttttttttaatagtttctaacattttttcaaactatttgaagtaacattntttaaaaccttagatttgaaattctaactttntatattttttttcattgttatacttaatatatttatccaattntctagttaccattttttaagagatcataattgtattattngtcaatcattttatctttttcaactac

SEQ ID NO: 167126 - DNA, 462 bp, Glycine max
  unsure (1)..(462): unsure at all n locations
gcatgcaagctcgctgcattggaagggtccaacaatctattgttaaagatgactagacgagtaaaattctgcataagaataatgcgatgggtggtagtggttcttcctattcttctagttcagacaaagacaacctggaggagtgtcagatgctgttagagtcaaattgttgatgtttgatggagtcggtccaagggcctctatttcactttcaggtgtggcgaaaggttttgttctctttagagaagcaaatttcaggtgacaggttatgtagatgtgatactatgaaaaanaaactggctatggattgaagacaagctaggaagaaatatgttttggacaattacagtataaatatctcactaacaattattatctttcttctttttctaatacattatattatacatttatactctctatttatttctcaattctttgctctctaagggcactatacta

SEQ ID NO: 167127 - DNA, 318 bp, Glycine max
  unsure (1)..(318): unsure at all n locations
cactataactacaaagntcttgattatcctcagcgtcaccaaatttttaccacatcacagcaggataaaaaaaaaaagcctttccagggaacctatcagacgttgacacatggcagtcaacatctgaggctaatggtcaatatccaattgggacgtcccggaccaacattgcagggatttaaaaaatgggggactaaatttgtgaattaaattataggggggccaaacgcgaaactggagcaaaagtgggggaccaaatgtgcaattttgtctcgttaatacaatcttaacagcacagaacttggtgcttataccaat

SEQ ID NO: 167128 - DNA, 486 bp, Glycine max
actcgcggcatgcaagctcgagagagcccgggtagtcgaagagaagttcaagtccatagccatcaaagtttgaaaagagtatgatgaactaagggatgtcaatatggccaccgatgaagccttggaatgagaaaccaagaaggcccgaaaggaagaacacgaccaaagccaagttttgaggggctttatagggcagcaatagtgagctcaagctccgaagaggtgaaaggaatcatcacgggtcataggcatgatcttgaaggacgagctaaaggcttgccttatgtcgaaaagaaatttgtcccaacagttaagcgagactgaagggaatatgtgggccatcatcgatgagtgcaaagagaagctaaatctagcggcgactcacgagcacaggctagaggatgagtacgccaagatatcagcagatagcgaagcaagggagagggtaattgatttcatggcaccagaggcaacaatgtggacgga

SEQ ID NO: 167129 - DNA, 453 bp, Glycine max
atacacactcaagccctaacctcattgtctctcacagtctgtagatttgggagccaatccaatccttgtgtccggactctcagccacttatgatagccgccgatgatcccattactgcttcctctaagctctctgtcctttcttcacgccgtatcccatgccttgcgaactacttggagaaccctcgcgttgtggacactgaaaccccgtgcgatgaaaggcgtgatgcttccgtctgatggcactcctctcatgggacatccttcgcatgaagatagaatcctgattcttccttccttctagcgagggaaccaattaacagacgcccctccatgctagccaagagttggtcccaattcgcctttccttattcgacgcacgagcggtgaccttgcagcggatagacgggcctaccttcttggagataagggtgtgagaccagccacacatata

SEQ ID NO: 167130 - DNA, 477 bp, Glycine max
  unsure (1)..(477): unsure at all n locations
agcttgtanaaggtggtacggaaggtaaatgatatgaaaataaaagtacgcaaaacatatggggaccaccaagggtacatagaatgaattgaaaagtttgatttcgggaacttaccggttgaagaccgaagaacaacgaagaacgaacgaaggatggcggaaaatcttcacgatatcacccacggaaacgtctcgaacgagttacggaagcgcctcggcttggattttcttcacggaaacgaattttctcactaatttcaagtgatcctcagataccaagagggttgaatgcttttgttcttccctcctccccctatttatatggaaaagagggaaaagcttgccacccagctcgcccaggcgagctggtgcctactggaggagcttccttaaaggcccaagtgggcctggttgctatttgcacccctgttactaaatacacccctggctttttttgtgattctttttcgtaacgta

SEQ ID NO: 167131 - DNA, 466 bp, Glycine max
ggcttcctttagatttctgagacgtctcaggacttcatttattgtgcaacaaaggacgccaagtatctcacagcggctaaccaaaggttgcatgtcatcaagtaataatccccgaacgaaatcagggtatgacactttgtatttcctatgtgttatatgtatggtagttttatttcttaatcttatggcgatggatttagagatgcaccttaatctcattgtttatgctattttagttagaccatctacaattacttgatggttaccataatgtcgtttaacttatttgcttaagaagcctttatgtttgttgcaggtgatttacgaagcaatcttgtaatgtaatgatttcaaaaccattcagcatttgataaacaaatggtctgataatatgatttaattggacatttatacaaatggtttactagcttgacaagaatgacacttcttattacttacacataat

SEQ ID NO: 167132 - DNA, 471 bp, Glycine max
  unsure (1)..(471): unsure at all n locations
gtatggctcgaaacatgcaccgaggcagaggtacaagaagtttaatgagtttatgagcaactcaggattcaaaagatgtgacatggaccattgctgctatgttaaaaaatatactaatagttatgttatccttgctgtgtatgttgatgacatgttgattgcaggatctagtatggcagaaattaacaggttgaagcagcagttggcagataactttgaaatgaaggatcttggtccagctaaacaaatccttggtatgagaattcttagaaacagatcagaaggaattntgaagctgtctcaggagaaatatatacacaagttgcttgacaggttttaccttggagattctaagaccaggaatacccctttgggatctcatttgaaagtttcaaagaagcaatcttttgagacagatgaagaanaatggtacatgtcaagagtaccatatgcatcagcaagtgggagttt

SEQ ID NO: 167133 - DNA, 448 bp, Glycine max
  unsure (1)..(448): unsure at all n locations
tcaagctctgcggatntggccttcgccggcgaaatgatcgaagtgggtctaaaaagaggcaaatctgatcatcttgttttgataaatgcaaaaaaaaaaaaaaaaaactggggcaagtgaaaaggatgagaaggagggagaaacctatgttgtgactgccattcttatacgaccaagtttcccaccaacccaacaatgtcattactcagccaataacaacccttctcattacccaccacccagtcatccacaaaggccatccctaaaatcaaccacaaagcctacctaccgcacttccaatgacaaacaccacctttagcataaaccaaaacaccaaccaagaaatggaatttgcagtgaanaagcctgtagaattcaccccaattccattgtcctatgctaacttgctcccatatctacttgataattcaatggtagccataacccc

SEQ ID NO: 167134 - DNA, 480 bp, Glycine max
  unsure (1)..(480): unsure at all n locations
cggatggacatgagttcgcgcgtgttagaccgngcgtcttaagacaccgcggctgcaagctttcattattatatgtacccggatggtccgcgtttgatggggtatnttattctggatgggagactatgatacacaatcttgcgagcttaagccacggtactctgagggtgtgtcgcttgcgttaaaaatgaaagagattaccgccaatcgatggaattgatgagtcgtaatttcagtagaaaaagtgcgagcgttcggcgtgccgaaccatgtggcggagacaaggaggtaaagtatataataaaaataaggctttggctagaaaagggaagacaatcggagcgttggtctttggattctcattttaatcgaatgaataattctaaggtgcaccaagcctaaataacttaccaggcagctccccataaagaggattcgagggggtattgcattctcatcagaagaggggattttaacgcc

SEQ ID NO: 167135 - DNA, 486 bp, Glycine max
  unsure (1)..(486): unsure at all n locations
tgaatcttgattgtttgaacgaagagagagaatntggctattattaaaaaaagactttctctttcctttntctaaaagcaattgccacatgtctcattttgagtggagcaaaaggggcccacctcttccccttgatgtgacatcatacacagccacaatgagagaaaaatttgaccttttgaatgctaaaatcctgcctcggtttgcatgtcgcctctatggttccagttcctcatgtttctctacacccgtcgaggctccgcttcgaaagtatacaatatatatatatatatatatatatatatatatatatatcaaaacgctcagaatgagaccctgagcgtggctcacaggttggttttgctaaaatttaatttgcatgcaaaacgataatctttagactaattaattgaggattaatctataactggccagttatggattactcttcgctattagtctacncgcgatctgtcccaatgtcan

SEQ ID NO: 167136 - DNA, 421 bp, Glycine max
  unsure (1)..(421): unsure at all n locations
agcttgcacctcttcactctcctcaggcatttcagcctcttccncgctcagactctatagctttgggagccaagttattccttacgttctcgacttcaaccatttgtgatagccgcctatgacaccatggctacttcccctaagctctttatcttttctttcctctttattcaatgccttacggatcctctgaagtgtctgtgcattagcttcattgaaacctcacgcgatgaaagatgcaatggtctcctctgatggcgcacctctcatagggtaacctagttgtcttatgggcaacaggattataattaatacaacccatcatccccatcaaagagaccattggaaattcttcacatgagcataacactcatgcccctccttctttcaccgtgggaccaactattgacgccctatcatg

SEQ ID NO: 167137 - DNA, 363 bp, Glycine max
  unsure (1)..(363): unsure at all n locations
ngctaacccgtggaagctcctaatatctcccacaccttttggtgtgggccattcttggatggccttgattttcttagggtccacttggactccatttctaccaactacaaaccctaagagaactatattatctacacaaaaggtacctgaaagaacctgcctgagatgtcctaagtgatcatctagactcctactatacaccacaatatcatcaaaataaataactacaaatctaccaatgaaatcccttaagacatgatgcataagcctcatanaggtgcttggtgcattactgtgcccaanaggcatcactagtcattcatacaaaccaaacttggtcttgaaagcgggtttccactcatc

SEQ ID NO: 167138 - DNA, 407 bp, Glycine max
  unsure (1)..(407): unsure at all n locations
agcttcatgatgatgaaccaagcaattntgatgatgccaaaagcccaagtgatttattcaagattgattcaagacttcaagatcaagcatcaagaatccaatccaagaatcaagattcaagagaagaaatcaagaagcaacaagtcaagactgcatataggataagtattaaaagaattnttcaaaaaccaaataacacagttttgttntataaaagaattttctcaaattttctaagttaccagagtgattactctctggtaatcgattaccagttggcagtaatcgattaccagtggccagattggttttcaaaatgttttcaaatgatttgtaacgttccacaatgattttcanatagtgtaatcaattacactatattagtaatcgattacaagtgaatctga

SEQ ID NO: 167139 - DNA, 551 bp, Glycine max
  unsure (1)..(551): unsure at all n locations
tgacattggaaccctgttagtaccgtcgcatatacngacacttcgaatactcaagcttgtagactaagtgctcaccaacactagataagaatccctcaggttgtttcatgtaaacctcttcttctagatcaccattcaggaacaccattttcacatccatttgatgcaactcaagatcaaaatgagctactaatgccaaaattactcgaagagagtctctcttagatacaggggaaaggtctctctgtaattgattccttctcttttagtgaatcctttagcaacaagttttgccttatgtctctcaatgttgccttctaagtctttctttgttttgaagacccatctacatccgatggcttttacaccaacaggcaactcaacgagatcccaaacttggttagatgccatagaatccatctcatccctcatagcattataccacaaatttgattccttagaactcatggcttgtgaaaacatctcaggatcatnttcggctccaatggtgtagttggattcttgtangtacactacataatcactacgan

SEQ ID NO: 167140 - DNA, 330 bp, Glycine max
gacatgctattactatatattgcacttcttatctaaccttggaaaggcttcacaaagagaaagccactattacaaatatgtttatttctgatgaatggatcctaaaccagttatctaaggagcctaaggggaaagaagttgctaaggtagtgctcatgccttctttttggaatagtgtggctcaccctcttatagacatggctccacttgtcaaagtgattcttcttgtggatggtgaaaggaaaccagccatgggctatatttatgaagcaatggacaaggaataagaaacaattatcaagtgtttcaacgacaatgaaagccagtaca

SEQ ID NO: 167141 - DNA, 483 bp, Glycine max
  unsure (1)..(483): unsure at all n locations
ntagaggtttctaaatgtcacattatcatttgtattttcatgttgctatgtcagggttgggtgtaaagtttctcactcttatttcattgattttgccggcttaaattgatgctttggttttattgccctacacattaaatttcataattttttctctctcctctttgcaatttttctttaactaaagctctatctcattgaattttattatcttttgccctcattntctttatttgaacctcatttcatcgtcttttgcttcatcttctcgatattttttatctgaacctccatctcatttatctaacaaaaaataacttattttggttctttatgcctcctctctcagtaagtttttttaatctaaatctgcatcctattaattatcttacctatatttgttttgttgtgcaaatatacatctaaatttagaaaaaatgattcctaagtagtgaatgaatttgagcaatcaatcttatctct

SEQ ID NO: 167142 - DNA, 373 bp, Glycine max
  unsure (1)..(373): unsure at all n locations
agcttcttaaaatataagatatgagatactttgtttataaagataaagagatattaaattattttaaatataatatttcattttttctttgaaaaactaatcaaatccatatctctttaacattatacataaaaacatctacttgaggcaaggtacacaaacataaactaaaaaaatagttcaagtctaattntagatttagaaaagaaaaagatgatttgctctttctggttttactcatcaaagagttgataggtagtctcagtgtaaatacacaaagttttcacacggatacattttcgtccattcacttaaaatgttgggtgcactcgtaataatgttgagtgcacctaacatcacccttttctttatc

SEQ ID NO: 167143 - DNA, 445 bp, Glycine max
  unsure (1)..(445): unsure at all n locations
ttcaaaacatgtttgcttctggtgatcgattatagcctctgataattgattaccagagagaaatatatattttccaaagatgtacaaccacttaaaaaactttataagagatttgaaaatttaagtcttttaaggccaaaccattgcaattttttaagagattcttttaacaaataatggactattgtgaatcgcttctattaatctcttaatcttgacttgaatcaactatgaatagcttcaatcttttggcatcatcaaaatcttcatacagcatatgcattcacatctacaagtgagtttccgttcttgtagattntacataaaaaaattggttttgggtttgggcctttaattatctatttgtcttctggagtgagtttggaaataatggaattactagagacaaaatctcaattggattgattggaaatggatgtaactc

SEQ ID NO: 167144 - DNA, 233 bp, Glycine max
  unsure (1)..(233): unsure at all n locations
agcttagattttttagtcaaactgttggtagaacaaaaatagctaatatgatgacaaanaattgttcattattaaaatcagtcccaccaactctcatgtgaatgtctcagaacaatgatgagagattattaccgattaatattatatacttataagaatcaatagaacaaaagaatatgtataaagcaattgcaaaggcatataaaactcaagcacttacaaaaaagtccatg

SEQ ID NO: 167145 - DNA, 341 bp, Glycine max
  unsure (1)..(341): unsure at all n locations
taaggaatctccgganattgtattaattgtttgtgtttctgataggattaacatgataaatagttatattgcgatcatgaaattatgtataagtgataaattaaatatgtgatgaattgtgggataacatgttgctttgaaattataatattgttattgagattgagtataagtgcaaaattaanaatgcattaatttgtgagatacacgtaaacatgtgatggtgaattgtgatattatgagatgtaaaattgtgaacatgaaatttagttgtacataaatgtgtgggtaatacttaatggtgaaatactcgtgttgtgagttgtgaattatacaataat

SEQ ID NO: 167146 - DNA, 361 bp, Glycine max
  unsure (1)..(361): unsure at all n locations
agctntgngctgctcaattgctccaggttgctgcatggaaaggcaaaggtctgtatggtggtcagcagaggaacacaaaccgcagacccttgcgacaggtacagatttttggttcaaggccagttgggttaccaagttaaccaatgcatccagttttccttcaagcttcttagtttcagatgatgcagctgagtttgtagctacctcatgcactcctctaatgactatagcataatttctggcgctaaactgctgagagttggaagccatcttctcaattgaatttctggcttcaacaggagtcatgtctccaagggctccaccactggcagcatctatcatacttctctccatattactg

SEQ ID NO: 167147 - DNA, 433 bp, Glycine max
  unsure (1)..(433): unsure at all n locations
tcctcggggccattcctgcanaggcaaacattgggaaagttagttttaccagtgggacgttactcttaaagcacaaatggcatataacctcctcccataaatacaaacatcaatgtaaatttagagtaagcttatgcgcatatttccttacaaatgttctcttgcacaagacattctattaaccgaaaaaatgcacccatatacaatcaaggcagctccgttacctagattatttacacgtatttccaaggtgtatttgttacttacatcacacacatctccttggctaaattcacatacatgcatacccaaagcattttggggtaccaaaaattgcacatgtacacctcttggtatttctaatacctatacatacacaaactctatgatgaatcttgactatctacacaataaagtgctacatttcatgctc

SEQ ID NO: 167148 - DNA, 433 bp, Glycine max
agctcgtagtatgagggaggactttatgatggttccgcatccacctacttttttgagtagtttccttttagcagatgcttcaggagttgtaactccgagtttggttcatttgtaattttgttgcttcaggttgttaagccccttatattaccaaaaaaaagaaatatcatagtatacaatattatacaaattctcttttttctttattctttccctgtattccaaaacacaaaaatttctcatatttgagttgaaggagcactctgccctagaggagtactctacatttgagccaaaggagcactttgcttatttataactaagtgttcctttatatgcttcactaactatctataaataaagttaacatttggtcaagggcattgcattggagattctacatctactagtgataagggcctgaaacatgtaa

SEQ ID NO: 167149 - DNA, 443 bp, Glycine max
  unsure (1)..(443): unsure at all n locations
tctcggctcatgctgngaacgcctctagttcaacacccgtgcagtctaaggcacccacccagagggaagctccccaagttccaactccgaacacggctcgaccggccggtaattccaacacgacaaggaacttccctccgaggccattgccggaattcaccccgctcccaatgacgtacgaagatcttctaccatccctcatcgccaatcatttggctgtggtaactcccggaagggtcctcgaaccccctttcccgaagtggtatgaccctaacgcaacttgcaagtaccatgggggtgtcccggggcattccgtcgagaaatgcttggcccttaaatacaaggtccaacatttaatggatgtcggatggctgactttccaagaagatcggctcaatgtgagaaccaacccgctcgccaatcatnggagggggagcggtaat

SEQ ID NO: 167150 - DNA, 423 bp, Glycine max
  unsure (1)..(423): unsure at all n locations
tcaatcatttccaaatatgcatgtgaattaggacgcatcaacaagaatcaagccaaggctattgtgcaagcaatcaatggggcaaaacacaccaaatgattatgatgatggatggctcanattctcacaaaggtaaactcatcactttcaaattgagctttcaaaactatcatgacatgtagaggagaatcaaggatttcaagtcacaaaatgtcaaaaacttttattccaaaacaattacccatttcttgaacatatcctataattcaaagaanaacatgcaaagttgtacatgcacacaaaattgacccaaaatattaaactaacaatccgaagaaaactacaacattaacanattaacaaaaccaacaaaactagcaaaccaaagaacactccccccccccccccatacttaaacaacac

SEQ ID NO: 167151 - DNA, 437 bp, Glycine max
  unsure (1)..(437): unsure at all n locations
cgtgatntatcatgagttgaccaagtgtgtatgtcagatgagatagaacaagaaagtatgctcacaattagaaatgttagtcagtagacaggttgattgtgaatgaaaagcttgatcataaattggtgagagtgtgatcttaaattgtgagtgaacgactagcatagggtaataatttttgcatcaatctctaaaatttatcacatttggtgggggtgccataagcgttgagaaaaattgaacaaaacacttgactggctattttgctaaatgaatgttaaatacaaacatgcatgtgatctcatcttatcatcttcaaaagttttgcaaaaattgagagtcgtttgtgtcgcaacctaccctatgacgggcgtgcgggtganaagacaaaggagcgttctccanaaaggaaaacacacgggagtcacccgcaacat

SEQ ID NO: 167152 - DNA, 444 bp, Glycine max
  unsure (1)..(444): unsure at all n locations
agcttctcatggaagtttctcaagaaaacttctcaaggaagtttctcaaggaagctacctaggctataaatagaagcatgtgtaacacttgttgtaactttgatgaatgagagtcttgtgagacacaactcaaagttcaacttttctcccccttttcctccttcaatttcgtgctccaccctctctctttctctctctctttcttttcctccattgaagcatcctctccaagcttcttatccaaggcacattcttggtggtgaagctccttcttccatggcttattccctagtggatggcgcctcctctcacctcttctcctttgtcttctgctgcatctccatggtggaaaataaccattgaaggacctcattgatgctcanagatcncagcctcacagaagctncacanagcaagcttcattangtggcttagccaggagtc

SEQ ID NO: 167153 - DNA, 490 bp, Glycine max
  unsure (1)..(490): unsure at all n locations
ccgatgatcacgatcaacctacttaggacaaatntataatgctttgaatntattggggtggtgtaataatgaaataatgtaaaactgaaatctcaccaattaaagtttataacataaacaaactttaagactaatttgtttcgaaagttttattatttattgctcccttcaactttttacagttttactattgtacaactcaaattaatggcgaaaaggaaacaaacctttttgcttgtatttccatttgtgtgaaagttaatttgatttataatttcactattgtttcaaaacttaattcactgttcttacccaatcagaagtaaacacacacaggaacataagttgcataacccttttgcttggagaaggaaaaaatataaatttccatctacaaaacatacctaanacacaaactcactttccccatcaccctaatgtttggtacaacaattatagcatgcaattatntaaaaataaataacatgat

SEQ ID NO: 167154 - DNA, 441 bp, Glycine max
  unsure (1)..(441): unsure at all n locations
agcttatgtctccacaagaccttccatcatcttcaaaagcttcattactaaatgaaagtaaagttgattcccatcttgtgagcatgaaaggtctttctcatctacagaagtttcctctggttaagtggaaaaggtttcattctctaccagagcttccaccattcttggaagaattgtcactaagtgaaagcaatattgagtgcatacctaanagcatataatatctttctcatctgagaaaactagccataaaaaagtgcacagggcttcgatatttaccagagcttccaccatatttgaaagatttgtttgtacgtggatgcgatattgaaagcttgccaataagcatcaaagatcttggtcatttgcgaaagatcaccttaattgagtgcaagaagctccaggttctaccagagctcccaccatgctctgcaatcattt

SEQ ID NO: 167155 - DNA, 422 bp, Glycine max
ctgacttgagtcatcaagagattataaatatgtggccatggcatgagtttcaatcgtcaatcatcaatcatctttgaatcatctatctttcaatctttacaacatcatctctcaacatctttcaatatctttctacagaattttctgattcatttctcttcatctttctaaaagttttttatcaacactttctcttccaagaaaaggtctttattcaaaaacttgtgttattcatctttttcattctcttctccctttgccaaaagaacgaaggactaatcgcttgaattcttttgtgtctctcttctcccttacaaaagattcaaaggactaaccgcctgagaattcttttgattattcccttccccttaagcaaaagatttcaaaggactaaccgcctgagatatcttttgtttcccctt

SEQ ID NO: 167156 - DNA, 453 bp, Glycine max
  unsure (1)..(453): unsure at all n locations
agcttcatggaacatttatgatactgatgtaaattcaggtcttcatggttntacaaaaatcatagttgttgtttaggcggttatcgttatcaaaattctagaatgctttgtaaagatgttcatcaagtccaagtctgtgcctatgcattgtagtcgaaatgaattcaagatagtcaattgacccatttccgtcaacatcagcctgaggaaaaaatatacatgtcttgcaaattgaaacaattaggaacaaagcanaaatgcatgacaacaaaaaatagtataaagatataggaaatatcatagtttaatcacaacattaaaaaaggctntagctagagcctacataataataattataataataataataataacaacgaagcanacatgcattacaacanaacaaaattaagaaataataaatatcagtgttaactcctattgtcacaacat

SEQ ID NO: 167157 - DNA, 374 bp, Glycine max
  unsure (1)..(374): unsure at all n locations
ntcagagcgcagctgcgagccctccaatctccaacacagagcgcgaccctggaacctagctgtgacccgcagcacacagcaaccagcaatgacgacccacggcgtgaacggcggcaacgagcacgacaacgacgacccacggcgcgaacgtcgacgacgacccacacgcagaacatcgcgatccaactctagtgggcatcttgaagctttattatttttttttgggtttggcttttctgtttgacacccattttttccctttttctatttgacaccctctttttactttcgatagtcccattnttattnttttttctatttgacaccacaattattttgttcagtcctcttttatagtggaaccatcatctgat

SEQ ID NO: 167158 - DNA, 309 bp, Glycine max
  unsure (1)..(309): unsure at all n locations
agctntataagcgcgggtctgggagacaaaggtcaagtggtcgcgatatgcgaggatgatgttccgagtacattggatttggtacgaccatgccctcctgatttccagctgggaaattggcgagtggaggaacgccccggcatttacgcaacgagcataatgtaaacctttacggtttaaaagctctatagttaggcctaggctttagaagtcttccttttgttaagagctctgtgtcctttgctattgaacttataatacaaggatctttctttatctgttcctacgtgtctacccattctcattcat

SEQ ID NO: 167159 - DNA, 457 bp, Glycine max
  unsure (1)..(457): unsure at all n locations
tgagggtttagttcagtggtaaggaaccctctttttttcccttctataaagactaatatgacaataagagggttgaattgtaatttttacaaattctcaaaactttttctaaacacaacaatgttacgtctgaagatgaatatgtaagaaaacatatatcatattttcgcagagcaatttagacaatgacttcggatcttgtaagacaaacaatgattttcaaatacaaaaatcaaattcgaaccataagtcaatttataacacataagagaaaataaacaagataagacacatggaattatattggttcatctaaaccactgagactacattcagttcttgacaaaccactaagtactactaacttcaactacttataagtatttatgactctcactnttagttccttaactcaagctctataccaaacttgttccaatcaatattttttttttat

SEQ ID NO: 167160 - DNA, 279 bp, Glycine max
agcttcctttcaacaaagagaagagaataatgaaggattgaagaaatacaagtagtggggatgtcttctccacctctagaacctcacaatcactcatagactcatctcatgctcttaggatggattcctcttcactctcagttctctaccagtcttcgcataacaaacgctctcaaaactctctagaacttggacctttctctctctagaaatctctaaacatgcaaaagcttcgagaactgcccaaactccccctccatttctgatttcaggcttaaa

SEQ ID NO: 167161 - DNA, 400 bp, Glycine max
  unsure (1)..(400): unsure at all n locations
ntgccgatttagtggtgaaagtgagttatcaataacaggagtcatttgacttaatatgtcaattgaaaatcttttaaatatttctcgtccttgaaaattcattntcgagaacctgcacagtttcttttattgctacaaggtcatgacaaaagacaacaatagatacctcagagccctacattggggcaatgaaaggcaccatgcaagagccttaagtgaacctaggggtagataagaagttctcacccggaaggtcgaaaacccgaaagggtggcctaggcaaaaattagggttaataaaaaataaaaaaaggagaaaacaatcatgagcgtggttatcagggattggtcttgaaatccaaacttgcaaaggatccaagtcaagatttgaaatgacacat

SEQ ID NO: 167162 - DNA, 434 bp, Glycine max
  unsure (1)..(434): unsure at all n locations
agcttacatcatatgttccaagagaatatcatatgagacatatagaagaagagagaataagaagagctaatgagagagatgaaaggttatgttggaggaccaaacaaaagagggaaggtatctctactagtgcaaaactcactacatctattcatcctactagaagtatggaacttgaatgtctcatgtgttcaagaaaagggcatatgacctcccaatgcccaagatggaagacattgacaaatgagctaaaagaaaaaagatgaaagagaatgagttaagaanaaatgagttgagggaaaaagaaaatgaaatgagagaaaaagatattcaagaaaaagaaatgaaagaaaaagagattagagaaagagaaataatttaaatagacagtgataaagaatgagcacaggatgaagagaagtatgactactctt

SEQ ID NO: 167163 - DNA, 274 bp, Glycine max
  unsure (1)..(274): unsure at all n locations
tccctgatatggagagctaaagcctcagatggttcttnctatggcgtacttgatgtagaacatacatatttatctaataatgatntgggtgtcactgagctatcaagacttaattctagtgtgccgttaccatgatcacggaactacatgcttagttagggtgactcaacattcggaaatggggtgtaccttacaacctgataggacagggctggactatcgcattggcatgatacatcatggcacgataacctatgttttgttatgttatgtc

SEQ ID NO: 167164 - DNA, 409 bp, Glycine max
tgagcatgcaagctcttcaaacaacctgctaagcttattgcaatactccaaggcattatatgcggtgggcaaatgttgcccgaagagtatatcgtgaatatgaatcactatttcaagatgctgcgatcttgacctgaactttatcttctcttccttttccgttcaccgctacatcatcattggcgatataatgctatgcactcttactgttgaaaggcctgttatacaaaaaaatctggccatgtactgcatgatgcgagttatgcatctcttccaaactaaagatatattgcaggattacatgaacaattttgattaaaagatgtattatcttaacgacaattgacttatattatgttaatcaagtcctactttatttacaatatataacagcattaacatgaattaa

SEQ ID NO: 167165 - DNA, 385 bp, Glycine max
  unsure (1)..(385): unsure at all n locations
tgtcctcggtgacgaanacaatagaataagcctcttcgagcttttcacaggcgtcaacgattcgaagaatgaagggtctgtgtttggaggtggcgatgaggtggaggacaacctcggtgtcataggtggtgttgaagatggagccgttgtcttcgaggttggttcggagggtcttatagttgacgaggttgccgttgtgggccacgccgactgagccgaagcggtaaccggcgacaaagggctggacgtttttgagcatggataggacggcggtggagtatcggacgtggccgatggagatgctgccggggagctggtcgagttttgattggttgaagacttcggagacgaggccaacgccggtgatggattggaggacgttgtt

SEQ ID NO: 167166 - DNA, 560 bp, Glycine max
  unsure (1)..(560): unsure at all n locations
tacacttctantgcctctggcncgcttttntttaacannaacanaaggggacgtgtttgaaactagtgaagcatgtaacactccaactnntatccaagaccatcttgggggagcgcttctcatggcgatcttatgaaggtgcttccactcatccctgggaggacagtacatccacatggtggaaaatcaacatagaatgacctgatatgaagctcacagatccatcctccatcaaagctccacacgcaagctaccatcacaaatatatgacgactactaatgagtgcaaacgaatactaatgggtggttaagactacgatccgctacacatgagactaaacgcattctggagggacgaacgtatatgtgtaggatacagagattggttatggagctcacctcttctcattgcgactgattatgacaggcgacttgcttcgctcgtagaaaccgtgaggcaagaactcgaggggacgatcgtatcagagcaccatcgctgggcctcgccctgaaccagtcagtactttccaaaccatttcggtgtcaaacagaggcaatcg

SEQ ID NO: 167167 - DNA, 376 bp, Glycine max
  unsure (1)..(376): unsure at all n locations
atctttactacctagaggtcttactaagcttattatattcagatcgagttgcgcttgatgttatcatgaggtcatagaagttaaacaattacatatctttatatctccaactcagtgatttgaacatgcaagttttgaagttttgagcatattttggaccttttccttttcttcatgaagaacttggaaaatctgagctttgtctacacatgtgaagactaccggtgaatttgatggtgtaggtgaaaataaaattgaactggtcaatgtgaggaattttaggagatctttgatgcttaaccttcctttatatattaacgtgacaaaattctacatttattttatggttaacacttctccaccccttgtgctgaan

SEQ ID NO: 167168 - DNA, 415 bp, Glycine max
  unsure (1)..(415): unsure at all n locations
ngtgtcaatcccacatggttggagcattcttgctaaacagggtgatcctgactagtctccctatgattntacttagtaggagtgatgaggacatgacaaggactaatggcaaggaacctttagaaggacttggaggacctatgtcaagggctagaacaaagaagaccaaggaagctcttcaacaagtgttaaccatgctatctgaatataggcccaagatacaagtggataagattcagattgtcaattgtaccatgttccaagaagagtagagggtgccacctttgttgagtggctntattagtattttgctagttgaaataaaggctcanacttgtgttaaagtgactgtcaattatatttggatttgcaccacctatnggacttgtttaatntgaagaaattaagatttaat

SEQ ID NO: 167169 - DNA, 296 bp, Glycine max
agcttgaggagcttgctttagcccatatagagctttattgagtctaaaaacacgatgtggaagagtgttactctcaaaccctgcggggtgctctacatagactctctcttgcattagtccattgaggaattcacttttacatccatttgaagagtctcatatgtatgagcagcaatgacctatagtgtatgcctccggtgacaacaagagtgaagttatgtatatcatacctcctttataaaacctttggaacaaccttgcctgttgtacatactaacttcctataaagctatgtc

SEQ ID NO: 167170 - DNA, 368 bp, Glycine max
  unsure (1)..(368): unsure at all n locations
gttgntgcggaggtgcccaaaccataactctgatgacactgcatagctgtgtatcttctatagtggtgtgaaacctcagaccaagatgatccttgatacctcagctggaggcactatgatgtccaagatactgaaggaagctattgtaattattgactccatatcatgcaatgattatcaaagtcatcatggaacaaccttcacttatagaacatgtatcatggagctggacactccaagtgtaattctaactcataacacactcttggtgcaacaaatagaggccttaagcaaacagataggccaacttcctcaataatatcacccaagtggaccacagaatacacacacaactcatcgagttcaaa

SEQ ID NO: 167171 - DNA, 396 bp, Glycine max
atgcaagcctttgtacaaagaagaagaagaagttcttagagattcaaggcttgtaaaggattgattggaaaagtaaagaatgaaggaatgaattaattgaaaatgcaaaacatagccttacttttatagactcttcatgtctggtcaagaagactattagaagagttataacttttagaaaaacttaaaaccaatttgaataagtcaaaaacctttttaagagttacatagtttgatttattcagaaacaaacactggtaatcgattaccaaattagtgttatcgattacacatagcttttgtgtgaaaggatgtgacgtcttacatttgaatttgaatttcaatgttcaaatgcactggtcattgattacctaaacattgtaatcgactacagct

SEQ ID NO: 167172 - DNA, 452 bp, Glycine max
  unsure (1)..(452): unsure at all n locations
gactctatacatactcagctctttgatgttgatctaggtctcagtagttgctcttgaatcanaatctaagaaagatcctagagattcattgaggtgcattcttgcatttctaccttcacaagaaacttggaaccctgngaaggttgattaggtaagggaagctctaaattttattttgattgtgtgactaatgcttggaatgatgatgtttttggtgtttattgatatttataagtttgggtgagtctttgcagaaggttgggatgagtaggtataccattattggccatgtagtttgcaattcgcaacttcattttcatttcggcccaaccgaagttntgttntgactgaccaaagcatgacaaagtggagcattaagctccatagaggtttcagcccaacaagagcttngttcggctatgcatgagtgagatagagtggagctttaagct

SEQ ID NO: 167173 - DNA, 470 bp, Glycine max
  unsure (1)..(470): unsure at all n locations
agctatagggtagaatttagatccatggactaagtatgagtctgcttatctttgtacatattaaattgagattntattatttttttgggccttatattcagggattcacagtgtagggagggtatcctagtaatataggatttttcagcctttgtattttagggcacctagactagtttttgtattatgggtagttttataatttcacatgcattaagtgtattatttgatgtgtgtgttgngagagaaatttaattgaattgcaagaagctcaatccaattaaattttagaccagcctaagggggaagtgagcatttgtttgttacacctcattatcacatcatatagtcacactttgtgtttgtccttcatgctttacatgtctcatggcacctaagcacacttagtggagaatcttggatttgatcttagattagtgcgctgaatcatagctgaactcactaatcat

SEQ ID NO: 167174 - DNA, 134 bp, Glycine max
aaatgttgccttattttgttctgaatttgttatgttggtttggtctgtgcgttggtggcttggttggtgatggtgttgttcgatggtggtttgggtcgcgggtggctcgtggcttggttggtgatggtgatctt

SEQ ID NO: 167175 - DNA, 461 bp, Glycine max
  unsure (1)..(461): unsure at all n locations
agcttcgggctgctcaattgctccaggttgctgcatggaagggcaaaggtctgtatgatggtcagcataggagcacaaaccacagacccttgcaacaggtacagatttctggtttaaggctagctgggttaccaagttaaccaatgcatccagtttgccttcaagcttcttagtttcagatgatgcagctgagtttgtagctacctcatgcactcctctaatgactataacatcatttctggcgctaaactgctgggagttggaagccatcttctcaattaaatttctggcttcagcaggagtcatgtctccaagggctccaccactggcagcatctatcatacttctctccatattactgagtccttcataanaatattggagaagcaactgctctgaaatctgatggtgagggaaactgacacatagttttttaaatctctcccagtattcatacagga

SEQ ID NO: 167176 - DNA, 455 bp, Glycine max
  unsure (1)..(455): unsure at all n locations
tcattctacancctgaaaagaggatgagatagttgcacgaaagagaaagcttcctaactaaaattttcatgcaagtggaccttcttctagtaattctgacttaccgcagccttttatccctcttcaattcccacctagagcaattccaaacaaaaaaaatggaagaagcagaaaaggagatcttggagaccttcagaaaagtagaggtgaacatacctctgctagatgccatcaagcagattccaagatatgccaagtttctaaaggagctgtgcacccacaaaaggaagctcanaggcaatgaaaggattagcatgggcagaaatgtgtcagcattgataggtaaatttgttcctcacattcctgagaaatgtaaggacccaggtactttntgtataccttgcattattgngaacaataaatttgagaatgacatgctagatctaggagcatca

SEQ ID NO: 167177 - DNA, 455 bp, Glycine max
  unsure (1)..(455): unsure at all n locations
agctntanaccaagctcggatggatctcatgctatgatttatcgatttgttgattcaaagtcagtctcataccattggtggttcgaactcaaatcgtggtactccaggttcgtctaacggcattccggttactttgattatgacagtttctgcaattcgagacatttctttgggttttccgcattntgatggcaatacaccggtcttggagtggatcttcaaagcagagaagttcttcaattatcataacactccagatctggatcgagttgatattgcttctattcattntgagaaggatgtgattccttagtttcagatgttgcaacggatgcaagttgtgagcatttgggctgagttaacacgtgctntggaaacacnaattggtccttcactgttcgattgccgatggcnaattattcnacttcaacattttgatagttgctatatatttg

SEQ ID NO: 167178 - DNA, 439 bp, Glycine max
  unsure (1)..(439): unsure at all n locations
tatcccctaatgcacctattccattcctcccatggtcatcatcaccataaacagctataacctctctccagccaaagtagttaacaaagtctgctattgcagtcatttcataaatgtcactaaaagcagttctaataaagaatgggaattgaagtgaagaaagagtagggtcagtggctgtaaatgatagtagaggaacttggagctcgttcgctatatgagatatgacatgagctgttgtagacgtctggngaccgattatagccacagtttgtgttgccatgagctgcaaggctattacacacaatttatgtaaaccaagagtaataatctgccaaactntgaagtaacttgtctaataganaaaaagatgcttttaaagttttaacacataaaaaagatgggaatattgtgaaggacgtaccctctgcaatgctca

SEQ ID NO: 167179 - DNA, 382 bp, Glycine max
gcttcgctaagtgagacaccagctgctagccttcacaagtttcatctttttttacctaaaattgaagttgaaacacattatattcacaatgttgggcatttctactgaacaaaattaaactaaacctatgtacaaacctacaaaaagaaccataaattgtggaaaagacaaacattttataaaacttttctataaaaaagttagttgtaaatgagactaacattggttccgccctgcctgccgaggattatgatgagaggagaccgcatgcatgctgatggacctctaacaaggcacttgctgttttcacatatccgcaagtgtctagacagactaacccttgatgtggtgtgccgaattctgtatggtgaccaccattcat

SEQ ID NO: 167180 - DNA, 415 bp, Glycine max
tcttatccaagacacattcttggtggtgaagctccttcttccatggcttattttctagtggatggtgcctcccctctcctcttctcattttccttccgttgcatctccatggtggaaaatcaccattgaaggacctcattgaagctcaaagatccagcctccatagaagctccacaagcaagcttccatcacaaatattgaatgactactaatgagtggtaatgactattaatgggtggtaatgactactaattggtggtaatgactactaaatgcattcttgatggtagaatgtctatatatagcatatgtgtttggttcttgagctcacatctttcattttcgtctgatattgacatgtgttttgttttggtggttgtaacctcacatgtttgatacttgagtcttacatttg

SEQ ID NO: 167181 - DNA, 292 bp, Glycine max
agcttcttatccaaggcacattcttggtggcaaagctccttcttccgtggcttattccctagtggatagcacctcctctcacctcttctcctttgtcttccgctgcatctccatggtggaaaatcaccattgaaggacctcattgaagctcaaaggtccagcctccataaaagctccacaagcaagcttccatcacatttactcttcctccaacttccaaaggtacttttgtccaccataatgactttttttctgtcttcttttctggaggtgggaccatgtcattgtctac

SEQ ID NO: 167182 - DNA, 460 bp, Glycine max
  unsure (1)..(460): unsure at all n locations
tgtgtaacacttgtngtaactntgatgaatgagagtcttgtgagacacaactcanagttcaacttctctccctttttcttccttcaatttcgtgctcccccctctctctttctctccctctttcttttcctccattgaagcatcctctccaagcttcttatccaaggctcatcttggtggtgaagcttcttcttgcatggcttattcccaggggatggcgccgcctcttacctcttctcctttgtcttccactgcatctccatggtggaaaatcaccattaaaggacctcattgaagctcacagatccagcctccatagaagctccacaagcaagctttcatcacatgtgcaattgatagaaatataatttacaatggcctaactaatgagattaccctcacccatccttgngcactaaattgtgttgcatcctcaaacaccttcataggtcaaggatag

SEQ ID NO: 167183 - DNA, 291 bp, Glycine max
  unsure (1)..(291): unsure at all n locations
agcttccatgtgcaggttacgccatattctcttatcttcaggtaacctaatgcctgttggtttgagtaggtcaactggtgtttcattnttgaatcagcttcctagtgatccaagtatgacaacagacaacatatctggcaagtatgatgtgaagaagaaagaaaatataccaattagaattgcaggtgatattgatggtggaatgcttgatggccaccttaatgcccctggtggtgtttggcgcacattaggagcttcaaaagttgtaaaaccttcaaattcacctaacat

SEQ ID NO: 167184 - DNA, 477 bp, Glycine max
  unsure (1)..(477): unsure at all n locations
ngtagaatgtgaaatanatatagggagtctctagggcttgaggaggagacgacagatttgggatatgacaaatattacaaggacctgtaactcanacaatgggagaaaagatttcactggtttcctatttgttgcaccacttccccataacccatctgaaacaatatggggtggcgtagcatgcaggcataccatgtacctgtgcgtcgcctcatccactgtcgtaattgaaaggaacatagttccatttggattcaaattcattttgatcaatctatatgagaggagtagtactcaataatggcacttaattaattgagccaatgagagagtgtaattgaatatatatttgtcacgacacgtacgggcttgctagctcgctgctttttgcttcggtgcaactgatacttaattttgtaaagtttggctgctgtgtangaaatagtagcaattgcaatctcataattaagtaattag

SEQ ID NO: 167185 - DNA, 354 bp, Glycine max
  unsure (1)..(354): unsure at all n locations
agcttatcaatggcgttcttgaatntacatatggaacaacctgaaccaagcattcatggcttggattgcatcacatttatcactaccgctgccgataattatcaactaacatgggcaatgtgacaccctttaccccaaaagatttatctaaataatagttgtggaaaatgatataaaatgcacatgtgaaaataacaaattttcaaaatatactccacaatttttcataaaaaaaaataattaaatagttttttctattataaaaacaattaatagaacctgatttgagttttgggacaatgtanaanagggagttcagctggaattgatagtcattatattcaatgcaaaaaa

SEQ ID NO: 167186 - DNA, 493 bp, Glycine max
  unsure (1)..(493): unsure at all n locations
tccatgaatntcttggtaccagacctagcaattgtacccaagttgctcaccatatctgaaaaaaaaaacataacaaaaatgaattagagactaaccaggtaaacaaaaaaattggtccacaaatatctcaataaaagaacatctcaacctaccagctttggtcatgccaataccattgtcaacaatggttagcatattgttagtcttgtcaggaataatatgaatgaacaactatggctaagtatcgagcttgctcttgtccgtcaaactctcaaatctagtcttgtccaaagcctanaattttacatacaaccacataattaattaatctttcaaaacaaatcaactcaagaagaagaccaatattaacacaaccacacatcacactaaaaaaattcagtggcagggtacaacatttcaatcataattcatctcccaacgtaaccaattcactcctacaaaataaattagatgtcactaattcactattcac

SEQ ID NO: 167187 - DNA, 378 bp, Glycine max
  unsure (1)..(378): unsure at all n locations
acaggtgaatgaccattttatatgggataatgatccaagtatgtgtgaccttgaatgtganttagaagaagaataacaagaagaagaagaagaagaagaatccgacaaaagaaactagagatacagacctccatctgttctagctcaaaggataaatctagatgaatgagcatgggtcgaaataagaaaagatcaacattagccgctctagatctataaaaaagctctagagatcctcagagaagagggagctttttcctcgacttaatcaccaactgatgtatctctggtttcttgtgctcccactgataccactacacaatgcagacatcttgataccctttcactttctcaacctataccttgcatgatggtctc

SEQ ID NO: 167188 - DNA, 488 bp, Glycine max
  unsure (1)..(488): unsure at all n locations
tccattgtcaatctgtccgcaacagcattacactctcaacgaatgtgacgaagagaaaatccagcaaggcaattgagccattctaataatgttctgaaccgtggattaacaaggatagtggactgctcaaaactttgtgaccaactccattgtgggcctctttcgaataagcttaagcttagaactaaaaagtacttatattagtatcatgctgggaagaggaagagatcgaagaattggtgtggtacaaacgataattattagtatttttattttaagcttaaataattttttggtacctacaaaataagattatggttttggtatttagcctttttttaactttaatatctgaatttttttattttaaaaaaactacctattgtgataatganttgactaccaaatcaataatttntaaatggtttggacttaatgtaacactcctccataagtcaccttattagttaaagaagatttctaacaac

SEQ ID NO: 167189 - DNA, 329 bp, Glycine max
  unsure (1)..(329): unsure at all n locations
tgaagatttggaagaagaaggaaatattaataatgaagatgcggnttttataaccaatgaaccggtaagaagccttgtcatattcgcttggttggtgcaaaccaaccggcgggcatcatgcacagaataatcaaatttccaatcgtcaatcagtgcaccttcaagtggtacaccttcgcttggcaatttggtaaatcatagaatanggactggtcaatgaccatcttaattccataaacctcagacattagggtgccttctttgatttctaaagttgaatagaaggcttttacaagatcataataaataggtaatttagagacatgaat

SEQ ID NO: 167190 - DNA, 426 bp, Glycine max
  unsure (1)..(426): unsure at all n locations
ttcataggtganatcacgtgcagccatttcccttatagtcctctcacgaggtggaggttgtgccatgttctcagaatgtgcaaaatcacaatgctcagaatcagaatgctcaaaattataatgctcaagatcaagatgttcaaaatcaccaataacagaatgcacagattcaccagttatggaatgctcagaatgatcaaaaggtataaaatgatgcctaactaatctatgaaatgtcctatctatctcaggatcaaagggttgtaagtcagatggattgcctctagtcatacactacattcagcatgcacacaactagttgccttgtcatgtaaataatagtgtaggtttgaactacagctaccctcaaatgatatccacatgacttgaaattctgtgagcaaccttatcaaatgatgagaagat

SEQ ID NO: 167191 - DNA, 394 bp, Glycine max
cggacactataatactcaagcttgtcaaggaagaaggacctcctatgcttttggagggcttcccacagtgctatattatgagagagctctgcgagggcaacaccacagacaaacatgattggaatgcaagaatatatgacatagcaaatatataatctattgcctactttcggttcggctaatgcattagatatctcatgattaaactagaacatattttctctctctcttgtcagaagcggtcgcgagagacagcatgaaattatgagaactcataacttgtgagcagatgacctttacgtacagtgttgagcatatattatgattttgatatcttgtatataattattatagaatgggtgagcacactcttgtgaatctcgcacatataatc

SEQ ID NO: 167192 - DNA, 352 bp, Glycine max
  unsure (1)..(352): unsure at all n locations
agcttctcaaggaagctacatgaagctgtctcggtaaaaacgctgcccagccatcgttaaccgttggatcttctcaaaatttgggctggagctttacagaacacttgcacgacgttttcgtttccgagagcattagtcacttgtgcattntgagccttgtagtccaagtagctttggaaaaatgccatttcttcttcttccttcatccaaaaccatttccaacgtgccaagctatttctccatcacccacagccaccagtagccaccacanaccgccattgttctccattgaaaccccacaccgagaggaaaccttcaccaaagcgaatctttaacttgcctcatggttggt

SEQ ID NO: 167193 - DNA, 345 bp, Glycine max
  unsure (1)..(345): unsure at all n locations
ngtgcttgttntatttanattcctaggatcatgaacaactaggtgtgtcctactatgacttgagaaacacaggtgatcaaataacaagcaaagatttaaaaggtactaggttgcctcctagtagcgcttctttaacgtcttgagtcggacgcgtgatgacttgtcggtcatggacctagtacctttgctttcctttggctttggacttggtcgcctgctggtcgaccacgggtcgtaggcaacgctccagcctttgtatatgagccgaggggctctggaggtggcggcagtgcgtctattgcccgctactggccatccccaggctaatgttgatgcaatcctacc

SEQ ID NO: 167194 - DNA, 203 bp, Glycine max
agctacttagagtggatatttcgagactcacattattgattacagatagagaataatatgcactacatagatcaagtgacagtaactcggacaactgtgcaaactgatgtgggatttcaccagaaaaactagctacagaaaggcttagatatcttaactgtgaaagctcaccaatgctcgatgggatttgagattgattgaag

SEQ ID NO: 167195 - DNA, 442 bp, Glycine max
  unsure (1)..(442): unsure at all n locations
ctgtaaaacttaatgctcgatctggtgtcataatgtggaggacctagatgttgccagataacaacaataggagaggagaatatgcaggagctgctatttgnggaagcagcccttccattgatgttaaaagaaaccatgtctatattggaacagggaacctctattctgccccattacacatacgtcagtgtcgagagagacaaaataatcgaactgaacctactcaaccagatgagtgtattgagccagacaaccactccaattcgatattagcccttgatttggattcggggaagatcagatggtaccgccagtgtggaggcttcgatatanttttcttagcatgtataaatgcttcagctcctaattgtccaccccgaggtctttggcaagatgctgattatggggaggcaccaatgatgtngaccatatatataaatcg

SEQ ID NO: 167196 - DNA, 393 bp, Glycine max
  unsure (1)..(393): unsure at all n locations
agctagtcatcgggagacatcanaggctagtattntaataaatctgggtatgataaattcaccaaattgatagagaagaatctaaaatcatacatcttagttaaataaggcatgctaccccccaacattattgcattttgattccatctttggacattcaaattgttgtttatttttcctgttatcttttcctttgccttagtctaaatttcgaacttacaattcggtatctctttcttcttttgtttctcctcatttcttaataattggatttgcatcacttaagtacaaccagagtccctttggattcaacagttgaacttcaatttcaatctttactacttgtgattaaattaggacacttgtcaatctattaacaaagttttggcactg

SEQ ID NO: 167197 - DNA, 482 bp, Glycine max
  unsure (1)..(482): unsure at all n locations
tagactatattgtagaatcttgagccttagttctcaatgattaagtcggtcttatcatagagggagtctttatgctttctttcaatatcgagaatccattntgtaagtacaatgtttttcctaatgatatgatcgaggcttcacaccagtaatgtggacttatcatttactaaaagaattaggattccagacaaggagaaattaccaccatatacatcttgtgtaacacccaatttttgcgtaatataaattaaaaaagattctatttaaaaataaatagagttttaggaaaataatgagattttcgtaattaaataaataagagaaaataattttattaattaaaataatgattttaagggtaataacataattatatgttcttataaaataaaatgaatatttaatttattcattcgattgggagtaaaatataggttatctttatgaaataatataatanagaacaatagagtatataa

SEQ ID NO: 167198 - DNA, 453 bp, Glycine max
  unsure (1)..(453): unsure at all n locations
agctcgtcggagtgatgacttcccctctttgatgatagtatcgggttgtcaatccttcttctttatgtactgctatctctttgatgtcttgggtttgattctccccatgaaatcttttcaatgttctctgcttgagaacttaaatgtagtccccttttagcttcatcccaatagttggactatggtcagggccttcgaggtcttgtgccttttcttcaacataagacccagtgtgtcggtatttttgtatttttttttcatatgaaatngacatgcaagattggttgggtctccctgaacaacgtgtccaagaagttgctcgagtttgacttgaacgtgtttcatcacttcaaggactgtttttacaaagtcctcgcaactgacgtcatggctgatgaattgccactgatcttcaatcgagatgaggaaaccccacttctgttctactacaat

SEQ ID NO: 167199 - DNA, 497 bp, Glycine max
  unsure (1)..(497): unsure at all n locations
cgtagtgagattngactactaacaattcattggttnttctaggattcanaagtttagattctaagagagcacaagtcctagactaatcccaatgatcttttcttgttttgtacaaatagccttcccactattcccttttcttaagttgttttcgacctttttgtaacagcacaacttattttctttttcttttttttaaacatacaacttatttgatgtttgtgctgatgcttaacctttttgttttcattctaattgacttttcacccccaaatttagagtaaatttgccttgaaccatatgctctcctagaatctaaacaaggtattaggagataatcatttanagttcagggttcaattcatgacaaatcaataagctntatacaagggagcaacagatacaaatatcattcaaggtaagctatttggtcaaaagagcttgtgtctatacaattcatggccttcatcatgttctgagttatacaaatcattcta

SEQ ID NO: 167200 - DNA, 425 bp, Glycine max
  unsure (1)..(425): unsure at all n locations
ncaagcttctaccttttccttcctttctaccacatagatggagttattccacatacataaaaggccaccagcagcttgcacagatggaacaaaatcccaatgaccagtggagtctccccaaatggcctggcaaatacttttattaaagttctccctcttggtttcttggaggcagacaagatccactntgtgctttacaatgagccttctaacagcagcccacttgactcccctccncaaacctctagaattataggagagaattatcataattgctgagatntaattcccttctctgctgccatcaaatcatctttattctccatatccagtagcagccctttaaccttgctatcttcttcctcataagacaagcccatttccttcaagatgtcacattgcagctgtatagggtcctcgtataa

SEQ ID NO: 167201 - DNA, 497 bp, Glycine max
  unsure (1)..(497): unsure at all n locations
tcaatntgtagcctcanatcagccactaccattgtttctcttgagacagaagacgaattagaaagttggttttcttcttcaacccattgaaaaaattgacagttatttgggtctgtttggggtaatgcacaagtatagaataaccttcctgggttcctccttgttcttgtagttcgaatagctgcatgtcttccatggtggcattgctgaatgaaactaccagaaaatgcacaacaactgccacttgcagacatggagaaatcaagtgaacaagcagcagcgactaagcctcaatagaagaagaagaagcgactcagcgtgggaaaccagcagcttcgtaaatcctaatttatttggggaagaagaagaatcaaccttgcgtgagagagaatttatagatgcatacctcagtgccacattggacagtctacgtggcactgaattgccacctatacacctcactaacgccgtcacctgagaattaacgacatggacta

SEQ ID NO: 167202 - DNA, 430 bp, Glycine max
  unsure (1)..(430): unsure at all n locations
aaccacccgatatgttgtagctaagcancctatatatataagtctttgatggtttanaatggataggaaactgccacaaataaaaatgtcgcatgtggactaatggaatgagtaatcggtgaagaagacaaaatacatatgtaaaagtttatgcactgggttcgagtgcgttgggtaaactgttaacaagtacttttgtgtgttgaatatactttatgagaggataattcatgttctaacattgtatgatatcattgataagattgtttgcccattgagatattgttcgaaaatcttatctttcaaaacacataacattaagtatctttggaaatgcggtggcgaacataagttattttcaattattttataactttattcaatctactcatctgttgtttatcataacagtatacaagtgattattgcg

SEQ ID NO: 167203 - DNA, 243 bp, Glycine max
ctgtgaataatagtgcatccgatgcgatttcatgacggatgacgcgagaacaacgttaagaatctatacctgtcgctccagactcaatggtcgatgattcttatcttacaacattacggggtggtaccttaaaccaagctgttaaatcactctatatacccgtggtggccacatttggggctagtgtattaatttcgatgcagctacattttataccccttttgaagtgcttaagccaattat

SEQ ID NO: 167204 - DNA, 258 bp, Glycine max
  unsure (1)..(258): unsure at all n locations
agcttcaagagtatgattgtcgtggngactatagccatcataatttttcattctttcagagagcttgtccttctgtgtgacgtgtcacgaaggggtagaataagaaacacaaaatagtacttccttcttctcaacattgctcatgtagnctctactacttgtaccaaaatgagtntgaaagaatatgttgatttgcttaaccagccttataacaatacacttganttcaaatgatgagatagtttgacaaggagagag

SEQ ID NO: 167205 - DNA, 436 bp, Glycine max
gtaacctctaagatcatatcatccacaaagaagaggtgggaaacttaggcatctcctcccttcccaaatgagaaaggtttccatcaactattgtgaatagaatccaaaatcagatgagcaagtctctgcatgtagagcacaaaaaggagaggaaataaggggtctccatgacaaaggccgctggacaatttgaaggaatcgataagagatctattccagctgatggagatgtttgtccaattgatgcaacgagagattagggagaacatccgagaaggaagaccaaggttttggagggtatcgatggtgaaatcccattcaatatgatcaaaagccttttgaaggtcgagcttcaagatcatgtagcaaggcttactagtattatgctctagagaatgaacaagctattggatgataacataattgtccataacac

SEQ ID NO: 167206 - DNA, 294 bp, Glycine max
  unsure (1)..(294): unsure at all n locations
agctttgtcctcgagagatcttattcgtgcataaccttcttctcaatctgcttctgttcatcgctgtcgaagttgaagatcattccctccaaggtttgaacacatgcaatgactccctcaaatccccttagttttatgtttctcttccactttgtgtaaccctcatggaattttttcttctgttcacagttttgaccctacaagtcatcgtacccttactttgtcactcgagctttaactgggccatgtgtctcttcaaggtttgtgaagcaacgccagagcagntcatctacc

SEQ ID NO: 167207 - DNA, 399 bp, Glycine max
  unsure (1)..(399): unsure at all n locations
ctgagagggtctgatatccaaagggacacccgtgctgnttccagattcattgataagagaagcacaaatataaaaaccatggctaagacaaccttcttcaattaagccatcaaaaaatatttggtcacttgtatgtcaattgcttctacttgtgcagctccgatccagatttcacgtcactagctggatatctgaacctccacactgtatatgcagcagcattgacatcgcacaaaacgttggctnttctcttaatttatttttctctgatttgaaaaacatccttgtattcgacaacctccacaccgtaaatgcagcagcattgacccatagggttaaatcaacccagtgtaactccagatcatataggaacatatttcaattttgcgagaaagaaag

SEQ ID NO: 167208 - DNA, 414 bp, Glycine max
  unsure (1)..(414): unsure at all n locations
tgtgagactcactaagggcagaccttatgttatgcgagcctttggagaatcgactaggaaattttctgtcttgggttgtagagagactcaccaacggcggaccttgagtttgatgagcctatgagactcagcaagggtggacctttggttntatgagcctttggagattcgaccagtgacgtgtccgacctggattntggtgagattcaccaagggcagatgttagtcgtcttatacgactaacttttgtataaaaaacttttacaaaatgtatataaatccccaatttatagttcttttgtaggattgtaaataaattntgctctgttttgatctatgttcattaaaagcctctttatatggaattaatgttaaattctcttcaatttcaggcaaaaatgagcacaattgaag

SEQ ID NO: 167209 - DNA, 328 bp, Glycine max
tgagaacctgcgacgtacctaaacaggcgagctcctggcagtctaccaataatagaacacagtccacgaatcacggaggcttgtgtggcggctggccaactatttgtcttggtgctatctgaaaataccctctggaatcgataccatcgtgagaatcgatacagggtttaaaatgggacaggatgttagtagctttagtaatcgataccattgtgtgaatcgaaaccaattgtgtgaatcgattacacagatgatagggcactagtaattgattaccagttgtgtgtaatcgattacatatcgctactctgctatgggaatcaattac

SEQ ID NO: 167210 - DNA, 486 bp, Glycine max
tcttagtctcagctgatgaagatgaattcttggctacttcatgcactcctctaatgacaatagcatcacttctggcactaaattgttgggagtttgaacccatcttctcaattaaatttctggcttcagcaagggtcatgtctccaagggctccaccactggtagcatctatcatacttctctccatgttactgagtccttcataaaaatattcgaggagaagctgctcataaatctggtggtaagggcaactggcacatagtttgttaaatatctcccagtattcatataagctctctccactgagttgtctaatgcctgaaatatcttttctgatggtcgtggtcctggaagcacggaaatatttttctaagaatactctcttgaggtcatcccaacacgtgatggaccttggagcaaggtaatatagccagtcctctgccactccctctaaagaatgacgaaaggccttcagaaatatgtgat

SEQ ID NO: 167211 - DNA, 156 bp, Glycine max
ggagtacgacagtcaccgctttaagagcgttgtacaccagcagcgcttctaagccatcaagggatggtcgtttctccgggagcgacgcgctcagctcagggacgacgagtatactgattttcaggaggaaatagggcgccagcggtgggcaccact

SEQ ID NO: 167212 - DNA, 457 bp, Glycine max
ctacagcacatgccactattcttcaagttcttaaaggatatgttaacaaggaaacacaagtatattcatcacgaaaacattgtcgtggaatgaaattgtatcgttgtgattcaaaagatccttccacctaagcataaagaccttgggagtgtaaccattccttgttcaattggagaagtcactatgggaaaggctcttattgatttgggagccagtattaatttaatgccactctccatgtgcataaggttgggagagttggagatcatgcccactaagatgactttacaacttgctgaccgctccattaccagaccatatggagtaattgaagatgtgctggtcagagtaaaacaatttatcttcttgatagactctgtggtaatggatatctgtgaagatattgacattcctgtaatattggaaggccattcatcgtaaactgtgagttgatagt

SEQ ID NO: 167213 - DNA, 201 bp, Glycine max
  unsure (1)..(201): unsure at all n locations
agcttctccgaatgcatggttatttccagtttcctgaagatatctganaatctttccagatgacgatcttcttccttnttggaaggtaccacaggatatggtacttccacaccttcatccataattttttcacttctactcttctttgcattcctattatttttttcttcttttcattatctatttcgttttctttttctt

SEQ ID NO: 167214 - DNA, 430 bp, Glycine max
  unsure (1)..(430): unsure at all n locations
nttcacttcaagtgctgggtgcaccaacaaanatgctgggtgcacctagcaacagtcgcaattaaaaccattttgcttgttatgaagccaagtccaagatcgaaactaaacatcatcaatcaaagattttttatccaatgaaacatattaaaaatattgttgttcctcgtattccaaatgccaaaaatcgttgaacaccatatcacctgccatatctcactctctacgcgtccatcaattgcgagaagaagcgttctaagtttccatggaacgttgttggaagattagaagaaaaccaagagctacattctaacgaaatctactaggctaccttgcatganatgaaaatatgataaatngactcaatttgagagtgatagaagcaacaatgtgaactgtccaccaatatatttcgtcttttgcaaatcac

SEQ ID NO: 167215 - DNA, 351 bp, Glycine max
  unsure (1)..(351): unsure at all n locations
agctagcttgtggngcttctatggaggctggatctttgagcttcaatggngtcctttaatggtgattttccaccatggagatgcagcggaagacaaaggaaaataagtgagaggaggcgccatccattaaggaataagccatggatgaaggagcttcatcaccaagatgagccttggataaaaagcttggagaggatgcttcaatggaggaaaagaaagagggagagaaagagagaggngggagcacgaaattgaaggaataaaagaggtagagaagtggaacttgaagtatgtctcacaagactctcattcatcanagttacaacaagtgttacacatgcttctatttat

SEQ ID NO: 167216 - DNA, 485 bp, Glycine max
  unsure (1)..(485): unsure at all n locations
cgcaagtctccacccatcatcatgttcgaactgaacagaaagtacccacaaacatgcactaaattgcctataaactcaaaacgtgtttaattgaatttattttaaactctgtcatatgtgtttcattacaattatgaggcatctcactgctaaatttggttcagcttggtccttctgtccttgctgccaatggcctgcataatgatagtttagtgcagtgtcgattctcttctagggtcaatctctagtaggactttaaggtttttattttttatttatgacataaaggttgattggattaagatatttgaaaactggaacttcaaaagagtcaaattactcttcatgccttattctggaataggacagtttccttgaatttttatataacctacaaaataaatgtagatggagttggcttcattcagtcatatggnttggactntaatcttagntaatgtccttagcatcattttcttaaataa

SEQ ID NO: 167217 - DNA, 326 bp, Glycine max
ttgggggggcactaaaatgttataaagaaacatttttaattctctctaaaacattaaggatgaacatatatttactatagaaactcctcatggtattaacagggaaccgataagcagggaagatgacgaaaaagatggaaatctttacgggtagggtatgaattatgattaacgttaacttgatatcaatataaaaaatttgttttcatatgttataccacataaattggaggctgttgctgcttgtatttctattaacgagaaaaaccgagagggagaaatcctcggtagtgtgttaaaaaaataacataaaacgcttttgaatg

SEQ ID NO: 167218 - DNA, 923 bp, Glycine max
  unsure (1)..(923): unsure at all n locations
ggtaaataagggaatagaaaaatatcncacgaaccaaaacattattgaatacaatttaataatatgacaacncacaggaaggatgagtcgttgannnccnncnnttnnanaaaacccgaggggaggnaaatgaaaanatagagaacggagaggtttaaatttacaacgaggtaagataaaagggggagattgtactaaaaaaggaggaaataaaagaaaagaatggttaaaaaaaacgcaaagatgaagaatgaaagagaagaaaaatagatataaagaggactgtagaggccatgaaagaataagtgcggagcaaaaaagttaggananaaaaannnaaanaaaggtaaaaaaagaagaaaaggagaaaaaaaaataagaaggagaagaagaggaggaagaaanggagaaaagagggaaagagaaagaaaaaaaagaataaggaaaaagaaaggaaaaatagggaagaagaagaagagagaaaagaaagaggaaaaagaaagatgaaagaagaaacgtaagagagaagagatgagagagaggaaggtgagatgaggaaagaagaaaagaaaataagaataaagagaaagaaaaggaaaaggaatgataaaaacgggaagatagagatagaagaaaagatagatatagagaaagaaaaaaagagaaagagaatagtaaaaaggtagggcggaaggaaataagtgaagaaaaggagaaagatgaagaagtaaaagagatggatgaagaagaaaaaagtcaaaatattaggcaaaaaagaagaggcagagtggaagatatagagaataaagagaagaaattagtatgagaggtaaatatcaatgataaaaaatgtaggggaaattagctagacaagtggatgagataagataaaagcataaaaagaaaaagaagaaaaatagagg

SEQ ID NO: 167219 - DNA, 1089 bp, Glycine max
  unsure (1)..(1089): unsure at all n locations
actgatcgagtcagactgacaacgcnacaacatcactgaactccaaccatccactagtangcttctctctcaatataaactcaatcgaancctccccccccacccnnccggggtttgatgacatcgtgttcacccgcagngccatactatagaactgcctgcatgcaagcttgcttctaacaaagaacacgattggaatatttaagaggaacccgacactatcatgaaggaaaagcagagggacgagaaaaagagtgcttcatatgataactatgttacatagcccttggcatctttttcgaaaaggaactgcaccacactcgatacaaattttggccctttgacaatgtaatgcaataacatttctataccgtcgcaacaatctagacctaaaccaaaaatacctaagttaacctaaattgttatccaccacctatattataacctccaataaaagaaagattcaccctattgaccaaaacttaaaaacacattttctaaaaaaccttgatgagacgaatgtatccccttatattaaaaaaaacccgcctaaattggaacgccgtagaaaaataaaaccctaatctccacgcgcactactcttttctcctcaactcaatgcttaaaaaacgagaaaaccggcgtgtccaataggaaacgctataacaaatcgaatggttgacaagcctcaaaccgaattcttcatccaacactaaaacccttgcaacgaaaagaagttcccgaaaagggggctcttaattctttcatcccacccacacctatactcacaatactaatcttcttatataacaaagctacccacagagaaatatccccacccccacaactacactaatgntatcccgtggctctataaacccccttgggntagaagacacctacaaaccaacnctcttacaaacctaagagtgggcgcactcttacacacaacaaaaccttcgcacataatacctagtaactcttacaaaacaataatattcgcgggcgcgcgacgccagcgcttccccttggtttattaataaaccaaaacatatagacgcgcgcggccacaacatacacacacctccc

SEQ ID NO: 167220 - DNA, 200 bp, Glycine max
tcagtgctttcacacacaagggtctactaatttggttgctattccgttggagggtattacgggggttgctgatcttgatgagagaaagttagttgcatattttgacagcaagattgttcctgtgcccaaggctgagggaactgagtacgtagcttcaaagcaaaagcctccatttggaccaacgttcattggagcagctt

SEQ ID NO: 167221 - DNA, 490 bp, Glycine max
agcttgaatttaggtctcatgggtatgcttttctggggtattccacaactcaataagggttacaaatgtctttctcctattggaaaacttttcatctctaaggatgttgttttcaatgaagtcaaatttccttattcagaactgcttttgccttcctccaagtctgatttaccccctattaaccccatctctttcattccctccatacctattgttcctcaatcaatttcttctctttccctctatagcaattctgttgctactcctacttctgctgatcctacagctgattcaaattccaattatagtccttctgtcaatgcggattctactcctgctattgcatctgagattcctagtcctatctttgaagctggatccacttctgggcaagaaaattctgctcagtcctcagaattggctccctctgaagtactcacaacgcaacaatggaacatgttcctacagttaattcccatcctatgccaac

SEQ ID NO: 167222 - DNA, 210 bp, Glycine max
ctgtaccttaactagttacaaggattccttctcaaatccccttattcagctaaatatgtaccttcaaaacttgaactttcaacccgagtgcacatacttgatctaaaagatactgtcataccctaatttcgtccggggattattatttgatgatatacaacctttgattggccgcttcaagatactaggcacccttttttgcacaatatg

SEQ ID NO: 167223 - DNA, 345 bp, Glycine max
agcttccatcagcgtgacaccctctaccccaacatatatataaataaatcgaatatatacaaatatcggtaaccaaattcacacgggtaaaagggtcacattcacttcactattatcaattaaaacttattaaaacatatttggcacaaaataaggccgacaaaaattataaaaaaattttgataaattagtgaaataacatataatacaagcttacttttcaataatcaaccacacttttttactcctcaatcacattacacaagaatcacacattttcatccagacataataacacatcaatttcataataaacaatcagcaacgcatatgccaacgttatgc

SEQ ID NO: 167224 - DNA, 87 bp, Glycine max
gctcctgtatcaacctggaatgatcagatcgccggacaacttagtccgcttgcgcacaactcaggacggggaccttgccctgcaaaa

SEQ ID NO: 167225 - DNA, 494 bp, Glycine max
agcttgtaggattatggggtacccatcacatgtggtactatgtggcggtcgggcgatggtgcacaacaagttttccacatccacaatgcgcgcataaacccaccatcccctgttgcccacctccaactgagctcacgtactcccacgtagcccatatcctcgtttttctcaacaccgggtccccatcaatcctcccaagcttccacaacatccaagcaaaacaacattcacacagcacaagctatcacagccaagcaaaacaaaagaaaggcagaaaactctgccaaaacaccaaccaaaaatcacagcttttcccactcaaagaccccagtaacaattccttcgatccaatttggtaaccgttggatcgactccaaaattttactggaagtctatagtacataagcctacattttgaccgttgggatctactaacaaacatccagaactcattttacattactctctccacaacccgcaaaaacatggatttt

SEQ ID NO: 167226 - DNA, 181 bp, Glycine max
ttggtcgtatgcaaaatcttgaaaattggattcttcaaaattttgcatgtgtggtggtatgtagtatggtggtatggttgtgattggtgaaacaagctcaacttcttccttatcatcttcctcctggaattgattgtgtagaactttgtcttcatcctcactataagggctgagtcccttt

SEQ ID NO: 167227 - DNA, 417 bp, Glycine max
ccaggctttaataataaaatatgttgaggcaagttttacatttggaaacaagacacacttgattaacttcttctttggattcatgaatatttttgtgtgtggaactaaatgttataaagaaacatttttaattctctctagaacattaagtatgaacatatatttactaaaagaaattcatcaatggtattaagcagggaaccgataagcagggaagatgacgaaaagatggaaatcttaacggtcagggtatgaattatgattaagtttaacttgatatcaatataaataatttgtttccatatgttataccacataaattgtaggctgttgctgcttgtatttctattaacgagaaaaaccgagagggagaatcctcggtaaagtgttcaataagtaaacataaaacgcttttga

SEQ ID NO: 167228 - DNA, 201 bp, Glycine max
gttggtcgtatgcaaaatcttgaaaattggatgcttttttaatttgcatgtgtggcggtatgtactaaggcggtatggatgtgattggtgaaacacgctcaacttcttccttatcatcttcctcctggagttgattgtgtaaaactttgtcttcatcctcactatacgggctgagtcctttgttatgtaagccacggtcta

SEQ ID NO: 167229 - DNA, 455 bp, Glycine max
agctttgagccaattcaaacgacaataactttttactcggatgtctgattgagtcccgtaatatatcgagaccgtcgaaattgaatattgaagctctaagccaagtaaaacgacaataacgttttactcggatgtctgattgagtcccgtcatataccgagacgctcgaaattgaatgttgaatctccgagccaattcaaacgacaataactttttacttggatgtctgattgagtcccgcaatatatccagaccctcgaaattgaatgttgaagctctgagccaattcaaacgacaataacctttttactcggatgtctgattgaatccccgtatataacgagacgctcgaaattgaatggtgaagctcttgaccaattcaaacgacaataactttttactcggatgtttgattgagtccccgcatatatcgagaccctcgaaattgaatggtg

SEQ ID NO: 167230 - DNA, 200 bp, Glycine max
tctcaataccaactcaatacagagagggtaaattattgagttttttggtgcgcgcatgtgcaagctcctatttggggtgcacatatacattgcacatactcaaagtccctctttagttatcaacataataagaaagaaagtgctatttataccaccacattaacatattatcactctctaagtgagaacacagaaggaaa

SEQ ID NO: 167231 - DNA, 442 bp, Glycine max
agcttctccgaagggcatggatatttccagtttcctgacaaaatccaaaaatctcgccaaatgacggtccttctctttcttggaaggcaccacaagatatggtacttccttaccttcgtttacagctttatcacttctactcttctcttcattttcatttttttcatctttctcaatttttgtaatctctttttctttttctacttcttttttctttttcttgggcattaaattctttttttcttgaccattatttgtttctctttttcttgattgctttcacctctcacatcatttttcttgccctcagtgcctttctttttagcagctttcttcttatgcacaacactctcctcatcctcggcctgcacaaatcttttactccttgtcatcacagctttgcatttcttcttgggattcttttctgtaattgccaccaaat

SEQ ID NO: 167232 - DNA, 201 bp, Glycine max
tcaacattcaatttcgagcgtctcgatatatggcggtactcattcagacatccgagtaaaaagttattgtcgtttgaattggctcaaaggttcaacattcaatttcgagcgtctcgttatattacgggactcaatcagacattcgagtaaaaagttattgtcgtttgaattggcttagagcttcaacattcaatttcgagg

SEQ ID NO: 167233 - DNA, 430 bp, Glycine max
agcttgtaagtctccagacgacgagagtaaaaacctgcaaaatttttgaaaataatcagaatcggacgaccaacatcatccagataccgtcgaatttgttcacctcgattgatgaaaggagcggatgatcataaggtatctctgcctgccacctaacttgctgtccctggatgacaaaaggtgcggaagacgatgttattctctgtatgtcaacgggctcgtttgcccctggttaacgaaaggtgcggataaccatacagtatcccccgcatgtcacctgacttcatgggtcaggatgacaaaaggtgcagaacacgatgttagtctctgcgcgtcaacgagctcgtttgcccctggttgacgaaaggtgtggataaccatgcggtaccccccgcatgtaattggacttggcatctctagatgacataag

SEQ ID NO: 167234 - DNA, 125 bp, Glycine max
tctaaactttgtacaagaatgaagctctgataccactttttatacaagtggcctcagatatcttaagaaggggggggggggttgaataatattcttcatactgtcctccctatttttttaccctc

SEQ ID NO: 167235 - DNA, 275 bp, Glycine max
acaaacaatgtggaaaacaaactaagatcgtgtgatcagatagaggtggggagaactatggccgatacaccgaggatggacacgcaccaggctcatttgcgaaatctcttcaagaacatgagattgttgcccaatacactgtgcctggttcttcggatcataatgatggggcagaaccaacaaatcacacccttattaaacatggtgacaagcatgacgaagacagaaagcttcctcaattttcgggattgatgctcttaatacggctgtgtata

SEQ ID NO: 167236 - DNA, 195 bp, Glycine max
tgttcatcttgagataataagtggtcatcctcatttgaagttgttggtgcaacatatttctttggcctaacatgaactccaatatttttacagcttctaatgttatgattggtttggccacaccttccacatgtaaactcagccaatttcctctttaacttatgtcctgtgacattgtcctcatctacagatctt

SEQ ID NO: 167237 - DNA, 378 bp, Glycine max
cataattcttcattccaattgacgacatgttacatacataaaaattggtacagaaactttgtcatactatccttagctccaaataaagaaaaaaaaaaaaagaagctttctgtcatatatggttcttaatttgcggaaacaaaacattgctctagtgcatcttttttccagaagtttacttgcactgggaaaaatataaccaaaagagtcagctctaaaacatgatggtaaaattatgcaattatagcgcttggcgtttatgtgaaagccatttccagaatatttattgatcagacatcccaataagattggaaaaaaaagcttacaaaatcaccagcgctacctgaatttattattcacatatagatatcataacca

SEQ ID NO: 167238 - DNA, 197 bp, Glycine max
tattccaaactttctacgcggtttcaacaacagttcaaaacttttaaatctggatttgcaaaatcgtagtctcacggatggaagtattcgtatgtcatcttctttcattattaggtctacattttctcttgagtcccttgatctcttctcaaatctgttgaaatcatccactatattttactggctctttaactcca

SEQ ID NO: 167239 - DNA, 412 bp, Glycine max
ttaaaaaactttggcttttacatgccccactcccttgagtgggcattgaattgggaggtatcttgggtggtccatcatagtacatttgaaattttgattggttcatgcatcatcctggtttgggtgaaaaaagattataatggtagaaaaatttctttagaagacaaaaattctctatttttaatcgattaccttgtagaaagccacatgacctttgggtggttctgatgaatgatccatgatgaatttgatggcaacatgattgccaattgggcgttttcaaaggttaaaattcaagacttatgattcctgaataccagccccatcatttagatgatcactattacttttacgaagggaatttttaattgatataccaaaagggttggcccaataatgcatgttaaaaagt

SEQ ID NO: 167240 - DNA, 200 bp, Glycine max
ttataagtgcgggtttaagacgcgaaggccaagttgccgcgatatgcgaggatgactccccgaggagattggatttgatacggccatgttctcccggtttccgacaaggaaattggtgagtggaggaacgcccagacgtttatgcgacaagcataatgtaaccttttgtagctttaaaactctacgattgggcctatgct

SEQ ID NO: 167241 - DNA, 366 bp, Glycine max
agcttattcgaagccccttgaattgaatgtcgttcatgcattctcaaccattgaataccgcgccccatgaattgattggctaacgctgctcatgcatcctccatcatcaaatcttattcggagccccatgaattgattgtcgttcatgcctcctccaccctttaagacaaagccttccgaaatgactgccaagctctgttcgtgaaacctctatcattaaatcttattcggagccccattatttgattgccattcctgcatactaaacatggttttccgagccctacttatgattgtctactggtggtcgtgcatcctccaccatcttatttcgagccccctgaattgattgcggtcatgcatcct

SEQ ID NO: 167242 - DNA, 207 bp, Glycine max
ttttggagtagaaacatgggataaactcattttattcaaaaagttataactagtcaagatctgagcgacaatacaaacttcctagcggtttctaatcatatggtccattaagtctatcatatgttgacaatagctgagaagtctgtggatcttcttgggggcggagtaggtgtccgccattgctttggccttggctagcaatcgggg

SEQ ID NO: 167243 - DNA, 442 bp, Glycine max
agctttaacctcatcggctctcacagactttatattttggagccaatccagtccttgtggtcggactctcagccacttatgatagccgccgatgatcccattactgcttcccctaagctctctggcctttcttcacgccgcatcccatgccttgcgaactccttggagtaccctcgcggtggggtcactgaaacctcatgcgatgaaaggcgtgatgctttcgtctgatggcactcctctcatgggacattcttcgcatgaaaatagaatcctgaatcttccttccttctagcgagggaaccatttaacagacgcccctccatgctagccaagagttggtgcacaaaaaacaattcttgcgccgctcttttcacatccccggtcgaacgtgttatacatggcccaaatggcgacgaccgggctttcctttgcatgaagaaag

SEQ ID NO: 167244 - DNA, 208 bp, Glycine max
tctcggctcatgctgggaacgcctctagttcaacacccgtgctgcctaaggcacccacccagagggaagctccccaagttccaactccgaacgcgactcgaccggccggtaattccaacacgacaaggaacttccctccgaggccattgccggaattcaccccgctcccaatgacgtacgaagatcttctaccatccctcatcgccaa

SEQ ID NO: 167245 - DNA, 372 bp, Glycine max
acctggagatatgtcacgggggtcaggaaaccttggggacgtcaggtggggtgctattgcccaaaaccaagcttcaccaatcgcgacccaacccgggcattgattacacagtgtaagttgcaggtttccatgttctgaagctgtgtaactcgagtttggcctctggtaatcgattaccaatgctgtgtaatcgattaccagagaagaaaacccttgaggcataccttttaactacatgtagcggttatgggacgcattgtgttgttaccccgaagtagatttctcgtgaaagagactacccccttttctcttatttcttgagatcgtgaaggcagcgcaattaatccatgatcgagtggagatggagtgcct

SEQ ID NO: 167246 - DNA, 206 bp, Glycine max
tatcccccaattttctataaatagggggagaagtgaagtgaatataggttcaccaccttaggcacttctctctctttcgaatttgcttggaaaaattgtttccgtgaagaaaatccaagccgaggtgcttccgaaacgtttccgtaacgtttccatgaggaatttcgcgaaggtttcgaccgttcttcgacgttcttcattcgttc

SEQ ID NO: 167247 - DNA, 565 bp, Glycine max
  unsure (1)..(565): unsure at all n locations
ttgacaaaacgaagttcatgtgaagtgaagtgaagtcactaactaactaacactaatatatagagggttagtaactaactaactcactaactacctaattaaactaattacacaacatagaagcccaaactcgcaacctaattctttaagtgcagaggttctagcttccaagctcaatttgaccctcgagatggcaaaaatggccatttggagttctcacacgtttcttagctttccatggactactcacacgttccatttggagttctgtagtgtcgtctaggccctgcacaaggcaaataggtcaagtaagccaaaatctaaaatttagctacaattctcaattaagctcaatcatttgccttagaccaaaactgatttaaggtgagaaaataatggtcaaagagattntcattgagctaagaagactaaaaaaaatattaaactttcaaatgctcaatcgaattcccccacactttatcttttgcacttagggcaaaactaanagaaagattaaaaaaaatcaaactacaaaataaccacaacctaaaagaaaggtatgaat

SEQ ID NO: 167248 - DNA, 741 bp, Glycine max
  unsure (1)..(741): unsure at all n locations
cctactccaatcaagttattggtcgggatcgtgaaactattgttgtttggtcataaggataatagttcttatctgattaggtcaggggcggccggcccgggggttacccgtgattggtaatggcataaccagaaagaggagtaggggagacaagcttatgcgctgtgtagcgcagcccatctatttcgggtacagggacgannnnnnnntnnnnnnnntnnngnnnntnnntntnttntttttttttntttgttttttnttttttttttttttttttatttttttttgttttttttngtttttttttttttttgttttgttttttgttttgattgggttggttatattgtttttatgtgtttattgtataatgtttggttttttttttgatattgtatgaatttatattgtattatattgaattatttttattgatgttttatgattttatgttatgtatatataatgttatattttgtaatgagttaattattagtattgttatgatttattgtttattttgatgattatattattattgttgttattattttttgttttttgattattataattattttttttttattttgagttaatgtttttgtaagtgttgtttgtggaattatatgttgtagttttattttaattagtaattaattatatttgtgattttattaangatgatggatatgaattgcttatatagcttgattgattgatcaatgttgttattcgttt

SEQ ID NO: 167249 - DNA, 406 bp, Glycine max
agcttgctctaaattacattgatgtttgtatttatgggaggaggatgtatgtcatttttgttttaagagtagtgtcccactggtaaaactaactttccaaatgtttgccttttcaagaaatggccccgaggaagcttgcctcaaagaagttcaggaaggacaaggcagccgaaggaactaattccgctccggagtatgaaaatcaccgctttaggagtgctgtacaccagcagcgctttgaggccatcaagggatggtcgtttctccgggagcgacgcgtccagctcatggacgacgagtatactgatttccaagaggaaatacggcgccggcggtgggcatcactggttactcccatggccaagtttgatccagaaatagtcccttgagtttatgccaatgcttg

SEQ ID NO: 167250 - DNA, 229 bp, Glycine max
acaccatacactactcaagcttgaaattgaacaacggaagctctcgagaaattcaaatggtcataacttttcacacggatgtccggctcaggcttataatatatcgagacgctcgaaattaaacatcgaaaactctcgcgaaattcaaatggtcataaattttcatacggatgtccgattcgggcgcatcatatgtcgagaagcttgaaattgaacaaccgaaactctt

SEQ ID NO: 167251 - DNA, 631 bp, Glycine max
  unsure (1)..(631): unsure at all n locations
agcttgcattgcgttggagtatacatccaccttttaagtatttgacgaagagaaatattgtgaaatagaaacaaacttatacaaataatcagttcccagatttctaaagattggacaaaaaaggattaaaaataaaaaaaataaaacaaaaaacattggttagatttttttaacgcgtacattattttatatatcatttgggtaaaaaaattatatttgtattatttgggtaattttttttgtattaaataggcactattagaaaatatgctgttcacatctgttatttatgacgttctacattggttattaaccgatgttgaaagattatagttaacaccggctttttaaaaccggtggtaatgtaaaattgacacatcggtatttaacaaccgatgtatataataagattacaccaaaaacatatgaatgtgatagttacatcggtnttatacaaaatgatgtaactttacataaaagaggttttataaaataatgtaacgatacgtaacatggtttgataaaccgaggtacttcaaagtacattatttataaaaaccgaatggataggattttttaaaaactttttttttacaaaaaaccaaataacccggatttaaaccaccccccc

SEQ ID NO: 167252 - DNA, 1212 bp, Glycine max
  unsure (1)..(1212): unsure at all n locations
ggctagaatcgatttcgtaatactacctgtatacctcattgcagagctctatcacttctccgtacaaccaggattacatgtcttcnatatnctcnnccnncgnnnnccgagtttgaatgcatggcaatcacagacactatannnaatactcaagacttctatgcgatgaatagctgcgagagacgtgcaaactgcattcgaacaatcaggatatattgttctaatagtctatctccacacacacgagaggcaacgagacttccgagactgttctcatatcctcgtngtagactgacgactactggaaaggtgcacacgacacagttgaaactactcctgcgtaaggcaaccaaaccggtcccagaagctcatttgatcacgagattggaccggcaccgctcctcagcagaccattacggaaggatactgtgctagacagatccgaccaaaccgtccggggnnnnnnagtnannannaanngnnannanagaaaaaagggagaaaaaaaaaannaaaaaaagaaaaaaanaaanaaaaaaaaaaaggaagaagtagaagaggaggtagtatagaaagagaaagggaagtgagaaagataggagaaggaataaagagaaaagaagaggataagaaagaaagatagtaaatatagataaaaagagatagtggatgtgtataaagataaggggtaggtatgttaaatgaagtgtgatagaatgattgaaagagaagatatgagggaagtatgaagaggagattaaatatgagaattaagttgattgatgggtgtaatgataattgaaggaagaattatgggtatatataaggtaatgaatagataaatgatatgagtatgagtgataatgagaatggagatatgtatagaagtagttgatagaagaataatagtaataataatggttaagngtagtatagaataggagtaatagatnaatgtaatagagaaattaaggtatagtagagttaagtgtaaataatggaaattatgagaagatgaaataagtagaagagttatgatgaggagtagagagaataagtgtagtggtagatatntggaganagatangaactttgtatcganagttaatgtatataggaagggaaggngtaatatgagagttgaaaattatggtataaagaggtgnggatagaaagatattggatgtggaagatgaagtaatangaatagga

SEQ ID NO: 167253 - DNA, 1060 bp, Glycine max
  unsure (1)..(1060): unsure at all n locations
cggtaagcactcaaacgtgtacacgaccgtgctggtaacaagctagtgcattactcttaccaaaccgtaccatcctcgacgctcttgcacgtaaacatccatatcccacnncccnncacccccgcnccccggtcncnnngttagactttcgtacgtcacttnccganngcacccnnagaaagaactgacaccggcagggcanaggcatatacacacctcatatcgtccttcttgacgagaggcgagtaatatattgtggtataccaagttccaaaaactctcgaggcgaaggagggcctacactcaaattttggaagacccccgaccccatccctaggaccataccaacccttaaatcgccttaacagacaaaagaaggacgcgcaagaaacaactcactttgtggaagaaccgtgtggggcaaaccctctcgaaagatagccaatcgataaagagccgaaggaggaaatgatgggttgcaattacagaacgacataaaaggactcgccacggaaatagccaaggcggttccgaactcccaaaagcattaaccggacacgcttgaactaaacaaaatggcgggcccaccaccacgaacaataaaaaatagtggttaaatacccccaccggaaaaaaaaaaaaattggtgaccccccttataattgaaagacctcgagacgaacatcactaacaaaaagaatgtagaggctctacagacggactactcaaaaaataacaaacgaaagcagcgggatgaagccaaagtgtcctctatgagaaaaaaaaatctctccctatgaaaaaaaagaaaaacgttcagaataagcgaatcaaggagagacagaagtaattacgccccgcctgcttatacaaaagggcgtaacaccttacaaaggagattgaaagtccacaaaaaacaatactgggtgccctataggggaaaacatattggggagaaaaaaaacaacatcccaagaaatttccggggggaggacacacgcaaaagaaaagagaaggcaattcgccccggtggaggacataaatactcaacaagtaaccn

SEQ ID NO: 167254 - DNA, 786 bp, Glycine max
  unsure (1)..(786): unsure at all n locations
acgggatgaaatcattgacctagcagacaccatacactattgaatactcatgcttaccacaagcgccaatcagtggacttggcgagtggctatttttttttaccctcctagaggaaagatcctttatcccctcattaaaaccaactgcttattgctggcaaaaaaaagccataatcatagttctgatgcggtcaatggcaaaatactcattggggccaaggaccttctaaggataaaaaggctttatatccaaagacnnngtatgtctaatataagacgacatagtatgtagtatattttagttctatgtataatgtttacgttatctgaacttattatctctatttaaattacattatacgtgtgacttttagatatcgaatatattgtagcatctgattagttttactgatatattttaatcatacttatcagctgagatgtttcatttagagatttggtattccatgtaattttacatactctcaatatgctatataattaacgctttacgatttctataataatatatttatatttatggtatatatttttaatatggattattgaattaattttcataataatatttcatttttgcattacttaattctttatcgacgatgtctcattagtagattaactcaaatagcatataaatattgatcgagaatagtaaaatctgaacttctattttcgagtttttgaggcatgatatagtgttgatatcttctaatctatattgactgttgattataattcataagtgattttttctattgcctt

SEQ ID NO: 167255 - DNA, 412 bp, Glycine max
agcttgtaggattatgaggtacccatcacatgtggtactaggtggcagtcgggcgatggtgcacaacaagttttccacatccacaatgcgcgcataaacccaccatcccctgttgcccacctccatctgagctcacgtattcccacgtaacccatatcctcgtttctctcaacaccgggtccccatcaatcctcccaagcttccacaacatccaatcaaaacaacattcaaacagcacaagctatcacagccaagcaaaacagggcaaaagcaaaaaactctgctcaacacaccaaccaaaatcacagcttttctcactcaaagaccccagtaacaattccttcgatccaattcgttaaccattggatcaactccaaaattttactggcagtctatagtgcataaacctaca

SEQ ID NO: 167256 - DNA, 911 bp, Glycine max
  unsure (1)..(911): unsure at all n locations
gcatctataacacacaatctccatcaccttcagacaataaactgcacaccctctgatcataacccctataccnccncnnnncgggggatgatgctgcatgcaaaccanaacaaanaagctggacgncaccactcaaaagctgggggcaggaacggattttatttttcccacgatctacagacaacacatcagccctgaatgagtcaaggacgcacccgcccgaggggaaccccgagaggcaatggcataaccagaaagaacagtctgggaaagaaacttatgcacgtgggaccacaccccatcaatatccggggcgaggtcgtcnnnngaannaaannaanaaaaaaaaaaaaaaaagagaaaaaaaannaaaaaagaaaaaaaaaanaagaanaagagaagaaaaaaagaaaagaggaggggaaagagaggaagaagagaaaaaagagaagagaagaagagagaagaagggagagaaaggagangggaagagaaagaaagagggagaagagaggagaagagaaggagagggaaagggaaagaagaagaaaaagaaaagaggaagaagatgaaaaagaaggaaaaagagagganggaaaagaaaaaaaaaaaagagaaggagaagaagagaagaaagagaaaagaaaaagaaaaggagaaggaagaaagagagaaaaaaaaaagaggaaggaagagggagaagagaaagaagagaaaggagagaaaagaagaaaaaagaagagganaaggaagagaaaggaagagagntgaataaaaatgaagaaacgaagagaggagtgagagngaagnnngaataaagatggagtatataagagggaaatggaggagggtattatgagtgataaatgaatggaggaaggagataatgatgaacagaatgaaaatagaag

SEQ ID NO: 167257 - DNA, 133 bp, Glycine max
  unsure (1)..(133): unsure at all n locations
agctttgagcacattcaaacgacaataaatttttactctgatgtctgaatgagcnccggaatatatcgagacgcttgaaatggaatactgaagatctgagcaaattccaacgacaataaattttttactccga

SEQ ID NO: 167258 - DNA, 201 bp, Glycine max
tcggtattctatttcgagcgttccgataaattatgggactcaatttgacatccgagtaagaagttattgtcgtttgaatttgctcagagctttggcattccatttcgagcttctcgatgtattacgagactcaatcggacatccgagtgaaaacttattgtcgttcgaatttgctcaaagcttctacattcaattttgagc

SEQ ID NO: 167259 - DNA, 521 bp, Glycine max
agcttgccaatgctctctggaatgccttcaactgcatcaaaactattggctactaatccaaataacgtgaattcttgggacccttcaccccatttgaggccagcacttactttgcctcaaatgccagtttttgcagcttggacagatgcatagttcatagctcaatagtccttttaattttttgttctctcaagtgaaatttcaatcctttttattgtctttttttgcatgcatgaacaacacaagaggaaggggttgtagctagtcaaatggagggtctaaatattatatcatcacatcactgtcagcaagtttaatttaaactttcaaatcattacattttagcattttactagttaagaattcctgaattttcattttcattttcaatatatccttgtggccagattttgtcaattcattcattgatagaaacggacgaaaaaggatataaaaggttatgattgagagggggaaatattaaaggcatatggggggagacaccattcaatattcatcat

SEQ ID NO: 167260 - DNA, 323 bp, Glycine max
  unsure (1)..(323): unsure at all n locations
tcaagaaaaagatggcctcagcaaattccttatttcctgaagggaattctatcaatagacctccaatctttaatggagagggttaccactactggaaaacccgaatgcaaatttttatcgaggcaatagatctaaatatctgggaagccatagaaatagggccttatatacccaccacagtagaaagagtttcaatagatggtagtnnnnnttnntntntttttttgttntttttttgttatttttttttttttgttatatatttttataatgttattttattaatattatatttttaaatttattataatatttaattatat

SEQ ID NO: 167261 - DNA, 973 bp, Glycine max
  unsure (1)..(973): unsure at all n locations
tcgaacagaccacaatatatccactgcacacaccgacttattacaccactgacatcaccccgccacactaacaattctcctccctcaancagccnccggcnttgtgacttggacacacccgcgaaccccggaaaccaaaaaaagcaccgcaggaagaacactgggctttccaccccgaattttttttcccgggcaacacaaatttcaccccacggggttaataaaacatatcataccaaaaactctttgaaacaaataagaaaaaacctctcaccagcaaaagaggaacgctggggaaaaaaaaaattcaaaacctgggggcgaaaacccccaccacgggggcaacaaaaaaaaaaaaaccaaaccaagccaatgagagaaaaaacaaggttccccacctcattcttaggctcccgccaaaaatcttacagcccacccgcaaattaagaacttgggggcgcacaccccaaaagaaaccatgtgggatacaacaaacggcgaaaaaaaaaattggaaccccctagaaatttaagacacccaagaaagcctgtctttacccaaagaaaatggaagcttgcctgctccccccaaaacattaaaattgaacgaggggggcgcaagctctgggagaaataggagcccgaaaattttttttctaagaaaaaagacccaccaccgccggcctatgggcgctaaaacacccaggcagaaaaaccccgtcgcccatcttttataaaaataaaacaaaaacggggcaataccacgagggcaagtggaaaaaacacaaacctggacacaaaaaagcacttttctgggcgccaaaaatcttggaacaaaattggatatggcaaggattctcacaaacaaaccatcgcacccaattatcacgcatactccaacgaaggggggtttcaaacaaaaaagcgcaacaaaaattccaaaaaaataatagccgctccgaaagagagaaacc

SEQ ID NO: 167262 - DNA, 198 bp, Glycine max
tcaatccagaaggtcttctaatcctactgtctatgaggtcaatcatttccaagatgacaatatagatctctcaaccgtttttcttatatatacaagaaacatgccatattgaaactatctcacataactaactcactaatgtaactaactactggataactaacctattataactattaatgacagttacctaatcac

SEQ ID NO: 167263 - DNA, 1466 bp, Glycine max
  unsure (1)..(1466): unsure at all n locations
gtgggacacgacagncgtcggtngcgtacntcccacacgcgagagaacatatagaggaagtagacgagcggaagcgctantggagacgcacgcgcgncgcatatctaacgcgcacgatcgantgngagcacggagagaaacacacacagcacacacaccaaacacagacagccgaatnagagatttgtactanagcanatcggcgagagnanancccnacccncanannnnanngngnnanancgngnanagcaaaccgacacggggcgacgggacgancanaaacgacancagagaagaacgacacangacngcgcgncgagaacgcgcgcgcgagcatgntntgatacacagcgagcgcangacggaaaacgacnggcgaacgggcccgacagggagcngcgngtgaccgaaaagacacgaacacagacgcagcgcgcacgcgaatggccgcgacggacaggagacgatgcggcagcgggagccggcaatgtacgcacacggcggaccagatgataccgcgcacggcgccacgaaaagcgaaggcgacgcgaaaggagcgcgaagaaacgcgaaagcaacggacacaggaaaccacggacgcggaagagtaaacgggngagcgcgagacgaacgaatcgaacgaacgcacgaagccgcgcgaggcggacggaatggaccgctacagacggatgcagcgtgcgacacgaggagagcggatagggcacgggaggacgcgacgaaaaggtacgagacggacgagacggagcggaaacggcgagaacggacggaaagcagataacacagcacgggacgcagacgcggagcaacagacggtgaacggagagaggagcgcgggcaggacgagatcgcacccgcaacaaagccacgccgggcgaactacgaanggacacggacgatagngacgaccaacagacaggaagcgcgcgacgcggagacgacacagagacgaacgtacgcgactcagaaccgaacgcggacggacaggatcaggatgaaggagtagagacgcacgtcggagacggatcgagcaacgcgcgagatcgaatcgcacgcagcgacatagcaagagagaaacgcacggacgccaaaggcagcggcagatgaacacatcggaactcgcacgagcggaatcgagaccgaacggacggggtggcgacggcacggngcccaccgcacggggacgggagcgaacggagcacaggagacagaaacgagacgacaacgaagacaaagcgacggagacgagaggatgacggacgagacgcggacaggacgggagagggcgagaccggaatcgcaaaggagacatgcgccgcgaccgaaacgatggggcacagacgcagacggacggcaagcgcgtgcgccgaccgacaagcgaaggcgacgacaccacacggacggaacctgaacacggacgacagggtcggagcgacaacgcgacc

SEQ ID NO: 167264 - DNA, 761 bp, Glycine max
  unsure (1)..(761): unsure at all n locations
tttttccgcattcagagagaattgagaaactattatttactctgacctagaatatgcagccaagtcaatttccatggccagacttgaagatctctggaaagagtatcataagatcttttcttcaatacaggttataactagtgcatttcgtagcattgaacctgaattaacagtttatacgtgcttaaaaaaaatagaagcgnnnngtaatcatcatcaatacgcagacgtttaacgtcttttcatatgttatgagttgtcagtcattacgtttctacatcttttctattgcttcgtttttagatttattccgtctttattttgaggattaattatataccttgtgtgtactacatgttaatgtatcaggtgactgtcatccttaacgtgttttgtagtttgttataattttgtgtcattgttcccatgtgttttaggattctacaattgcgattcgatggtcttatgacaagagtctacgttttatgatctttttaatgtgatctcatgttcagtatacctaagatcttgatgctatttcgagcttctcgttcgcattcatgaccagaactgtagtggatatcaggagtgatatagtgtatactatcggaggctcgagtttataccctagtttgaatcattcttgtaattgtgtctctcattatttaatgaagtnnatctcccacccatcgttcgttttcgtgntacgtcgacaattttgtctttaaacattatactcatttgtcagatcagtacgttgg

SEQ ID NO: 167265 - DNA, 344 bp, Glycine max
  unsure (1)..(344): unsure at all n locations
acatcctcaccacttgtatttttgcaatcttccatcttgttcttctatttgntgataagaaggcttcctggtattgaaagttaaatcctctgttggatcttccctgtaggtacctgatataaatatatttatatctatttaatgatgttttatgtgttctctgtgctatctgcttttcattccaatatgcctttaccttgatcacgtaaatgcatgctttgttagggtcattcaacaatggaaactggtctgactctaaagtccttgatagtgcaacgcttaagttgcgtgctttcacgaggaatccgggtgtgataagttaagtgagtatgtgtgtcttaatg

SEQ ID NO: 167266 - DNA, 205 bp, Glycine max
ttaaacttctgcagatattttggttcctttggacaactatatttcaaggggaactgctcatttccttacttgcaaagaacccgactatcaacagagtttatggaacatgatttcatctgtgagttacttttacattattactcgagtcgccacctgtttggttggcctgatggttgataatgattattattattttttctgttat

SEQ ID NO: 167267 - DNA, 443 bp, Glycine max
  unsure (1)..(443): unsure at all n locations
gcctggtcttgaattttcctcaagttcttaactagctttgaaccataaacttgggcctcatttaacttgttttgggcttggcagccacgctcaacaaagtactttcgacacctactgtacgttgatttcaccaatgcttgtatgggaatgttgcgacaatcctttaaaaccttattgatacattctgagaggttcgttgtcatgtggccatattgacgtccttctctatcgtaagccatcgtccatttttcctttgagatgcgatcaatccatgttgctatggctggactcagttcacgaaatttttctaaattttgaaaaaaatgtgcttgcacggagtgtacgctgcataaaaatagttatgaataacaattttaagtataaatgaaagtaaaatanacgtgaccatcanatatgaaatcttacccaatttcttcaaacat

SEQ ID NO: 167268 - DNA, 206 bp, Glycine max
tctccgtgtgctacatcttctccatcgatgcgtgtttggtttgaagagtagtaatagttagcacacaactcgtgcctcgacgtgtcttgaccgtgaattgggattgtgaaactatttggaatttacatactgtgtgacggaggccctcacttccaatcagctaagccgattcattaggggtggggtggataaagtgtaattcgagc

SEQ ID NO: 167269 - DNA, 504 bp, Glycine max
cagcttggagaattgctatagaaattctctaaatgttctctgaagggaacttcatggccaagtaggggggtggacactatggcacctaaagtatttagagacgggcgaccgagaagtattttgtcggagatgtgggcatgcactatcacatatcaaattttcaaacctttctattgtatagtcatacgcatcccttggttcccactctttcttcggtgaagccgaatagtgggccatcatggggaaggagctctaactccaatatacccaactgcttaaaagtgttttaggataggatgtcagttgaactcccttggtcaataagtgtctttctcactatacaattggggatttctatgcttatcacaaccgagtctattgctttgaagtcagccaaagtaaaggtggtgtgggaaaattatgtttactaaccaaacctaccatgggtggctttttcagtctgaggtcattgcccttttgttagttgatgaatacaactaactt

SEQ ID NO: 167270 - DNA, 208 bp, Glycine max
tcacaagatatgcactctatctctcaagtgtctaggctattgtttactctcagagcacccatgaaaacaaacaccacatagacttagcaagactctaaaattgacaaccacataacaagcacatgcacatgaggatcaaaaggtcttttaaggttgtaatggggccaaggacaaggtagatgaaagtatgggatggtagctaaaaccc

SEQ ID NO: 167271 - DNA, 478 bp, Glycine max
  unsure (1)..(478): unsure at all n locations
agcttgtaggattatggggtacccatcacatgttgtactaagtggcggtcgggcgatggtgcacaacaagttttccacatccacaaagcgcgcataaacccaccatcccctgttgcccacctccaactgagctcacgtactcccacgtaacccatatcctcgtttctcttaacaccgggtccccatcaatcctcccaagcttccccaacatcaaagtaatacaacattcaaacagcacaagctatcacagccaagcaaaacagggcaaaagcagaaaactctgcccaaaacaccaaccaaaatcatagcttttcacatacaaataccccagaaacatttccttcgntcccatttttaaccggtggatcaactcgaaatttttactggaagtctctagtacataagcctacattttgaccgttgggatctactagcaaacatccagaactcattctgcactactcttttcacaaccagc

SEQ ID NO: 167272 - DNA, 207 bp, Glycine max
taacaaaaggcatgcgaagtgggtggaattcctagagcaatttccttatgttatcaaacataaaaagggaaaaggtaatattgtagccgatgctctttctcggcttcatgcattactttctatgcttgaaacaaaattgattggtcttgaatgtttgaaaagcatgtatgaaaatgatgaaacttttagagaaatttttaaaaattg

SEQ ID NO: 167273 - DNA, 440 bp, Glycine max
atcatgaactatcaaaacccaagaaaacagagcaggggcagagaactttgcccaaaacacaaaccaataccacagcttttcttacttcaataccccagtaacattctcttcgttccaattccttcaccggtggatcgacttgaaaattttactggaggtccctggtacataattatacattttgaccggtgggatctgctagaaaacgtccagaacccaatatgtacaaccctttccacaaccagccatgcataagcattttctgcacaaacacaaaattctgctgcacacttgaataacaaaattctgcttagaagtgcagattttcgaaatcactcttgccctcatccaaaatcgcccacattggatcctacaagtcctaaatcaaggatatatcatatctaaaccaaagacaagcttcaagccaagcaactcaaaat

SEQ ID NO: 167274 - DNA, 229 bp, Glycine max
acactatacacatactaagcttgcttgtggagcttctatggaggctggatctttgagcttcaatgtggtccttcaatggtgatttttcaccatggagatgcagcggaaggcaaaggagaaaaagaaaagggaagcaccatccactaaggaataagccaaggaagaaggagcttcaccaccaagaattgccttggataagaagcttgaagatgatgctttaatggaggaa

SEQ ID NO: 167275 - DNA, 348 bp, Glycine max
agcttgaagaacagcttgaagaattttgtgttttacatgcgcaactaacttgaatggaatttgcattgattggtgtattatgtgttgcatcttagtctttgtcattttatatatgtatcatgcatgatcatgtaggagtaagaagaaagtttctgaagctagaaaatttcttttaatggtaaaacttttctattttaatctattaccgccttactataatccattacacaagttggcttaagctggtatagaagtgcatcggataaatttaatcgattaccagcttggagaaattgattacttattttttttttgagacaatgaatggcttattcatgaatctctgct

SEQ ID NO: 167276 - DNA, 200 bp, Glycine max
tgcttgtggagcttctattgaggctggatctttgtttcttaatgaagtccttcaatggtgatttttcaccatggagatgcatcggaaggcaaaggagaagaggagaggggaggcaccatccactatggaataagccaaggaagaatgagcttcaccaccaacaattgccttggataagaagcttgaagatgatgctttaa

SEQ ID NO: 167277 - DNA, 132 bp, Glycine max
agctttagttgaacagaataatccaaaaatgtttaataattgggtgttgaaaaagcataacaagactttctgtgattggtttaaagatacaatctttgcacaagagaatgccttcaaaacattaagaaaact

SEQ ID NO: 167278 - DNA, 201 bp, Glycine max
tgaaggcaaactggatgcattggttaacttggtaacccagatgtgtcttgaatcaaaaatctgtacctgtcgcaagggtttgtggtttgtgctcctctgctgaccaccatacagacctttgccctttcatgcagcaacctgtagcaattgagcagccttaagcttatgctgcaaatatttacaatagacctcctcaacctc

SEQ ID NO: 167279 - DNA, 511 bp, Glycine max
  unsure (1)..(511): unsure at all n locations
agctttaactgatcgtttaagtcgttttctcgcctaataaaaaaaataaaataaatttccaccgatcatttgaattgtaatatccattaatttctgttaaaatgaaatccgaccgttcggtcatgccgtaaccacgttggaaaccaaaaagagggtaaataataatataataaaaaaatatattttagtaaaataaaccaaaaaaagcaatcggacgtttctctttgggatttctctttcttaattgaattgactaataactaaagtgaaactaaggctaaaatcaacccgcaaagtcaagctcgtccacaaaaatcactaaaaaaggattttaagattcaatacctcagtttttcttacaaagtaaaaaggatgattcttaaggtccaacgccttanaatgatcacctttccagtaaaaagaaatcgttgattcacccataagaaaaaactacataggtcttatttcctcttcgatggagggtacgtacgaacaaaagcccccgcttttg

SEQ ID NO: 167280 - DNA, 203 bp, Glycine max
tctttgagaaaacttccttgagaagcttctttgagttaacttgcttgagaagcttctttgagaaaacttccttgagaagctagagcttatttacacatacccctctcataactaagctcacctccttgagaagcttccataagaagattcctaaagaagctagagcttagctacacacacctctctaatagctaagttcacct

SEQ ID NO: 167281 - DNA, 477 bp, Glycine max
agcttgaaggtgtgtagcccaccatctttttatattagaatactgggaatgtgtctactatcattggcatcattttttctctggcattgaggagccacttgagctgccaagtctctccacctttgggcgtattcttttgaaagatttgtgccccctttttgcacatgttctatagttgctcctatccgaagacattatactgacactggctaacgaaagcaaccactaagtccttccaagaatggactcgggaaggttccaagttagtgtaccaagtaatagctaccccagtaagactttcttggaaggaatgtattagcaattcctcatcttttgcggatgcccccgtcttccgataatacatctttagatgggtcttggggcaaggtagccccttgtacttgtcacagtccacaccctgaacttgggaggggtgatgatattgtgtactaggaacaactcttctaagttagcaaa

SEQ ID NO: 167282 - DNA, 203 bp, Glycine max
ttagttggtgaaatcaggtgtagccatttcccttatattcctctcacggggtggaggttgtgccatgttctcagaatgttcaaaatcaaaatgttcaaaacaataatgctcaaaatcaccaataacaaaatgctcaggattctcaaaaggtactaaatgatgtctaactaatctatgaaatatcctatctatctcaggattaa

SEQ ID NO: 167283 - DNA, 465 bp, Glycine max
  unsure (1)..(465): unsure at all n locations
agcttgtttgaacagtgaattgattgaaaatgatatgcagnggattgttttgcatgaaatgagagtttgagaatgatttgaatgagcaattgtatgattataatggattggaatgattagataattgttttgatcaagcttgcaatcattagaagagaataagcatgtgattggaagtatgactgaaaatgttagtcagtttgtcagattgattgtgaaggaatgcattaaccctatcccggtgagagtgtgatccttaaattttgagagaaatgactatcatttagtattgatttttgtgagaatctctgaagtatggactgaatgcatgaaattgaggatcatgaaggccatgtttgattgtgatacccacttagccaaaaagatgaccacgtgcttgaatgatttatcccttgcacccagtttgagctaaatgaattattgattgattgaaccctgagccta

SEQ ID NO: 167284 - DNA, 201 bp, Glycine max
tcaaagacggatgaaacttaatttacctcatatcatttttagacacaataaagagatacttaatttgctgaccatacatactagcacaaatacattatagttggggaccaaccaagcaagacctcataactttgcccaggctttaaattctgctaagcaaaattaaatacaatattgtccacttttgtttggtattagaat

SEQ ID NO: 167285 - DNA, 247 bp, Glycine max
ttgaagggaacctcctctatctatgaacttatcatcagatcaaatgcttttgaaatttttaaagaagaaatcactgtactgggctagagataaaaactcctccaattcaagttatttataagaaccctaatggcggattgtgaaatctttgtgaacaccatgacttgaattggtttataatttgatttgatgcgaatagaaaatccaacatcagaaatttctacaagccaaagattaacctttggtt

SEQ ID NO: 167286 - DNA, 190 bp, Glycine max
tttaggactacttaatttattaatcgatgtaaccctaaaatttaggaagggggatattttcaagaaacaattgctagaggataagaatttcatttgatgcatgtcactttttaatagtatgaatttgttcaatggggtgataagtaacaagcataagcacaggttccttcggccaatgaaatggatttcc

SEQ ID NO: 167287 - DNA, 206 bp, Glycine max
agcttgataatggaagacacatgaacagctcttgcaataacattcatggggctccgaaaaatggtgagaatggaggattgcctttgagggcctcacttatgcaatcatgaaacacaactcccaactcgaaagtggaggacacatgaccagccctaagcaataacattcatgtggctcccaaaaaaggtgaaaatggaggattgcct

SEQ ID NO: 167288 - DNA, 199 bp, Glycine max
  unsure (1)..(199): unsure at all n locations
ttggggctgaaaaaaactatataacagcaccaaggttctagtttagggagccccctctctccctcgcgggagactctctctctctctcctctctctcttctattcttcgtttttagttttagtctctcttctctttctcttttattttcgnttttttttcaattccagttcagacttttagttttatcaataaaatttc

SEQ ID NO: 167289 - DNA, 428 bp, Glycine max
gcttttcaaatgggtaaaaggctcacattcacttttttctacatcatagtcaaacttgtccaaataaataataaagtcatctcgactcaaagaaagtcatataagtctcatacaattaatatagaacctatatcctaatgtcacatcctatcagagcggggtgttcccgtgtcctctagcatgaggttcttcataggcattcacctattcatctgctcccccgaacacaagttcaagatcatcacaggatccaaacacaacaacacacagggagtgagttatcacattcctagctaatagagaaacaagacaattaaatatacgtattatataaatgagataccacttgcttaaacatagctcacgtaacttcaccacttcggtattcaaaattcacttttcaattatcaatcacattacccaagaat

SEQ ID NO: 167290 - DNA, 211 bp, Glycine max
tgcttctacagagtgaaataggaataaagatgaaggaaaacagtgaaaaagaaaaacaaaaagaaaaagagaaggttgatgaggagaaaaagaagagcaagagtgaggttttaagagagaaaaagaacgagattacttcagctgaaggaaaggaagtaccatatccattggtaccttccaagaaggataaagagcgacacttatccagatt

SEQ ID NO: 167291 - DNA, 260 bp, Glycine max
aaactcactctttttccactcataacaccatattctcactttctaaccctaagttaactctacccttcatccctagcaagtttccataagccatttcagcacaccaacaacaaaagtatcatcataaaaccataaactgaagggtagctaactactcaacaaacaagtcagcatgctttcgtaaatctcttcacaataactatcacaaagcattaaccaaacaaactacccatcatatctccaaagcccataccccaaat

SEQ ID NO: 167292 - DNA, 206 bp, Glycine max
ttcgaatttaagaacttatctaactattttatcaacaatgattttaaagtagcaaacgtgacgtagatttattggtcgttatttgattttaaatttggagtttgatttcatgataaggatcaccttgtaatttgaaaatttatcctaataatgccaaaagataaattaaaaaaattgattgtttctcttatagcatttgatcatgc

SEQ ID NO: 167293 - DNA, 248 bp, Glycine max
aacattttaaaacccacttgaaccatcataaattcaattctaggatctaaaaaaggcacacttgagcatatgaattggattacattgtatgttacctgcaaaaatcaaaataataataacttcattatttgtaaaccttaacataattaccattcaattaaattgaatgtattacatacttccctatatctatgaaggtgttgtttccaaagaaaaggaccacctttagattccatgattaaggtttt

SEQ ID NO: 167294 - DNA, 209 bp, Glycine max
ctttaaacttcatacaagaatcctgctctgataccacttgttgtaccttgtggcctcaataatcttaagagggataggcttagaatgcagaagaagcaacaacaatcaatttaacaatgttcttttggaatctctctcgttgtctgttgagaggataagacattttggaccaaaaacactctctcttcaattttgtcccaagtcacaca

SEQ ID NO: 167295 - DNA, 87 bp, Glycine max
  unsure (1)..(87): unsure at all n locations
tatgtggtagattnatcaaaactaattgttccattttgtnttgctggtgcaaatttacatgtttgcttttatatttttgtataggga

SEQ ID NO: 167296 - DNA, 942 bp, Glycine max
  unsure (1)..(942): unsure at all n locations
cctcccttcttttagaggtcctnctcctctccctccctccctttctttnnttctgtccttctctctttcgtcccccccctacccacacctggtatacttgaaacttgtggccgcgtgaaccccgagatctcctcgagggactcaagcgcgggttattcttttttataaacaacagatatagttctgtatttttctcgagaaaaaaaagcctctgagccctggcaccccactgaaaaacgacggagtgggttgccaacgataacacaccctgacagtatgtgcgagattttttcactaagacatcgggggtcgaaccaacttagatatttcaacatgggcccatgacaacatttggccacggtggaagctagaagtaacacaggacgtctcactgcccgttcaagggggtgggcagacacacaacaccaaccgatgggacgcctcgtctaatcttctcgcccgaacgttatttggtaggacagggactcatcattactaacacacagggactagatgcaccatttttggaatgaacaagagacgtgtgttgtaccgcatcaaccccacggatggggacttttgatcgccgactacttcacccaccctttcctacaaatgacaagacccgcgcctaatgtttgccatgcacgtggacaaggcaattatgcaaaatagaatgccccgaggaaagattattttctcgataaacactcacatggggacaacgcaccacaaactttggtcgcggggggttcttgttgggaaaaaagacatcgacgccacgatgggggggtcaggtgacctacccagcccccagaaaggcgcggggtgatcccgcctcgctctttcacctgcttccaacaaaacggacgcggcaccgcgcgatactgcaccgatgggtcgcgataacccgcgatcgaagcgcgggagaaaagatcactc

SEQ ID NO: 167297 - DNA, 145 bp, Glycine max
tgttgcaaaaagcgcttagcacaccctgctgcgctaagccccagatgcttacgggattttacaacttcaagttgggcttaacgcgaggctatgctaaacgcttggtttttaaactcaaacttcatgttggcacgctaagctcagt

SEQ ID NO: 167298 - DNA, 449 bp, Glycine max
aagcttgccaaccatggaagccctaaatcttcccactttttggggggggccattcttggatggccttgattttctcagggtccacttggatcccatttctaccaactacaaaccctaagaaaactatattatttacacaaaaagtacacttctgtatatttgcatagagggtgttttttctaaggactgaaaaaacttgcctgagatgtcctaagcgatcatctaggctcctactgtacactaaaatatcatcaaaataaacaactacaaatctacctatgaaatcccttaagacatgatgcataagcctcataaaggtgcttggggcaatagtgagccccaaaagcatcactaacccttcatacaaaccagacttggtcttgaaagcgggtttccactcatcaccctttttcatctgatttggcgatcccccttttaagatcaatttt

SEQ ID NO: 167299 - DNA, 197 bp, Glycine max
tgatattatgctaagcctcacatcttatgctaagcgcatattggtgaaatatttcttgtgttgcaaaaagcgctaagcacaccctgctgcgctaagccccagatgcttacgggattttacaacttcaagatgggcttagcgcgaggctaggctaagcgcttggtttttaaactcagacttcatgttggcacgctaag

SEQ ID NO: 167300 - DNA, 240 bp, Glycine max
gggatcttaagtgaccgcggctgcagcttttaacattaaatggtataacttttactcggaggccggaattaggcgcataatatatcgagacgctcggaattgaacaatggaagctcttgagcaattcaaatgggcataactttttactcggatgtccgaatcaagcgcataatatatcgagacgctcgaaattgaacaatggaggcacccaagaaattaaatgggcaaaaacgttttact

SEQ ID NO: 167301 - DNA, 193 bp, Glycine max
ctgatgataacatgacaaactccaagtgcttcattttggtgacaacgtcatttatataccgatcgttattttgcatgaaaaggggagaaatgggaaaagattaagatccccgagaaataacttaacaaaaaactatatgtcccctaacctcgattattatagtccaaagattctcccaaattattataacgtg

SEQ ID NO: 167302 - DNA, 232 bp, Glycine max
agcttgcttgagaagcttctatggaggctatatctttgagctttaataaggtccttcaatggggattttcagccatggagttgccatgaaagataaaggaaaaaaggggagaggaggcgttatccacaagaaaataagccatggaaagagaaacttctccaccaagaaagtggcttggattagaagcttcaagaagaaaagaatgagagaaaaagagggggcataagaattg

SEQ ID NO: 167303 - DNA, 205 bp, Glycine max
ctttgatgtaacatttggagaggttaatgaaacaacgtattatgatgcgctccatgagaggttggatcaaatggagaatagagaccatatgaattgctcaagagcttccattgttcaatttcgagcgtctagatatataatgcgcctcaatcggacctccgagttaaaagttatgaccatttgaaatgctcaagagcttccattg

SEQ ID NO: 167304 - DNA, 368 bp, Glycine max
caagctttatgaagttttttggttttctaaaccttgaaaacttgcgctattcatcttttcattctcttctctctttgccaaaaagaattcaccaaggactaaccgcctgaattctttttgggtctctcttcttccttttccaaaagaacaaaggactaaccgcctgaattctttcgtgtctcccttctcccttgtcaaagaattcaacatgacacagtctgagaattcttttgattcttcccattccctaatacaaaagcattcaaaggtttaaccgcctgagaattcttttgtatccccattcacaaagtattcaaggtttaaccgcctaagatctttgtcttaacacattggaagggacatccttt

SEQ ID NO: 167305 - DNA, 217 bp, Glycine max
  unsure (1)..(217): unsure at all n locations
tttattgcatagataaaagttaagagtgcagaatattgttgttggtacacattgggtaccttgagtttacatggagatgggacttatttaaagaaatggctcaccaaatgtgaaccttgggtttgttgagccttagaacacactggcgtgttagccttgagttttatcaagcctatggagttgcgtcaacgcttaccaaggacnnnttttttttttt

SEQ ID NO: 167306 - DNA, 497 bp, Glycine max
  unsure (1)..(497): unsure at all n locations
agctttttaaaaagaatttaacgnggntcgacacctcctgcctatgtccacgagaccgtcttaaaaagtatttcactatcacaaaaatgattacaagattgtaacccaccccaaatactgtatcactctacaaacccgagtactccactcaatggttataagaaatgataacactctcacacaaagacacttttctctcaacaaagtgactttgtttcacaatctctcttctcacacacactctcttcatgggttgggtttctcccctaaatctcttctctatttatagtgaagattgccaccaactattataaataatttctcttggaagttgaaacaaaaacaatttttcaatgcatccattaagctaaagctcatctagtaaaatgcaatctttcactttccattaaagccacctaaaccttagtgatgaaaatccaattcccatatgcatgcacttatcttgggttgaaactctacacttaactattattttt

SEQ ID NO: 167307 - DNA, 204 bp, Glycine max
tgctaagatttttagtatgacaatttcaaaatataagaataacataatcatttattgttagggtttttttcacgtctttctaaattcaaaatccaagtattatttgatacaagttactttaaccttcactctcctttatagaaagaaagaaaagaagcaactatcacttaaagtaatataagacaatatgagataatttcttta

SEQ ID NO: 167308 - DNA, 355 bp, Glycine max
agcttcacaagatgatgccgatcgaacttttcctaactgatatcatgcaaatttcgttcacggattgaattgaaaactcaatagccgacatcggcctcgaaatagccccgattgatatttttcagccgacattgagcaattttttttaaaaactctcgctggcagataatggtttttttacggtagaggaagttttcttgttttggtgttgcataaaatatttacaatttaagtcggctaggattttttgtgcgagctcaaccgaacttttgtttgggccaaaactggcttgttcccatttattcggccagcaaaacattagcccattccggcaaaaaaaatattattcaccgat

SEQ ID NO: 167309 - DNA, 198 bp, Glycine max
tcaccggatgacgccgatcgaacatttcctaaccgacgtcatgcaaatttcgttcagggattgaattgaaaactcgttaggcgacatctgtcgtgaagtagcgaccgatatttttcagccgacattgcacaattctttttagaaaagctcgctggtcgataatggcctttttacggcagagtaagttttcttgttttg

SEQ ID NO: 167310 - DNA, 142 bp, Glycine max
tgcaagcttcaaattcaacttcgagcgttttgttatattatacgactcaattatacatccgagtaaaaagttattggcgcgtgaattggctgagaacatcaacctctaatttttgagcgggccgatatatgacgggactcaa

SEQ ID NO: 167311 - DNA, 200 bp, Glycine max
ttgagcaaattcaaacgacaataactttttactcggatgtctgattgagtcccgtaatatatcaacacgctcgaaattgaatgttgaagctctgagcaaattcaaacgacaatatatttttaatcggatgtctaattgagtcctataatataacgagacgctagaagttgaatgttgaagctttgagcaaattcaaacga

SEQ ID NO: 167312 - DNA, 876 bp, Glycine max
  unsure (1)..(876): unsure at all n locations
gcacggccgaagactacgacgacaggcgtctggagggacaccctggattcgcaagagcggcatcactactaaaaaaacccctacnaaccccccaaggtcatgagactgagacctcacccaccagggaaatacccccgggggtggagggtcgacgccaagaaaggggcatggtttatgttcatacgaagggcaggccttcctggggggggggagggggggcacacaccataacaaacaaggagggtgaaaaaggaaacgaaagggaatagaggggacgagaagaaaaaaaagggggggacaaactcgtaggcggcgaactggggcgacaacacgagagggggggcgaacgcgtcgggagggaaaagctgggtcaaaacaagcggacgagacaaaacgttggggccggagacaaactagacgttgatgtggggatgagcgggtgaagcccaaaacctcggtggggaagacgggatggaaaaaacgcgaggccgagggaccaaccacgaggcaggaaaaacaaggaaatcgaggatggcgacgggacaagcggaggagtggacgagactgcagatagcacaagggggagcgataaacgcgcgagacaagaagagcaacgggaaacggatgagaggcgacgaaggacagaacagacgccggggaaggggggaagaaaacatcggggcgatagagaacgtagctggtgccagatagttaccaaacgacgggaatccggctcgatgacgcgtgaaagcggacgggagagcacaccgcaggccggcgacgagcaatatctaaccgaaggaaaaggatgatgcaagggaaacgcagagggtcgccggacacacctgaaggggatagacgcttggagaaggaaag

SEQ ID NO: 167313 - DNA, 207 bp, Glycine max
ttgagccaaaatcctgactcaccataaaccttgacccagggtgagaatgtttatccttactctcggaaacaaaaaagaaggaaaggaaatttccaatcaaagaaagaaaaaaggagaggaaaggaaatttccaatcaaagagaaagaaaagaagaggaaaggaaattcccaatcaaagagtgggagaaagaaaaaagaaaagaatga

SEQ ID NO: 167314 - DNA, 400 bp, Glycine max
aaacaacaaccttttggaggaatcttctggagggcccaagtgggtctggttgctatttgcacccccatttttactaaatacaccccctgcctttttttggggattcttttttcgtaaagctacggaaacttaataaattttctaaccgatacttggtttctttccgtaatgttaccgaaccttgcggattacataatcatcccttttttgacttacggaatgttacgaaacctcactaattgtgcaacgatgcttccttttgatttccggggtgtcacggaaccttacggattgtgcatcaatattttcttttgattttcggcacgttacggaatttcacaaattgtctactgatgggtgccaagcaccttaataatgaccaaacacaagttgcatgcca

SEQ ID NO: 167315 - DNA, 208 bp, Glycine max
ttgagccaaaatcctgactcaccataaaccttgacccagggtgtgaatgttaatccttaccctcggaagcaaaaaaagaatagaggggaaatttccaatcaaagaaaaagagaaggaaaatttccaatgaaagcaaaaaaagaaaagaaggaaaattccccaatcaaagagtgggagaaagcaaaaaaagaaaagaaggaaaattccc

SEQ ID NO: 167316 - DNA, 449 bp, Glycine max
ttggtggccctttctctcccttccaatttagttggggggaccaacccttatcgaagtaagttccctctcccttttgacctttgtgatttgctacttattccattgtttttcaaactttaaattttgctagtgtcacataacaccacttgcatttgtttaacagtaatctatttagtttgttcattttccaattgcagcataactcacttctttagctatgttgtgtggcacatgctttgatgttgaaatctcccaacttgaagattctgaatattttgatattttttttatgcttgtacgggagacggtgatatagttcatacccttgcttggcttgccattttggaagtgcaaagctttcatgacttttttttggtgaagacaaccgatttagcttgatcttctataaattattgcgggcttggatgcaaattgttgttttacctagt

SEQ ID NO: 167317 - DNA, 206 bp, Glycine max
ctaacaaacttagaaatcaagtgatcatgtattccgcaatatatggggagaaaaacggatgcacattttatctatatacaattgtttgttgcttgcttgaatcttgatttcaggtattgtattgtcatcatcaaaaagggggagattgtagatgcaattggctttgatgttttgatgatgatcatgatgatgtgttgcaattgatg

SEQ ID NO: 167318 - DNA, 407 bp, Glycine max
ggcatgagttttaatcgagttttataatcatatatcatctatcatctatccttcaatctatctttcaatatcttctttcatctctttctacagaactttctaattcatttatcctcatctttctaacagtttttgttcaacactttctctttcaagaaaagttctttgataaaaaaacttggggtattcatctttttcattctcttcctcctttgccaaaagaacgaaggactaaccgcctgaattcttttgcgtttctcttctcccttaccaaagattcaaaggacttagccgcctggaaatcttttgattcttcccttccccttaagccaaagatttcataggactaactaccacagaaatcttctgtttcccctttccaagattcagttgactaaccgcctaag

SEQ ID NO: 167319 - DNA, 202 bp, Glycine max
taccttttcattggtgtattttgatctccttttggtgctctaaattgtgggaatgtgcttaaatatgtggggcaattttggtttgttttcttgcttgattaggttgaattgggggtttgtatgggatggccctaggcctataatgcattttgaaacaatgggacatgccacattgtccccgttctcttgctattgatgccta

SEQ ID NO: 167320 - DNA, 373 bp, Glycine max
ggcttgtacacaacaacaccaacaaagtccattaattcctccataacaatgatgctcaataccaacaccctcttttccaccttctctctgactctcaagtatatttgcacttcatgcatattgaaatgctcatatgcaaaaactactttcaaattttattcttgcatatggtgttcgtttattatatgcataatttgtcaatcttccttaaaactttattttaatattaatggtataggaagcactgacacagaagtgctgaatttatcggcagctgaaaatgttgaacggagaaaagatacttgagcaattccaagcttctacatcttttgaaccggtggcttctataactcacgaaacagaaagtgaaaat

SEQ ID NO: 167321 - DNA, 485 bp, Glycine max
  unsure (1)..(485): unsure at all n locations
agctntgaaatccaaagatctaatccaaggtatatgtttcataaaggggattcccttacttgtgctattcgagtgcaacctattcttttatatcctattcgtgtgtagggaaacttaagctttttgtgtcttctttaaataaagatatggtgggagaaaccccaactagcggttttgtggtaatttctaatggggggttgaattggcctgtggaaatttctggtagaacattaatgattgatctaatttgttggcctttgagccaaattgatggtattctgggtatggactgggtatcttccaaccatgtcttgttaagctgctttgataaaactatggcggttgatggctctagagtgagtaaggatatatatggagaagccagcttcatgatgaatcaagattgattcaaagaagttctgatgatgacaaaggtgatgacaaaaagctcaacgaccagaacaattaatgatacaaagatgatg

SEQ ID NO: 167322 - DNA, 188 bp, Glycine max
tcaagtaatgagtatctttcccttcactctagtgctttacattatataaatttgccatattctcgataaattttgcagcttcatcatttaggcaaagcactgtcaaatctatggaatcttatggacacatcatacagtgagcggcaatctttttcccatgtaatcaatatgttgccactctcatctgc

SEQ ID NO: 167323 - DNA, 434 bp, Glycine max
agcttgcttgataagcttctatggaggctatatctttgagctttaataaggtccttcaatggtgattttcagccatggagttgccatgaaagataaaggagaaaaggtgagaggaggcgtcatccacaatagaataagccatggaaggagaagcttcgccaccaatagagtgccttggataagaagctcaaagaggaatataatgagagatagagagggggcataggaattgaaggagagaagttgaactttgaagtgagtctcacaagtttctcattcatcaaagctatgaaaagtggtacacatgtttctatttatagcctagcacatgggaagcttccttgggattctataggcagaaagcttccttgagaagctagaaaggggctactcatacccctccaatagctaagctcacccctatgtatgataca

SEQ ID NO: 167324 - DNA, 200 bp, Glycine max
cgtaaggatggcacaaatcaacgaaggattatcaactacaatctttcagtcatcgcttcactcaagctcaagtgttgaggctcattccatcgtaaacaactaacacaaggtccaacctttgcgtttcatctcatgtcatacagcgatgatcacacaatatgaatctgaatgacttcctagtcttgtaatgggggtaggct

SEQ ID NO: 167325 - DNA, 537 bp, Glycine max
agcttctatataagctgaaccattttatcaatttacacaagttgagttttattcagaaaattagagtttatctcttttatcttagtgagagtgattctcctaagttcttgagtgattcaagaacaccctggctgtatcaaaggactttcacaacctttgtgtgttgccctcgccagaaagagcgattttttccttcctttcatcttcaaccttggtctttcaaaccacaattccagaaaatccacttctgcccagaattatctcgtggccataactccagttttacgcactcaaattaagtgattcttgagcctaaattgaatttcataacgagacatttcacctcattttggaatcacctcatttggagcccggtagcttgagctattggcatttctatattatgtccagccctcacttaacctacgttttttttcatctcattatttcattttatgccaagaaccaacttattaagacccacgaaataaacaccttatttttactctttctttatcaatttcgcatttccatcca

SEQ ID NO: 167326 - DNA, 203 bp, Glycine max
tgtagccattagaagagaatgagcacgtgattagaagtatgactgaaaatgttagtcagtttgtcagattgattgtgaaggaatgcattaaccgtatcccggtaagagtgtgatccttaaattttgagagaaacgactatcatttagtactaatttttgcgtgaatctttgaagtatggactgaatgcatgaaattgaggatg

SEQ ID NO: 167327 - DNA, 534 bp, Glycine max
  unsure (1)..(534): unsure at all n locations
cantcgcggcatgcaagcttttaattagaggcgaattattttgaaggtcatgatgcttttatctataccaccatgcaaattaatgctttgattgacaaatgctttaattccacaagttgtagcttttttttaagaaaaaaatgtatttgtgtaataaatttatataacttttaacgatgaagagagaaataaaataaaaagagataaaatagatattttttgtgtgtgataatcaaggcttaaatattaaattttggagaaactagctatctcaatctcaccactagatggaccctagtaaggtataaaatataattgatatgatgaagagtgattgaacaagtatttatctataaatatttatatgagaagaaaataaaattaattaaagtttttctatttattaaaattaacttacaccactgtatttttacatatataaactctctcggttattaacatattggcgggccgagtgacaattgatttaattttttaaataagggtgtatgtttaagttttgtaattgaaaaa

SEQ ID NO: 167328 - DNA, 200 bp, Glycine max
tgtattgtgtgagcttgttgtagcatgttatgtttgctgttattttttaattctttgaccctttgaatggccaaactggattttgatgtcttcatgagagttgtagagaattctatccttgacatttaggtactggtcttatgtcatttggaccaataacacataataaatcttcaaagcattgcacttacgttatattg

SEQ ID NO: 167329 - DNA, 489 bp, Glycine max
agcttatagagttaagtctcatataggtttaatcaattacaattgtttcataatcgattacattgctgtttgagacaatgactaatttattcaaaagtctctgctttaattgattaccaagtggattaatcaattacttctctctcatttagttgttcaaaggagaacaagaatactttaatcgattagttaaagcatctaatcgattacattgttcttgagttctttccagatgttgggaagaacacttcaattgattacttaaataatcttatcaattactttgttgaattaatcaattactttgtagatttaatcaattactggcggttatatcagttttctctataaataaccagcttgtgttcacaactacacatcaagagatcaatagagattactcaacacatctcgaaaataactcattaacctctgaatgagaatgatctcatgttattcataatgaataagagaagaaaagaaaagagc

SEQ ID NO: 167330 - DNA, 204 bp, Glycine max
tttcgcaaagcttatggtaaaatctgggacttagccatggtagaagtctccacagaagccattgcctccctcgcccagtattatgatcagccgatgaggtgcttcacctttagggacttccagctatcacctatggtagaagaatttgaagaaatcctacgatggcctctaaggtgaaggaaaccctatctcttctcagggttc

SEQ ID NO: 167331 - DNA, 958 bp, Glycine max
  unsure (1)..(958): unsure at all n locations
gactgatacgtattgggtgtcagacgtgtntatgctataccgtgttgtaaagcgtagattgtggtagttagtgtaacgatatattatcntcctcctccactcacagccnnctttttgactctgagcgacatcgaggcacccggagaaaatccccaaggaaaccccccgggattggaagtttttggaagtgggaaaatttttttcttatattttgatagacacaggggggagtgacggtacagagagttcctgtaaagacacacatccttcagaggggtataaaaaagggagaagggggggggccggattttcttcaatggggaggggaaaaacggtgggagaaagctggggtatgactatataggagggtggggagacgggatgacaaagaagggggattttttctcccgggcgatagaatagagccacaagagttggaacgggtcgggaggggataactcccacaagtgggtgtcgtggagggggttttgtgggtaataagcaaaacgaataatgggtcggaggggacgggaaaagacagaatttagctggcgcctttggggattttgataaaagaaggaggtttttaagacggtggaaagggccttgttacatatcaggggggggaggaaaattattttaggtggatttatagaaaagagagcaaaagggggtatgggcgagtctcccgaaaagaggatcctatgtttaggggtgggagggaaaagattggagaaaatgtggagataagagaggggaagaaaaaatgtgtgttaattttgaagaaaaggagttttggggtggggacggaagaggatattgggcgtataatttcgaaaagggggtagggaggaagagggtcgaagaatgtgtttaatgttgggggaaatccttaggggagggaagggaggttttttttggttaggaaagtgctaagagcaccaaaatgggggaatcg

SEQ ID NO: 167332 - DNA, 198 bp, Glycine max
tcttaggatctttgtgatttgatttgtgatttgatcttaggtactatatgacttcccttgtgattttagatcatttgtgatgacaatgaatctactaaacatctcctcaatatattctgcttcttccatattgaacaggtcatattggagtgtcaagatgtttatcgtggactcatttacttagttagtcccatcata

SEQ ID NO: 167333 - DNA, 199 bp, Glycine max
tattgtattgacccaccccaagtggctgagcttgtgcagcaataaggtctacaatcaacccatcaaatgtctcttaagtattttctttttatgctttatgtcacttaagtcttaaaccttatattgcattaaaaaaaatcttgaccttataatgagtcattattaatgacatcacataagactcatataaagcccagtt

SEQ ID NO: 167334 - DNA, 424 bp, Glycine max
agcttcttcgggtatccttgctcaatcctgaatttcttctacaaggtctaactcaattcttattaaattgtttttagtagccttatgaaattgttgtcattgaaacaagagttcttcaacatcaataggaatcattgcatcgctaccataggctagccaaaaaagtgtttctttagttgttcattgaggtatacaacggtatgcccacaaaactcccaacagcttcgacccatgcttcttttgcttatccaagttatttttcaactcatcgaggataaccttattaaatgctttggcttgtccattggattgaaggtggtcaattgagctgacttgatccatttggggaagtaatcgaccacaactattatgaacttgcattgcccttttttcaacggaaaggctacatggatattcattccct

SEQ ID NO: 167335 - DNA, 202 bp, Glycine max
tctcagattctttttgaacaacttgtcttatttcttctccaagtttcctttttctttgagctataagtttggctttagaggagatagaaagtttgtgacaaatgaaattatgattgacgcctgacaagttaactgcactttatgcgaacaaatcaacattttattttaacaggtgctctatttttcttcgaagatctacatc

SEQ ID NO: 167336 - DNA, 437 bp, Glycine max
attctggtttatgagaaattttcttaaaaagaaacacaccactaaattctatgtgcccttactggtattgggcgtataaatagggcttggctcttatgcactttataggataatataaagtaccatattaattaaaaaaaatcaatggttaagattgtaggtaacttaatttagattttataatatttatatttgattttattacaatcccaatcgttaatgttctaattatcaatggtgagtgcactttattctctaaaatgcaaccatcattttagtttaaaggaaccaaattctataaaatgatacaagtatctgaatttgctttaatttcggtggttaacaggttttaaggcaacccacaacaggctgggaggttcaacttcactacacaatttccttactataaagaaagaaacttacatgccagaatttta

SEQ ID NO: 167337 - DNA, 1089 bp, Glycine max
  unsure (1)..(1089): unsure at all n locations
cattttcaaagtaattantctataatagtgaacttctattacagtgatgataagtatataataagatagtagaataatattatattcaatatncntcccncaaccaggttggaatgaatacataggaaaacagaaaaataaaatgagactaggacaaatggggctgatgtagggattatttttttttggaatactactctataaaaagggatcaggatttgtaagagaggaaaagttaaattgagatagagagggggatttaaaataagaaactggaaaaacttgggaaaggaagaaaatttggataaaaagaaaagggtgctagggcnnaaagaaanangagnaaaangaaagagaaagaagggaagaagaaganaagaanaaaagagaaaaaaaaagaggaaagaaggaaaangagagagaaggaaaagaagagtaaagagggagaaagagagaaataaggaatgatagaaggaaggaatgagaaaaagaggaaaaaagatagagagagaaagaagaaattaggaaagaaaaaaatataagttaataggataaagagagaagaatataagtataaagagataaatgaatgagagatgaagtggaaatatgaatgaatgtaaagaattataatagtgaagattgtaggatatagaaggaagtaatgaatgatatgagagaataaatgaatagaatagaataatgagatagaaagatataagaatatgtaagaganatatgagattataaagtatgatgaagtgagataagtagaagggttgtaaatgagaaaatnagtaagatagatagatgtaatagaataaataagaggtgattatagatatttatgaatggaagaaatggaaagatatagagtatatgataaggaagatgtatagaatataatagaaggatatataaagagataagtagaaaaggtatgaatatgaagtgaataatattgtagggaaatgaatataagattataatnatatatatgtaagaatnttataggaatgtaaagatggtatggataagagaaagaataagtggaatgagtatatgagaagatgagtataaataggagan

SEQ ID NO: 167338 - DNA, 424 bp, Glycine max
tatttcactcaagccagccccatagaactttggcataagagacttggccattgtcatattcaaagaatgttgaacatgaagaagaaagacatgaccagaagtctaatggggttttctcgccaaattgcaatgcttggcagtttggtaaacaaaatagaatgccatttcccaaatcaacttggagagcctctcaaaagatgcaactaattcacactaatgtggcagaacctcaaagaacaccatcactacaagggagttcatactttattcttttcatagatgattttacaagaatgtgttggatttttttcttaaaattcaggcatgaagtggctagagtatttataaaggttaaagaagatggtggaaactccaagtggctgcaagattcaagttctaagaaccgataatgggaaggaatata

SEQ ID NO: 167339 - DNA, 207 bp, Glycine max
tatggattatagtagttcagctgtatctttgtttaaagagtttttgggtgttgagcatttggctcaaagattacagatagaggttcatagggtcattggttttgctggagagaatgataatgtgatgctcactggtgaaagctcaagacatagtactcatcagctttactctcagaagaggctgataaaagtgtcccttaaggccct

SEQ ID NO: 167340 - DNA, 433 bp, Glycine max
cgctgcaagcttgaacaccatataagtgaaggcaaaacccttattcctaagccttaaggttttggattaaagcgtgggttcatgttcacttatggtgttgcttgaggcttgttggtgcaaatctccctaatggttacccctctcgattgcaccaaattgggatcagagctttgattcttgaaattaaatgttatctatcctttgggctttctttttattgagcgggttctcatttggttgctctttcccttttggttaactttatattattatttcatcctcctttgctttatttccttgagactatctttctttttctgaactctatctagcatcaatatcttttttacctttttttaataaatactaccaacaaatttgcgcaaaaaaagaaagaagcgaaaaaaatatataattttcaaaatttgaagcc

SEQ ID NO: 167341 - DNA, 208 bp, Glycine max
tggtgtttcacctatggagattttgaattaagggggtgtgttatttataattcagaatattagttgtaaagtttggtagtttgtttagttagttgagtgtgataagacagtgattgaggctgaacttgagttgtataaatagcctctgtgtaatttagttcataatgcaattcatctcattttagtatatgctttttcctggctttct

SEQ ID NO: 167342 - DNA, 449 bp, Glycine max
agcttgcttggtagatagtcaaggcttggacacctactgtgggttggggcctggtacgctccctaatggggggatacggtgtcgtcacacaaatctacatcaaatatgttgtcgccttcaagctttcagcataacattgctgttcctacttttaatcttccttgacaaccatgatatctcccatcaaggtggggactttcatcttgaaatgtatggagatgatgactcctagctcgtttggtgttttcctgccaatcaaagcaaagtaagaggtatttgcaccaacaattaaatacctaattgtgaagctccttgagagatggccttgatcgaaggttgtcattatgtcaacgtagccttttgtctctactctttcttcgacaaagctgaggagtgatccacagtgtggctggattggatcaagtgagactccagcctttgaaatgttt

SEQ ID NO: 167343 - DNA, 501 bp, Glycine max
gcatgcaagcttgcatttggaattgcgaaagccccactccatcattaagattagtacctgacatctcaaacaaacaaatcaaacgtaacaagacaattatagttgctgtttgaatacctcacccactcaagggtatcacacaattatggcttttctctaatgaaacactcttgccttttaccactctaattccccttgagttcttaggcaattcaagagattatggccacaacaaagaacaattcaccaatatgtgtaaggtaaggctagacaaagaaaaggttaaccaagaaaaaggctaacaatgtttttaggcaccaatgaaggaaacaaaattcagaattcatgaattcaagaaacaatccttcatgcaaccaaaatattaccttaaaagagttttttttttaagtttttcagccatgaaccattcagctccaattttttttttttttaaattttgcttatcgaaaaacctgcttcttttttttttttaaaaccaaa

SEQ ID NO: 167344 - DNA, 201 bp, Glycine max
tgcagtgaactttcttgttacgggttttttggcatggaaatatggaagacactaggactcacaggcaagtgggacaaagtttgtttgtgcgagttgacaagcttcagttaggtactctccttatttcttactttaatatgaaaatccatcattattttttggtaacaataaatagtccatgattgttattactcgtttgag

SEQ ID NO: 167345 - DNA, 950 bp, Glycine max
  unsure (1)..(950): unsure at all n locations
gaaagatgtggtgaggnagggatagactagatagaatggaatgtcagatggaatatgtgattgaatgaattatgactcacacaaagaccaacggggnttgtgacttgtgaagtaccgggattttgaaaaagacccgagcgatgcaagctatagnttnttttattaatggatagaatattatggtggaagatagaaccatggaaggcggatccacataaagggaaaatgggtgtgttgtaagaattcagttttttcagatatcgtaagctaaatgtttgggtgtatattagttaaatattccaattataattggcttgatgaaagaattattttatattggggaacacgatatagaaaataagataataagaacgtttgggtaatagtttaatttattttgggatcgaatatgtgagattaggagggaattatttttgttaaaggaattggggggtttgtgaaaaacaaagtataggtagggtgctgttgtaataacaatttattagaaggagtaaaattataggggcgataattaaaatgtaaataattattaattattgggttgaaaaaaaaggatggaatattttggaaagggctggtggaagggtacagggtgggagaggttggataaattacaataagaatatgagttttggttatatatttgatgtttggtgagggagggcggaaattaaattttagttaatttttgttgagaaagaagtgatagaggtatatgattgggggggacgaattgtattttatttattatgacagatgttttggaggggaaaagtattgactaattgagaattaataaaagcatggtgctggagggtgttggaattataggacaaaaataaatgagatggaaattgggtgagagggattatgtagggaaaatttatggagtgattgaagagagaatagggatgaggatgtgtagatgn

SEQ ID NO: 167346 - DNA, 195 bp, Glycine max
  unsure (1)..(195): unsure at all n locations
gcttagngaccccaacttgagcttaatgcagggaacatgcttttatttggttttagaggtagaaaaacatgaaaattaggattttcttgtgagagtttttgctcgaattttggttgccccatgtttgatactttacatagagggagcatgggaaacaccttgcaatagtgtggatacataggtgaatataagaag

SEQ ID NO: 167347 - DNA, 493 bp, Glycine max
agcttgtaggattatggggtacccatcacatgttgtactatgtggcggtcgggcgatggtgcacaacaagtttttccaaattcacaatgcgcgcataaacccaccatcccctgttgcccacctccaactgagctcacgtactcccacgtagcccatatccttgtttctctcaacaccggggtcccatcaatcctcccaagcttccacaatatccaaacaaaacaacattcacacagcacaagctatcacagccaagcaaaacagagcaaaggcagaaaactctgccaaaacaccaaccaaaaatcacagctttttccactcaaagacgccagtaacaattccttctatccaattcgtaaaccgttggatcgactccacaaatatactggaagtctatagggcataacctacattttgaccgttgggaactactagcaaacatccagaactcattctacattactctttcccaacccagcaaaacatggatttt

SEQ ID NO: 167348 - DNA, 194 bp, Glycine max
  unsure (1)..(194): unsure at all n locations
tttaattgatacttcatatttcttataggatgagtaatcnggtttatgttcaattaacaactttattattaatgcggcatattatacagggggaaatacaagatcccacgagtcttcgccttacatgtcccttcttcgccttaagcatacaacaccacacttataatcttcacgtctttcttaggagctataac

SEQ ID NO: 167349 - DNA, 399 bp, Glycine max
gctttcacaacatccaagcaaaacaactatttttacagcacaaactaccacagccaagaaaacagagcacaggcagaatcacagcttttctcacttataaaccccagtaacaattctcttcgttccaattcggtaacccgatggaatcgactccgaaaattttacctggaaggcctctaaaacctcaagcctacattttgaccggtgggatctactagcaaacatccagaaatcattctggactactctttccacagccaaatacacacaagcatttttctgcacaaaagcaaaaacctgctgcaccctattttgacagcaaaatactggataagcgcagaacttgaaaaatacaccttcccctatccagatcttgccaaatcaaaacctacaagcccc

SEQ ID NO: 167350 - DNA, 184 bp, Glycine max
aactaaattgtttggacaatattatttttaactaacttaaactaatatttaaagttactactcataaggaagtatgggccttgattaggctcatctaatcttcctaattaaactaattacacaaagcaaagtccaaattcacaacccaattattcatcaagtgcagaggttctgacttccaagc

SEQ ID NO: 167351 - DNA, 449 bp, Glycine max
agctttttgttgcgttaaatttcttaaattttatcacaaattcaaaaccttaagccaccgggtcaacaatagaatctttttattgctttttttctaaagttggcacaaaaaaacagatgttcaattatgtgggtagataattccaccaacaaaattatttgttaaatgtaactcaatctctcacagtagcgtaagatcatattatatttatatgtggaaaaacaatttatttaataaaagaaattatatttaacttttatcgcatgtaaaactttattaaattaacgacgaatatgccattgcaacggaattaatctatgaccaaatgatttgaaagatatctatgatttctgatttaggttaattaaaaaaggaaccaattcatatttttaattatttataacttatattaactaagggaataaaaatttcaattctattctcatttg

SEQ ID NO: 167352 - DNA, 177 bp, Glycine max
tgagactttgagaaaggagtatgacagatatgagcctgagacttttaggaaagaacagagtagagatctgctacaagaaaagcatttaaattctggagatgaccgttgtcattcctctttatcccattggccagcatatacaagagaatctccttcagcagattgtttagctaaatg

SEQ ID NO: 167353 - DNA, 304 bp, Glycine max
  unsure (1)..(304): unsure at all n locations
atgcaagcttttttgagggtgccttattgtgtgctattttaccttcctgaaacaacggttaccttaaccctcccccaaattaggggcatatcatgactaaaatccttatgctctcttaaaccctaaaanaaggtacgagattattaaagttcgcttatggagtttacaaaaaaacatgactattatttttggctcaaataacgtgcgaaggatataaattatcattcagggctgggtttttggccaagtggctgaaaataagaagaaacaaagccttgatcattttcacctcatgtaatttatc

SEQ ID NO: 167354 - DNA, 198 bp, Glycine max
  unsure (1)..(198): unsure at all n locations
cttctttggtatgatatgatgataaaattgggntggtaacttactaattttcaagaaaaatatggacttcttgtggatacaagatcataaatgttctgaaagttgcaagttgaaacatttcttgttgtgtcccctgaacataacctcaacttctacattaaatgttgcacaaacaggtcgatggtcagagaacttaaa

SEQ ID NO: 167355 - DNA, 1042 bp, Glycine max
  unsure (1)..(1042): unsure at all n locations
gtggggttgatagatattagatgataaggaatgtatggtatattgatgtaggattatgtaaataagtgtatcnaaataaatgaaagagnacnttgtggctttgagaaccttgggagaaaccgcgcatnttntagagaaaaaacccgccgaatggtagaattgatagaaaaatgggtataagtatatatattatattgggtaagtntgtggagggggggagtgagaaaaatattatagtgtaaatgcgatgagatttatgtttaatgtgaagaaaatttgtgttaaataaaagtaaaaagatgtgaaataatggagaatttttaattaatgttaggtggaagatgatatttaaataagtatgttaattatagagtgtagggtgtggaaggagattaaagtatggggattatggaggtgagtgaagattttaagatagatgtgttgggaatttgtggagtttataatgttaggatgtagagaaaagaattatgaaagtattgtattaggaggagtggatagattattgtgtttgggtaggttagaaaatttaaaataagaatagagtgagaaatataggtattagttgggagatagatgatagtgatgtggtggataaatttgataagatgttggatgatggatgaatgataggtggcgagtgaataagtaaatatttttgtagagtgaagagagtttgatgattgaagtagagaagtatagttagatgaatgtatataaggtagttgagtgagaatgagtgatggaaatatatatgagaattgtagattgaattatgtgaagtttaaatggtggatatagaatttatgtgattgatatattgatgatttatattgatagtgttgttgtgngggttattgaaagatggattgagtatagggtatattgtattattagtagtgtgatacgtatggtggttatgtgaagaggataaagagatgggaagactaagtgaaaagttgtgaaaaatgttagggatgtgatgtatttattgtggatgaagttatggatgtagtgagataag

SEQ ID NO: 167356 - DNA, 164 bp, Glycine max
  unsure (1)..(164): unsure at all n locations
aaanaaatagtaatgatttatagttagnttagttataatgaaggaagttanaagtttgtttggatatagaaaaactagtgaaatgaaatgatattaaaagagnagataatgaaaggtaagataantttagttttaatgaaantgatagttanttttnattagta

SEQ ID NO: 167357 - DNA, 925 bp, Glycine max
  unsure (1)..(925): unsure at all n locations
nnttgacacccnnatttaagtcctcgaacnnntttgtnttggaagtgcgaaaaccancccncnnattagtnnnnnnnnnnnngtatnnanngttagtatttttttattttaaagngaattaatataggtgtgggggtgatgtttatagttggatgaaatggaagaatgataagaagaatgataaataaggggagggggaagaggtatgataaagaaatgaggaangttaatggtagaaaatggagggtggatgtatataggagaagtagggtggggaatatgtgaataaaaataggagaaaaagagattagggggatgtgtaaaaggagaatgagtgtggaggaaaatgtattttatatggaataatatgataatttgnattggaatgtagtgttatatggttagatattatgaggattaaaataagttaagtagagtggtaggaagaggtagtaataatgtaattgatatagttgttgtatgtgtatgtaggggattgaagatgttttgaatgtattggttagatgaagtgtatggttgtatggatatattgagttattgatatatggattgatgaatgattgtatagtgttagaagatggtatgaagagtaggaataaggggaagatgtgttgagagaagaatgatggataataaataagtggaagtgaatgtaaatagagtgaattaggtggattgtggataaggaatattttgatggtaagtttgagttaggattggtgatgtaatatgtaaatatgtgatgattataattagagttatgtatagtttatgaatgtgagagaattaaattaattaggatgtggtggtataaggtagggattgtatatagttggtatgtataaagtttattggataaaaataggtggagtttaggtatggaattaggaaagtaagtggaatg

SEQ ID NO: 167358 - DNA, 141 bp, Glycine max
  unsure (1)..(141): unsure at all n locations
ggggggangngnagggttttttttttggggggggaaaagagggattgtatanttaaagatttattaaaaaataatttttatttttaaaaaataatttaattttttgttattaagagaattttgaaaatttttataaaaaaa

SEQ ID NO: 167359 - DNA, 781 bp, Glycine max
  unsure (1)..(781): unsure at all n locations
nttgaacactgatngcacgcgatgntgagntacatgtctatntnattgaaatatgtattggtaaanntntttgtttgatgtggggaaattggaggggggggatatttggggtggataggaggatactataattttttgaagagatgggggtggataatgagnagagtgggtatagggaaagaaatgttggattatttaagtatagatgagaaagtagtttaaaaaaatttgaacgatatttatgatattaatgaaattttaaaatttgattgttgtgaggggttggaaaagagaaatattcttgaatatggtaaagagtttttgatattgaaatattatagagatgaaaataaaggggttaagattagaaataatgataatagttgtattattaatgtaaaagagggaaggttatttgtagatgaaggggttaggataaaaaggagattatgatatttggatggagaaaaaaagagatgaatatagaaaataaaggagatgatgagatgtaaaagatggtaagtatgttttataaagatgtgtgagggaataatgttaaaatatatatataatggaaaaaatgtaaattgatggagataatataataaattattttagggagaaagagggggtgaattgtatgtagaaggaaaaattgttgtgtatgtattttatagattgagtgtaattagatataaaagtaaagaattatatatataggttgatattatattgattataaggaattataaatgagaattgaaataagagtagatgtaag

SEQ ID NO: 167360 - DNA, 146 bp, Glycine max
ttatttaaatgaatttggggttgggggtaaatcttaacatagttttttcgatagataatgtaatgtgatttgtataaagatgttatgggaatgttgtaacaatgctttaaaaacttattgatatattctgagaggttggatgtaat

SEQ ID NO: 167361 - DNA, 186 bp, Glycine max
ttgtaataccaatatcaataattttaattatattagagataattgcacttaacgtgacagggcacgctaaacgcacaaaaaacaccataaattttctaatttgtctatgaaaacaacatatacttcgtctttagacgtaacataccgcaacttatacgaaggtcataatgcatattgaacttttac

SEQ ID NO: 167362 - DNA, 171 bp, Glycine max
  unsure (1)..(171): unsure at all n locations
gaacgaaggggaaaaagagactatgtatgtttacttgcgccgaatttattcttcagcaacgaaagtccccccatagactatggatnatggactgattggcgcttgaagggacatatgtgatctgttggatatataatgacgagaaaatggttgaaagaatgcaaagaaagg

SEQ ID NO: 167363 - DNA, 408 bp, Glycine max
agcttgagtaaatatcttgaggaggccaaactggtctaacaatatacttaaaatcaatttgaagtcatataacatttgtgattcaaatacatgttatacaaattggttttataagtattggcattacaaaagtaagtaccaaatgaaacacaaatattacatctatttaaactattgcttttcattcttggaagaagtcacccaaaataatcaattcagagctaaaaaatttaactatttcttttttaatataaaatctaactaatcattttgcccaaaaaaagagggaaaaccccacccaaagtataagtatttatgaacaacaagaatttcaataaatatttttttttaatttgagaaattttaaaaaattaattcgaaacttgtaaaaagaaaattttttcccac

SEQ ID NO: 167364 - DNA, 204 bp, Glycine max
cttggaaaatatgctgaggagtgcgttatctgcgataattgatgaaatgtattcaactttcataaaggacagacatatccttaatggaattctgatccttaatgaagtggttgaggaaactttgaagagaaagaagccagttatggttttcaaagcggatttctaaaaggcctatgattctgtatcttggtcttttttggatta

SEQ ID NO: 167365 - DNA, 212 bp, Glycine max
tcaagcttttggaatataagctgaggagagtgttatctgcgataattgatgaaaggtcttcaactttcataaaggacagacatatccttaatggaattctgatccttaatgaggtggttgaggaaactttgaagagaaagaagcctgttctggttttcaaagtggatttccaaaaggcctatgattctgtatcttggtcttttttggattac

SEQ ID NO: 167366 - DNA, 481 bp, Glycine max
attgaaaagatttctgcttgattgagtgcatttggcatgccatgggtattttggatcgaccggaaggagaccaagtttctttaaagagagcgtactgccaagcaaaagctggcttatctggatccaaggttgctatcttaggtgctgctgcgctgggcctgggagaattggacaaccccttacgttgctaatcaactagattctgttcttcttctttatctttatgatgctgtgaactcccttggtacttgtcaactatgttatccatattacacttttttgcagatgccccgaaaggtggcttttatttaagaggtatttcttctcttgtatattcaacgaaaaaatatggtagtacttgaagtatagtgttacagatttacaaatataaaacaaattacctgggcaaagagatttcattcccccactatgaattacctttaaaggttcacacttctcacagtatatttacctttaaccg

SEQ ID NO: 167367 - DNA, 194 bp, Glycine max
  unsure (1)..(194): unsure at all n locations
agngcgtggaccgtgccatgcatgatttattttttanggagcggntaaataattagggtaatgcatacttcttttaattattttaatataagaaataagaattttttatttttttaaatataagtaaattttaattatttctgttttatttaatgaaattctctacaaaacttcttttatttaataaaaataaa

SEQ ID NO: 167368 - DNA, 405 bp, Glycine max
ttcattaagtgggattagagcacacagagctttaagtagtgctaaatggtgtttcttcattaatgataaaattaatgaagaatttaagtagcacaagaactccttaaacctccattaattttcagctttaccttccctttcattggtggttcttcatttttctccctgtatctcctcacatgtctaaggcttaatgtttttaacatgatcttttagaatttccactgattaaacttgctatacaagctagattttattttttatgggtcaaatttcttgttcttgaaccataaattggggtgagttaaggtcctttgagctttggattgctattttttgtggctgaaacctgaatgataaaattcttataaaacctttaagtagaagaaaaccctcaaaaatcta

SEQ ID NO: 167369 - DNA, 1030 bp, Glycine max
  unsure (1)..(1030): unsure at all n locations
gatgtgggagagggangatgaggtgtaagaagaagtatgattgaaagtgtgcatatgtggagaagtattatannccctccaggaggggtgagtctgtancactgccnnnttgggaaaaaagcccggccngngagngggaggggnanngaggggggaagaaaggattaagagttttttatgaaganaggagggttggggggggggggggtgggaatagtagtgataatgtggggggggaattgggtgggaggggtaaggtgtgatgggtggtttggtgggggggtgagaataaggataagggggatgaagtgggggagaggggtatgagggagtggggaagttgtgagacttatgannnnnngngngnggngggagngggaggaggaggaggggagggaggggggaagagggggggggagaagggggggaggaggagagggaagaggaggaggaagagggaggggggaaaagggaagagagggtgggaggaggaagggggagaggggggagggagaggggggagngagaaaggaagagaggggaaaagggaaggagaaaggggggggaggggggggggaagagagaggagggagggggggaggnggggagggagagggggatggangagagggagaaggggatgaggaaggagagaaagggaaagaaggaggnaggtggggnagnagaggagagaggagggagaagganagggtaggagaatgtggtagagggtgtgaagaggaatggattgtgatgtggagaagatgtgattgtggtgatagattgggaagagtgggtagaaggagttgggagtggaatagggtggggagagaaggatggggaagaggggtgagagaggtatggagtgagtggtgtggtgagaggatgtgtggtagagatgagggggagatgaggtggtatatgtgatgtagagaatgggtgtgggatggagtgnangagagatagaattgtgatgaggagtgggggtagtggtgagtgtgaagtgatttgagttgatgagggagaaggg

SEQ ID NO: 167370 - DNA, 488 bp, Glycine max
agcttgcgccacgggagaagttggtccccagcgaatcaagatatggactcagataagggagtccaaaactctgtgctgaaatttcaaggttatgaaacaaaataagaattcaaatccttcatcaggcaataatatgcataataaaattgcttcacgtgacaagtcattcgatcatgtatagacttaattattaattttggtctaacatgaaaaagtgaatgaatatattatcatgtatcatagcttgacaatgattaaaatgttcatggacgtacgaaatttattttacttatcgctaaataatatctacccttcataatttaagcctacatttttatatctggtagctcctttcctaaaggcggttttaacttacaagttatatatatcgatgtcatcgtttgaccaaaaaaaatttgtggtgaaaaggcggaggacaagaaagaatgaaaagaaaacggatctgataccatgatagccacacatct

SEQ ID NO: 167371 - DNA, 206 bp, Glycine max
  unsure (1)..(206): unsure at all n locations
ttcccgcgagtanaaacatgggaccaactcattttatttcaaatatagaagtcgtatccagtcaaggtctgagagaccatacaagtttcctaacgatttctaattatgtgggccattaagtctatcatatgctgacaatagccgagaagcccatgaatctcttccggggtggagtaggtgtctgccatcgtcttggccttggctaa

SEQ ID NO: 167372 - DNA, 346 bp, Glycine max
agcttatgcgcatacttgtttacgaacgttttcttgctcaagacatttttataactaagaaaaatgcgcccatattcaagtcaggcaccttcgctacctagattatttatatgtacttccaaggtggagttggtacctacatttcatgcactttcttgggtaaatttacatacaatgccgacttcaagcatttgggggaccaaaaaatgcacatgcgcacattccggtatttttaaaacttatgcatatacaaactttgggaggaaacttggctatctacacagtaaggtgaaacatttcatggtttaatcaagtgtttcaggaacctaaagcccactgtcatttc

SEQ ID NO: 167373 - DNA, 202 bp, Glycine max
ctgagccaaaatcttgactcaccgtaaaccttgactcttggtgtttaatgtcaatccttaccctcggaagcaaataatagaagagaaggaaaatttccaatctaaggaaaaaagagaggaaaggaaattcccaatcaaagagtgggagaaagcataaagaaaagaaagaaaattcctaatcaaagaatgggagaaagaaaaa

SEQ ID NO: 167374 - DNA, 510 bp, Glycine max
agctttataaccacaaacaaaaaattatttgttattagctttttttaaaacaaaaaatatgacatatgttaataaaaaccatttcatacactctgcaaaaccatttcatacagtatttgtagtgtactctcaatggaaatacacttatgagataacctctaatctttttttatcagtgaaaaactctataaaaaaaggtaaaaccaaaagatagaaactccaaggaccttataagtccaatcagctgagcccactgagcatcaacagtactccattgatccccctcaataaccaaaacaatatgaaatacggcatgtgagaatagggtcaaagaggataacattagcatagaccatgatatcaaagatggttgacagacgcgaaatcttgttgcaatacagaaaaagattcctacataaataaagaataactagtatatagcatctacaaactagaaaaagaaaggccagtgatgaatgataaaaagaataataaatctttatgtccaac

SEQ ID NO: 167375 - DNA, 198 bp, Glycine max
tgaggatagagacttcccaagctatttatcttctctctcagagaggctctctaactttctagctttcttactctaagaagtggattcactcttgtcttggatcgactcactctacggtggctcactcaagcttgaggatagagacttcccaaactatttatctcaaaaatcctcccaactacttcaaaaatttccttt

SEQ ID NO: 167376 - DNA, 497 bp, Glycine max
agcttgtaggattatggggtacccatcacatgtggtactaagtggcggtcgggcgatggtgcacaaaaagtttttcacatccacaaagcgcgcataaacccaccatcccctgttgcccacctccaactgagctcacgtactcccacgtagcccatatcctcggttctctcaacaccgggtccccatcaatcctcccaagcttccccaacaatcaagtaattcaacaataaaacaacacaaactatcacagccaagaaaacagggcaaaggcagaaaactctgcccaaaacaccaaccaaaatcacagcttttctcacttaaagaccctaggaacaaattcttcgttccaattcgttaaccggtggatcgactcgaaaatcttactgcacgtctctggaccataagcttacattttgaccgttgggatctactagaaaacattcataactaattctgcactactctttccacagccattcacacacaagcatttttct

SEQ ID NO: 167377 - DNA, 197 bp, Glycine max
tttgtatggggcttaatgcttgatattaccaacaaaattcaatctcagcaacagaaacattcctttggctgaggaggatacgcggtgcccattgtaatgcaactgaggagagtgaaaatcacaagttttttgcttgctggttctcatcacaaatctggaataaatgttataagtgattgagagtatagatggtacaa

SEQ ID NO: 167378 - DNA, 318 bp, Glycine max
agcctgaattgacggatctttttgtgagtaaataaataataagaagtccactttgactggtgcatttttgcaaaatgtcttaatggagtaacctcaaactatatgttttgggcttaaatcaactaacctttactttttcaagaaaccaaaatcttcaaaatcacgatcaagacctaactttgaaatgaaagacgctcctccaaagaagcaaaagcagtggcaatgaaaacactctaaatgcttaaagctgtaagcaaaactctctttctctctctttctgtggatgaattgtcaacctgagagtttacttaaactagt

SEQ ID NO: 167379 - DNA, 204 bp, Glycine max
tcctgtggatgaggggataagatgggacgaatgtgttaaatagaaaatatagaagaaagtttacgatgaaaatcattttctttggtagtacataaaaccgaattgaaggataacaatttctttttttactgtgtcttccttgccttttttttatagaaaaatgttgtttgcaatatttgtgaagtatcctgttacaaattacaa

SEQ ID NO: 167380 - DNA, 340 bp, Glycine max
agcctgctctaaatttacattgatgtttgcatttattggaggaggttgtatgtcatttttgttttaagagtagtgtcccactggtaaaactaacttttccaatgtttgccctcgcaggaaatggcccccaggaagcttgcctcaaagaggtccaggaaggacaaagcagccgaaggaactagttccgctccggagtatgatagtcaccgctttaagagtgctgttcaccagcagcgcttcgaggccatcaagggatggtcgtttctccgggagcgacgcgtccagctcaaggacgactagtatactgattttcaggaggaaatacggcgccgccggtgag

SEQ ID NO: 167381 - DNA, 208 bp, Glycine max
tgttgtgcaccatcgcccgaccgccacctagtaccacatgtgatgggtaccccataatcctacaggcttgagatgaggaagtgttgaagggtgaaacttcctgcttttattgttgaccacagagtggtacctggagatatgtcgcgggggtcaggagaccttggggacgtcaggtggggtgctattgcccaaaatcaagcttgaccaa

SEQ ID NO: 167382 - DNA, 901 bp, Glycine max
  unsure (1)..(901): unsure at all n locations
tatattgggtatttccttacatctgcgtctcgggtgaatgcttcgctatggccgtttttattaacaacaaaacgtcaatggttctaataaattctgatactttttggttaatatagttgcaaccctttggttcataataacagccttgaattctttaactcttgtacattggctaaatttgttaatgaatgaataaacaacaattttactttgggtccttttaactctccctttctaagaaagtttaagctgcgagaaacgccctaaatttctagtaggaaaatttttaaattaatcaatgggttggattccaaagctcacgaacccaacaatatctaatttggttgcctaacatacctgcccagaaattttaactttattcatttcatttttgaaaaacaaacgtgtattgccaatacggaattgccaaaacaaaatttgaatttctaaatgcttaaacccaaacctgttgtgctaatgcctaaatggtcatgtaaagactccagggccaaaatatctatttgtttggtggcaggacggagaatcaaaccttggtcgacctctgatgaaaactaacttaccaacggatgggccaaggtggccagccagatggtgcccttcgctctcttcttgtgaaagactttttctttattctttaatcaaaaactggcaccactcaagcattctctttaacagataatagcactacctcttcccaaaaactaacttatgtctggaatacttcacgggaacttnatataccttactcaagttaatctttccgggcaaatactctacgagaatcgccaacacgctggatactttctctctccaccctacctttcatagccaacaaatgtaacaaccctattctttccgttttattctccgccctcgcacg

SEQ ID NO: 167383 - DNA, 204 bp, Glycine max
tgatgcttctacttgtgatgaaaagattaataacataaaagatatagatgtacaagctctttgatgaatatgtgattgtaaagtcaagttcatctattgcatcaagttctcaacaacctactgttgaagaagatttcagtatagaagaaaatcaagagatggatgatccatataatgttagtcttttgtttaactatttaattg

SEQ ID NO: 167384 - DNA, 431 bp, Glycine max
gcttgaaatattaatacattgtatgtaacgtttatctcaagaaatccaactataacaggcttgcatgataaactttaacccaattatacaaacaatcaataatacaaaaatcacaccttggagcctgtgcataaaacccatcctttgtatagtcactaacaccaattgtgtaaaccaaatctccatcaggatacaattttgaatacccattccacaatccatactgcccgaacctacaagttgaggaaaaaaagaaaaatctaagaacagatcaactgacatctaaaggaaacattttcatacaattaaaaggataataagcacagttggataaagatttatcattttcatcatttcatggtggagtaataaaatgtagcacacatccaaaattagcaaatccattaaagccatataaggacaaacaaaaa

SEQ ID NO: 167385 - DNA, 203 bp, Glycine max
taatcagctgatcaggaacatagtatataatatgcggacctatactaaaaattaagagaaatttgttgtactttaaatatgatagtcatatgtgggaccttttatacaacatgagatttttttagtcttaaaaaattaataacatttttttattgatgggtttaaagtttaaattttagttattttatcattaaattaatctt

SEQ ID NO: 167386 - DNA, 894 bp, Glycine max
  unsure (1)..(894): unsure at all n locations
gcgacctgtctgtagctaaacaactcaccgatttggtaacacttctacttaaataacacattgtacattcgtatctcatccttactcaaancncagacnnttgtgacctcttgtaccgccgacctctacatcgacctgcggcatgcaagcttgcagcacaatcactaacaacatagtatgtgtttttgagcaagaagcctcctacccagatgacgagctttgcaggcttcaaaacatgtcggaagacgaccctgaagatactaatgaaacctttgcggaaggtgatggaggtagacaaaaactaaatgcacaattacttcaacaactagtcttggttgaaccaaaccaggaataatgcatattaactgaaaatgagaacaaaaatgacttttatgatacagacactttttaggaaaaccatacatttaaagtgaacgcggggcctaacttaacggggaccaatactttacacctggatggacggggcgatgtatattaacacattttacagccatctcaattgaaagaaaacctaccattttggccgcacaaaacatgctaagagggggttcatataagaccaacttaaactgttaccaaacacatatggagaagggaactccctattaaataaatgcgccttaaaggaaaggccgacaccctcagatcactcctccagacggacggcctcgccaactcaacatctacccccacctccccgtttactacctcaaagcactacgctcattctcctcaacaacagataacaccgcttctcatcctacctcgataacactttattatatgtatttttttttatttatccccacccccatcaccccccccccgcccccttgtcaccccccctattaattgagtccccccccccccccg

SEQ ID NO: 167387 - DNA, 206 bp, Glycine max
tacaaatctattttcagtccaagaccataaaccagataaaattttatatggacaagataagataatattggatgaaataaaatctggacgaaataaaatctagatgaaataaaatcaggataagataagatttgataaaataaaattgtctgctctcttcaattccaagcccaattctgaattcaagtccaattacttataattct

SEQ ID NO: 167388 - DNA, 315 bp, Glycine max
agcttctgttttcaattacgagcgtcttgatatattatgggactgaatcgcacatccgagtcaaaagtttaatttcgtttgaatttgcttagagcttatgttttcaatttcgagcgtctcgatatactacgggacacaatcggacattcgagtcataagttattgtcgtttgaatttgctcagagcatctgttttcaattacgagcctatcgatatattgcgagactcaatcggagatccgcgtaaaaaggtattgtcgttcgaatttttttagagcttcagctttcaatttcgagcgtcctgatatactacggg

SEQ ID NO: 167389 - DNA, 489 bp, Glycine max
cagctttttgcaatactaacacgaatacataatttatataaaaaaatatgctgacacattaattaacattctaatggattaatttagccatataaacatttaaaaaactaatgtaattatattctaattctcaggaaaatgtatgaagactttatttaacatatatcttgctttaaaaattaacttacaaaagttccaattaaaaaactattatagaatttttttgaaggggttttacctagcaccaaatgatatattcttggataaatatgaaaccacattgaaaaaatatataatttttcataactgttttttctttaaaaaaaaaaaaaactaatttcttcttgttccctgaggcacataggaataaggcgacgcataaaatttcaaccatcgaagattgatagaaactactttccattgggcaaagttttgtccttaaaacacttataatttttcttttttgagggatgtgtttctttttttttt

SEQ ID NO: 167390 - DNA, 202 bp, Glycine max
ctagagtttttccttttgttaaggcttcgcgacttttgttgttgaatatataatacaaggatctttcttcatttgttcctacgtctctacccattctcattcatttgcatgtatacttctttttctgaaacggcagatccgatgacgagtcccccgaaggtactaatacctgggacccgcctatcgacttcgagcaagaaat

SEQ ID NO: 167391 - DNA, 512 bp, Glycine max
agctttcacgatatccaagcaattcaattccaactatcatgaactaccctcaaccaagaaaacagagtagaggcagcaaaatctgcccaaaacacattcacatattacagcttttcttactcaaataccccagtaacactctcttcgttccgatttggtaaccgttggatcgacttgaaaatgttactggaggttcctagtacataagtctacattttggccggtgggatctgctagaaagtgtccaaaacccaatatgtactacctttcccataaccagcaatgcacaagaattttctgcacatgttgagcaattctgctggacaaatttaacagctttttgctgcacaaattgggagaattcgaaattcatcctacccaccatccattttgctcaaaatggaacctacaagtcctaaatcatgtataaatcatatttaaaccaaaaacaagcttcaaaccaaggaaattcaaaatctacggatctaaaacccataattgagggaattttc

SEQ ID NO: 167392 - DNA, 1151 bp, Glycine max
  unsure (1)..(1151): unsure at all n locations
agacatattcgcactggacagtaagtcggaagaaatctgcattcacatcgaggatcgatncgtgtcacgcatagaaatggaatgatctgccttaatantcaccccccccgacagggggttgatagcttgaatacactagaaacnatcgaatacacatgccaggaggtactgatggcgatgaaaagaataataatagagaagattaatggtctaactctttgaagaataagggaacgtgaagtcaggtacaactaattgcatgttgagtgtgcaccagactaactgtggaatgacagaaggtgaactaatagcgaaaagaaaacgcagaagaagggtgaagcgataataatgtgaagagtttaagggcgaaactaattcacagttgcgcttctggnnnnnngagagaaagggagaagaagaaggagaaagaagaagaaaggaagagagagggaaaggaagtagagaaaaagagaaatgagagaagaggaagaagnaaaaggagaaggagaagaggaagaaaagaagaagtggagtgaagggaggaagatagagagggaaagagagaaggaagaaaatgagaataagagatgtagtgaagaagataaatgataagagtgaaagtgaatgtgtgtgatgagtgagaaaagttatataggttgtgaagagtagagatatgggtgagatgtgtgtgaggataggaagaggtgttagagagtagtgatagagaagaaggataaatgagataggataaagtgaagatgaaggagaagtagaaattaatagtttatagattagaagtgtatatatgatgatatttagaataggtagagggatgagtagtaatggagaatgtgaaagaagattaagggttgaaatgagagaaggaagagtgaaagagaaggaagagagaggagttagtaaagtgagaagtatagtgggaagataagagtgaatgggtagaaaaggaggttgaaaggagataatatagaggtattgagtgtgatatgtaatagaaangagcagatggtgaggatgaggtgtagagggatgaagtacatgtgaatntaggggagatgtgaaaaaggaagatattgtgaagagtagtgttataaaagttaatgtgagatgagatgagttgagtagaagagtgg

SEQ ID NO: 167393 - DNA, 517 bp, Glycine max
agcttattggattatggggcacccgtcatatgtggtactaggaggcgatcgggcgatgacacaaatcaactatcccatttccaaaagccaggcagaagctttcacaatatccaaacaattcaattccatttggcatgaaactaccttaaacaaagaaaaacagagtggaggcataaatctttgcacaagattcattcaaattccatagagtttttcctaccctcataccttagcaaaatcctcttcgttccgattcgctaacctttggatctccttgaaaaattaactgggggttcctaatacagaaatctaaattttgaccattgggatctgctaaagaacatacaaaacacgaaatatactaccctttcccgtgacagcagaaactagcactgcacaaccattttttttctgcataattgggcagaatttgctgcacaatttgacagccttgctgcataattttggcaaatttttaaaataagctcacatacatccaattccactcaaattggat

SEQ ID NO: 167394 - DNA, 201 bp, Glycine max
tgcatcagctccatccatccatcttatctctccccttttttatatatttgattttaagtggctgcgaagaaattgaaagccttaatgttcattcaaaatctctcaatgtactgagactcagaggatggtcatctctcaaggaattttcagtgacatcagaggaaatgacacatttggacttatctcagactgctatacgtg

SEQ ID NO: 167395 - DNA, 383 bp, Glycine max
agcttcatgatgattaaccaagcaattttgatgatgcctaaagcccaagtgattgattcaagacttcaagatcaagcttcaacaattcaatccaagatttaagattcaagagaagaaatcaagaagcaacaagtcaagacttcatatatgataagtattaaaagatttttcaaaaaccaaatatcacagtttttgttttacaaaagaattttctcaaattttctaagttaccagagtgattactctttggtaatccattaccagttggcaagaatcgattaccaaggacctatttggttttcaaaatatttttaagtggtttgcaatgttcccaaatgattttcaaaataggtaatcgattaccctatatttagaattgatta

SEQ ID NO: 167396 - DNA, 199 bp, Glycine max
ttccgcaagacttacggaaagatcttagagtcgaccttatcattagtattcatataagtcattgcatgactcacccaatactacgaccagcctttgagatgcttcacattcggagactttcaattagtaccaaccattgaaaaatttgaggaaattctaagatgtcctctcgagggaaggaaaccatatcttttctccg

SEQ ID NO: 167397 - DNA, 477 bp, Glycine max
agcttgtccaaggaaccctcatcttggtcattgtccaaagcactgagtgtggacaaattttcttatcaagaatttgatgaggatgaggaactggccttcatcttaagaaagatttgaaagatgtggaagaacaagagtgggttaagaccgaactcctccaaaaaggtgttcaaagagaataaaaacacggaaaagagcttcataatatgatatgagtgtaagaagcttgtacacttcaaatcaaaatgcctaaaactagagaagtccaaggacaagtacaagcattaccagtccaaaagtctcatgagcagttgggaggacatggacaacaccccctttaatgaaaaagtagaaggggaagccaacctatgtctgatggatgatacaactttctgaagagtcagactcagaacaagagaaagggagattttgatgaccctaaatcattaagacaaacctatcataaactactttcaa

SEQ ID NO: 167398 - DNA, 202 bp, Glycine max
tccccgtggcttctttgagaagctagatccttatctacccatacccttttattaactaaattaacctccttgaaaataattacggataaaaataacacaacaaataatcaaacatcaaacataattactaataatatatatatatatatatatatatatatatatcagggtgttacactcaacattctctgtctttatgttt

SEQ ID NO: 167399 - DNA, 522 bp, Glycine max
agctttgatgatatgggctccaccgacgaaatgatcaaagtgagtctaaaaagaggcaaatttgatcatcatactttgataaatggcaaaaaaaactaaggcaagtgaagaagatgagaaggagggaaaaacctatgctgttactgccatttttatacgaccaagtttcacaccaacccaacaatgtcattacttcagccataacgacccttctcattacctaccacccagtcatccacaaaggccatccctaaaatcaaccacaaagcctacctaccgcacttccaatgacaaacaccacctttagcataaaccaaaacacccacccagaaatgaatttttgcagtgaaaaagcctgtaaaaatcacccccaattccagtgtcctattctaaacttgctcccatatctacttgataattcaatgggagccattaccccagccaaggttattaaccttcatttttccagaataccattcaaacgcacgtgtgcttgtacggaaaaaccctggggcgttccat

SEQ ID NO: 167400 - DNA, 1060 bp, Glycine max
  unsure (1)..(1060): unsure at all n locations
agcaccgggggtttganncccatgagacgccacgnctatgctacgccgacacatatagacatcgctcaagtctttatctagcacggcgtctacggaggacgaagggccatagttggtcgctcatgtatcgaaggatgaatgtgtcccgagtaacgattaagactttgtgtactgaactatcgaccctcacctgatcttctcatgctgtggcaaatcagtgcgagatggagcgaacgaccactgcgcattgtacagcaacgtagcattaatgtagcatcctttacgcggtgttaaacatgctctattgctcgggcactgaggccccgnnnnnnnnncnannnttnnctnntntnnagttgagattcaattccagtatattataaaatgttgttctgaatattattattgttgttgtaggttatattatctcctttatgttttctttctcgttttgttcttcttttttaatacttacttgtttttcgttatgagtttacattgttgagtgtatagcttttatgcttgatctcaattacaattagtggtcttatttacgtattgtttcattaattaatgtccgacaattctagtctggagtgtgatggaatcttcttatattcgtttatgttgtctgattgaattcggtattattaatagttaattcttgactcttgtatctagtattatattctgcgtttatctatctatttattctatatgtttagaggttagtgattattcgggatttattttgctcttatttgttttggcttttattatcatctcctatatttaactatcacgtattttatcgctgttcgaattctttaggagtgctgtatcgattgttagattctcatctttatgaatatctagtgtacgaatcgacttatgttgttagaattatcatgttcgaaacnccgaactctcttctgttcatccttgtttatgatacttattctantcgtatgcnacgtattgcactgatttcttagtgtgtgttatatgtccgacgtcatactagtcgacagtgccgctataatncattcgtatgtcaatn

SEQ ID NO: 167401 - DNA, 309 bp, Glycine max
agcttatgcacggaaaatgtaattatgaaattgtgacgccccaagaaacaccatttcctagttaaccatgcattaagcaccatgctcaaattattttgttattaagtgaaacgggtttatgatcccaacatggttggctcctaacacatgaaactaagaatgtagcgcgaagttccacacttccccctcttttgttcttgtttcgtacacgaaaacgcaaggatgagccaacatgataacaaatggtatgcaattttgcagatcaaaaagattgttgaacgcatatgcatgatgatgccatgacttatg

SEQ ID NO: 167402 - DNA, 201 bp, Glycine max
tgtgaccatttgaataactcaagagcttccattgttcaattttgagcgtctcgatatattatgcgccttaatcggacctccgagtgaaaagttatgaccatttgaataactcaagagcttccattgttcaatttcgagcgtctcgatatcttatgtgcctgaatctgacctccgagtgaaaagttatgaccatttgaattt

SEQ ID NO: 167403 - DNA, 314 bp, Glycine max
agcttgtcatagaacgatacgctcgtaattttgcactagaagcactcgcgagggctagatgggcaccaattatctcgcggatcggcgactctggctcatatattgctgggaatctcgacaccgcaccaccgatgttctatatagattgatgtggacatatattcccacacagtggtactgatccagcatatcacatttttcgacgctgatatctgacaattgacacggtttgcgaaattcgacgcgtctatctagtgacgcacgtggtctactaaagagcatggctctacagtcgctcttaaaggctttccgat

SEQ ID NO: 167404 - DNA, 370 bp, Glycine max
  unsure (1)..(370): unsure at all n locations
agctttaggctgttcaattgcttcagattgttgcacagaagggcaaaggtctgtgtggtggtcggcagaggagcataaaccatagagtctggcgacaggtgtagatttttgattcatggccagttgggttaccaggtttaccaaggcatctagtttaccttcaagcttcttagtctcagctgatgaagatgaattcttggctacttcatgcactcctctaatgacaatagcatcacttctggcactaaattgttgggagtttgaacccatcttctcaattaaatttctggcttcagcaagggtcatgtctccaacggctccaccactggtagcatctatcatacttctctncactgtactgagtccttca

SEQ ID NO: 167405 - DNA, 319 bp, Glycine max
  unsure (1)..(319): unsure at all n locations
agtctataaatagaagcatgtgtaacacttgttgtaactttgatgaatgagagtcttgtgagacacaacacaaagttcaacttctctccctttttcttccttcaatttcgtgctccnccctctctctttctctccctctntattttcctccattgaagcatcctctccaagcttcttatccaaggctcatcttggtggtgaagctccttcttccaaggcttattccctagtggatggcgcctcctctctcctcttctcctttgtcttccactgcatctccatggtggaaaatcaccattaacggacctcattgaagctc

SEQ ID NO: 167406 - DNA, 324 bp, Glycine max
tataatacactcttttagcagtataaccaacaacaacaaaataattatgatctttctagccacagatacaatccaggttggaggaatcatccaaatctgagatgggaaagtcctctacaacaacaacagcatgtccactctttctataatgttgctcggccaagcacgccatatgttcctcctccaatgcagcagcagcaacaacaatcaagaccaccacgctacagacgccccttctcaacctttcttagaggagttagcgaggcacatgactatccagagtatgcaatttcagcaagagataagaagcctcattcagagtct

SEQ ID NO: 167407 - DNA, 343 bp, Glycine max
  unsure (1)..(343): unsure at all n locations
tgcttccacgttattggcctacgaatactgatcaagagttgcaacaaatatcaggagagtatncaacattgtaatctgtcctataaattattatgaatcactgacaggatacttactggttgatacacttattattatcttgatagctaatctttaccttagtatttccttaaccatgattcatgatatgttcaagttcaaattctacaatcgtgccactctttgaaaagatgcttactgcaagtgatgctggtcgaattggtccttggtttaccaaaagcatgtgctgaagtaattatctaactcatctgttaactggcattactgttgcatttatataact

SEQ ID NO: 167408 - DNA, 365 bp, Glycine max
tgcacgcatgcaagcttaatagttccctctaacagatgatttgtgtgtggttattcaacagatggagcttcctgagtggaccgatattgtaaaaacagcaaaatttaaggagttggctccatatgatcctgactggtactacattacggctggtgagtacacttcactaagtgcaagtttgccatattctacactattatgttggtaaacgtttttgttgtatttactgttagattaatggtgttcaaccttggttacagcctcaatggcaagaaagatctatttgagaggtggtcttggtgttggtgctctccagaggatctatggtggaagcaaaagaaatggaagccgtcctcacattttgc

SEQ ID NO: 167409 - DNA, 290 bp, Glycine max
acaatggtgatcaaatcggtccacacaacgaccacaggcggaacaacgtttcgctcgaaaaagcctcacaacccgaagaaaagacaacataaaactgtgcgcaaaacaattcacagcaaaggaaagacccgcatccgcaatccgcgcacgcaagacactgatcagctctacagcagaggtctcacatcaaaacaaagccaaaaccttcatgttcacaaagctgggacaatttccacctagcaagccggactacttactcaatctcaaagaggccccgcccaaccacccaa

SEQ ID NO: 167410 - DNA, 402 bp, Glycine max
gagtcacctgaggcatgcaagcttgacacattgcttaaccacctaatttgcaaaagttaaccaagcttaactatcaagagtagaagctacacacgatgcttaaccactcaagacagcagcaaaccaataacagtgcttaaccaccatataggtagaagcaacatagcttaaccatcgagagtagaagctaaacatggtgcttaaccactaagacagaagcaaaacaatatttgaatgcttaaccaccataaaggcagaggcaacacaccaatgcttaaccaaaggcagaaatttgacatcaatacttaaccaccatggacagaagcaaatgactgttttttttataaaaaaaaataaacacctaaacctcttgagaatggggggacagcaatagtaacagag

SEQ ID NO: 167411 - DNA, 438 bp, Glycine max
agctttggcaaaggaagaagaagattattttcacgaagatgttcacagagattcagaggttgtaaaagaatatatatgaaaaacaacagtattaaaatgcaagtcaagatcttgcttttatagactcttcatgtctggcccagaaaaaacactggaagagttataaccttgagaaaaatctgagtcctaaacccgaaacctaactcctaaaccgtaagtcctaaactgaaaccctaaccattaaccctaaaccctaaacctaactcataaacctaacccataacccctcaacctacctcctaaaccctaagtcctaaaccttaaaccttccaaaaatctaattcctacagccaactcataaaccaaactcattacccctaaacccttagtcataaacctaaacgctaaaccctaccattaaccctaaccctaaactct

SEQ ID NO: 167412 - DNA, 319 bp, Glycine max
agcttctatataagctaaacctagtcactctgatgtttgattccgggacacaatatatcaaggcgctcgaaattgaacagcggaagctcccgagaaattcgaatggtcataacatttcactcggatgtctgactcgtggacataatatatcgagacgctcaaaattgaacaggggaagctttcgagaaatttgaatggtcatacctttacacacggatgtccgattcggggatataatatatcgagactctcgaaattgaacaatggaagcgcttgagaaattcgaatggctataacatttcacacggatgtctgattc

SEQ ID NO: 167413 - DNA, 416 bp, Glycine max
  unsure (1)..(416): unsure at all n locations
agcttgtaggattatggggtatccatcttatgtggtactacgtggcggnccggcgatggtgcacaacaagttttccacatccacaaatcgcgcataaacccaccatcccctgttgcccacctccaactgagctcacgtactcccacgtagcccatatccttgtttctctcaacaccgggtcctcatcaatcctcccaagcttccccaacatccaagtaatacaaaattcaaacagcacaagctatcacagccaagcaaaacagggcaaaggcagaaaactctgcccaaaataccaaccaaaatcacagcttttctcacttaaaagacccagtaacaattnctccgttcagttcggtaaccggtggatcgactccgaacatttaactgaagtctctacacataaacctacattttga

SEQ ID NO: 167414 - DNA, 296 bp, Glycine max
  unsure (1)..(296): unsure at all n locations
tctgttttatatgaatcgnagaaacagcagcgccgttcacagagttcattgaataaccacatggttcaaaggcaaagtcacaaatctcggaatctggaagaattttctaatgccggaattaacagtcatcatggcagctgaagcagattgttctttgtagaaaacctgtgctctctctctatccaggccagtcatgcacatctcaagagtgtaaacattgtcacattgagttacagaatctgcagaagcagagtagacatgccagttctgtgctttgtcttggccacccaaaatat

SEQ ID NO: 167415 - DNA, 257 bp, Glycine max
gactcctgagtctatggaacttgtttaactcctgattctttggcatcatcaaaataatattggaagtcattgctctcacaacagttgtctagacgggaagtttctttaatatttgcctttatttcaaaatgaatttccttcttagctaagctctgggaggagacacttcactccttacactcctccttaaccattaaaggttgtgcttctccttggcggtagatttcttgactagattctctcccttttgcctcttc

SEQ ID NO: 167416 - DNA, 451 bp, Glycine max
agcttggagaggatgcttcaatggaggatattttagaatgagagaaagagagaggggggagcacgaaattgaaggaagaaaaagggagagaagttgaactttgagttgtgtctcacaagactctcattcatcaaagttgcaacaagtgttacacatgcttctatttatagactaggtagcttccttgagaagctctcttgagaaaacttccttgagaagcttttttgagaaaacttccttgagaagctagagcttagctacacacacccctctcataactaagctcactttcttgagaagcttccctaagaagatttctaaagaagcttgagcttagctacacatacctctctaatagctaagctcaccctctcgagatgagaagctagagcttagctacacaccacctataatagctaagctcacccccattgacaaaaacatgaaaata

SEQ ID NO: 167417 - DNA, 396 bp, Glycine max
  unsure (1)..(396): unsure at all n locations
agctttaagggttacttcatcatacatttatcatgttgtcccataacaagcttttctttgtgtttgggcttctcttctttcttccattttttttctttttgtctgcttattcttcatcatttcttcaaacattcctcatctccttttgtctcttcttattctcagcgcagctgttcttcttcttcatgcgttcaatgtgtcttgtgctctgattattcaaaatttaagaatttggctctctatntttttagaatttcagaatttagttctctggtcttttagaatttcacaatcatgttcgtcatgctctattgacgagatgggagctttgaagaatatggcgtgggagtggaactctaaatggangacgaacctattcgaccaccagattgatat

SEQ ID NO: 167418 - DNA, 201 bp, Glycine max
accactaaggttcctgcaatgctggtgagtgatgacgtataaaacaaacttataaactccaagcttggtgctggcgtactcgacattttcgattgaatactccaccctggaacggaacttctgcgtggacactaaaatgtccccatctttgaaacctgatgctgacatggcatgttgtcatgacttggaggcttacttgcc

SEQ ID NO: 167419 - DNA, 291 bp, Glycine max
  unsure (1)..(291): unsure at all n locations
agcttccatcaggtgggtatggagatgttcttgttcttgactcanctcttccttgaagacgcgaatcgaatcatctttcttcctcttccatgccgctactattgatgttcaaaaagcaaatgactccattgatgaagaagatcccaggcctacaaactccacgtggagctacatcaaaaacaactttataatcgattacgagagggttgtaatccgtctaaccgatacaagacagacatctacaagcttaacacaacctgtgtgattgattacgataaggctattatcgat

SEQ ID NO: 167420 - DNA, 70 bp, Glycine max
aaaacaaaaaccaacgccaggactgactgaactcaaacacaccacacagaacacacaaacaaaaaaaaaa

SEQ ID NO: 167421 - DNA, 437 bp, Glycine max
agcttggagaaaagctcgaagatgttgttttttacatgcccaactcccttgagtgacatttgtattgattgttatattgaatgttgcatctaagtccatatcatatcttttctgcatcatgcatcatcatgagtaagtgagaagaaaaatttctaagttagaaaagtttcttcagaaggcacaactctctgttttaatcgattacaaccttatcgtaattgattacacaagttgtctgaagcttgcagagttatttcttgtattagtttaattgattacatccttatcatagtcgaatacacagttatttttgagacaatgacttcgatttttaggagtctctactttaatcgattatcatttgatataacccgatacttctctttctattagctgtctacaagtgaacaagaacgctttaattgattactttgagt

SEQ ID NO: 167422 - DNA, 364 bp, Glycine max
  unsure (1)..(364): unsure at all n locations
cagctngaagaggatgctttaatggatgtataaaaagtatagaagggggagcacgaaattgaacgaataaaagagggaaagaagtggaactttcaagtgtatctcataagactctcattcatcaaagttacaacaagtgttacacatgcttctatttatagactaggtagctcccttgagaagctctcttaagaaaacttccttgagaagctcttttgagaaaacttccttgagaagctagagtttagctacacacacccatctaaaaactaagctcacctccttgagaagctctcttgagaagctagagctcagctacatacccctataatagctaagctcacccccatgacagaaaaacatg

SEQ ID NO: 167423 - DNA, 390 bp, Glycine max
  unsure (1)..(390): unsure at all n locations
agcttctatgcaaccgagagcaactcttttgttaataatgctttctggatatttctagcattcaccttaacttcgtcattntactcctcttaacataaccttacatatgttttcacctaatgtgtaagtatacctttacatttnttccctaatagctaagcctatgtcttatttctttaacccatagaaacactantcatatattgtgtggacacatatccatgaccttgacacattgctactttacattacacatgacaaatattattcacatgcttgcaatgcaacaacaaccatgaatagaaacacacactgtttatatcatttcaacacaataccattctatacatttatctgcgacacgatgcatacgcctgtcatgtcctcatt

SEQ ID NO: 167424 - DNA, 400 bp, Glycine max
  unsure (1)..(400): unsure at all n locations
agctttgttctacattttgttaggcatcccattcctagacttgatgatttgcttgatgagttgcatggtgccaatatctcttcaaaaatggatcttaaaagtgggtatctccaaatcatgatgaaaaagggtgatgagtggaaaaccgctttcaagaccaagtttggtttgtatgaatggctagtgataccttttgggctcactaatgcaccaagaacctttatgaggcttatgcatcatgtcttaagggatttcataggtagaattgtagttgtctattttgatgatcatttagcgtacagtaggagactagatgatcacttacgacatctcaggcanagtttgatttcaaaaagctttcaactaaatcttgcacgttccaattgattcaaaatgatgt

SEQ ID NO: 167425 - DNA, 367 bp, Glycine max
  unsure (1)..(367): unsure at all n locations
agcttctcaaagaagtttctcaagaaagttatctangctataaatagaagcatgtgtaatacttattgtaactttgatgaatgagaatcttgtgagacacttcaaagttcaacttttctccctctttctgtccttcaatttcatgctcccccttctttctctttctttcttttcctccattgaagcttcctctctaagcttattatccaagtcactctcttggtggtgaagctccttcttccatggcttattccttagtggatggcgcctcctctcacctcttctcctttatcttccgctgcatctccatggtggaaaatcatcattgaaaggattgcatcatctcctcccccttggaaaggatttg

SEQ ID NO: 167426 - DNA, 301 bp, Glycine max
agcttgcttgcaagccactggtgaaagttgaaagatgaatatctcaaacaattagacttgttgtaatcatcatgtatacatcccaagacccaaattaagaaagtaagaagtaacaaccatgtgtgataagtgtcaatacatatctagagtttcaaaatttgtagttaacctgtagaagaagaaggtgatgcttcgtattgctggtgcctgttttatcatttgctttctttccatcggtctgatttccactttcaacaggaccattttcagaggacactttattgagctcaccctgcaaaac

SEQ ID NO: 167427 - DNA, 193 bp, Glycine max
  unsure (1)..(193): unsure at all n locations
ttaaaacaacaccccatactcaaaagaattatacatcaccaaattatattagtctgaagatacctcacgtattataaataaagtccaataagtaagtttgtacttaaataaaaatattattctcaaatatgggcgtctaacaataatcgacgctataagtataacgganttagccacatttgacatattaaca

SEQ ID NO: 167428 - DNA, 442 bp, Glycine max
agctttggaaaatgatttctatacaaaagttattcgtataaagcgactaacagccacgtgcgtgtgttggagggtgtgtggtacttcgagattagggttgtgaaattggtagaaagtgggcacatggtgattcttatgttgcaaaggtaagagaattactttatcctaggtaagagaattcacataatgaattcgactctattgtgcttcttgtttatcctaagaagcaactgacttacagaggcatgcatgtcttgcaatataattaggtatggggctctcattatttgaagatactgttattttattcagcactctgtgggtttaaatcacagcgtggtttttgggaagtcttttgtgttatgctaacagatgtttcattgttagtgggcttcttctttcttattggaatgtctgtttagagattttgacatttatattt

SEQ ID NO: 167429 - DNA, 73 bp, Glycine max
  unsure (1)..(73): unsure at all n locations
caccccccccccccaacacacaaacccncccccccaacaccccgcctgactaacccaaaccacacccccccca

SEQ ID NO: 167430 - DNA, 276 bp, Glycine max
  unsure (1)..(276): unsure at all n locations
gctgctgctacactacatttacatcatgtacttcagtaaatnttccaacaaaggattttagcccttcattacaaaggcccacctttcacaaataggagaatggtttaagagaaaataccatattacaaagcagtggggatgtctcctccactctaagaacctataaatcactcctagacctaanatcttaccaaaagttagggcctttttcatccttgctcaacttttctctgttcttcgttctgacaaagctcacgtagtctatttagacgtctc

SEQ ID NO: 167431 - DNA, 355 bp, Glycine max
agcttctgaaggaagcggtctccagtcattttctcaaggaagctacctactctatgaatagagcatgtgtaacacttgttgtaactttgatgaatgagagtcttgttagacacaactcaaagttcaacttctctcccccttttactccttcaatttcgtggctccccatctctctatctctgtctctctctttgcctcattgaagcatctttccaagcttcttatcaacgacattcttggggcgaagctattcttcatggctattccctatggaagtgcctcctttacctttctctttggcttcgcggatctcccggggaaataccatggtatcttggggtgaacctaaccataa

SEQ ID NO: 167432 - DNA, 260 bp, Glycine max
agcttgcaaaagaaggtacgcccatgctagttcaacgtaagggatctcgtcttgaagaaagtatcccgagcccaaaaagatcataggggaaaatgggctccgaactatgaaggacctttcattgtgaagaaagcattctcgggaggagcattggtgcttgccaccatggacgatgaagggtttcctctccccgtgaattctgatatcgtcaaacgatattatgcttaaatacttacggcagcttgaggggtcaatgcatg

SEQ ID NO: 167433 - DNA, 324 bp, Glycine max
agcttgaaggaaaacttgatgccttggtttatctactaactcaacttaccatgaataaaaaatctgcacctgttgcaagagtctgtggtctatgttcttctgcagatcaccatacaaatctttatccttctttgcagcaatctggagtcaatgagcaacctgaagcttatgctgcaaacatttataatagaccccctcagcagcaaaaccaacaacaacagaataattatgatcttttaaggaacatatacaatctacgttggagaaatcatccaaatctgagatgggcaagttcttcaaaacaacaacaacctgtccctcctt

SEQ ID NO: 167434 - DNA, 387 bp, Glycine max
  unsure (1)..(387): unsure at all n locations
agcttatccttatggcctgcctccagacttcacccctcgtgccactccggaagatttaagccaagcccttacttttgaggggcaactcccaccttatgaagactttcccgggcaagacgatggggaaggagatacccatcttggccccctgctccacctcaaagatccatccccgcatgaactaccctagccgaacatagtccgccatatcccggcctcacccacacccgtaaaagaatctgttccctttgcagaaggtaagggaaagattgaagcgcttgaagagaggttaagaacagtcgaaggcctcggcaattacccattctccgatttggcagatntatgtcttgtgcncaacatcgtcatttcttccaagttcaaagtacc

SEQ ID NO: 167435 - DNA, 317 bp, Glycine max
agcttgcttgtggagcttctatggaggctatatctttgagctttaatgaggtccttcaatggtgattttccaccatggagatgcagcgaaaggcaaaggagaaaaggagaggggaggcaccatccactacggaataagccaaggaagaaggagcttcaccaccaagaatgtgccttggataagaagcttgaagaggatgctttaatggaggaaaagaaagagagaggagggagcacggaattgaaggaataaaatacggagagaagtggagctttgaagtgtgtctcataagactttcattcatcaaagttacaaca

SEQ ID NO: 167436 - DNA, 373 bp, Glycine max
agcttgaaggtgtgtaacccatcatattttatagtagaacactggtaatgtgtctactattattgctatcattttttctccgtcattgagggaaacacttgggctgtcagatcccttcacctttgggtgtattctttgaaggattcatgctcctttttgcacatattctatagttgcatcctatctagagccatatcagaattgtactgacactgcctaacgaaaacaaccattaagtccttccatgaatggactccggaacgttccaagttagtgtaccaggtaacagctaccccagtaagactttcttggaacgaatgtatcaacaattccttatcttttgtgtatgcccccatcttccgaaatacatctt

SEQ ID NO: 167437 - DNA, 75 bp, Glycine max
ccaccacaaaaaaaaaacacctcacaccccaacacaacgccagtgactgatcctccaacaacaacccaacacccc

SEQ ID NO: 167438 - DNA, 83 bp, Glycine max
aaacgacccccaacaacaaaccacacaagccagagctgactgtaccaaaaccaccaaaaaaacacccccagaaaaaaaaaaaa

SEQ ID NO: 167439 - DNA, 295 bp, Glycine max
  unsure (1)..(295): unsure at all n locations
agcttcaacctagatgtatatgaccattctaagtgttggagaagatcaatgacaatgcctacaagattgacttgcctagtgagtataatgtaagtgccactttcaatgtgtctgatctatctctttttgatgcagatggaggggccttggatttgaggacaaattcttttcaagaagcanggagtgatgaggacataaccaaggtcaaggaccatgaagcacttgaagggcccatgaccagaggcagacttaaacaagcccaacacgtcatagagacaaggctagtcatttggat

SEQ ID NO: 167440 - DNA, 287 bp, Glycine max
  unsure (1)..(287): unsure at all n locations
ccgagcagcacctgcaccccaagaccaactttttaaaaaaacatgccaagaaacaacgtggcgcaacggataacgagcccctccgggctcagtggccacgaccaaaaccacattatcaattctgacaccggcccttccgacggcgcacaagccccccggggctaaaggcttccgtgggacgaaaaggggccatcatcacctctcttcaacagatctaggctttcctctacatcgtgagcttcaacacgacntaccatcacaccaccattccggatccgagctttccc

SEQ ID NO: 167441 - DNA, 303 bp, Glycine max
ggctggagcaccggctctgctttcctaactgtactggaggcggttgccgcggctctatcctctataattttgtggagttttaacatgacctccgagatggaagccatttgatcttttaaggccgatagatcagccttcatctaatcctgcacgcccacttcattatacatttttctggatcgagtgttataggggtgcctctgtgctttcttaatatgatgaaattcctaaaaaataaaccacggtgagtatgccaccaaaacatgcatatgccaatgaatgatcccagcacttggatccccc

SEQ ID NO: 167442 - DNA, 286 bp, Glycine max
  unsure (1)..(286): unsure at all n locations
aacctttgtagaagcncctatagaggccattgtctctctcgcccaccattatgatcaactgttgacgtgcttccactttggggacttccanctattacccatcggggaagaatctgaagagatcctacgatgtctctctaggggacngaaaccctacctcttctcacggttctatccctcttggctanaannnctacaatagcccaatttcagcgcaagaatataccgcggacagacattaaaatgggtggctgcgataccaaaaatgtttgaggcaaaacgaaat

SEQ ID NO: 167443 - DNA, 370 bp, Glycine max
tgcaagctggagttcttaggctgttcccatccatacttggaacaagttatcatattgagtaagttctagtacctttttcctaattatgctgctaaatatttaacttctttgcttctatagtcataaattagaaagaaaaaaagaacttaattacaattcttaggaaatttttatgttttccaatcacaattatctcacaacaaatatttgcatcaaaagtcaacatagaatctcaagtaaaacttcaattctgataggagaatattgctaaaaacaattgtgaaactgtatcttagttttctaacacaaatcatatattttatacagaatatcttcctttggaccctgattcataatctaattagaatag

SEQ ID NO: 167444 - DNA, 449 bp, Glycine max
  unsure (1)..(449): unsure at all n locations
agcttntcaaggaagtgttctcaatatattttctcaatgaagctacctagtctatgaatagaagcatgtgtaacacttgttgcaactctgatgaatgagagtcttgtgagacacaactcaaagttcaacttctctccctttttcttccttcaatttcgcgctcccccctctctctttctctccctctttcttttcctccattgaagcattctctccaagcttcttatccaaggctcatcttggtggtgaagctccttcttccatggcttattccctagtagatggcgtcgcctcttacctcttctcctttgtcttccgctgcatctccatggtggaaaataccactaaaggacctcattgaagctcaaagatccagcctccatagaagctccacaagcaagctttcatcaggtactcagcttactcacaattctatcagacctatctag

SEQ ID NO: 167445 - DNA, 328 bp, Glycine max
  unsure (1)..(328): unsure at all n locations
gatcctctgagtcacctgcggcntcnnncttccgtagctagggatcgctttttatacattcattcaaatgcaagacgaagaccctgctgcagcccttcgactcctgctgaacaccagtcaagccaacacctcaagtgaaaagattcctggtgcttcgtnctcatctgatgctgacataacctcttcagtacgccaagattgcctgcttttgaagtatcaatggaatacccncgggcagacgtacttaaatccattgaagagaacccctctgctgctttcggacacctgaattttttgaagaaattgcacaacccccttacctctgatg

SEQ ID NO: 167446 - DNA, 288 bp, Glycine max
agcttggagaggatgcttcaatggaggtattaaaagaatgagagaaagagagaggggggagcacgaaattgaaggaagaaaaagggagagaagttgaactttgagttgtgtctcacaagactctcattcatcaaagttgcaacaagtgttacacatgcttctatttatagactaagtagcttccttgagaagctttcttgagaaaacttccttgagaagcttttttgagaaaacttccttgagaagctagagcttagctacacacacccctctcataactaagctcac

SEQ ID NO: 167447 - DNA, 176 bp, Glycine max
ccttctatcgagggccgcagccaatggctgacccactttagtccagaaacggcccaagaccaccaccaaacctcgagctaaacacgacacactcaagtttttaaaagggcaactacctaactagtcttgaccaaccatcatatcctatgctaccatataatatatatgctgggcac

SEQ ID NO: 167448 - DNA, 62 bp, Glycine max
  unsure (1)..(62): unsure at all n locations
tctatactttttttctnantaaagagggggtgtgctctgagcctgaaccacaaaaagaaaca

SEQ ID NO: 167449 - DNA, 342 bp, Glycine max
tgatcttacagtcactgaggcatgcagcttactgaattgttagacatccgttcttttattatcaaaaaagtactaagcgatctcggattgaagtaaaaatactacaaatcacacaagttggtagaaaaattattgtccaggacacaaaaagtgaaagggaagtgcgccttgtgttttggctcaaaatttgtcctataattggtgcctattttataccaatcctagttctgaaaccttaattgaaaattattgtgaaaacaagtgccccaaatagaggtttcctgagcctctctttctttttcttttaagcctctctacctactctaaacgcattctaggtct

SEQ ID NO: 167450 - DNA, 255 bp, Glycine max
  unsure (1)..(255): unsure at all n locations
agctggtanaatggctagacatgatacatgttattgtgttggttggttcaacgataaaagggatgccccacacttatttcatgacacaaatgcaaaaatgatgatttggaaactttatgcaaaactggttatgcatgcacctatgtggacgctcaagtgtcaaaattttatggtcatgtgatgctagggctcacgattcatcttctctattttaaatcaacccaacgttctcaaaatatgttcttttattcattt

SEQ ID NO: 167451 - DNA, 365 bp, Glycine max
  unsure (1)..(365): unsure at all n locations
agctntcaactgaatttgcaacgtttatttgatctcccaatggcgtaatcgattacaagatattgctaatcgattaccagcgcatntgaaccttggaatttcaattcaattgtgaagagtcacatcgctttataaaaagncttgtgccatcgattacaatgatttggtaactcatcaccactgacaacttttgaacaaacntcnnnngatgtaactcttccaatggttttcaggtttttctaaaggttataactcttcgaatggttctcttgaccagacttgaagagtctataaaagcactaccttgattcgcatttacagaatacttacatacttacaacctttacaaaccacttttcaacata

SEQ ID NO: 167452 - DNA, 400 bp, Glycine max
gatccttaagtcacctgcagctgcagcttgaaaatatgttatacaattttattttatagagcgactaacattcctcaacaatttcttcaagtgcaactaaatcatcaactggttccagtgccagttcattagccagctattgtttaaatccctccaccttctaatcagctctactttcctccgcttggataaccattttgcttctagtcatcacaactctgcactcttctttaggatttttctctgtgtttgttgtaaagctgtttgatgatctttcagctaactgctttgcaagctgacccacctagacttctagattcttaattgctgactccgtgctctcttggttagacattgacacttgcatgaattgagctagagtctctcccactttgtggtt

SEQ ID NO: 167453 - DNA, 290 bp, Glycine max
  unsure (1)..(290): unsure at all n locations
aagcctgagaatggtagaatgattcttttttggcttggntcggctcacaggtaaaagggatgccccacattatttccatgacacaaatgcaaaaatgatgatttggaaactttatgcaaaactggtcatgcatgcatctatgcggacactcaaatgtcaaatttttatggtcatgtgatgctagggctcgggattcatttcctctattctaatcaacccaatgtttccaaaatatgttctcttatcaatttgtacattcatccgagctcattttgggcgttgggaaaatc

SEQ ID NO: 167454 - DNA, 71 bp, Glycine max
aaaaaaacccccgccagccctgactgaaatgaaacccacccacaaaaaaaaccccccacgaaaaaacaaaa

SEQ ID NO: 167455 - DNA, 247 bp, Glycine max
  unsure (1)..(247): unsure at all n locations
agctcgtaggatgagtggcggacccatcttatgtggtactangcggcggccgggcgatggtgcacaacaagctctccacatccacaatgcgcgcataaacccatcatcncctgttgcccacctccaactgagctcacgtactcccacgtagcccatatcctcgcttctctcaacaccggggccccatcaatcctctcaagcttccacaacatccaaagaaaacaacattcatacagcacaagctatc

SEQ ID NO: 167456 - DNA, 339 bp, Glycine max
  unsure (1)..(339): unsure at all n locations
agcttacttgtggagctcttatggaggctttatctcngggctctaatgaggtccttcaatggtgagtttacaccatggagatgcaccggaagacaaaggagaaaaggtgagagaaggcgccatccactatggaataagccatggaagaaggagcttcaccaccaacaatgtgccttggataaaaagcttggagaggatgcttcaatggaggacaacaaagagagagggggagcaccaaactgaacgaggaaaacggggagagaagctgaactttgagttgtgtctcacaagactcacattcatcacacgttgcacaagtggtacacatgcttctattta

SEQ ID NO: 167457 - DNA, 385 bp, Glycine max
  unsure (1)..(385): unsure at all n locations
agctngctgctttatgttactagttatattctatttaatttttcttctgaaagaaaatatgcataaaatctgtgatctgctcctctttgaatttatcttctatattataaaatgtccctctttcttgtgtacatggtctttcaagaagttctcgtgttggtgaccaaccaaagtgcttgcacaattgcattggtgaagttattaggataaaacatcttgaaaatgagaggtatgctaaaattgtctatcttcgaattgtgatgccctgtcatatgaagcttatgactaaattataaccttgattattttcattcttaaaatcctatatacgctcggaattattaaacgacttgataagtattcccgaaaacattctgtaagagat

SEQ ID NO: 167458 - DNA, 377 bp, Glycine max
  unsure (1)..(377): unsure at all n locations
tgatttcaagattgagtccataattcaagaattcagagaagtttgatttccagattcaagaaaagatgaattccagttccaagagaagaaatcaagaagactttccaagggaagtattgaaaagatttttcaaaaaagcaaacatagcacagttttgtttttcaaaagagttttctcaaaattttctaatttaccagagttntactctctggtaatcgattaccagtggcaaagtttgatttcacaagttctcaattgaatttgcaacgctccaatctatttcacaatggtgtaatcgattacaagatattggtaatccgttaccagtgcatctgaacgttggattcacattaattggaagagtacatccttcataa

SEQ ID NO: 167459 - DNA, 80 bp, Glycine max
  unsure (1)..(80): unsure at all n locations
ccccccccacacccaccccaaccccccccccccccgcccggctgactgtccccaccaancccaccacccccccccccccc

SEQ ID NO: 167460 - DNA, 451 bp, Glycine max
  unsure (1)..(451): unsure at all n locations
agcttggaatgagagtagaggaacttatattacaagaataaaaagttgatcacaacaataagaaactacaattgaaagttcaaataaagtcagatatgctaggagaaaaatgttatactcaaagtattcacatggacatgctactttgctcatattcctataagtctacactatattgcaatcctcttcattctggagtcctaaaacatgtgagaaagtggattaagcagccctacaattataaggcatcttgggtgtttataccacatagcatgcaaacaaaacaggatatttatagcataattgttttcaaaacgggagcttgaactacacaaactaatcattatgcttgggttcatgtntcctaacagcagcttaaacatatttattcaacacatgactgctaggaacttaaaactatcgaataagaaatgaatatatgacaattaat

SEQ ID NO: 167461 - DNA, 396 bp, Glycine max
agcttgcaacttttatgaagaacttgatttatacttgaatgagagaacaagatcagaacatgagaagaaagacacaacctttttatactggctcactctcctattctagagaagctaatccagttatctaatccacaactagaattagatttctactatgcatcaagaatccttacaaggaatcacagctaatctacaatctccaccctgaaaaaagagactaaggcacccaacactagggccctttgtgaatataagcctaagagaaccctattcttagcccaaaccagaaaaccttattctagcatgctttatgcgattcacggataaccaaaaagactgtgtcaaaaccataccacagtaaaatccagttagagagatacaacctgatcaatc

SEQ ID NO: 167462 - DNA, 245 bp, Glycine max
  unsure (1)..(245): unsure at all n locations
agctntnacgtgagaggacgtgactcttcttattngaaacataataccaccattggcaggcgctgacaaactatttccaaaacattgtcgtctattccatatattcgaaatcaacccctacattgctaatccacacgaaaagtttgtcaaatcattgttgctagcggtaatcaattactacaatttggacactcactaccacagagtaaaaactttcatggacacatgtctcgacaaaatcatgt

SEQ ID NO: 167463 - DNA, 222 bp, Glycine max
  unsure (1)..(222): unsure at all n locations
gggatccttaagtcacctgcagctgcagcttaagaagaggatggccttatcttatttcttatttncggaacggaatcttatcaatagacctccaatctttaatggagagggttaccactactggaaaacccgaatgcaacattttattgacgcaatagatctaaatatttgggaagccatagaaatagggccttatataccccccacagtaaaaagacttca

SEQ ID NO: 167464 - DNA, 424 bp, Glycine max
  unsure (1)..(424): unsure at all n locations
agcctcacaaattcaatcgattatngtctatctattcttcagaatagctacaaattaagatctaaatacaaagcaaatttgagcaaaattgagttacattaattttacctcactttcaaaatggttttacatcaatttttttaaaaaggcaatttcaagacgtcttcgattgcgtttttgtttttttaatctattctttacaataatttttaaaatagagatgttttgattnttttagttttttagtcaccatagcattgcattagtataaaatattaatcaattttactaatgactaattttttataaagacatatatctattaatactaaataagttatttatactaatacaacgtcagtttatttattaatattatcttatcatatatactaataatactaactattaaatactaacaaac

SEQ ID NO: 167465 - DNA, 88 bp, Glycine max
acgcccacccacaaaaaccaacaccccgcccgccgtgacctgatactcaacaccccccccaaaaaacaccaccccaccccaaaacaaa

SEQ ID NO: 167466 - DNA, 225 bp, Glycine max
ccaaaaaataatagcctagtattcttatctaatcaccatttttcctatattattttggacaacacaacctttattataggggtgtacgttttaatatctgtatagaattagcagttagaatacatagtgccacgtgggactgtctatttctgaagatatatggctgcaggtattatctagtacatactatggggaaacatggggctcaggaggagtggtgcaggg

SEQ ID NO: 167467 - DNA, 409 bp, Glycine max
actatgaatgactaattccttgggataaacgtagtgttgccatgttatcaaagcccgtactaaggcatacaactccttatcataagttgaatagttaagggtaggaccacttacacttctactaaaataagcaattggatggccttcttgcatcaacacaacctctatcccaacatttgaagcatcacactcaatttctaaagattgttgatagtttggcaacgcaagtatggtggcattagttagcttttgcttaagaacattgacagcttcttcttgtttctctccccatctgaaaccaacatctttcatgagcacttcattgtgaggtgctgccaatgtgctaaaatccatcacaaatcgtctattaaaactcgctaaggcatgaaaacatctcacctcggtcaca

SEQ ID NO: 167468 - DNA, 243 bp, Glycine max
  unsure (1)..(243): unsure at all n locations
atggattctttttgtgtgaaaccatttttatgccgtaaaggagactgctaagaggcttgttttcttaatatagcctatcccttttattacaatttggttatttgttcctacagagatcgtgtatattctgttgcattcagtcccaatggtgagtacatagccagtgggtctcctgacagatcgatgctcatattgtccttgantgagggcagatcgttaaacctacactggtgatggaggcat

SEQ ID NO: 167469 - DNA, 359 bp, Glycine max
  unsure (1)..(359): unsure at all n locations
tataattttatttgtagctttacgaataaattatttaataagtaggtattaaataacgtagtaataattaaagtagtttatttggtattggctaaacgttaagacaccaaatttcaactttcacatgttcctattttcggtacctacactatggnattatttatttatttattatgctattgatatggagtattgataattttgttgctaataattttgattgacaaattaactgattatttaatggggttttttctttatttatgttttttatcctcaaattaaattaaatttttataaagatattaataatacgctatttcacatgctcttatataaatcatgatcaactgctttaa

SEQ ID NO: 167470 - DNA, 481 bp, Glycine max
  unsure (1)..(481): unsure at all n locations
acctttaatgctaaatagtttgatgaaatggttccacgtacatttcctgtaacagctattaaagtgtacttgatactatgtgtgccacgaatcaataacaaaaggcatttcatctcgtgatcagctattattgtaaaagctggtttcaaaatctgtacaacaagttaattaaatgtaatcaaataaaattaanaagtattcatttaaaagaagaaatgagtatatatatattgttaattaaaaagtatccattctaaatataaaatgtttaaaataattatactaattaatctttttggcaaagaagtatccattttatatatactgcgtcccatatatgaagtactgaagtagttaacttcattgaacttgaaggcctctggtttgtgtatagagatcttaatgacaagctattatcagcccaatgcatganataattatactatggcagttatttatatcacccgcgatatatagctga

SEQ ID NO: 167471 - DNA, 487 bp, Glycine max
  unsure (1)..(487): unsure at all n locations
ctatttgtatcgataccgtgatgtttctgaaaaaatcaaaagatgtaactcttcaaaaagggtttgactntntcaaatgagttttaagtttttcttaaagttataactccttctgatggtcttcttgaccagacatggagagtctataaaagcaaggctttgttttacatttcaacaatctngaataccatttttctttcaatcaatcctttacaagccgttgaaatctctttgaacttcttcttcttcttctgtgtaccaaacactttatgaagttttctgggtttctaaaccttgaaaacttgtgctacttcatctttcattctcttttcccttgccaaaagaattcccaaggactaaccgcctgaattctttgtgtctctttctcctttcaaagaattcaaacgacacattctgagaattctttgattcttccattcctagtacaaagtgtcaaaggataaccgcttggaatcttttgttccct

SEQ ID NO: 167472 - DNA, 117 bp, Glycine max
ccctgattttactttttttgccaacttaagtttgtttaactgaatggctatttattcttctgcaaaatgtagcacgcgattttggcttatctcaaaaagatcctatttggtcttctg

SEQ ID NO: 167473 - DNA, 296 bp, Glycine max
  unsure (1)..(296): unsure at all n locations
tgaatcttctacgcacttagccggaggatagtgcgcttagtggatggatcacccagtgcatggcgtggctcaacgagttcataaaatttgtacttcaccaatcttgctcatattgcctgaaattganaggaatgatcacttaatacacaaaaatgggatatngagtacctactactttaatttacaaaaagtaattacgatgctaccaaaaacaactattaatgggaggagtcatattccatntacaacagtgtcttacacaaaagttagtcatattgactgactaacaatgacat

SEQ ID NO: 167474 - DNA, 474 bp, Glycine max
  unsure (1)..(474): unsure at all n locations
tatanagagctatggatatgggtccagcactgagtaccangtccatggaaaactctatctctctctctctctcaggtggtaaaccgaatatatcacagggaacactctatgaaactctttgacaacttggaggccacccatggaaacctttgtctctacacccaagttagacaagatcatgtacacttgagcatcttcttttaaatatgtcacaacttggttggcagagataaacatcctatccttactccttccaaaataatcaaacaccacaattttatcaaaatagtttaacaagacatggtgtggaagataaccagtccacacccagaantaacatcaattggcttaanggaaactaatctgatcaattaagaatgatctactagaaatttccacaggataattcgaacacacattataagtaacacagaacaattaattgaggtctctaccaccagatctttgttaaag

SEQ ID NO: 167475 - DNA, 252 bp, Glycine max
gctgggaaattggcgagtggaggaacgccccgacatttacgcaacgagcataatgtgaaactttacgaatttaaaaactctatatttaggcctaagccttagaagttcttttggtaaggctttgtgtcttttgttttgaatatataatacaaggatctttcttcatctggtcctacgtctctacccattctcatccatttgcatgtttacttctttatttctgaaacgacggatccgatgacgaagtccccg

SEQ ID NO: 167476 - DNA, 379 bp, Glycine max
acaatggcggtcatgacggaccgacgcacaaccgggtatatggagtaacgcataatgatcctcccttcaaaggtagaagtgatccagatgcctacctggactgtgaaatgaagactgagcacgtatttgtctgctatgactacactgatgcgcacaatgcaagctatcacagctgaattctccgactatgcccttgtttggtggcataaataccaaagagaaatgttgagagaggaaaggctacaggtagatacatggactgatatgaaataggtgatgagaaaaaggtatgtgcccactagctataacagaaccatgcgacagaaactccaacggctgtcccaagggaatttaaccgtggaagaatatataaagagat

SEQ ID NO: 167477 - DNA, 266 bp, Glycine max
  unsure (1)..(266): unsure at all n locations
agaaaaaaataccgagattatgttgaaagtgtgcatagaagaggtgaatgctggaaacaaacctcacaaccacttcactaagcttggttgggaaaatattgcagaaaagttcaataaggcaacaaatttgagatatgaatataaacaatttagaaataggtgggattctttgaanaaggaatgaaaattatgggttaagcttatcgggaaagacacaggtcttggctgtgaatggaagaagaaaaaccattgtgctagtgatgaat

SEQ ID NO: 167478 - DNA, 378 bp, Glycine max
  unsure (1)..(378): unsure at all n locations
atatgtgcttaatattgaccagctaggtgtatttatatgctcaatctcagtagaatacttcttatagcttgactggtgattaaaaaagaggaatataacatatcactcttaacacacttattataaattgttaatctaaacaatatatgagttgaaacaaaatttattctctatatcttatctttacttgattattttatgtgttttattattgtnaatcgatctatataaatcaatgagtaaattacatatttatctcctttatgttaattattggatagatttaagggtgaaaattgcatttcttaacccgcgtacatactattcgtgtcagttaaaagttatatatctgtgatccaaataatatatataacgtac

SEQ ID NO: 167479 - DNA, 174 bp, Glycine max
ccatctttctttggagtacttatatataaagtattagtaggacttattttgaagaaaaaaacaaatactctgtgggagcttagacaacttttctaaaaaatttttatctgactatttcacaaaactcccaaacataagaatcctaaactacaaacattatctaatgaatcctaa

SEQ ID NO: 167480 - DNA, 327 bp, Glycine max
  unsure (1)..(327): unsure at all n locations
agcagagtgagagagtngaatttaaatataaaaataattagtaatataattctataattattacttataaatatttattatattattaatattaatacttaaaattttatattagttatattggttagactaaaatctaattgtgatgttcttataatttcaaagtcataattntaatttcctgaaactaaatgaaatgagaaataaaaaatatcttaatatgaattagactcatgatcttttgctcaaagagcaaataataaatcattaggatacatatgttatttggttagtcgggtgaacattatatttctatgtattattagt

SEQ ID NO: 167481 - DNA, 348 bp, Glycine max
  unsure (1)..(348): unsure at all n locations
gaaaaaaggagagagtgactttagttgtgtctccagactttattcatcaagttacaacaagtgttacacattcttgtatctattgactacgtagctttccttgagaagctttcttgaaaaacattcttgataagctttttgtgaaaacttncttgagaagctagaggctatctacacacacccactctcataacttaagctgacctccttgaggagctttccttagaagactctctaagaagcttgagcttatcttcacattcctctctaatagtttagctcaccttcttgagagagaagctgaactatctcacaccccttatagctagctacatcatgacaaaaaca

SEQ ID NO: 167482 - DNA, 351 bp, Glycine max
tctggggtctccctgcctccaattaagactcgatccgggttgaaaagatcttggattgcagttccctcatcaaggaattcaaggtttgaaaggatttggaacttgattccctttccattgtgagtcaaaatcttctctatggcctcagcacgtttcacagggacagtggatttctccaccacaatcttgtcactcttggagacatcagcaatcatgcgtgctgcacttctccagtaagtcaaatctgcagcctttccggctccaagaccacgagtatttgtcggcgtgttgacggagacgaacactatgtcggcctcatagacatgtttctcaacatcagtgctgaagaaa

SEQ ID NO: 167483 - DNA, 370 bp, Glycine max
gtaatcgattacgactatgttttatttcttattttatgatgaaatatcatgttgatcaaaccaaactcttcacacatataatgagacttaaagaataaaatattcctattcacacaatatatataatgggaagggatataaaattaatgggagtcgacacttctaaattatctttatgaaagatatcaataaatattattatctcaatcaattattaagttttaaacaaatatctcctctctttgcgagacttttttcatttcggtgatgtctctcttcaagatgatattcttattctaaactttattattgcaatcatcttatcttaaaaaaaatcctaactcttaacacatcataagataatgatatt

SEQ ID NO: 167484 - DNA, 220 bp, Glycine max
  unsure (1)..(220): unsure at all n locations
aaatgaagttggtttagagtcaacatcaaaatggtgtacttaaggactctgggaatgagaatatcaaaatgatactttgatgaccaaatagattatgagatgactacatcaaaatgaagtattgaagtccagatcatgcaatatttatgcatcataatgaaacttgggtnnactctacattagaattgtgaaaaacttgactctgaaaactaatcttcag

SEQ ID NO: 167485 - DNA, 397 bp, Glycine max
  unsure (1)..(397): unsure at all n locations
taacttttntgagaaaaggaaactatatcttgtgattatattctatgaaggacatgtactcgaaaattgtgttggattcaattggaatccatcactcaccaacagagagaagaatgttgagaagaattgagaggaactgaatctttattgatgaatgaattgattacagttacagctcattttctgaagtatatattctatgactccaggtgtaattctgttacacctataacaaactcaaaacagaaaaatagtatataaactgaaatgcactatatcaattaatatctatctgtgatgctatcaggtgctactagcaccatgtgactttattttgattacccaaaatacaacactttcncttaattcanatcttcaaacaaatgactccaatctc

SEQ ID NO: 167486 - DNA, 371 bp, Glycine max
  unsure (1)..(371): unsure at all n locations
tttatatacctacgcagatatcatagcaaggtgttcctgagctttggactaatgtaactaattataatttntagtttaaaatgcatgtcnggtaggaatttagctccatcttttaatgctgcagtatgctagtcatttggtccaactctgacagcttggttctatacaggctgaagttgatagtctatatgctgaggaatgcanacttgatgaatgtataagggtagctactaaatttccccaagaatttgtatgagtcccacgttggtatttttgattggatgctttcacatctcaggcctaataacatngcgaagaatactcatgttcatgaatgttttcttacccaagtatgtacaattcttaattat

SEQ ID NO: 167487 - DNA, 350 bp, Glycine max
  unsure (1)..(350): unsure at all n locations
ctgactcaccatanaccttgatccagggtgagaatgccaatctttaccctcggaagagaaaaaagaagagaaggaaaatttccaatctaagatgaagcaaaatacaggagagaatgaaaaattccaatcaaaggaaaaaaggaagcaagaaaatttccaatcaaagagtgggagaaagcaaaatgaatagaaagacaattcccaatctatgaatgggagaaagaaaaatacaagaacgagaataatgaaagaaagctcctgatcaaggatcgaaagaaaacagaataaatgtgcttagaggtctttggaccagacaatatctgaacaatacggaatngtcaccaaatgaa

SEQ ID NO: 167488 - DNA, 235 bp, Glycine max
aaaaactttgtttttttctctacctctacactgttacagtattgtctgacctcttcattcaccttgctcttaccctattgtttcatttgtgtttgacatacttgaggaactctcctttgagatactttccatgtgatagtttttttaaggtagatatgattataactatgagaattttggaaactgtttctgacaggtgtcttttatctcctagacttacacattaagttcttaa

SEQ ID NO: 167489 - DNA, 298 bp, Glycine max
actaacactgagaatgcttatcgtcagctttttatcagatgccaatttcaattgatcaaatattaggatttttgattgctttgctggaggattaatagggtttctaaaaaatgcttgttaatgactgtgaagagaacaaaaaagcattactataaactttctgtgaggaagttactctcctaaatagatggaggatcaaaacactaatgtaccacttgcttccaaacttcaatgagtctcaagtgtcatcaatactcagaatacctactgcgctgttgcctgactggacctttgtctt

SEQ ID NO: 167490 - DNA, 294 bp, Glycine max
  unsure (1)..(294): unsure at all n locations
attagaaatagataatgccattagaagttaatttagcccgtttggtacctgcactatgcacataatggaagtctcaaattatattcacgtgattgcccatggagagcaagtataatgtccgaatcaaagaaaaatgttcttccaaaacattgtttgccagtcatgaccttatatttttgtgcagaattaattggaagttaaggaggccgaaggagaatgatggcgttgcaaacctcagtgaaatcaactgctataatactngtattagcatgtgtgtaataatattaaaaaaaa

SEQ ID NO: 167491 - DNA, 439 bp, Glycine max
  unsure (1)..(439): unsure at all n locations
gatataaatatgtgaccatggcatgaattttaatagaagagatccatcatctatctttcaatcttctctcaacatcattcaatatctttcaactgtttctatagaaatttctgattctttttctcttcatctttctaaaagaatttgttcaaaactttctcttccaagaaaagttctatgttaaaaaactcgtgttattcatttgtttcattcttttctccctttgccaaaagaacgaaggactaaccgcctgaattcttttgtctctctcttctcccttacaaaagattcaaaggactaaccgcctgagaattcttttggttcttccctttcccttaagcaaaagatntcaaagaactaaccgcctgacgatatctttgtttcccctttacaaagattcanaggactaaccgcctgagaattctttgtcccaacacat

SEQ ID NO: 167492 - DNA, 281 bp, Glycine max
  unsure (1)..(281): unsure at all n locations
tttttacggataatctttaacaaaattatatttttctacataaaataaataaataaataactttttactacatgtaaaataggtattttgatttcactagctattatgntntatattttagtatcccatattntttatgtctgattttaatatcagacataagtaagaatcaactaaataataatatgacaaagtaagaatcaacttaataataatatgacaacataacaaagtatcacattatcacacgtaaaatcacttaatggatggctcaatgatat

SEQ ID NO: 167493 - DNA, 501 bp, Glycine max
  unsure (1)..(501): unsure at all n locations
gctacatcatgaagcatataggctacaagaactagatggtaaagaaatttttataacatggtatgctacctatctgaatntctatttcagttgacctactgcaagaccaggtgttgtactctntnttctactctagtcttttgtcccaaaagagaaaaatcagggttttgtactcaattgacttcattgaataaagttctatctctcgttagtttctataattntcttatgtccattttacaaaggcttgtcanacccaaggtctgccattagtaagcctcgccaaaacccaggacggatgcattcctggtcgcttctctaaaggctcgtcaaacccaagatccgcccttggtgagtctcgcttctctaaaggctcttcatacccaaggtccgcccttggtgagtcttgcttctccaaaggcttatcaaacccaaggttcacccttggtgaatctcgtttctccaaaagctcataaaaccccaacgtccccttggtgagtc

SEQ ID NO: 167494 - DNA, 308 bp, Glycine max
  unsure (1)..(308): unsure at all n locations
agctntatgtatgagtgtccatatggatgtatgcatgtttctgttttgaataaatntctaaatcattattgtcatatgcatgtcatggaaatgacttggggcatttagttagtcttgaaccgctggctaaacaaacataccgacatgcatcatgtctcgccattcgtaggccttttgagccaaacctcaacattttggccataaccttgacctatgatggaaatttccaaccttaccattggaagaaagaacggaagaatctttctcaaaaaaaaagaagcctcttttaccttgggttacaaatgtgc

SEQ ID NO: 167495 - DNA, 445 bp, Glycine max
  unsure (1)..(445): unsure at all n locations
tatgcgcatatntccttacaatcgttctcttgcacaagacannaaaatatgcacccatatacaatcaaggcagcttcgttacctagattatttacacgtacttccaaggtgtatatgttacttacatcacacacatctccttggctcaatacacatacatgcatactccaagcattttggggtaccaaaaattgcacctgtgcacatcttggtatttctaatacctatacatacacaaacttcatgatgaatcttgactatctacacaataaagtgctacatctcatgtcctttttcaagtttttgctacctaaagccgcatgcaaattcaagcatattntctcttgcttgactaaattgtattcaaattatatatatatttgttggaatatgtcttntttcacataacattcaacatatgtatatatattttnttgtgagacat

SEQ ID NO: 167496 - DNA, 346 bp, Glycine max
tagtcgaccattatttaccaccacccaatattctgtacgataacatgactgccacagctgatcaatgcatgcatgagttttatcaacaacctctcatggatggcatggctatggatccatccatagaaggactcatggatgcatccatgtcatcatcatcagagggcatgatcatgttgagcccaagcaattcacacaacaacacaacaattggccaccacaatttaactccaaagggttgtgcattcaaacaaatacgaaggagatctagagcttctaagagcactccaattacccttctcaacccaacaccttcaatttcagggcatttgtacaacaattcact

SEQ ID NO: 167497 - DNA, 391 bp, Glycine max
  unsure (1)..(391): unsure at all n locations
catgctaataactaataagatntcctgtgcagggtatcattgtttttgcatgactgatggctaccttggggctggagattatggttgaatctgcctcaagtgttattttgaaggtaattgagataatcttttgttggtggttggttattatatacctaaatttgggttgaagactagttattcaacatgtggattatctaccatgataagtgattctatcatttgagcagatgatattatcatttgaccttgcttttgctttgattccgctcctaaagttcagtagcagcaaagtgactagcagcacaagcattgaagaggtgtgttccttcttgttgtggatcatgaacataagttatcatgaactgaaaatgtctagtataaaattgat

SEQ ID NO: 167498 - DNA, 241 bp, Glycine max
tttttgaatgtgagaatattcggaaaatcagcacccttcgaggtcgggaaaccaaatgcacgtctagatatgtcgttctttttactaacgtagcctcacagctttattttatgccgggggccattgtcagattatttattattacttttcccttgcggtagcttatagatttgtatcaaaaaaaatccgcgtgatgtattgtattgtaagattacgcgggcgacctgaaaaaagtaatttt

SEQ ID NO: 167499 - DNA, 415 bp, Glycine max
  unsure (1)..(415): unsure at all n locations
actgactaaaactatgaatgacttacaaatggatatataatcagctctttaatcttttctctcaatatgttcaaggtcgtttgagagattttcaactttacaacaatatacataaagcttttaccgtttgtaatcatctatnggcttatgcgtgctatcatctagaatctcatacacataatagcatatcataattntatgatgcattagacactgcttttaccacttgtatttatttgcttctaatcaaaatcattagaagtcatgaatcgtcttaagttattaactaacatttgacttaacgatctccctttctttatgattgcaacacattagatgttgaacctatagcgttatacagataaacaataacccatgcttgtcttacgatgcatattgaacacatatagaatgt

SEQ ID NO: 167500 - DNA, 392 bp, Glycine max
  unsure (1)..(392): unsure at all n locations
tcacaatgatcctatggtggtcaaactagatcttgctaaattttagtgtgcaaaagtttgattgtctaaggaagcttgactgatattatctattgatccaccttcaaacaaatgaacattctagaaagccaaattcagccattcttggaacaactcagaggctttttgtgagagataactaacacaatgggacacataaactngctaaccaactttggagacaagaaggggtaaaaatccatcaatgttaggtacctnctagtcaatgctcttacttcttacaatattntgattggtctacctgcacttaaatgaattgggtttgtattntaactctccatctangaatgaaattcccaagtacgagtggcaagatcatcattgtaaaagtc

SEQ ID NO: 167501 - DNA, 235 bp, Glycine max
ggaagtatatgttatgctataagcccactcacgcagatataaagagaagcatcgccggaacgaagagcggttgtcaaaactcgtggttgaaacaagaatgtgaaggaagcccaccctgccacataagtacgagctctataagcgctggtctggggaacgaaggtcaagtggtcgcgatatactaagatggtgttccgagtacattggatatggtacgaccatgccctcctgattt

SEQ ID NO: 167502 - DNA, 248 bp, Glycine max
ctgcattacctctgagatggctaggcattcaacctcagcttcaatccttatcctaaaaaggtccctaagcttcgactcaaccactttacatttttcatccgacgaatctaccgttctagcagactcttccctagaaatcttaacactactcgaggatgtttaaagtcccaatcctggagtcctcagacaagccaccctgtaatcttcaacttgtttcaaaatattatatttgtgtcagctcatacctg

SEQ ID NO: 167503 - DNA, 300 bp, Glycine max
  unsure (1)..(300): unsure at all n locations
ctatattattatgctatttgaacaatttactatttctttatttgcatggtatgnttgaacaaatattaattatgttatttgactatgtgcgttttatatatttgatctattcatggttcttgcttcatgatttggtttatatttttccatgaatgttgtgtggatgcttagttgtatttgaatgctttaaacttgttacgcactttggtttttgtcgatgccaagggggagagaaattggattaaatcaaaactacatgagtatcaacttattttagagaacataaatcaaaacaaaggg

SEQ ID NO: 167504 - DNA, 345 bp, Glycine max
tctagctaccactattgcatgcaattgttatgataactttttttataatggctgacattctatgaaggagctcattgctttttttgccagaatgatctcctatggattcagtctacacaccttttatccctggtcagtgctgctaatgaaaaaaaaaagtgcaccaaagtattttaatggaaatatttatttttattattataacaaagtaaaagagccctctgaatgggtttatcagttttcacgttttggacactaaacagcggcatttgatattttaaaagctaatgggtgctaaatcacggtttaaaactcttctatgattaagcctgggtccatctcccc

SEQ ID NO: 167505 - DNA, 406 bp, Glycine max
  unsure (1)..(406): unsure at all n locations
gatatagctcangagttatgccagagatgaagcagcttagcagaaatgtcagagtgaggtcaacaattcagtttacaagcctttcaaactcagtgaggcaatcgttcaccgaacctcgctattgcactttgaaaagagcaccatgagggtcatcatagtataacgatgcgaatatggactcgagaacctgcaacatggcagtccatgatgtaaggaagccatttttggacatccattgctaccaacagagggcgggaccctccatgtagaaggatgcgacggtcatccttttgtgtcgggcacaccttgataatcgaaaaattggctgattttaaaaatccatcccaatggatcctaaccatcanatcgtggaacatctancttcatatgaagctggctgggtgga

SEQ ID NO: 167506 - DNA, 461 bp, Glycine max
  unsure (1)..(461): unsure at all n locations
actggatgcgatggtcaactnggtaacccagctggccttgtatcacaaatctgtacctgtcgcaagggtttgtggattgtgctcctctgctgaccaccatacagacctttgcccttccatgcagcaacctggagcaattgagcagcctgaagcttatgctgcaaatatttacaatagacctcctcaacctcagcagcaaaatcaaccacagtagagcaattatgacctttccagcaacagatacaaccctggatggaggaatcaccctaacctcagatggtccagccctcagcaacaacaacagcagcctgctccttccttccaaaatgctgctggcccaagcagaccatacattcctccaccaatccaacaacagcaacaaccccagaaacaaccaacagttgaggcccctncacaaccttccctcgaagaacttgtgaggcaaatgactatgcagaaca

SEQ ID NO: 167507 - DNA, 283 bp, Glycine max
  unsure (1)..(283): unsure at all n locations
atatgggccacgngggagtacgtgagctcagttggaggtgggcaacaagggatgatgggtttatacgtgatttgtggatgtggaaaacttgttgtgcaccatcgcccgaccgccacctagtaccacatgtgatgggtaccccataatcctacaagcttgagatgaggaagtgtagaaaggtgaaacttcctgcttttattcgttgaccacagagtggtacctggagatatgtcgcggnggtcacgagacctttgcgacgtcaagtggggtgctattgcccaca

SEQ ID NO: 167508 - DNA, 421 bp, Glycine max
  unsure (1)..(421): unsure at all n locations
aaataaacaaagtgtcattagttcaaagctataactatccaagaagtcaaaagatgcatcttcatcatcaaaaggaaaaggaagttcattaaagaanaatgtgaaaaaacaacttgtcataagttaaagctcaaagctacaagcatccaataagtcaaagcatcttcatcatcaaattaagtttattcaatctcagaaagtccattaaggcgaataaacaaactattctgacgtcctcttatgaagagtcaatcttactccaatgttcaaaaaggagcacacaacatanaaacataattcaacaacaggtcaccagcaaaaggaaataaatacacaaagtctatttaaatgaatcattntcgtggtttattcacatcatttttatgttnttaaccaatatgggttgactattttctttcat

SEQ ID NO: 167509 - DNA, 339 bp, Glycine max
aatctcagcttcacctttggcctcatttcttctccaatcgtttattgatagcattttcggggtcgagaagtgcctggctaccagtgggacttccaaaatatatgtttgggcggacttctttctcctctgaatttcgtgggtatcggggtttgggagatatgattggtacccttgttagatttctgctccatgatggatatttgtgaagactcttgttgacagcttgttgaaattgccatgtctggatgagttaaacatacccattctgttttatgcgttttgtgatgatgttcgtgacgtttatatgctgatattgctgatggaaaactattatagatg

SEQ ID NO: 167510 - DNA, 431 bp, Glycine max
  unsure (1)..(431): unsure at all n locations
gatacatggcaagcaatggtcatttgtaatagccaacgtttaaatctgggctggtggaccaaaattgcgtgattagacaaaaaagggggactaaatcgctgaataaatttaaaagggaactaagataaaaattgtagactgtagaagcangcttcataatgatgaatcaagttgattcaagtagttttgatgataacaaagatgatgacaaacagcccaagagaatgatttcaagaatgattcaacangttcaagatcaagaataatttcacgtttcatgagaagaaatcaagaagattcaagaatcaagagaagtttgatttcangaattaagagaagatgaattcaagattcaagagaagaaatcacgaagacttcacaacggaagtattgaaaagaattttcaaaanaacaaacatagcacagttttg

SEQ ID NO: 167511 - DNA, 411 bp, Glycine max
tatattactgctgactatatagagcactttatgtttttttaataaaaatattgtgacaattatataaaaactaattatgtttaattgagatcagtttttatattttgctaccgatattattagtattactaactaaattattaatcatcactattaatctactaaacatgacatatatatatatatatatatgtatattaaatattaataagaaatcatttatcaccacgtaatatgaaatatttatactttttacaatttaaagagaaaaactgatagttcacattttagggagaaatgggaatataatcctgaagaagaagaatataaaaatgtttgaaatgtaaagaaagagtacaaaagaagagtaaaactaaatctatagagcatctttccgctgaactgtaatga

SEQ ID NO: 167512 - DNA, 422 bp, Glycine max
  unsure (1)..(422): unsure at all n locations
gcagcattaaaaaaaaattaaaattgtaactttcataggtgaacctatntacaactaacaaggaatattgngggtttaagaaactaacgaaggaatatggattattgccgggagagtgatagaaatgaaattaaaggaaacgaagatatatggacgaagtcatgggacatggtatatatgatgtccgtaagattaagcattagtttgtgcatattgcattacatcgccaccacataagggagcagcataatgagctcacgaagaaattatctttttgccttcatgaaattcccagaagctatggatgtctcgctgcantacacaagaaaaagaatgccaaaagaattacttacattaatagaagccgcatacagcatatgaagtaatttcatggataatattgtctntacctcaacgctgag

SEQ ID NO: 167513 - DNA, 322 bp, Glycine max
  unsure (1)..(322): unsure at all n locations
aatcatattcatatatcattggggcatttcaccgagcacttggtgggcacatgnttggacataaattgcaagagaatgggggcaatgtggcatgccccaattgcttaaaaaacaacacaggcctaaggccttctcacaccaatcctcaactcaacaaatcaagcatcaaagcaacccaaaactgcctcacaaatataagcacattctcacaatttagagcatcaaaagataaagaaaacacatcaatgggaagctaaaaactcaaggattgaatacttactttgtggagtgagtagaaacaccaaatatgaaagcaaaatgc

SEQ ID NO: 167514 - DNA, 408 bp, Glycine max
  unsure (1)..(408): unsure at all n locations
cacanatgcaaaaatgatgatgtggaaatattatgcaaaactggtcatgcatgcacctatgcgaacgctcaagtgtcaaatttttatggtcatgtgatgctacggctcangatatcatttctctattttagtcaacccaatgttaccaaaatatgttcttttatccatttgtgcattcatccaagtccatttctggcgtccgggaaaaattcacagcattcacccttcacgtgtacacacattttttattttccaaaactagctatatcagcgaattttcttaaagaaagttggagcatctttttcaaagcatttggttttcagctaacaactatattcttatctcacatatttctccttatcattcgatattcttttcatgtgggacatctccccctcctttcatga

SEQ ID NO: 167515 - DNA, 394 bp, Glycine max
agccatgaaaatgggcaacatgaaaccaaaaataaactcacttatgaatgaagaaacaaacaacacgttacacacctgatgcgtttcaagcaaactgagaacatcacttctggccttcatctgcttctctgttgctaaaattagtgattccatttgctcgacattataagttaaatagttcgtattaatatggatattatcattaacaaattttatgtcattcaaattcaagataagttaattaaaaagaattacgcttttcttttcttcctcaaattatctcctttgttgataattgacttttcttgttcaatcagtggtgcaccagcgatcgagtcatcatcattgatctatctcttgtgcaattttattttttcatggcttataataatta

SEQ ID NO: 167516 - DNA, 406 bp, Glycine max
  unsure (1)..(406): unsure at all n locations
ttctcttgtgtccagcacattctttggaagaacatgaaaattntagatnttaaaatatataatatttaagtgattttntttgcttttctatatttacaaaaaaattatttatcgattgaaattcaaagtgaggtctatctaataaccttctcatgtgtagagatattcattttagtagacatgtntgtcacatgtgtttctacttgattaatatataatatgtaatttctagtttttaatgtgttgattaataacaatgaaaattttatcttattttatagtttctaaatttaatatacttacaacacgcaatattaatatcattagaaaccctcaatgaaagactgattgaatntttcaanaatatcatttctgagatattattacaattatatatttttctatg

SEQ ID NO: 167517 - DNA, 282 bp, Glycine max
  unsure (1)..(282): unsure at all n locations
tattctaaggctcattttcttatttttccccattagttctattaagtatntctatcagttctgataagatgggtacgatttgatgaggttcagatcattttctaattaaacttagaataatgttgtgacaactgcgagagcagcttangatatttccttttcttgntaaatagattaatgtaattatgttttaattcattnttgaacttattattcattcaaattatttaagctgagttatgtggtacccttttttttaacttaaatcatatatcacctgac

SEQ ID NO: 167518 - DNA, 477 bp, Glycine max
  unsure (1)..(477): unsure at all n locations
gtttagaaacatatcctgcatggtaatggtgcacagttaattggtgcctgactactcgaaaggggtattctatgacaaggaaacatgacaatccctgtgtatgactntagggatttagccccccttaatggaatatggttttaaggtgtattttttattntggccttacactttntacactctattttaattcaaaaatttcctttaaaccaaatacacacttattatttctattatatttctattttcttcctctaaaccaaatacacacttattatttcctttctcccttcttggaccgcangtgagaccccttaagcaccactctagtagtgaacttctcctatgcccctagcaaggtacaatagcacaaaaaaatattggatacatgattagttatgttttggtctgttggcggcagatgaatggttggtatgaagggaaatgtttatatttacactcttagtacatactaca

SEQ ID NO: 167519 - DNA, 320 bp, Glycine max
  unsure (1)..(320): unsure at all n locations
ctgccgctgcagcttgaaaaatctggctctttccaagtgttttgtcaaaatattcaagtcatttattcatggagactggcaatgtgctagaaaataacagaatgcatagctcctattttgaggcatttagtgttgcttctttcctgaggtgactacaaatgattgtgccgtataaaacagacttcccaagcttggctcctgttctgtacatagatgtcaaatttcgcacacagcaataatttgtattcatgtnttcatgtaacattaaatgtgtgaagtagcgcttgttactccgatatgttacctgatgataattatca

SEQ ID NO: 167520 - DNA, 466 bp, Glycine max
  unsure (1)..(466): unsure at all n locations
ctggcaccaactattcttttgtatattaattaatgtcgtctcaaatatctaattttgttatatatatatgagatgagattagaacaataacatgtatagctgctcaaatatgtattgtttacataatggattgtctttaatattgtgaaaataacgcatccatgccactaagaactaacctggaattgtaggatgatccatagcctttattagatgaggtcaatttcatacaacaaagttgaatttatgttatttatattaattttagttctttatcttggtcttttgttaaaaattatggacctaatttaatttcatcattcaaacgttatatttttaatgtacaacataatttatttgacatttaatcattctttacgagaaaaatatattgaacaaatgaacatcattctagtacgtttatactttnttattaaaagagtgccatttaattaattaagttatt

SEQ ID NO: 167521 - DNA, 263 bp, Glycine max
cactgatataaaattttcttgggctttgccattcttgccaaaggcagcccttgaagccattgtgtaaaatgatgtaagtactgcctcagcgaggttgatgggggatcctctctttgaatcaatccacttgacaagattgaagagctcatcttcttaattgtgtggaatgagttgacgcgttctatgcctataagctccaatgtgcataattttcttatctgcctccaatatattccatagccagcaaaagctatacttgtgaa

SEQ ID NO: 167522 - DNA, 474 bp, Glycine max
  unsure (1)..(474): unsure at all n locations
gctttgagtgaacaatgtgactcttcacttntaaattttaatttcaacgntcaaggacactggttatcgattaccaaaacattgtaatcgattaaaaccttttgaaaatatatggaacgttgtaaattgagtttgaaaactttttcaaactcattttactactggtaattgattacaacaatatgggaatcgattaccagagagtaaaaactctctggtaaagggttttgtcaaaactcatgtgctattcaaagttttgaanaaaaaaacttntaatacttatcttgattgagtcttttcttcattcttngaatcttgatcttgatcttgagatctagagtctcgattcttgattgcaggctttcttcttgagtcttgaattctttcttgatcttgaactctaaacttgtcttgatcacttgagatgtctttgatcactnganngtgtcttgactttgagcttttgtcatcact

SEQ ID NO: 167523 - DNA, 408 bp, Glycine max
  unsure (1)..(408): unsure at all n locations
atctcanaagaagaacgtccgactggattttttaaattattttattcaaaagaatattttgattattttattattattttgcctctttttggttataaacgtggttacggcgtgaaagatcggtccaattttattctaacagagattaaaagatattacaactctaatgatcggtggaaatttattttatttttgattaggcgagaaaatgacttatataagttattaaagcacgtcaaaagggggtacggaaagcaaacgaaataaatataaaagctcatcaaacaagtggggaccactaatggcacatagaatgaattgaaagggttgatttctggaacttaccgcttatagaccgaagaacgacatagaacgatcgaagaacgatgaagaacggtggaaaacctt

SEQ ID NO: 167524 - DNA, 334 bp, Glycine max
cttcgagctgcacttgagggtacgatatctatactccttttttttatcatagaagttttatagcagagccaaagaagaaaagatttctcatatgaaccatgcaaaattttataacattaaagaaaaactgttgatacataatataggacttggatgcagtgcaataaagtcctatttactgagcttaaaaaaaatctcagaataaaagcagagaaaagtaaagctagaaaaaaacaaaaaaactctatcaagtaaggcatacatgaaagttgatctgcgagcaaaagggtggaataataatttctttagaaggagaaatgaaaaaatctttgta

SEQ ID NO: 167525 - DNA, 439 bp, Glycine max
  unsure (1)..(439): unsure at all n locations
tgtggactaggtggcggactgtcgatggtgctcatcaagattttcacatgcacaaagcgcgcataaacccaccatcccctgttgcccacctncatctgagctcacgtactctcacgtagcccatatactcgtttctctcaacaccgggtccccatcaatcctctcaagcttccacaacatccaagcaatacaacattcaaacagcacaagctatcacagtcaagataacagagcaaaggcagaaaactctgccaaaacaccaaccaaagatcacagtctttcccacccaaagaccccagtaacaattccttcgatccaatatgttaaccgttggatcgactccacaattttactggaagtctatagtgcataagcctacattgtgaccgttgtgatcgactagcaaacattcagaactcattctgtactatctctttca

SEQ ID NO: 167526 - DNA, 297 bp, Glycine max
  unsure (1)..(297): unsure at all n locations
agcttgagatgaggaagtgttgaatggtgaacttcctgtttttattgntgaccacaaattggtacctggagatatgtcgcgggggtcaggagaccttggggacgtcatgtggggtgctattgcccaaaaccaagcttgaccaatcccgacccaacaccggcatagtcggtcagtgagaacctgtgatgtacctaaacaggcgagctcctggcngtcaacagataaaaggaaaacaagaccacaaagcacggaggcttgtggtggctggccagctgtgaattttgtgtaatatgtgga

SEQ ID NO: 167527 - DNA, 431 bp, Glycine max
  unsure (1)..(431): unsure at all n locations
agactacgttagtctccgcatgctatcatgctttctgtcttacagatagcanaagaatgtgtataaggataaccactcgggtatttccaaccgccagcgtgactcaaatgtcactatgacagatcttgtgagcgcggaaaatgacgtaaatctccgcgtgtcaatgggcttattgggccgcaattgatgaagggtgcagaagacgatgttagtctctgcatgctatcacgctttctgtcttacagatagcaaaagaatgtttatacggatgaccactcgggtattttcaaccgccagcgtgactcanatgtcagtatgacagatgaggtaaaactccgtgtgtcaacgggcttgttgggctgcgatngacgaatggtgcanaagacaacgttagtctctgcatgctatcacgctttctgtctacatatagc

SEQ ID NO: 167528 - DNA, 440 bp, Glycine max
  unsure (1)..(440): unsure at all n locations
agtggatatctaaatttagttgcaattnttcagtttacaattattatttaaagttgggaacttgctctttctcctatttatttataattcctttattatcataaattctctctctctgcattgatatttcccatttgacatttctatgtcttcccacaaatatagataacaagttaactacacatgaaaaacataatactctcattggatataatatggtggacctatttaatagtcaatcatacaatgaatgaaatgctgttgggttntcttttcattntatgcaaccatgcatcttttcattngacaaatntgttaagttcanattcagtagtacgctnntgtttcccacaacanaacacactgtgatgttttaatgtcatatngagatatngttattacgatcttcgactctatgatanggtatgacacatatggag

SEQ ID NO: 167529 - DNA, 363 bp, Glycine max
  unsure (1)..(363): unsure at all n locations
agatttacaagacacgcatgatgataaaaatcaaagaaaatagacgtttctttggcaaattgactaacacttaacaaaattttcgaaattgaaggaacatgtagtaacttgtgaagtttanaggttatgccaacatcattaggagaaataaatgatgaagaaccacgtgtagaaatacttaaaccttcaccattgcctatgaatatctaatctggtccatcaaagtgggtgaattgtctaatactatgtgagtcttcagttacatgaaagctggccccagaatctggaatccaggtggtaccagcttgcccattcccttgagaggttgaactagtgagcatgacattgagtngactatgaatt

SEQ ID NO: 167530 - DNA, 354 bp, Glycine max
tctacttctgtatattacaatcgtgtcagaaattagaattattggtgctttacggaatgttcggaagtaaggattttaagaaaaagaataaaggatgacaaatagttgttcttcaattaaaagagatatattatatttatataaaaaaaactaggacatctatataattatcttcttgatttgaagaaattatctagttaaacaaatatttatttaaaactaaatatctacctcccttcttacctttttgttgttatcaaatcatactccaacaacctttatttatataaggctgttgctgatattctcagaactgtaagctgtaaagccaaatacactacacgtaaacctgat

SEQ ID NO: 167531 - DNA, 395 bp, Glycine max
  unsure (1)..(395): unsure at all n locations
agaatgactacaacacaattatccagaacatttacagaatagcccaatcaaagttttggagaatttgatctaaattacaatttttggaacgaaccagcatggaaaagttcctagaagaggcaacattgagaattgaagcagtgcttccttttgcacctctttcaattgttggtccaagtgatctccaatggttattagatacgagagagagaacatcctcttatggtcttaaaagttctcaaactcaatggaaagaacatggtttgtactctatatttctcatttaatgcaactttaanaacacaaattattcatgaacaaagaaaaaagaaacatcttctatatatgataactgtttaccagtatgaacatctaatgaacaaagatttactcaa

SEQ ID NO: 167532 - DNA, 261 bp, Glycine max
  unsure (1)..(261): unsure at all n locations
ataacaacttaattcggtataaatatcttcacgaactacttggactctctttttttttcactctggttacccacatttggagggcgagatcacttctcttgtgtaacttgcatcgatggctcgcggcgcacgaccacatcagagtgaaaattccaccctaattagtacaagtctgttgacgattactcttcaaatatttgctcgtatcactgagggaaccagcatgataaattacatccancctattggtaaggtaaatat

SEQ ID NO: 167533 - DNA, 317 bp, Glycine max
  unsure (1)..(317): unsure at all n locations
tctttggtcaaccacgcctctctctagtctctatgaatagcgcgcagcacgaaactccttttccctattttttttctgttttttccatatcattctttgatttctcctcgaaatattataacataggtggggaatgtatgcttatgaagatttatgctncttgcgggaaaaaaataaaaactaatttcccaatatattgcgaaggagaagggcaaaaaaatatatactggaagaagagaagcatntggtattcgatggggttgctattcgccatatattgcaatatcacttattgggcatggggttggtaattcgtg

SEQ ID NO: 167534 - DNA, 453 bp, Glycine max
  unsure (1)..(453): unsure at all n locations
actggctcacatggttacacttgcttgcataagatgttttttcaattgtagctatcatgtttactatctagctttaggtaaagttggagaagacagcaaatatagttgtagtcttgnaagccagtgactgttgttgctagtcccacgattatcatcgaattctacttgatcgtaagtttcttacaatgaaagctataagatttccccataaacaaaaagaaattaaattgcctttctttatgtctactttatctttttaaaccgttatacatttgaatctaccattctttaatctctatctctaaattgaatttagaaaatatcaatcttatatcacaacttgaattcttcatcgttaagtaaacatataatatattatatcaaaaatattttttcattgtgagtttatatattaatatattttacatatcaaaaagatttattttgttaatt

SEQ ID NO: 167535 - DNA, 381 bp, Glycine max
ctacctaataaatgcatttgatttttacaaataaaagatgcctctcttctataataaaaagtgtaatgtttgaaagataaacgataaaaaatattgtattaattttgaaacaagataagattttaatgagcattatactaatgtgatataagtgattttgacatttattttttataagatgaagtgtgtgaaagaaataccaacacaagaatttttttaaagtattaaacatgtaaaacttatgttgtttaaggtctgtattgttgaatattataatcataatgcaatattgcgttataagagaagtcttctagataaggtgagataaggggggcagaagcgataatgattatctaaacgaaattgagttttttattaact

SEQ ID NO: 167536 - DNA, 488 bp, Glycine max
  unsure (1)..(488): unsure at all n locations
ctctacgaggttggagacgctgctattatntatatggtggagatagtangctcatgcaagacaaaaggacagcataaagttgttgtgcacatcattcggaagagattatccaactcatacaattatattcacaaattgacgatgagattcgtctagtgagacactataatgagcaaatgagtcgtgcatatagcaacaatatcagcggttggaatcaaatgtcatgcaattcctaccacccaacacacattctttgttcaanatcagcagcataacaaccaccaagaggagaaccaacatcatattgattagcatgagcaatatgaacaccaacaacaactagactctcctgattatgacaattatgagattgttgtgaaagacttattacttgtcctttatatgaatgttgtgttaaactatgatatgctctaatttatgaatggtttgactcggtatattagaataatctatatgacaacgtttgc

SEQ ID NO: 167537 - DNA, 284 bp, Glycine max
  unsure (1)..(284): unsure at all n locations
tacgacagtcaccgcttcaagagcgttgtacaccagcagcgcttctaagccatcaaaggatggtcgttttttcgggagcgacgcgttcagctcatggacgacgagtatactgatttccaggaggaaatatggcgccggcggtgggcaccactggttactcccatggccaagtttgatccanaaatagtcctttgagtttacgccaatgctnggccaacagaggagggcgtgcgtgacatgagatcctgcgttangggtcagtggatcccgttcgatgccgatgc

SEQ ID NO: 167538 - DNA, 396 bp, Glycine max
  unsure (1)..(396): unsure at all n locations
ttcgaaagccacattaactatgtccttatatattccttggaatagttagtcacgcacggnggagtagccacaatgtcatcaggatgatattatcggtttgcaattttccaatgcattctatttttattttgtggtctggttaggggttatnttgaaccaatttgcttaactttcaatcctctttttgtgtgacatcagtgagaatgacttctatttgtttttcacttcatcacgctgaagattgaccagtaattcaattaggccaagaaaagctacttcaatgggatcactcaacagttcatcacannaatacttttacctgtttagtgaatctgtacaatacgacatctgtcgtgaattctaatctcaagctttttttaataacatctgatcttt

SEQ ID NO: 167539 - DNA, 374 bp, Glycine max
  unsure (1)..(374): unsure at all n locations
tgtcacatcagataatgtcaaaaatcgtatcaaattattgagatcgtggttgggatggcactaagcacatgatcacagttgagaatgaaaatgcttggaatgaatattgcactgtaaatattctttaaatgatgctatttgttattcaaagtagattggatttgactttttctttgttttctagtcgcataaatcggctaaaccatttcgactcaaggtgcttcaaatggcgatgatatagtggatttgtgtgctaaagatagagccaccggtcatggaggatgctgatgaagcgatgagtagacaaacaaatgaagtggaattcatggngttaggtgctactgccatagatntagaagaatcaagctctaata

SEQ ID NO: 167540 - DNA, 312 bp, Glycine max
  unsure (1)..(312): unsure at all n locations
tggaagtgtgtttctgaattcatgagactctcttgcatttggctcattacaaacaagcttgagcttttcagttcacatatcgactcgttagctagtcggctcaatgtacatttnttattataattattaatacgaatattacgtctatcagtatgtaatttttttcatttgactgaatattaaaaaaggtttattaattgatagtcacaaagtggaacataattgaggttaaaatatttaattcattaacactaacggtagaattactaattagctcattaaacttgcttcaaaaagaagaatgaattcgat

SEQ ID NO: 167541 - DNA, 461 bp, Glycine max
  unsure (1)..(461): unsure at all n locations
atttattattattattattattatctgttgaggacttacacgcgcgtggtacagtccaagatgggaaatgaaagacaaagacattcctctctggaacatgacattgaatggattaaagacaaaatagtgatcgagtttccacttccattattgatattttgtcgttggttcattcttcatttaactgtcaatcaccaccgctaaattcctcttacgcgattacatataactgcagtattggatatttaatataatagtgtaacaagtatatntatattcttaatataatgtttgtttaatttatttttcttaacccaacaccttttcacatactagttaatactcactcctcagttaagtaaagaaaaaaatacagtgtgaacacaatttactttcatgctatctaatgatattatcataagaatattcatatatcaatcgagattttattttctaatatt

SEQ ID NO: 167542 - DNA, 137 bp, Glycine max
tcttcaaatatacaacctaggcttctttagactactgtggccaaaagtgaaaatctgagccctgggaggaacctttttttggtttctgcacagattgcagaataaactaccaattgacttaagaaaaaatgaatcga

SEQ ID NO: 167543 - DNA, 342 bp, Glycine max
ctaatttatcaagtaccccatgtgttaatcgattaaacttgtttctgtgataacaactatatataccctcaatagttgattctcataagtgactatcgcagtccaatcttatattagggatagaccatcttatcttggaaatagaacaaactcttcattttcaataagagattcataatgatcagaatttatctattcttctcatgagtgtaccaaggaaagaaaggcttgaagatattatgaattgctcattcatgcgtattcaatcctagatatcattctactcttatttatcttgatatggttatcaacggatatgtgagttatagggttcaactctga

SEQ ID NO: 167544 - DNA, 69 bp, Glycine max
acgtcggtgaggcaatcggaccgtgcacagcaagttgtcccagtctcttgccaatagaaccgccccatg

SEQ ID NO: 167545 - DNA, 360 bp, Glycine max
  unsure (1)..(360): unsure at all n locations
aacacaccaaatgaatatgatgatggatggctcaaattctcacacagggtaactcatcactttcaaattaagctttcanaactatcatgacatgtagaggagaatcaacgatttcaagtcacaaaatgtctaanactattattttcaaaacaattacccatttcttgaacatatcctataattcanagaanaacatgcaaagtcgtacatgcacacaanaatgacccanaatattaaactaacaatccgacgaaactaacaacatttacatagtaacaaaacccagaagactagtcaaaccaaagaacacgtcccccctacttaaacaacacattgtcctcaatgtagcacaattaaaag

SEQ ID NO: 167546 - DNA, 272 bp, Glycine max
tctacgaaacgtacgaattttttagcgctcgcttaaatttttcacgaacaatttcaaacaatcaaagaaagaatgctaaaggctgacccttcttctgcttctccctattatacaaatagggagggggtgcgccactcgccagcagctaactgccagcagcaggtgttctcaaacaacgctttggagaattttgaggccaagggctgggcattgccccatttacagcaccccttgtttttgtatcttttcaagtccgactacattctacaact

SEQ ID NO: 167547 - DNA, 227 bp, Glycine max
tgacttcaaggatgggttcctaccaatgttggagaacctgaggaagtcattaagttactaataccgggagacaaaacagggtatgaacaacatacattagactttataactttcccttctttcttaatggtaaggcatgagactggttgtgctagtacctaagaacaacatcactacatggaactaatgccaccagtaccttcttaaggaagtatttctcttctatg

SEQ ID NO: 167548 - DNA, 411 bp, Glycine max
  unsure (1)..(411): unsure at all n locations
aatctcaaagaacttcacataggtaataacatgtntaatggttctgttcccactgagataggttntgtatctgggcttcaaattgttgaattgaataatatttctgcccataggagaattccttcttccttatgtcaagtcacggagctatggcatcttgatctcagttgctatggatgctgaagttcctggagtttgaggcccagaattcctccaaagaaaggataagataaggaatagagactttgatttctgcttgcgaattcattacatggattggctatttataagcttaatttgctaaatattcgctgctgtggctaattcataacattctcatgcccttcaacaacaccttgttctcaaggcgtgggacctcaattatacctcgaatacacagttcaaaataaa

SEQ ID NO: 167549 - DNA, 344 bp, Glycine max
  unsure (1)..(344): unsure at all n locations
gcttcattcccgagagcatttcttatataggcatttttgtctttgctttcgtgttgcttatngaaaacgncatttcttctcctttctttcttccagacccatttctaacatcccaagcactttcttcatcacccacagccaccattagccaccacaaaccatcgttgttctccattgaaaccccacactgagaggaacccttcgaccgaagcgaaatcttccaacttggctcgcgggttcggtagagaacgaaaccctagtctgacctttcatttctccttcgagggaaccatggctctacgcttgtttcttgttagtttcagcttgtctgtgcatcttttctg

SEQ ID NO: 167550 - DNA, 340 bp, Glycine max
  unsure (1)..(340): unsure at all n locations
tcataatgcttatatctctctgtctcaacaattgccccgtgttggctcttccccctcttctctaggctttctacatctatcaattgtgtttntgccttgtaacttgactcctcaatcatacaagaaagatgttctgctgtcttcttctcattcgaaagctcaggttctgctagagccgttacagaatctgcagtccatatgctctctttgtaccttccaatatcccttcttgctctgtggagttcccttgttcttgaagagggcttctgaggatattgagagaanaaaaattaagatttactataagaatgcctcaattagtcacaaatattaaatacac

SEQ ID NO: 167551 - DNA, 289 bp, Glycine max
  unsure (1)..(289): unsure at all n locations
actgtgtcgcttactgcttagatatgactttcatcatatagaatgaaagaaacgtttacaacattagacaaaaagaattaagaatggtcaaataagacatttaaaacttccttttagtgagctaaagcacaagtttcttactgagtatgtggatgttactttcttgattntttttcattccttgagaatagagtaactattctatcactcttgcattgngaaccaagtgcgaaagcacttgtcttctcaggctgcactacttcaaaaccagattaacatcgcatattac

SEQ ID NO: 167552 - DNA, 374 bp, Glycine max
ggtgacaagtggttgaaaataacaatttaatgcccaacttgctccacaaagtcctccaaaaatggcttaggaacttagagtccctatcactaacaatgctccttggcaaaccatggagtctcacaatctccttgaaaaaaaaatcagccacatgggaagcatcatcaacttttttacatggaataaaatgagccattttagaaaacctatcaacaaccacaaaaatggaatctctaccattgcttcgttttggcagccccaaaacaaaatccatggataaatcaatccaagggatactccggaatggcaatggagtatacaatacatgaggctttaccttagactgtgcccttttacatacaatgcaatgttca

SEQ ID NO: 167553 - DNA, 263 bp, Glycine max
  unsure (1)..(263): unsure at all n locations
cttgatttacaagncatttgctttatatggacactctatgcaaaaagntacaccaattacaagttttgagaacaaaacatgcgatgagctcaacctaccactacatctaattatggggtatgtgagatagtctactatgtgtggatatttattgttgggtgggagcacctnnctctcgacaacctacgactacatataatatgagcttaggaagtgggagtattgggtattgaattgtttagagcttatcttttttgttgcta

SEQ ID NO: 167554 - DNA, 483 bp, Glycine max
  unsure (1)..(483): unsure at all n locations
ctaagctgtgctcatgccctnngaaatgattgagtgcgtgttaccatggctgtgttgatcacttaatcaaactgaagttagatcatttcttcagaatatgtatatggcaggtgcagtactgattcttcacataaacgtgtacttctcattatcttgttactaatggatggnggttttcattnttntattctgctgctgacatagagttatgtgatgcagccccagctacggatcatgcattggttacccttttctctggttgggcatgcaatggatattctaggaacagttgcttctattcaagcacaacaggtttatgtcctgataggagattgatggaaataccatattgcatgtgtgaaccttcattcggtctcaatgaaaaatcttcaaccattcaacaagaagatgaanatggctgtattggaccagtcaagcatggaaagcctgantcaaagcaagacaatgatgttgctaacctga

SEQ ID NO: 167555 - DNA, 344 bp, Glycine max
  unsure (1)..(344): unsure at all n locations
caccatttccacttttatgaacctctggacttctgccaatcctnccaattttatctatattggctccattgcttcgtatctcgacaccttttcttttcttcccagaagaaatattaatacctgatttggtaagagggctctgagctacttggagtgctgaatggtagctggtatgaagaccatgaccatctaagttactcttgtgagacaagtcttgcacattgggtgagtcttgcagtttcttcccagaagaaatactaataccctgattggtaagagggctctgagctacttggagtactgaatggtagctgttatcaagaccatgaccatataagtactct

SEQ ID NO: 167556 - DNA, 443 bp, Glycine max
  unsure (1)..(443): unsure at all n locations
ttatctntaagagtatacacatttatgatgcatgtttcaaacattcatacantaatggttccactgaacctcacataaaaaaatgtacgcccattctcgcctcacatagtctaggtagctcatggtcaaaatacgactcatacccattctcgccccacataggctaggtcacttatctcaatggcctctaatcacaactcaccatatctcttgttcatcacatgcacgacatanatagatatgtgttccttccaaataatggtcagacattataacctttatgatgcaatcttatcctccaagggcattggatagaagactctaagaagaatgtgccagaaatgcaagagaaagccctanggttctcatgaaccttatggtagaatttggcccatgggctaagatgagcccacttatctctgtcatattagaataaggttcat

SEQ ID NO: 167557 - DNA, 340 bp, Glycine max
caacacacttgctcaaacccatgataggaaacacaaactccatcataatcatgcactcaattcaaaatgaaaacatacatccatttttcacaataagataaaagtgttgcacttgcatgtcatcaaaaataagataaagcgttcaaaatgcttcacgataagcatactaactattcatagatgaaactagcagtatatatagacataaaggaaataatgttcgaaaaccagaattataataaatcagaaagcacacagtgtcatcatgaataaaaattcctgtgactggaccttgatgtcctgtatctgaacattcttctcatctgttagatgccatact

SEQ ID NO: 167558 - DNA, 322 bp, Glycine max
  unsure (1)..(322): unsure at all n locations
atatctctaagggctaccgtgtctaccacttgcagacttagaaactcgtcatcagtcaagatgttgaagttgatgagtatgcttcttggaattgggatgaagaacaagtggagaagaacgttcttatacccgctcaactacctcaagaagaagctgaggaagaagacctaggtgaaccaccttctccttcaccacaacaacangatcaagaactatcatcaccagagtctacttcaagacgagtaagatctttggtggacatatatganacctgtaacttggcatacttgaacctggaagctntaaaaagcgtcaaacaaga

SEQ ID NO: 167559 - DNA, 306 bp, Glycine max
  unsure (1)..(306): unsure at all n locations
tgctgttcgacgggcattgttcacggctagccaagcagcttcaaatctgtacagttccaagggctatcttgcagtgtatgttggggagaaacaaaagcggattgtggttcccgtatcatacttgaatcagccatcattccaagatcttttgtatcaagctgaggaagagnttggatatgatcatccctcgggtggcctcacaattccttgcagtgaagatgttttccaacatataacttctcacttgaattgagaccacanatctcactgtgggagactcacatagattagtagacattttacact

SEQ ID NO: 167560 - DNA, 391 bp, Glycine max
  unsure (1)..(391): unsure at all n locations
tcatttcatttattccacatgaatctacgttntacatatccctctatttctttgtcctttttggattatggaccctaagatagtataccgcgtgacttaaggtanaagtatgttttcttagtntattttctgcataaaagtaaattaaataggcccttaaattgagaaaattcaataggttccttgactaatttttgatcattcgatccttatactaaaaaagtatgtcattgaagtaactttaacagctaaacagctagaaatgtactttatgacatattaaaattccaattaactacgttaaaaaatatttagagactattgaaattcccacttccaactgtgataacctacttatatttgcttaacgtaaactgtttatgtacacttt

SEQ ID NO: 167561 - DNA, 383 bp, Glycine max
  unsure (1)..(383): unsure at all n locations
gttattctggtcgagaaaaatatttctatttaccatttctggtttcaataataattaccaaaatatcactatttttcactttatttattgtatattcaaatttgtaattattatttaaaaccaaaaattcaagccgaaaatattttctcaaaataaataggccctanatgtgtctctattgaattgaaatgtgctcccaatcanactaatggtcatcatanaactttttacgttcagtttctttggagcaatntaaccatgatgcactatatgatagcaaggatcatggaccatccatganaagtacattcattaacattngatgcatgtaaaatagacatccanggcacatgccacaggtcatacccatagcttagttatca

SEQ ID NO: 167562 - DNA, 469 bp, Glycine max
  unsure (1)..(469): unsure at all n locations
tcacttgagttttgaaattgtgtattgtgtctctaggaattgcataaagnggaataaaacattgtagtcacgaaaatgggtttgtgatgtctgcgttcattggttcgtnttgatggggaggattgaggaaaaataaactttgtgtgatggggttgtaaatgaccaaaaatgatgaaaacaacgtccaagtgagatgcatgttgatcgaggattgatgcacatgtgatggtcatcgcacagatgaagtggatcgtgtgggatgtccaatcataactctggttatgtgatacgtgtgattgtgtgaggcaattgtgcccgtattggagatgagattgtcgtggaatgatctgtagcatgtcaaaatatcatctcgtactatggcgatgganatcacattgatccattgggacatctcgatggggagtgtcgtttacgagctagtccttaaagttatggatgactcatacgg

SEQ ID NO: 167563 - DNA, 351 bp, Glycine max
  unsure (1)..(351): unsure at all n locations
ctacaagttctcatattacatgtcatgccacaccgaactcatccaaaagctagtttgaacatgctgtcttacaaggattctaaagaaatcttaagagatatcaaaatggaatgaaatcaaaaaggtttaaatgctgagtcttaaaaatttcaggggttgaaatgaaactctcagaacttgaatatggtgagcacacgacaagtttgaataaagggttcgataagggcaatttctctagtgtcacaacatagtctaacatactatatccaatttcacaggcacgtctttgaatgtgtcaaaaacacttnataatcacttggaagtaggtatatattaatattatagttatca

SEQ ID NO: 167564 - DNA, 488 bp, Glycine max
  unsure (1)..(488): unsure at all n locations
gcggactttacatagatttacgtggtacgaattctttaacacttattgttggtggtagttggntcttcttaaatatgggcaaattaatgttagtagtagccatagcttatctatgtaccaccatattccatgtgattatgtattgagtacttgtgactcaaaaatgtttggctcacatggcttttcttaatactttatttatatgtgtggttgaaggtaactataaaaagatgtttacattaattaagttaaaattgaaataacaaatatcacactagaaggaagttgaatagtgttgtgaataaaatgtgaataggttaaattattattaggttctctaacttattttaatgttaattaggtcttctattattagtatctaattggtcctctattattatatgattcaatggttatcttatcatttatataacatcactaccatcattattagaacaatcatcattgcatgtcaattgactgctaca

SEQ ID NO: 167565 - DNA, 262 bp, Glycine max
  unsure (1)..(262): unsure at all n locations
tttgattcactatacacacctcaatcagtataaaatgaacagaaacagntcattattcacatataactggcagctcaagtgtatcttaactaaaacccataactgattaaataaacagagaatttcagaacccgcaacatcaaccctaaaaccacatctattntttttcagtagcagatctaacaattntcaagtcctcttatatcttcaagcagggagaaaaaaaagcttaagggaccattntttcccgcgagactaattt

SEQ ID NO: 167566 - DNA, 328 bp, Glycine max
  unsure (1)..(328): unsure at all n locations
gcccattagnattatttgtatacaaatatattcttgtactcctattttcattagacaaataaaaattaatttctagagaaccaataacagccacaattgtaactagtaagaagagggttcacaaaataacaaaactacagtctatttaaaatcgtaccttccaatagggtgagtggtaccacttttcattgctgaagcaacagcaagagcttctttttcacaggtgggaatgcaacacgaaggaacatttgattcgttgtttctaacatgatgaccataaatgggctcaattggcttgaatacgagtccaccaatggtcaatgtccct

SEQ ID NO: 167567 - DNA, 273 bp, Glycine max
ctctttgtattacaactgtgaatgttatatgacaatttcaagaaacagtcaaagactatcatgcagcaagcaattcacacatcagaagggcaactactattcaagtgtagaaagaagtggcaccatatctaaaacaagtatgagaattttggctaaatacctgtaaattaggccgaagagcctcaagtggtcccttaggcttctctccgcctttgctgttcatgggagagcacaaaagagtgtcagaaaatttattatatgcaactattacag

SEQ ID NO: 167568 - DNA, 389 bp, Glycine max
  unsure (1)..(389): unsure at all n locations
tggtattgtataatattataggctttctaatatctgttattatcattctttncggggtctatcctctgtgagcatgccgactatgcatatcttgctaagcgttgagtattctcaatatacattgctagaagtaatcttcaataagttgatacttcggtccaaaatcgtttatactgttgcatttctttccgtcatttattggctagtggttatatcatattgtgcttgcttggaagtaataatattctatgtaaaatatggtatggtatatgaaatgacgatgcggctattcttaagatcttgtgttatctttacttacaactgatgccctagagtaattatacaacaacattcactgtagctggttcattgatatcagacatatgatg

SEQ ID NO: 167569 - DNA, 293 bp, Glycine max
  unsure (1)..(293): unsure at all n locations
caagtaggcctggntgctatttgcacccctctgtttactaaatacatccncctgcctttttntgcttattctttttccgtaacgttacggaactttacgaattccgtaacgatacttgttttccttccgtaatgttacggaaccttacggattacgtaatcaccccattattggcttacggaatcgtacggaacctcacgaactgtgtaacaatgcttgcttttgatttccggcatgttacggaacttcacggatcgtgcaacaatgctctcttttaacttctggcatattat

SEQ ID NO: 167570 - DNA, 180 bp, Glycine max
  unsure (1)..(180): unsure at all n locations
cttatttaggctgtggagagcatcatccacagaaaatgggtcaaggcaaatttggttcaaatttgggggaggcacttggtaaagattgaaatggttaaataaaataggatatacacacttgctttggtttctgtgttaanaaaaactataagtataaataaagttaataagtgtgtatgc

SEQ ID NO: 167571 - DNA, 311 bp, Glycine max
  unsure (1)..(311): unsure at all n locations
cccacttttactaaatacacccnctgcctttttttttgtgattctttntccgtaatgttacgaaactttacgaatttcgtaacgatacttatttttcttccgtcaggttacgaatccttaccgaatatgtatttactcttttttagctttcgaagaagttacgaaaacttacggattgcgcaaaaacacctcttttcgacttccgccacattacggaatttcacggatcgcgcangcctgcttcctttagaattctgagacgtctcaggacttcatttattgtgcaacaaaggatgccaagtatctcaaag

SEQ ID NO: 167572 - DNA, 361 bp, Glycine max
  unsure (1)..(361): unsure at all n locations
aaggatgccccacattatattccatgacacacaatgcaaaatgatgattnggaaactttattcaaaactggtcatgcatgcatctatgccgacactcaaatgtcaaattttatggtcatgtgatgctagggcgtcggaatcatattctctatttaatcaacccaatgtttccaaaaatgttcttttatcacattgacattcatccgattccattttggcgtttgggaaaatctcacacattcaccttcggtgtaacacattttcaaaactagtttatcagtaattttttcaaaaaagtggaatcgctctttcaaacctgttgttttcactgacactattatttatttttttttttttttta

SEQ ID NO: 167573 - DNA, 360 bp, Glycine max
  unsure (1)..(360): unsure at all n locations
cttgaactcactttactttatgggattagactcttttgtgctctaattggcgaaggctcaatatggggcaatttggattgtttcttgcttgattgagttaaattgggggtttggatgagatggccctatgcctataatgcgttatgaagcaatgggacatgccacattgtccccgttctcttgctattaatgcctaagcgcgcgcccaccaagagtatggtgaaatgcctcaatggcattagcgcgtggatttcgtagggaaacagcccaatggggcattttgtgttgcacatattttctattattcgggacatgcattcatttctgaaagggctagagtaaangccccacatatattct

SEQ ID NO: 167574 - DNA, 224 bp, Glycine max
ctgagctcacgtactcccacgtagcccatattctcggttctctcaacaccgggtccgcatcaatcctctcaagcttccacaacaatcaagcaaaacaacattcaaacagcacaagctatcacagtcaagcaaaacagagcaaaggcagataactctgctcaacacatcaaccaaaatcacagcttttctcacaaatagaccacaggtaacaatccttcgatcca

SEQ ID NO: 167575 - DNA, 346 bp, Glycine max
gggtgttgacatggaagtgatttgtggaggagaacgttgttggtgatgttggttggttcacagacaaaaaggatgttgggtcagtgaagcctcgccagatttggttttgcttgtgagagacagatgtggttttttacgggtatatatgttcgatgtaggtgcacgaagttaaaggctaggtcttatctagacaactttgagcacatatttgcaccagctggactctatatctgaagatcatattacgttgttgttggaggataaatctatctataatatattaaagttgagcttctcacaacctcaccgaaatatatgatttgaaagcatgagaacattctacgtt

SEQ ID NO: 167576 - DNA, 374 bp, Glycine max
  unsure (1)..(374): unsure at all n locations
agcgtcgaggagagccatgtngtataacacctcaatcccatgcaaacgacaataatcaattttgttcttaatagcctttaacaagtaatgatccccaacgggattttcgcacggtttcggcgacgacccagttacgagaagcacgcggtgcttgttgggtcgaagganattcgagaaattgggattctcgcgaagccagcgagatctctgttcgtcccagatcgatattttggggccgagacgatacgcctcgtgtgggttaactatctcgcggatctcgtcttctgtttcgtcgaccaagatggtggtgatgtcgaaggcgttgtaattggtggtggaagtggaactttcaaacggcgtcgtngtggaatgga

SEQ ID NO: 167577 - DNA, 284 bp, Glycine max
tggcctttcatgcagcaacctggagcaattgagcagcctgaagcttatgctgcaaatatttacaatagacctcctcaacctcagcagcgaaatcaaccacagcagaacaattgtgacctttccagcaacagatacaaccctggatggaggaatcaccctaacctcagatggtccagccctcagcaacaacaacaacagcctgctccttcctttcaaaatgttgctggcccaagcagaccatacattccttcaccaatccaacaacagcaacaaccccagaaaca

SEQ ID NO: 167578 - DNA, 315 bp, Glycine max
  unsure (1)..(315): unsure at all n locations
agtacaattcatcccatcttcttatatgttctgactacttcagacaagggtttanatatcgcttgtggcacgttatggtttcattatgtttggtgatatcgcgagagatcacagacagatatgatcgattggtcccaattacaattgtgttgcgactgtggacagttaaaaaaccttgatgttgtagctgaatcatggtggcgaaccattttttaaaacctggatgggatatgatgtaagcaccattggagcttgtatgcctaggatcttcttcatcaatggattcctttgcttcttggagatgaatggtacgta

SEQ ID NO: 167579 - DNA, 267 bp, Glycine max
  unsure (1)..(267): unsure at all n locations
actctgccttggtactggacccggccaccactgattgctttttatatcacccagataccaaataaggaccaagaaanatggcagcaccagaggatgaccttctggcatccggatcagaagcccggtcagcatcacaatatgcatggacagagtaatgtgataatgagaaattacgttgcatatgcaaactaaagttgagagaggctttcagatatctaaatattattttgattgccatcagtgctgttcagtgtgttactcatgaag

SEQ ID NO: 167580 - DNA, 153 bp, Glycine max
tgctatttatatttcggtgtcttgctcctcgttgaatcatcttcatagagaaacaacttgttttggactcttaatatataaatacatttcaactgtgtgtgaatgggagatactctagtatattattcaaatatatgatagtacgaatcagtt

SEQ ID NO: 167581 - DNA, 400 bp, Glycine max
ctaaaaatgtcgaattcaaagaaattatgaaagtttctttgttcaattgacaaacaaatcattaaaatatatgtaaccaaatcatgcaaaattatctaactgatgtaaatttctaccgaccaacaaaatcattgaaaatacgaaaatccaccaataagacaaatataaaaattgttatgggtaagaaaaaatggcgaacattaattttaaacacaataacagataaaagttatgaatcatatatacacgaatgggtcaaaattgcatgctatgaaaaaaagtcccacaataaaatttcaataataggaacttatgcattaaatataacatgaattaacgtcaattaatttaagagaaaaatacttacacttctattatatatactgaatcacgactatgt

SEQ ID NO: 167582 - DNA, 390 bp, Glycine max
ttatattttaggatatgttatttatggacctctccgttatcgcacacggtggtcaatgtctagcatatctgtgttacagatgtggattctgtaagtcattttaaattacttttaattacctaagttattgctttcaattcataaatatttaactttgacttaacataaacaggcatctcactgatacaagtatgcaagcggggaattctgatatctatggattcctcgagccacagtccatttagaggtctgggcaatcgcagtttgagtttgaaagttacataaagacttggatgcagagttcaaaacgggatatctatcttggagcctacctaaatgggtaagtgatgcgatccctcctaggaagggaccaatcactagaaccatgag

SEQ ID NO: 167583 - DNA, 444 bp, Glycine max
  unsure (1)..(444): unsure at all n locations
gaagaagaagaagaagttcanaaagatgttcaaagagattcaaaggatgtaatagtatatatataaagttattgaaattcaagtcaaggtcttgcttttatagactcctcatgtctggtcaagaataaccattgtaagagttataaccttgagaaaaacctgaaaaccattggaagagttacatctcttgatttttattcaaaacttgtcactggtaatcgattaccaaaaccatgtaatcaattacacaaataattttatgaaaagatgtgactcttcacaattgaatttgaatttcaacgttcagatacactggtaatcgattaccaatatattgtaatccgatacaccatttaaaacacaattagaacgttgcaaattcagttaatagcttttgaaatcaaacttttccactggtaatcgattacaggaaactggaagtcg

SEQ ID NO: 167584 - DNA, 491 bp, Glycine max
  unsure (1)..(491): unsure at all n locations
actctagcanaagagtatgcacatcgaactgatattaaacagaattgtctccatttctcatgtgcatatacaaactcagaagactctttgaagcccactctgagctgtcatctccttctttggaacgggacttaccccgtttcttggcctgttttcttttagaacgactcaaatctgcattctcataggagctatctgaatctgatcctctatcgttagtggcatcaaaagtttcatccagtgattcctctttagaaagaagcatatcagatcccttccaaggcgttntagcttgagtgagttcatcaaatgtgagagatagtattttttttatatctatgtagtacgtccttgaagagatactcccagctgtttctgtcatcanaatatatatgtccctgcaccaaacatgaaaataagtatcagtggccaacaagagatgtcctcggtaatatcactataaattcacgtctacaattctacattttatc

SEQ ID NO: 167585 - DNA, 418 bp, Glycine max
  unsure (1)..(418): unsure at all n locations
tttcattctcttctccctttgccaaaaagaattcgccaaggactaaccgcttgaattctttntgtgtctctcttctcccttttccaaaagaacaaaggactaaccgcctgaattcttctgtgtctcccttctcccttgtcaaagaattcaaaacgacacagtctgagaattcttttgattcttcccattccctaatacaaaagtgttcaaaggactaaccgcctgagaattcttttgtatcctcattcacaaagtatcaaagatttaacagcctgagatctttgtcttaacacattggagggtacatcctatgtggtacaagtagagggtacatcctttgtggtacaagtagagggtacatctacttgggtttcactgagaacaagagatggtacatctcttgtggatcagttctagt

SEQ ID NO: 167586 - DNA, 364 bp, Glycine max
  unsure (1)..(364): unsure at all n locations
gcttgtgatcattggagcatttagtacttgcattaatggcatatncatttgcatgctgaataatctctntggttggttttcgtatcgagcactacagtaagaaatcacttcctttgagtcaaagtagatttgtaatagcaatgcatgtcttttgatgttgtttgacaactccacaaaacttacatttgttcttcataggattcaaaaagatcctangaaaatgtcttatgatacaattcttgcaaaatgattctcagacataaagtattaaattaaatcttaaatattgtgtatagcccatgttgctaaagggttttatcaaatggtgatgaaatntatagtttatcaaatnttctattattca

SEQ ID NO: 167587 - DNA, 414 bp, Glycine max
  unsure (1)..(414): unsure at all n locations
cagcactgaaaaagtgccaatngaccatcaacactgaccttgctgtttngcacactactnttatcatccttggactttgtgtagaaagaatgctaatngatatcatatctcttccaagttggaacattcatatttggacccacagctagaaatcttaatgtgttngaagcactgtcatcggtgaagattgattgtctaaaccagggtatgaaagttctattgtgctcttgcaacaacctcatcatgtttatttttgagtgaatacgactaagatgttgtttgtgagcatctatgtaagggagtgtctcagctgtgttgtgtaatacatatanatgagcatgtgccagctgttggcgatccatggttacaacattgaacccccgtgtgcccctacctttgattgtgcagtcatga

SEQ ID NO: 167588 - DNA, 388 bp, Glycine max
  unsure (1)..(388): unsure at all n locations
tgaacaatatactngtccttcatttaactgtctttgggctnggcattcactctcaacaaagtactttcgacacctactgtacgttgatttgaccaatgctgttatgggaatgttgcgacaatccttcataaccttattgatacattctgagaggttggttgtcatgtggccatatcgacgtccttctctatcataagtcatcgtccatttttccttggaaattagatcaatccatgttgctatggctggactcatttgacgaaatttttctaaattttgatcaaaaatgtgcttgccaggagtgtangctgcataanattagttatgaataacaatcttaagtatatatganacttanataaacgtgaccatcaaatatgaaatctta

SEQ ID NO: 167589 - DNA, 288 bp, Glycine max
gatacatatttcctcctttaaaaggtttacataaattttaaaagcatttcagactctccattggttttggtttttatctattttacaataattttaaataagatgtttgattttttatttttagcaccatacatcgcatagtataaaattaataatttactatgacaattttataagactatttattatactaatacgtattatctatacacctagttatattaaataactattattatcaatatttactttaatctaaaacataattatatatctaaataaattttt

SEQ ID NO: 167590 - DNA, 433 bp, Glycine max
  unsure (1)..(433): unsure at all n locations
gcttcacacatccaagcaaaacaacgttcaaacagcacaagctatcacattctagccaaacagagcaaaggcagaaaactctgctcaacacatcaaccaaaatcacagcttttctcacgtaaagaccacagtaacaattccttcgatccaattcgttaaccgctggatcgactccaaaattttactggaagtctatagtgtataagcctgcattntgaccgttgggatatactagcanacatccagaactcattctgcactagactttccacagccaaccacacacaagcattnttctgcacttgtgcaaaattctgctgcacaatttcacagcaaatactctgcataagtgcagatttcgaaaatcacccttcctctcatccaatcttgcccaaatcanatcctacaagtcccaaatcatgtatcatacatg

SEQ ID NO: 167591 - DNA, 206 bp, Glycine max
  unsure (1)..(206): unsure at all n locations
atatgccttggatagatgcttatataggatgctctattggacgaaaagaaagagagaaggtggagcacataattgaaggaataatagagggagagaagtggaactatgaagtgtgtctcataatactntcattcatcanagttacaacaagtattacacatgcttctacttatagactacgtagctttcttgagaagctttcttga

SEQ ID NO: 167592 - DNA, 157 bp, Glycine max
tttttttaaaatcaaaatggggcttttacacctaaattctcatgcctaaacatctctagatacactaatatttctttgtttggacttgaaatttctttgttcatcctactatacgttgtcattatcacacttacaatacatatctgcgggggggaga

SEQ ID NO: 167593 - DNA, 417 bp, Glycine max
  unsure (1)..(417): unsure at all n locations
tcgccaagtaccaagaagagtgaggtgtagccacggcccacgagcatagaatcgcggatgagtatgcccaagtatacgcggaaaaagaggctagaggaagggtgatcgactctttacaccaagaggcaaccatgtggatggatcggtttgctcttaccttgaacgggagtcaagaacttccccgattgttanccaangccaaggcgatggcagacacctactccgcccccgaagagattcatgggcttctcggctattgtcagcatatgatagacttaatggcccacataattagaaatcgttaggaaacttgtatggtctctcacaccttgactagatatgacttcctttctgaaataaaatgagttggtcccatgtttctactccaaaaagcttgtgcaaatcaaatccctccta

SEQ ID NO: 167594 - DNA, 279 bp, Glycine max
  unsure (1)..(279): unsure at all n locations
cctggacgctgggtgaattcactagaattatgctcatgttacggattcanncagtcgcttagattgaaaattcacgatgtcagactttgaatcccgaatgcataaatatggacaaattagtcattttttgaacataataaaactattttttttgtctcatgataattatcataaaaattttataatgcttgcgcccacaataacacacccacttcaactgacactttgtatcgatatttgatgatttcttttataaaaactattttgatcatctgtact

SEQ ID NO: 167595 - DNA, 316 bp, Glycine max
  unsure (1)..(316): unsure at all n locations
gcctatgtactgcccagatcacctctntatatcttcactgccaaaacaggaggtgtatgagagttcttatctttgttggtaagggaattctttttaacaacaccgtaatttggtaacaatttatgccccagtgggactcacattgtcacattgtcaattacgctttttttttcatactaaagactttttggctttttcngctatggatngaacttgtattctttttcccatttntttgggtaatgctggttacaccattctgatttatccctttgtaatttttatcctaataattgggcatatcttctgctattat

SEQ ID NO: 167596 - DNA, 416 bp, Glycine max
  unsure (1)..(416): unsure at all n locations
ttgcttntacagtcagaagtgtgggatgtggtgatcaagatggagtaagaaagagtactccatgtctgagcgagtatggtcatgttcttctcgaggatcttcacaggctgaccatcaccattaagcttaaatcccctccctgggatgcagagctaaacagccaactcttgaggatcaggccctaagaaagcaaatctacagtaagctggtaatgtctccccctcctcaatgatcatacgggtctttacgaatgtgttgaacgtgtcttcatcaaattttatcaaatgacctctgaccctcacctgctttggtgatttgttctttggatcataaacgttaccataccatcctactatggcaacatcaatgctgccttcataaacctggccatctttcatccatcttcttctcttcaa

SEQ ID NO: 167597 - DNA, 136 bp, Glycine max
  unsure (1)..(136): unsure at all n locations
aggacaaaaatctgtatggctatttgtanaaaaacatacacctcacacttttgcaacaggtgtagattcctgatccatggcacgctgggttactaggttgaccaaggcctaaagttttccttcaagttttttattt

SEQ ID NO: 167598 - DNA, 401 bp, Glycine max
  unsure (1)..(401): unsure at all n locations
cgctttaggattgatttgggttngagaagaggcaaatttgatggatcctgctttgatgaataggaagcctgcggaaaatggagagaatgagatggagggaggaacccatgctgtgactatcgttcctacatggccaaatttcccaccagctcaacaatatcaatacttagccaatattagcccttttcattacccaccacactatcaaccaagaacattcaattatccacaaaggccacccctaaatcatccaataccaaacaacaaccttaacacaaaccaaaacaccaaccagggaaggaattttccagcaaagaagcctgtagaattcactccaattctagtgtcgtatgctaacttactcctatatctactcaataatgcaatggtagccataaccc

SEQ ID NO: 167599 - DNA, 400 bp, Glycine max
  unsure (1)..(400): unsure at all n locations
cacatacatatatttaaatnntacagttcacactagaaggtagataccacaactaggattagcaccaactgattagtctagagaacattgaatactaagttgtgaggaggggcatggtggaatttggacttcaacaacaaccttaagcatctgtgtcacatttctcattgttggtctaaaaccaggatcctcttgcacacaccaaagggcaatcatcaccaatttctccaaggtcttcatgtcatccaatgcctctttgtcattctcaaccaagtcatgaagaacaccttcagtgtagcagtcaaaagcccattcagttaggattgctttctcttcatctgcctcaaattctacactttttctgcatgaaactatctcaagtagcagcaccccataacta

SEQ ID NO: 167600 - DNA, 363 bp, Glycine max
  unsure (1)..(363): unsure at all n locations
aaaaaatgggtgcttgaacaacatggttttgttatttaaattctaaatcgagattgcttccagggaagctaaaatctaagtggtccagatcattcatcttanatgaagtcattccacatggagtttgggtattgaaggatccagccacaaagaggacagagactgtgaatggcagcaaaatcaaacactacttgggtggtgatgttgaaaggctcaccactattgtccaattgtacgaagcttgacgcacaacaagggcatccacctaaaaagacgttaaagaagtgcttctacgacgcaacccaatgtttctaaactttgtcttactctgngatacctgaatcatatgtcttatgttttttg

SEQ ID NO: 167601 - DNA, 139 bp, Glycine max
  unsure (1)..(139): unsure at all n locations
acatgcgtgngaaacgtggtgaggcattgaatctctcgacggcttctattgttcaatttccgcgtctcgatatattatacgcctgaatcgcacatccgtgtgaaacggtatgacccttttcgaattctcgagagccttc

SEQ ID NO: 167602 - DNA, 397 bp, Glycine max
  unsure (1)..(397): unsure at all n locations
ctgangcatgcaagctttgaaaagtgtggttctccactttattactaacccaatccgctagcttagcgagcgtgcgctaagcgcaaggaacaatctacaagaagatgagctatgtacgttcgctaagcgcactgcttcatctcactaagtgcaccgctttagtccatccgcaaagcgagaaaggcacgcactaagccgaaattcacaattgtgtgctaagcggttgagaattgcactaagcgcatgagcataaacaaggccacctatctaagcctaaaatcatattttgtgaaggcgagttgggctgagagctgaagctttgcatgtctagtgattctagagatagaaaggtccaacttcttgagagttttgagagatttcattgtgtgaagatctg

SEQ ID NO: 167603 - DNA, 396 bp, Glycine max
  unsure (1)..(396): unsure at all n locations
atataaattatatnntaaatgtataagattcttatctncnggaggcaaattggactgacattcagncttattttaccatgatctaaccatgtgtcacaatcacatccttttaaccgataagctgaaaaatggatctaaagaatgaaggaaaatgatcacaacaattatattggctaataaacagctcgtctgaattaaaaaactcagtcataaatggcacatataaattcatcnaccaaaaggaacaacgatgtgtcctcttcccattcaatcatctaaaaacaccagcatatgaaataaaaggaaataaagtaaagctcttctttcaaaacttgggcatgtttatataatttcaagcaatctnattcttcagttgcagcacttgcagcactcaag

SEQ ID NO: 167604 - DNA, 351 bp, Glycine max
  unsure (1)..(351): unsure at all n locations
ccccttcctggcnccccnctnccnnctgcctnnccccccctgctgttnctccntcntttattttgccntcactgcttncggcngttccttaccgtcctnnntcacttccgattcagttacgattaaccctttgtgcctaactagggttttgaaacatcacaacagagacagaccattgaacaatggattttcatcattaacattctacagagacataccttcgatggaagcacaaacacgaactccacaaacgccaactcgacaatgtggttgcagtgaccgaagcgcaccctcatttgcgacaaacacgaacctaggcagaaggagaaacacgccctggaggaccctttc

SEQ ID NO: 167605 - DNA, 426 bp, Glycine max
  unsure (1)..(426): unsure at all n locations
gcctgaaaaagtcgccaaatgaccattttgccctctcttttgggtattttccgcattgtcttttgaaacgtcgaanaaatttacggattgcacgacaactggtgttaagcagctcaattcggctggcaagaatccaaatgtttcaaataatcatccccagacgaaattanggtatgacagtcgtcttacaagtttttctaaaaaatttattaataatgaggttcactatctagacaaacatgtttggcatctcgccggtttttatggatttcctaaaagaaatagtaggacgaattcttgggatcttncgcggtctctttacgttgagaggaagaccacttgagcatgatgaacgattaataatacagttaacttgtagggcatgtaactatgaattatctcagtcattggttggtcatcagtatg

SEQ ID NO: 167606 - DNA, 285 bp, Glycine max
gggtttaagggacgcaacattaatattagttgaccatggttgctggtccttgtttgtaggggctgttgtagcctttgtagataatctcccgcttgtagataatacctgggagcttatagataatgttaaagataaaaatttgcttatagataaaaggtacaagataattgtaccttgtagataatgtgtacgctcatagataagtaaatacctgtcaatagataagatattcaaatacatttgaatattagcacgctacacataacctgtttgttggagagtccc

SEQ ID NO: 167607 - DNA, 418 bp, Glycine max
  unsure (1)..(418): unsure at all n locations
atggttctgaccctgcaggatgctgaggcttatgcacaccttctaaatgttctggcacctgaatacaccaatcccttcacattggcagttaaaaatccctttgaaagagcaaagttagttcttgaacatgctgataagatgggttgcaagcgatacttaactgcaagagacatagtggaaggatcaccaaatcttaatcttgcctttgttgcacatattttccagcacaggtgagaataaccaccatctaaacatttagaacattttcatttttggatgtggatagataaatcccaaataaaaaatggaacataattccaggctttcataactattntttttatagtggtatttgtattgactgctattggctatatgctgactaacaaaaaaatagcttagtaaatatcaacttact

SEQ ID NO: 167608 - DNA, 233 bp, Glycine max
  unsure (1)..(233): unsure at all n locations
tgtaagtgggtgaatggaaacacacgtgtgcatgaagacaaaatgggattcactttactagaccttacaaaagttggttaccaggaccacccatncataatggtagcgcaagctcgacaggtgttttatgtagaagatccatgcaactctagatggacagtggtttctcaaacgaaaacaatttctatcaatcaccatgttgatggatcaacacttgatgtcactgacatgcc

SEQ ID NO: 167609 - DNA, 335 bp, Glycine max
tctccgctatgcacgtgcacgtcttgaaggccacacatggctcatgagttccatgtatgacacacatgaagttggtgaggttcaatcccagccattcccatcagaaccatcacatggtaagcttctatgtctcaaaggatgcgacacgcatgtcgggtcatggaactcctatgctttggcatggcctgaggcattgccttataacaccaccttcatgaggcttaacttttgtgtcatataaccattacaactatgacaatttgtggcatgggttatgcgccacggtaccatttgtggcttgcgataagatgaacaattgctcacaactgcccctc

SEQ ID NO: 167610 - DNA, 378 bp, Glycine max
  unsure (1)..(378): unsure at all n locations
ctccatataagctctacaagcaatcttttatcaaatggcttcaacaactgtcatagaaaatacttttttagtagtgattatttttctacaatatgaaacaaactcaaaaattctaactctcttcattttctcttcatcgcataactatatcaatacaaccatcatctttaattactaaatttatttcattcgaaaccttggctatatccccaaatttcattntgggaaacccttaatccaaattgaacaggcatagagcatgccaaagaacaagtctaagaagacaatctgcataatcctcttgacatgcttcatagggttaatgctcttgaaagcgccacaacttacttngccgacatggcgatcaacctcaatgat

SEQ ID NO: 167611 - DNA, 348 bp, Glycine max
  unsure (1)..(348): unsure at all n locations
gattatttattacctttaagctaaccnacaagcaatttttggatgaaatttactaccgacagtctttcacgtatgcaggtaatcaatttcggtttcaatgtatgcaactgaaaaatgatgctgatgttaacacaatgttaatgtgtaatcatgaattctcntttgttggtccgattgactcattatatagtactggtagaaccccagatggtattctacacttacttgaaactactatgacccctactcatgatgccctgctatattacaatgggaagtgaacatttcacgccaacagaccttgttggtactcgttcacagaaaaaatgcaataaatttgacttccac

SEQ ID NO: 167612 - DNA, 259 bp, Glycine max
agattcacttaaaattagtgatacaaatcgcttccgcgaacaaaatccacgccaaggcgcttcggtaccatttccgggacgtttcctggggtgatttcccacggtttccaccgctttccgcgcttttcggtttaaaccgtacttccccaaatccaccttccaatcttttaatgacccttatgggcccatctggttggggctttttcttttttcatcactcttcctcccccctttaacccctcaacatcttatacccatt

SEQ ID NO: 167613 - DNA, 362 bp, Glycine max
  unsure (1)..(362): unsure at all n locations
ttcatttaactggcgtgggacttggccggcacgatcaacanagtactttcgacacctactgtatgttgatttgaccaacgttattatgggtatgttgcgacaatccttcaaaaccttatcgatacattctgagaggttggttgtcatgtgaccatatcgacgtccttctctatcataagccatcatccatttttcctttgaaatgcgatcaatccatgttgctatggctggactcacctgaccaaatttctctaagtttgatacacaaaaatgtgcttcacngagtgtaactacataaaatctgtacgaacaacaatttaagttatatgaaacttaaatacctgacctcaaaatgaaactta

SEQ ID NO: 167614 - DNA, 454 bp, Glycine max
  unsure (1)..(454): unsure at all n locations
ttactgagaatgatggaagcaattgattttggcganacttttaatgcaagtctcatgagcgagaagaagagtttcgacttcatcaaccctaagaggctcaaacctacaactaataagtgtaaccaatgactcaaattcatctggtagtcagtcaagaacgacatcaactcgttcattagccagagcaaatgctccaatagatgaaagcgaatcgatcaaggtctgaactcaaaggagatattcagaaattgaaagattatccagcgaaatattacgaagctgcttcttcttcatatgaattatagattgaaagtgtgaatgaagtttatcccaaagatgccaggaggacttacaaccgatgagtctaggaagaactttgccagaagtcgtggattgaagccacgatagcaagaatggatcctgttgttcccaaagcagaaactcagaagagacg

SEQ ID NO: 167615 - DNA, 397 bp, Glycine max
  unsure (1)..(397): unsure at all n locations
ancttgtcaagaggggaagcaagttaaattctcttttcaaagcaaaaacattgtttctatttcaaaaccccatgaactactccacattgatttatttggtccctctagaactatgagtttgggtggaaattaatatggcttagtaatagtggatgattactcaaggttcacatagactttgtttttgaaaacaaaaaatgaagcttttgatgctttttgcaaacttgccgaagtgattcaaaatggaaaaggtctcaagattgtttcatttagaagtgctcatgaaggtgaatttcaaaatgagtcttctgaaaacttttgtgaagaaaatggaattcaccacaacttttttgccctaagaacacctcaacaaaatggtgttgcgaaaaggtaaata

SEQ ID NO: 167616 - DNA, 431 bp, Glycine max
  unsure (1)..(431): unsure at all n locations
ggaccatctcaagtgcttgaaattttctatgacaatgcttacaaagttgagttggattcagaaaattagagtctatctctcttatcttagtgagagtgattctcctaaattcttgagtgattcaagaacaccttggctgtatcaaaggactntcacaacctttgtgtgttgcccttgctggaaagagtgattctttccttcctttcatcatcacccttgttctttcaaaccacaattccagaaaatccacctctgcccagaattatctcgtggccataacttccattttacgcactcaaattaagtgattcttgagcctaaatcgaatttcaaaacgagacctttcacctcgttttggaatacctcatttggagccctgtagcttcagttattgtcatttctatatctctgtccagccaccacttaaccta

SEQ ID NO: 167617 - DNA, 288 bp, Glycine max
  unsure (1)..(288): unsure at all n locations
agttatgaccatnngaatttnttgagatcttncgnggttnaatttggggcgtntgcatatgtcatgtgcctgaatcggacctccctaagaaaatctatgaccatttgaacttctctagagcttccgttgtttaatttcgagcttttcgatatctgatgtgcctgaatcggacatcccactgaaaagttgggacaatttcaatttctccaaaacttccctcttcaatttttagcgtctcgatctgtgatgttcctgaatccgacctcccggtgataacttatcaccatt

SEQ ID NO: 167618 - DNA, 459 bp, Glycine max
  unsure (1)..(459): unsure at all n locations
aaaggatcaatagtttttctanaagaggcaaatttgatcatcctactaggacgactgagaaaactggggcaaataaagagggtgaggatgagggagaaacccatgctgtgactgccattcctgtacggccaaatttcccaccaacccaacaatatctttactcagccaataacaaactttctccttacccaccacccagttatccacaaaggccatccctaaatctaccacaaagtctgtctaccgcacttccaatgacgaacaccacctttagcacaaaccaaaaacaccaaccaagaagtgaattntgcagcgagaaagcctgtagaattcaccccaattccagtgtcctatgctgactntgctccatatctacttgataattcaatggtagccataaccctagccaaggttcatcaacctccatttcttcgagaatacaactcgaacgcaacgtgt

SEQ ID NO: 167619 - DNA, 371 bp, Glycine max
  unsure (1)..(371): unsure at all n locations
ttcttttgggggctctaaattgtggtaatgtgctcaaatatgtggggcaattttggtttgttttcttgcttgattgcgttgaatcggggtttatatgaaatggccctacgcctataatgcattttgaaacaatgggacatgccacattgtccccgttctcttgctattgatgcctaaacgcgcgcccaccaagtgttccgtgaaatgcctcaatggcattagcgcatgatttttgtanggaaacaacccatggggcgttttggtttgcacatattttctatttttttgggacatgcattcagttccgaaagggctagagtaattgccccacatatatcctaggcctacgaaccaaagtttttatgcaaaag

SEQ ID NO: 167620 - DNA, 245 bp, Glycine max
  unsure (1)..(245): unsure at all n locations
tgaagaaacanaaaanaacaattanagnaaaanaggtngttggatttattgtttaagaatactttnactaattatatttttaattaacagcacaaaatttcaaattgttagattttacaaatgaaacaacgaaatcacgatcattantgaaaaaagcaaaacaaaatagcacctaatgcaacaaatagagccaaattataaacccacaaaatcataccagaattactatttttcccagaatattg

SEQ ID NO: 167621 - DNA, 259 bp, Glycine max
taaggtaccactctgtggtcaactaataaaagtcggaagactgactctttcacgctttcttaaaccgggcttattgtgttattggggcaccgtcatatgtagtactacgtggcgatcgggagatggcgcaaaacaaatattccattttcacaaacccaagcataaacacaccatcccaaggtgcccaccttaaatctagcttattgtaacataccgtacccttttcccttttcctcttaagaccgggtcccatcaaccc

SEQ ID NO: 167622 - DNA, 321 bp, Glycine max
  unsure (1)..(321): unsure at all n locations
tcagattgcggaatgccttctaacaagccaccctttgtcaaatgaattnttctccatggcctcttaagttgcagatgtcccaaattcttgatgccattatgctgacttcatcttctttggaggatagacatgtggaggagtcactgcgttctttacgtctccataagtaacacnttgtccttggatctgctgcccttattataaccttcacctttctcactcggccacaaacattctgactttgggaacttaccttggatcctccatcactcacttgactgatgctgctccagtccgaagtcaccccttcgccgccggact

SEQ ID NO: 167623 - DNA, 246 bp, Glycine max
  unsure (1)..(246): unsure at all n locations
gactactgataaaactgcggctcataaccacagtgacgatgatggacaaacccatgctgtgactgccattcctgtacccgccaaatctccaccaacccaacactatgttcactcagccaataaccaactctatccttacccaccacctatntatccacaaangncatccctaactgtgccacagaggcggtgtggcggagtgcaatgacgaacaccacctttaccacaaatcacaaacaccaacca

SEQ ID NO: 167624 - DNA, 359 bp, Glycine max
  unsure (1)..(359): unsure at all n locations
tatgctanttaacacactgtcccatcaaggtgaaacatatatggtgtgtaataagcttgtcacacgtatatctaacctgaacttcaaagaagcttggcaaacataccagccagctgattgctggagttaacaaagttggttgtaattctcctggaaagcaccttttctctaacaaagtgacagttgatctttctatgcctttgatcctttcatgtgtttgtctcccaattctaactgttggagtanttccctaagctgcataagctcacatgtggctattgccctaaaacaaaatccaacttttgcactggatctaataaatatgtttcccttattgctcttccatgatattaagtttt

SEQ ID NO: 167625 - DNA, 394 bp, Glycine max
  unsure (1)..(394): unsure at all n locations
cgtgcggcgactgttaacgatagcaatatagttgatacacttncatttagcatactgtcatctcattgagtgttgcatccccaccaacaaagatttccttactatcatcgttcgaggtatgtatgtgattctcacacttatgtgcttaagtattataggcaatggttgacatgttactgttctttagtagtacattgtaattcattgagtgagccatagttccccgtttgagattgaatacaacgattaatacagacagtttggatcaattgttgtattcaatcttgaattgtccgtttggacagtttgggaagacaacattgttttacttcattttgacttataagttaagtatgttgcgttatctttgactaaatttcaaccaatgcatctt

SEQ ID NO: 167626 - DNA, 421 bp, Glycine max
  unsure (1)..(421): unsure at all n locations
agcttntagtagagttgcagactgagatttttaacacttctactccttctgagtgagagaatgagaatcttcagagcaaatgcaagtgacaccaacaaagtgtggccatacaccatagagttagaaatagagaacgcgagtggcatacaatagcattctccaattgatcgaattaaagatacaaatgagagagggtttgatctgtatttacagagctcattagagagcctacaatccaattaaataactaatttttaactaatatcctgtaacaagaacagttatgtgatttttagacttcaagtcggaattcgaaaaggctgtgagtgtggtaggcgactcttcatctaaaggaatgttcatagactcttgctatgctcactggcaaacagaatcacaggagacatggtataagagtgac

SEQ ID NO: 167627 - DNA, 349 bp, Glycine max
  unsure (1)..(349): unsure at all n locations
catntggaagtggttattaaacaaattacgggatgatacanncattncaccaacaattgctttctcctctgcgcggcagcaatcaacataatggaggaatgttccagcatggcaaatccaaacctttaaacaacttctaccaccaagctgaacactacctcataatgactccttaaagtgcaacacacacgcaacaatcttttatgatgtgaaatgctttggtttccgattgtgttttgagagataaccatggaaacttcatcaagacctcaagctaatacctccccaaaaggcgccgaagcctgggccttcttcttaactctttgggaaaaaagcttgatttcgccac

SEQ ID NO: 167628 - DNA, 387 bp, Glycine max
  unsure (1)..(387): unsure at all n locations
cggcgactatattgctgcgttgganatttctttgcgagccatgaaggctctcgcagacctgtgtcccaccggtgctccgccgccagatccgatcggtttaagttgacccaagttgttcatctttaggtgtcttcttgcgatatcgttaatattggttttcagatttcagttccatcttcgccactctatttttttatttctctcctcattttttattatttcatttaaagaagctataactcacaacaatatatgtcctatattgncatacatatgatatgatatggtctataattaggtcacacatataactgtacccctaatattttccatgatgaataaagctcgctattatcaaaattgacactcacatcttatagttatatt

SEQ ID NO: 167629 - DNA, 394 bp, Glycine max
agtttaggtatggaagaggttgcagaagtttggattatttttttggcacccccatagcagagaactgtagagcaatatatgaacgccgagcaattagagaaacatgcacaacctgaagattggtgtaatcaagttcgtattattactttcatgataaggatatgcattttgccaatatttttaagtacatatctttcttatattaaagaaaaaattaaaattctaaattactgatttatttatattcgtaagtgtgattcaaagaccacgtcaacattaagaacaagcacaagctctagcttcatttgacatttcaaagtggcaatgtactccaaaaattgggtggatacatgcaaccagttatttagccttacatcaacatggtaatttctga

SEQ ID NO: 167630 - DNA, 435 bp, Glycine max
  unsure (1)..(435): unsure at all n locations
ttttgataagctntaaatancttatgtgtaagttataattattttatatggagaagataacatgagagaacttntactaattagnttatggagaagctcatntcatttctttntattttcttctcctacaataagatcccgggaagtttatcctaataagcctttaatctcaaaagctcctatcattctgtttttaatttgaaactctgatttcgtttattctcctaaaatttcactcctaaattctttataaaatataccactcccactagnagtaagtttggacgctccatatcttagcagttattgaactctggctctattggtcagttcttctgtatatgctatggaatcccatgtgagagagagggagagatgtcaactgtcaatataagacttcatgagagagaaagaccagaaatttcttgagaaaat

SEQ ID NO: 167631 - DNA, 342 bp, Glycine max
  unsure (1)..(342): unsure at all n locations
catgcagagctannaagaaaagacaagtggactctatttttcggtgtggcatggcaaatccacaagcggaaggatccctctttaccaaaccctctaaaatactcgaaagttgccagcatgtagtaacaatctcatgatggataatataggtgcgaggcattcgacacctacccaagaacctatgagctactgcatgctgcaaacatacttattgttgatacaaaaacgaactatcggggccacaatcancattttatgtctgtcttgtcaagcagtatcggatgagtgcatatatacaaaaagaagagtcttagaatgcggattaaatactaacctatcatg

SEQ ID NO: 167632 - DNA, 347 bp, Glycine max
gagagcgagagttgagagtatacatgagttgagatcgatacttagatatacatccgcttcaacaagcataaaacggtcatttttgcttccaaacaccttatatattcaagaaaaccaaatccatctctgtgtcgcagttttccttcatgttgccccactagtcaaaagatatgcatggaggaatatatgaatctctctgactcataaccaaattggctatctgatcgatccagacatatcctaaggaaagaaactcaaatggagtgctcagaatttcttcacgcctatgcatataaagaaatatcttacttatcgctagagacgtgtatatcttaaatacacatgtg

SEQ ID NO: 167633 - DNA, 402 bp, Glycine max
  unsure (1)..(402): unsure at all n locations
ggggagcgccgatgcaagctgcttaaattacatggatgtttgtatttattggaggaggttgtatgccgtgtttgttttaagggtagcatttcttggtaaaactaactttccaaatgtttgccttcgcacgaaatggccccgaggaagcttgcctcanagaggtccaggaaggacaaggcggccgaacgaactagtttcgctcctgagtatgacagtcaccgctttaggagcgctgtacaccancagcgcttcaaggccatcaagggatggtcgtttctccaggagcgacgcgtccagctcatggacgacgagtatactgatttccaggaggaaatacggcgtccgcggtggacatcactcgttactcccatggccaagttcgatccaaaaatagtccttgag

SEQ ID NO: 167634 - DNA, 268 bp, Glycine max
  unsure (1)..(268): unsure at all n locations
tgcaattctgctgctactcatctcaatcgtgatttactgcaacttccctcttgctatctcggaattccagtgggtgctaatcctacaagagggtggtctgggatcccgtcataaggaagattgacgctaagctgagcaaatggaatcagagatttatntctttggctggtacgatcacactcatcaatgctgtcctaacagcattacctctttttttcctgtcttttttcagggtcccttcagctatcattcataagaattctgccat

SEQ ID NO: 167635 - DNA, 378 bp, Glycine max
agcttgcctaattaacctgaaattgagatataaatgattattaaacacacaaaatggaagtactaagtatttattacctatacttaacaaaaaatacttataacactacaaaataaccataaattggaagagtttgatacaatttacacaagttttatacacaaaagttagtcatattcaccgactaacgactcccccaaatttacagttttgcttgtcctcaagcaaaaagagaacaactcacttgtcctcaagtgacaataacatgcagtgactatgtacaaaggtgtatgcaacaaaagttactaattgcatgataagagaatgaagtaaaatgccctcatcacttgtctttcacaccgtatgcagttatccaaa

SEQ ID NO: 167636 - DNA, 379 bp, Glycine max
  unsure (1)..(379): unsure at all n locations
ctaagcttgtaactctggccaatttctatacaactagtcacttatatagttgngactntngaaagaatcttcagatacaagtcacttgaagaattgtgacttttggaaatgtatctttcgaaatcagtcattggtaattgattaccatgaaggtgtaatcgattacacatcaacagatgtgactcttcattttgaattttgaaaattaaaatggttagaaaacactgataatcnattacaaggattgtgtaatcgattacacaagttgacaatatttaaacacaagttgtnactcttgaaatttgaaatcttaacgttttaaaatactggtaatcggctactaccttttggtaatcgatcaccagagagtaaatgatgc

SEQ ID NO: 167637 - DNA, 222 bp, Glycine max
tattacatttcccatgaaataaacggtttgcgatttcgaattgtgaaactcatgctatgagtaaaataatggattctgccagaaatttacacgaggtaattactccgattaactcaagatgcgatcctaatccattttagtgtcagagaaaggctcatatggtcgcgtgttccttcagtgacactaatttcgaatagaaaatcatgatccaccaccattatc

SEQ ID NO: 167638 - DNA, 371 bp, Glycine max
cttctctcaagtatctgaatgctaattaatttaagggtgagggaaccaaaagcactatggatgctcaaagttaggcttcgaccgatgaatcataaaatgaaaaatcaacacgtgtccttttaccttaaagaaatctcacttcttgtctatacatcatcgtgatagagccttggatcatgggccctgttgcatagttaccattttacgtaatctatctctaattattgttttaagggggtggtatgtttagataatccaaaatatcatcttctaaatggttaagtttattctcttgtggtgtatttggctatccaaccatccaaacatgcattactcaagaaggaggtctctatatgatctattcagaatga

SEQ ID NO: 167639 - DNA, 341 bp, Glycine max
ctctccatggggatttcatcttttgtatctctgcccatgtaactcttctgttcctctcctttgctttataatttccatttgctctgccataaaaagaattcagcaaaataacccaaggactaattctcttttattttggacattggaatgaccaaccatagcatactctaaactcttaagtatatgtgttaattaccttctaaaactttattgtggacctctttatctctggataactttcatatcatcaagctcataagagtggcagatgtgccatgactagcaacaacataaaaaaaatcaagttgtcagttattaaatcatcatctaatggttgatga

SEQ ID NO: 167640 - DNA, 64 bp, Glycine max
aatcgataacaagatatgggtagtcgattactagtgtatctgaccgttgaaattcaaaatcaat

SEQ ID NO: 167641 - DNA, 399 bp, Glycine max
  unsure (1)..(399): unsure at all n locations
agcccgnagaggacgctccaanggangatattaaagacggagagaaagagagaggcgggagcacgaaattgaaggaagaaaaacggagagaagtttaactttgagttgtgtatcacaagactctcattcatcaaagttaccacaagtgttacacatgcttctatttatagactaggtagcttccttgagaagctttcttgagaaaacttccttgagaagcttctttgaaaaaacttccttgagaagctagagcttagctacatacacccctctcataactaagctcacctccttgagaagccttcttaagaagattcctaaagaacctagagcttagctacacatacctctctaatggctaagctcacctccttgagatgagaagttagggcttagcta

SEQ ID NO: 167642 - DNA, 242 bp, Glycine max
  unsure (1)..(242): unsure at all n locations
acaccaaccacggaaggaagtgtccagcgaaaaagcctgtanaattcaccccaatcctaatgtcctatgctaactctgctccatatctactcgataattcaatggtagccaaaancccaggcaaggttccttaacctccatctttccgaggataccgcttgaacccaacatgtgctaatcatngangaattntggggaattccattgagcattgtatgaccctgaagcataangtgcaaagt

SEQ ID NO: 167643 - DNA, 385 bp, Glycine max
  unsure (1)..(385): unsure at all n locations
taagtcacctgaggcatgcacgcttggactgtgctagggagaagaactttgataaagtgttattgagccatttctagggcaaaagtgggtgttgaagagtcaaattttgattcggtggaattttaggtgtaaattcagtttgagcaattttagattgaggttatggacttgtgtgaggtgagagtttgcttcaaacttacctcattctcaatttcacttttcaaacctanaaaacccattgaattgacgggtgttggacacctagattctgtgttgttgtgctgtaaagcttgattttgggttacacatgattgatacatgatttgggacttgtaggaattgatttgggcaagattggatgaaagcgaatgtgattttcaaatct

SEQ ID NO: 167644 - DNA, 465 bp, Glycine max
  unsure (1)..(465): unsure at all n locations
aacttaacaaaaagatggcctcagcaaattcctctattccataanggaattctataaatagacctccaatcttcaatggagagggttaccactactggaaaacccgaatgcaaatttttattgaggcaatagatctaaatatctgggaagccatagaaatagggccttatatacccaccacagtagaaagagtttcaatagatggtagttcatcaagtgaaagcatanccatanaaaaacctanagatagatggtctgaagaagatagaaaaccagtacaatacaacttaaaagccaaaaacataataacatctgccctgagaatggatgaatatttcacggtatcaaattgtaagagtgctaacgaaatgtgggacactcttcgattaacacatgaaggaactacagatgttaaaagatctacgataaatgcactaactcatgagcatgactcattacaatgaa

SEQ ID NO: 167645 - DNA, 244 bp, Glycine max
aagagacaatataactatgaaaatcatctaatataacgaaataaatactataataaaataaaacgcagccacactaaaaaaaatgcatagaaataacagaaatcttaaatcagtaaaaatcagcaatgataaaaaaagcttaagaaaaaactattgtggaagcattcgtacaaaaacgagcatgtaagaaccaaattttactgtaaacaacatttaaccacaataatattcctgtaacactcca

SEQ ID NO: 167646 - DNA, 187 bp, Glycine max
  unsure (1)..(187): unsure at all n locations
gatactatctantcaacctangngngaaagaattattgaaggagtttgaggatgtggaacaattattgaacgagtttggggatgtctctcccacacacacccctcattgtttacctcctttgaaacgaataaagcacccaatcgatctcattctacgatcttccttaccaaatcagctaacctatac

SEQ ID NO: 167647 - DNA, 364 bp, Glycine max
  unsure (1)..(364): unsure at all n locations
agagcccgggtagtcgaagagaagttcaagtccatagccatcaaagtctgaaaagagtatgatgaactaagggacgtcaatatggccacagctgaagccttggaatgagaaaccaagaaggcctgaaaggaagaacacgaccaaaacaaagttttgaggggctttatagggcancaatantgagctcaanctccnaaaaagtgaaaggaatcatcacgggtcaaaggcatgatcttgaaggacgagctaaaggcttgccttangtcgaaaagaaatttgtcccaacagttaagcgagactgaagggaatatgtgggccatcatcgatgagtgcaaagagaagctaaatctagcagcgactcacg

SEQ ID NO: 167648 - DNA, 371 bp, Glycine max
  unsure (1)..(371): unsure at all n locations
tgtcttctgcttataatacaacaacgcactactggctcagaataaatagccagactcagaaggtgctccgaagtgcaatgcagtatgttacaaacaaaagcatggttgatgaatatattggatgacggacccaacgataacggtccaaattgcacaacancanttggttccaacacattttctgaatacttggcgagatacaatgttgcgttatactgcattaccaaaattntaatgattaacacccaaattccaagattgcctcaccacccggcatgaggtgaacctcangcccttaaatgctgcaagccaattggcaaccatgactcctgtgctgaacaatatgcgagaccatgtctgcaagttacatc

SEQ ID NO: 167649 - DNA, 358 bp, Glycine max
  unsure (1)..(358): unsure at all n locations
ctatgctcattaactatgtataaactatattgacatccactctaccactgggtataggtgttctaacaccactgtcaaagttcaactctcctacaaccttagttctttttttcctatggagatacaagaatggagggttttacatttctctaacattgcacgactaaatgtgaacctttctttttaaattgtcancanttcaaaaattgtaaaccttgtaccatccatgtcgtgtggaacccttgatctgtcctttatagaaaattctatgcatttgatctgttgttacctaataatatatcttctagatacaagtattgtatctttccacaaattaacagtcttacaccttctctta

SEQ ID NO: 167650 - DNA, 362 bp, Glycine max
  unsure (1)..(362): unsure at all n locations
atgaacccctcattcttgcgggttggggtttaatattatttcatcgcttcatttgttcgctcaaaaacgatacacataaacaaaaccacaattaattatcacaatccatccttagatcatgattgacgcataaactatgattcacttagcttgactagcttgttagaccctcattatcaacatatataaatactttatctaagaatcaaacagctcatacataataatctttataatgtcttaaaacattgtacttatataattaccattaccacatttacatggctaaatcaccaacaactaaaaatacatagactgcctctatctntatctttattcatatctctataaattgcataaat

SEQ ID NO: 167651 - DNA, 83 bp, Glycine max
ttttttctgcacaataggcttagcgcacaggcacgcttagccttattacgaaggtaaagaaacataccctatggggcgcttag

SEQ ID NO: 167652 - DNA, 331 bp, Glycine max
  unsure (1)..(331): unsure at all n locations
cctncanncatncaagcttgcacaaaagattctccttatttatatgcagctntaacatctaactgccccaggtgaagattctctgcagctacaatactcacaataactctgatggtagtaatctttacaactggagagaagatctctgtgaaatccattccttgtttctgctgaaaccctntcactacaagtctcgccttgtatctctttctaccgtcagattcttcctttagcctatagacccacttattttgtaacgctttctcttcttctaacaatttagttaaagaccatgttttattcttcttaagggatgtcttctcatctatca

SEQ ID NO: 167653 - DNA, 274 bp, Glycine max
ggcaacttcctacgacttttattcatgtaacataaatcatagtcaggcaggtgtttgttttgcttatcggcacccaaatgtcgcgaccagaatggttgtactaatccgcaccatcccaaaagagtacgtggatttaccacaactacaataatctctcaacgtcactactgctgtaccaacatgtcgatgccacgatatgattcgtacgccaaaagctgcatattggctgaggcccggatcacgtctgtacgtaacacacatgatcaagtcccaa

SEQ ID NO: 167654 - DNA, 280 bp, Glycine max
acctaccttttacatgagcgtgtctatgatgagttcttggagaaatcaaacaaacaggctttgagacatgttcgtggtgatccgctcaagaaaggtgttgaacaaggccatgtaattttatttttaaagtaaccactgtgttattgcatgtacttgacaagttctttttttctctttgtttcctccttaacaatcatgacttcatgggaaaagttaaagttgtgagtgcatgttaacatcggctcttgggaaaactgatgttgcttgtacacactaatgt

SEQ ID NO: 167655 - DNA, 323 bp, Glycine max
  unsure (1)..(323): unsure at all n locations
acaaactgaganagaaacggcgccccgaaagcagagaaaanccaaggaaacgacacgnaacacagncannncnncncgaaaaaaacacaacgacaccncncgacactacattagatctctttatcacccttccatattgaatatatccaatttgctggtggttcattgttttcttctttgtatctgaagatatgcttgtagttgcttagcttggtatattgacagcttgctcaaattcttatgcagtgtttgctgggatacttggtaaatatgcgatgaaaaatatacagcagcgaattgacttcgaatatttaaattagctc

SEQ ID NO: 167656 - DNA, 375 bp, Glycine max
  unsure (1)..(375): unsure at all n locations
tgtaagactagactcagctctatcttcttacaaaagtttagcctaatgtagcgtaagcttcgtccgcagatccctcttgtaacaacataattaaaaccaaaacttagtccgcaaatccctctcgtaagactaaagtttgatcctaattcaatcaagttctaaggcaacaatacatttcccaatgctaaagccacctaactatgaacacaaatggatgatcagaccanaagcatacaaacattaagcattgaacatagaaaacataatcaattagatattaggtatttacattagttgttcattataaatccccaactagggtgtttagccagccattacagaagaaaccctaacaataataagcttacaaaaact

SEQ ID NO: 167657 - DNA, 101 bp, Glycine max
catgcaagcttgaaaaggatgctctaatggaggatatttattagagaaggggggagcaccaggctgagggaataaaagagggaaagaactgcaacttcgaa

SEQ ID NO: 167658 - DNA, 366 bp, Glycine max
  unsure (1)..(366): unsure at all n locations
tggattattaaataatatgattagtaccacacaaattctgcaataaaaggattcaccatangaagctacaatatcaagtaaatatagattatcattaaccaagagtgaattaattccaacaatatctgaattaaaagacaacctaaacacattgtttgcaaatgaacataaataacccaatttttccaaataaaaaactgaaaccaaattctgtctaaatgacagtaaaacaaaagtgtctttcaaatccaaataaaaaccaatacataataataatctaaaatggcctatagcttccaccttcactgatttaccatnctcaacatagattcgaatcaattggcttcggtagcttaagcaaaccta

SEQ ID NO: 167659 - DNA, 367 bp, Glycine max
  unsure (1)..(367): unsure at all n locations
tcgaaggggacatgtagtatatgcctttgattctacaaattatgcattgcctacagaattgtgaaaagatttgatgctctagcatttattcttgatatgtatttacttagcataagatatgttgattagcaaatgcagtgcaaactagtctaatcaaatggtcttctataatggtaacagactcctccaatctcctccttccctcaagcccacacacatataaaattcgcagatgttgatgcaacttgaataaatgatatgattgnctaaatgtatccatgcggcagcactaactgatgtccagtactcataacttcattttcactatgaaaatatattatccccacccggttattgctaggaacat

SEQ ID NO: 167660 - DNA, 99 bp, Glycine max
ggaatttatttcaagcatatggttcaagagttggagagacccctcttacctcttgtaggcttcacaaaatttaaaaaggagaatgaaggatttttgatt

SEQ ID NO: 167661 - DNA, 400 bp, Glycine max
  unsure (1)..(400): unsure at all n locations
agctntgcaagtattgcaagagggtttattaactaggtgcaactcaagcacacaaagaccttgtaagaaggataacacgagtacaaaaaatgattgatcattgttgatgtgatccttactaggagtggatcgcttgatacaagctacaaagttttggacgacgccacttcctgatagggaagataagtcaggtagatgccacaagaattaccttgataagtccgagattggttcagcgaggaacccatagagaagttctcacaaatttttataaaggccaaaagttccttcattgaaaacgaaaaccaatacatatagtgtatttgacaaaaagataaaaatagacatgggcctttaaaacagtttgggccaaaattcaacgaaaaaaatttaaatgaaa

SEQ ID NO: 167662 - DNA, 166 bp, Glycine max
caatacttataaacctatcacatcatcaaatcttttagcttgatcctttgtctacaccggaggtgacttgataatgcaatggtagccataacccctgctaggtttcctcaacctccattttctgaggtatggcactgacgccaccgatgctgtatatggaaacccc

SEQ ID NO: 167663 - DNA, 178 bp, Glycine max
  unsure (1)..(178): unsure at all n locations
gttaaggatagcaatatagtggagtgctctttcatttancatactatcatctcattgagtgttgcatccccgccaacaaagattcccttactatcatcgtccgaagtataggcaagggtggacatgtcactattctttagtagcaccatggaatccatagagagacctatatctccca

SEQ ID NO: 167664 - DNA, 388 bp, Glycine max
  unsure (1)..(388): unsure at all n locations
tttttgngcaaaaatggcctagggagtgtgtgttaatattcaactctcattctttaaatgagaaacataataaaagaacaaaattaacaattaaaatttttatattctcgtatattcattttctttctatgataacaagtctaaaaaatacttaagagacatctaatattttatatttcaaatcgacattcttgaaggtctaaaatagctaatnttttccaataatgttatcatctttcaaatgtccatttatattgagggcgtaaaaaaatctacagttaaaaaatacgaataaattacattttgaatcaaaaatgattatgatccataatacttgcctgaagtttatttttgttctctaataaaaaaattctttatttctactccc

SEQ ID NO: 167665 - DNA, 388 bp, Glycine max
  unsure (1)..(388): unsure at all n locations
ggctataccttcaccaaacactgccgagtttctgtctcggcccggatttaaggcgggctgcaacaccggctccgcttccctaactgtactagaggcggttgccgtggctttatcctctatagttttctggagttttaacatgacctccgagatggaaagccattgatcttttaaagccgatagatcggccttcatctgttcctgcacgccctcttcattatccatttttctggatcgagtgttataggggtgcctcggtggtntcttagttatgatgaaattcctaaaaaaataaacaatggtgagtatgccgccaaaacatgaatatgcaaatgaatgaatcgagcacttggatcccacccaanggtttttagatgatgtgataagt

SEQ ID NO: 167666 - DNA, 312 bp, Glycine max
  unsure (1)..(312): unsure at all n locations
ataacctaaaatttgcatattntaggatatacttttagtagtcctaggatacaatgtttttattattttaagctgctggctatgtatcaaattaagtctatatataatagcttaacttttcatattacacgcgatataaaaatcattctatttcactaaatatctataacatagaatatatgtagataatattataaaaatttctctacacctatataattcacatctaacaacttatattttcctttccaaattaaataattgcttgaacaattttttatgtgtaccatcatgcacaagataagtgaaaaa

SEQ ID NO: 167667 - DNA, 107 bp, Glycine max
agcctaaaaaaaagtaaatctgtaatccgtaaggattcgtacccttgcggaaggaaaataagtatcgttccaaaattcgtaaagttccctaaccgtacggaaaaaga

SEQ ID NO: 167668 - DNA, 300 bp, Glycine max
  unsure (1)..(300): unsure at all n locations
tctcnctgnnccaaaataaagtgggagtctatgttgtcttacaatttatactaataaaaacaacaaaatactatccaaaactcaaaataatattaattacattggaaaactaaagggatatctatacgggctttaacgggaaaaaccccattactatacactgaaaagcttacatgaccactattctttctccaaatgtacacttaatttgacacggcaggagtataacataccaaacataaaaagggaatggaaccattcttcattccatccacaccaaacaccacatgacaatcgata

SEQ ID NO: 167669 - DNA, 297 bp, Glycine max
  unsure (1)..(297): unsure at all n locations
tagtggaattaaatagttntaatacaatgnattatgnaacatattcaatataatagctacaatnttatcacacttaattgattttagcggcctcaaaatagctcttcttttctgtatcacctaatagattgctcttttaagctcttgtgttgctccggcagggtactcatgagccccacaatttaactaaaaagacacctcctgaaaaatcaaagggaagaaagcacacaaattgccgcatccagtcacagaattcacaaaacacacaatctcatcaacaggcaacacccacaagtt

SEQ ID NO: 167670 - DNA, 103 bp, Glycine max
  unsure (1)..(103): unsure at all n locations
tctatnaatttaacgggaaaccatatcccatgccagggaggtattaatctatctaagacttatcctaacaacaacaaaaatgtggctctcatatggccaaaac

SEQ ID NO: 167671 - DNA, 259 bp, Glycine max
  unsure (1)..(259): unsure at all n locations
tctatcaattttaccgctgaccatatcccatgccaggcgagtattaatctatctaagaatgatcctctaaagctcaagttgaggcccctcatcggagaagttcaacaagccattaatcatgctctgatcacacagtcatggttcatgcaccagaagttctttagaactcttttatttaatgcttanttaacaaatattatattttaattaattctttggaatttgacaatcaactaaatttgttnntattatgattttg

SEQ ID NO: 167672 - DNA, 263 bp, Glycine max
  unsure (1)..(263): unsure at all n locations
gaaaacatgatcgcggaatggtgagatcttttatgctcatgacacttttcctacactcnaatagtaaatttgtaaaagtttactttanataaaaaaataataaattaactataaatatcatatcaatttaacattctattaatattttaaagcacataagtaataagttcatccaaatacaaaacataagctcttctccaacaaaaggtcatacaatttgaacacacacatagagaagaagaacctggttggcgcaatttgtt

SEQ ID NO: 167673 - DNA, 377 bp, Glycine max
  unsure (1)..(377): unsure at all n locations
atattctaaacttttttttctattaagctaagtctaggccagcagatggatctgaggatgaancttactttttgctagtcctaaacctaggagggttgcctaacttgagcctagtccaacaagagggatctagggacgaagcttggattgattcggtctaactagggatcgaggtttagtaatttacgctacaacatatgacacaaaagcatgattgattagagcaacatctttatatacatcagctggtctgttagaaaggcccaacatttatacctatcgttgccaatcttacttacttcgcattttactgtttttagcctagacttagattaatcatgctctaatcatcagatattaatgtttcttcaacaatg

SEQ ID NO: 167674 - DNA, 341 bp, Glycine max
atattttttgtttttagtgtatctcaaacattctgtgcaggttgaaatgatcatagttcctttcttttgcgtgcttagaatgtgccatatgagaactgaggtacattacttttatgtaacctcatattaagcaagaaatgtggtttttattgcattggtgatgtcaagctataaacacataataacaaaacattcactggcacaaacatcactaactctcttgcaccttgacgctctttaagaatttgattgacatgtacacaattacgcgcactacccttttacttggcggaacgggaacaataaacaccttaatcagcatctctgactaatgccttatt

SEQ ID NO: 167675 - DNA, 319 bp, Glycine max
taacctgattaactggataggctttactcaaaagccttgtcctaacttattttctgaaaaggcctgccttggcctaggcctgatgtaggctagggcgtacgcctctactgaatggcctaggctattttcacccctatgcaccaccaccgcaatccctttaacctcattgcaacggaaacaacccttctcgaaaatgcaacaaagccatattatcccttttattctggagtagatattctgaaagtgtacatgtattccaaaatactatacacttttcgaataactattttaaaatacaaaaatcctattctggaatatg

SEQ ID NO: 167676 - DNA, 334 bp, Glycine max
gacacacatttgaataatttctaggtcactaaagatctcgggattgatattatagggatagacaaaggcgaactattctgtccaaacaattacctaagaaagggggaaagttacgatgctaaagcaacctgttagccaccattggcatcatacaaagctatctgcactcaagcaccagaaacagtgaaaaagtctaaaatgaatcaaacaccctatccaatgggtggaacatatgtatggatggttgacagactaactggtacgctgagattatacaatcatggaatctgcaggccatggagctgaatgacactagtttaaggacttgaaccga

SEQ ID NO: 167677 - DNA, 205 bp, Glycine max
acaacttcatctgtgcgagtcttctttgcacataaagaaatataagttcagtcgcatgctccactacaaactgaactctttcaagttccttcatcttaacccctttccagctcttgctcagattatgcctagattgattcaacaattacatccttatgcactatatcacaatctatatccatcattgtgtccctctcaatactct

SEQ ID NO: 167678 - DNA, 383 bp, Glycine max
tagatgaaaatatacaaagttgcgtttggaattggcgctaaagtgtgaagttatgcaaaatgtgttatgaatgacttccaaattaatttcaattggaatttcctttattgaataagaattatgaaatgacatacataggtagtaaagttatgtcacgagaatccacttttactaagcattgataagttacgagttgaattgaattgaatattaattcctggtattttaagtcggtattatttaattggtattgaaatgagcctttgaaatattatactttaacatgattgaatgattctacctcaaagggagacccgtataccttaacatgaattattggatattgtgaattgagttcatttaattgccactatctcgattgt

SEQ ID NO: 167679 - DNA, 161 bp, Glycine max
  unsure (1)..(161): unsure at all n locations
acacaaaacgnaancactaannagggattacttatacttaacagataattcttatcacaactttttaaattttgcatcaaagtccaatctacgtgtcacaatctgggacaattcgccacgttggatactctatgtggccctaaaatggccaacaatgcacc

SEQ ID NO: 167680 - DNA, 270 bp, Glycine max
gtataggccatataatggggcgcggtaatctttatcaatatttgctctcttacctcttcgaggctctatatctacttctggttgtgcaagattttcactactaatagcaggaagataactggatgaactaccaatgaacacacatttatagggctctactcgcaagtttaaccctcttagggtctgggatccttacatacgccaaacatccccaacttctcaaatcagacaacattggccggtcttccttaataccccataaggagatgt

SEQ ID NO: 167681 - DNA, 440 bp, Glycine max
  unsure (1)..(440): unsure at all n locations
agcttctatataagctgaacgcatttatcatttatctgtaagtgagnnnnattcagaagatnagagtttatctcttttatcttagtgagagtgattctcctaaattcttgagtgattcaagaacaccctggctgtatcaaaggacttgcacaacctttgtgtgttgccctcgctggaaagagagattctttccttcctttcatcttcacccttgttctttcaaaccacaattccagaaaatccacctctgcccagaattatctcgtggccataactcccattttacgcactctaattaagtgattcttgagcctaaattgactttcaaaacgagacctttcacctcgttttggaatcacctcatttggagccctgtagcttcagttatagccatttctatatttctgtccagccaccacttaacctacatgttaccatcc

SEQ ID NO: 167682 - DNA, 494 bp, Glycine max
  unsure (1)..(494): unsure at all n locations
ctgaagcttacaacatgtggattatcctgcagcacatcaacatccttttatctatgtatatcgcacaggcttcatcagactcttcagtcgaggagttatcctcacctcgcctcgtgttatcactgcaaaccaaatacaaagaacgatcctccatcgagtcctccatcaaatatgtatcatataggtcatcattagtccctaccttaatgtaagatttaagcaaaacttgtgccttgactcaaattaagactctagccacatctagatgcatcctattagtagtatactcagttgcatacatatagtcaccataggagctacaatccgatttgaaaaaatcatcattccattcatgagtagggacattaagcaatntcacccataccaagttntcatggtctaccaagcgagcgagaattccatagaacaatatctacagaccactccccatcccatgcttcttttccgtcacaaagctctccaccaccttaaag

SEQ ID NO: 167683 - DNA, 318 bp, Glycine max
tgcaagcttttggctggttcaagtagcagaccattattttattatcagacgccacaatttagagcaaattggcccatctcaaataaatagcttatgcaactagtactctccttaataataaagccatggtggtgtgcttgaaagatagctcccaaggctttgatcattcttttcaagcactgtaatatttaccactggccgacataatcactatcagaaatcccattggttttctaagaaagaacaaagcatttgatagaggacatgtgctggttcaaatgcttatgctgtacaagttagattgtaattgactgttac

SEQ ID NO: 167684 - DNA, 439 bp, Glycine max
aagaaactaagctgaatcattttagagttatggcctatacaagttgagtctcttggaggaaacaggtactttataacctttatagatgaattcactagaaagacctagatttatatgatcaaaagaaagagagatgtgtttaatatctttaagaagtacaaagcttatattgaaaatcaaagttctaggaagattaaagtgttgagaactgatggaggtggtgaatacacctctaaagaattcctagaattttgtgatgaagcaagaattgtgcatgagttcacaccaccctacactccacaacacaatggggtagaagacaggaagaatagaacaattatgaacatggtcaggagtaggctcacatgcaaggatctgccacactacttgtggagtgaagttgtttccactgttgtgtatgtgctaaatagaagtccta

SEQ ID NO: 167685 - DNA, 440 bp, Glycine max
agcttgtaggattatggggtacccatcacatgtggtattatgtggcggtcgggcgatggtgcacaacaagttttccacatacacaatgcgcgcataaacccaccatcccctgttgcccacctccaactgagctcacgtactcccacgtagcccatatactcgtttctctcaacaccgggtccccatcaatcctcccaagcttccacaacatccaagctaaacagcattcaaaccgcacaagctatcgcagccaagcaaaacagagcaaaggcagaaaactctgccaaaacaccaaccaaatcacagtttttctcacttaaagaccccagtaacaatcccttcaatccaattcgttaaccgttggatcgactcgaaatatttactggaagtctctagtacatatgcctacattgtgaccgttgggatctactagcgaacat

SEQ ID NO: 167686 - DNA, 392 bp, Glycine max
  unsure (1)..(392): unsure at all n locations
catcctcagatccctctnngtggactagactaaagtgtatatatctttcttatattttagactaatttagcctaagctttatcctcaaatccctctcgttggactagacttagaccaaacaacattatcgtaatagcatacttaaaaccaaaactttatccgcagatccctcttgtaagactaagtttcaattctgcttcattcaagttataaggaaacaatacatttcccaatgcttaagtcacctaactatgcacacaaatggttgatcagaccaagagcatacaaaatttaatcattgaaagaagcattgaacacaagaaacacatcaattagagataaaaatatttacatctgtcgttctttagaaatccccaacaatggtcgttagc

SEQ ID NO: 167687 - DNA, 430 bp, Glycine max
agcttagactgagttcagcctaccatcctttttttatgttcaaactaaacggaccattcagtcgttggaggaccttttaagagcatgtgtcttatagcagaagggaagctgggggagttttcttccattgatagagttcacttataacaacagttttcattccaccattggcatggctccctatgaagctttgtatggtagaaggtgtagaacacccctatgttggttagagcccggagaaggcctcaccttatgaccagaagtggtacaacaaaccactgagaaagttaagttcattcaggaaaggatgagaattgctcacagtatgcagaaaagttatcatgataagaggaggaaagatctggaattcgaggttggtgatcatgtattcttgagagcactccatggactggggttggcgacattgaaa

SEQ ID NO: 167688 - DNA, 484 bp, Glycine max
tactaagcttgtggaaagtttataaaaagaatacttttgctcgatttgtgtgtgttctcggatttgattagtgatggtggattgcatttttgtaatgctcagtttcaaaaggtgttgagtcaatatcatgtgcatcataaggtggcatcaccctatcaccctcaaactaatggccaagctgaagtatccaacagagaattaaagaagatattagagaaaacagtggcgtcaaacagaaaagattggtcaataaaattggaagatgcactgtgggcttatagaactacatacaaaaccccaattggcttatctccttttcaactggtttatggaaaattatgtcatttaccagttgaaatggaacacaaagcatattgggctcttgaaattctgaattttgatgagaaggcatctatagagcacaggatgatcaactattggagttggaaaaatgcgatgaaacttataatcttcaaactctaca

SEQ ID NO: 167689 - DNA, 415 bp, Glycine max
  unsure (1)..(415): unsure at all n locations
agcttctcccctattgtgctataaataggtgttatatttttanaagaaaagggtgcagggccttaggcccttctctctcttttgaatttgctgaggaaaattattctcgtgaagaaaatctcaagccgaggcgccttcgtaacgttttcgtaacattttcgtgagtaattacgcgaagattctcgaccgctcttcaacattcatcgtgcgctcttcggtttcttcagtcttcaacgggtaagtacctcaaaccaagcttttcaattcattctatgtacccgcggtgggccacattttgattcatgtatttttattctcattttcattggcttgttatacccccttttgacgtgcttaagccatttatttaagtcattcctcgctttatctgaaaacaaatagatttcaccgatcg

SEQ ID NO: 167690 - DNA, 475 bp, Glycine max
  unsure (1)..(475): unsure at all n locations
ttacactanagctgaatcttatgacaggtaaatacaatgtttatattatttttattattataatattttgcttacttatattttcctttatatacttgtttcttttaagtatgactcctcctgactatgttggagtccaatttaatatatatttttcttgattatattattcaatctgccagtgacacactcacactcgaggcatgctgctccagaaaaaaaatgctatgccgttaaattttatatggataaggagatatatagtgacatactatcattgtctattaagccatgattatcaactacctctccattttattttgtagttaattgaatttttaaactaacataaaaagcattctgtaaaatttatttatgnttcacttactcttctgcatctacctctaaaacacagggagaaatatctttatttctctatttttcatgtctatttaacttaattaataaactccac

SEQ ID NO: 167691 - DNA, 203 bp, Glycine max
ccaacccaagagtgcgagacagcataaagaaaagagagaaaactccccatcaaagaaagggagaaagcaaagaaagaaaagaagaaagcccctggccaaaggaaccagaagaaatgtgcacagaggccttcagaccggacaagatctgaacaacacagaatcgccaccaaatgaacaaaaagaaggaaaggaaaccacgacct

SEQ ID NO: 167692 - DNA, 401 bp, Glycine max
  unsure (1)..(401): unsure at all n locations
agtgtcaagccactacttgtgatgatttcnctacatttctttaacatggatgattgcaagtttttgctagctaagtttgagaatttcaaaaaggatcaccaagttgagtgtataaaattgcaaactgagctttcctaccttaaagatttgtttggaaaattaaaatgaggaaagagtgatcttaatcacatgctcaatatgcaaaagcatactacagataaggccggcatgggatataacaaacaaacctaatgcaatcctacccnccaatggcattggatagaagactccaagatgattatgccaaagatgcaagagaatgccctacggttctcatgagccttatggtatatttctggcccatgggctaagtatgagctcacttatctttgtacatatta

SEQ ID NO: 167693 - DNA, 429 bp, Glycine max
agcttacttgcagagattcctttatggtattatatcttaccagctgtgttgatccattgtgatagtaccgcggctattgcaaaaattaagaaccgctattacaatggtgagaaacgacagatacgtcataagcacaacactgttagagaattactctcaacaggagctgttagagtggatcacgtacgcactgatgataatttagcagatcctttgacgaaaggattagctagagagaaagtccataacacttctaaaagaatgggactattgcccttactgcgatgatcattcatgatggtaacccgacctatatgactggagatcccaagaactatgttcaatgggtaataacaagttatgaagtgatatgagatgaacatgctcgtataagtgaaagcagcattgattctgaagtaacaagaggat

SEQ ID NO: 167694 - DNA, 462 bp, Glycine max
  unsure (1)..(462): unsure at all n locations
tcacaaatcgngaacactccatcagaagtgagattttatatctatatatcnggaggattagagcctaaaggaggtgccaaatttcgaattatatcaataatatgaggctataattcagacatgagacgctccacatcccactatcctttattgttaataaagaaacattcacgctcatcatgaccttgctgatttcctgaattacaaatctcagacaacttccctactcctgacacccaattatcagaccagaaccgagttgatctaccattaccaataacccatctcacattaggtatcaacttatcccaacaaattaaccataccacgtcagaaattagaactcggtatgttggagctaatcactggaagtgtatcatacccacacttatatnttgatctaatcacacgaacctatatatcatttggtgttgtgcacaaattccatccagctgtcagcat

SEQ ID NO: 167695 - DNA, 389 bp, Glycine max
ctatttaagctggaagcattgcttaagccgaatgttaaacaccttatattatcaatttcagatgctctaatactttaaaccatgatctgctcagtattcttgcagaatgttaacaagctatgtgaagcgatgtaaacagtgttctcataaatttcaaatagcatgcctttcactttccatttcaaacaagaacaatatctcattcacgctattctgatattcaaaaggggcattgtattgtgccacattgtaaacagaagcatgaccagctttctggtttttgtcatggcaccagaccattttgtgccttcaatactagcttgcaacacagcggctttcaccgcaacatttgaaatgttaacttggccaccaaactggcttgctgccac

SEQ ID NO: 167696 - DNA, 466 bp, Glycine max
  unsure (1)..(466): unsure at all n locations
tcanaccacagcaacacanaatctaggtggcaattatctttcttctaatggctnanctaggtttgaaaggtgaaanttataatgacgtaaatctgaagcaaactctcacctcacataagtccataacatcaatctaacttgctcaaactgaatttacaccatacaattccaccaaatcagaatttgactcttcaacacccaattatgccctagaattggctcttggttcactctggtcattagtttttctctctagctcagcctaacctttctcacatgttctaaatgacatttcaagctagtattaactcactttaacctccattaaccacagagttcagacttagccttccaactgtcatagcctactctattccactcttacatcacattctcactatctaaccttggttagttctcccttcatcttaacagattccacaccaattcagctataacttacaac

SEQ ID NO: 167697 - DNA, 375 bp, Glycine max
atgtcttgagagggttatttacctcgttgacattcttttgtctttgaatgggaattgccatgaacaggtttattgttactgtctttgatatttggtagatgatattgtgttgcgggaggtaattccgattggattaactcaccatccttcactttccaatttgttatgacatttgttgttggatcacctatgatgtcttgtttccaagggtaatctatatcctttctgatggcataagcatgaaaccaatcaaagaaaaggacattaattttgcctctttcgacaaattcgtaaaacttgtcttggatttgtttctgtttgacccctgtaatgtggaaaaccatatacttgaggtcattctccgagataaaatct

SEQ ID NO: 167698 - DNA, 419 bp, Glycine max
  unsure (1)..(419): unsure at all n locations
ngagatgaggaagtgtanaatggtgaaacttcctgctttttctctttgaccacagagtggtacctggagatatgtcgcgggggtcaggagaccttggggacgtcaggtggggtgctattgcccaaaaccaagcttgaccaatcccgacccaacccgggcatagtcagtcagtgagaacctgtgatgtacctaaacaggcgagctcctggcagtcaacagataaaaggaacaaagaccacaaagcatggaggcttgtggtggctggccagctgtgaactttgattgatatgtgggttatggcctctggtaatcgattaccaagggtgggtaatcgattacaaggcttaaaaatgaagacacgatactaagatggtgtctggtgatcgataaccaaagggtgtaatcgattaccacgcttg

SEQ ID NO: 167699 - DNA, 441 bp, Glycine max
  unsure (1)..(441): unsure at all n locations
cccggatcttaagtcgacgcagcatgcacttcaatactattaagatcttcttatttatatgatctacaccaagacgcagcagcagcagctntggacggtgtcaagtggcggagcttactaaatttaactactttcattttaactgttcctctgtgtcatatctacctttgcctttattttccaaattagtgtgtatgagaggatatagtcatatagccccctttattttaatttaaatttaaatttatttgttaaaaaatactttttttaatataataactagttttctgtttctttatgtttgtctaattcaccttttttttttaaaaaaaaagaagcaattttttgttgtttcaataattaaatcttatttatttcttcaaaaatcataggacagctataaattggcaatgattataaaaattgccattaccacacaaa

SEQ ID NO: 167700 - DNA, 473 bp, Glycine max
  unsure (1)..(473): unsure at all n locations
atggggaagaatactgaaatagacatatctccttataatcaaacaatttgattccttggaacatggcatgtatggcaagattactcttgctgacctcatggaaactgtctattaaatccaaacatctcttctaaaagggcaggagcaatatacgagactaccactattgtagagtgactgtttctgctactaaaacctgagaccatcatcaggccacaaaagataaccttagtgttatctcatcctttatttattttattttttttggtcaaacgttataagtgtattgcacatcattaccagccatttgctgtcacttgcccatatgcatgaaatacggatattcggtgagtagaactatagaagcattggccattacttgcaccgatacttgtgaaaatngaaaagcataagatcacgggtgcccattattatatgtacttcgtagtactagntctatattgttcttgatg

SEQ ID NO: 167701 - DNA, 296 bp, Glycine max
acgggactcaatcgggacttcgagtgaaacgttattgtcgttcaaatttgctacgaacctttgtttacgaattacagcatttcgatgtattacgggactcaatcggacttccgacgtgtcgctcgaatctgatacgagattctcgtttcaatttcgagcgactcgataggttactgcactcaatcggacattcgaggacaaaggtataggcttttaattttagacgagcatctcgtttaaattccaagcgtgacgatatattacaggactcaactcgactgtcgagcgaaaagtta

SEQ ID NO: 167702 - DNA, 356 bp, Glycine max
cccttatggtatcaaacataaaaagggaaaaggtaatattgttgccgatgctctttctcggcgtcatgcattactttctatgcttgaacacacaatgattggtcttgaatgtttgaaaagcatgtctgaaaatgatgaaacttttggagaaatatttaaaaattgtgaaaaattttcagaaaattggttctttagacatgaaggctttcttttcaaagaaaacaaattgtgtgtgcctaaatgttctactagaaatattgcttgttgtgaagcacatgaacgaggtttaatggggcattttgtggtcaaaagactctataaacattacaagaacattttatttgcctcatattgaa

SEQ ID NO: 167703 - DNA, 312 bp, Glycine max
tattgaaatattgtatgtaataatgaattgacagcggaaaaatgattttataatttatcttgcaagcttaaaaaatatcaaattttaaatgagcgtaaccattcaagctcaagctcatgcttttattttttcaaaaaagcccaactcaagcttataattatcgtgtgcttaaataaatgagtcaagctcgagccactccttttttcacaaggccaacttctatccctagtggtgagctcatttacacccttatctgtcgggactaaaatgacaattcataatttatgttagaaatcataatgggagtgatgt

SEQ ID NO: 167704 - DNA, 343 bp, Glycine max
cgcttgaaagcaaagctcgaaaagacaagagtggtgatattatttctgaagacggcagtcactagggtcatgaaaaagtgtgatgagctgatagatatcaacttgaccacggttgaagcgttagagcgggaaacaaaaaggtcttgataggaagaatggagaaagaacaagttccgaggggctctatggggcagcagtaatgagctcaagcttagaaaggctgagagggacaaatcaatgatggaaagtatggtgctagaggataagttaaaggctcgtcagtggtcgaagagaagttgacggaatagttgagcaaacagaagagaatatgttgtaatcattg

SEQ ID NO: 167705 - DNA, 399 bp, Glycine max
agcttgtagcaaattcaaacgacaataactttttactctgatgtccgattgagtttagtaatatatcgagacgctccaaattcaaaatagaagctctgagcaaattcaaacgacaataactttatacacggatgtccgattgagtcccataatatatctagatgctccaaattgaaaacggaagctcgtagcaaatttgaccaccataacttttaactccaatgaacgacagtgtcccgttatatattgagacgctcaaaatttagatccgaagctctatgccaaaagaattgacaattactttatacacgaatgtgcggatgagtgccgtaatatattgagacgctccaaattgaaaatgggacctctttgcacattcaaacgacaattactttatac

SEQ ID NO: 167706 - DNA, 483 bp, Glycine max
  unsure (1)..(483): unsure at all n locations
cttccgttttcaattggagcatctctcgataaattacaactctttgtctggcatccgagtaaaaagtttttgtcgtttgaattttctaagagtttccgttttcaatttgtagcgtgtcgatatattatgggactcaaccgcacatccgtgtataaagtaattgtcaattcaattttctcagagcttcggatcaaaattttgagcgtctcgatatattacgggactcaatcagacatccgattaaaaagttattgtcgtttgaatttgatacgagcttccattttcaatttggagcatctctcgataaattacgacactctgtcgggcatccgagtaaaaagttattgtcgtntgaattttctaagagtttccgttttcaatttggagcgtctcgaaatattacgagactcaaccggacattcgtgtataaagatattggcaattcaattttcttagagcctccgatataaatatagagcgtct

SEQ ID NO: 167707 - DNA, 443 bp, Glycine max
agcttctcaaggaagttttctcaagagagctttcttttgaagctacctagtctataaatagaagcatgtgtaacacttgttctaactttgatgaatgagagtcttgtgagacacaactcaaagttccacttctctccctttttcttccgttaatttcgtgctccccctctctctttctctccctctttcttttcctccattgaagcatcctctccaagcttcttatccaaagctcatcttggtggggaagctccttcttccattgcttattccttaatggatggcgcctcctctcacctcttttcctttgtcttcctctgcatctccatggtggaaaatcatcattaaaggaccccattgaagctcaaagatccagtctccatagaagccccacaagcaagttgtcatcaccttgtgaaagacaagtgatgaggtcattttac

SEQ ID NO: 167708 - DNA, 483 bp, Glycine max
  unsure (1)..(483): unsure at all n locations
actaaccttctttgagcttactgtgaggaaggcacaatgacatttgttgttatcattatgaggacatgtgtgatgtttcctccttggagtcttgttgttaaggatcttctaactgccaacctcctgtctcaccctttntgtgcattgtttctcccctacgttagggttagtattgattgctctggaacttggtgtttccctttcttttgtatacgtatgggtagaccaaggttccagatattttgcttgtattcccaatcatcagctttctattatttgtattttggggatgtatccaaaatttgatgtatctaatggtttcaaactcactactatttatataattatgcactcttttatgtagttagtaatcaaaagtttatctcatttctcttcactctcattctaaaagtgtatggtttatattcgaaacacatctgtttttatcaagcgacttatatttctttcacaactaatatgtat

SEQ ID NO: 167709 - DNA, 312 bp, Glycine max
gcatcttgagcgttctgagtgttcgttgctggcgattctgaatatactgagtttgagcattcatctactaatttgcatactgagaacatggctcaacctacacctcatgagaggactcttaaggaaattgctccgcctgttttcacttatgaaagattgagcactcaatatcctgataaaggtgttccatatgttctaaatactaaactaagacatttgctaaccaaatcttatggtcttgcaggtgaagatcctcataagcatcttaaggagttccatattgtttgtttcaccatgaagccccctgatgtc

SEQ ID NO: 167710 - DNA, 399 bp, Glycine max
  unsure (1)..(399): unsure at all n locations
agcttcttatccaaggcccatcttggtggtttatctccttcttccatggcttattccctagtggatggcgccacctcttacctctcctcctttatcttccactgcatcttcatggtggaaaatcaccattaaaggacctcattgaagctcaaagatccaacctccatagaagctccacaagcaagcttccatcagtacgagactaagttgttgtgctatcacgagggatcggggtacaagaacttagttgtgtatgtgtgtcttaatgcggncttggttgagtttagtcttacaagaggaatctgcagatgaggcttaatcagggctaagctatgctaggctatcatgaggaatcggggtctagtagtccaagagacaacataggaacgcatgagcatt

SEQ ID NO: 167711 - DNA, 455 bp, Glycine max
  unsure (1)..(455): unsure at all n locations
cgctggagaggttggagagacactacatgcacacttgntggtgttttactngagttgggaacgatttcaagagcaatattatcttctattatcagataccggtactatttttcttttaccaacttttagttactgaatcaatcaaaccgctgttgaagttcacattcgaagcttgtttatcctcttttagtaacagatgcatttgttgcgttctgcaccgcttctttgctagtatttaggttgatcattttgcaatgccacctgattttggatatctcactttttgtggatatacttattttcttccgtgctatgcccattaattaatgattctaacacacgcatgctaagcatgtttattaattgtgaattcgaacgaacgtttaatattatgcatgttaatgagattatgcacggtggattataataatcangagatgcgtatattatatgct

SEQ ID NO: 167712 - DNA, 352 bp, Glycine max
  unsure (1)..(352): unsure at all n locations
agcttgccattttntgctagtgtagcattttggtttttacttcttgaccctcttgaggcatagattcttctgtgtcttgtgatggtgttgaaattgaaccctcatgacctacttgtattttactatcaacttttgctatagtatctcttgtgcaaatttcttcttgacccttttgagccttagactctggtgtgtcctgtgatgaggttgaaaaagcctcatgagcaacttgttttttactatcaacttttgtaatagtatcttttgtgggaattccttcttgacccttagactcttgtgtgtcttttggtggcgctgaagttgaagcctcttgaccaacatgtttttcact

SEQ ID NO: 167713 - DNA, 449 bp, Glycine max
taagctgcctcacaattccatcatgaaacagatgatagattattggagggagggcatccatatctcagaccagatgggctgactcctaagctacaatgtccacctcacagtcctgcccctaataggagttttaacaaggttcattcatacaatgaggaagcccttcacatggagattgctagacacttgggggtatcctatgctgagaataataacagtaatgataacatgatgaaagaggccaatattattagtggttttaatgcaccaacaggagtgatgggaatgaaacacattgactcatgaatattttgtcctttaattctaaagggctgggtagtggagtcaagaggtcagccattaggaagctaaccttggccaacaatgttgacatactctgcattcaggaaactaataatgagtccatagacaaaaccttctgtcaatat

SEQ ID NO: 167714 - DNA, 283 bp, Glycine max
gagcggagcaaatcagcctcacgtgccaaggaggtgcgctaagcgctcgaacacattgcttaacgcaagagtgagtatgctcttatcgagaagcacgcgcttatgcgataagactaattgtcaaaaatgttttctaaatattaaactaagccctttaccaagttccaagggaggctgacatgctccaatgtgcacattatacagctagttcccaaatgatcaaatgcatgataaacaaacacatcatagataagcaatgggttgcctcccacgaagagcttct

SEQ ID NO: 167715 - DNA, 438 bp, Glycine max
  unsure (1)..(438): unsure at all n locations
agcttgccaaagggttacatgtatcttaattctttattcaagacaaagaaatcaaagatattcaagatggatgatcaagacagtttctagagtcttaggaagagtatattaaataggaagggaattccaattgaagaagcaaaaggtttggctaagaaatttaagtttaaaagtatttttcaagagatttactctctggtaatcgattaccataggatgtaatcgattactagtggccaaaactgatttacaacagctattaaaatntgaattcaaaatttgcactgtgtaatcgattacacatatatggtaatcaattaccagcagttattgaacgctttaattcagattttatagcttgtgatcgattacacatatactgtattcgataccagaggagaatttcagaagatattctaaacagtcacgtcttttttt

SEQ ID NO: 167716 - DNA, 464 bp, Glycine max
tcaacatcagaccacttccagggtgttggaacttcttcttatggtcttgatggggcctatgcaagttgaaagccttggaggaaagaggtatgcctatgttgttgtggatgatttctccagatttacctgggtcaactttatcagagagaaatcagacacctttgaagtattcaaagagttgagtctaagacttcaaagagaaaaagactgtgtcatcaagagaattaggagtgaccatggcagagagtttgaaaacagcaagtttactgaattctgcacatctgaaggcatcactcatgagttctctgcagccatcacaccacaacaaaatggcatagttgaaaggaaaaacaggactttgcaagaagctgctatggtcatgcttcatgccaaagaacgtccctataatctctgggctgaagccatgaacacagcatgctatatccacaacagagtcacactta

SEQ ID NO: 167717 - DNA, 458 bp, Glycine max
gacccggatccttaagtcacctgcggcatgcagctttccgagggaggtctgactttcttggtgagttcccggcagtggcgagttgcgtcaccgtcatgtggacgttgatgtgcttgttgggctcggggaggtcgagaagcgcgttgttaatgatgacaaaggcctcctcgagatcgctgaagatggagaagagcgagtggaggccatcagtggtggtgtcctatccaaggccgtggaggaagagcttgcgctgggagacattgtggtccgtgacgatgcgcacaacaacaaggacgtcgaggtggcccaccaccgcgtcctaaaggatgttgaggaattggttaggggtgaagcgcttgatgagcttgcgggcttcgaagggggagagcttgatggggtcagaagagttgttgttgagaataatatagcttcaatataaggaaaattaaaacataaca

SEQ ID NO: 167718 - DNA, 363 bp, Glycine max
  unsure (1)..(363): unsure at all n locations
tacggacctataaaactcagcttagcttctcaggaagttntctcaaagaagcttctcattgaagttttctcaagaaatcttctcaaggaagctacctagtctataaatagaagcatgtgtaacacttgttgtaactttgatgaatgagagtcttgtgagacacaactcaaagttcaacttctctccctttttcttccttcaatttcgtgctcccccctctctctttctctccctctttctttacctccattgaagcatcctctccaatcttcttatccaaggctcatcttggtggtgaagctccttcttctatggcttattccctagtggatggcgcctcctctcacgtcctttcctttgtct

SEQ ID NO: 167719 - DNA, 439 bp, Glycine max
  unsure (1)..(439): unsure at all n locations
agcttatgcgcatatatacatactatctattatctttcacaagacatcctattaactaagagaaatgcacccacatacaatcaaggttgcttcattacctagattatttacatgtacttccaaagtgtatttgttacttacatcacacacatctccttgtctgaatttacatacatgcatactcaaagcgttttggggtaccaaaaattgcacatgcgctcatcttggtatttctaatacctatacatatacaaagttcatgatgaatcttgactacctacacaataaagtgctacatttcatgctttntctttcaagtttttgctacctaaagccgcatgcaaattcaagcatattttccttcactgactaaaattgtagcaaaataaaaggtatatatcttattgtaatatgtcttctgtacataacatgcaacata

SEQ ID NO: 167720 - DNA, 391 bp, Glycine max
  unsure (1)..(391): unsure at all n locations
tgctctaaatttacattgatgtttgatttatgggatgttgttattgccatttcngctctaaagagtagtgtcccactgtgtaaattaactttccaaatgtttgccttctcaagaatggccccgatgaagcttgcctcataaaggtccaggaaggacaaggcggcccaatgaactatttccgctccggagtacgacagtcaccgctttatgagcgctgtacaccagcagcgcttctaagccatcaagggatggtcgcttcttcgggagcgacgcgttcagctcatggacgacgagtatactgattttcatgagggaatatggcgccggcggagggcaccactggttactcctatggcccaagttgatccacaaatagtccttgtattttatg

SEQ ID NO: 167721 - DNA, 370 bp, Glycine max
  unsure (1)..(370): unsure at all n locations
agcttgngagaagaaatccaaaaatctctcttctttgactctacaagaggttgaacaagaaaggaaaaaaatgatcgcatggtatgtgtaaaggcaagaaaccacctaacagccttctggaagttatgtagaaacagcattgtgcctaagtatttgacccttgaaaccatctcccaagtttcaatccaatcaagaagaggcccacatatacgagatgcagttgccttgagaacaggaacatttttgtataaatcatagaatccaatgaggacagtaacaaatgagatcaaaaaatataaaagtcttgcaagtgggcacatccaaggacgataaagattgcataacactggatatgactgaaggaagatga

SEQ ID NO: 167722 - DNA, 450 bp, Glycine max
gacactatgaaactaagctttcttaatattttccaatcatcaagaatcttgtgttattagccaattgtttagtggctattctagactctgtcatcatgaaggtgtacagttgttgcttcaagcatagccaatttgcaagggactttgtcatatacaatgtctctagtttcaaccacattgaggctgttgtcttttctcatgcaacttctcttaaagctttatctccaaggcatagaatgattgcacttctggctctatcaatcatcgctgatttctccgttgagcttagagatttagacatcctttcttctcctttaagagcttctgcacaaccatgttgaatcaagattgctttcatcttgattctccataacccgatgtcattttcccctgaaaacttctcaatatcgtactctgttgttcccatctttcttgatctagatcttgtcc

SEQ ID NO: 167723 - DNA, 396 bp, Glycine max
  unsure (1)..(396): unsure at all n locations
agcttcaagaataatatcatgagatcccttttgtcaactttctccaaaggccttccttggttntcctcttcttagtcgtgcttctcatgacctactttgtatgtgtccataccaccttaattgattttctgtcatctttttctcaattggtcctatctcaatcttttcttggagataattattttgcatcttgttcttttgtgtggcaacccatccatcttaacatcctcatttttgccactctcacctttctcttatgttgttcctttaaagcctaacattcactaaagtttcttccctctcattttctgttctcaaatatcttctcttagatntctgagttttcattggtatctggttgggttgccatgccttgtactcttgataatataaagt

SEQ ID NO: 167724 - DNA, 452 bp, Glycine max
  unsure (1)..(452): unsure at all n locations
ggacctatcaatctaagcttaatggatgaaattccatgacctggttattaattatatataactgagaggaagacatttacacatcttaaaacttgaaagaccatgcagaagtgttaatttcaaggcaaccttcagtccactccactccacaagatattggcatcattaatagacagatttgttaccatatacttttaagtgttaagaaatttataatatatgatgcaaaaagatgataatcaagacaaagaagcatcccatgaaaagcattatgaaattctaaatctggtggataaataaagccgcgtttaacaatggtagaatatcacacattcacaccatccagatagacattgaagaataatacatgaagcaagcgtagaagtcactaatgaatncgattaataatactacttaatgattacctctgtcgaatgcatgttgaattgttc

SEQ ID NO: 167725 - DNA, 343 bp, Glycine max
tactacaaggcgtaaacgtaaaggatggcgcctcctctcacctcttttcctttgacttacgcagcatctgcatggcggaaaatcaccattaaaggaccccattgaagctcacagatccagcctccatataagccccaccaacaagcttccattacaaaccctgtgatgacaatggattgagaaaacgtcaaacggctccattttcgtcactccaaaatggtgaagtgactaaatcaaacacaacatacactctgagggaatacccggagagattgcatatgatatgataaggttgcatgaattatcacctctttcaaaagtgaattatacaactttcattaca

SEQ ID NO: 167726 - DNA, 385 bp, Glycine max
  unsure (1)..(385): unsure at all n locations
cgctcatgttaattaatggaaatgctgaatgtttagtattaattattacactatcaccaatatggggagtgaatcttctcatggaaaaatttccaagaccttgtcatgtaaattatttgtattcttctctttctttgtaaatattaaataagcgagtccttataaaaaattgtaatatttaaaagagagagatagtgataaaattttcacaagatcttaaaattttaacataaatagatccatgcccaaccaagatgacacattcaatcagggttataagtagtgaagaaaaccttatcttcctgcatcgtgtatttatcatcaatatctccacatagatatgttactcttttaagaagagaaaatgagacantttgtctgcatg

SEQ ID NO: 167727 - DNA, 443 bp, Glycine max
  unsure (1)..(443): unsure at all n locations
agcttagacgaaaagtacctaggtaacgtggtgatggtcaaganaaagagagctctcacggtcttcagcacgatggagaagaaaaagcttagatgcagaacaacagaggttacatgaagaagaagagagcacgagcaaaacaggtcgcatatgatataatttaaaatgtaagtctaacatcgattttcaatagaaaactgatgttaacaaaattatgttaatgttaacatcgattttcttcaacaaaccgatgttaacgaagtgacgttaacatcggattttaagaaaactgatgttaacagatacacattatttacaattatgccaccatgtttatgttaacatcggttttgtcaaaaatcgatgttaatctgccgatgttaaatatgcttttgtagtagtggttatttcctatcaaatgaataaatcaaatatctttttat

SEQ ID NO: 167728 - DNA, 416 bp, Glycine max
cacttgaaactaagctatccgcctccattacagggtcttcaaagaaaagtattgcatgccatatgcatgcacaacattagggggaggaccagtagcagccagccacagatgcaccattgccacctctatggcagccaccatctttagagtccatctctgctcacatgcaaaggatggagctccagatgcacgcatatatgcatcatatgaccgaccagtaagcggccaatcatagtggtcaagtgcagctgaatgagagcttttatcgatacaccctgcatcagcatagccaagatgccagtccttttccgtggcctacccctaagcagttcatggccacagttgcattgtctggagatacgctcaatattcacacaagggcaggacccgaagtgatggaagcatgcttatggggc

SEQ ID NO: 167729 - DNA, 417 bp, Glycine max
atctaagctctgataataacaagatcaaatgatgtgtgattctttgatgccacaaaagagatgacaaggtgatgtcaaaaagcttaaagacaaagaacaactcaatgaatcaaagaacatctaagtgaataagaacagtcaaagttaagaattgagaaaattaagactcagaaaaagcttacaatcagattcagattcaagattaagatctaagaataagatcaagattcagactcagattcagaataagaaggactcaatcagatagtattaaacgttttcaaacttgaatagcacatgagtttttgccaaccttacccagagtttacttctggaatcgataccatttgtgtatcgattccagtgtaaagagtttgaaagtttcaactgattacacgaccatattttcaaagctgg

SEQ ID NO: 167730 - DNA, 419 bp, Glycine max
gagctttaactgaatttgcaacgttccaatttatttttaaatgttgtaatcaattacaagatattggtaatcgattaccactgtctatgaacattggaattggtaatcaaatcgtgaagagtcagatctttgcacaaaatgcttcgcgtgatcgattacatggttttgggaatcgattactagtgacaagttttgacttaaaatgaatagatgtaactttttcgacggtttctctcaatactttctcaaggttataactctgccaatggttttcttgagcagacactgaagagtctctataagcaagaccttcgctgtcatgttacgcacttgatataacttgttacatatgcttgtaaattatatgaatctctttgacatcgtctcttctacttctttagcaaaactttttgagtgtc

SEQ ID NO: 167731 - DNA, 452 bp, Glycine max
  unsure (1)..(452): unsure at all n locations
tgtgcaaatcanatcactcctacatctcatctctagcatgcgttttctttctttacccactcctcacgtttggttttttagggaaaaacaccataactaaacgcgccgcaagggatccctatcgcaccagatccaaatctagaacgatgggtgatcaagaggagacgcatgaacagatgaaagccgacatgtcggctctgaaagaacaaatggcctccatgatggaggccatgttaggtatgaagcagctcatggagaagaacgcggccactgccgccgctgtcagttcggctgccgaagcagacccgactctcttggcaactacgcaccatcctccctcaaacatagtaggacggggaagggacacactggggcacgatggcagccctcacctgtgatgcaaccgagcggcttacccttatggattgccgcccaactattcaccacccatc

SEQ ID NO: 167732 - DNA, 442 bp, Glycine max
  unsure (1)..(442): unsure at all n locations
agcttgactataacattntttcttttacatatcttgcgtggcttgtcctcctctacaaacaagtaaaaattggtgaaattttttgtaatgcagaaccatttctcatcaatgaacacaatattttccatcgacttaaactttggaaaatattgcttaaactttggaagttacataccctgtgttgctatcatccaacatttacaagaaaaactttaagcgaacaaccatgttctccggttttaaatatggcttaagtacatttgaatggcgttgtataacttcagccttttgcaatctaaacaatgatgtcatgttaatgtgcaaaggacaagatagagaccgaagggcaatccactttgataatggaacttcacgtagtctttcactgtttagttaaactaattntcttccataattctttgttttattatgagaagcatca

SEQ ID NO: 167733 - DNA, 475 bp, Glycine max
  unsure (1)..(475): unsure at all n locations
ntgtntgttactcggtgaaacagttttcctcattaatatggcaatatcactccccaaacatatcatccacaattntaatattgtgcaacttcaacatgatcttctgctccacctagatatcccaccaacttattgatgcatgtacataattcccttataacctcactatcaaattgcatctgaggattgtcattgaactctgcattcgaaaagtggacaaccacatgtaatgggtgatgaagttggatattccatcttcgttcaatgatttcaaacacacaagtgtgtgtgcttattgatttagtcaacatatgataaagtttctaaaatcctaaagtgacctaaccatgctttcaatgatnttaatcactcacttaaccatgctntcaatgatnttaatcattttcatttgtcatctggctttggtgggtttgtgagactcacgcatgaaatntgagagaatgaaatgagtgat

SEQ ID NO: 167734 - DNA, 397 bp, Glycine max
  unsure (1)..(397): unsure at all n locations
agcttcgagtntgagaaccttgtacaccctatatttcttatttacctgaagcccataattgctgaaatgacatttatccaaacagaaaacccatgacattaccaaaaatgtcaaatgatgttctctagttgcaacccaaacactttaatttcttaactcagcaaaaaggtgataatttaaacaaaacaggaattttctttccacataaccttacatactaagaatgagttttcaacgtttagttttaccactaaagagtagttcatgctgagctgaaacttactgtcatagtacccccaccctgatatgatgacaagtccacaaattgtaacatatcccgttgataaggttaatgacgtgttataaaattaaatccaaaatacatatctttgaattc

SEQ ID NO: 167735 - DNA, 488 bp, Glycine max
  unsure (1)..(488): unsure at all n locations
ctaagctntacatgaccaaatagtcttaagacataaaatactaatattatattatcaatgacataaactgtagactaatgataaaatcacaattcaggaatggtaaaatcacaactcgtatgtacatattacactttggtcaatatgacttgttgctggaattatggaatcaggttgcaaaaagggtgttataaagaaagaaaaatgttgtaaaaagtatatttcctaaatctattggttggtttacacgttgcactaacgtccaaatgtatgaagaaagaaacctttaacaaaacaacaaaagtactgtattataaagaaataaaaggaacaaagagaagacaatgcgattcaccgatcttccagagccactacaattntattcattgaaaagaggataaaaggatgtctatataaaatacaattacaatcaatacattacataatattgttatccagatgtaggtgagtgatgagttacatacctg

SEQ ID NO: 167736 - DNA, 412 bp, Glycine max
  unsure (1)..(412): unsure at all n locations
agcttaaaccaacatgctgctctattgttatttatgacagagntngaagggtcgagcctcaaaccttctccgtatgccgagcaggcctcattgaacctttctgacttaaaaagatcattaccacgcagtcgagctctagcaaccatcctcacattgttgagcaaaacagcaacttcaacatttgtggggtcaatctgactagctntctcagcagctgtaactgcattctcaaacctgcaacacattcatcatccattctcactctgcaacagatactctttccagattagatttctgatgaagcttacagtttctgaactcacctttcagaagccatctcaatctgagctctaacgaagaagcaataagcctcggagaacatcccaaaaaatctcgcctgtgataaggaacc

SEQ ID NO: 167737 - DNA, 430 bp, Glycine max
tgccactgcagcagttaagtgaacaaatgaagtgttcatattcattggatggttgctcggtagaggtacatgctaataactaataagatttcctgtgcagggtatcattgtttttgcatgactgatggctaccttggggctggagattctggttgaatctgcctcaagtgttattttgaaggtaattgagataatctttcgttgttgtttgcttattatatacctaaatttgggttgaagactagttattcaacatgtggattatctaccataataagtgattttatcatttgagcaaatgatattatcatttgaccttgcttttgctttgattccgctcctaaagttcagtaacatcaaagcgactagcagcacacgcattgaagaggtgtgtttccttctctgttttgattctgaactataagttata

SEQ ID NO: 167738 - DNA, 430 bp, Glycine max
agcttgaaggcgtgtaacccacctacttcttatattataacactagtaacgtgtccactatcattgttatcatctccttctccgtcattagggacgctacttgagctggtagatccctccacctttaggtgtattctctgaaagattcatgctttttcttgcacaagttctatagttgcatcctatccggagccatatcataattgtactaatattgcctaatgaaggcaaccattatgtccttccatgaatggactcgggagggttctagattagtataccacgtgacggctgccccaataagactttcctggaagatatgcatcatacaattttcattttcggagtatgcccccattttcctgctgtacattttcatgtgattcttggggcaagtagtcctcttgtacttatcgaagtctgacacctt

SEQ ID NO: 167739 - DNA, 430 bp, Glycine max
cacatatatttaacaatctaaactctaccacacttgtatccacaatgaagaacaggctaactaaagaatttatattataaaattcaccatcaacagtcgtgtagaaatgtgtctcttccaatatcccaaattaccgaaacaatcttttagttacttaaggagcaactcatttgcatcatcacagtctaaatctgaagaacagaagtgactgaggaaaaatgaaacacacacagaagcagaaagtaattggagttaaatattactcaacctaacaagtgccggtaaaacatgtatgcatgaaattcataaaatgaagatcaagtgaggatagaaaaccttaccttggagtacccaaaatcgcatatctataaacgaggtgccgagctttcatccagcagagtgtttttcaacttcaagtcccgatgacata

SEQ ID NO: 167740 - DNA, 440 bp, Glycine max
  unsure (1)..(440): unsure at all n locations
caagcttacaactgaatctttaaaatatgatgttggctctttggatgattctggctcgggatggagttggattagtgaacctatcggtatttcaaaggctcattcattctcaaaattttggctactggagcaaataaatacaactgcagatagaagtgattacttgtggtattcctcaaggtatatagtatacctttaaggttgagaaagctttcttctgactcataagatggtaacacttttcatgttttttttctgcagcattgatcttgatgctgctactgaaactgtccttcacattgaatcccttggtcatgctcttcatgctttcgtaaatgggaagcttgcaggtaaataaaatttaaagcatcgacatangatgatatgtctttntataattttaaatattntggatgcccatatgtgttcttggttaaatt

SEQ ID NO: 167741 - DNA, 479 bp, Glycine max
  unsure (1)..(479): unsure at all n locations
tctgtcaaagtcctgttgtaaatacaatcactagtgactctgattttcaatgtttcatccaataaagttgttgtagataagaatgttgtaaatacagctactagtagtgctacttctttggcaacatggcactctaggcttggtcaccctagtgttgctgctaggaaaattgtatttcgactntgtaatattccaaatattaataaagaaccaacagatttttgtaatcactgttgtattggaaagtcatatagacttccttcttctctttctcatactgtctatgcaaaaccttntgatcttatctttactgattnttggggaacctaccccatctccttctggttttggtattatgttacttttggtgatgctaataccaggtgcacttggatgtactaaagaataaatctgacactttagaaatcttcaaactggttaaaactatgggttcaaatcagtttaatatgtctatcaag

SEQ ID NO: 167742 - DNA, 397 bp, Glycine max
  unsure (1)..(397): unsure at all n locations
agcttcacggacgaacccatcactctcacttttattctgnganctcgccctcaccagagaaacgtgcaaataaaaatgcctacccgtgaacctacctaaccaaaagagaccaactttcagacgctgaccttgtacctcttttccaaattattaaacaccaatataacaaaaagaaagggaactttttgatttacaaaaaaaaaaaaaaataggagacaaggcatgaggcctttttatcataaaacaatcaatctatctagttcagttgctttatggcgctttttctttggttgactttgggttgccagaatatgtatttagagggagggaaaagagtgagtcagctcccactaagatcgaatcgcatggggtttgtaaaatggaacaaacaactcta

SEQ ID NO: 167743 - DNA, 406 bp, Glycine max
agcttggctaaattaggctaaacttttgtttctgcttgagttgagtctagtcttacaagagggatctgcggatgaaacttattttaagttagtctaaacccaagagggccatctaaattgagcttagtccaacaagagggatttgaggacgaagcttggattgatttggtctgacgaggatcgaggtttattaatttatgctacaacatagaacacaaagcatgattgattagagaaatatatttatatgcattagctcgtttgttagaaagacccaacatttctacctactgctctcacttttacttaccttgcattttatagtttttagcataaaggtttagtttaaattctgtttgaaaatatcaatcatacatgttctctcaacaatgcttcatttatgaac

SEQ ID NO: 167744 - DNA, 419 bp, Glycine max
  unsure (1)..(419): unsure at all n locations
agcttggtgagtttgtgtgggatcttactgttattggaattccaaatgtaaattcatcgttgttcttaactatcataccctaatttcgtccggggaccatttgtttggtaggatgcaaccttcgtttgatcgctttgaggtacttaacacccatcgttaggcaattcgtgaagttccgtgacatgccggaagtcgaaagcaagcattgttgcgcaatccgtaaagttccgtaacattccaaaagtcaaagaggggatggttgcattatccatgaagtttcgcgacattacgaaaagaaaacaagtatcgttacgtaatccgtaaagttccgtaatgttacggaaaaagaatcagcaaaaaaagcaaagggggagtgtatttagtaaacaggggtgtgcanatagcaaccatactcactt

SEQ ID NO: 167745 - DNA, 406 bp, Glycine max
  unsure (1)..(406): unsure at all n locations
tcttctagactcatcttctctatgaagtggcatctcttctctctcttccttctccattccgctgtcattcatcttccaagaagcaaaggaatccattgatgaagaagatcctatgcctagaagctccaatggagcttacattatgtggtatcaagagcatcttcatctaggtgatgttcttttgcttcctctatctttntgttcagtcaattcactttaattccttgttattcatgttattctccatgtatatcctccattgtcttgtggtttgtttttttttagagcagattaaaaaaataaaccaattaaatcttagatctacacttgttcttgcatttctatggttcacattttatagatctactcttgaatcactgttctgtgtcgatttaggttgatcatt

SEQ ID NO: 167746 - DNA, 436 bp, Glycine max
  unsure (1)..(436): unsure at all n locations
tgtttgtaattccattcgagtaattgaaggtacgagacatacaccatatcatacgtacacatacccacctacaagatcgatgtagctagggctataagtatatatagtgcactctaaatcactaataatagtgtttatatatatgtgtgtgtttcctacgtgtccatatgaatgagcctactggtatacgtggtccgttatgggtaactagctaggcataaatacatgactacatatattatattataagtaattaaatatatttataaataaacccaagaattatntagtggttgatgcaagattctcttgactttnntaacatttgtggacgggtnttaagctagtcccagacccangcataataaccccagatttattctctaagaactgattgattacagcanagagttcatctttatggtgagagatagtt

SEQ ID NO: 167747 - DNA, 442 bp, Glycine max
  unsure (1)..(442): unsure at all n locations
agcttcccaccaatggtatntgaagtttaattataccattatttcctttggatntaaggaaaataccgttgatcaatgtatatatttgaaggttaaggttatttttataattctgtatgttgatgatatatttcttgcaactaatggtcttggtcttcttcatgagactaagaaatttctctctaacaactttgtaatgaaagatataggtgaggcaagctatgtgatagggatataaatattccaaaataaagattattatgcctgtcttagaaagcacatatcaataaagtactatagagatttatgatggaaaagtgctcaacatcacttgttccaattcagaaaggagacaaatttaatcttggacaatgtcctagaaatgatctggaacgaaaacaaatggaagcaattccgtatgcataacttgttgggagtatta

SEQ ID NO: 167748 - DNA, 494 bp, Glycine max
gtgacctatgaatactcagcttaaaaatgatgagaagatagcaccaaacattttagaccataaattcaaagtctaactatgaaagctaaaaatggtaggttaagaaaaataagtgaataaaacttgaaatataaaaaactcttgatagaatcaatttttttggacgatggagacctcagccaactggctgccacagcgtaggaaaattttttctaccccaaatacatatataataattgcgattctgataaccagagcaaaagttatggccgtttgaagttttgacaaaaataaaatttgctacttttttggaactttcaaatctgaccaaactaaaggctctagctatttttcccacaaaatatagattgaaagaagttaccacaaaaaaattcagccaaaaataacaatcctagctactaaaacaaaaaattccaaataattcagcatgggtggtcgctaaaatccgtcgctacatgatttctactactact

SEQ ID NO: 167749 - DNA, 329 bp, Glycine max
atcaacttgacggcgtcgctgaatttgatattgctcatcacccatgcataaaattcaatactgtacactattggaatgtgagtgtaaaagctgtctggagtacgtacaatctctcagccacttgacttggtagggagtgcatacaatctatcatcagcagcagcagtggcgtttaggtttaatacaccttaatctggccatgcaccttccagagaaaaactggttttattttttatactttctttctcaaaccctttcctctaggctctgggggcgaccatgatttgcccgtccactaattgacacacaggtttatagaatgtgtgcac

SEQ ID NO: 167750 - DNA, 477 bp, Glycine max
  unsure (1)..(477): unsure at all n locations
agcttccgcaacggcactaagccaccattgtgtgaataccattctgttttgtgggtcctgaaaatgcanagatggaaatgcattgaatgtgttacagatccaaaaactattatacagagagagaaaatacaaagttatttccaaggatataatggcaactttaaatttccaacgaatgcaagtgaattataaacatgaaaaaaaaagaaagaaacctgtgccaatcttcccaatgcaaaagcagacatttccctgagttgtacatcaggagactgaagcatctctatcaaaggtcggacagcacctctctgtcaatgtgaacctaaaaagaccaagagttacaaaaagtaaaaactaatggacacagaatataatatatgatacatcatcacaagagtagcaattatacttccagtactctgaccatcgaaatcttgacttaacaagagataaataatacagaacaatcaaacttgg

SEQ ID NO: 167751 - DNA, 433 bp, Glycine max
  unsure (1)..(433): unsure at all n locations
agcttgtaggattatggggtatccatcacatgtggtactaggtggcggncgggcgatggtgcaaaacaagttctccacatccataaatcacgtataaaacccaccatctcctgttgctcacctccaactgagctcacgtactcccacgtagcccttatcctcgttcctctcaacgccgggtccccatcaatcctcccaagcttccacaacatccaagaaattcaacatcccatcatcacaaactaacaaaaccaagcaaaacagggcaaaggcagaaaactctgcctaaaacacaaaccaaaatcacagcttttcacatacaaatatcccagtaaccttttcttctttgcaagtcgttaaccgttggatcgactcgaaaattntactggaagtctctagtacataagcctaccttttgaccgttgggatctac

SEQ ID NO: 167752 - DNA, 495 bp, Glycine max
actaagcttgtacacataactcggttggttggatatttataattactctatcctatatgactcaaacaacaaagacactaaaagtagagaattacataccctgcagaaaagcaagaatattaataattacactagccactgtgaaaatgtcatggcaactaatttagtaactacttaaagcagaaaagcaagaatattaataatcttacctcaatgccccctccaagaccttcaaatacatttttcagatttctagatgcatcccagacttgaacaattccatggaagcaccctgatgcaagaaactgtccatcatagttaaaatctaaacttgatacaaaatctttatgacctacacaaaatcaatgacaaactcacgatggaaattcaatcaattgaaagatacatgacattaccaatcatgatgttgaaactatcctaattagaaaaatacacatccagtagtagctattgcatgatgcaaataccttgaag

SEQ ID NO: 167753 - DNA, 459 bp, Glycine max
  unsure (1)..(459): unsure at all n locations
tctgagtcacctgcggcatgaagcttgtaggctttgggtgggaaatgatattgatactcaacttanataccaaccttatgctacaacaattgcagcaagacccactatctacaatgagataacaatttttgtttaaaaccttgcatcttgtatgaaagatgttctctctttgggtttggtttaggtcacaagattgaatcccaaggaaccttctcaccattagaagatcaccttcttcataggggtaaacctcttcaatatgctcatcacccttggcttcaccctcacttccacttgaggaaggagaagaggtagcctcctcttggctactatagatgccttgacccctcatcatcatggttttctttgtggggcattaagaagcaatgtggcctttcctaatacatttgaagcacttactgttactagttctatcttgtgaactagcctttggagtga

SEQ ID NO: 167754 - DNA, 461 bp, Glycine max
  unsure (1)..(461): unsure at all n locations
ntgatggtgtcgagaagaaatcacatgtttgtcatcatcttatttgtggagaatgtgaatgtatgtatacatgattttgatgatgtcaaagaagaatctaacaaggctgcttcaaatgataagcatttgcttcaagaataattcaagattgcttcaacaaacaaagccttattttaagattcactaaagaccaagccttgccttaaaacaaagtgctttcaagacatgcaaggctctggtaatcgattaccaggaagtgtaatcgattaccagaagacagggttgagaaatagctgttgaaaaaggttttgaatttgaatnttcaacatgtaatcgattaccatatgtcttgaatcgattaccagcaacgaaactttggaaattcaaattcaaaagtcataacccttcaaattataattggtgtaatcgatacacaaacattgtaatcgattaccagtgga

SEQ ID NO: 167755 - DNA, 400 bp, Glycine max
  unsure (1)..(400): unsure at all n locations
agctntaacctcatcgtctctcacattctttattattgggagctgatccaatccttgtgtccgggctctcagccacttatgatagccgccgatgatcccattactgcttcccctaagctctctgtcctttcttcacgccgcatcccatgccttgcgaactccttggagtacctttgcattggggtcactgaaaccccgtgtaatgaaaggcgtgatgctttcgtgtaatggcgctcctctcatggggtagccaagctgtcttatggcgaggacgggattataattaatacaaccccatgttctcatccagggaacatttggacatccttcgcatgaagatacaatcctgattctttcttccttctagcgagggaaccaattaacagacgcccctncatgc

SEQ ID NO: 167756 - DNA, 430 bp, Glycine max
  unsure (1)..(430): unsure at all n locations
tgaagcctcagatntaaagctagaccatttaagtttcattggtgttntaactgcttgtaaatatataggagcagtagaaaaagtaagggattattttgcactgatgatggataagtatgagatcgagccattgataaaacactatactttcatggttgaagtgctaggtcaagcttagcatcagatcaaagaaaataaactaacatacacatttactacctatttntacttctactaggtgctttctgatctaacatgtcatggaatacaatagtttaaccaatttattcaactacaacaattgggattaaaatagataaagatagttttttttttctaatttctaatgcttactttagaaaatacaaattataaaccttcccaaactattgatgcaacactaatagacttggtggatatccttgacatg

SEQ ID NO: 167757 - DNA, 427 bp, Glycine max
  unsure (1)..(427): unsure at all n locations
agcttgtacttttcacattaaaagatatgtttttgtcntaaacaaaattgacgttgaagagcctctcaatcaggaaacacaaaggggaggaaaaagaacacatgttatcttaaaggaaaattactgtgagtgtaaagcttttcaagcttacagatatccttgctcccacgtcattgtagtgtgtgtccatcttaacatcaatcaataccaatatgtggataaggtatacaaaatcgagaccatcattcaagcatattttgcaaactggaatacccttggttgtggagaaaccatacctgaaaggagtgaccctattattattccacatgagtctagattacgtctgaagggtcgaccaaggtctccacacattaggaatgaaatggattggtccgaatctcaacgtgtacacacttgtagccaatgc

SEQ ID NO: 167758 - DNA, 474 bp, Glycine max
  unsure (1)..(474): unsure at all n locations
aacatangaatggcagtcaggatagcaagattagtttattcatgaatattgggggatgcattatcatacatacccctgaaaacctgttttaaaaattattaattgtcaatcccttcaattgaaagtggtatcaaacatatgatagccgataagtataaaactactgaagtaatccaatttatgataatacatatggcattagacattcagtcaaatttatgaatcataaaattcccagcagaagaaagtgcaccttttgagccacagctaaagctgcctcatcttgactaacacatctaagtatgatctcatgaacctcagaaatgacaccctaaacataagaacccaaaacagatattataacatgtggaaaataattactgatgtaaataaacaatagaatgtataacaactcatattatgcattacagtaaagactgtataattngaataagtgtgaaccacagcattata

SEQ ID NO: 167759 - DNA, 428 bp, Glycine max
  unsure (1)..(428): unsure at all n locations
agcttcaagaatcaagattatagattcaatattcaagtttcaagaatcaagaatcaagtttcacgaataatcaagatcaagtttcaagacacaagattcaacaatcaagagaagactcaatcaagataagtactaaaaaagtttttcaaaacattgattagcacaagaagttttcacaaaatcattaccaaagagttttactctctagtaatcgattaccagtgtttttaaaacgttagatttcaaatttcaacagttttaaatcattttaaacttgtgtaatcgattgcacaaaacttgaaatcgattaacagtgtttctgaatgtttcaattntcaaaattcaaaatgaagagtcacatctattgatgtgtaattgattacaccttaatggtaatcaattaccagtgaccgatttcgaanaataca

SEQ ID NO: 167760 - DNA, 475 bp, Glycine max
  unsure (1)..(475): unsure at all n locations
tgtcatatactgatgttacacttaaccaagctattttctatgcccgcacttagcgaaatgtctagctaagagagagagagagacgtttggtttttcaagacctattgctttgaaaatccgcgcgcttagccgacgtttcaaattcaaaaagagttttttttaacagggaaaaggctaagcttagcgcgtgaatagagaaaaggcttagcaagacatctctcgctaagcgtgtctctaggctcacttagctgaaatcatgtatcttgagtacacaggagtgggcgctgagtgtaaattaaaatcgctcagcgcacatattgccgcaaacatttgagcttagcggcatggaataacacttagctcaatcaaaatgaagtttggctgcaagaagttcagcttagccacaatgattggcgctcagctctatgaacttcagttatagccgtanagagtttatgcttgcaacactgagtcg

SEQ ID NO: 167761 - DNA, 391 bp, Glycine max
agcttgtccgcataaaaatcagaatatatgtattttaaggttcgatacctcagtttttctcaccaagtaaaaatgggtcattttaaggtccaacgccttaaaaggacccccttccaagtaaaaaaaatcgcttgatttcgcatttaaaaagaactacgtaggtctgattttttcatcacaattgaggaatacgtatgagcaaagggaaacgcccttatcgaccacaaaaatataagaacgtaaaaagggaaaagaatataaattgaagtcatatttgcacatttgattaaaggctgccgtcttttacgacagacgcgtggggtgctaataccttccccgttcgtaaatacaactcccgaacctttcacttaaaattcatagaaccacgtct

SEQ ID NO: 167762 - DNA, 468 bp, Glycine max
  unsure (1)..(468): unsure at all n locations
ggacacataaaactaagcttatggcaaaaaatgctggtccttaactcaccccttctttattataggagaaaggggaggtggttgccgcccagaggcttcttgaggaagattcctgagcgcacccccaattgataagttcaccccgtcccagggttgcttacttattaagtttcctgagtgcacccccaattgattagttcacccccaccttccagagtgttttggataaagttcctgagtgcacccctcatgtttgataagtgcacccttattttgtttttttttttttttgctggtttctttccgaaacgtcccagaactttacggattccacgacaatgggttctaaacatnttgaagtggtcaaacgaaggtcgaatgccaaaaaacaatgatccccgaacgaaattatggtatgacacaagggtctaaccagaaactacactccctactctcaagcttgagctg

SEQ ID NO: 167763 - DNA, 309 bp, Glycine max
tgaacttgaccttttcactaaacaagccaagtcggatcttagataggccgagtaaaaggtacttgagaagctggtcgactcattttcatccctagttgggattaacaaaattagaagtcaagaatggactaattaacttaatcgcccataatgcaattttaaccgattagagcaaaagagttttctgcatatttaacctggattagcgtattgttaatttgaatacagcaaagattgaacgcttcaaatactgtgtgtcacaaataaatgtacttcaattttttaccaaaggagagtggatttttttta

SEQ ID NO: 167764 - DNA, 383 bp, Glycine max
agctttttccacaagcaaaaaatagcttgtgtgctagttaaaataagcttattggagagagctaaatttggagccaaaaggctgattttaacatatgcatagctaattttagactatgggagaaagtttatttcatttttccttctaatttttttttctcttgcgggtgaatatagagaaacttatccaaccaggacctttgagaagaacaatacagtgtgaccaattccacaacttaagcaaaataacagaaacaccctaaagtcctttgttgaattgcatcatcaatttctcaaagcaaaacctccccacgcccacaaaagtttctaatcgaagaatgcaaccacaagcacaattcatacaaatacacacacaaaaacgaa

SEQ ID NO: 167765 - DNA, 407 bp, Glycine max
acactataaaactaacctttaaggatagatgacaagaagctcatggtaccttatgggtacaacttgtaatcacttccaagtggatgtttatagctatggaattgttgtcttggagatgataactggaaggagcccaacaacaggtgttcgaatcaccgaattagaagcagagtcagatcatcgcgagaggttagtgacatgggtgagggagaaaaagatgaaaggatcagaagcgggatcttcttgggtggatcaaatcattgaccctgctttgggatccaactatgccaataatgaaatggaaatattggcaagggtggctattggatgtgttgaggaagagaaaaacgtcatacccaacatgagtcaagttgctagaagctgaaactatattatgccacattgtg

SEQ ID NO: 167766 - DNA, 399 bp, Glycine max
  unsure (1)..(399): unsure at all n locations
cagcttctgttataagttaaaatggacttattcctgaaccaatttatagaagctatcatttatgttttcaaaaagcttattttaacttataacctgaccaattttttacttatgagagaagccttagcttcttattttctcttctcttataaagaagcttatttaaccaggccctttagtcctttttagctagttatccaagggatttggttacagtacaaggcaacttaccctggtggaatgtttattactactaatatagtgtagcggcatctcatttctcagggtattgttggttttagatcatctagaattataatgagcattggactttgatatctggtgagtcatatntatgaaggtgtctaaatgtattatgtatgtacatgctcattattt

SEQ ID NO: 167767 - DNA, 444 bp, Glycine max
  unsure (1)..(444): unsure at all n locations
ntactgngtgttggagttgtgtntttttatactagcaattatgggattaagtttgaatttgttttacactagccatcaatttctaggccacaccagattgctgcaaagcacttgggaggcacacaaaaggctaagaatgttgtcttctgaacctttatcaattgacactcatttaccatagcctttgttaatgacccagacccacaatgagtcacaaagcaacccacagatgggtgactcaagatcaatagctgctgaacccaatccccatgtaccacccatcttccctttgttctctcattaaacccttcaggcaaagttgattctattgcttcagctccaatatggngttttaatgcagctaggaaaggcaggggaaaggacattgaaagtcatgatatgctaagacaaggtttcacttcatgtntcttgatggcattcaat

SEQ ID NO: 167768 - DNA, 417 bp, Glycine max
  unsure (1)..(417): unsure at all n locations
gctttgagccaaaatcccaactgatcatttaccttgatcttggtgagaatgtcaatccttgcgggcggaagaaaacaaaaaaagagaaaaggaaaattcccaatcaaagagtgggagaaagttaaaaaaagaaagtcctcgatctaagatcgaaagaaaacataagaaacatgcagaaaggtctntggaccagacaatatctgaacaatacagaattgtcaccaaataaacaagaaaaaaggaaaccacgacctaaagtggccctctccctttgattgccaaccaaaatcctttgcgctagcgactttctcgccccgcacttaacaaaaacagaataggaaaaggctaaaacactcaaagccaaatttcccacctaagaatcattctcaaaaaagtcctattgatccatgatcacgc

SEQ ID NO: 167769 - DNA, 473 bp, Glycine max
  unsure (1)..(473): unsure at all n locations
tagaaatcaattgatcaagtgctcattaattccaaaacatatggggagtatgaaatgagtgaacataacattatatcttgcatatactttgcttgtatcttgatttcaggaattgagttgtcatcatcaaaaagggggagattgtagaagcaaagactttgactttgatgttttgatgatgccatatgattatgatgttttgatgccacatgaacatgcgcttcttaagttaagatcaagacaaaaatccaagagctcaagaagatctctagtgatttagggaggaaattccaaattgaaatagcaaaaggtttggccaagcaatttaagctaaaatgtctttttcaagagatttactctctggtaatcgattaccagaggatgtaatcgattaccagtggccaaaatgatttaaaacagctattagaaatttgaattcaaattntacactatgtaatcgattacacatgtat

SEQ ID NO: 167770 - DNA, 442 bp, Glycine max
  unsure (1)..(442): unsure at all n locations
gagcgtaagggtcaattggacaataaaaattttgctttttatgggngcaactgatatcatcattgataaacaggtaagctttttggtcaagaggcttgtatatacaacaatggccttcatcatatcaacatttatgaatttcattctaaaattcagagattgatacaaaaatcattgctctatgctagtcgttctctcaacaattaagttcacactctcaccgggttatggatcaagctcttctttcacaatcaatctgtctactgactaacattcgtaattgcaagcttacattcttgttctttctttgcctaccatacacaatatgctcaaactcatgataaaacacaagcttgattccaatcatgcagtgcgatccatgatcaccatttcaaaactactgcaatttcgccgagtcaagttaaactgttcagtatgcttc

SEQ ID NO: 167771 - DNA, 446 bp, Glycine max
caaactaagctaaagtatgcccgagtcattcatccctatgagatgttgttgatgtattgtttatcaaaatagccattccttggattatagggttgaaccaagctcacgctcttacaaaaaggttcatcaagtcaagttgaaatatggaagtaaccgtcttgcaaaattggggcaaaagatgaatcgagtcacatcactgcttcgtctattgccaaacatatttaggattattgatgtccttgttactttcagtttcaccttgacaaagatgtcatggaccatgttgaaaatctaaattgattcaaccccatatcttgcgtaaaaattcgcaatacttcaactgtacatcattcgcatgcatccatgcttttcattggttgcattgctcgttgcattctttccttgaaaaataaaatataatgaacttaatcattgttataaaaaag

SEQ ID NO: 167772 - DNA, 360 bp, Glycine max
aaaagtaaagttacttaacctttatttttttatacttagggtgtatttaattaggattttaaaagatcttttatatataaaaaaattgtgtggattttaaaagattttataagaatgtaataatttctaaattttttttaaaaaaactttcatgattaaaattttacaatctagattttaatagatttataaaatttaaaaaaactttttagatttataagatcttaaattactccatgaattatcaaacattataacaataaatatgtatgataggaagtgggtcctaacaataatttgattcaggaccgattcaaaattgtgtctaccaacttgattcagtattgtaatactctattg

SEQ ID NO: 167773 - DNA, 371 bp, Glycine max
  unsure (1)..(371): unsure at all n locations
tgcacattaaagactggatctgtttgttgtccaacgagtctncaacagaagggcggagttttgttttgcattctcaatgccaaaattaatcatacgtgtattgactttttctgttgaacccaaaaacaggccagtaaaaagaactgaaaaagcagatgggaagttggggagtggggggggatttgtcttctaaatcagaggaaacccttaagagtaaaaatagcgtatctaaaagcacagtctatgtacctgatcaaaatagactaaaataagtatcatgacttccatgctcacacatgacctcatcctaatctgaccaaccccatttgaagtatattgagaagcaaactatggaaaancaggnaaatgag

SEQ ID NO: 167774 - DNA, 411 bp, Glycine max
  unsure (1)..(411): unsure at all n locations
agcttaggagtcacgtcgcactatgtgtcnctcatttcccataccaaggtatggtcttatcacttttcattactttattatttttttattccattttggctctttattatataaaaaagtattgcatagttacaatatctcaaaaacactagctaaagaggatcacttgtagccagtatttgcagggttatgatatatcaagaaagctatatatgttgttcgggaaattaatgtcatctactttagtaatattgaactcatctttaaatccataaatcatatcaattttgtgtgaatcatattcaatttaataattcgatacaattatcaattgtcttcaataattcttctatataacatttatctcattatataagggcactataaaggactagcatattctttttatgc

SEQ ID NO: 167775 - DNA, 411 bp, Glycine max
tcccatgttacatgcacaatttagcggtacagtatattatttattgtcattgataagatagttgtaattgattaatactttggcactgctcttacatataacaaaccactaaatttgtaacaattaaggttttgaatctgatatagaagtacagttttactgtaatttattgttttcttacaggaagcccataagaaatatatattaaaaaagaatgcaaggcatcagtacattactaatggggcttcctgttggggagcatgtttgagacacttccttaggttggaaacagttcacgcttctatcacattggtgccatggatcatgataagaagagggaccaacgagatatcatataatgtaaagggaccgagaattttatgaaagcaagttaatctcttactatatcgt

SEQ ID NO: 167776 - DNA, 423 bp, Glycine max
  unsure (1)..(423): unsure at all n locations
agcttatgagcatgagaccgttcttcaccttttgataaagaacatcaaatgattcctcatcctctaacaacatcccaaaatgttcaccaatatcagattcaagaacctgtattgtgttaactgagaagaatctatggacgacactaaaaccgcaatagtgccaattatcttcaagcaatcatccttgagaaaatttgacgtctcaaggtgtctccgtttgaaaaaccgcgtatagcccctattacacaacaagtgcatcattgatcactacgtaatgtacaccacanaaaatggatacacgagctaataaatcatgatgatatccaaatcatatcaccacaatcacaaggttctctagttcctttgaaaatataattattatgtcttatattctaataaaagagctatctctctacccctgac

SEQ ID NO: 167777 - DNA, 459 bp, Glycine max
  unsure (1)..(459): unsure at all n locations
tctaaactntatacaagaacgaagctctgatactacttgttagattagtggcctcagatatcttaagaagggggggggggtcgaattaagatatttcaaactacttcccctaatctaaaattctatttcactttttattcaagttatgaattcccttaatgacaatcttcttatatatttattcatataaaacaatctgtatatgaatataaagcacctatgaataaatgagattaacggaagagagaatgcaaactcagttttatactggttcggccacacccttgtgcctacgttcaatccccaagcaacccgcttgagagttccactatcttgtaaattccttgtacacgttctatacacacaaggacaaccccttctttgtgttagaatacctttcaacaagagactctggtctctaatccttacagatgacagacaaaaataataatctctctc

SEQ ID NO: 167778 - DNA, 423 bp, Glycine max
agctttgatggagaacaaccttatgttgtttattgtacacgcatggagaagaagaaagcgcgagcaaaataggtggcgtctaatataatttaaattgtaagttcaacatcaattttcaataaaaaaaaccaatgttaacaaattcatgttaacgttaacatcggttttattcaataaaccgatgttaactgatcatacgttaacatcgggtttcagaatactgatgttaacgaactaaggctaacatcggttttctgaaaacccgatgttaactaattaatgttaacatcggtttttccagaaccgatgttaaagtcactttgttaacatcgattttattcaaacccgatgttgaagtatacacaatattcacaattatgccacgactgttatcttaacatagtgtttttaaaaaaccgatgt

SEQ ID NO: 167779 - DNA, 466 bp, Glycine max
  unsure (1)..(466): unsure at all n locations
tactaagcttgtaaatggctagacatgatacatgtcagggcttggtttgtntttatgataaaagggatgccccacattatttccatgacacaaatgcaaaaaatgatgattcggaaactttatgcataactggtcatgcatgcacctatgcggacactcaagtgtcaaatttttatggtcatgtgatgctagggctcacgattcatttcctctattttagtcaacccaacgtttccaaaatatgttcttttatcaatttgtgcattcatccgagtccattttgggcgtctgggaaaatcttcacagcattcacccttcaagtgtatacacattttttcaaaaactagttatgatcagtgaagttttccaaagaaaagttggaagtcatcttcttttaaaagcatgttggtttttcagcttgacaacttatatttctttttcctccctcttctttntgctttatcat

SEQ ID NO: 167780 - DNA, 357 bp, Glycine max
atttaactagaagaaaggtaaaatggctggctattaactcttaacatcaattcctaattattacaaaacgtaaaaaatgataaatttcttctacttacaaccagaattactacaacctgtgcgccatgctttactactgtcttaaaaattgaatcatttattaatccgatcaaagttctgaaacaatatggaaattagattaactagtgagttaataattgaatggcatgaattgaacggcattgaacaaagagtgtctgtagaaaaagttattcattttcacttttatttttttaatctcacactactgaaagaataaagttaaaaaatgcttccatcttacctattttttaatta

SEQ ID NO: 167781 - DNA, 370 bp, Glycine max
  unsure (1)..(370): unsure at all n locations
ctagagaggtttcaaattacttatgagtgtcaaataaaaaaacaaatcatggttttcaaatatattanaaagaaaggtaatattttctctactttgctagcaggaaagttagttaaatgttataagagaatttagaattagaaaaaaaaaatacttttcaggaaattaaaaatagaaaacattaaaaaaatattatgataccctctcaacataacatctaaacataagtttcaataaaatatttttatgattaattcattctttaggttaacgagaacctggtgaacctttctttattatcagggttgtgctgtatagcgaattatatagaccaagatatatgttgtccgtgatatatctctaagcaaat

SEQ ID NO: 167782 - DNA, 432 bp, Glycine max
  unsure (1)..(432): unsure at all n locations
gacctatgaaactcagctgaaaggaaccgcctgaagctgagatgagttgttttgattgcgaggncctaaggtggaggagacatccccactacttgtatttctgcaatctttcaactttctcttcttttcgttgtaaaggaagcttcccggttatggaaagctaaatcctctgttggatcttccttgtaggtatttgatgtaaatatctttttatctattaaatgatactttgtgtgttcactgtgctatcagaacttcattctaccatgccttttccttgatcacgtagatccatgtgtttataggatcattcaaccgtggaaacctggctgattcttagaacttgatatgataaggctagtttgtcgtattttcacgaggaattcggggacagtaacctacttgttgtatgtctgtcttaatgcggccctg

SEQ ID NO: 167783 - DNA, 432 bp, Glycine max
  unsure (1)..(432): unsure at all n locations
gcttggagaggatgctgcaatgttgtgtatatatagagagagggnggagcacgaaattgaaggaagataagaggaagagaagttgaactttgaggtttgtctcacaagactctcattcatcaaagatacaacaagtggtacacatgcttctatttatagactaggtagcttccttgagaagcttctttgagaaaacttccttgagaagctagatcttagccatacacacccctctaataactaagctcacctccttgagaagtttccttgagaagattcctaaagaagctagagcttagctacacacacctctctaatagctaagctcacctccttgagatgagaagctagagcttatctacacaccccctataatagctaagctcacccccattccnagatacatgaaatacacaaaaaaagtcctactac

SEQ ID NO: 167784 - DNA, 471 bp, Glycine max
  unsure (1)..(471): unsure at all n locations
caactgatattggcttatcgntaatgtgtttaactttaaactaacagaaggactatnttgaacctttttaaaaaaataaaagaccaaaatgaaccaaaaaatataagatataagtcatttggcctttaaatatccatgtaaaccaaataggtttcacaccttcaggcaattcgacaagatgccaaacatcattgtcttgcataaacttcatctcatccttcatggcatcaatccatttcttagagttagaattgtgcatagcttgacaaaagttgattggatcttcttttgttaaaccaataccatcctcatgttcttggagaaatataatataatcatttaggattgcacttctcctctttntaatggatctccttaatgaaacttcttatggttgttgaggttgctttataggtatttgatggagaatctcattgttgtcttggtctagaacagtgtcatcaacaatag

SEQ ID NO: 167785 - DNA, 433 bp, Glycine max
  unsure (1)..(433): unsure at all n locations
tgcggcatgcaagcttgggtcatgggttggtgtatggattttttgtttcttattctatacacaatgcagatgatagacatgttgaatgacaacattacatcgaaacatgggtgaaggaatcccaacaaggggtctacctaggagcttacttgaatcaataagtaaaatttatgcaaatgcttgtaagagaaatatgtgcattatatgtacctaattattgttgaattcagggcccattggcaattggttgttctatgtcatatgaacgttgttgctgtctggttctgttcgttgcgtaagaagcttgatattcatatcaaaggtgcaattaacaagttaagttttatattataactcatttaatgtaatgtaaacttggattgaaaatagtntatgctcccatatagttgatgtttttctaactgatcaatga

SEQ ID NO: 167786 - DNA, 465 bp, Glycine max
  unsure (1)..(465): unsure at all n locations
actagctgatcttgtacataaacctaaggatgacttgtttgttattttccaaatgcgactnggacgcaactagacttaacaaactacattattcaaactgtctttagtttctattgtgtttaccatatttgtaacaagcttgactcatatcatacatatgctctagctggaggaggagtaagagattgtgttttgatattattgctgatattatattttttattagaatattttatgtcttattaaccattaattgattgatccttgtaattaatgtcgattttctttctaatattataaatagcatgaggtgtgatttaaataaaacattgttatagtattaatgtaatattagaaaacctttatattatacattatacggataagatatgctatgcagttgctaatccaaccatagaataatttcttctacgataacctctgaacatggctggaaaaaagatt

SEQ ID NO: 167787 - DNA, 440 bp, Glycine max
  unsure (1)..(440): unsure at all n locations
tgcaagctntcatagacgagactagttgtttttatatctaggatcgngtacaagaacttattgtgtatgtgtgtcttaatgcggccttggttgagtctagtcttacaagaggaatctgcagatgaggcttaatcaaggctaggctaggctaggctatcatgaggaatcggggtctagtagtccaagagacaacataggaacgcatgagcattgttaaataaagaaaatcctttttagcatcaggaacctataggaagaccaatgcattctctactttgttttacacaatatttctcttgcgtgattttctttctgtttgcttagataagttaaatacctgttcataaccacaattatattttcacaccagacgcctatctatcgaaatagcttgccagataacacaagtaccccaagagtttgatactcggttcttactg

SEQ ID NO: 167788 - DNA, 466 bp, Glycine max
  unsure (1)..(466): unsure at all n locations
cgcaatgaaagatattgnctattcaggactctggcgtcattctatacacacaaaccaaggccataatggagaatatgtcaggtagaaatgatcataatcattggcagaaatattgactactgtaactgctactaaacttgcaatggaagacattgtatatatatattgatgaattttgcattcactaacacaaatttgtttaatttgtacgctcaaatctattagcttatgtgttcaacttgaaatatgtaaatttctattattacatcattttatattggcattattgtaactcttgtccagcacatcacaaatttttctttgatttctcttggccatagattagacctgctttatatagttctactttgttagatttaaatacaacattatagtggcgtaagccatcaatgaagttaaanattgcaactgaaatatcgaacacatgatcttagcatagcagtga

SEQ ID NO: 167789 - DNA, 411 bp, Glycine max
gctctcagaatgttcaaaacaataatgctcaaaatcactaataacagaatgctcatgatgctcaaaaggtactaaatgatgtctaactaatctatgaaatgtcctatctatctcaggatcaaaaggttgtaagtcagatggattgcctctagtcatacattatattcagcatgcacaactaggtgccttcttatgcaagtaacagtgtatgtttgaactacagctaccattaaatgatatccaaatgacccgaaaatttgtgatcaaccttataatatgatgagaagatagcacacaaaatctcaaacgataattcaaagtctaactatcgaagctaaaaatgataagttaagacgaataagagaataatacttggagaacagaaacttctgacataatgctattttcgaa

SEQ ID NO: 167790 - DNA, 412 bp, Glycine max
agcttgcttctacataaatgtttgcagcattattcttcttgttgctcattgactccagattgctgcaaagaaggatagagatctgtatggtgatcagcagaagaacatagaccacagactcttgcaacaggtgcagatttcttattcatggcaagctgagttactaggttgaccaaggcatcaagttttccctcaagctttttatttttagcaaatgaagatgattccgtggcaacctcatggactcctctaaggacaatagcatcattgcttgcactgaattgttaggagttggaagccatcttctcaatcaaattcctagcctcagcatgagtcatatcaccaagggctccaccactggcagcatcaatcatgcgtctctccatgttgctaagtccctcatagaaatatt

SEQ ID NO: 167791 - DNA, 431 bp, Glycine max
tcttgagaagatcatggccccatgaccatgatcacggatctgtttcttgaacatattatatgctttgttatttttaaatatattttgtaattgagcattatagactctaattgagggttcttaattattgatgcattgacggcatatagcaagagcataggaatcctcctccttctctctgtattccagcttgatgttctttcttttttgttttagtgtccatggctatgtgccataagtcatctttgttatggaattaaggcattgcactttacattagtttaattaatctaaatagtcgacggtttcttcaattattttcttttaatacttctcttattgcttcttatatatgcttgagacttgatcactgtttgcatgatgttagacactaacgaatgaattgagaagtaaacttaatatgttggaac

SEQ ID NO: 167792 - DNA, 417 bp, Glycine max
  unsure (1)..(417): unsure at all n locations
gagctcccacaacagacaagagagtccacatttctttattatatactaacaaaaccaagcggagcagagcaaaggcaganaactctgtccaagacacagaccaaaatcacaactttttctcacttatagaccccaggaacatttccttcgctccaattcggtaaccggtggatcgactcgaaaatttttctgggagtctctaggacataagtctacattctgaccgttgggatctgtaacagacatgcagaactcattctgtactactctgtccacagccagcaaatacatagcatttttctgcacttatgcaaaattctgctgtacatttcaacagcaaaattctgcattaggtgcagatttcgaaatcacactttccctcatgcaaaatgtccaaattgaatcctacaaggtcca

SEQ ID NO: 167793 - DNA, 335 bp, Glycine max
  unsure (1)..(335): unsure at all n locations
taagcttcgcctcnacacctcttgttggaaaggctgaatctattcttctcttctacgtttaaactaacttaaacagagctccatcttcatatccctctcgctggactagactcagcttaaatagcttacgagagtttagactaatttagcctaagctttgtcctcaaatccctcgtgtgggacttgacttatactaaacagcattattgtaacaacatattggaaaccaagactttatccgcagatccttcattcaagactaagtttcaatcctacttcattcaagttctaaggcacctatccatgcacacaaatggttgatcacaccaagagct

SEQ ID NO: 167794 - DNA, 416 bp, Glycine max
ttctttcacccatccctcttgtatcaacccttcattttgtttttagatctcctttgtctcttccagattactcctataggtgaccctattaagaagtgaagcttccaaaataagatctatttaatgctcaattcctcttaaaggaggcaagccatggggaatgtcttgtaggaagacatcctcaaactcctttaagagtgtatcaaaaccttaaggcaactcaagggcactagaagacaaacacatgtaatttggaatgagtaaatacattggttgtctagctagcatcactctttatacctccttaggaacaaactctcttctatcacttattaattttcaccccttcttactcttttcttttgatccttattatcactattatggctctgttttttgcttcggcttttctctct

SEQ ID NO: 167795 - DNA, 378 bp, Glycine max
  unsure (1)..(378): unsure at all n locations
agcttcagctttctataattggttattaagtatattccataaatacattnttggcatatgttctgatataaattactcctctcggtgtatgtaacattgatgtcagtaacattgatattaaatgttctgacaaacttaatttttggcatgaatggttgcctagccttctctaatgttcttgtagtggatgatcatttgataatagaatctagtttacattgcaactatctgctagtgatatatatgaataaagctaggtattaaaaaccacaattctaatatttaatagctgaagtattgatataaaatttgctatctagcatgcttaatgagatgtgttatccacatagtaacttcttttctcagataataaataat

SEQ ID NO: 167796 - DNA, 480 bp, Glycine max
  unsure (1)..(480): unsure at all n locations
cgctggagaattatgggggacccatcacatgtgggactatgtgtcggtttggcgatggtgcacaacaagctgtccacatccacaatgcgcgcataaacccaccatcccctgttgcccaccttcaactgagctcacgtactcccacgtagcccatctcctcgtttctctcaacaccgggtccccatcaatcctctcaagcttccacaacatccaagcaaaacaacgttcaaacagcacaagctatcacagccaagcaaaacagagcaaaggcagaaaactctgctcaacacatcaaccaaaatcacagcttttctcacgttaagaccacagtaacaattccttcgatccaattcgttaaccgttggatcgactccaaaattntactggaagtctatagtgataagcctgcatttgaccgttgggaatactatcaaacatcacgactcattctcactatacttccacagccaccacacacaa

SEQ ID NO: 167797 - DNA, 246 bp, Glycine max
agaaaacacacgagggcgccaattcttccaccagcgacaaaaagaaaccacaaaacacccgcgcacagaaaaagaagcaagaccaacgggaccgaaagcgcaacaatacaacaaaccgggagaagaccaccagcaacacaaaacaccccaaagacatgaagaacacagggtaggccaaagaaaccaagaagggacgctgcacgaccccagcgaacacagaagccatgaacacacgaagaaaccaaa

SEQ ID NO: 167798 - DNA, 372 bp, Glycine max
cgatttaagcaccgcggctgcagctgattggttaactgttgtctttattggactgagaatgatttgggcacatggtgggagaatggatttcaaatctgcactttgcgaattttgctgtgaattggcgcaaattttgcacaagtgcaaaaatgctggtgtggtggctggaaagttaatgcgaatggtctggatgtttgctatgatccacggtcaaatgtggcttatgcactatatacttcagtaaatttggagtcgaccacggtaacgaatggatcaaaaattgtactgggctttactgaaaactggatttggtgacggtgacaagttttgcttgcttgttgctgctggatactggcgttgaagtgttgttga

SEQ ID NO: 167799 - DNA, 449 bp, Glycine max
  unsure (1)..(449): unsure at all n locations
tggggtacccatcacatgtggcactttgtggcggtcgggcgatggtgcacaacaagctttccacattcacaatgcgcgcagaaacccaccattccctgttgcccacctccaactgagctcacgtactcccacgtagcccatatcctcgtttctctcaacaccgggtccccatcaatcctctcaagctttcacaacatccaagcaaaacaacattcaaacagcataagctatcacaaccaagaaaaacagagcaaaggcagaaaactctgctcaacacatcaaccaaaatcacagcttttctcacgtaaagaccacagtaacaattccttcgatccaattctgtaaccggtggatcgactcaaaattttactggaagtctatagtgcataagcctaccatttgaccgttgggatctactagcanacatccagaactcattctacattact

SEQ ID NO: 167800 - DNA, 256 bp, Glycine max
acaaaataagcctcgaaaacaaacccctatcactaattatattaactagtgttacacgtagtttgtaaatctgatccatgaaatgccgaatgcagtgttgccactggatatggctgtgaaagggccacaaaatcggcatacttgctcataccatcaataacaacccaaatagcatcctcgtaatgggatgggaggacctcaaatgaaagcaaatggtatacttccccaaatctgactagtatgaaataggaaggtg

SEQ ID NO: 167801 - DNA, 381 bp, Glycine max
  unsure (1)..(381): unsure at all n locations
cgctttattatttattcaataccatgtgatacgctccatatattntataataaaacgttatgtttgttaacttaaacaatatatatatgcaatcttagttgctcaaataatatttctcaaagcaaaatacctaccaaagttccaatgtggacgagttgttagctattgttcatgatcttgatgagtattaagttgtaaatatgttatgagtcttttttataagaaaattgccataataattcgtgtatatatataaatatcaaaaagatctatctcagttggttgagtaagatgcatgaattattgtaaactcttaatatctatctcttattcttattgacaaaatatattaaaattttatacattccttcacnccaatca

SEQ ID NO: 167802 - DNA, 455 bp, Glycine max
  unsure (1)..(455): unsure at all n locations
tacacaaacattcactagtccaacacacactaaacaaattgtcatcattagtccacagttccaatcaatcatgctccgtatgatgcatgcacctgacctcaactctcaaatgcaatgtggtaccatccccaaggaaatagcctaagcgtgtccacacgacactctcacttaggaaaactaggaaataagtgtcgaggtcaccctgtcgtgcataggcaactcccctcccatggtgatcagcctgagtctcaagggagttccaaaccaagtaacatgcccccaagtacaagtattcctccgcatgagaaactacaagtacttactgacaaagtttatactatttacatgtcatatgaagtatgaaacatgggcaccatcaaatgcattgaccgtggataattaaaggctctaagccatcccnctctagagatgcttaaaactctntaaccactata

SEQ ID NO: 167803 - DNA, 438 bp, Glycine max
agcttagagtaacttacctgttcaaaaattcttttgtctaaaaggtgaagaagtatatttcgtagttgatataaaattcccctgtcataatcaatattaactaataaaaattactaaatataatcaataatatctcaaaacggaaatctccaatttcttaaagcatgtaaacagaaaattaagaaatattctcaagttgtgcgcataacaggtaaaatacaagaaaaaacagaaaatagaatcaatttgaatccatattgatcaatcaactgtaagccatactgtactaacttccttaactagaacaacagacatccatgtttaaagaaaacttatgaaaaggagtaacatttcatagaactgtcattttcaaatgtctgacccatgcatgatggcaatgttatacttatacatttgcaatcttttatgtaaattctt

SEQ ID NO: 167804 - DNA, 484 bp, Glycine max
tgtccatgtcaagagccaacaccaagtggctgatgttattacataagctcttccaggaccaacttttggtaaagtcattgccaagttgggaataattaacatctattcgccaacttgagggaggtatcacaattctgttgtaaatatagctttagttagttataattagctgtcaaactattatgacatatatacagttagttagttactatgtagttagttagttactctctttctgttttgaatcctttgtatataaatcatttcttgtaacgcattcaccaatgaatttcaatctgttttcattcttcactttgatatctgacatcatcctttcctttggctcctctaatggatctcatggtcgggtaccactacatgcatagtctcaatttcatatttcaaatcttgcacattcaaacaatgttgagtattaacaggcatatgttgtgttaaagtaaattttttacatgtgaactaatga

SEQ ID NO: 167805 - DNA, 437 bp, Glycine max
  unsure (1)..(437): unsure at all n locations
agcttcttgcgtagcccctcttggtgctctatattttctattaacaaatccctcttattactagctattatgaatactttagttcctgaatgtacaaccttcaaatagttgctcgttcccctctttgttttctgcaagaaagaaaatcaatatcaaacaattcaggctgaattgttatcgttattattactcgaaccataacgaataacaactaaacaagtctctcttattcaaatggaaatggatgttgttccaccagcatcatcagctttggaacaggattttggtctccaaataccatggttggaggggattagatcaagggcctaaaaagcattatntttctacttggtgggatgacctaagagccatcatccaacaccagagtatgaatcctgctcttaaccaaatttgctggaaggtgggtaggggagatc

SEQ ID NO: 167806 - DNA, 453 bp, Glycine max
  unsure (1)..(453): unsure at all n locations
tcacttctaaaagaagaaaataagacgacaaatgatgatatggactctcncataaanaaaaataaattctccatgagttaattgttagaagctcaccaatataacttctctaaaagatcagatgacatctacaaattagttaatgaaaaactcattttaattaatggaaaagctcatttcattttttttcttattttcttcttctagtaatgtttttagagaatcttacttgctggtgtgggtgtacgtaccgaagaagtaatgtgattgtgtgtttgagatgaacacatttcatttaataatattggggtgtaggatattntnagcattttcgcaatcttgaggtgttnctaattaaatttaatttgcatgctatagacaaagatttcgaataataatcttatactgtgattaatatcaatagcatatttatactaggatcagagacacaca

SEQ ID NO: 167807 - DNA, 438 bp, Glycine max
  unsure (1)..(438): unsure at all n locations
agcttgctaacccatggaagctcctaatattttttctttttnntgggggggccatacttggatggccttgattatctcaaggaccacttggaccccatttctaccaactacaaaacctaagaaaactatattatctacacaaaaggtacacttctctatatttgcataaagggtgtttttcctaaggactgaaaaaacttgtctgagatgtcctaagtgatcatctaggctcctactatacactaaaatatcatcaaaataaacaactaccaatctacctatgaaatcccttaagacatgatgcataagcctcataaaggtgcttggtgcattagtgagcccaagaggcatcactagccattcatacaaaccaaactcggtcttgaaagcaattttccactcatcaacctttatattctgatttggtgataccacttt

SEQ ID NO: 167808 - DNA, 440 bp, Glycine max
  unsure (1)..(440): unsure at all n locations
tccattttcaattggagcgtctcgatatattacgggtgtttattttactttcgngtataaagcnattgtcgattcaatttgctcagagcttcggctctaacatttgagcgtctctaaatattacgggactcaataagacatctgagtaaaaagttattgcactttgaatttgctacgagcttccagtttcaacttggagcgtgtcgatatataacgggactcaatcggacatccgtgtataaagttattgtcgtttgaatgtgctacgagcttcattttcaattcggagagtcttgatatatatcgggacttaatcacacatccgagtgaatagttattgtcgtttgaatttgacaagagcttccgatatcaagtggcacatctctcgatatattacgagactctgatggcatctgattaacaattttgtcgtttgaatt

SEQ ID NO: 167809 - DNA, 269 bp, Glycine max
  unsure (1)..(269): unsure at all n locations
taggacgagctcacttngtgaaaacaaggtgtttttaggcggcaaagggctcttttgaatcgtaacagtttgtaaaaggatgcttgggatacgcatggaagagagtgtttgtagaatgaatgtggggggaaattccgatgaaggatcaacagggttccttttactttatagccagttttatctctgagagacattgcttttgacccatgtcttatacaaacaatccaaactttagggctccacacttatgaatccgaatattacataca

SEQ ID NO: 167810 - DNA, 202 bp, Glycine max
ctcagcttaatatgtgaaacaacaagcccttgagcgtcatcatgtataccataaaatgcttccaaaacttccgcaaaatatggatgtacctcacggtcttcaacggtcaaggaggcatccatagagtctgccatcaagcatacataatcaactccctcttcactaaaagaatcagaggatgcagatacattgactccctaag

SEQ ID NO: 167811 - DNA, 280 bp, Glycine max
aataatacctcactggctaaaactgagagattttttttttaacgcgatcttgctcaatcaggcttcaggaaacccacaacttgaaattaatgttgtcccgaaccctaagtcaaagcacttttgagcttcccttataaggagggaagacgtgatactgtcagcctacactgggatacttaagaattttaaaatttctgtgcgaccccttgaagattagtgaaaatatgaaactttatctgaaattaaattggcgtgcccccctaattaaagtcttcatttt

SEQ ID NO: 167812 - DNA, 469 bp, Glycine max
  unsure (1)..(469): unsure at all n locations
tcagtcatcatacccaacagccttccatatgcatgcattgtattctctngaaggatgattacacgcctgtgagatatccacagacgaggctgagtcccaccattcttgatgtggtgaagaaggaggtgatgaaactactagttgcagggatcatttattccatttcaaataacactcgagtgtcacttgtccaagtggttcctaagaattgtggcattgtaatgccttgaatatttgctaactgtaaatcaacgttcaatgtattttcctattgtatttgattgatctggatgagttgaggtgttgtgctaactaaccatgtgtgatttgcttgatgtggatgtcgagttatgtggagttctattgacttaatttgaaatatttgaatacaacgttacctaaatctattaggtcaaaccacatcccttctcataatggatgttttataatcacaatatgaagtttcatt

SEQ ID NO: 167813 - DNA, 330 bp, Glycine max
catgcaccctcaaatggtgaggatattttttatatttagaaatacacgagtgtggaaagctaaaataaaatctgacgacaaaaatttaaaatactttatatatttaccaaagctgttcttttgaaatagggaaagcactcccattgtcagtgacttccaaaatgtgaaacccttatgggatggagaaacttaggacttatatacctaaccaatggtgtagcacgatctcataatttaaaagttcaaaaaagttattaagacttttgcattaatagattcttggtataatataaaaaatactgactacataggggacatcgttaatattta

SEQ ID NO: 167814 - DNA, 375 bp, Glycine max
cagcatgcactgtaaggcaccaggacttaagttttatatggggattcacctatactattgaatactggatgccaccttatggagatcatagagattcctcttctttgtcgcatcattttcattcacacaccaaactatgcactagggtatcgatgcaaggagtactttccttgtatgagcaagggccaccatacccgagaagactctctcattatgtgctgggccccatacactgggatgacttatagcacactgggcaccccttgttcaataccaatgtgaggacacacttgagagatccaaatatggagagttcatcaagggcaagacctatgatctatgacaggatgagatacaccgggaacccacaaaaat

SEQ ID NO: 167815 - DNA, 476 bp, Glycine max
  unsure (1)..(476): unsure at all n locations
ggaccaaaatctaagctttcgaatatatataaagacaatgacattgagagtttattcttgttcctttgatgagtctaatgccattcttccaaggaaggattttttagatgatatttcagattccttagaagatacacatattcatggaaatgactctaaagaaaaagatgaaggaagcaatgaggattctcaagataatggggctagaggaaataatgaacttccaagagaatggaaagcctcaagagatcatcccctcgacaacattattggtgatatatcaaaaggggtaacaactagacattctcttaaagatttatgcaataatatggcttttgtatctatgattgaacctaanaatataaaagaagccatagtagatgataactggataattgccatccaagaagaactgaatcaaattgaaagaaacaatgtgtggaaattggtagaaaaaccttgaaattatgctgtca

SEQ ID NO: 167816 - DNA, 336 bp, Glycine max
tgaatgatgtctataagaagcgttatgtatatatttggaaattgaaaagctctcacaacacttagagcatcttaagagagaagactatgaggttagagatcatatccatttataagacgattaagattcaggcaactagcaaacaaactttaagtctttttatttgtttagagcccatagtgacatagtgggacaaagaatattggggtgtttcaagcttggtgtaaagcttgggttgtagagccaaaagtgataataatgaatacttgtgaccttgtgaacatagtcgaacctgaggacttgccaataactggacgtaatcttagtgattaagac

SEQ ID NO: 167817 - DNA, 472 bp, Glycine max
  unsure (1)..(472): unsure at all n locations
tctgaatgagctaagatcacgtgatgttatagtttattattattagaagaaaagngcttagaaaaagtaactcacaccttcaagttttacacatctttttgtgtgtgcatgaatcgctaaaggcatactataataggtgtttttagtttaagctaatgttaggtttctcttatgctcttattcacaaatgaccgtagtgcctaagtctcttttgctagcgtgggaactgtaaattggttgtgattgcttgtaaggattctatatgtatagtgaaaatctatctctaattctagtattaatcagttgtgtaaaggttcaagaatatatctttgtgaaagaaagaacttaatgaaggattttgtgcaaagagtggattgattaagtattggttgagttcaatttatgaaaatctttgtgatacaatccgtagaacagaagtttgtaactctggtttaaaagtttgtttgctttg

SEQ ID NO: 167818 - DNA, 363 bp, Glycine max
atctcctataaatcacgagggatggaggggatcgacatattaaaagaatgatgggtggatttcgttattgttaagttgaaaccgttgactgcatgctcactcacgacttaaaatatatgcttaaacacaaattcaaattttgctctcaatttaaatcacgctggctttttattcctcccttgtgtctaattatgcatatgggagacaagtcctccgcatggctgcagggtccagtacattaaaattaatacagaacgagtttctgttgagatcaatcggccacacatactatatctggaattgtattaaatgtgaatagagaagatcattgatatcttggatcgaagacgtatgtaatcactc

SEQ ID NO: 167819 - DNA, 179 bp, Glycine max
cattttaaaactacggatagtcaaataatcattgattatcttgaggtgtgatgatcacgcgtggaccttgttggctgattgttcgtgcacattattatcttgtgacaatctatatttacaatatgaagatcaactgttaaagctaatgataaagaaaagttccctacatttactatatt

SEQ ID NO: 167820 - DNA, 248 bp, Glycine max
  unsure (1)..(248): unsure at all n locations
tttcganggcagaagaaatatttagcctgaacaccaaaggactttgtagcctctttacactatcaaatatctatgccgcctatggcgaatggtcataagtcgtgaatgtatcgaatttgattaaagaaagaaatttccattagcagcctctttttacttggattgaaaaattcacgtgagattctttgaagtggcatagacaaataatggaacattatggtccgcgaactggatattngagtatgtga

SEQ ID NO: 167821 - DNA, 372 bp, Glycine max
  unsure (1)..(372): unsure at all n locations
agcttagttatgagaggggtgtgtgtttctnatctctagctactcaaggaagttgtgtcaaagaagcttgtcaaggaagttctctaaagaaagcttctcacagaagctttgtaaagaaagcttctcacggaagctacctaatctatgaatagaagcacgtgttcacttgttgtactttgatgaatgagagtcttgcgagacacaactcagagttcaacttctctccctttttcttccttcaatgtcgtgctcccccctgcgtctttctctcactctttcttttcctacattgaagcatcctcgtccagcgttgtatccaaggctcatcttggtggtgaagctccttcttccatggcttattccttaatggat

SEQ ID NO: 167822 - DNA, 385 bp, Glycine max
  unsure (1)..(385): unsure at all n locations
tgcaagantggatacagaagacattttttttttatattcggaagacgtactctgagggggtctaaaaaaccttttccgcacaataaagtgggcctccgataactccataatcgttctgcaagacgtgtacagtaatttttcgaaagaagggtctttgtaagtaattttatgtgattttttaaacgcaatatgttataataatttaattttataaataaatcacgttatttaataaataattttgtttacataaatactagtaacataattatgactaatttggttttcttttttacgacatggcaattaaataataatttggtgacactctttataatttgatcaaaaaattacaaattccgttatgtataaaatatataacttt

SEQ ID NO: 167823 - DNA, 312 bp, Glycine max
  unsure (1)..(312): unsure at all n locations
tccactcactnctacgcgagacggctttaccactccgcaatcacaacgcatggagaacattctgggtctcatcaaacttcgtatcaaaagaggcacttatctctaagtttgtgatacttttacctgtgacccatttgtctttgtcaccatggccgaacaggttagaagcttgagattatactttcttattgggtatgaattatatttttctatactgcaccttgattaattataggattcgtattgagactagaggcagtgaaaaagagctttaaaggtcctaagatcttcgctatccagtcttcaagatct

SEQ ID NO: 167824 - DNA, 444 bp, Glycine max
agcttctatataagctgaacgcatttatcatataacacaagttgagttttattcagaaaattagagtttatctcttttatcttagtgagagtgattctcctaaattcttgagtgattcaagaacaccttggctgtatcaaaggactttcacaacctttgtgtgttgccctcgctggaaagagtgattctttccttcctttcatcatcacccttgttctttcaaaccacaattccagaaaatccacctctgcccagaattatctcgtggccataactcccattttacgcactcaaattaagtgattcttgagcctaaattgaatttcaaaacgagacctttcacctcgttttggaatcacctcatttggagccctgtagcttcagttattgccatttctatatttctgtccagccaccacttaacctacgttttaccatcccatt

SEQ ID NO: 167825 - DNA, 481 bp, Glycine max
  unsure (1)..(481): unsure at all n locations
gggactaatccagtcttagtagggatcgtgggttagtatcttatgctactacatagaacataaaagcatgattaattagagaaatatccttatatacattagcttgtttgttagaaagacccaacgtttttacctactattgtcaattttattaacttgcatttactattttcatcatagaattagtttactttacctttaatcattaattatcaatgcttgttccattaatgcctcaattctgaatataattttgtctaagactagttccctgagtttgatactcgaattcatccattttaattttaaatacttaatgatctgtgtggaagcaaagctttccaagtttattttgatgatgccaaagactcaagtcaagaatctgtggaagcaatgccttccaagattattntgatgatgccaaagaatcaagagtcaagcaagtttcaagaatcaagatcaagattcaagaatcaagaat

SEQ ID NO: 167826 - DNA, 431 bp, Glycine max
  unsure (1)..(431): unsure at all n locations
aagctacaagttctaccacactatctactattctctttctgataataaaagccaaactcagcttctggaattaataagcaaaattatctcatcctccctgtgcttgaaggaggattattagtgtatagtgtatactggacttgtatggggcagcctcatctgttggtacaggtcaattgctattagtatgttagtattagtcataacagttgcatctgtctcacgctttgctattgtaacagtgtgataacaacccactcattttctcttcatatataaacctctctctactagcttatcattgatgagaatacacattcagtctcttgaacacttagcttgtgtttctcaaaatactctcgactacagattttcaatacttcctatcctaagtgaactaaaatataaatggtgaatcgtanatttaaaag

SEQ ID NO: 167827 - DNA, 451 bp, Glycine max
tgtcatgatccactagagcaagacagaagctgatggtggtgatttttaataccagaggtccttgaagctagactgagaaacatctttgagagatagatgaccattgctggagttatttcttccgaaggatgaactgggatgaccatatctacagtaaccattctctattttaaacgttaagaacttataaaattatatttcatttttagtttttagtattataaagctatggtattatatctctttaattgtgtattattattattattattattaattttgtactatatttcttcaattttgtattattattaattttccctctcaccgacacctctcttacaacgcatgatgatctcaaccttcgcagtatcctcgattttctcgagttttttcttatgttaggcaatcatgcaatggcttacccatgagaattctatatattcttctg

SEQ ID NO: 167828 - DNA, 312 bp, Glycine max
caaaatcacaccgctctctattgtgaaagctcaactctataatgctcaatatcaagatgttcacaatctccaactacagaatgcacacatacaccacttatggaatgctcccaatgatcaaaaggaatataatgatgcctgactaatctatgaaatgtcctatctatctcaggatcaaagggttgtaactcaaatggattgcctctaggcatacactacattccgcaagcacacaactagatgccttgtcgtgtaataaacgtgcagggttgaactacagctaccctttaatgatatccaaatgacgtgaaa

SEQ ID NO: 167829 - DNA, 295 bp, Glycine max
  unsure (1)..(295): unsure at all n locations
cacaaatcactgccaagacgagcgtattcttatgtattgggttncgcctacccggcatcaggaagacatcaattgcttgcaaccaagcatcttctcaaatattgtggatgttgccaaataggctaccattgatgtctatgttggagacatatcgaggcggtttgtgagccccctatcatacttaaaccaaccattctttttagatttgttgaatcaaactgatgaagaattctggtatgaccatccaatgggcggtaaacattaccatgcatgaagatgatttctaactcaaact

SEQ ID NO: 167830 - DNA, 444 bp, Glycine max
  unsure (1)..(444): unsure at all n locations
agcttgaaatcagatcttattgtaggagttttgtatttttcttaaagaagcctttgcgtgcacgagagtctgaccttggcttgaagcttttgcatgtttaggaagttctaaagagagaaaggtccaagttccaaagatttctaagagattttgttgtgtaaagatctacagagacaagagttcgaagcggaagcctttctgagagcttgagatttgtttgtgagtgattgtgagatcctagaggtgaaggagacatcctcaccacttgtatttttgcaatctatcatgttgttcttctctgtgttgtaaaggacgtttccagactatggaaagctaaatcctctgttggatcttccctgtaggtacctgatgtaaatatacttctatctatgtaatgttngtttgngtgttctctgtgctatctgcttttcattccagtatgtc

SEQ ID NO: 167831 - DNA, 491 bp, Glycine max
  unsure (1)..(491): unsure at all n locations
aatctaagcttcacatagggtccatgggttaacaccaaaagtaattntaaattgtttcattctgggccttatccttgagatttgtactgaaatgagcatcttacgaccttcctcccttgctaatgccattggttttgccaaacttgtcgaggctaaggttaaggcttcaaaagtccacccctttacttgctccagtcctttcgcaaaccaaaaacattctcacaaccctgcttcaaaccctattccaaacgcctccactattcccttcaagaaactcaccccatcttagtatagtgaaaaacgcacaaaagattttatgctactattgtgatgaaaaattccatattggccacaagttgctaaaataagcaatttttctcctgattgtagtcgagggtgatgaanaagatgagctngaccttaacactaccctggaacctatagatccctcagatacccaacccaaccattttcaactattaccccaagcc

SEQ ID NO: 167832 - DNA, 316 bp, Glycine max
  unsure (1)..(316): unsure at all n locations
agctntgntccacgcgcttatgattgttcttttttcgtccgncgcgccggcgggtttggccccgaagtccaccacgttgtaggaggttgctttggctgatgatgtggagaaccaggtacatacgaccaagaagtgcaatgtgtgaagagcgagaaaagagagaggagatgggtgttttgtcgttgctgttggggttggcatttttgtaaattgctaactgaagtgaagggtgttttttgagtatatgaatgataatgtgtcgaacaagctacaataagattgataggtactggtgaacgagaatccagggcaatgg

SEQ ID NO: 167833 - DNA, 444 bp, Glycine max
  unsure (1)..(444): unsure at all n locations
tgtaagnttaagctagtggatttaaatttgttttttattttatgtgttaagctctttgcacaggccaaagttgagggaacatatgcagcactgtgttgatcatcctgtacagataagcaagcttgcaaaggtgaaagctcaagtttctgaagttaaaggtggcatgatggagaatattgaaaaggtacagaggcactacttagttgcattaatttaagaggataataccatttaaactgaaaagatcatgttgtacaagaattcatttttgccaataaataaataaatatgattgtgactgtttgggaaaaaaagatggccaacgcaggggagtatgaatgaaaatcagaaaccaatatgttctccattcccattttcatattgaacacagttcccatgcttgttctctactgtctaggttttaagaatctgtgatggatttat

SEQ ID NO: 167834 - DNA, 399 bp, Glycine max
  unsure (1)..(399): unsure at all n locations
agcttangctaaattagtctaaactttctttatctatttaagctaagtctactccaacaagagggatctgatgatgaagcttactttttgttantctaaacctaggaggggtgtctaacttgatcctagtccaacaagagggatctatggacgaagcttggattgattcggactaactagggatcgaggtttattaatttatgctacaacataggacacaaaagcatgattgattagagcaacatctttatatacatcagctggtctgttaaaaaggcccaacatttatacctatgtgtgacaatcttacttacttgcatttttactgtttttagcctagacttagaataatcatgttctaaatcatcagatattaatagttttgtcaacactgcctta

SEQ ID NO: 167835 - DNA, 446 bp, Glycine max
tgcctaactaacctgagagtgagagagaatgattattaatcacacaacatggaagtactaagtatttattacctatacttaacagataatacttatgacaactttttaaatattgcatcaaagtccaatctacgtgtcacaatctgggacaatttgccacgttggatagactatgtggcactaaaattgccaacaatgcacctcactaacggtgatactttcaaatttaacggcaaggactattttgcaaaacttatgcaaagataggactatttttaacatttcaaaaagatagggactaatttgcaaaatgggtcaaaagtcacggaccaaaatgcctatctactcttatgatacaataaaataagattcaaattatatgttatgcatgaactaacaattctattagatatttcttatgccgcttgagatgtcatctgcccata

SEQ ID NO: 167836 - DNA, 395 bp, Glycine max
agcttgtaggtggaaaggtatcaaactgtttcttttctgggatttccccatgcaactcattatatgacacatcaaatgaggataagaaactcaatttaattaatgattgcggtatttctcctgagagtctgttgtgagacaaatccaaaatctccaacattgtcatgcctgataactgccaaggaattagtcctgagaggctgttgtgttttaggtccattacatgtagccctttcagattgccaaaacctggccaaattggtccttcaagtttgttgtaactgagcaataaagatggtcgaaaacttgaaacttttttgtaagcatttcttacattcccattgacataaaagggaaaggcaaaaatgattccttctagtgataaattcctgaac

SEQ ID NO: 167837 - DNA, 478 bp, Glycine max
  unsure (1)..(478): unsure at all n locations
tatnntggtcaaaccaacttataagattctagtgactngctcaacacaccctatgataagtttcttggtgaaattaagttgtttacttaaattgtaccctataagaattaaatacgtaaattgttcactatgagaatcaacaagtacctggcctagtgtttgaatagcaatagcctccaatacaccttcctgtaagtcgtggggaaaagttttcctggatgttgtttgaatgtagtttattaaagggtgatcaatgcaggtccaaaactaaaaatttattgagaaacatactntgtttcagcaggtatccgagtaagaacatcccttacacagaactccaggtatcctgatgccttgagtaacanatcaattgctttcctcttgctatctgacaatacanacatgcaatgattaatgattgttcgacgtgtggatggtttaatangatcttaacttcatgctcactagtacagaatct

SEQ ID NO: 167838 - DNA, 397 bp, Glycine max
  unsure (1)..(397): unsure at all n locations
agcttgtccttagatccctcttgttggtctatgcccagnttagacagccctgctaagtttagactaacttaaaatgagttttgttcgcagatccctcttgtaagactagactcaactcaggcagcttccaaaagtttagcctaatttagcctaagcttcgtccacaaatccctcttgtaagactaggcctagactatgtagaagcaaagcttcatggtgaatcaaaggtgattcaaaggtgttttgatgataacaatgttgataacaaaagatgatgacaaaggtgatgacaaaaagctcaaagatcaatcaaagaaaacttcaagtgaatcacagatcaatcaaagaacaactcaagtgaatcaagaacaattcaagagttcaagatgagaatcaa

SEQ ID NO: 167839 - DNA, 462 bp, Glycine max
  unsure (1)..(462): unsure at all n locations
tcttagttncagatgatgcagatgggtttgtagctacctcatgcactcctctaatgactatggcatcatttctggcgctaaactgctgggagtcggaagccatcttctcaattaaatttctggcttcagcacgagtcatgtctccaagggctccaccactggcaacatctatcacacttctctccatattactgagtccttcataaaaatattggagaagaagttgttctgaaatctgatggtgggggcaactggcacatagtttcttaaatctctcccagtactcatacaggctctctccactgagttgtctaatacctgagatatccttcctgatcggtgtggtcctggaagcagggaaaatttttctaagaatactctcttaaggtcatcccagctcgtgatggaccttggagcaaggtaatatagccagtccttcgccactccctctcaacatgggtg

SEQ ID NO: 167840 - DNA, 388 bp, Glycine max
  unsure (1)..(388): unsure at all n locations
agctngtgcattaaagaanaacaaatataattgtcatagttacaaggcctatgcagccaaatttcaacaaagaagaaaaaagataaagacaaaggcagcctatacacatgcatcatcgccttgttccatagcaccctacccttcctcagcaacctcctcttccataatgttagtctctttatacgactaacttttgtatagaaatcattttccaaagtttgtatagttccccaatttatggttattttgtagtgatttttggaaataaatcttgttttatggttaatgctatctctagaacatttccattggatttaatgatgaaatctatgcattttcaggtgaaaaagaggctaagtnttgaattgcaaaatgtagcagctgggct

SEQ ID NO: 167841 - DNA, 424 bp, Glycine max
taggtttaggagagcattatacatagataaccttatttttttattattcacatcccatactttccttttagttagacagtcagcttaatttcattattttgcagcatacacacttactaatttcatctgtacttacaatttctttttaacacaatatatacagagatatcatgtgtatgtacataaataatgtgtgtatgctatttactctgaccatttgcattcttacccagggcactccccaaatttggaacaaatttaccttgataattactcccctaaatttgggacaaatatgtcttgaatcgcgcttcttgtggatgatgctctcctacaacctaagtcaaggtagcaggagataacattggatatgctcaaggttcaatcaatcaataattcattcaatcaataattcattcaactc

SEQ ID NO: 167842 - DNA, 431 bp, Glycine max
  unsure (1)..(431): unsure at all n locations
agcttgtgctagaggaaatacttggacttttatatttgncaaacttttaagcctttgttaagtgtattaagagagaacaacaaataaaaggaatttaagtgttgaaagagttaaggatatcttanaattaatacatacaaatattcgcggtcccttccctatggatttatgaaataggtaaatatattttattatgttcattgacaattagtctttctttaattgatgagaagactcagtctctatatattttcaagtctttcaaatttgaacttgaactttaattatgaaagaaaattgaggtcatcaaatatgattgtaacgacgaatactatggtagatatgacaaataaggtgagtaacgtctaaaacctttcacattttttctttattttctacaataactggtaaagttttctgcaatatacaat

SEQ ID NO: 167843 - DNA, 448 bp, Glycine max
gtgcgaatataagatacatcttcttcgactcttgttgattcttgactccatctcattgaagcgcatgtccacttgtaactccaaagtatcaaacctttcaccaacaaaggtttgaagaccatcaaacctatccaaaatattttgaagaagagaggaatcttctccaccatgtgcttctttatcaacaagtcgagcaccctttttcacccaagagccatcatgctcttttttataaccaaaggatgcaatgacagcagcgcctattataaaggatcgctagattggaacataatgttcagaatcaagagggatggtaaagtgttgaaagaagatggtgactatgtgtggatatggcaatgaaacatttaatcgcaatgccttatgcatgcgatatcggactaagtgtgcccaatcaatatgtccgcctttatgtaaagcccacataaca

SEQ ID NO: 167844 - DNA, 396 bp, Glycine max
  unsure (1)..(396): unsure at all n locations
agcttcnttgacccatttggtgtagtattctatctccacaagaatgaaacgatgacaattcgaagctctgggttcgatggccccaatgacatctatcccccacatggaaaaaggccaaggggtggacatgacatttaaaggatgtggcggaacattgacattgtccgcgtatgcttgacatttatgacatttccttacataggtgcaacaatcgctttccatagtgagccagtaataaccggctctaaggatcttcctagccatagcatgcccattggcatgtgtcctaaatgaacccccgtggatttcctcaatcatgtagttcgcctcattggcatctacgcatcgtaggagggtcatgttgtggtttcattctgtcaggatggtaccactcac

SEQ ID NO: 167845 - DNA, 394 bp, Glycine max
ggaccttcaatactaagcttttgagaaacttcttgagagcagtgttttctttcacacccctctcataactaagctcacctccttgagaagcttccttaagaagattcgtaaagaagctagagcttagctacacatacctctctaatagctaagctcacctccttgagatgagaagctagagcttagctacacaccccctataatagctaagctcacccccatgacaaaaaacatgagaataaaaaaaagtccttattacaaagacaactcaaaatgccccgaaatacaaggctaaaaccctatactactagaatggccaaaatacaaggcctagatgaaggatatacctattctaatattcacaaagataagacggcttatacttagcccatgg

SEQ ID NO: 167846 - DNA, 467 bp, Glycine max
  unsure (1)..(467): unsure at all n locations
ntatctccaaggcatagaatgatcgcacttctggatnattcttcatctctganttctcctttgagcttagagattcagacatcttttcttctcctttaagagcttctgcacagccatgttgaatcaagattgcttccatcttgattctccataacccgaagtcattntcccctgaaaacttctctatatcgtactttgttattcccatctttcttgatcttgatccttcccacagacggcgccacttgttggttctagatataaattctgctactcttaatttgcacaagatcaaaaacacagaaaacacagcaaagcaatacacagcagagcaagaacccaaagatttacgtggtttggcaatgtgcctacatccacgggaaaacgcagctcatcatcatcacattgatcatgaaattacaagttcaatacaagtagcaactagctttgatatctcttgggttctc

SEQ ID NO: 167847 - DNA, 349 bp, Glycine max
cctcccctatcctcttctcctttgccttccgctgcatctccatggtgaaaaatcaccattgaaggacctcattgaagctcaaagatccatcctccgtagaagctccacaagcaagcttccatcaagtggtaatcagagcacaagagcttcaagtaggtgctccttaaacctccattaattctttttctttaccttctcttccattgttgtttcttcattattctccatgtatctcctcacatgtcttgttctaaatagtcgtaacatgattctttacagtttccaccgattaaacttgctatagaagttagattcgattttctatggttcaaatgtcttggtcttgttc

SEQ ID NO: 167848 - DNA, 388 bp, Glycine max
caatggtggttatgacggaccgaggcagaaccgggttgagggagtaaaactcaatgttcctcccttcaaaggtagaagtgatccagatgcctacctggactgggaaatgaagactgagcacgtatttgcctgcaatgactacactgatgcgcagaaagtcaagctagcaacagctgaattctccgactatgcccttgtttggtggcataaataccaaagagaaatgttgagagaggaaaggcgagaggtaaatacatggactgagatgaaaagggtgatgagaaaaaggtatgtgcccactatctataacagaaccatgcgacagaaactccaagggctgtcccaagggaatttaaccgtggaagaatattatatagagatggaaatg

SEQ ID NO: 167849 - DNA, 449 bp, Glycine max
gcttcttttctagacctcgatcagtcatgttttctggccgatgtcaactgtcatttttttcgatcaatatcggtgaataatattttttttgccgagatggtctaatgttttcctggccgaataaatgggaacatgccagtttcggcccaaacaaaaggtcggtcgagctcgaacaaaaaaacctagccgacctacattgtaaattttttatgcaacaccaaaacaagaaatttcctctacggtaaaaaaaatattatcggccagcgagcgttttttaaaaaaaattgctcaatgtcagccgaaaaatatcagtcggggctacttcacgaccgatgtcggctattgagttttcaattcaatccgcgaacgaaatttgcatgatgttggttaggaaaagttctatccgcaacatcttgtgaagcttcttttttatacctcgatcggtcatg

SEQ ID NO: 167850 - DNA, 462 bp, Glycine max
  unsure (1)..(462): unsure at all n locations
tgcaagcttgataactaaattatctaatgatgaggttatatagagagagagatnaaacatattcgtaaaagaactaatcagagttttcatgatagaaacattaataaaaaaaagagtcacaacatgagtggttaagaatactatcatttatcaagaattgacacaaacagagagaacagttaaaagaaacataacacagttaaaaatttaacgtaataaaaatgatatacacgaagattcacaaaaaagagtaaaatcctcagtatcatgtggattgtttgctattntatacattattcatatactgaatcacaattacaacttttgggtgaaaaaaggtttattaccttgtacaggtccagtaagtttgcctataaccattgctcccagaatccttcctttgatatgacagttaataaatagtagaggtcatcgctgaagataaacataaactgcaatgac

SEQ ID NO: 167851 - DNA, 367 bp, Glycine max
  unsure (1)..(367): unsure at all n locations
aaactgacaacacaaacggttgcaaagagctccatctccaaagattaaactctgtgcttgtgttgaaacaaagccatgtaggctcttttataacgacgtattgagcatatggccaaccatgtgtatacttttctaagatgatgccttaagtccaatataagtatgttatccattgcatcccaacaagtacataaatctttcatgctatcacaaagcagtttagtggaatgtcaacataagatacataacaaacaaaatgtgaaacaagcgctnacaaaaatgaccctattagtttgtgtgtatcaaacatgcacataaccatgcataatatacatactcctgaaatagccttgcaataataaacatg

SEQ ID NO: 167852 - DNA, 328 bp, Glycine max
tacttttattcgcggaccacagagtggtacctggagatatgtcgcgggggtcaggagaccttggggacgtcaggtggggtgctattgcccaaaaccaagcttgaccaatcccgacccaacccgggcatagtcagtcagtgagaacctgtgacctacctaaacaggcgagctcttggcagtcaaccgataaaagaacaaagaccacaaagcacggaggcttgtgtggtggctggccacctatgaatcttgagttggatttggaatatggcctctggtaatcgattaccaagggtgtgtaatcgattacaaggcttacaaatgaagacag

SEQ ID NO: 167853 - DNA, 457 bp, Glycine max
aagcttactctgcatagaacttagtttctttcctataagaatggaacagaacataacccccaagtttattctgacattctcttcaataggctgtgcttgagtttcggcctcatctactgaaagctcaagatgaaaggagtccccacttctagcattttcgtccactagttgcggctgagtttcagcttttcctactgaaggctctagttgggaagagtccacagttgaaccttgaacactacatccagactttgtaccctcaacatccttgccatcagcggggttgatttcaagaacacatgcatttctgtaagatcttgcaataacatttatccagtcaccttcagtttcttccaacatgtcagaactgaaaacagagaaatccaaccaaatttcagatcccccaaactcatctcgaagttaatcgaaatctgggttggagcccattggaaagaaa

SEQ ID NO: 167854 - DNA, 457 bp, Glycine max
  unsure (1)..(457): unsure at all n locations
agcttctatataagctgaaccatnttatctttaaacacaagttgagttttattcagaaaattagagtttatctcttttatcttagtgagagtgattctcctaaattcttgagtgattcaagaacaccttggctgtatcaaaggactttcacaacctttgtgtgttgccctcgctggaaagagtgattctttccttcctttcatcatcacccttgttctttcaaaccacaattccagaaaatccacctctgcccagaattatctcgtggccataactcccattttacgcactcaaattaagtgattcttgagcctaaattgaatttcaaaacgagacctttcacctcgttttggaatcacctcatttggagccctgtagcttcagttattgccatttctatatttctgtccagccaccacttaacctacgttttaccatcccattcatccattttatg

SEQ ID NO: 167855 - DNA, 455 bp, Glycine max
  unsure (1)..(455): unsure at all n locations
agcttgntgctcgtgtgctgagtgtgtgatgatatcgcgtaaaggggtttgatggaacttatatttatattagttgagtgtggctgctagtccttgtttgtaggggatattgtagtctttgcagttaattctcggcttgtagatattaatcaatagcttacatataatgttagagataaacatttgcttatagataaaaaggtagaagataatcaaaccttgtagataatgtgtgggcttataaataattattttaactgccaatagataagatattcaaatacatttgaatattagtaggttagagataacctgtttgttggggagtccggctgttaaggttcaggcatccgtgttcctgtagcagggctaaaatggagggtggacacgtatttatgagtgccatgtaagatgccctgtgtattctgcgggtccttgacaacatataagcccct

SEQ ID NO: 167856 - DNA, 415 bp, Glycine max
  unsure (1)..(415): unsure at all n locations
agctttttgagaacttgaaacttgcttttcatcactgacatagccttctgataaagtgctgacaagttcagatcctttcctgtgttggaaactctgagttgtccttttatctgtttggagcaacgtaacccttgcatctgagcttatgtttgatttttcttccatgttctttaatctagttctagactttatgctagatgtatcttcaacattagacttgtgagcttctgatacttcagaaaattgctcagatttttttctcccctctctatccttcatctgggtaatgatcttctctcctttntggtgtttctgcttatccactccctgaacagaactcaaaactgaaacttttttcactcccatgtccttcatcctagtatttgaggtcctttcagtggtcttcaattttaaa

SEQ ID NO: 167857 - DNA, 457 bp, Glycine max
agcttctccaaagaaacaagatactaccttgtgaaaatagcaaaagggcaccaaagaaacctagcttgacaaaaaacttgtccattatattttgttgggcagtgacgatgtcttctacttgttggagtatcagaattggcaagcaaaagaaaaagaacgtacaaaaaacctaaggggagagaagagaaaaagagaagtgtgttttagtgagtctatacaggaagagaaagcgttcctttttataggtagacaaatattaatattatattattcccagcaataaagatgattgacaagaaataataagtaataaatagatttaaacacaataatagactattattactgttttttaaaatctttgactctactaatattctatacttacttatactctattactattatctattttaatatatctttatctggctacattctattatatatatatata

SEQ ID NO: 167858 - DNA, 300 bp, Glycine max
gataacaaacatgataacaaatgatgttgactaaggtgatgactctaagctcagaggtcaatcaaatgatgagtttccgatattaaagatcgaatcacgatcacttctagattcaagaggaaagttgatctcaagaatcaagaatcttgatcaagattcaagaatcaagagaaggctcaatcaaaataagtatgaaaagtctttctcaaaaattgagtagcacatgatttttctcacaacatgtttaccaaagagttgttactctctggtaatcgattaccacattattgtaatcgatta

SEQ ID NO: 167859 - DNA, 341 bp, Glycine max
  unsure (1)..(341): unsure at all n locations
catggtggcaaaagatgcaaacctgngaagagttggttgaagcttccgctacccttatatggatcgcttcaactcttcatgttgctgttaactttggacagtatccatatggaggtttaatcctgaataggccaattatttgcaggagatttatgcctgagaaagggtctcctgaatatgatgcgttggctaagaaccctgagaaggagtctttgaagactattactggcaagaaagagaccctcattgaccttacagttgtagaaactntatcaaggcacgcatctgatgatttcaagcctgggcagagagatggcggtgactactggacttctgatgcc

SEQ ID NO: 167860 - DNA, 439 bp, Glycine max
  unsure (1)..(439): unsure at all n locations
agctntcataagggagaactagaactcttatctgttgtgatgctgcgcaaacattatagactcggattactgtggtattaaatggacttcgtgatacggcagggaaggtatccatttctttttcctaaagtaatctgtctgtgtgtgtttcagacaaatgtctgcctatcaatgattttgtatttttctcacgtctgcatgcaaaccctacactggagaaatatgccattgatcatgtcacaatgtggctccaaaggatcttctattaatatcagccaaatggttgcctgtgttggtcaacaatcagtcggtggtcgtcgtactcctaatgggttcatagatcggagccttcctcatttccccagaaaatcaacaacccctgctgtatgtttgttctcattattttggaactctttcatcatacacattgcaatcccca

SEQ ID NO: 167861 - DNA, 452 bp, Glycine max
agcttaataaatctatatatgggttaaatcatgtttcctcgccgtggtaactagacattaaacctatattaagaaaatcttagagagaatttggatgaaagattgttcaccaagtgttgctcccattgtgaagggtgataggtttgatttgaaccaatgctcaaagaatgactttaagagggaatagatgaaaaacattccttatgcttcactttttggaagcctcatgtatgattaagtgtgcataaggcctgacatctgctttgtagttggaatattaggaagatatcagagtgatccaggtattgaccactggagaactgcaaaaaaagtgatgaggtacctttatgggaccaaagattacatgcttatgtatagacagaaagacaatctatatgatggaagcttgcttgtggagcttctatggaggctggatctttgagcttcaatga

SEQ ID NO: 167862 - DNA, 426 bp, Glycine max
  unsure (1)..(426): unsure at all n locations
agcttatactagttgggaacctagcctagtttgtcttaaggccagacaaccaccaaggaagagcatgacctagatgacaccaagagaagcagcattggaaccatgaagtaggcaaaagaagagataaagtggaagaccaaggtagacagagacaccagtagtagtggcatgagcggccatctccataagaaccagaacccgtccagcaaatcagaggtgtaatcaacaccattacgagaggattatcctatgaaggacaatccaagtagccccgaaaacacccatcttcatgccattcaagagatcaacatcaattttgtcgatgcaccattacaacgaagtctctcacctatcactttcacaaatagggactgtaagggtatcaacctcgtcaaccaagatgaccntgtggttgtctccatcatc

SEQ ID NO: 167863 - DNA, 413 bp, Glycine max
  unsure (1)..(413): unsure at all n locations
ttgagaaaacttccttgagaagctagagcttagctacacacacccctctaataactaagctcacctccttgagaagcttccttgaaaagattcctaaagaagctagagcttagctacacacacctctctaatagctaagctcacctccttgagatgagaagctagaacttagctacacaccccctataatagctaagctcacccccatgacaaaatacatgaaaatacaaaaaacgtccctactacaaagactactcaaaatgcctcgaaatacaaggctaaaaccgtatacaactagaatggccaaaatacaaggcctaaacgaagganaaaacctactctaatatttacaaagataagcgggctcatacttagcccatgggctcaaatctagcctaaggctcatgagaacc

SEQ ID NO: 167864 - DNA, 467 bp, Glycine max
agcttatgcgcatatttccttacgaacattctctcgcacaagatattcttctaactaagaaaaatgcacccatgcacaatcaaggcactttcgttacctacattatttgtatgtacttccaaggtgtactacctacaccacatgcatttccttggctaaatttacatacatgcatgctcaaagcctcttggctaccaaaagttgcacacatgcaaactttatgatgaatcttggctatctacacaataaggtgctacatttcatgctttattcaagtgtttttactaccaaaagccgcatgcaaattcaagtatattttcttttgccgactaaaattgtattcaaattaaaaggtgtttttgtaaggtattttctttacataacatgcaacatatttatatatttttgtgagacattgtgactaccaaaaattatatgtacatacatccaagtatctagctaccaca

SEQ ID NO: 167865 - DNA, 276 bp, Glycine max
ctcgacccggatccttaagtcacctgcggcatgcaagcttctatggagttggggtctttgagcttcaataaggtccttcaatggtgattttcggccatggagttgcagcgaaagataaaggataagaggtgagatgaggcgccatctactagaggataagccatggaaggagaagcttcaccaccaaaagagtgccttggataagaagcttacagaggaagcttcaatgaaggaagagaatgagagagatagagtgatgcaatcctaccccctaag

SEQ ID NO: 167866 - DNA, 430 bp, Glycine max
agcttgaaatgctgtgtgttgtgttctctttaaagaagaataccccaaagtccacaacttcggaagtgctaagcatatgtgggacacactggccataacatatgaagggacatcataggtaaagagaaacaagttaactctcctcatgtgagaatgaattatttactatggtagaaggtgaaaatatataatgtatgtttggatgcttccaaatcatattaaatgaactaaatctttaggaaaaagttataataattatgatcacattgacaaaattttgagaagtctatctagaaagttgagaccacaggttacaaccttgagagctctaaagaatcttgataccatatccctctaagaacttgttggaaccttaaaggtccatgaacaagaacttcaacaatatgaaggaatcaagaacgataaatct

SEQ ID NO: 167867 - DNA, 449 bp, Glycine max
ttctcttccaagcgctttcttggtatcccaactaccccatttctatgttgcttcaaccgttctaattcctgttctaggatcttgacaactttttctatttttgccatagaaggatagaactcagaaaaaaggtatggattccggcaacagcgccaaaaaacttgttcacttatggcaagtgcatcggatcgcgcaagtagtataatacggtaagaacagagtatcgaactctcggggaacttgcgttacttggtaaagctatttcagtaaatagtgtctagtgtgaaaagagatgtgtttattatgaacaggtgtgtaaactaactattaaaaggaaaaatcacgtgagaaattatgcgtaaaaacaagtagatgacatgttggtcttcctaatacgtgcttgatgttagaaggataatctctacttaacaatgctcatgcgctctatg

SEQ ID NO: 167868 - DNA, 420 bp, Glycine max
  unsure (1)..(420): unsure at all n locations
agctgagtttgaaatatgaaaatgtatatatgttgcgngcgcgcgcgtattatggacctatctaactagaactagtgtgttttgaaaatttaagagtgacccttttttcaaaagctcctaattgttgatgggttcactcaagtttttcatctttttggttccttgttatggggtcaattgaggctcactgcaatttcccatggctgttttttgagaacctttttgtttgaaaaaagtacacaaagtgttttgcatgatcacagatggntcatgaaattatatacttttttttttcctttttcattaaactctatttaatattttcttaagtggtggccacaagtcaccgtggggcactgtcagtgaaactggattcagttcattctcacaatctaatcttaagaataacgaataatatcg

SEQ ID NO: 167869 - DNA, 456 bp, Glycine max
  unsure (1)..(456): unsure at all n locations
agcttataatggatctcaggaatataaactgcacccaaaccgntacatggcaaagaagttatgatcgtgtgaaggacattataactatctttgggaagacgtaaaaaaatccccactgagaaaaacatatggaagaaaaggtccattttctttgatcttccttactggtctgatcttgatgtaagacactgtataaacgccatgcatgtggagaaaaatgtttgtgatagtttaattggcacccttcttaacattaaaggcaaaaaaaaggatggtttgacgtgttgtcaagacttggttgacatgggtatacgagaccagttgcatccaatagcaaaagggtcacgaacgtatctacccccggcatgtcacacaatgtcaacgaaggagaagaggacntttttgtcattgtctatggagtgtgaaagtcccacaatgatactcttcaaatatcaa

SEQ ID NO: 167870 - DNA, 472 bp, Glycine max
  unsure (1)..(472): unsure at all n locations
agcttataagaacaaaattgcctcaatcatttttatatatgcatgtgaattaggaagcatcaacaagaatcaagccaaggctattgtgcaagcaatcaatggggcaaaacacaccaaatgattatgatgatggatggctcaaattctcacaaaggtaaactcatcactttcaaattgagctttcaaaactatcatgacatgtagaggagaatcaaggatttcaagtcacaaaatgtcaagaacttttattttcaaaacaattacccatttcttgaacatatcctataattcaaagaaaaacatgcaaagtcgtgcatgcacacaaaattgacccaaaatattaaactaaaaatccgacgaaactaacaacattaacaanttaacacaactaacaaattaacaaaaccaacanaactagcaaaaccaaagaacacttccccccatacttaaacaacacattgtcctcaatata

SEQ ID NO: 167871 - DNA, 436 bp, Glycine max
  unsure (1)..(436): unsure at all n locations
atcttaagtcacctgagctgcagcttctacagagagatggccagaattttttgttggactactcatcaaaggcaaggaaggagaatatcacaaggagttgaattggagcatgttgaagattgatgaacaacacgcctgggcttagtgcgagctgtctggcttatcccaattccaacccgaggagaaattgggcttatcgcaagctgtcaggcttagcgtacaccttcaacattaatttacaaaaattcctaattttagttatttgtgtaatgggcttacacttgatgtaaataggtcttattatatgctgagttatcttcttaagcctacgtctataatactcacaactcttattgagaaaacttttgtaaaatgcaattagcttgtgctagaagagctancctttcttggtttttgctgaaaccaataattttat

SEQ ID NO: 167872 - DNA, 457 bp, Glycine max
agcttcaagaaaaagatggcctcagcaaattctttatttccagaagggaattctatcaatagacctccaatctttaatggagagggttaccactactggaaaacccgaatgcaaatttttatcgaggcaatagatctaaatatctgggaagccattgaaatagggccttatatacccaccacagtagaaagagtttcaatagatggtagttcatcaagtgaaagcataaccatagaaaaacctagagataaatggtctgaagaggatagaaaacgagtacaatacaacctaaaagccaaaaacataataacatctgccctaggaatggatgaatatttcagagtttcaaattgcaagagtgctaaagaaatgtgggacactcttcgattaacacatgaaggaactacaaatgttaaaagatctaggataaatgcactaactcatgagtatgaattat

SEQ ID NO: 167873 - DNA, 422 bp, Glycine max
  unsure (1)..(422): unsure at all n locations
agcttagncttgagttgtagggtacatatgttctattgattaatacctagaatttggtggtggttagccaaaacaaaacataatctcactagtagaaatcaacatatataaatctctatgtcttaacgctttcgtttatctttttatttttaaactgacctaagacttgattagattttgttttgaaaactttgtctgatttgcaagatctantttaatcgtctgaaagtgattttgcgaaaatctattatttatcttataaagtttttcttcaaacggtaactttgcttttaaaaaaaatgctctaaaaattttaaaatcacaattcacagcccggctatattngccgtttcatatactacaaataaagcatattaaatcaaaacacctaaaatataataaattaactaaaatacgataaa

SEQ ID NO: 167874 - DNA, 455 bp, Glycine max
agcttgctacattgatgcatcctgtcttcttatcttcgatttaggcacttaaattttggaggctctaattctctatcaaaggagaagatggtgagaggacccccccccctctattaaccacactgatcaactatatgaaggatgttcacttggcaagcaatatagaacgagctttccaaaggaggtaaactcaagagctaagaagccacttgagctaatacatgctggcgtctgtgggccaatcaagccaagctcactaggtaaaactaactttttcctccttttcattaatgatttttcaagacaaacatgggtctatttcttaaagaaaaatcataagtcttttttgccttcaagaagttcaaagctgtagttgagaatgaacgtggcagacagatcaaagccatgaggactgaccaaggaggacaattcatcttccaaagagttctgaatgt

SEQ ID NO: 167875 - DNA, 446 bp, Glycine max
  unsure (1)..(446): unsure at all n locations
gatcttatatcacctgcggctgcagctttataaactgtcatacaaccgttttatacgccattgttaaaccacaccccagatgatcacacaaaaagaataaactattccaaacgtggttcgcacttgatccgataaagaaaataaataaaacctactccactcaaggaaaccgcgagaaacacaccacagatcacaagataaggttgttttgcgagcaaatgaaaaagggtggtgatatgtgttaactggtggcgtgcacacaaagaaacanatggtgttgtgccacagggagaagattaagagccgactaacctacaccaacattgagattgagagaaggtggaaccgctgagaacagtatgtataaagtgattggccattgccagctttgcgctcgccactcgtgcgcttccaaagaactcacatgtggcttcttctgctgccat

SEQ ID NO: 167876 - DNA, 431 bp, Glycine max
  unsure (1)..(431): unsure at all n locations
agcttccatcagatttggttaaaggactgtctataaattgtttgaaaaactcatattctctatgaagcatgccagcaagggaaacaaatagaaagaagtatggatctatttggaccaactagagacattgagtctataaggaaagaagtatggttttgtcatagttgatgactattctagacatacttgggtatacttccttactcataagcatgagtcttgcaaagtctttttgaaatattctgtaaaagagtcaaaattaaaaagatttatgtatctcttctatcagaagtgaccttggaactatgtttgaaaatgctgagttcaaatcattntatgaaaagaatggtattttccaaaacttctcttcaccaagaacacctcaacaaaatggggtagttgaaagggaaaatagaactctacaagagatg

SEQ ID NO: 167877 - DNA, 424 bp, Glycine max
  unsure (1)..(424): unsure at all n locations
ccgggattcttaaagcgactcgccgcatgcaagctntatccatgcaagacaaggttatattattaataagtaacaaaccctcttttggaaatcgtccagcatcttgatattgattctttctggatcagagcattcctgtaatatacaaaatctgtttaagaaggcccatcacttactacaagtcaaaacaagttctagcaagaccatattagttgatcatcaactaacccttttattaaatgacttccttttcttaataagctttgccctgtggcaaccatcatttttctcttcaacatcaaaaccattaacaaccaacttgttggactctaaagtgcttctagcacaattgtttgcattcacacagtgtttatagatttcttccaatgcctgagatgcaacacggtaagtatcttcagataaa

SEQ ID NO: 167878 - DNA, 408 bp, Glycine max
agcttcaagctgctcaattgctccaagtgtctgcatggaagggcaaaggtctatatggtggtcagcagaggagcacaaaccacagacccttgcgacaggtacagatttctgattcaaggccagctgggttaccaagttaaccaacgcctctagtttgccttcaagcttcttagtttcagatgatacagctaagtttgtagctacctcatgcactcctctaatgactatagcatcatttctggcgctaaactgctgggagttggaagccatcttctcaattaaatttctggcttcagcaggagtcatgtctccaagggctccaccactggcaccatctatcatacttctctccatattactgagtccttcataaaaatattgaagaagaagctgctccgaaatctgatg

SEQ ID NO: 167879 - DNA, 440 bp, Glycine max
tgttcctttttataaaagagaatttctgaaactcatcacgttgtctaaaaaggccttgaggtggatctaagtgctctgataattcattagcatattcatgatttggtggcatgctcaccactgtttgtttctttaggaaactcaccataactaaaaaagcaaaaaggcacccctataacacccgatccaaaatcaagatggataacaaagagggagtgcatgaacagatgaaggccgacatgtcggctttaaaagatcagatggcttctattatggaagccatgctaaaaattcaaaaatcaatagaagacaatgctacgtcagccgcttccaatacagctagggaaacggaatcgatgctacaacccacaatgaacttatgccgggacagaagcgcgacaggtttaaatcggaggtatagtcctcaagcctacccttat

SEQ ID NO: 167880 - DNA, 457 bp, Glycine max
caatagttccatatgcatcctcgtcggaaattgccactcacggcgaaggaaggcggcacacggcggtcaaaaattgtctcatggcagcggcgaccaaaaacataggggttttgttgcggacgtaaaggtgagctgattggtggtggtggtttcatgaattgtgatctagattggccagaaaaggaaagggaaaatgttagggttttgtgtattggaagatttttaggaaaatgtaatcgaaaattgaaaagggaaatatgaggagaaaatgaataaggattgatcgaaggtaggtgttggccggaatcggtgactcgttacagaggacggtggcggcggcgaacggagaggttgatcaatattggcagcggagaggaaatggtattgttctgataccatgttagaattcatggtatagagatggaaaagagaaaaaagagaaaatgaatattatttt

SEQ ID NO: 167881 - DNA, 446 bp, Glycine max
agcttcatgatgatgagaccagcaatgtttttgatgcctaaagcccaagtgattgattcaagacttcgagatcaagcctcaagaatccaatccacgattcaagattcaagagaagaaatctagaagcaccacgtcaagacttcatataggataagtattaaaagaatttttcaaaaatcaaatagcacaggtttgttttactaaagaatcttctcaaattttctaagatatcatagtgattactctctgggaatcgattaccacttatcagtaatcgattaccagtgaccagtttggttttcaaaatgttttcaaatgatttgtaacgttccaaaatgtctgtcaaatagcgtaatcgattacactatattagaaatcgattacaagtgaatctaaacgttggaattcgaatccaatcgtgaagagtcacaacctttcataaaatg

SEQ ID NO: 167882 - DNA, 479 bp, Glycine max
  unsure (1)..(479): unsure at all n locations
gcgatcctttagtcacctgcggcatgaagctttgtgatatggtcttcaccgacttttggttctatgngggtctaaaaagaggaaaatttagtcatcctgcttggacgaatgagaaaactgcggcaaatgaagagggtgaagatgaaggaaaagcccgtgctgtgactgccattcctatacgaccaagtttcccaccaacccaacaatgtcattactcagccaataacgacccttctcattacctaccacccagacatccacaaaggccatccctaaaatcaaccacaaagcctacctaccgcacttccaatgacaaacaccacctttagcataaaccaaaacaccaaccaagaaatgaattttgcagtgaanaagcctatagaattcaccccaattccagggtcctatgctaacttgctcccatatctacttgataattcaatggttgccataaccccagccaaggttcatcaacctcc

SEQ ID NO: 167883 - DNA, 420 bp, Glycine max
  unsure (1)..(420): unsure at all n locations
gcttttgaaaaccatgttgctactagtattccattacaataanctgcgaatcaattaccagagagtaaaaactctctggtaaaaagttttgagaaaaattcatgtgctactcagctttgaaaaaactctttaatacttatcttgattgagtcttctcttgattcttgaatcttgatcttgatttttggaacttgaatcttgaaaattgattcttgattcttgaaatcaaatttccttttgaaccttgaagtgttcttgattcaatcttgaactcattctttgattcttgaagtcatcatctttgttaacatgaagcggtcttgactattgagctttttgtcatcatctttgatatcatcaaaactccttgaatcaatcttgattcatcatgaagcctgcctctacatatgattcatgaag

SEQ ID NO: 167884 - DNA, 395 bp, Glycine max
  unsure (1)..(395): unsure at all n locations
agcttcctcgtggcttctttgagatattttctcataagacttctttgagaagcttgatgcaatcctccctaggaagggaccaatcactagaaccaggagcaagaggctccaagaagattgggctaaagctgctgaagaaggccctagggttctcatgaaattcagggtagatttctgagcccatgagccaaggttgagtccaattatctttgtacatattagactaagatgtcattatatttggtccttatatttagggcttcatattgtaggtagggtaccctataaatataggatnttctcagcccttgtattttaaggcacctagactagtttttgtattaggggtacgtttgtaatttcacatgcactaacgggatatttgatgtgtgtgg

SEQ ID NO: 167885 - DNA, 455 bp, Glycine max
agctttggaaagtgttgttatcaccttctcttaagccaatctgatggcttagcgagcgtctgctaagtgcaacattcctgggctaagcgcaaggaagaatccataagaagatgagttgtacaagttcgctaagtgcaccgcttcatcttactaagcgcaccacttcagttcatctgctaagcgagaaaagcgggctaagccaaaaatcactaacgtgcgctaagcggtccataagtgcgctaagcacacgagcacaaacaaggccacctagttaagcctgaaatcagattttgtgaagggagtttggactaagattcaaagctttgcatgtctagggtttctagagagagaaagtccaagttctagagagttttgagagatctctgtgtgtgaagatctgcagagaccagagcttgaatatgagccaatttgagagcttgagatgagtttgtgag

SEQ ID NO: 167886 - DNA, 466 bp, Glycine max
cctgcggcatgcaagcttaatacccagaatgatatgtacaatatctatggccttcatatcaaaattactagacaattaagacttcacatcatttatgaaatgcatattactaccaaatatcaatatgtcatccacatacaaacataaaatgactcatccactatcatcaaattgtttcacatacacacatttatcactattattgatttcaaaaccatatgaaagaacaacttgatcaaatatttcgtaccattgctttggagcttgtttcaaaccatataaagatttaacaagtttgcaaactttattttctttacccaattctacaaagccttcaggttggctcatataaatttcttcttctaattcaccatttaaaaaataagttcttatatccatttgatgaatttccaaattaataacacaagcaagtgcaattcataactctaaccttgtgctcggatga

SEQ ID NO: 167887 - DNA, 415 bp, Glycine max
  unsure (1)..(415): unsure at all n locations
agctttanaatttgaattaaaacgttcatttttcgctggtaatcgattaccatatatgtgtaatcgattacacagtgcaaattttgaattcaaattttaatagatgttgtaaatcatttttggccactggtaatcgattatatcctctggtaatcgattaccagagagtaaatctcttgaaaaagactttttaacttaaatttcttggccaaaccttttgctacttcaattaggaattcccttcctatttaatatacccttcctaagactctagagactgtcttgatcatccatcttgaatatctttaatttctttggcttgaataaagctttgagaagcatgtgatcctttggcatcatcaaaacattcagcttgatcctttgtctacacaaatgaataaatatttacctcatg

SEQ ID NO: 167888 - DNA, 453 bp, Glycine max
gattttcagcgcctgagctgcagcttgacccttccgctcttactatattaatctcacaaatctgaaatagagagaaaaaataaatggtaagaaaaacctaaacaaacctcagacagggaagtgggagagaaattattagataatcttggactacttcgcgttcatgattcaactaatatgtgtgtgatacattcaagttttttaatttaaaaaaaaattaataaaaattcattaggtatcatgttgcggagattagttgaaacttgaaaatataatgttctcagaccccatctaataatttatcaaagtggggaccatatagcgagatgtgcagacaaaagttgcactagcatgttcccattgtttcacaaacaaatgataaagaagtgcaggaaatgaagttttcactttaccagccctctctgcactccatcatgcttaatggcaatgaaa

SEQ ID NO: 167889 - DNA, 431 bp, Glycine max
agcttggtgttatatgtgaaatttttaatgacacattgcccatcacatgcagggaaagttgtatgctatcatggaaatatgccgctcatttgatcaaatatttaaagaccatcttgatggcgtgtacgtgttacatttttgtattctagtttgaaatttctctgtttcaaagttaactccatactgcattcatttttggattcaaactaatttcaataatttgcaatgttcctacaggcggcctggaggtgataaaatttataatgtctttgacaatcagctccctgctgctttaaaaaggttgcagtttgataagcagctttcaatggaaaatataaggaaacttattacagaagctgatgggtatcagcctcatctaatagctccagaacaaggagtaccgccgctaattgaatcttctctaataacta

SEQ ID NO: 167890 - DNA, 469 bp, Glycine max
  unsure (1)..(469): unsure at all n locations
agcttatagaatatataataaaagaacttgtctattgaagaatctatncatgtttcctttgatgagtctaatgctatttctccaagaaaggatattttagattatgttgcagaatctttagaacaaatgcatattcatggacaagattctaaaggaaaagggaaaggaagcaatgaagatcctccagaagaagccatatcaaatgatgaacttccaaaagaatggaaagctttaaaagatcatccccttgacaacattattggtgatatctcaaaaggggtaacaacttgacattctcttaaagaattatgcaataatatggcttttgtgtctatggttgaacctaaaaatataaatgaagccataatagatgatcattggatagttgctatgcaagaagaacgaaatcagtttgaaagaaacaatgtgtgggaactagtagagaaacctgaaaactaccccatcatag

SEQ ID NO: 167891 - DNA, 450 bp, Glycine max
  unsure (1)..(450): unsure at all n locations
gcttanagatgtataacaggctaaataaatatctacctatccttagtgacgactntatttagataccatttctcagttctattaaaaaataatgtttcccaatgctacccctaaaacttactatgcaaatggatgatcaagccacaagcaatagtattaaccacaagaaaggataatgcaaatgtaatattataaatagataggaagagaaattacatcaaagtagttggctgtcaaattcctaagaaatgaggtttaacctctcattgtcatggagactttacaattgcaagaggagaatatttagtaaagggggaaagttaagaaagggaatgaaatgaaggaatgattctcattacttgtttctccttcttctagctttntccttctataaggaatngtattctgttggaattattggggcttctctttctttcttctcttctttat

SEQ ID NO: 167892 - DNA, 401 bp, Glycine max
agcttctatttgctaatggagacaacgttaatgaccttacatgacatgcaaatgagagaaactacgatggaatgctcaatcatccgatcgattcctcccagtggaagaagattgatagtttgtatccagattttgacaaagaggcaagaaatcttatgcttggactagccactgatggaatgaatccatatgtcagtttaagcactcaacatagttcgtggccagctttgctagtaatttacaatttttctccttggttgtgcatgaagcaaaaatacatgatgttgtctatgataatatcgggcccaagatagccaggaaatgacatcgatgtttatcttattccattgattgaaagacttgacaaagttgggggacgagggggttctaatgtttgatgg

SEQ ID NO: 167893 - DNA, 417 bp, Glycine max
  unsure (1)..(417): unsure at all n locations
agcttctcaaggaggtgagcttagctttttatgggtgngngnagctaaactctagcttctcaaggaagttttctcaaagaagcttctcaaggaagttttcttaagaaagcttctcaaggaagttttcttatgaaagcttctcaaggaagctacctagtctataaatagaagcatgtgtaacacttattgtaactctgatgaatgaaagtcttatgagatacacttcaaagttccacttctttccctcttttattccatcaatttcgtgctccctccttctctctttcttttcctccattaaagcatcctcttcaagcttcttatccaaggcaattcttggtggttaagctccttcttccttgacttattccctagtggatggtgcctcccctatcctcttctcctttgccttccgct

SEQ ID NO: 167894 - DNA, 248 bp, Glycine max
cagggataatgaccgttactcaccaacacaaaccgtgtgtgccgcaacaacaacgagcccacaccctcaaaccattaccacagccctcctagacaagttgcctaatggcaggatctaccccagggacaaccccgaatactcaactcaacaagagcatcacgttaagcacggaaaaatcaggcgtccccccaagagaacttataatcccccgttacgagaggaaatacatcccacccccctaggaggcc

SEQ ID NO: 167895 - DNA, 295 bp, Glycine max
ggagttctgcgggaacgagaagatatcacgcccacgggtgaaactaaagtatggggagatgcacaaaacctaaaagggggtgttcaaataagacaacctaacgggatattaatccaacttaagaatggattggacataattaggccgctgctaggggcacctatggtgcacccaacaatttaagtgaaggggcaaaaatatctttcacttaaattaccaaatccctccacctctcattgccctccgcaacttgtaccccatttcgctgcaaacggcctcgtctcacctcttgcct

SEQ ID NO: 167896 - DNA, 444 bp, Glycine max
  unsure (1)..(444): unsure at all n locations
agctgcatgatagagataagtttggaaatttaccataannngcattctaggagattaaaaattaataataacgaaaaagaagaacgtgcagagcaatgggtatcaattataagcagctctcttcttctcaatagcgatattacattgctcatgggaaatggaagtgctgaaggaaaaatgttgcatcaaaagaggaagatcttttctgggtaggaacaaacgattttatgtagaaatagcttggaactctaggaaaaacagacaccaaggactggctgagtacaacttgtccgtatatttatcctcagcgtcaaggatccattgactacaaatacaattatggttaatttaacaaagactccacagtggtttaccattgtgtgccaaattaaccatgctataatttatggggcctcgatgatacacctcatctcatcatcaata

SEQ ID NO: 167897 - DNA, 434 bp, Glycine max
  unsure (1)..(434): unsure at all n locations
agctttctcgctgcagaattcatttcttgtttggtgctctnggnttgngctaaaggtggtgttcgtcattggaagtgcggtagacagactttgtggctgatttagggattgcctttgtggataactgggcggtgggtaaagagaaggtttgttattggctgagtaatgacattgttgggttggtgggaaacttggctgtataggaatggcagtcacagcatgggcttctccttcatcctcaccctcttcatttgccccagttttctcattcgtccaagcaggatgactaaatttgcctcttttaagacccacatcgatcctttcactggcaaagaccaaatccgcaaaagctttgaaggtgcgtagcccaccattttccatagtagaatactggtaatgtgtctactatcatttgtcatcgtttttcggcattg

SEQ ID NO: 167898 - DNA, 477 bp, Glycine max
cacctgcggcatgcaagcttatgctgcaaacatctacaacagacctcctcaacctcagctgcaaaatcagccacaacagaataattataacctctccaaaaataggtacaatcccgaatggaggaatcatcccaaccttatatggtcgaatccttcacaacaacagcagcaacaacaacaaccttattttcaaaatgatgctggcccaagcagaccatacgttcctccaccaatccaacagcaacaacaacaacagccccagaaacaacaaacagttgaggcccctccgcaaccttcccttgaagaacttgtgaggcaaatgactatgcaaaacatgcagtttcaacaagagaccagagcctccattcagagcttaactaatcaaatgggacagttggctacacagttaaatcaacaatagtcccagaattctgatggattaccttctcaatctgttcagaatccataaaatgtgag

SEQ ID NO: 167899 - DNA, 378 bp, Glycine max
  unsure (1)..(378): unsure at all n locations
catgcagctataatagaagtgggagctttcatgttatgacgganntcaccttcattcttcgttcggaagtcctcgatcgttgcccgaanctccattgttttccgccgcttgagtcgctcaaacgaataggactgtttcttcaatattcaatactttgcctgctttcaattcaatcaaattattgatgattatccatacaaataaaaattgcctgtgaagagttcaattcttttcaactgcatttcaagcactcttcagttttgaaatgccttcgtccacacacatgctcttattattggaatctctttgaatgagaaatgctaacaacacacaaatggtgtgggtcccacaccttcacggctgtggagtcttcaaaat

SEQ ID NO: 167900 - DNA, 355 bp, Glycine max
cttcatacccaggagaaaaacccgcgatggcagattttacactgcacaatctagatggaggaaagaacctcgctgtgaatctctcctccaccccttccaaagtgtcgaggcttctactcggatgcgataggagccatgttctcttccttacccgctaatgaaaaagaacaagccctgaggtagacaacttcaacatctccgcccgaagccccaatagcaccgcactgttccatcaaggtagacaaacgagcgaatggatcctcacgacccataccacccgagggacgcgagccaattagcacaagcagtgtgtaccttccactccaccaccttatcgcagaaaagaggaataact

SEQ ID NO: 167901 - DNA, 140 bp, Glycine max
gaacacaatactcaatactctaacattgaagattgggtcactcatgagagcgcaagctcaaatgcctcatcaatacacctcatttccaaaactatgataaacgcaggattgtacatgggccggtaaaacgcctagagtgg

SEQ ID NO: 167902 - DNA, 428 bp, Glycine max
agcttgtctttggtttagaagtgatttattcatgatttaggacttgtaggatctaatttgggcaaaattggatgaaggatagagtgatttcgaaaatctgcattattatgcagaattttgttgttgaaatgtgcagcagaattttgtgcttgtgcagaaaatgcttatgcatgactggttgtggaaagggttgtaaatattgggttctggacgttttctagcagatcccaacggtcaaaatgtagaattatgtactaggaacctccagtaaaattttcgagccgatccaacggtgaacgaattggaacaaagggaatgttactggggtatttgagtaagaacagttgtggtattggtttgtgttttgggcacagttttctgcctctgccctgttctttgcttggtttgatagatcatgactgttggat

SEQ ID NO: 167903 - DNA, 241 bp, Glycine max
agtatttataacctcaacctcacacaatatactcatcacactacaaaataaccataaattggaagagtcggatacaatttatacaaggtacatacacaagaattagctgtattcaccgactaacaactcccccaaatttacagagttgcgttgcctcaagctaacaaagaacaactaaacttgtctcaagccgacaaccacatgcaatgactaatgtacaaaggtgtatgcaactaagtaa

SEQ ID NO: 167904 - DNA, 458 bp, Glycine max
  unsure (1)..(458): unsure at all n locations
agcttgaatggaacaatctcagatattctcacaaactaatggaagaggccaaagtgattaacaaacctcaattggatagtggggatctttgtactcttgttgaaaaaattatacaacaattgaagtatgagaaggagctgaatgcgaatctccaattacagttaaataagacacaagatgcaaattctgaactagttcttgcaatgcaacacctggatgaaatgctggagcagaaaacatcattcaataataaacacaagcacctacagtggggtcgtatactactcgaggcctctctatgatggaatcngcgttgcgggaatgtgggttgttctgacaatggtggtagtgtttgaattcagcatatgtaagtttcagacatcctatacatatttctccttattatagaattgaagaccaaagtaggtaagttttggacactggaattagaccaatga

SEQ ID NO: 167905 - DNA, 452 bp, Glycine max
  unsure (1)..(452): unsure at all n locations
gctgagtgagccaccgtagagtgagtctatctccagacaagagtgaatccactccttggagtgagaaagcgagaaaagtagagagcctctttgagagagaagataaatagcttgggaagactctatcctcaagtttgagtgagccaccatagagtgagtcaattttgtaaacacatccttgtaaccctactattcttttgtatagtggaagaatctccatattggagaatcataatcgggtgttctcattactacctttaattacttagtgcctatcttaaacttcacgaagcgggaaaatctgagttttcccaacaaatactaagtcaagaaatcaagagctcacactgttataaatttacaactaaatacttttgtctttttctttactttgcatacaaacactcaaggtcaactatactntgtatctatttcaataatattgagccagt

SEQ ID NO: 167906 - DNA, 434 bp, Glycine max
  unsure (1)..(434): unsure at all n locations
ctgcagctncttaaacaagagaaaaattttgttgattganaantcccgcggtgaggatgtctcctccacctttagaacctcacaatcactcacaaactcatctcaagctctcaggacgacttcctcttcaagctccattctctacaggtcttcgcacaacaaaatctctcaaaactctcgggattcagacccttctctctttagaatctctcacatgcagaagctcttcgagaaaatggccaaaatcctctcctatttctgatttcaggcttaaataggaggcctttttggagcttgcacgcttagtgcaactttgaaccgcttagcgcacattagtgaatttcggcttagtgcgcgtcttctgacttagtggatggactcaagcagtgcgtttagcgggatgaaccctcgctcagcgaacatgcacaactcat

SEQ ID NO: 167907 - DNA, 450 bp, Glycine max
  unsure (1)..(450): unsure at all n locations
agcttttattcttctggttgaaattactaatgcttttatgtaataataaagaaagctaccaagattcacgggtgtggatggtaccctgtggcaaagctaccaaaatgtaatttttggcgctccttcaaaagctgatgtttatttcaccattcactgctataatgtgaaattgtcttgaacttgcacattaaacacattactagatcaaatacaaagagctagcttttaagggatggcattttaaatataaaagatggaagttatacctaattattggctaacatcgctagatgtggtaggctacactttcttcaaatttgtgaaaatcagattagcaaaggaatactaatattggctgctaacaaatcccaactcccatatatgtttacttcttggtggttgttactaatgaaaattgaatgtangaatctcatgaatctctggcttctg

SEQ ID NO: 167908 - DNA, 363 bp, Glycine max
  unsure (1)..(363): unsure at all n locations
atactatatagaacggaatctttggtttaccgaaaaaaaagttattacatcgtcacgcgacattggatttttttctaagccataaggttgtcggatccttattataacaggcaccacttntattattattggggggttctaagaattgtctcaatcaaatttattcaagatgataaagatgtctttccggtggtcaagagccttttatttcttattcttatcttttaaatatatacttttaaataacacgtgttacaaaagtaattttacatttatcatccaaattgagactaaagatcttggaatttgatttaattttaaaaacaatctatttccatcattacccttcgatttgcattttgt

SEQ ID NO: 167909 - DNA, 357 bp, Glycine max
tactcgccagtgctggagagaatgatgtcattttctctccgcaccacagataacagacaactctttggccttcttcaacaacccatttctcctcttggagaaggcaacttgcctgctgctcaaattctcaatcttcttaatctcaatcttgcctctccccatgccttcttttctcctcttccttctctcacacaaaaaatgctctcttctttattatccttcctcaccaaaaaactgaacccaccaccagcattatgggaaagatgggcatgaataagatggacaccttccaaaagatggttcttaatttatatgccgcacaccaaaaaaatacatatctatatttatattaaaaaa

SEQ ID NO: 167910 - DNA, 418 bp, Glycine max
  unsure (1)..(418): unsure at all n locations
agcttaatattgaagaagatgtactatgcttcacaaggaanaacacacgttgtgtaagattttgaatgtgttactatgtggggagatgctacaggcttacacatggggaatctagcatcagctatcaagaaagaagcttactgatccgggtatgtacagacgacgtttccctcctactttcatgctcagaataccttcatcaagtccttgtatcacctgttactcattgggttgaatatcagtttatcttgaaaaggattatccaacaattggccccaaaactattgtttttcaagtttgaacactattaactacaatgaaggttaaattcttaagttggataacattaaaagcaacatccagagtttacctgaccagaaccaacacgaaaaatataaggctgacctttctccagtga

SEQ ID NO: 167911 - DNA, 463 bp, Glycine max
agcttctgtatggaaacttgtgctacattactgtttcatgttattgggtttgtattacctggttattttttttggtatcacgcttgccagtccatgacactataatgttctggcacagcaagagaatgttagtttgcattggcttctaatcattcaatagtagttaacttcatgcttgagatgcttttgttgggtcttgcagatccgtaaatggtgagaatgctaccaaaatacctgaaagaacaaatgaagtaactggtcaatatgcaaacgcctgtgttgaggtagcaaaggaaatgggcgtgtggtatatcaatctatggtccaaaatgcaagaaacggatggctggcaaacaaaatttttgaggtttgccacaacctatagagaaatattgactttgacataagtgtgaccctgttttcttgttaaatcttgaatgcatgtttattacatctgacatta

SEQ ID NO: 167912 - DNA, 409 bp, Glycine max
  unsure (1)..(409): unsure at all n locations
gccatctcttatcaccgcagctgcagctgagactttcgattcaagacctctctctagaaccctctntcgtctattctttctatcctttgtgggagtgccaacactcactatccatgagttgaacatgaaccaaccccaaaaaacagcctactatcttcggtgttgatccttgcctcttatgcatccataacgaaacactacaaaaagncctttaatgtatatttaattattcaaaaatataaatatatattacctaaaaaataaaccataatcccatcaaaaaagtatatttctgctacattgaataaaacagcatagtgagctaaaaattcattcaataaaaatttataaagcgaaaaagaaagactatcaactaacatgataatggtttttaatctcatggcacatg

SEQ ID NO: 167913 - DNA, 338 bp, Glycine max
tggtgcacaacaagttttccacatacacgaagcgcgcataaaccctccatcccctgttgcccacctcctactgagctcacgtgctcccacgtaagccatatactcgttcctctcaacaccgggtccccatcaatcctcccaagctttcccaacatcctagtaatacaacattgagacaacacaaattattatagccaagcaaaacagggcgaaggcagagaactcttgccaaaacaccaagcataatcacaggtgttctcacttaaagaccgagtcataattccttgtgccgattcgtaaccgtggatcactcgaaattatctggaatctctatactt

SEQ ID NO: 167914 - DNA, 441 bp, Glycine max
  unsure (1)..(441): unsure at all n locations
acctgctgcatgcaagcntggcttgacctatttgatatgattctacataggagntataattcttttacgggtcatctttgagttggttatcatattaaaggaattaaagaaagaaataaaagcacatggaagttagctcaaagataaagactttatatagcagtggcacaagaattagaaaatatggaagtaaagaaataagaacaaaaaatgaaaaaaaaatggcagagaccccaaactttaaagagagtgataagtccaatgaagatctggcacaaagctatggaaacctttgataagaaccaagaaagcttcatctaagaacccacaagaggcacaacctttaaacttacaaaaggagtgaaattctaatcttattcaaatatgcccaaatgcaataaagtacaaggctatttataggcaataattagtgcccccact

SEQ ID NO: 167915 - DNA, 385 bp, Glycine max
cacaatcttcatggtgatgactatctacgaaaagaccaaagctgctaccaacgtgctaaataaattagatgatggaaaaccctctagtgcatcggaatccccatgcattgccagataaaaacctcaagtacaagggattacttaaattatgaaaaaaaaagcccaccacactatgaaaaagagtgtaacctacagaaaaataatgtgaacaccaactaatgcctgttatcctctgcctcccctcctcccaataataagggaaaaggccaatcgcataatttagtccatacaatcaaataataacgctggaatgcaacctattctcatccaacaccatgtgtaactactaccatgtataaaaaactttgtatgtaatattgttaat

SEQ ID NO: 167916 - DNA, 457 bp, Glycine max
agcttggatatagttcataacagtccattattatctaccaaaggccacacacagctcttcgtgggcccttcatgctcaacacgaattgtgtttgggctctcacatttcaccccaatgatattttttttaatctttttcataactttctttaatataaaataaccttagaatgcgtttggatacagaattttaactgaggaaagtaatttatcagagaatttgaatttttgtaatttagaattcattgtttggatgctttttatgaagaatttaaaattttggaattttaaaacagaattttaaacaactaaacatctggaatttcaatttctttctaaaatgtgagaaattgaaaatttcttcttaccgtattcttcaagaaacaccatctgagctcctaaaatatcgatggagtgtgagcatagaggaacaatatgtataactagcatatcaatca

SEQ ID NO: 167917 - DNA, 439 bp, Glycine max
  unsure (1)..(439): unsure at all n locations
agctngaaggcaaactggatgcattggtttacttggtaacccagctggccttgaatcaaaaatttgtacctgttgcaagggtttgtggtttgtgctcctctgctgaccaccatacagacctttgtccttccatgcagcaacctagagcaattgagcagcctgaagcttatgctgcaaatatttacaatagacctcctcaacctcagcagcaaaatcaaccacagcagaacaattatgacctctccagcaacagatacaaccctggatggaggaatcaccctaacctcagatggtccagccctcagcaacaacaacagcagcctgctccttccttccaaaatgttgttggcccaagcagaccatacattcctccaccaatccaacaacagcaacaaccccagaaacagccaacagttgatgcccctccacaatcttccct

SEQ ID NO: 167918 - DNA, 450 bp, Glycine max
  unsure (1)..(450): unsure at all n locations
agctnttttctgaagtccacaagttgttgtcttctaagctcacagatttgttgtgttgggaagctctcaatgcactattgtgtacagattcgaggcagtgacgaagatacatctcatctgcacttgccataagctttggaatcttgtagtgtccatgaacaagtaggaagaacaaatattttgggaaaacattactattttgtgattgaataatgtttacaaacgtggcctggtgagaaattccacctttagctaacttttttaactgagatgcttcagataatgaatcctttttcctttgaccccttttttgaacccgacattgtgtatgttccatcttcttcctctatcacactaccgtgccttaatggcaggaacactttttcacagtaatcttccttcaaccagaaactaagcaatataagatagcatcctgaaaaggagggaaaa

SEQ ID NO: 167919 - DNA, 426 bp, Glycine max
  unsure (1)..(426): unsure at all n locations
agcatatacctaagaactgacggcctaattattgctnccgaacaagctatctctaactgtaaaacaaataagtagaattatttaaagcttgggtgcacatagataaaactattgtcttacaaatgaatttacaaattaaacctttaaggcttttctatcataatttataaggtgtgttaagagtttcataacttaagaaatattataatacaaagagagcttgaatgtaagaaagaatatgcactacaaagtcggtaacttcaactcttcatgtatttataagcttcaatgtcaagtaaccattagtcttcaaactaactatgttgcattgtcttgagtaagtgattgttggagtttttcttttctagtctacttcaagatgataaaacacttcacttatcttccttgagtagcactcattctact

SEQ ID NO: 167920 - DNA, 385 bp, Glycine max
ggacaatagcaccccacctgacgtcctcaaggtctcctgacccccgcaacatatctccaggtaccactctgtggtcaacaaacaaaagtaggaagactgactcttccactctttctcacatcaagcttattggattatggggcacccgtcttaggtggtactaggtggcgatcgggcgatggcgcaaaccaactttcccacttccacaaatcaaacataaacacaccatccccagttgtccacctttcaactgagctcacgcactcctacgtagcccttatcctcgttcctctcagcaccgagtccccatcaacccttccaagcttccataatatccaagcaattcaatcccaaatatcatgaaactaccctaaaccaagaaaat

SEQ ID NO: 167921 - DNA, 274 bp, Glycine max
aatcttcagacaaaaccctatagagtggaacaatcaccaccatagaattttccttaaaagtgtgtcacaacccacggatataaataaaacctaattgacaggtgtaagattcacatctcacaaatcttgtatcatttatgaaattatcgtcccaatttagaatttttcttcgtgacttacttaagtggattaacctggaatctccctttattgcgtcttctatgacacacaactggtatgatcaactctctctatgaatgatttcaactcaaaa

SEQ ID NO: 167922 - DNA, 350 bp, Glycine max
aatatagatgggaatagaggtaacaatggtggtaatgacggaccgaggcttaaccgggttgagggagtaaagctcaatgttcctcccttcaaaggtagaagtgatccacatgcctacctggactgggaaatgaagactgaacacgtatttgcctgcaatgactacactgatgcgcagaaagtcaagctagcaacagctgaattctccgactatgcccttgtttggtggcataaataccaaagagaaatgttgagagaggaaaggcgagaggtatatacatggactgagatgaaaagggtgatgagaacaaggtatgtgcccactatctatacagaaccatgcgacagaaa

SEQ ID NO: 167923 - DNA, 405 bp, Glycine max
  unsure (1)..(405): unsure at all n locations
ggtctatccaaagttctgacccatcaatgtttcttacaaataaaatgtggaccttccctaggatttccatggatagattaaacatccaacgactcctttgccgccactccaaaatggtttcatgactaaatcaaacataacaacactcagagggagttctcacagagatttgcaaacgataggataaggctgcatggactatcacctctttcaaaaggacattcaatttgtgttttccaaaaaacaatcttctcagaatcaaaatcaccaaatagggaaagaatgcctgaacattgtacaactttccattacattgcattgtttcatctgaagtccgcatttaccaaatttcaccgacaacgttgcatgcctcttgcatcctacnaatcatgtttactacataga

SEQ ID NO: 167924 - DNA, 353 bp, Glycine max
  unsure (1)..(353): unsure at all n locations
tcacctgcggcatgcaagctntttttctagaactagatcagacatgttttttttccgacgacaactgccatttttttcgatcaatatcggtgaataactatctctttgccgagatggtctaatgttcttctggccgaataaatgggaacatgccagtttccgcccaaacaaaaggtcggtctagctcgaacaaaaaaacctaaccgacctacattgtaaattttttatgccacaccaaaacaagaaatttgctctaccgcaaaaaaaatattatcggccagcgagcgttntttaaaaaaaattgctcaatgtcagccgaaaaatatcagtcggcgctacttcacgaccgatgt

SEQ ID NO: 167925 - DNA, 450 bp, Glycine max
  unsure (1)..(450): unsure at all n locations
ctttggagtagaaacatgggaccaactcattttatttctaaaaggaagtcgcatctagtcaaggtcttagagaccatacaagtttcctaacgatttctaattatgtgggccattaagtctatcatatgctgacaatagccgagaagcccatgaatctcttcgggggcggagtaggtgtctgccatcgccttggccttggctaacaatcggggaagttcttgactcccgttcaaggtaagagcaaaccgatccatccacatggttgcctcttggtgtaaagagtcgatcacccttcctctagcctctttttccgcgtatacttgggcatattcgtccgcaatcctatgctcgtgggccgcggctagacctaactcttcttggtacttggcgatgatagctagcatngtggtctccgtctcgcataaacgctgagacaagcttcttttggac

SEQ ID NO: 167926 - DNA, 386 bp, Glycine max
ctaattatctatgatgtgtttttagagacagagatcaaccatattcgtaaaagaactaatcagagttttcatgatagaaacattaataaaaaaaagagtcacaacatgagtggttaagaatactatcatttatcaagaattgacacaaacagagagaacagttcaaagaaacataacacagttaaaaatttaacgtaataaaaatgatatacacgaagattcacaaaaaagagtaaaatcctcagtatcatgtggattgtttgctattttatacattattcatatactgaatcacaattacaacttttgggtgaaaaaaggtttattaccttgtacaggtccagtaagtttgcctataaccattgcgtccagaatcttcctttgat

SEQ ID NO: 167927 - DNA, 465 bp, Glycine max
  unsure (1)..(465): unsure at all n locations
taagctatacttataaggagagtagtttaataaactattaattatctataccgcaataaataccttgatagtgtagattgtcgaactttatttaaattccaagctgacatttacaatagggaagtatctgataaatacttgaaattactatttttttgctaactaagctttgggctggctctatatttctctaggatatatgtcgatttaccagatgctgaaaatcgaatgaagattntaagaatctttcttgcacaagaaaatatgaattctgattttcagtttgacaaacttgctaacttgactgatggatactctggcagtgatttgaaggtaaatattgtcaagtgcaactgaataggaactgctatatgttatgcaccactatgctggatcacattatgaatgtgaggtatcaaacggaaaataaggtatatatggttgagaacgctaccttatttcctg

SEQ ID NO: 167928 - DNA, 428 bp, Glycine max
ggaccttaagtcacctgcggcatgcaagcttctccaaaaacacagtgtcgtcatcatattgaagaacgttcacaggaactttgttcttccccaccaaaaagcttctgaatttattttgagaaattgcttctctcatcagtcctgtcaatccctcagccactagatcaaagaggaaaggtgccaaggggtcaccttgtctcagccctctttgaaatgcatatcagtgttatcaattgcagattgcggaaatggcggaaagccaataattttttctatatgatatagtggatatcgtccctaacatatagcgaaagttacataacagttgaaatataagatatatatcaattatatatgcataaaaaaattatgttgtatgtaaataatattaaaatacatgaaaattgacataatgtaactcaaagttc

SEQ ID NO: 167929 - DNA, 468 bp, Glycine max
tccttttagtgcgtcacgtttaaaaccgagctcgatggtggtacgagccttttgatgggactccaccggaagtaatgggggaaatcgacattcccatttagataagcgcccacacttgcaatgtggtgtttcatgtaatggatataaatcccgcctatagctgcctcttgggaagaccttggattcatgccctgggagtggtcccttcaacgcttcaccagaaattgaagttcgcagtgggtggacttttagtgatagtgtcgggtgaagaggatatgttagtgagctgcccctcctccgccccatacgtagaagcggcagaagaatcattggaaacggctttccaatccttcgaggtggtaagctgcgcctctgtggaaccaagttcgttgctaccttctctctccaacgcggccataatggtggtgcgtgttatacttatgaacggatttgagcccgaaatgggct

SEQ ID NO: 167930 - DNA, 413 bp, Glycine max
  unsure (1)..(413): unsure at all n locations
agctngaattatagttgtctccgttataatatcactttgcagcgatattttatgtgaatttgtgtcatttgcatgtttttttttttgcacaactcctgtttgggcactaatttttgttttgtaaaagcatatccgctcaattaagtgaaaccaatgagaatttacacttttacctaaaaaaatcacaaatgtcttcaaagaatcatgtcaaattctctaataggatcatctccatgaatatgatgactttcattaccatctccatcatcatcgaggtcttcctcagattgtgcatcatcattagattccgctaaaattaaattatctagatcaaaaacgtctacaattggatcatttgaatttcctccaacatcctccattaatataacattgcggcatcaccttcactctga

SEQ ID NO: 167931 - DNA, 363 bp, Glycine max
gcaatgcaccttggacagaaatttctcagatcattgtctgattatccttacgtcgaaagttattgattggggaccccaaccttttagggttctggattcttggcttttagacatttcctttataaaagttgtgcatgattgctggtcatctacctaacaaagtggatgggggggctatgttctcaaagaaaaaataaaacgactcacaaatagattgaagatatgaaataacgagaattgtggggacacatataagaaggtaaagcagatccaggatgagttaaacaatcttgaagagttgacaatggatatgcaattatcatcccaggaggtaaccttcagaaagtactataagaaaactgt

SEQ ID NO: 167932 - DNA, 443 bp, Glycine max
  unsure (1)..(443): unsure at all n locations
agcttgacattaattcgtcccattttctctatagacttggcaaattcctcaaagaatccttgagttgattgaagttgtctatcgataatagaccttgtgataggactagtaagaaattcagcatctgactgaaacaagccccttctcttaacaacttgtttataaaatccaagatcaaatgtatcgcgacttccaggatccatctcaataattgtattatcattgatgttcttacacttaaaagttttgatattttttgcatattcactgtctagtgttgggtctatgtcacccttgccagtgaaattgtatagacgagttgcaattgatgaacaatgggcaacaccaattgtgtgagcacctgaaagaatangaatttttataattagagacaaagtttaaaatgtagaacataaanaggaaaaaacttagatataattatt

SEQ ID NO: 167933 - DNA, 467 bp, Glycine max
ctatttctttggtagatgacatgctacagactgatcacatgttcatatcgaatttatatcaatcaacttaggtttgcaagctaaattcatatatatttgaacaatattcatctttttttaaaaaattattaatcaaaattttgcgaacatatctattatgcttcggcgctagcaaatatcatattagtcgagacaaaataattggttttatgaatcgtacttgaaatgcactaaaaaggatttcacaagttgagaataaacattcttgtgacatgtgcaagtgaagtttctttgttgttcctacgtatcttacaattctagttcttgtgagttattttacaaatatcataatgattacatgattggtgtaaaaaaaatataaataaaacattttcaaattgatgcctttgcacgtttacgacacaaaaagtaaattatcatcttttttatgcatttcagttaatctc

SEQ ID NO: 167934 - DNA, 314 bp, Glycine max
acccgtatatgtggtactaggtggcgatcgggcgatggtgcaagtcgactctccacatccacaaatcacacaaaaatccaccatccccagttgcccaccttcaactgagctcacgtactcccacgtagcccttatcctcgttcctctcaacaccgggtccccataaatccctccaagcttccacaacatccaagcaattcaacatccaaacatcatgaactatcagaaccaagaaaatagggcagaggcagaaaactcttcccaaaacacaaaccaataccacaactttccttactcaaataccccagtaacat

SEQ ID NO: 167935 - DNA, 469 bp, Glycine max
  unsure (1)..(469): unsure at all n locations
ttatgtatgagtgtccacatggatgtatgcatgatcagttntgcataaatttctaatcatcattgtcatatgcatgtcatggaaatgatttggggcattcccttattcttgaactgcttgctgaataaatataccgacatgtgtcatatcccaccatccgtaggccttttgagccaaacctcgacgtttcggccataaccttgacctaggatggaaatttccaaccttaccattgggagaaagaacggaaggatcatcccaaaaaagaaaggttccttttaccttggattataaatgtagtccaaaagaagagaaaagaaaaaggaaaggaagaaagccaaccaatcaaagattgtagaaaagcaaaagacaaaaataaaaaagaaagaaaggaaaaaaatacgaataaggttccttggaccagacaatgtctgaacacatgtgcagaattgtcgaaagcaaaaagaaa

SEQ ID NO: 167936 - DNA, 339 bp, Glycine max
agcttctagccaaatggacttaccttgttttatttcctttgatagcccttttgagccttgtttccctttccttgttttgaagctcactacaagccttaagtgaaaaaccatgatattaccatatccttaaggaattttggagctctggaattgttttgggaataagtgtgggggggtttttgtttcattggacaacttgttttgttggctatgcttcatgatgtattctgggccatacttgatgtacattgtatattgggtaaatgttggacatgctgaatgaaattgtgtttctcaaaggcccaagcagtaaacaaaaaaaaaaaaaaaaaaaattca

SEQ ID NO: 167937 - DNA, 460 bp, Glycine max
ttagccttaggttgctcactatgttgctcatgttgctctccctatctctaacaatatgccttactgtggtggaaccaagtgaggagtgatgttaacaggatgagaaggcctttgattcatactaggcaagacatgaagagagttttgagagagagatttgtgtcgtcctattataagagagaccttcacaacaagctccaaagactaattcaaggaaataggagtgtggatgagtatttcaaagaaatggagatttccttgattaggactcaaattaaggagtctcaagagaccaccatggcaaggtttttgcatggtctatatacggagatccaagacattgtagagttacaccactatgcctatttggaggatctcattcatcaagctatccaggtggagtacaaattacagaggaagaaaatatatcagaagttcccatatatggctcttcaacatg

SEQ ID NO: 167938 - DNA, 376 bp, Glycine max
agcttgccgcccagctcgcccaggcgatcaaggttgcttcctccagaagcaacagccttctggaggaatcttctggagggcccaagtgggcctggttgctatttgcacccccctgtttactaaatgcacccccctttctatttttttgtaattctttttccgtaacgttacgaaactttacgaatttcgtaacgatacttattttccttccgcaaggttacgaatccttacggattatgtatttactcttttttagctttcgaagaagttacgaaaactcacggattgcgcagaaacacctcttttcgatttccgccacattacagaatttcacgaatcacgcaagcctgcttcctttcgatttctgagatgtctc

SEQ ID NO: 167939 - DNA, 465 bp, Glycine max
  unsure (1)..(465): unsure at all n locations
ntagtaactatgtgcaaccacacatttacattgagtgtcctcattgatatattctacagccgatnttgcatgaatntatgattgtcataacatatgattcatggatatgatctaggcattctttctttctttacagtttaagccattggctaaatagctatcccaatatatattatttttgccatttgcaagccctttgagccaaacacttgaaaaggaaaaaaaacaagttctttatggataaataaatgtctgaatcatgtacaaagctgttgtaaatatctaaatagaaagaagtgataacttggttaaaatgaaaaaggataggaactgatcgttcatttaagttactagctagatttttatgtctgctctcctattctcaaggtatgtttgaatattcagaanaactaagatttccttcanaactaggcccaaccttaaaaagacctattgatccatgat

SEQ ID NO: 167940 - DNA, 436 bp, Glycine max
agcttagcaagtggacctgtgtgttgcacaatttcatcatatcttccgtaatacacaccacctctatcatatctaataattttcatctttttgtctaattgcctttttactttattctagtaaatttctaaggcatccactgcctgagaaatctcaagcagtaagtagacataatcgtaacgtgaataatcatcaataatggtgataaagtatcattcctttctgaaagaactaacatcaaaaggtccataaatatcagtatgcacattttcaagaaactgagtgcttcttgtagcttctttctttgtatgttttacttggtttcccttaatacaaccccacacaatatttagatccataaaatctagataaggaagacattcattctttattaatcttttcatcctttctctagaaatgttacctaaacatttat

SEQ ID NO: 167941 - DNA, 454 bp, Glycine max
tagctgaattcagatcgaatcggattagcttatctcaaccttggcccgcttagcggaccaaatcagcctcagatgccagggttgggcgctaagcactcaagactcgtggcttatcgcatgaatagagatgcgtttaacgtgaggcttgcgcttaccgaaaggactattcttcacaaaatattttctaagtttttttcagtcctttgtccaagaaattgaaacccttatgttatgcattcaaagattggctgatatactcctatgtacagattacatagccagttccaaatgataaaatgcgtgaaaaacaaacacacaaacaaaacagagattaaaattgggttgcctcccaggaagcactttctttaacgtcattaacttgacgcttttacctctcagggcaatctcatcgtttgggtctcacccttagaacctcttgaccttcttccattac

SEQ ID NO: 167942 - DNA, 383 bp, Glycine max
agcttagtctaagatcatagaagtcgttgttagttttctggaccacaaaatttatgtagccttttgtctttttttttttttttccggatgtttaacttatttgtctagttcatagcaatttgtttgtgtaccatgaatattcgatgaatgtgttgtatggactcttcagcaattgacatttatttgttttatttcagttctaaggttgaaaacaaaaacttcgaaaatgacgctacaattgaaagcaatgttgtaaggatttgacaaaggaaaaaatgtttgatctttaatgggtgtcacccttttctgttgatgaaggtttgccatatgctctcaaagggtggcctaatgttggtgatatatggggatagaaagtggggaga

SEQ ID NO: 167943 - DNA, 461 bp, Glycine max
ttgcaagccagaatcatttatcctatctccgatagccaatgggtgagtcccgtccaggtagtcccgaagaagactggcctcacagtgatcagaaatgagaaggaggagctgattcctactcgggtgcagaacagttggaaagtctgcatcgactataagaggctgaaccaggttaccaaaaaggaccattttcccctgccattcattgaccagatgcttgaacgcctggcaggtaaatcccactactgtttccttgatggtttttctggttatatgcaaattactattgctcctgaggatcaggaaaagaccacattcacctgccccttcggcacttttgcttataggaaaagaccacattcacctgccccttcggcacttttgcttataggaggatgcctttcggcctgtgcaatgcccctggtaccttccagcggtgcatgattagtattttcagtgat

SEQ ID NO: 167944 - DNA, 159 bp, Glycine max
gggatacaaaaatgtgtccaaagatggtgacattgtgtttaaatgcctccaaggtcttgcttttatggactctccatgtctgggctagaatcccgttcacttagttattccctatgaaagatcctttaaaccatctggaaagtgatctctattcattat

SEQ ID NO: 167945 - DNA, 375 bp, Glycine max
  unsure (1)..(375): unsure at all n locations
agctaggggaataaatgtatgtattcttgttgaatattagggtttaaatcctcttggcggtctgcaatcagatagtatcatgagagctggttgttggtatttttatttttgtcggcaaacttttatattgatgctgccatttgttttggttattttttctaaaagcagggtacatgtgtatttatagtgaagatgagatggaaaatatagtgaaaatgagatggaaaatatagataaggcgctttcaactctttttgaattacatttttcaacttagttaaacggcacctgttgatctaatttgaataaatagttgagtttacagtatacaaaaaaacttaaattctggattgttttaagnttctgttctttact

SEQ ID NO: 167946 - DNA, 466 bp, Glycine max
  unsure (1)..(466): unsure at all n locations
tagcagatgcattaggtatttcatttgttagattctgtatgttatttttttttttttttaatgtttatgcagcataaaaagaacaaagttcgaaaggatcttgtacaaattactcaaattctctaccatgacggttgagttgtgcaaagaagtaaaggttaaaatcgtcatggaaacttgatattagcctaagaattggcaataaaaaaaagctaaaaaataactgaaaaaccaaataaagtgccataaaacatatttaggtttgcgttcaattaaatttcttttccgttttgtttttgaaatgctttctgatttntaaacgaagaagctggatcatattttctttcaggggagaagttttggatggcaaataaattgaaataaagctcgatcatagcttcataaagaataagtagaatgctcaataatgtaaccaanaaaagggggcatcatgaacaaattaatg

SEQ ID NO: 167947 - DNA, 388 bp, Glycine max
tcaacaacatctggaacagactatagatggtccagacgttttttagttgtgggtgaactcggccaaccattcctctaatgataaacaacaccaacacatcagcaaacatacagacctcaacgcttcaccttaggccatctaccctctgaataacgacatccatatattcacgcactcatacgacccattcgcaccccattttcttcctatctccttattctaaccataccatttgtcacatgtttatccccacaaccccatccagaaaatactaacgatagacaaatgagcaaaacgggtcactcaacatatgatcaaatattgcacctccccctgtcatttgcaacatttgaaatccatatcgtcataacggagaagcctaacaaca

SEQ ID NO: 167948 - DNA, 315 bp, Glycine max
agtttcttaccaagtaaaatggatcatttttaaggtctaactccttaagatgatcacccctcaagtaaaaaagaataacttgattcacgcatgtgaaagaactacgtaggtctgatttcttctccaaaggagggtacgtaggagcaaaagccccgcttttgtcgacctcaaaaaattaaaagaaataaagttaggtaacacaatttccacaattctaaaaaataggctgttgtcctttgagacaaacgtgagaggtgctaataccttcctcaagcgtaaatacaactcacgaacatacgaatttcattttgaccg

SEQ ID NO: 167949 - DNA, 467 bp, Glycine max
  unsure (1)..(467): unsure at all n locations
tctaaactntatacaagaatgaagctctgataccacttgttttacaagtggcctcagatatcttaaaaagggggggttgaattaagatatcacaacttatttccccaattaaaaattctagttatctttctattccagttataaattcccttaataatgaatttcttaaatattgattcaaatagaacaatttgaatataaatataaaacaataataaataaaggagtttaagggaagagaaaatgcaaactcagatttatactggttcggccacacccttgtgcctacgtccagtccccaagcaacccccttgagagttccactatcttgtaaattccttttacaagttctaaacacacaaggacaacccttcctttgtgtttagaattctttcacaacaagagaccctcgatctcttaatctcttttcagaatgaagaagaagaaaagaagacatctctcttgaa

SEQ ID NO: 167950 - DNA, 427 bp, Glycine max
  unsure (1)..(427): unsure at all n locations
agcttgttttggctagtagtgcgtcttgtgacgtgagatcaaaaagacttttctttgtaagcatataatctcaatcacaaaggatggcatggttattggttgtcatgttttcaattaactccatagctttatcaggtgtcttcaatttgatcttcccaccaacggaggcattaagcagctgctcggaatgggattgcgtgacattaatgaatatattttgctgaaccggctcgctgaacccatgggtggaagtcttctagagtaaaccttggaagtagtctagaacttcactcaatgattcaccagggaattgctagaataaagagatgtccaccttcccctcagtggtcttggactctggaaaatatttcttcaaaaaattctccaccacctcttnttatgttcacaagctattttttctttgatg

SEQ ID NO: 167951 - DNA, 474 bp, Glycine max
tgccacccagctcgccctggcgagctaggttgcttcctcaagaaggcaccgtcttctgaagaacttcctggaaggcccaagtgggcctggttgctatttgcacccccctgtttactaaatacaccccttgccttttttgctgattcttttctcgtaatgttacggaactttacgaattacgtaacgatacttgttttcttttcgtaatgtcacgaaaccttacggattacataatcatcccttctttggctttcagaatgttacagaacttcacgaattgcgcaacaatccttccttttgacttccgacatgttacggaacttcacggattgtgcaacaatgcttccttttgacttccgacatgtcacgaaacttcacggattgcctaacgatgggtgccaagtacctcgaagttgtcaaacgagggtcgcatcccaacaaacagatggtccctggacgaaattacggtatgac

SEQ ID NO: 167952 - DNA, 288 bp, Glycine max
  unsure (1)..(288): unsure at all n locations
agctngaccaggaatgtattgtattgttttgatgtngaattctggcacttcctggggcggagatgatggtccagatggcgaaccaggagctgaaatttcttttggtgagcgcaccatggaaaagcaaagcgtntggaatgatttcccaaatttctgagagctattgggaaatgctgaagacgggattaccacgacaatataagtttgaatgaggaatataggggggcgtgtgaagcaacggtcgaattccttttggcttattagtgaacgtgctattaatgttaagtg

SEQ ID NO: 167953 - DNA, 455 bp, Glycine max
cgctgaaccataaccggtgagagtgtgatcttaaactgtgattgaacgactagcattgagtaatagtcttcgcgccaatctttgaattctacaatgaaatgtatgaatgaggacatgatgaaggccatgattgtatatacaagccaattgactaaaaagcttaccttgaattataattgtatcctttgcaccctttgtgagctaaattacattttcaaaattgaaccctaaacttgaatgaatatatccagataccttgcttagattctacgagagtagatggttcaaggcaatttaccccaaatctgggggagttaaccaggatgtaaagtgaaaggtaaagcacatcaacacacacaacaaataagttgtgttaaaaaaaaaagaaatcaaagaaagtgtgtgtctgtgtaataacgtcaaatacaacgtaaagtgaaaggctagtgaataag

SEQ ID NO: 167954 - DNA, 315 bp, Glycine max
  unsure (1)..(315): unsure at all n locations
agctntgagccaaattcctgactcaccataaacttttgacccaggngagaatgtcaatccttaccctcggaagcgaaaagaatagaaggaaggtttccaatcaaagagaaagcaaaaaagaaaagaaggaaaattcccaatcaaagagtgggagaaagccaaaagaaaagaaagaaaattcccaatcaaagaatgggagaaagtaaaaaaggaagaagaagaaggaaagaaagctcctgatcagggatcaaaagaaaacagaacaaatgtgcagaaaggtctttggaccggacaatatctgaacaatacagaatt

SEQ ID NO: 167955 - DNA, 469 bp, Glycine max
  unsure (1)..(469): unsure at all n locations
tgtaggattatgggggacccatcacatgtggtactaggtggctgtcgggcgatggcgcaagacaattctccacatccacaaatcacgtataaacccaccatcccctgttgcccaccttcaactgagctcacgtactcccacgtagcccttatcctcgttcctctcaacgccgggtccccatcaatcctcttcaagctccacaacatccaagaaattcaacatcccatcatcacaaactaacaaaaccaagtaaaacagggcaaaggcagaaaactctgcccataacacaaaccaaaaatcacagcttttcacatacaaatactctagtaacattttcttcgttccaatttgttaaccgtcggatcgactcgaannatttactggaagtctctagtacataagtctacaatttgaccgtcgggatctactagaaaacatccagaactcattctgtactactctgtccaca

SEQ ID NO: 167956 - DNA, 348 bp, Glycine max
  unsure (1)..(348): unsure at all n locations
agctngnatatataaggcgctagtctattatttttataaaatngattctaaatatctctcttcatcttcttttctggcacaatcctcctcccgcggagaaagcccctcanagccttgctggatgggtggtcacatctccacgaggaactttctgtgtcatacttaagggatggctacttgaacgccgctcttattcgatcgattgtaggtctcccatactgaacactttatatacttttaagctactgatctcgatcgtagacagttcatctctttgactatncatctcttgcttcatggtctcaactaacctgtgacaccatcaatttntaacaccgaaaatcctcg

SEQ ID NO: 167957 - DNA, 428 bp, Glycine max
tctataagtcagaggtcgatcatgttactgcactttcttttgtcacaaagttggctaacatagcacgttgcggtgacaaagaggctgttgtccaatccagtgacaatgttgtccactctgtcaaactccatcctacctatgggtttatatgggagagggaggaaattgatgctgcttcctctgaagatggagtcattccaccaactgggtggaatacatacgaacattaatatgactgacgccactgcatgggccacaattacggcttatatggccgaaaatagactaaatacggcctttgacgctgaatcctaacaaaatatggcagttgaagccaagatcgaagatcatgacaacaaagaaacaaaggatcgaagactggattgcatttatgatgatgagccgctgggttctgagacatatcccat

SEQ ID NO: 167958 - DNA, 337 bp, Glycine max
  unsure (1)..(337): unsure at all n locations
agcttcggtattcaatttcgagcgtctttattattacgggactcaatcagacatccgactaaaaagttattgtcgctcgaattacctcggacgttcagaattcaatttcgaacatctcaatagattacgtgactcaatcagacatctgagtaaaaaagtcattgtcatttgaattttctgagagcttcaacattcaatttcgagagcntcgatatattacaggactcaatcacacatccgacgaaaaagctattgtcgtttgaatttgctgaaagcttcaactttcaatttccagcctctcgattattacaggactcaatcagacatccgagtaaaa

SEQ ID NO: 167959 - DNA, 464 bp, Glycine max
  unsure (1)..(464): unsure at all n locations
tgaagaggatgctntaatggaggagaagaaagagagaatgtgggagcacgaaattgaaggaataaaagagggaaagaagtggaactttgaagtgtatctcataagactttcattcatcaaagttacaacaagtgttacacatgcttctatttatagactaggtagcttccttgagaagctttcttaagaaaacttccttgagaagtttctttgagaaaacttccttgagaagctagagtttagctacacacacccatctaaaaactaagctcacctccttgagaagcttccttgagaagctagagcttagctacacacacccatctaaaaactaagctcacctccttgagaagctttcttgagaagctttcttgagaagctagagcttagctacacacccctataatagctaagctcacccccatgacaaanaagacatgaaaatacaaaaaaaatcctactac

SEQ ID NO: 167960 - DNA, 358 bp, Glycine max
  unsure (1)..(358): unsure at all n locations
agcttaatcattgagagatggctatttgtgattaataagnctcttgattaatggctacagcagattgatagcgaccttgttagaactcaagaaagctctcttaagtattgttgtaggaacgtgggagtctccatgaatgtataaacagaaaaaaattccatcaagaaataaacaaaaagcagttcatgggtgccacattgtggggatgagtcacacattctttaaattgctttaaagaacgacacatcaccgtgaacctcgctcgttgtctnctgtatataagattaagattaaggatcaatgtacacttcgttctatgggtaatacccaatattgtaatgactagggtgtaaaactt

SEQ ID NO: 167961 - DNA, 460 bp, Glycine max
  unsure (1)..(460): unsure at all n locations
tctctcggatactcttcatctctctgtttcatacatcgataggttcttatcagctaatccagtcactaaatcaagactttagttactgggtgtttcgtccatgctcatcgctgcgtaaggcttcacttcctgttcttaattntgcaatgcttgttaattttaatctgcttaaacattaaaattgcattttttgcttcttctgaatatgcagaaaatatgaggaaacggacccaccaagtgtggacgagttttgcagcatcactgataacacgtatgacaaggcagaggtaaatatgcaatgctatttttattttttgtggggtacaaatgccaaattactttcttgtttgatatttgtcagacctctttctctcactctggttttcatggctattggtgatatatacgctgtgaagatggaagctgacatactcaagtccctaaagtctgaaatgggaaa

SEQ ID NO: 167962 - DNA, 422 bp, Glycine max
agcttagagagaaaccttctatggaggttaataatgagagagagaggagggggagcacgaaattgaaggagaaaaagagggagagaagttgaactttgatgcgcatctcacaagtttcacattcatcaaagttacaacaagtgttacacatgcttctatttatagcctaggtagcttccttcataaacttccttgagaagcttccttcagaagctagagcttagctacacacatccttctaatagctaagctcacttccttcatatgagaagctagagcttagctacacatacaccctataatagctaagctcaccctcatgctaaaatacatgaaaatataaaaaagtccctactacaaagactattcaaaataccctaaaatacaaggcttaaaccctacactactagaatggccaaata

SEQ ID NO: 167963 - DNA, 435 bp, Glycine max
  unsure (1)..(435): unsure at all n locations
tcaaatgggcaaaagcagaggctctatcccactctggttataaaactagaatacttttgcaaccgtggagccgcaacaacaaccacaggttcgttcctgtagtgttggctgctccaagtttggacttttgtttcatcagactcgacggggctttcaccgtcgtcctcgaaaaaagaagaaagctgaaggaaccttgacacaagagtttgtgcaatgtcaaacctgaaggaaccacagacacacccacacacacacatatacccaactacaataataaatcataagcacccttcaaacccaacattttaaattagttacataatcaactgctgatgtctatatntgtctgtaattgaattttaccttttgtatgttcttgtatgtgatcagcgcaacttgctatataaacaactgttgttcatgctgagaaacctt

SEQ ID NO: 167964 - DNA, 437 bp, Glycine max
  unsure (1)..(437): unsure at all n locations
agctttgaaggtgcgtaccccaccatttttcatagtttatacactggaangngtctactattattgtgatcatctctttctccgtcattgtaggtgccacttgagttgccaagtctctccatctttgggcgtattctttgaaagatttgtgccccctttttgcacatgttctgtagttgcatcctatccagagccatatcagaattgtactgacactgcctaacgaaggcaaccattaggtccttccaagaatggactcaggaaggttcctaagttagtataccaggtgatagctgtcccagtacgactttcttgggaaaaatgtatcagcagtttttcatcttttgcgtatgcccccatctttcgacaacacatctttagatagttcttagggcgagtagtccccttgtacttgtaaagtccgacaccttgaacct

SEQ ID NO: 167965 - DNA, 411 bp, Glycine max
cgtggctatatgacacattttggccaacaaagtcaggttagcgataactcgcctatgctttttctctctgccttatgtagaaagtcattgatcctgtcaagtttgatgagtcggaaaattgacgccgcaattatactgtgccagatggagatgtattcttcccctgctttctttgacatcatgattcacttgattgtgcatctggtcaaagaagtcaaatgttgtggtcctgtttatctacggtggatgtacccgattgagcgatacatgaagatcttaacagggtatacaaagaatctatatcgtccagaagcatctattgttgagaggtacatcgcagacgaagcattgattttgttcagaatacttagaggatgctaaacctgttggccttttgagtctcggcatgat

SEQ ID NO: 167966 - DNA, 179 bp, Glycine max
tgcgaattccccacaaaacctgttcccagaaaccaccaaagtttttatgttatagagcttactttgtcgctcgcttaactggccacataaattgttggccaaactgtgagtgtctccaaggctgacattgaatacaaggaatctggaagatggccagtgaatgcattggaatccaaatg

SEQ ID NO: 167967 - DNA, 368 bp, Glycine max
  unsure (1)..(368): unsure at all n locations
acgctacaaatatgatgtttgggcccaattggtattttggtccaattataaaaatacagcccanaaatgaaatataataaaactggacgacaaataaaattgtctgctatcttcaagtccaagccggttcagcctaattctggatccaaacccaatttcttataattctcctgaaattaaattaaaacatagaattagtcaagtaggcccatatgataaaagtgcataattaatttgacaattaaggctaatcagtaattaaaatggtgacaaaaaggggtaagaaataggagaaaataatgacacatcagattctgatgagtcttagggtagatttccgcgccatgagctaagtttgagaccgctta

SEQ ID NO: 167968 - DNA, 461 bp, Glycine max
  unsure (1)..(461): unsure at all n locations
tcttatccaaggctcatcttggtggtgaagctccttctttatggcttattccttaatggatggcgcctnctctcacctattatcctttgtcttccgctgcatctccatggtggaaaatcaccattaaaggaccccattgaagctcaaagatccagcctccatagaagctccacaagcaagcttccatcaatggctcaggagcggacatggatgccttgtgtcttgttggaacaagtgcgaaaccaaccaaacacagagggcgggcaagcaacagatgatccgtgcgctactctnttcgtaccttcggtccaatgtgtcaaatagatctgccaagacagctaccaccggacttctcttgctatggtggtatgcaaggaaagcgtcgattgctgctaggtccaccaaaccatccacgtttggaaagaggacgacctcananattagcacagctaacacatcca

SEQ ID NO: 167969 - DNA, 452 bp, Glycine max
tatcttctctctctcgctccgaatctctcagttagcctgattttgtggcgttccaacaaactaaactgttctgcgtattacttactatttacgactcatcttcctattctcgacgatcggtatcattgattcttctactacactaaggacaaaaaatcaacacaacacaaactatcacctgcggccccagattccttctatattgctggggctttgcacagattcacagggtcgctctcataactttacctatcttggcggcgtgattcggattgctcattctttcaccaaagatccacatcactaatctaaggatactaccattcatatcactagttattaatttattaaactctacgttaaatacgcccatctgcacccacacgatcatgactgtatacattattcctttcaaaacactttcgcgtggcatatcgcaactacatgcacat

SEQ ID NO: 167970 - DNA, 259 bp, Glycine max
gcttgtggttggtggtgtttggtgtgggcttggccgtcggtggtggttttgatgtaagttttatgccgcgtgagtgagtgggttactgtgtttgcggtgttggtggttcacggaggctgcgttggctccgccgatggcggttttcggtggctgtgttggctcggccgatggctgggctcggccgatggtggttcttcgaggacgaaaggggctgactgcgggctactggtggctcttggctcgtcctgcgatttgactg

SEQ ID NO: 167971 - DNA, 378 bp, Glycine max
atctgccatacgagtatccaagaaaacaaaaagatagttgtgaaacaagtatccgatatgctcaaaagcctcaagcttaagctccataagtttcacgttatttcttttggctttccgaccaggaaaacataagcattgtaacactatccaaaacaacgcaaaacggtaggaaaacatgaagacatcttatctaacccaggaggtgaaaggaacacgaactttaactacctacttatgaagaaaacacacgcgagttccacaaaagaccaaattaagagctattaacgaatacccacgatagctaagtgaagaatcacaacttcagctaagtaatgcagcattaaagaccgaaccttggatcccacgaagacaggaaga

SEQ ID NO: 167972 - DNA, 154 bp, Glycine max
aagtcgaggagaccttcaatcccattatcgcccatggccgacaaaaccggacaattaacttgaatctccattactgtcaatgcggaaggtattctgcgcttcactatccatgtacacctattattgcaccctgtggctacgtcgacccgaacta

SEQ ID NO: 167973 - DNA, 315 bp, Glycine max
ctctctctacgctcctgctacaccgtctccacaacgaagagtagaagaaccactcctctgaaacgcaaacgggcaatctcagtgccagcgccgagtctctgagtccggatgatcgagtcaatctcccgacagttttgatactgtttcggagcacaccgtgctttcttccagtcctcaagcgacctgccgcgcttgagattatatgaacgttgccaaaattcttttaccagccacgatacacagaggatgtaccctcccttgttctatttgaccctagtggatgtaccctccgctataactgactcacatgagatg

SEQ ID NO: 167974 - DNA, 465 bp, Glycine max
  unsure (1)..(465): unsure at all n locations
ctgagaaacacgcgatcctccggcagcgagaatatattcatctcgatcgcntgcctacaatagcgcccttgtcgacgatgacaactccttgcaatcaagacaagctatatacaagacgacagcacgtccacacaaccgtcactccccctatctctcggcatgtatgcccaaccctcacgatcgaccctcaatgacagatctctaatcgatcctaaccgatttctaacccaagccctctccccctttggcaacatcaaaaagaactaagcacaacactcaaaatccacacagagccaaacattaaaccaaaataagtccatacactgccataaccacccaaagcaaagtccagaaatatacaagcgccagattacgataactagagcaacaaagagccaaacacaccgtgatcaaaccaagtactactaacactcactcataatacacaaaaatagctcacacgac

SEQ ID NO: 167975 - DNA, 413 bp, Glycine max
  unsure (1)..(413): unsure at all n locations
gaccttaagtcacctgaggcatgcaagcttaacagaagggaagctcttgccttatctgctgaagagntaaagtntgttgccagtcagtttatgcgcctgcacagtaaacaggttcagcacacctttcgtttttacttccaacagtggaggacttgggctgcatgctttattcaagcagcctggcgtcgctattccaaacggaaaactatggagcttactcagaaggacgaacctgaggagtcacaaagacttcctggcaatgccagtggcagttcgtacagcctcggtgccaccttcttggcctcaaaatagctgcaaatgctcttcgtggtgtacattggaatcgggaacgccacagtgccacggagttggtgaaactacagaaacctcagaagctgacttcactggtgatg

SEQ ID NO: 167976 - DNA, 430 bp, Glycine max
tcatgatgaactaagatcgatctcacagacgtgttgttgttttcttacgtgatgaaaaaaagctcagcggtcatgaacacttaatgataacaaagatgatgatctcaagaatcaaagatgagttcaagattgaatcaagaacactttaaagctcacagaggaagtttgattttcagaatcaagaatcaagtttcaagatctcaagttccaagaatcaagatcacgattcacgactcaagaatcaacaacagacttaatcacgataagtcttaccaagttttttcactaactgagtacgacatgaatttttctcaaaaccttctaccaaagagtttttactctctggtaatcgattaccagattattgtaatcgattaccagtagcaaaatggttttaaaaagctttaactgaatttaaacgctccattga

SEQ ID NO: 167977 - DNA, 388 bp, Glycine max
agcttatgctcaagcaaatctggtgctttactgggagaaatgtcacttcatggttcaagaaggaataatgttgggtcataaaatctcagctcgagggatcgaggtggaaatagcagagatttatgtcattgaaaagctaccacaagtcaatgtgaggacattaggagtttcctcggacatgcaagattctatcggtgattcataaaggatttctccaaaattgtcaggcctttgagcaattttctaaataaagatgcagtgtttaagtttgacgaagaattcttgacaacctttcagaccttgaagagtagtctaatatgtgctccgataatggtggcacttgaatggagtaaagaatatgagctcatatgtgatgtcagtgactatg

SEQ ID NO: 167978 - DNA, 490 bp, Glycine max
ggaactatgaaactaagctctttcacgtgacgtgtaagagtatgaatggggatttttatggcgattcacacaactcgttaaagatctaatatgaacttatacttatcttatgggtgtgtgtgaatctctcataattcactttcttcacttggtggacaaccaccttctccaagaaaatattttgatgtgttacaagaaagtttgctattatagtgggctaaaagtttattgtactagcgaaaacccactctaaattgatggcttacaatggatcaaaagttcattggtaagttttatcaaccaccccaaaaaagttctttgtaataggatgagttaagcccactataactcgacgataatatagtgagcttagtcgtcaataatttgactatcgataatacagagagcttaaccgttaataaatgatgaataaaagtggacatgaaccagaatgtatcacaaattacaatacgttaaagtgtctgtatta

SEQ ID NO: 167979 - DNA, 236 bp, Glycine max
ctattattgagatcatacctttctcccgcattggacgtgccacttgagttgccaagcacctccatctttgggcggactcttagaaagatttgcgcccccttattgcacatgttctgtatggcatgctatccagagccatatcagaattgtactgacactgcctaacgaacgcaaccattaagtccttccaagaatggactcacgaaggtttctaagatagcataccaggtgatagc

SEQ ID NO: 167980 - DNA, 354 bp, Glycine max
atgcaaattcaattccacacctatactaccaagctaccctctgacttggatagtcgcaccctatcactcttagcatctcacccagtgcggttccaagacctccttaaaactgatcattaagcaactcaatgggtaaatgaagaattcggattcaaactggccacctcctaccaatattagggttttccaagaagaacgattgctatctttggacaagaatatattgattgcaaatgatcccaggactccttcatcaaggcataattatagttctcatctaatgtaaatagcaaccacaactaatctattcgaacatctataatcttgatcgaacctttacgagcccacatatta

SEQ ID NO: 167981 - DNA, 313 bp, Glycine max
tgcaagcttgggcatagggacctattaaccttttagcttttgagaagaaagattccaaagaaaggcacttttgcttggagtggcttgataaacaagatccaaattcagtcctatacgtgtcttttgggaccacaacaacttttaaagaggaacaaataaaaaagattgcaactgggttggaacaaagcaagcacaagttcatctgggtgctgagagatgctgataaaggagacatatttgatggaaatgaaccaaaatggaatgagtcttccaatgaatttgacgagagagttgaaggcattgggctagttgt

SEQ ID NO: 167982 - DNA, 447 bp, Glycine max
ttggataatatcagcctgcgactggttctgattaatatgaagatgcaccaaatagtactgctcagaatggagtccacttgcaagaacatattgattttcatgatggaagatggacgagaagaacaatatttggaaatgattgtttagtccataaaattatttgagtatttaaggcttaccattgttggagtcattggtgcctctaataaaactcctgaattgcttaaaatgaatcccattggaaaggtacgctctgcttgttcccgtcttactacttaaaaataaagcgtttctcttatatggatttgccccccttaaaaaaatatggatttgctccccttggagacttatcacattttaacccttatctcttatatcctgttctcttactccttctaagcatatatcgacatgaggtaatcaacactggctcatgcttgcttagtt

SEQ ID NO: 167983 - DNA, 406 bp, Glycine max
  unsure (1)..(406): unsure at all n locations
gtcacctgcggcatgcaagcttcttatccaaggctcatcttggggatgaagctccttcttccatggcttattccctagtggatggcgcctcctctcacctcttctgctttatcttccgctgcatctccattgtggaaaatcaccattaaaggacctcattgaagctcaaagatccagcctccatagaagccccacaagcaagcttccatcagcagacaattctcatactactcttctcacatcttcggncaaaggtgtcatagaggtcggctagcatagcaacgactgggctttccttgtggtcatgataggcaagaaaagcgtcaatcgctgctaggtccaccaacccatccacatttggaaagaggactcctccaagatcaatagtgcgagaatgtctatgaac

SEQ ID NO: 167984 - DNA, 474 bp, Glycine max
  unsure (1)..(474): unsure at all n locations
tgcttgtgtggcttctatggagactggatctttgagcttttattatgtcctttaatggtgattctccaccatggagatgcagcggaagacaaaggagaagaggtgagaggaggtgtcatccactagggaataagccatggaagaaggagcttcaccaccaagatgagccttggataagaagcttggagaggatgcttcaatggaggaaaagaaagagggagagaaagagagaggggggagcacgaaattgaaggaagaaaaagggagagaagttgaactttgagttgtgtctcacaaggctctcattcatcaaagttaccacaagtgttacacattattctatttatagactaggtagcttccttgagaagctttcttgagaaaacttccttgagaagcttctttgagaaaaacttcttgagaagctagagcttagctacatatacctctntaataactaagttcacttccttg

SEQ ID NO: 167985 - DNA, 454 bp, Glycine max
  unsure (1)..(454): unsure at all n locations
gtcacctgcggcatgcaagcttgtaatcgattacacatatactgttatctattaccagaggagtntttcagaaaacattcttagcagtcacatctttttatctgtttcttaaatggccatcaagggcttatatatatgtgacttgagacacgaatttaacaagagtttttcagaacaaggaccttatgttccctctataatggccggaagtgcaacaatagaaaaacctagagcagattggactgaggaagaaagaagattagtacaatataatttaaaggccaaaaatattattacatctgccctaggaatagatgaatactttagggtttcaaattgtaaaagtgctaaggatatgtgggatacactacaagtaacacatgaaggcacaacatatgttaaaagatctaggataaacactttaactcgtgaatatgaactttttaggatgaat

SEQ ID NO: 167986 - DNA, 457 bp, Glycine max
  unsure (1)..(457): unsure at all n locations
ngatgccacgctaagcttcatatctcaagctaagcgcatattgtataacattttgtgttgcagaaagcgctaagcgcagcctgttgcgctaagccccaaatgcttactggactttacaacttcaagttgggcttagcgtgaggataggctaagcgcttgggtcttaaactcatacgtcacatgggcacgctaagcgtagctctagctaagcgcaactctgcactaaatatgccatacgaatttcagtttttaaaaatcaaaggcaaaggcactttgagtgctacctttgcacccaaacctttgcacctttctaactctgagattgtgtgcttcccctttgcgtgctcatactaacttgtctgtgttatcattgcttcattctgcattacaatcacacactaagtcagtgggcacatcttcatttttatttctcattcttcaaaccttacgatagatg

SEQ ID NO: 167987 - DNA, 441 bp, Glycine max
  unsure (1)..(441): unsure at all n locations
agcttaatccgggaggacatgaataagtttgtgtataactttttccttagggggtattcagtttggaatctccatgtagctcatgttgattccatgggttgaagtatccttccaagactgggtaaccttgatgtgccattgctagtcttatctcggngagagtgtactaatggaatcatgtgggttcgttactacatgtcctcccgagcttctttcgtaaatattttctgatactacatgcatatgagaaaagataaattgacattccattgcatatgtgcatatttgtgaattgtctaagttgtgttgtttataatgtggatgccatgtgtggcttgtgtggtacttatgttatgcgtgaatgattctatccatagntataataatgtatatgtatctatatgttaaacctgtgtggcgactcgtcatgggatgagatgt

SEQ ID NO: 167988 - DNA, 467 bp, Glycine max
tgtctcagcgtttatgcgagacggcgacaaacatgctatctatcatcgccaagtactaagaagagttaggtctagccacggcccacgagcataggatcgcggacgagtatgctcaagtataggcagaaaaagaggctagaggaagggtgatcgactctttacaccaagaggcaaccatgtggatggatcggtttgctcttaccttgaacgggagtcaagaacttccccgcttgttagccaaggccaaggcgatggtggacacctactccgcccccgaagagattcatgggcttctcggctattgtcagcatatgatagacttaatggcccacataattagaaatcgttaggaaacttgtatggtctctcagaccttgactagatacgactttctttttgaaataaaatgagttggtcccatgtttctactccaaaaagcttgtgcaaatcaaatcactcctacattt

SEQ ID NO: 167989 - DNA, 331 bp, Glycine max
tgtccaatgcagcagtaacgatggttcgtgttatgttggggaacggttaccaacccggaatgggtttaggcaaagacaacggcggcataactagcttgataaatgccaaaggaaatcgtgggaaatatggtttaggctataaacccactcaggcggatacaaagagaagtatcgcgggaagaaagagcggtggtcaaagctcgcagttgaggcaagaaagtgaaggaagcccgccctgccacataagtagaagctttataagcgcgggtctgggagacgaaggtcaagtggtcgcgatatacgaagatgatgttccgagtacattggattt

SEQ ID NO: 167990 - DNA, 466 bp, Glycine max
tctagttggggtttcttgcaactacaactagggaagagtttctttataagggtcgagagaacgatgaagttttttaggttttctctaaaaggcgtcgttttgacgatttcttttacgtgaaaacccaatacggattttaaaaaccagctggatcaccaagtttgtacaaaaccggtcgggtcttaccaggtcatactgggctagatgcacgaccggtccaataaccaaatcggcccggttatgacactgggtcccaatcagaccgaatttcttaactatgattcatgttttcaataaaatattaatgaaattattattatgattatttaagattgaatagtattaaaatattttgtttaaaattcatcgttggagagaaaaactaagtattaaagatctataaaaataaaaacaaatcattggttgaaaaataaaataaatcataaacatttcttatgtagaaatt

SEQ ID NO: 167991 - DNA, 310 bp, Glycine max
  unsure (1)..(310): unsure at all n locations
agcttgncttagggcttgtacctcattactttcttccgaagctttaacctcattgtctctcacagtctttagattccggagccaatccaatccttgtgtccggactctcagccacttatgatagccgccgatgatcccattactgcttcccctaagctctctgtcctttcttcacaccgtatcacatgccttgcgaactccttggagtacctttgcattggggtcactgaaaccccgtggtgaggacaggattataatttatacaaccccttgttcccattaagggaacatttggaaatcctctccatga

SEQ ID NO: 167992 - DNA, 467 bp, Glycine max
tgtggcgatgttgagatctatgtaccatgctaacaaatcttattaattaaatcgagtgctaaataagaattaatggaggccaacaagtcaagctaacatgtgaccagcgtccttgttgctgaagtaaaagtaagattttttgcgagaggaagtgctagacagtacggtagaaaagccattgtatttgccatcaaattttgataaccctatcttggtaagaaagtcaaatagctcattttctcggacaaaaggctgggccatgtagtcctcaattgccatccactgaaaaaacaaagaaaaatcacataaccatgattggcataattcataactattaataattgaaattatctcatttaatatacacatttccgtagattatatccttaaatcactttctaaatttcaaaatttcttcaacttagataacttctcacttctttatattatcagtcttttatctatca

SEQ ID NO: 167993 - DNA, 329 bp, Glycine max
tgcagcttaagcagcataaggactttatttctctcttttgcctccttctctttcaccaatattaagtccaataggcttactcaaaagtttaggaatcttacggaagccttacgaaagcctcgaaagctccggaaaccattttccaacaaaatgtggaggatctttataagtccaccccctcccctttgctaaatgcactcctttttattttcacacccctgtttactaaatacactccccttttgcttttttttttatgctgattatttgtccgtaacgttacggaactttaccgattaccgaatgattctcgttttttttccaaatgc

SEQ ID NO: 167994 - DNA, 418 bp, Glycine max
  unsure (1)..(418): unsure at all n locations
tatgctgcanacatntacaatagacctcctcaactttttcttcagaatcaaccacagcagaacaattatgacctctccagtaacagatacaaccctggatggaggaatcaccctaatctcagatggtctagccctcaacaacaacaacagcagcctgctccttccttccaaaatgttgctggcccaagcagaccatacattccttcaccaatccaacaacagcaacagccccagaaacagccaacagttgaggctcctccacaaccttccctcgaataactcgtgaggcaaatgacgctgcagaacatgcagtttcaacaagagaccagagcctccattcagagcttgactaatcagatgggacaattagctacacaattgaatcaacaagagtcctagaattctgacaagctacctt

SEQ ID NO: 167995 - DNA, 276 bp, Glycine max
agcttgtcaagtatacaaactgtattgtttagtgcctacgcttgcagctgaggttgggaattgtaaaccgtttataaaatgagtaaatgtaatctcttacaatatctttctattaggttttttttaatattttaccaagacagaattgaaaaacagccgtctttccaatgtttggaaacatcaaaacatttcatatttactttatctaaaaagaagtgattaaggaaaatcctttttacaatcatcagagatgctgaatgagtataggcgatggag

SEQ ID NO: 167996 - DNA, 444 bp, Glycine max
ctcagctcctattcggttttattcaagcctgttcattatgttttatggcctcagccactatattagaaagcataggagtcaaagggtcatcttgtctcacttctctagaggggactagttcctttgctgggctcccatttactaagattgagatagtagctgagtgaagacaagcagaagtgcactttctccatttaaggcagaaagagacacaattaagcctgtcaaatatatcaatatagataaaggatgatactttgagatgatcgagacttgtgagacaatatgtcttgctacttgcgtgagtagtgagtgaaaagcttctggtgttggcggtcctacctcacacggacgtggtcattgcgacaatcagattgatggcgaactttttgtacagcgaaaatgattttatcacgcccacatgatgtgagcttctgataaaaa

SEQ ID NO: 167997 - DNA, 432 bp, Glycine max
agctttctacaacgtccgctacgatgactgtttgtaaccggcattgtatgtcaaaaataaccggtgtaataggccgtttgtatagtagtgtcactatgattaattgttgttatgtggaagatatgtgtgacaattctataatatttatgaaaacactattattttaagatatttattactagtgttattttagaagaatgtagacatcatggttgatttttcggattaccgcgtcggctgaaagcaaaactatttgcaaatccttttagaacttgttttattcgttgagattattatcccattaaaagtacccttttagaacttgttttattcattaagattatcatctcgttaaaaatgttattttcataatacaaggaaaaaattgtttaaattaaggagagttgaagacattttttctaaccttcattt

SEQ ID NO: 167998 - DNA, 457 bp, Glycine max
tattatttctttaatctgcatgcgatagtgatggtgctgttttaatctccatgcatgtgaaacaaataattgggtctattttgctggggccctacaatcatcagtgcacaggaacagaacaaaaatcctgaggaggataatggggtggtggctatgcaatcccaagtttgatcccccgtaaactattcatgtactagttaaacaagcttcgatcataaagtttttttagtttttaaattcctttgcactcctataattgagtgaggaacaaaatatatttatatgcatctgttcactattcatatagtgattattaaaaaggcaaggacaagaaactaataaaccaattgttgattatgatcataatgatcgaactgataatgacggcgttgatgaagctatataatatagccttatcgatagactcgttctgggtgacagataatttgtgaatagt

SEQ ID NO: 167999 - DNA, 386 bp, Glycine max
  unsure (1)..(386): unsure at all n locations
agctntaggatcaaaacagtttctctctttttctctctnnttctctcaactgttcttcattcttctccctcttctcatttatgatattgcttcttcttgcacaaattttgtggctcttccactggtgatgatcatggaaggctaaacactcaatcaatccaaggatccactctaagtaaggttgaatttgacttctggtttaccattctaattttgtactgttcatctttttcttcaatcctattctcgattttcatgattatgaatacgcttatgattgaaaatgaattaagtttagattcattttctaatttcaaaatttaatcgcacattgaactaactctcatgacattgattgaactttcataacatgatcattctttgta

SEQ ID NO: 168000 - DNA, 385 bp, Glycine max
  unsure (1)..(385): unsure at all n locations
acagcttcntcggggccatttcctgcgagaacaaacatttttattttatttntacaagacaatgcttatgttaacgcagaaagtgttatgctaatccctctgattttagaatgaactcatgtaatctatttatgcacacgcgtatttgtggaatatcctactatttatatcaacgtcgaggccatccaacacatcctaattctcatacatatatatgcattcgaaaagaacatacattctcacgcctaaggcatcgcgtcaaaactcacacttacttatatactaaacatttgctaatacaaactacctacacacatttgaaacatgtatcataccaaccttatctgttctgcatattcgaaagctaattacatccctgccacac

SEQ ID NO: 168001 - DNA, 411 bp, Glycine max
agcttacggtaaaatctgggacctatctatggtagaagtctccacagaggccattgcgtccctcgcccagtattatgatcagccgttgaggtgcttcatctttggggacttccagctatcaccaatggtggaagaatttgaagagatcctacgatgtcctctagggggaaggaaaccatacctcttctcagggttctacccctcattggccagaatttctaaaatagtccaaattttggcgcaggaattagaccaccaaaagcaagtcaaaaatggggtggttaggaatactgagaaaatgtttggaggcaaaatcaagaatcttggcaggtaaaggcgagtgggccccgttcatagatattctcacactgttgattttgggggagtcctctttccgaatgtggatggggt

SEQ ID NO: 168002 - DNA, 433 bp, Glycine max
  unsure (1)..(433): unsure at all n locations
ntctcggggccattcctgcgaaggcaaacatttggaaagttagttnttacaaagaaatgctacccttaaaacaaaaatggcatacaactccctccaataaatacaaacatcaatgtgaatttagagcaagcttatgcgcatacttcttcacgaacgttcacttgcacaagacattcttataactaagaaaaatgcacccatatacaatcaaggcaccttcgttacctagattatttacatgtacttccaaggtgtatttgttacctacatcacacacatttcctttgctaaattcacatacatgcatactctaagcactttggctatcaaaaattgcatacgtgcacatcttggtatttctaatacctatacatacacaaacttcatgatgaatcttgactatctacacaataaggtgctacatttcatgccc

SEQ ID NO: 168003 - DNA, 439 bp, Glycine max
  unsure (1)..(439): unsure at all n locations
agctnttgatactctgaaatatttatngatttctgcacccataaactgctccgaattggaccctagattttgaaataatgtgtgatgcaagtgattatgcagtaggggcagttctgggtcaaaggaaaaataaaaattttcatgtcatacactatgcaagcaaggttttaaatgaagctcaaattcattatgccacaactgagaaagaattgcttgcaatagtatatgctttggaaaaatttagatcttatttgataggatctacaattgtggtttttactgatcatgcaactataagatatctgttggttaaagctgattctaaaccccaacttatctgttggattctatttgtgtaagaatttgatttggatatcaccctcaaaaaaggaagtaaaatcatgttgctgatctatctacgctgacagtaatgaagtga

SEQ ID NO: 168004 - DNA, 460 bp, Glycine max
  unsure (1)..(460): unsure at all n locations
ttctgcagggaagctaagtgtgaagtatgcaatcctgcataggattggcgctgcaaactgggtacccaccaatcatacttccactgtngccacaggtttgggtaaaattctgtatgcttgtggaaccaagtccaaatttaaatttggaaactatatttttgatcaaactgttaagcattcagaatcttctgctgtcaaattacccattgccttcccaactgtattgtgtggcattatgttgagtcaacatcccaatatgttaaaccacattgactctgtgatgaagagagaatcgcctctatccctgcattacaaactgtttgaggggacacatgtcccagacattgtctcgacatcagggaaagctgctgcttcaggtgctgtgtccaacgatgctttgattgctgaactcaacgacacatgcaatgtgctggaagcaaccatcacagccaccacagag

SEQ ID NO: 168005 - DNA, 423 bp, Glycine max
agcttcaacctagaggagacggaccattctaagtgttggagaagatcaacgacaatgcctacaagattgacttgcctagtgagtataatgtaagtgccactttcaatgtgtctgatctatctcttttttatgcagatggaggggccttggatttgaggacaaatccttttcaagaaggagggagtgatgaggacataaccaagggcaaggaccatgaagcacttgaaggtcccatgaccagaggcagacttaaacaagtcaaacacgtcatagagataaggctggtcatttgtataactggcattgatgatgattgaacgcccaagtggagaaagatgaaggcccagaggtagagacactacccagactactaattggtgctgaagggccaaactaatttaaacgcccaagtaaatatgtttt

SEQ ID NO: 168006 - DNA, 451 bp, Glycine max
  unsure (1)..(451): unsure at all n locations
tgtnattgattacacacatactgcgatcgattactagttcagatnttcagaaaatattctcaacagtcacatccatttatgtggttcttgaatggctatcaaaggcctatatatatgtgacttgagacacgaatttaagaagagaagaagaatctctcttgaaagagatagcttgaacaatttgagcactcaaataattccttattgaatcacaagtgttttggccaaggaatttgtaagaggataaaacgattttgctttttaagaggataagacctttttgttcaaaaaaaactcttgaaaaggactttttagcttaaatttcttggccaaaccttctgctacttcaattggaattcccttcctatttaatataccctttctaagattctagagactgtcttgattatccatcttgaatatctctgatttctntgtcttgaataaagct

SEQ ID NO: 168007 - DNA, 330 bp, Glycine max
tcacatgctggctgatcaaatcagttgcctttccagcagtgccaatggtgaccacaacagggttcctcaaatatttcctagcaagcctctccacagcaggcggcatggtggcgctgaacatataggtggtacggtaaatcttcttctcgtcaagctcctcatcctcattctccggtttgagattgctggaaggcatggcatcgaggacacccatcacctgtggctcaaaacccatgtcaatcatacgatcggcctcatcaagaaccacatagttgcactggttgagaacagcatagcggcgctccaaacaatcaatcaaacgtccgggag

SEQ ID NO: 168008 - DNA, 455 bp, Glycine max
  unsure (1)..(455): unsure at all n locations
tgtggacacaattcagtaataaacatacatgatgtgagtattatgtattcaatcatgttttatcggtgcgctacctgcatctgcatggtagttcaccctggccaaaccgaaaaatgagttaataagtaaaaatatgtttttttttataaaaaaactttccggtcgattgtgcaggaaagtgtccacgtcagatttgcagaatccctacacgttaaatnttctcctccgggggagtgtgtgcgtgttgccttctgttgtgttgtgtgtgcataaacaaaacaaaaacaaagagcgtttcaattgctattctccacaaacatctatagttaagatctgcgttaaccactaagatctctgaagcagagggcattgtctactgtcacaggcatgggtgaagtaagacttctctctctctctcccctcttaccagctattacgcccatcttctcaactct

SEQ ID NO: 168009 - DNA, 329 bp, Glycine max
agcttggaggcattgacaagcgtgttatttattatgttgagaaggaagctgctgagatgaacaagaggtctttcaagtatgcctgggtgctggacaaacttaaggctgagcgtgaaagaggaatcaccattgatattgctttgtggaagtttgaaacaacaaagtattattgcacagttattgatgcgcctggacatagggatttcattaagaatatgattactgggacatcccaagctgactgtgctgttcttatcattgattcgaccactggtggttttgaagctggtatttccaaggatggacagactcgtgaacatgctctgctt

SEQ ID NO: 168010 - DNA, 315 bp, Glycine max
tccgtcactaaagccgcacaagttggtgatgatctctcctgaaagcaccttctctctcacacagcgacacgcaatctccatgcgtctagtcccgcaatggaagagccaatttgaagcaacgtgaatagcctatcgattgccacatattactctatcatcttgagtgtctcaaaatttagctgttggagacactcctaagcatgtaatctcacatccacctgctgccataacactcgcatcagctccagcactagatacaacaacctgtcgctgctccttgcacccacacggatcacagttccctccatagaacac

SEQ ID NO: 168011 - DNA, 366 bp, Glycine max
  unsure (1)..(366): unsure at all n locations
aagatctaatccattgttttgtttcatacatgagatttcgttacttgtgttattcgattccggggcaacccattcctttatatnctatttgcgtgtagaaaaacttaagctttatgtgtcttctttaaataaaggtttggtggtagagatccctactagtggttctgtgttaacttctgatctgtgtttgaattttcctgtggaaatttctggtaggacattcttgattgatttgatttgtttgcctttgagccagattgatgttattcttggtatggtctggttatcttccaaccatgtcttgttaaactgttatgataaaagcgtggtgtttgatgactctggagtgacgtaagatatggtgct

SEQ ID NO: 168012 - DNA, 402 bp, Glycine max
ttctcctctattttgcaataaatagggggagaagtgagattgttttgggttccccccttacgcacttgtctctctttcacatttgcttaggaaaattattttcgtgaagaaaatccgagccgaggcgcttctctaacgtttccgtgagtaattacccgaagattctcgaccgttcttcatgactcgtcgctcgttcttcgttttcttgagtcttcaacgggtaagtacctcagaccacgcttttcaattcattatatgtacccgtggtggtccacattgtgtttcatgtattttcatttacttgttataccccgttttgacgtgcttaagccatttatttaagacggttctcgcctaatctaaaaataaaataaacttgcaccgatcgcttgaatcgtgaca

SEQ ID NO: 168013 - DNA, 381 bp, Glycine max
taagtcacctgcacgctgcaagctttataagcgcgggtctgggagacatttgttttgtggtccccatatgtgaacacgatgttccaagtgcattggatttggtacgaccatgcgcttctgatttccagctgggaaactggcgagcggaggaacgccccagtctttacacaacgagcataatgcaaacctttaccgctttaaaagctctatagtagggcctaggctttacagttctcctcttgtaaagcctcccgcttttgtttctaatttataatacaaggacttttttatttgttctacttactaccaatctattatttgctgttactttttctttgaacggaaatccgagacagtcccccaagtacaaacctggacccc

SEQ ID NO: 168014 - DNA, 127 bp, Glycine max
ctacttagcggacatagaggtggaagagacttgcttattccaccctactcttgctccaccatgacttagggagacgtcctttcctatttccctctttactttgattacatttggccaattctatttg

SEQ ID NO: 168015 - DNA, 359 bp, Glycine max
  unsure (1)..(359): unsure at all n locations
agctntcaacttctcctcattganattttttactnggagagccaatctaaccctcgtgtatgaactcttagccattcatgcctctcttctgtccctgctcccctcatagggtaccctaactgtcttataccaagtgcgggattatagttaatacaacccctcgtccctatcaacggaacgtttgggtactctccacatgagaagagcactccctcctttccttccttncatcgaggaaaccagttgattgtgctgcctnctatcccaaccaagtattggctccaatttactcttcctttttcgacgcacgagcgataaacttgaagcggacatgggtgccttattgtcttgtggaatac

SEQ ID NO: 168016 - DNA, 469 bp, Glycine max
cttttatccacgcacattcttggtggtgaagcttcttctatatggcttattccctagtggatggtgcctcccctctactcttctccttcgcccttcgctacatctacatggtggaaaatcaccattgaaggacctcaatgaagctcaaagatccactctccatagaagcgtcacaagcaagcttccatcacctcacttgctcgaaatccccagcctttattcactcatggcccagacacagatgccacaaagaattatcattggatgcatggctcccaccttgtgaaatagttaagacgaagttttcatacacgaccctcgaaggatgtctagatttccttgcttggccccctgcattaccataaacttccctcttcctctgattttcataactctatcttcaccctaacaagacaaaccttctgaatccatgatgaaactcacttaaggttctaacaatcctatcatg

SEQ ID NO: 168017 - DNA, 328 bp, Glycine max
  unsure (1)..(328): unsure at all n locations
acctcgacaagccgagctgagaagttattattttccccatcaccactatcatcatctaaattaaacacttttaaaataatgattatttatacgatgatcatttgcactttacactattggtctaatggtgcatatcttgaataatactttgcttgctagctttatagcacctgagagattaacgatgattatctataccatttctatgcgcttatcaacggtcggatgaagtgatataaagggcttacagagtttcacttgcatgtggaanaatctccaaaagagaaagactccgattactacgatcatgcccccatattaatacttt

SEQ ID NO: 168018 - DNA, 448 bp, Glycine max
  unsure (1)..(448): unsure at all n locations
agctnttatctagacaagatcatacttttgtgttacaacagaacctaacgatttctaattatatgggccattaaatctatcatgtgttgacagtaattgattagcccgcgaatttcctctggggttgaacacacttcagcgatggcctttgctttggctagtaatcgcgagaggtcttgacttccataagtggagcttccctgaaccgctataagattagaatggttgagcatttttcagtaacagctattgcatccatagtaatggcttttcacatgttgtagcagtgctatgattatatcggctttaaaaaacaatttttgcctctgaaacattgttgtttgggtttttttggggggtaaaatattccacaaaaaaagtaactttgttttgacctctgcttcttcacactttacaggacatttttttttgcgctattctattcttc

SEQ ID NO: 168019 - DNA, 459 bp, Glycine max
tctggaggaagcctcttaatgaagcttctagagatacctacatgaagctgcctcggtaataacgctggccaaccttcgttaaccgatggatcttcccgaaatttggtctgcaacttcacaagacattttccatgatctgaccgctgggatctttgagaagatgtctggagtgtgctacaagcctcttaatgaagcttctggaggaagcctcttaatgaagcatctatagaaagctacatgaagctgcctcggtaaaaacgctgccaagccttcgttaaccgttggagcttctcaaaattgggtctgcaacttcacaagacacttgtcaatgatctgaccattgggatctttgcgaagatctctggagtgtgctagaagcttccgttcccgagagcatctcctatgtaagcatttcagcctttgctctggtgtagcttaggaaacatgccatttcttctt

SEQ ID NO: 168020 - DNA, 434 bp, Glycine max
  unsure (1)..(434): unsure at all n locations
agcttccttgcagccaaatgtttaatanatatttctattaaagaaccatgtaagtgacaaaataacttatgtaaatgtaacattttttacattgattatgtatataaggaatgtaaaaaaagttatacaaatagattcaaatattcaaatcttcctcgagacaaaaaaaaaatattttaattttataagaacaaaaaaacatactaaaatttttaaaagaaccaagataaatttcaaaaatctctaattttatgagggtgaaaaacatattttaattttttttatatagtacaactgtgtgagatactgagaaaatgcaagtggttgagatatttatttaaaattatttactgaataatataattttcttaataaatatgttattgcgattaanaattaanaaactcaagtacaaattccagaaaatgaaagat

SEQ ID NO: 168021 - DNA, 462 bp, Glycine max
  unsure (1)..(462): unsure at all n locations
tctaagggctcacatagaaagagagagattactatctttatatcatccttttctacctacattgtatacacactctgagagagagacattttcttgcttggtaatggagttctgccctggtggggacttgcatgcactcaagcaaagacaacaagggaagtatttttcagagcaaatcttttcatgagtcctaagttgtcaagaaaacattgaccactacttgtcctcccacaagcactcctctaaacttaaaacttacttcaaatattttactactccaagaaggacctacgcaactaagatagcattcaacggtttacagtgactgacttctctatgaacttagggtttactccctacaaggatctcactggaaaacttaaacttactcgagtcatctctaacaagggctaacgttaattcaaggaatcctaaaataactntctggttcgactactaatt

SEQ ID NO: 168022 - DNA, 408 bp, Glycine max
  unsure (1)..(408): unsure at all n locations
agcttgttgcccattccttacgaatngttgtaatggcctccaatttcaatgatattccatcactaaaccactgcaacatataataaacacaagttaacctcataaaataatgaaaaatgtaataattaaaaacgtcaaagtaaattagcataaaattaaatacaagctaatgacattttataattaaaagtctaataattgaaagtttttaaagtaaaatagtgcgttgtattccattcattcttcaaaccccccatgactatggtccacatccaatgcatgacataatgaccacattccaaccttaggtttcaatatgactaaattcaattataaaaaaaatcaaggtaggttcattaaatttaacaagagacttgaccttccacgagaatcaagttaaaaaatgac

SEQ ID NO: 168023 - DNA, 404 bp, Glycine max
  unsure (1)..(404): unsure at all n locations
tcactaattggaccatccacaatcatagttaatcctgttattccattatnctttcttccaatttaaaaaccttcctctaaaggtgccggagcagaatttctaactttttcgtgaatatttcttatagcagacgcaagacaagctagtgcaattgcccatccaaccctccaacttgatgatacaagacagagcaacagtgagttaaaggcattctttatagaaatgatgagaaagctaaaaaacttccagtgtagtttggttcatacaactttgacctgttacttgtgatgctaaatgatttcgaccaagaagatgttataacagtctactcttgcattccagtaaatgaggccagcgatatatgttctacgttcgcatacgttatatgctcacatacctacatt

SEQ ID NO: 168024 - DNA, 341 bp, Glycine max
  unsure (1)..(341): unsure at all n locations
agcttaaccatactagggtatcctatggttataccttattttctaccatttcaatagtctaaaaacactacccaatcacaacaaagcaataacactatctaccatatgataactgttgtgtatagatatatnttgggattaaatcatataggaattgttaattttcctctcttatttcttccttcttatgttaataattggcattttaatatcatttaagcttttgtgcagaatgtgttcaagttttgtgaatttatagttcttggtgaataattgccgcagaaaaacaaagtaaaactcgagaaagcaaattgaagatttgaagctgctcacccaacgcg

SEQ ID NO: 168025 - DNA, 456 bp, Glycine max
  unsure (1)..(456): unsure at all n locations
tatgcatggaaaatgtaattatgaaattgagatgcccgtttattcaccatttcctagttaaccatgcattaggtaccatgttcaattattctgtttttaagtgaaacgggtttatgatcccaacatggttggctcgtggtgcctaacacatgaaactaagaatgtagtgtgaagtttcacgcttccnccctttttgtttttgttttgtagaggaaaacgcaaggatgagcaaacatgaaaacaaatggtatgcaattttgcagatcanaaagtttgttgaacgcatatgcatgatgatgccatgactcatgcaaaatgtgaggccggaatatgataacggacaaatgcaggatatgtccattatgatgttatgaagagatgcttatgcgatgcatgatatgaatgcattttacggacacgagagcccggaaaattatctctttttacttgcgcatt

SEQ ID NO: 168026 - DNA, 311 bp, Glycine max
catcaactagtagatatcctatggtgaagctactggagagctcgccttgaccaaagataggcatcaagtccatgtagcctctagtctctactctctcgcctgcaaatccaagaagtggaccgacatgaggatggacagtgtcacgggagaccctcaagttctagaaggttttccaatacatgatatcggtggaactgcactagtcgataaggaccctaaacaccatgaagtttgcactgataatggagacaaccacggggtccgcctacttgacaggtttgatacccttgaagtccatatcctgaaagtga

SEQ ID NO: 168027 - DNA, 471 bp, Glycine max
  unsure (1)..(471): unsure at all n locations
tcctctatctcaatcattccttctgtgcgcgccattgtctacttatttacttcaacaaattcttntaatgactcggctacttctttcattgacgaaatcatgccttctttttttccactcttacttgggcgaatgctttccttgtggcggaacttgatccctctaagtcaaaactcacactatgaattgcttcctcttcattcgctcctttgctcatgatatcatctgcatctaatgcattatctgctccgagtccagtagctctatcctttgcacataggtcaacaatatcattccaattaggaatgaatttgaatcacaatcatccgccctttgcatgtgactcgaaaaaaaatagaaacatgtctataacaacacacataataattacaactgaataaaactaagagatgattgactacctttacctattcattccatgcaattccattttcaatgcgaatcatgtac

SEQ ID NO: 168028 - DNA, 269 bp, Glycine max
ggcaaattaagccctctaaaatgttctgcaggggtataccaccaactgctagcccttcaagggcatattccaggcaagggctcaaaccggctataatgtggcgaggaatttcatgttgcctcccccatgggcttacaaacatgcgcatgacaaggttggccgctctcaatgaatatgggagaaaggagttattgacatcctcacccgagtgtctgccgcattggcggtgattaatcggacgcaacctggttttttgcctaaatgaaggc

SEQ ID NO: 168029 - DNA, 465 bp, Glycine max
  unsure (1)..(465): unsure at all n locations
tatatctagtcgagtgcaggtctgagcatacataatactctctacatctgatgcatacggaattgcttccatttgcttccgttccagatcatttntaggacattgtgcgagactaaatttgtctcctttctgaattggaacgggagatgctgagcacttttccatcctaaatctctctagtactttattgatatatgccttttgagacaagcctaacaatccttgtgatctatttcggaatatttctatccctatcacatagcttgcctcacccatatccttcatttcaaagttactagaaagaaatttcttagtctcatgaagaagaccaagatcattagttgcaagcaatatatcatcaacatacaggactagaaacataaccttactcccactgaccttcagatatacacaccgatcaacagtgttttncttanatccaaaggaaacaatggtatcattaaa

SEQ ID NO: 168030 - DNA, 460 bp, Glycine max
catccaaactgtataaagtaaacagggaaaaacatattcttgttttatatacataaatcaattacaccaaaaaaacaacaaagacagacagaatttcaaggaaatgaaagctttttacgatgcatgcaagaaaaaaaaaagaaatccggcaaacatgccagcaattagatcaatgatcttaacacttggtaaccagtaagaattccttgctgggaaacaattgcaaatagcaccactgaagaatcactttttcagcaaaccaggtagctgatataataccatatcaaacaaaacaaagagtccaaccttaaattagacctctttggaccacgaatatgcacaatatctctagaaacttgaagggcttaacatcaacaatctcttcgtcacttggaacaacaggagtgatagccatggagttctcatcctgtctccggacctgatgcacccttctgactga

SEQ ID NO: 168031 - DNA, 258 bp, Glycine max
  unsure (1)..(258): unsure at all n locations
gatgtanggcagatatccgtgaatccaatttccctctattttaatctgaatcccaagcttattcacgccactgggattntaactgtaacatgtcacctctatttgggacacaccagtctaaaccttcattaattaatcgctaattgattgatccgcacagctatttttctcgaaacattatgagcaaacgtgaattcctcatctaatacataccctaaataaacaactagagggtgccgctttatggataattttttt

SEQ ID NO: 168032 - DNA, 372 bp, Glycine max
ctgatgacattatgcatgttactcatcatccctgcatttatctttacctcgactctttgtctctgtaaatgtcaaacgaatttgtgatgctcacatattaaccagaaattaacaacatataaatttttctaagaattccatggttcaaatggctaatgctcatagccttttctaagaagcagattatggtccaatggaaaccccctgactccagatgaatgaagcttaatcttgattaatcggtccacggcactaatggtatagcagaatgtggcggctcaatcacggatgattaggggagatggattgcgggatatgctaggaaactacggataacctcatcctttgcgacatagttacggcgagtatatc

SEQ ID NO: 168033 - DNA, 322 bp, Glycine max
aagagttacctgtttgataaataaaataaatataccattaagtgtatcagatgtgtaactttggagtttataaattgaatttattcttttctgtgatatttgccccatcaaggcatgtgtgttcagttttgttgttaaaacttacaagtcattataatgtagtccaatggagatcagaattagccaagttgagggactcatggcaattgatcatatgaattctgttaattacaattaacagaagaatttgggcaaatattcaacttcattgcaatactgatgtaaattgttttaattgacgcatgaacattgtatggactat

SEQ ID NO: 168034 - DNA, 454 bp, Glycine max
  unsure (1)..(454): unsure at all n locations
tgcaagaaaagctagagagaaaagaaaatagacaacaatgaatggaattctatgtattgaatcaatgctaaaagctgtacagatggttatatataatcaattacaacaacaattaactctcaactaactaccactagtttcaaccaactaaactaacttctaactaactagctaactaacactaagagcctctttcaaactagaaatggatatcagacattcctagtttggaatgcagaaatttaaaagcaccaggcattacggctttagtgtaaacatcaactaattgatttgcagaaggaataggaagtaacttcacaagaccacttaacaccttctatcaaactatgtggcagccaatctcaatatgctctgttctttcatgaaacattggatttgcatctatgtgaagggcanacttgttgtcacaatacaaagtagtacgtttcttaaa

SEQ ID NO: 168035 - DNA, 408 bp, Glycine max
  unsure (1)..(408): unsure at all n locations
cgggatctctgagtcacctgcggcatgcaagcttctaaggaagctacctagtctatatatagaagcatgtgtaacacatgttgtaactttgatgaatgaaagttttatgagatacacttcaaagttccacttctttcccttttctattccttcaatttcgcgctcccccnttctctctttcttttcctccattaaagcatcctcttcaagcttcttatccaaggcaattcttggtggtgaagctccttcttccttggcttattccctagtggatggtgcctcccctatcctcttctcctttgcctttcgctgcatctccatggtgaaaaatcaccattgaaggactccattgaagctcaaagatccagccttcatagaagctccacaagccagccttcatcaaggtat

SEQ ID NO: 168036 - DNA, 400 bp, Glycine max
  unsure (1)..(400): unsure at all n locations
tctaccatgcccaaacgaaggagactgagtatggttttattataacaaagctagtaacagtgctctgggtccaacacccacatcactacatgaaagagctgagagtatttcggggtttacaaaggaacgtatattggaaattccgaccacacccatgtgaccggggttcagcgtatgtcactacaataacatacatttcatgataggataatgtttacaaagtctctttctctaaggtttcttaaaggaagcataagacaagcaatggcgcgtccaaagtcagaaaagatgcagagacgagacgaaacttacaagaaacaagtctacaaccatgactaccttgtaagaatacgaaagatcagattacggttttngttctctaccgaacctgacgcaagat

SEQ ID NO: 168037 - DNA, 274 bp, Glycine max
  unsure (1)..(274): unsure at all n locations
agctngngaacaagtggaaagatcttattanatatacccacgctccaatcataagttgctctgacaagctcttcatttgaatgtatctgaacattagatntggatgattcttggtttaaccaccacttctctatccttggcgacttgagcatccccaaatgcgttttctttgacttactactgtgggacactaacaatctctttccagacacaatctcctcctactgttgatgatattaatatgggactgggactcacttattcggagggattc

SEQ ID NO: 168038 - DNA, 391 bp, Glycine max
  unsure (1)..(391): unsure at all n locations
agctngcanaagctcagaaaaatgagaattattcaaacatgtacctcgcgttgatgtcacactccaacggaggatgctcaacctcgcaatagtgacaaaccccaacggcggtcataaaccctaacagcaatgatggtgaggaggagacgacgatgataggtcacaaacggcggtcgcaggttgcaaatgacagtgacaggtcttgcaggtgagggagaaaaaaaaggctttgtttgtgagactgatcgcaccacggaaaaacgcgtttgggttttaatttatgtataacacaccatcggctttttaaataaaattgatgttaacgtcaactcgctaatatcggctttataaaaaactgatgttaacgtcaactggctaacatctggtttga

SEQ ID NO: 168039 - DNA, 325 bp, Glycine max
caccgttttatgagcattgtgcaccaacagcgcttttaagccatcaagggatgggcgcttctcccggagcgactcgtccagctcagggacgacgaatatactgatttccatgacgaaatacggcgccggcggtggccaccactggttaccctcatggccaaggtcgatccagaaatagtccttgagttttatgccaatgcttggccaacagaggagggcgtgcgtgacatgagatcctacgatatgggtcagtggatcgccttcgatgccgacgctatcagccacctcctgcgatatccgatggtattggaagagggcacgaatg

SEQ ID NO: 168040 - DNA, 426 bp, Glycine max
agcttcaccggatgacgccgatcgaacatttcctaaccgacggcatgcaaatttcggtcagggattgaattgaaaactcgttaggcgacatctgtcgtgaagtagcgaccgatatttttcagccgacattgcacaattctttttagaaaagctcgctggtcgataatggtctttttacggcagagtaagttctcttgttttggtgttgcataaaaaagttacaacgtacttcggctaggtttttcgtgcgagttcaaccgacatgttgtttcggccaggaaaacattagcccacctcttgaaaaaaaaatatttgtaaccgtcttcagcctttttcattcgacgatggatagaaaactcaattcccgccacgggcgagaaatagccccgactggtattttcagccggattgcgcatttttttaaaa

SEQ ID NO: 168041 - DNA, 461 bp, Glycine max
tcttgttagacctcgatcggtcatctttccaggccgttgtcgaccgtcattcttttcgatccatttcggtgaatgatatttttttgccgagatgggctaatgttttcctggccgaataaatgggaaaatgccagtttcggccgaaacgaatagtcggttgggctcgcacaaaaaaacctagccgacctacattttaaattttttatgcaacaccaaaacaagaaaacttcctgtgccgtaaaaaaaaaaaaaacattacatgacagcgagcgttttgaaaaacaaaattgcgcaacgtcggctgaaaaatatcactcggggctttttcacgaccgatgtcggctattgagttttcaattcaatccgcgaacggaatttgcatgatgtcggttaggaaatgttcgatcggcatcatcctgtgaagtttcttttttaggcctcgatcagtcatcattcctgac

SEQ ID NO: 168042 - DNA, 407 bp, Glycine max
  unsure (1)..(407): unsure at all n locations
agctntacaacagatgttagtaatgaaccactaacctagaattaaaataacttaatgccattaacctagggaattaaaaaaaacttaatggctgagtgtaactgaaattgtggcaaccaaaagtcacccccaacagccaacaagtcagccaccatttggtctcccaaaaggctgatgcctaggttgccaattgggcccttattacaacttgaactaaacctaactaaagcccttttagttgattaacccaaaacatatttttggtcagccaactttacaaggattgggtcattatttagacaaactaaacactctaaaattgaaacaaagtggtgtcatttagtcctcctccatttgggccatgatacaactcacaaccttggacttttctccttgaaacttgggct

SEQ ID NO: 168043 - DNA, 414 bp, Glycine max
  unsure (1)..(414): unsure at all n locations
tctcgatatagtatgcgcctgaatcggacttncacttgaaaagttatgaccatttgaatttctcgagagcttccgttgctcaatttcgagcgtctcaatatattatgcgcctgaatcggactttcgtgtgtcaagttatgactatttgaatttcttgagagctttcgttgttcaatttcgagcgtctcggtatattatgcgctggaattggacttccatatgacaagttttgaccatttgaatttctcgagagcttccgtgaccgttccaggtttaaataagaagaatcaccggacgacgccgatcgaacatttcctaatagacatcgtccaaatattatcgggggattgaatagaanaaacaatagcggacattggtcgttaaatagccccgattgatatctatctatcgaca

SEQ ID NO: 168044 - DNA, 385 bp, Glycine max
  unsure (1)..(385): unsure at all n locations
gcttctcccctattttgcttgaaaggcgaataagtgaagaagaaaagggttcagccccttaggcacttctttctctcttgaatttgctgagaaaaattatttccgtgaagaaaatccaagccgaggcgcttctctaacgtttccgtaacgtttccgggagtaattacgcgaagattctcggccattcttcaaaattcatcgttcggtcttcgttttcttcagtcttcaacgggtaagtacctcaaaccaagcttttcaattcattttatgtaccccgggtggtccacatttcgtttcatgtatttttattctctttttcatttactttntatacccccctttgacgtgcttaagccaattatttaagccatttctcgcttaatct

SEQ ID NO: 168045 - DNA, 467 bp, Glycine max
  unsure (1)..(467): unsure at all n locations
ctatgaaactcagcttgaggattatggngtacccatcacatgtggtactacgtggcggtctggcgatggtgcacaacaagtttttccacatccacaatgcgcgcataaacccaccatcccctgttgcccacctccagctgagctcacgtactcccacgtagcccatatcctcgtttctctcaacaccgggtccccatcaatcctcccaagcnttcacaacatccaagcaaaacaacattcacacagcacaagctatcacagccaagcaaaacagagcaaaggcagaaaactctgccaaaacaccaaccaaaaatcacagcttttcccactcaaagaccccagtaacaatttccttcgatccaattcgttaaccgttggatcgactcaaaatttactggaagttatagtgataagcctacatttgaccgtgggatctactagcaacatcagaactatttacattactc

SEQ ID NO: 168046 - DNA, 403 bp, Glycine max
  unsure (1)..(403): unsure at all n locations
agcttacctgtnatcaatgattatatcatttgctcncatctttgagctaaactgtaattggattgaaccgtgagccttgaagtgtaattcctatttaccttgcttaggttttaagagggcacattggtgtaggacaatttcaccccaaatttgggggagtctgttagatggttaatgtttaaaggtaggaaacaacaacacacacaacaaataaataatttaaaagagaaaagagaagaaaagagttcaaataagtgtgttgttggatcaagtggcctcaaaataattaagaaggggggtagaattaattattaatgtgtcttgactaattaaaatttatccttcttaatattactagattcaattacgctttactactaagttatgagaaagtaaagaacaa

SEQ ID NO: 168047 - DNA, 286 bp, Glycine max
  unsure (1)..(286): unsure at all n locations
nctcgcccaatggactcaccttgaatgaaggcgctagatagctcttttgagccccgttccactttcctaggtttgaacgccactacaagccttaagtgaaaaaccatgatatcaccatatcctgaacgaattttcgagctgtggaaatgctttgggaataactggggagggttttcgtttattggacaccttgttttgttggccatgcttcatgatgtattttgggccatacctgatgtacatcgtatattggttaaatgttggacatgatgaatgaactgtcgtc

SEQ ID NO: 168048 - DNA, 362 bp, Glycine max
  unsure (1)..(362): unsure at all n locations
agctctagnncactgcttcaagtagtgcatgatatgcttccagaggaaaacacgttgcctaacagtaactatcaggccaagaagatactgcgtccaatgggtatggagtatcaaaaaattgatgccttcgccgaatgattgcatattgcacagacatgaatttcaagaaatacccaaatgccctaggtgtggggtatcacggcacaaagtgaagaatgatgacgactgtactagtgacgaaaactcaaagaagggaccccaccgaaggtgttatggcatcttcccatcattccaagattctaaccgctgcttactaatggagaccatgcacaaagaccttacatgacatgcaaatgggagaa

SEQ ID NO: 168049 - DNA, 175 bp, Glycine max
cccccttacgcacctactctctctctctaaattgcttggaaaaattgttcccgcgaagaacatctaatcccacgcgcttgcgaaacgcttccgtaacgcttccgtgaataatattccaacaggctttaaccattcttcggcgtgcttcaatcccgcttcattcgtcttggatctt

SEQ ID NO: 168050 - DNA, 337 bp, Glycine max
ttaaaatatggcctataaacttttgttccgaggaaatctataaaagacctccgctttaaggaggggtaccactactgaaaacccgatgcaattttatgagcaatgattaaatattgggaaccataaaaaggaccttatgttccttatataccgaagtgcaacaattaaaaacctaagcacatgactgaggaagaaaaaatacccaatataattaaaggccaaaatattattaatctgctagaaagataaactttaggttaaatgaaaaggtaagattgggataactacataccataagccaaaatgtataactgataaacttactgtaaataattta

SEQ ID NO: 168051 - DNA, 443 bp, Glycine max
tgttaagaactcaaaaaataaaacagctggtctattttgttcgcgtgtaagatatccaatcgacaaggcttgaagtacacgagaccttcaatcctataacgcaacatgacggacaaaagtgggccgttaacttgaatggccattattgtccatgcggaaggtattatgcgcttcactatccatgttcacacattattgcaccttgtggttacgtgagcatgaactactaccaatatataaatgttgcttacaccaatgagcacatcttaaaagcatactccgcacagccttggccttttgtgaatgaagcgaatatccctccttttgatgatgcatggacacttatccttgaccaaactacaattcctgagaaaggtccggccaaatcaacaaggatcaggaatgaaatggattggttcaaccatctgaccaccgatcaaaat

SEQ ID NO: 168052 - DNA, 294 bp, Glycine max
cggctacgggcgaaattaaggcccctccacagtgttttgcaggggtataccaccaactgcttgccctttagtggcatatacgaagaaaggctccaagtccgctacattgtgggagggaatttcatgtgtctcctccgccggttgaaagacatgtacatcatgaagttgtcggctctcaatgagtatgggagccgagctattgacctccttattgcgagtgtacgccatattgggtggtgtatgggtgggacgccaacactatggcggaaaggcatgctggttcttgaatttcac

SEQ ID NO: 168053 - DNA, 484 bp, Glycine max
  unsure (1)..(484): unsure at all n locations
aaatactaacttgtggaattatgcacgtcgggctgacctgaaatcactcttttctcttgnttacaacacttgaacaccctaatgcttttgtaagaaactggatggctttggggttggcccacaacggccactttgatgatgtgccggtgccactcctctgcccaggaaatagcgagcatgaagacaaaaggacttggtagctttgttacactatcaaatatctatgccgctgatggtgaatggtcacaggttgggaatgtaacgaatgtgatgaaagaaagaaacttccctacacagcctccgtttagttggattgaaaaagtcaggtgagattcttgaaggggacaaagaccaacaatggaaccatatggcccgtgaattggatatgtgagtatgtgacgttatacaatatcattggtgcttctccccttcacatttagttgtaaatacctcacacagactgacatggcgttcacatttgtgt

SEQ ID NO: 168054 - DNA, 345 bp, Glycine max
  unsure (1)..(345): unsure at all n locations
agctctgagccaatatcgtgactcttatttaccttgacccacggggagaatgtcaatccttaccctcggaagcaaaaaagaatagaagggaaatctccaatcaaagaaagagaaggaaaattcccaatgaaagaggaaaaaagaaaagaaaggaaattcccaatcacagagtgggagaaagaaaaagaaaagaaagaaaattcccaaccaaagaatgggagaaagtaaaaagggaaggaagctcctggtcaaagaaaccagagaggtctntggaccacataatatctgaacagcacaaaattgtcccaaatgaacaaaaggaacgaaggaaaccaccacctaaat

SEQ ID NO: 168055 - DNA, 433 bp, Glycine max
  unsure (1)..(433): unsure at all n locations
ccataaaactcgcttgcttaactacttgatgttgtattatggtatgttgttgcctgccactctcgtttcacgagtcgcgtcccactggtaaaactatactctcccaatgtttgccttccacaatatggccccgacgaagctcgcctcaaagaggtcctggaacgacaacgcaaccgaaggaactagttccgcttcggagtatgacagtcaccgctttacgagcgttgtacaccagcagcgcttctaggccatnaagggatggtcgtttttccgggagcgacgccgtcatctcatggacgacgagtatactgatttccacgacgaaatacggcgccgacagtggacatcactggttactcacatggtcaagtttgatccacaaatacttcttgacgtttatgcccatgcttcgccaacagacgagggcgtgcgt

SEQ ID NO: 168056 - DNA, 393 bp, Glycine max
agcttcccaacatgcaagcagaataactttctatatgcacaagctatcacagccaagcaaaatagagcaaagggcgaacactctgccaaaacaccaaccaaatcacagcttttctcacttaaagaccccagtaacaattccttcgttccggttcattaaccgttggatcgactcgaaaagtttactggaagtctttagtacataagcctacattttgaccgttgggatctactagaaaacatccagaactcattctgcactactctttccacagccaatcacacaccaacatttttctgcacaagccaaaatcctgctgcacctattttgacagcaaaaatcttgcatagtgccgatttcgaaaatcacacttccccttattcaatcttggct

SEQ ID NO: 168057 - DNA, 455 bp, Glycine max
  unsure (1)..(455): unsure at all n locations
cttatccatanatcatactggagggcctatcttcttgatgttatttctcaggaatgagatccattttccttcaaaccgcataaacagaaaaaccaacaagttaccatttcaagaatcaagggagataaacatttgacctttcacatgaaattattggaggaaggcaattggaatctacaacttaatgctaaccttatctgtgatgagatgtcttacaagattacgaaggtttctagagcagtctttggagctgtgggctaagatataagaaatcttggcggttgaatgaaagtatcaacgaccacgttagaaacacaaaatgctcanaaatggtcaacgcctgaaatgccagacatgacatgagtnatgaatgaagcatgatataaatcatttaaagagttntacaaagatcttgaataagatgtataagcctgcctacaataaagaatgaacaa

SEQ ID NO: 168058 - DNA, 376 bp, Glycine max
cgaactatacaaactcaagcttccgacctataccgccgatgcagaaggagcgtgaacataatttgaacctgacaccatatcaatctcgcaacagaatagcatctgcacgttaacgaatctacaacaactttctgcaggctaactaatccagttacgcatacgtacatgcatgttcgtgcgtcttctagatatttaagagagatgtccacgtacacaaaacacaaatcaatgtcttgccaaatgcactgcacaattaacattcaacactcgcacaaaaaaaaaaaaaaatcgcctatgcgcaatgcaccatgggccatcacctattcgaaaagacgataacccctctcatctcacctaagataccgtaatcgaattt

SEQ ID NO: 168059 - DNA, 301 bp, Glycine max
  unsure (1)..(301): unsure at all n locations
aaagaagcgatgggtttttgtattaccaanngctactaatactgtggctttgatatgttgcttgaatcccatcttcattgccacgtgaccaacttcatttatttgtacaaatcttacaattcatttatgtcatgccacatggcctcaagaaggataagtctatccacttagtggcatgtctgtgaaaagataacatactacgtgtgctgattgagctctatggtatgaaaagatgcattatttttatacagagggttagcttatacgacttacgtaaagtaatttacaggttaattttgat

SEQ ID NO: 168060 - DNA, 202 bp, Glycine max
  unsure (1)..(202): unsure at all n locations
cacattggattntattgcgatggcagtaaggcacatgaacacagttgacaatgaaaatgcctggactgaatattgcactgatagtattctttaatatgtcgctatgcgctatacaaagcagattggatttgactctttgctcttagtcgcataaataggcttatccgttccattcaaggagctttaaaattttggatgatat

SEQ ID NO: 168061 - DNA, 348 bp, Glycine max
  unsure (1)..(348): unsure at all n locations
agcttcatgatgatgaatcttgttgattcaagcacnncggatcatgacaaagatgatgaccaacagcccaaagaatgatcttcagaaagagtcaaccagttcaagatcaagtttaatttccagtttcatgagaagacatcaagacgatttcagaatccggagaagattgatttcacgattcaagagaagatgaattcaagattcaagagaagaaatccagacgactacacaagggaagtattgaaaatatttttcaaaaaacaacatagcacagttttgttcttcaaaagagtttttctcaaaattttctaagttaccagagtttttactctctggcaatcgattatc

SEQ ID NO: 168062 - DNA, 341 bp, Glycine max
agcttaattgagcgaataatagttaactttctttcacatgattaatgggtgagagtagatgtgatccaaatcgttaattgtatgatatatgatatatgatatgattgtatctaaatacacaatttcgcttgaatggaagattatcagaattggatcttaaacaacacgacgttaaaaatgcctaatcatatcactttgtgtttaaaggaattacaccccgaaaaaaacaagaaagtggacaaaaaagatatgaatattaattcattgtagtaaagactaatcacaccatctaacagagagtactaaactttgacagataagaaaaatgatagactttttaa

SEQ ID NO: 168063 - DNA, 336 bp, Glycine max
tgtccttggttgcttatctttttgacacagacatcctctttaatccctccgatgctcatctcattctccacgtatatactccattgtcttgaggttcggtgctgtctagaccacattcacaaaaataaacccattaaatctcacatctacacttggtcttgcatctctatggttccactctcgaagatctactcttcgaacttgctcttgtgttcgatctaggccctatcattcttcattcataataccctcgtgctgaaacttagatataaatgttcttccaaatattgacataaaaaaaaaaacaatctagcgcaatcactaatcctgttgttc

SEQ ID NO: 168064 - DNA, 444 bp, Glycine max
agctagtacattcaatttcgagcgttccgatatattacgggactcaatcggacatccgagtaaaaagtaattgttgtttgaatttgttcagagcttcaacattcaatttcgagcttttcgatatattacgggactcaatcagacatccgagtaaaaagttattctcgtttgaatttgctcagggcttctgtattcaatttcgagcgtctcgatatattaccggactcaatcccacatccgagtaaaaatttattgttgtttgaatttgctcagagcttcaacattcaatttcaagcgttccgatatattacgggacttaatcacacatccgagtaaaaagttattgtcgtttgaatttgctcacagcttctacattcaatttcgagcttttcgatatattaccggactcaatcagacatccgagtaaaaagtattgtcgtttga

SEQ ID NO: 168065 - DNA, 430 bp, Glycine max
taaccattctatcaataaagacaagttgagttttattcataacattagagcttatctcttttatcttaatgagagtgattctgctaaattcttgagtgattcaagaacaccttggctgtatcaaaggactttcacaacctttgtgtgttgccctcgctggaaagagtgattctttccttcctttcatcttcacccttgttctttcaaaccacaattccagaaaatccacctctgcccagaattatctcgtggccataactcccattttacgcactcaaattaagtgattcttgagcctaaattgactttcaaaacgagacctttcacctcgttctggaatcacctcatttggagccctgtagcttcagttattgccatttctatatttctgtccagccaccacttaacctacattttaccatcccattca

SEQ ID NO: 168066 - DNA, 349 bp, Glycine max
gcttcacctgaagccccggagatatataatttttttataagccttggttagtaaaggctatttatatttgtttggattttttcttaatatcttatgtatgtgctggagctgatctacattttttgtcaaaggaacaccaattattgaaggaccggaagaagaatgtgaggaagcgacccttacagggggggaattgtcttccttctgcccctaccacagtctcaaatcaaagtagagcatcaggaaatgatgcctatgcagttaaactggtacttgcttgacagcaaaatattttaaaattgggacctttttaaccatcaacgaagcgcaatgtaaacatgggtggtaa

SEQ ID NO: 168067 - DNA, 466 bp, Glycine max
tatattaatagtatactgtatcttaataacattatatatattatatataacattcatgaaaacgtcaaattgtttgtttttatatgcgttgttgatatatatacgtgtccccctatgcccacacgaccacactcaatcgacactccgcgagttcaggcgatgtttcttgaagaagaggattatcaacgtgagagaagagtcgcgaattcgagaacagagtttttgaaacttttacgtggaagagagaatgaatatcatacatgaaatacataaatattttggaaggtttttcgatcataaatagaatttcaatttctgacattttagaaggaaattgaaatttcatatttttacgtatttaaaattttgttttaaaatttccaaaatttaaattcttcatgaacaaacactcaaacaatgaattttacattacaaaatttaaattctctgatacatactttcttcg

SEQ ID NO: 168068 - DNA, 399 bp, Glycine max
ggatccttaagtcacctgcggcatgcaagcttatgcacggaaaatgtaattatgttattgatatgcccgaagaaacaccatttcctagttaaccatgcattaggtaccatgttcaattattttgttttgttgctgtgtgtctttttctttttttagaaatgggtttatgatcccaacatggttggctcatggtgcctaacatatgcaactaagaacgtagtgtgaagtttcacgcttccccttttttgtttttgttttgtagaggaaaacacaaggatgagcaaacatgaaaacaaatggtatgcaattttgcagatcaaaaagtttgttgaacgcatatgatgacgcaatgactcatgccaaatgggaatgtgataacggacaaatgccggaatgata

SEQ ID NO: 168069 - DNA, 472 bp, Glycine max
tcccgtatccgtacttggaaggatctgattactgctttcctaatgcaataccagtataattccgatatggctcccgatcgcactcagctgcagaatatgttccagaaagagggcgaaacctttaaagaatacgcacagcggtggagagacctagcggcacaagtggctcctcccatggtagaaagagagatgatcaccatgatggtagacactctgccagtgttctactatgagaagctagtacgttacatgtcgtccagcttcgcggacctagtgttcgccggggaaagaatcgaggtacggttgaaaagaggaaagttcgattacatttcctccaagagtgcgaatgccaaaagaatcgggacaacaggggcaaaaaggaaggaaggagatgcccatgccgtctctttaacacccgcgtgggtcacacccccgcagacacctcatggtacccatcagtacgcgcaacatc

SEQ ID NO: 168070 - DNA, 332 bp, Glycine max
agtcactgagctgcagctttgaaaacactggaatgtttttgaaaaacttcttgagaactagagctagctaccacacccctcttataactaagctcacctccttgagaagcttccttaagaagattcctaaagaagattgagcttagctacacatacatctctaatagctaagctcacctccttgagatgagaagctagagcttagctacacaccgcctataatagctaagctcacccccatgacaaaaaacatgaaaatacgaaaaaaaaagtccttactacaaagactactcaaaatgccccgaaatacaaggcttaaaccctatactact

SEQ ID NO: 168071 - DNA, 475 bp, Glycine max
  unsure (1)..(475): unsure at all n locations
agaatactcagcttctcaggaagctacctagtctataaatagaagcatgtgtttcacttgctgcaccttgacgaatgacgagtctgtgagacataactcaaagttcaaccttctctctctatttctctccctcaattatgtgctcacgcctcctcttttctctccgtctctcttttcctccattgaagcatccttccaagcttcttatctaaggatcatcttggtggtgaagctcctctctccatggcttattccctagcggatggcgcgtcctctcacctcttctccttcgtattccgctggatcttcatggtggaaaattaccattaaatgacctcattgaaacttaaagatccagccttcatagaagcgccacaagcacgccttcattaagtcggcattatagcacaagagctttcacggggtgctccctanaccctcattaattttccttctctaccctctcctccattgt

SEQ ID NO: 168072 - DNA, 445 bp, Glycine max
gtcacctgcggcatgcaagcttccaagagttgaagaggcgtttgactacagttccagtgttaattttgcccgaccctaagagaccatttgaagtgtattgcgatgcgagcgggcaaagcttgggggtgtgtgttaatgcaagagggaagagtggtggcttatgcttcacgccaattgcgtcctcatgaagttaactatccgacccatgatttggaactagcagttgtggtctttgccttaaagatttggaggcactatttatacggtactcgttttgaagtttttagtgatcacaagagcctcaaatacttgttcgatcagaaggaactcaatatgaggcaacgaagatggatggagttcctcaaggattatgaatttggtctttcctaccatccaggaaaggctaatgtagtaactgacgcactgagccggaagtccttacatg

SEQ ID NO: 168073 - DNA, 463 bp, Glycine max
  unsure (1)..(463): unsure at all n locations
ctgcgggattggtctttgccagtgaaaggatcaatgtgtttttgataaaaggaaaatttagtcatcctgcttggacgaatgagaaaactggggcaaatgaagatggtgaggatgaaggagaagcccgtgctgtgactgccattcctatacagccaagtttcccaccaacccaacaatgtcattactcagccaataaccaaccttctccttacccaccgcccagttatccacaaaggccatccctaaaacaaccacaaagtctgtcttccgcacttccaatgacgaanatcacctttagcacaaaccatgagcaccaaccaagaaatgaattttgtagcgagaaagccttagaattcaccncacatccagtgtcctatgctgacttgctcccatatctacttgataattcaatggtagccataacccttaccaagggtcatcaacctctatttctccgagaata

SEQ ID NO: 168074 - DNA, 454 bp, Glycine max
agcttctgatagaattggagtattttatcttacaaaaaaacctccaggtctcaatactctatttagctccaaaagaagtttaccacctgcaattggacaataataatgtaaatagactaatcaaatcttgtaattacagtaactacgaaattgatgattcttgtaactgttagcctccttgagaattaaaaacaaatggatttcatcaaatgtcttttgttttagttaaaaaaaaagtccccatcccccccccgcaaaaaaaaagggctcttaaataaaaaagctcgttgcactcacatgtatcttacatcaatatgttatcttataatctaaatggctaaaatgaatatggtttagaaaatgctatataagggaatcatcttatcaccaaaataaaagttatgtaattggaataccttctatatgccacggaactctacatcgtgcacagtgg

SEQ ID NO: 168075 - DNA, 456 bp, Glycine max
tctcatcatgctgcttctgaatatccgtatctgtttgctctgtcagcaccctcggttcatccaaatcaataccaccatgtcggtgcctcaatggctctacttgtacttgatcactatggacaaaacgcattacggcaaggctaatcccgtgatgttccaccattctccatccatagcacaatgcctctctatcatctggtcctccaaagaacaacactgctacatgatgagatacttgatttcccgccagacggttagagccacttaagcctttatccactagaattccgaccgagcaacgtgcatttgctagcacattctggttgatggatctgtatgccatgtttgttgcttccattccaccgtcaaccgtttgttgtttgtggaaaggaacgattatgaaggacacgcgtttgtccaaagccaaattgcagatgtcttcatgcatggtggagt

SEQ ID NO: 168076 - DNA, 326 bp, Glycine max
agctctgatacttggtcaaattgtttattgctcataccaccaattcactcttcccttgtaactatatctagcatgagctcatgttgtccattcaatggtccaatgcccaaaccaccaactttaacaggcttgcaaagcttatcccatgatattgttaccaatttcttctgagtaatgtccccattccatataaaattatgaattcctctctccaaagattgaagcaaatttatcggccatgagtaaatgtgaaaggaatataataacattacttgaataacagattgcacaagttgaactcaaacccttatggagaaaaatgcacc

SEQ ID NO: 168077 - DNA, 431 bp, Glycine max
  unsure (1)..(431): unsure at all n locations
tntctgagaaaaattccttgggaagctagagcttatttattcacacccctctcataactaagctcacctncttgagaagcctccttgagaagattnctaaagaagctagagcttatctatacacacctttctaatagctaagctcacctccttgagataagaagctagagcttagctacacaccccctataatagctaggctcaccccatgacaaaatacatgaaaatacaaaaaagtcccttgatgtgtcattattttctcctatttcttaacctttttgtcaccaatttaattaccgattaactctaattgtcaaatttattattcagttttatcaatcgggtccacttgactaatttggtgttttacattaatttcaggagtaattatagcaattggcctgagccaaatgggacttgaagagagcaga

SEQ ID NO: 168078 - DNA, 382 bp, Glycine max
agcttctatcaagagcctagaatttttagttggacaacttactaattaattggctgaaaggaacaacaaaatttttcaacctaaccgaagtaaatccaaaaagtggtaactctaaggtggtgggagatccttgaatctcttatcactcgtcaagctagtgacattaaagaagcactgctcaggaggcaacccaatttttttttcaattgattctattttcaagttctttaaaaatgtgcattatcaataaggaagagtgcatacgtgcactcactatataaaattgacaactccgtgtagcaagaatactcttttaccctttgaactcctttgttctatgattctctattaccaaggggaaccttggtattgtgaatttggg

SEQ ID NO: 168079 - DNA, 362 bp, Glycine max
tctatatatggtagcccacttcatgaataaactgttgtagtattctagtcacatacatacagctgatggccgttaattcaaagagagtgcttctcctctattgtggtgcgactcaacaacaccctgtgtgtatcacagactttttaaacatcgtgtgttgccccgctgaagagatggattatacaattatttcccttttaccccatgatctttcagatggctgggccagacaatccaacgacgcccagaaatatcttgtgtgcatatttccatgtttacgatgtccatttaagtgatccttgagcactaatcgaattgcaaaacgagatcttccacctcgattaggaatcatctcatctaga

SEQ ID NO: 168080 - DNA, 364 bp, Glycine max
  unsure (1)..(364): unsure at all n locations
agcttagaatagagggatgatcgttnttgtttaagccacagctagcacgtgctgggcacgcgctacacgcaaattaccagtgatcctgccgtccagcaaccaagatttttcttaacacattgctgtagagattaatctcttctctctctttcaactatcataatcaaaatctttagattttatatagcctgatttccagatatttcttgtaacgcgacttataggcataatttaatcttataaaattatcttacaatagcgatgaaacagcaaataaaattatagatataatatttnattatcttcggataatagaatatgataacatctctcaatatatactcggatttacttatgtgcttta

SEQ ID NO: 168081 - DNA, 295 bp, Glycine max
  unsure (1)..(295): unsure at all n locations
ttgtaaatccgcttactctctcttatatacctacaaaaaggaatgctctatatcaccatcagaccaattacattaactaattccaacaaaaccagggctactatctagcttgccacgtccgcatcaccggaaatggctctcatatcacatactagcgcgaaagacaattcccattccacaggctaccaattgatgttaacccaattgtagccatggcgtntccgaccacacaacgagtgcctccactttctattttgggcagcaccagaagcccagtcacccacatgttacgcac

SEQ ID NO: 168082 - DNA, 308 bp, Glycine max
  unsure (1)..(308): unsure at all n locations
gatccttaagtcacctgcggctgcagctccatactagatgtttggtgtctccncatgatgatgacttctctgctggttttgcttatctaaagggcgaatgtgctaataatgtggtatgggctttacaacggcttcgagcgttttttctaagacgtgatgccctctctgaagttattgtgactaacagagacctcacattgatgaatgcaatgaacactatatctcctgaattgaaaaacttgttgtgcacggtctacatcgacaagaatgtcaaggacaaatgtcaatccctaattggtaaaaaaatg

SEQ ID NO: 168083 - DNA, 391 bp, Glycine max
agctttcatcatgaaggtacctttcttctttgagacatataaggatgaagctaattgtgatatagttcccatggaggcaggacatattcttttaggaaagccatggcaatttgataggaagatcatttacaatggcctaaccaatgagattaccctcacccatcttggcactaaatttgtgttgcatcctcaaacaccttaacaggtggccaaagatcaactaacaatgaaagataagaaggatgaggaagaaaaacaacagaaaaagaaggatagtaaggccttgtcttcaaaggccaaggggaaggaaaaagagggaaaagattccttcaagaagattgttaggaagcaaaatcattttgcacaaaaggtgatattaaaatagcactcc

SEQ ID NO: 168084 - DNA, 408 bp, Glycine max
  unsure (1)..(408): unsure at all n locations
ttttttttgtgtcacccacatgcagttaagttatgtaacgcatgttatcttgtttttttgatagacagtacctacaaaacaaataggtacaggctcccattgcttgactttgtggaggtgacaccaaccgggatgactttctctgctgggtttgcatatctggagggtgagcgcgtgaacaatcttgtatgggcattggaacggtttcgaggcctttttttaagaaatgatcgccttcctgttgttattgtcacagacagagacctagccctgatgaatgttgtgaaagttatgtttccagagtgtatgaaattgttgtgcaggtttcacatagacaaaaatgtgaaggcaaagtgcaaatcgctaattggtcagaagaatgcctangactacataatggatagctgg

SEQ ID NO: 168085 - DNA, 154 bp, Glycine max
  unsure (1)..(154): unsure at all n locations
ttgagagaatttgtgagtgattgtagatctaagataagaacatctccccttgatntttaatcttcatctgtcttcttatgtgtaacgcggttccgactatgaagctaatctctgtgatcttcctgtggtcctatgtaaatatttattattatga

SEQ ID NO: 168086 - DNA, 344 bp, Glycine max
ttatttatttctggggaagggaaaggtggactaaggaaccattgaattatcaattgcatttcaactatatggactatggacatataacagcagtagtagtagtctcttacacgttgcttgtgatttttgtaatttgagatgacatggacagatgatgaggcaatgctgaatttggtaaacttaatttctaatgaggagtagcatgaatgaattcgtgataagggcataagttgttttatttggtggattcataacagcttgccagcgcaaatgctactttatttatttccagcgaattgatttgaaattctttcctaatcttaaatattgacgcataccgctat

SEQ ID NO: 168087 - DNA, 411 bp, Glycine max
agctctttctaacctcgacagcatttttcctggccgatgtcaactgtcatttttttcgatcaatatcggggaataatattttttttgccgagatggtctaatgttttcctggccgaataaatgggaacatgccagtttcggcccaaacaaaaggtcggtcgagctcgaacaaaaaaacctagccgacctacattgtaaattttttatgcaacaccaaaacaagaaatttcctctacggtaaaaaaaatattatcggccagcgagcgttttttaaaaaaaattgctcaatgtcagccgaaaaatatcagtcggggctacttcacgaccgatgtcggctattgagttttcaattcaatccgtgaacgaaatttgcatgatgttggttaggaaaaattcgatccgcaacatctt

SEQ ID NO: 168088 - DNA, 345 bp, Glycine max
tctttatctaaaaaggaagtcgattattcaggcctaagaccatcacgttcctacgattctattatgtggccattaagtctatcatatgctgacaatagcccagaagcccatgaatctcttctggggcggagtaggtgtctgacatcgccttggccttggctaacaatcggtgaagatcttgactctcgctcaatgtaagagcaaaccgatccatccacatggttgcctcttggtgtaaagagtcgatcacccttcctctagccttcttttccgcgtatacttgggcatattcctccgcaatcctatgctcgttggccgcggctagacctaactcttcttggtact

SEQ ID NO: 168089 - DNA, 299 bp, Glycine max
gttggtggagggaggtcaaacatcacaaacgcgtgtcccgacgttattttgcaggcctgactttagtcatccacaagtgtgacttcattcattttgcaagcacctattcttgaagcatactccgcacaccctatccatgtcaacatcatcaagggaagcatgccctcatcatcgatgacattatgaccgtcgattggatcgccaacgaccttagcaccaacaacctcattctattgttgggttttgcaatttgagtcagcttcttgaaattgaaggaggatgtgaataacgatgaggtc

SEQ ID NO: 168090 - DNA, 426 bp, Glycine max
  unsure (1)..(426): unsure at all n locations
atactactggnggtatggcgcggagaaattcctattggtcatgctacttggaaagatgtccncgagactttacaagttatcgtatgggatgacattatggtaagtccactcacctggtaacgagtttactcttgtgtatatttaatgcctgtggaaatgtggtttatgcaagtactgattcgaaagtatttattattttaggccaaatttgatattcctgaaggttaactgcgaagaagaaggttatgtccacggntgcaacaagatggaggcaatataagtccttcctgacctccagatatctatacactgacaaagacgatcacacaaacacttgatcatctgctaagtatggnttcgatcgagaacatggcagcatttctagacacgaagacacaacttggaagttaaagttaatgttttact

SEQ ID NO: 168091 - DNA, 399 bp, Glycine max
  unsure (1)..(399): unsure at all n locations
agcttccctgttgtgcgtttgggctttattaaattgatgctctccnngaccatctttgctaaaaacaaactgcattagtagtttgaagggatcgatttgaacaaccgtggaaactagaacaactgttataacatgtgctcccaacaccaactgaggcaaaatacgatgctaaagaagactacctagaatcaaattaattagcagggccaaggatgtctcatgtcaaataacatcaaagcaagtacaagttacaacttttaatttctaatatcatattntttttatcaataggaatcaaagataattagaagatttacaataactcgtgtagcatatttaactaatttagatagactctcttaacatttattatatcatatatgattaatcgcctaattt

SEQ ID NO: 168092 - DNA, 425 bp, Glycine max
  unsure (1)..(425): unsure at all n locations
gatagaaactaggcaagctgagttcattataatgttaccttgcagttggaaaggtcattctgccgtgtacccttcattatntgtaatgaacctttgaatacctttaaagttccaccttctcctttgaatgaacatccagattgatctagcattcccaaagagagcacgttccttttaagctcaggaacatgccttacatcaaggagcaactttacagatccatcttgcatcttcaatttaacagttccaatgccaatgacattacatgccatattgtttcccacgagaaccttccctccatctatctccttataggagctgaaccattccagattgggtgtcatatggaatgagcaacccgagtctagaatccattcctcactggtgttntcagttgagatggagagcacttcagcactttcata

SEQ ID NO: 168093 - DNA, 426 bp, Glycine max
agcttttcgattcattctatgtctcttcgttgtggtccacatggggtttggggtatttctattctcgtttcatttactttttataccccctcttgacgtgcttaagtcattttacttaagtcatttctcgcttaacctaaaaataaaataaatttccaccgatcgtttgaattgtattatctgttaacttcggttaaaatgaattccgaccgttcggtcgtgccgtaaccacgttggaaatcaaaaaagaggtgagaatataatataataatcaaaaaacgtcttttaataaaataaagcggaaaatcaatcggacgctctctctttgggatttctcattcttaattgaattgactaataactaaagtgaaactaaggctaaaatcaactcgcctagtcaagctcgctcacaaaaatagggtttga

SEQ ID NO: 168094 - DNA, 368 bp, Glycine max
aatctaagctatagaaaatatgcattgtttaggactttggatatacttgacgagtggtctgatagttttggagtttgttatttatatatttacatatcgtgaatggattatttattgtatgataattatacatgtacgaatggttgagggagtccatatatgaaaaagggggaatatggtcacttcagtgaaaaaaatgggtgatgaaaaatgttgtgtcgttttggatagaagacctatatttactatgtactttggattatgaaaatcgatgatttaatgggaagtgcaagataaacaatggtcattctgaatgtcttaatgaacacttatttgttaagaatatggcattttactatattcatgat

SEQ ID NO: 168095 - DNA, 414 bp, Glycine max
agcttctcaaggaggagagcttatttattttaggggtgtgtgtagctaggctctagcttctcaaggaagtttctcaaggaagcttctcaaggaagcttttcaaggaagtttctcaaggaagctacctaggctataaatagaagcatgtgtaacacttgttgtaactttgatgaatgagagtcttgtgagacacacttcaaagttcaacttctctctctcttttcctccttcaatttcgtgttcccccccccccccctccccctctctatatctcttttttttcctccattgaagcttcctctctaagctttttatccaaggcactctctcttggcgagaaactccttcttccatggctattccctaagggatggagcctcctttcatactttctccttaatctccactgcatat

SEQ ID NO: 168096 - DNA, 359 bp, Glycine max
  unsure (1)..(359): unsure at all n locations
ctaagcttgttcgcacgtcgttcgtgtgtatgatatccacttcacaatggtntgtatttatgagaaccccaatcctattacgcaatgtggtagacaaaaatgggctgttaactcgaatggtcattaattgcaatgcngaaggtatttngcgcttcactattcatgttcacacattattgcagcttgtggttacgtgagcatgaactactaccaatatatataatgttgtttatacaaatgaagtgtacaccttaataaatatgataccatacattaagtgtcacagtcaaatcacaaacataaaacaacaaatataagccgagacataaaatcattcattatatgttcgtggtgacgtg

SEQ ID NO: 168097 - DNA, 421 bp, Glycine max
  unsure (1)..(421): unsure at all n locations
agctngacacaatcctctagttttattcttaatctacacatttaaacagtaataacaattaatgtcatcattcaaataatacttgaatcaattactatttaataattcatgaataaatattttattattttttaaataacttttttaatacttttatatattcataaatgaatatagaaattcttttctaaaatttatagacttcacatcactaattatagtaaacttaaattaatgaccaaaatctaagtacaattttattttttatttcttataaatgactatgtcattttttttacaaattagtatttgaatacttttaaatatttataagcaaatgaagaatatttaattttatacttccaaacactatttatataaatatttaatactaaaaacaaatttaaattttcttattaaa

SEQ ID NO: 168098 - DNA, 315 bp, Glycine max
  unsure (1)..(315): unsure at all n locations
ctgctctaatataacttttgccgaccctctccacaggggtcaatggatcctcgtcaaacgacttgaacctggtggggctagactgncaatataatgggaaacacggctctctgtcaaggttgaacatcaatggcaagctattagccacgatatcagtagctaggaccttgaagaaacggtccttgaagcagcgaaatacgttcgagttatactcgaacaacttcttagatacgctgtttaaagagacccaaccgatattgcccatcaacttcatctggaanaaatacaanaacaccgacactttatgccgaatgt

SEQ ID NO: 168099 - DNA, 414 bp, Glycine max
  unsure (1)..(414): unsure at all n locations
agcttgtagaacaggtggncatgatatatgtcaggtgtttggccagcggntcgaggataaaggggatgtcctacattatttccatgatacacatgcaacaatgatgattaggaaattttatgcaaaactggtcatgcatgcacccatgtggacactcaagcatcaagtttttatggtcatgtgacactagggctcaggatttattttccctattttaagtcaacccagtatttccaaaatatgttcttctatcaatttgtgcattcatccgagtctatcttgggtgttcgaaaaacttttcacagcatttacccttcaaatgtgtacacacattnttttaaaaaaactggttaagatcagtaaaatctttcaaaaaaagttggaaattatctttttcacaagcatgttgttttt

SEQ ID NO: 168100 - DNA, 401 bp, Glycine max
  unsure (1)..(401): unsure at all n locations
cagcttatagctcgggaatnngngtgtcctagcctacggtgtaagtatatatataattgtgcactttattattacaatcagaagtggaaacagtgtttatacaatgagacacacacacagctggataatagacagcttgggagaattttatgctttgaaactgacagccatatgtcaacatttcttgtaaagggattcatctgcaatcttagatttgaccaagcaactatttactatgtaagctcacgaaaacacgattgtaagagcaatttgttgacctatgacgtcttttttttgagatatgagcatttttagagcagatttttacgatatatgagaaggaaattaagtgtcagaactgaatttaaaccttgtcttacaataagattggttagacctca

SEQ ID NO: 168101 - DNA, 385 bp, Glycine max
  unsure (1)..(385): unsure at all n locations
agcnttgagccaaaatcctgactcaccatataccttgacccagggtgagaatgccaatccttaccctcggaagcaaaaaaaaaaaaaaaaaaaggagaagagaaggaaaatttccaatcaaagaggaagcataaaaaggagagaaggaaaatttccaatcaaagagaaagaaaagaaaaggaaaggaaattcccaatcaaagagtgggagaaagaaaaaagaaaaaaaagaaaactcccaatcaaagaatgggagaaggaaaaaaaaaaaaaaagtaaaaaagaagaaagctcctggtcaaagaaactataagaaatgtgcagaaaggtcttttgaccggacgatatctgaacaatacagaattgtcaccaaatgaacaaaaaaa

SEQ ID NO: 168102 - DNA, 322 bp, Glycine max
  unsure (1)..(322): unsure at all n locations
gctccttcttttatggcttattccttaatggatggcgcctactctcagctcttttcctatgtcttccgctgcatcatcatggtggaaaatcaccatttaaggaccncatttgaagctcaaagatccagcctccatagaagcctcacangcaagcttccatcatcaacaggtccttaatttagtaaatcaattagcttaatcatgtgttagaagtgacagagaagcgatgtaactcgatccatcttcttgcccaactnttgcaagctagttacttccatacttgaccttgacctgatgaaactttccttaaaacatgtacttg

SEQ ID NO: 168103 - DNA, 421 bp, Glycine max
  unsure (1)..(421): unsure at all n locations
agcttataagaaattaattgtctcaanctttttcaaatatgcangcgaattaggaagcatcaacaagaatcaagccaagggtattgtgcaagcaatcaatggggcaaaacacaccaaatgattatgatgatggatggctcaaattctcacaaaggtaaactcatcactttcaaattgagctttcaaaactatcatgacatgtagaggagaatcaaagatttcaagtcacaaaatgtcaaaaacttttattttcaaaacaattacccatttcttgaacatatcctataattcaaagaaaaacatgcaaagtcgtacatgcgcacagaatttacccaaaatattaaactaaaaatccgacgaaactaacaacattaacaaattaacataactgacaaattaacaaaaccaacaaaactagcaa

SEQ ID NO: 168104 - DNA, 410 bp, Glycine max
  unsure (1)..(410): unsure at all n locations
agctngagtttcagtgggaatatttgattcatgatttactgcattatttggaattctaataatattaaagtaggtccattaggtgttgtgccgttgtggttcggcaatttttaaaaatgcagttagagtgggtcctaaaaccacaatatttacttaattaaaaaccttggccgatagaaccacaaaagaaataataaaagaattattgaaaaaaaacgccccttggtttattgagatgctctacttttaatatatagttcttttatagcaaatgcaagacaatgttgtatgtttatattaaaaatagaaagaaatgctggtcctcatcactatgggttgatcaaaatggagatctacctgcctcttttgtagaattgctaaacaattggcctgattgcacttttcaaatt

SEQ ID NO: 168105 - DNA, 344 bp, Glycine max
tatgctccacgatcacatggccacaactacttgtaatatgaaaatttgattaaagaaatcacatggcacgtagaatgtttaatcgacaacggcttataggctaattgtctacccagaaatacatgttaaggattaattgttaagacatatccttgtttggtcctgaatacggattctcccttgtgttttgaagcgaaaagggatgcggccaatgaaaaatgcataaaatgacccttttaagatgcccagtcactttaacaagtagaaaaaaattcatgagcactttctctgttgatcttttttttactccttacacagtattaaataaattaatgcattatttt

SEQ ID NO: 168106 - DNA, 386 bp, Glycine max
  unsure (1)..(386): unsure at all n locations
aaatcttgatatccgggcacattgtgattgaaatctatccaaagttccacattcttgggtatctgattctataataaagaatgtttgctgatttcaaagctatcccatctgattttagcgaccacactactcttnttttccaagctcccagttctcttaaacggtgattcaattcttgtcctctttaaagagttaatgagatttcataagatgggaatgtaaaatactgggatgttgcatcacattcatcatttttttaattatcttgatttgtgtgccttaatttaaaattactctgaaaaccgaagtttttattaatgtgcatgntttggtctttgtaacgaccatttgtgcctataggaagttacttctatgacaaagtctgc

SEQ ID NO: 168107 - DNA, 335 bp, Glycine max
  unsure (1)..(335): unsure at all n locations
atctgaagttactcgctcaacgcgtctcanacactcagcatgacacaattgcttatcgcaaggaaatatggagaagtctggaacacgaaggtgcatgtagcgcaagtcacgcgctaagcacaagaatactggcatactcgctaagtgtggtaattgcgcttagtgcaaaggctatgtgaataccaaactgaactacacctatattatgaggagagagnataaggaaaataatttacagaaatctttagagaatacaattccttaccgaagacattggttangagtcatttattccttcattccctttgttaacattccttccatattactatcct

SEQ ID NO: 168108 - DNA, 278 bp, Glycine max
  unsure (1)..(278): unsure at all n locations
gctttgagngccgtgaatatcgaacattttacatttttcctccacaaaactggatgctgaaatcatgctcagcttatcaatctgacaattntatttccaggaataattattataaatattacctagaggttactctagcgagggttcaaaaagttataggctactaaaagccttaatgttgccagatacaaaccaacagagttcctcataaaactcacattcataccaccactggagaaatttgcaaacaacacaaatttcattttatcatataatgg

SEQ ID NO: 168109 - DNA, 89 bp, Glycine max
aaactaagcctatttccttaggaagagatccccatatatgagaatatgatgcatgtctcgttctctatccacttttaccattatacatt

SEQ ID NO: 168110 - DNA, 421 bp, Glycine max
agcttcctcgggcatttcctgcgaaggctaacatttggaaagttagttttaccagtgggatactattcttaaaacaaaaatgacatacaacctcctcccataaatacaaacatcaatgtaaatttagagcaagcttatgcgcatatttccttacaaacgttctcttgcacaagacattcttttaactgaaaaaaaaaaatgcacccatatacaatcaaggcagcttcgttacctagattatttacacgtacttccaaggtgtatttgttacttacatcacacacctccttggctaaattcacatacatgcatactcaaagcattttggggtaccaaaaattgcacatgtgcacatcttggtatttctaatacctatacatacacaaacttcatgatgaatcttgactatctacacaataag

SEQ ID NO: 168111 - DNA, 413 bp, Glycine max
  unsure (1)..(413): unsure at all n locations
gctttctctgtcacctacatttctatacacgaaaagcctttttctgttacacgcatttanaaaaaaactctctctctttatatcaacatggtctatacaaaacctctattccttttcaaagaattcttttccctttttcaacatacactcggtttttataccaagaatttctttatatacactcattgctcacacacaagaatttcttttcacacattatttatacacacaaaatcttttcatacactgtttatatacaaaaactcttttcctttctttatatacagatatgactttggttcacaacgcctctttcgtttctattcttggtgtcatgatgtttgttcgtttatttatgacgacgtcctaaatgaaactctcacagtccagaatttcacaacatttcgacatac

SEQ ID NO: 168112 - DNA, 427 bp, Glycine max
  unsure (1)..(427): unsure at all n locations
agctnttggcaaaaggaagaagaagaagttgttcttatagactcanaaatcaatgtggaaaaattgcttgtgtaaagaatgaattggaaaagatagatttttcaaatgtaaaacaaagtcttgcttttatagactcttcatgtctggtcaagagaaccattagaagagttatgacctttagaaaaacataaaaccaatttgaaaaagtcaaaaactatttgaagagttacatcttttgattttgttcagaaactatcactggtaatcgattaccaaatcagtgtaatcgattacactaagcttttatgtgaaaggatgtgactcttcacatttgaatttgaatttcaacgttcaaacacattggtaatcgattaccaaaacattgtaatcaattacaacattttgaaatcaattggaacgttgtaaa

SEQ ID NO: 168113 - DNA, 490 bp, Glycine max
  unsure (1)..(490): unsure at all n locations
acaccctctcatactaagctcacctgcttgagaagctttcttaataagattttttattaagctagagcttagctacacatacctctctaatagctaagctcacctccttgagatgagaagctagagaatggctacacaccccctataatagctaagctcatccccatgacanaatacatgaanatacaaaagaaagtccctactacaaagactacccataatgccctcatatacaaggctaanaccctatactacaagaatggcaaaatacaatgccccaacgaacgagaaacctattctaatatttacaaagataagcggactcatacttagcccatggacttgaaatctaccctaatgctcatgagaaccctacggcgttccttggattctgacccaattacttggagtttctatcaatgccccgcggggaggatgcatattcctcaccttgaacgattgactcaatccgaggtttatacttggttct

SEQ ID NO: 168114 - DNA, 426 bp, Glycine max
  unsure (1)..(426): unsure at all n locations
tggtaaaacancaatacgtaccgtctcatgatgcacattcatgtgacactataagaactattgttattgaaaactacacttgtattcatgtcaatctaatcatgtatgcatgtacctgttatatcatanaattaatttccgaatataaaaacgttctggtggctgatatgcagttcattttcttggtgtaagtacccccatcctaagaataagtatgacaaccactaaatagagaagcgtcacttcctatatcatatggccaaatgacaacttcaacatggaagttgacaccttggatgaagtcacccactgtagtaagaaatcacttgcgcttactataaatgtttgatgaacaaggtgaactgtctcaaaaaaaattgattacggccatgctttatagaaacagtttattgtgactttaataca

SEQ ID NO: 168115 - DNA, 413 bp, Glycine max
  unsure (1)..(413): unsure at all n locations
agctgacaattgttacaacatatttaatggtagattctatattgagatcttataccacttattggtggatctcccaacaccatgtaagattgaagatatctcacattttttttctttagtggtagatctcattttgagatcttagatgagtcccacatggactctaattttaaatattntatttaaaattttaataaattaaaggcttaattacaaaaagagttcttttatttttttcatttcactaaattgatcttatttttttaatttattatcaaagttttcatatttttcaaaatttattatattataccagaggaaaaattgacattcactggtcacttgctaagagtttattactccccttttcaggttcaatgattagcttgtctagtttgttgcatcacttgcat

SEQ ID NO: 168116 - DNA, 326 bp, Glycine max
  unsure (1)..(326): unsure at all n locations
tgctatacgatatgtgatggtgtatccaaactctcgtcttacgaatgcgatgaatgtangaatgtgtagttgctcgtcttcttcaaccatcacaaggatagttttgcctacaagtttgaatccatcttattgtgatcttgtgagatggttggcatgacgcatgtgtgagacccttctatcattctaatttcccaaacttgttagaaatttttctttcgacactctaagtttccattggcaccctacaactgggcaacataagacccatgtattcttcgatacctcttggctttgaaagtacatggttcttaatgtgccacatttta

SEQ ID NO: 168117 - DNA, 416 bp, Glycine max
  unsure (1)..(416): unsure at all n locations
agcttgagccttgaatcttgattcttgtttcttgaaatcaaatntcctctggaaccttgaagtgttcttgattcaatcttgaacatcttaaacatcttgaactcattctttgattatcatgaattgacctttgagctttttgtcatcacctttgttatcatcaaaacatctttgaatcaatctagatttatcatgaggctttgcttctacatttaccattttatcatgttcatgcatggcattttgcataaatcattcgtttagcatgtttctttgtgctgccaaccacataccttctgttgtcattagttgcatgttatgttcactcatgcatactcctgccatatggttgctcaagccttgcattcctttctttgctgtcaaagtcacaatgaagtgtgaaagtctgcaccgca

SEQ ID NO: 168118 - DNA, 334 bp, Glycine max
acttcctttttgaaagtcagcacttgccactatgggccctatgctctctctagagaactgctatgcatgaccgagtcagcatcatacggactattgctgggactcatgtggtaatctcttcaaccaccaatattgctggatctagatgtgctctggatggtctgacaattaccaaagactgggagaaggagtgaacctacagaaaccgcggatagttgctctatggaatgcctcatctagacagacgtgacaaaaaggttctcaacaccttcgtgaggacatccaacttgatctacatgtgtacgatgatccacagtgtgttattcaacatact

SEQ ID NO: 168119 - DNA, 351 bp, Glycine max
  unsure (1)..(351): unsure at all n locations
ggaccttaagcacctgcagctgcagctgcccaagaagagcttttgagtttatgcttatcacctcanaagactggaaagcggtgtctaatgattcctctgcggcctccacataaggcatagaggatgggcagctcgccaagatgtcttcttcgcctgatacgatgaccagatgcccatccactacgaatttcaacttttggtggagtgtagagggaacaactcccactgagtggatccacggacgccccaacagacagttgtagggggggttaatatccattatttggaaggtaacttgacaagtgtgagggcctatctgtactgggagatcgatcttcccccttacctctc

SEQ ID NO: 168120 - DNA, 463 bp, Glycine max
  unsure (1)..(463): unsure at all n locations
actaagctttccgtcgtcttactgttcttcgnccgtcgtgattcgttctttcgtcttctatcggcaagtgttcgaatctgagactatcaattcatttcttggtctggtttctctcatcttcatctcgttcactttcgattatcttctcttccgctgttaacgtgctttttaccgtttatttaagccgttatctcgcctaataattgataacatgaatttcaacccgatcattctgtggtgtaactctggtctaatcactgctaaaataaaatccaatcgatcatgtacgctgcaacctcgctaataacaagacgaagaaattataacaaaataatctaaatatctctgacaagaatataactaaataatcaaaatatctctgagagatatactcgacaatccaactattttataaacagatcaatggacgttttcttacatgtctcctgaatgaatgctaata

SEQ ID NO: 168121 - DNA, 410 bp, Glycine max
  unsure (1)..(410): unsure at all n locations
agcttgctaacccatggaagttcctaatatctcccacactttntggggtgggccattcttggatggccttgattttctcagggtccacttggatcccatttctaccaactacaaaacctaagaaaactatattatctacacaaaaggtacacttctctatatttgcatagagggtgtttttcctaaggattgaaagaacttgcctgagatgtcctaagtgatcatctaggctcctactgtacactaaaatatcatcaaaataaacaactacaaatatacctatgaaatcccttaagacatgatgcataagcctcataaaggtgcttggtgcattagtgagcccaaaaggcatcactagccattcatacaaaccaaacttggtcttgaaagcnagtttccactcatcaccc

SEQ ID NO: 168122 - DNA, 332 bp, Glycine max
gaattctactcttacttgtatgaaccagaagagatatcacccaagcacgtgtgggtcacgggtcatctggttataattgatgaagataatctaaataatatttcgaagatcccagtgattgtagaagatggtgagaatatatgtgcttattctagatttgactcctgaggcctgatcctcacgagttagctgctaagctctgtatcacacggaggggatttgagctgaatactgatggtctccccttgaagatctttatgaagaagatgactactctcactcagacatgtagcattctttcttattgtaacttggtgccgacctttcacact

SEQ ID NO: 168123 - DNA, 421 bp, Glycine max
agcttgtccattgtagtctttgccttgtttaatgcaaaaaaagttataaatatgaccatttccagaagtactggctttcaacctctgaaggttattaatagtgttagagtttgtgggttctaatttatgtgttgagcttattgagtcttaagcccacttctgcttttgtactgtatttattagcaaatcaatgagaaccaatgggatgttatcgttcctccaaaaaaacaaataaaaacagaaatttgaccattaatcattaccaccaaaaactgatagtagaatcattcaaattaatttgaaaagttggcgatattgccagtctggcaaaaacaattagcaatgagcttagcaagacaaagttttgagcagattgcatgtgtttgacaagagcagcaattaggtctcgtatatgtaccac

SEQ ID NO: 168124 - DNA, 224 bp, Glycine max
  unsure (1)..(224): unsure at all n locations
atacaactccttatcataagttgaatagattacggtaggaccacttaactattcactaaaataagtaattggatggccttcttgcaacaacactgccccaatcacaacatttaaagcatcacacttcattntcaaagattatcgaaagcttggcaacgctagtatggnggcattagttagcttttgcttgagaacattgaaagcttcttcttgtttctctccca

SEQ ID NO: 168125 - DNA, 414 bp, Glycine max
  unsure (1)..(414): unsure at all n locations
agcttcccttaagtattaacaattgaggttatttaattatnnaagaacttcaagaccctaattgtttgggtgctatctacctggttgagacataacccattacatcttttattgagctaacagggtgcatataattataatcaatggttaacatcattgagcttgtttaaggaaatcctttcgggtccatttttcaataaccaccaaaaaaaagttattaaggggatttttaattaattattattttgtaaatccacaccgactatgcataatctttagcaaatttatgatacgataagattcccttacattttcatgtagggtagacctacttttctctcattactattctatattagtttaacttcttgtcattcgacacatgtaaaaacacgagcaaattgattttaatat

SEQ ID NO: 168126 - DNA, 369 bp, Glycine max
  unsure (1)..(369): unsure at all n locations
gacgtagtgagcatatataggtaagatatcactttcttcgtgaccaagttaacaagaacaaactagcactcgagcattgcagaactgaggagcagtttgcagatatgctaaccaaagctttcaagcctaagagactcgaagaaatgaagaacaaaattgggatgcacaaattgatagattcgaattaaggtggtgtgttaaaaatagtgtaattcaaatgtaattgtccaatcttgttagtatgtgaaatgcattagaggttaagccttacttagtgtataaatagcatgtaaacctttgtcataagggtgagtgattgttggtttctgacgctcaattcctattcaagaagangtatttttctgttac

SEQ ID NO: 168127 - DNA, 376 bp, Glycine max
aagctctagcttctcaaggaagttttctcaaagaagcttctcaagaaaacttctcaaggaagctacctagtctataaataaaagcatgtgtaacacttgttgtaactttgatgaatgagagtcttgtgagacacaactcaaagttcaacttctctccctttttcttccttcaatttcgtgctcccccctctctctttctctccctctttcttttcctccattgaagcatcctctccaagcttcttatccaagactcatcttggtggtgaagctccttcttccatggcttattccttaatggatggcgcctcctctcacctcttttcctttgtcttccgctgcatctccatgggggaaaatcaccattaaaggaccc

SEQ ID NO: 168128 - DNA, 153 bp, Glycine max
atgccatgtgctcgcgactggtccctttcttcccttcgcaactcgagttcactattgctaccccatagagctccgcgaaatttgttccggccatactctttcttgcgagccctcttggtctcttgttcaagggctcttgcggtaattgcattc

SEQ ID NO: 168129 - DNA, 432 bp, Glycine max
  unsure (1)..(432): unsure at all n locations
agctntaatgcatgacaatgatattaagttatatttntatggacatggacaaatctatcgactagaatagaaaaattatggcggctcattaatttgatattaaagagtcgcgagcgatgttaataattttaggtggtttactggcttttcctcaaaattcatgatactattgattaagggataactgcctttgagaaaagcatcacttacctttccgtattcttcttttattattttttttcaaaataaatctttcacttatgcggttcatagagtaaatatacctttatacaataaattaaattcaccactcttaaaaataagataatcttgaatgtattatttttctattaaagacattacttggttaaaaacctcccatctttgtttatttcattttgtttacattntatgatctccttatttttcttt

SEQ ID NO: 168130 - DNA, 334 bp, Glycine max
cctagcaatatataatgtgttagcaacaaatacgagatggtagtacaacgcacaattacaagttcataacaacttatagtacgtgagtgtcacaaagctggctcacatgtatgccacacccggttataattaaaagcaaacaattctcaattgttcaagatatatagtgaatgtgatgaacacgaactgactagtgattgcaatcttttttcaatactgatcactcaagcagatacctttccacatgtcattatcatcacgccaccatataaaccttattaaatggatactcaaacgcttcataactgtatataagtaataaacattcttttaa

SEQ ID NO: 168131 - DNA, 441 bp, Glycine max
  unsure (1)..(441): unsure at all n locations
gatccttaagcaccgcggctgcagctttctgaactttaggtcctttgattatgtctattgtgaatttcagntttggtgattgaattgctggctgaaatgttgatcctaagtgaatattgaactcctaaaattgtggtaaacaatcctagtgagttcaacatacataggatggttgaaagtaagcccaaggcaatcaatataccatgcttaaaaaaaaatcgctggtgctggcagcttggacatacaaactagtaaaaattactgagaattggttacttctaattttgagctgaaatttttactgaattttctagacatcaggaaaaaagttaaaaaaaaaaaagaaacaagtgatttggataaaaggaaaaaatacgaaaaatctcacaagttggcaggaaaatcagtatccagaaaaaaaaaggtgaaagggaagtgtgc

SEQ ID NO: 168132 - DNA, 479 bp, Glycine max
  unsure (1)..(479): unsure at all n locations
tgtctcagcgtntatgcgagacggagaccaacatgctagctatcatctgtcagtccaagaagagttaggtctagccgccgcccacgagcatacgatngcggatgaatatgcccaagtatacgcggaacaagaagctagaggaagggtgatcgactctttacaccaagaggcaaccatgtggatggatcggtttgctcttaccttgaacgggagtcaagaacttccccgattgttagccaaggccaaggcgatggcagacacctactccgcccccgaagagattcatgggcttctcggctattgtcagcatatgatagacttaatggcccacataattagaaatcgttaggaaacttgtatggtctctcagaccttgactagatacgacttccttnttgaaataaaatgagttggtccccatgtntctactcaaaaagcttgtgcanatcaaatcactcctacatttcatctctagcatg

SEQ ID NO: 168133 - DNA, 395 bp, Glycine max
  unsure (1)..(395): unsure at all n locations
gacccggagagcccaccagcaggcatgcaagcttgtagaatggctagacatgatacatttcatgtttngttttggntcaaggataaaagggatgccccacattatttccatgacacaaatgcaaaaatgatgatatggaaattttatgcaaaactggtcatgcatgcacctatgtggacactcaagtgtcaaatttttatggtcatgtgatgctagggctcaggattcatttcctctattttagtcaacccaatgtttccaaaatatgttcttttatcaatttgtgcattcatccgagtccattttgggcgtccgggaaaattttcacagcattcacccttcaggtgtacacacacattttccaaaaattggttatgatcagtgaattgtttcaa

SEQ ID NO: 168134 - DNA, 381 bp, Glycine max
  unsure (1)..(381): unsure at all n locations
actagattctntgtgctaccaagccactattggctctaacacatgntataanatttgtnggntcgatcgcataatgactaatagtctaccgtcttattgacatataaacaaattcatcacttagtcttttctatgaagattattaaagtgttctgagagcttttctaaactcttcaagaatttacacagagagcattttatggtaaaaatgatatcatgagcgcttcaaatcatatgtcatgtcttcaaagctttagatatttatacgcctcccttagntaagtatctggtgtccctaaatagacacaattgttctctttaagctcacgcctgaagaaaatggttgttggacgcattaaatgcacgtacttctcatgctga

SEQ ID NO: 168135 - DNA, 378 bp, Glycine max
  unsure (1)..(378): unsure at all n locations
agctggaaattgcacaacggtatcttcttatatattcaaanggccaaaagcggaccacacggatagtccgaatcacgcgcataatacatggagatgctccaaattgaacaacaaatgcttccgagaaaataaaatggtcatagacttggccacggaagcccaattcatgcgcataatatatctacaccctcgaaattgaacaacgaatgctctcgagaaataaaaatggtcataacttgtcacacggaagtccatttctggacataatatatcgaaacgctcgaaattgaacaacgaaagcttcttaaaaatgcaaatgcgaataacttttccaggtgtcgttctattcacgcgctaatatatccgaaagcttgaaat

SEQ ID NO: 168136 - DNA, 420 bp, Glycine max
agcttgcacacaaaggacttttgtattatttccttttcacaaggccggaagcagaggaaacctctaattttataacgcaacatggcggacaaatgtggacagctaacttgtatgtccattattgtcaatgcggaaagaattttgcgctttcactatccatgtgcacacattattgcaacttgtggttacgctagcatgaactactaccaatatatagatcttgtttacacaaaagagcacatcttaaaagcttactccgcacaaaggcggcctattgggaatgaaacggcaattcctccttctgatgatgcatgaacacttattcctgacccaactacaattagtgcaaaaggccggcctatatcatcacggataatgaatgagatggattggttttaaccttatatcacccacaaaaat

SEQ ID NO: 168137 - DNA, 356 bp, Glycine max
  unsure (1)..(356): unsure at all n locations
agctngacaccatntagggatataatttattttctaangggaacacaaaaagaggggatcaagttttttttgaggacattattctctttaataattctttggtccaaattaaattttattagttcaggtgttaaaaattttgataatacctataattattttctctgaaatctctcctaatctctattccttcctagaaactttacagtctaaattaaacctcctcacctctcactctcagcatgcttaactttgaaccaaccaaatattatcaacacgcctttaatttcaattatgtctcttcttttgtacgacttgtttttgaacaagtaataagactctgccacactaaaaag

SEQ ID NO: 168138 - DNA, 378 bp, Glycine max
  unsure (1)..(378): unsure at all n locations
agcttctacttcttatctcacatacaacttggtctgtattatgtgtngnaggtaggaatagtcacacaagctttatcatttaaaattatatggtgtgctcttctatatctgtaaatctaatgattttttctgggtgggggtgattgccttggtgatattgcagatacaagcccaggatattcatgtaggtaatatagtatggctacgtgaaaatgatgaagtgccttgtgaccttgttttgattggcacctctgatcctcaaggagtttgctatatagaggtaattatgtcgtgaaacatgctaaaactggtcttctctctctgcagcattgcagggaaattggaatgtcattccactattcttctctttttctctca

SEQ ID NO: 168139 - DNA, 365 bp, Glycine max
  unsure (1)..(365): unsure at all n locations
gtggganaaaaatgaaattaaagcacgtgagcaaaataaagaatttcacaatggagaagttagagaaattatggtttaagtcctcccaatccttgatcaaagttcaaaattttattaagaaaaatatttacatttaatatttgatcaaatacgaagtaaaactatgtcaaanatacatatganaaagaaaaacttacatgatgagatttcttatttttcttattctttttctttctcttttggtacctacacagtacacacccttttgagtgtcaatgaatatctccaacacatattctttctggctagattccagaacaagtactactctgctcagcacatatcttctgacnnataaaacatga

SEQ ID NO: 168140 - DNA, 431 bp, Glycine max
agcttgatgttattaaaggctttgcactttcctctggcagtaacagtgacaaagatgatcataagtacgttgacaacttgacatcaaattttacttgagattttatagtttctgatacttggtttacttggacataacagtggggagcaattgatggaagacgaatctcaaattgctctaaggagaaggaagaaacttgttcttgatggtgatttggaaagacaaatcaaagatctccatgagaagtaggtttgactagatcaaacttttgtctgaactttggagcatgatttaaattagagccttgtcaaaaagaaattcagtcttttttattttattttttttacatcattggtacaaacattcttaaaaggagtgagcaagatagatcaattcatagcttttcaatattttgttgaatttcattattt

SEQ ID NO: 168141 - DNA, 371 bp, Glycine max
  unsure (1)..(371): unsure at all n locations
tctccccccaatttctatanatagggggagaagtgaagtataaaggtgttatccttngcacttcttcttttcaaatactgggaaatggttcggaaaaatcaaccgagccttcgtacattcggagtgattccaagttcaccgtctcacgcttattgtcttatattttagtcttaagggaagacctaactactttattattatgacccgggggcccattggtcagatttattcgttattatttatccctttgctctaaccttattaagcttttcgtaatctaaataataattcaccgtcttgatgatatcgtattcgtaatgatcgacgtcgcggcgacccgtgaataanagagtnatatattatataaaaat

SEQ ID NO: 168142 - DNA, 408 bp, Glycine max
  unsure (1)..(408): unsure at all n locations
agcttggcccgaattctatttcttcacatcctaattngntncgccccagatatcaagattgggttcccacgataaaagaccccattgaaacacaaccttagactttttgaaccttggcctataaaaaagaatcttcattccttccccgaagcaaaggacagcggaatctcctcaagggagggcgaatagaatgctaaaacccgatttccccaaacaaaaggatgggaaaggagaagtgaaaagaaagaaaaggaagaaatggaaagaaagaaaaataaaaaagatgaaaataaagaaaagaacaaaaaagaagaggaaaagattcccagtctaaggtcgaagggaagtggaaagggaaaagaatcaattctcgattaatgaaagaaagaggacagaaattcttcaagc

SEQ ID NO: 168143 - DNA, 387 bp, Glycine max
  unsure (1)..(387): unsure at all n locations
tcatcatcatgtcccgagtggccacatgtgtttctgcttttattctcgtctgttactattataccccctgttgacggcttaaccatttacttaagtatttctcgttaacttaaaacaaaataaatttcaccgaacgtngaattgtattatccattactttcgtaaaataattcgaccgtctgtcggccgtaccacgtggaaataaaagaggtaaaatatataatatcaaaaaaaatctttatcaaataagcggaaataatcgacgtttctttgggattctcatctgacgaatgataatactaaggaactatgctaatcactcgctataagctgcccaaaaacgtttgagttgcattcatctcctagtaatgatatttaggccacgct

SEQ ID NO: 168144 - DNA, 413 bp, Glycine max
  unsure (1)..(413): unsure at all n locations
agcttgagatgaggaagtgttgaagggttaatactttntgcttttattgttgaccacagagtggtacctggagatatgtcgcgggggtcaggagaccttggggacgtcaagtggggtgctattgcccaaaaccaagcttgaccaatcccgacccaacccgggcatagtcggtcagtgagaacctgtgatgtacctaagcaggcgagctcctggcagtcaacagataaaaggaacaaacaccacaaagcaaggaggcttgtggtggctggccaactgtgaattttgtgtgatatgtggattatggcctctggtaatcgattaccaagggtgggtaatcgattacaaggcttaaaaatgaagacaggaggctgagatggtctctggtaatcgattaccaagggggtgtaatcgat

SEQ ID NO: 168145 - DNA, 420 bp, Glycine max
  unsure (1)..(420): unsure at all n locations
agaaagagggagagaaagatatatgtgggagcacgaaatgaaggaagaaaaagggagagaagttgaactttgagttgtgtctcacaagactctcattcatcanagttacaacaagtgttacacatgcttctatttatagactaggtagcttccttgagaagctttcttgagaaaacttccttgagaagcttctctgagaaaacttccttgagaagctagagcttagctacacacacccctctcataactaagctcacctccttgagaagcttccttaagaagattcctaaagaagctagagcttagctacacatacctctctaatagctaagctcaccttcttgagatgagaagctagagcttagctacacacccnctattataactaagctcacccccattgaccaaaaaacatgaaaa

SEQ ID NO: 168146 - DNA, 274 bp, Glycine max
aaatcctattttttattaatctttctttaaattttaactttttttagttttgaatatttttaccgattccttgcctatcatgctaaattaaccgaaatataaggtgactatggttggaaagggtgaaggaaaaggaaggggagaggagaagcacgtttaatctcactacatacttttacaaatttacaatacattgtcataaaaatctataatcacccatttttaaaaaaatcaaaaagttagagttgcgtaaatataaaaaccaaaaatgatt

SEQ ID NO: 168147 - DNA, 348 bp, Glycine max
  unsure (1)..(348): unsure at all n locations
attctagttaattattcagntagaccactaggtagaatcctgaacattcattgtagggttcagttcctaaacagatagtattattggcatgaaagcatgtgtaatcaactaatgtagtttaattgatgagtcctacttttttaagaagcttttgaggaatgctgaatgcttgcttaccttgagaaagctgttgattgttttgtaaagggggtaatgattctgtctataagatggtggtaccctttcaatgagttccatgaatctctttggccccatattctggatctgcagctatattgaataaatatgcatcccacaactccgcaaccctgtaattgctggcttctg

SEQ ID NO: 168148 - DNA, 423 bp, Glycine max
  unsure (1)..(423): unsure at all n locations
agctngcaggagtgatgacttccctcttttgatggtggcatcttgcaattcgcccttctttttcatgtacaggtgtctgtttgaggtcttgggttcccttgaccactttcttgtgtgcttttctcgagcacttgaatgtggccccttcccaacttcactcgaatagttgggccatggtgaaggcctttgaaattttgtgcctcttcttcaacatccagcctggtgtgccggtcttcctatttttcttccaaatgaagctgattggcaagattggttgggtctccttgaacaatgtatccaagaagttgtttgagttcgactcaaacatctttcaccacttcaaggatcagtttttaaaggcctggctactgatgtcatggctgatggtttaccacttatattcaatagggacagcgagcctta

SEQ ID NO: 168149 - DNA, 374 bp, Glycine max
  unsure (1)..(374): unsure at all n locations
cctattntgaatctcctatgtngcacctacttatattatacagttccactctccccattctacaaaatcatattcatacatcattgcggcatttcatcgagcacttggtgggcgcacgtttcgacatatatngcaagagaatggtgacaatgtggtatgcctcattgcttcataatacagcataggcctaaggccttctcattcaaatcctcaactcangaaacaagcatataaacaaaccaaaactgccccacaaatataagcacattctcacaatttggagcaccaaaagatgaagaatatataccaatgggaagctaanaacatcaccgatngaatacttacttgttggagtgaattataacaccaaaaat

SEQ ID NO: 168150 - DNA, 283 bp, Glycine max
agcttgcctgttcgatgcaacagaaatgatggtcctttttgatgtggggagtggctaccatcccggaatgggtttatggaatgacaatggcggcatatctagcctgataagccctcaaggagaatcggggaagtttgggttaggctataaaccccctcaagcggatgtaaataaaaacattgtggaaaggaaaatcggaagtcaaggttctcggatgatacaaagaagctaaggaggcccaccctgccactttagtaagagctttattacccctgcctatggg

SEQ ID NO: 168151 - DNA, 223 bp, Glycine max
  unsure (1)..(223): unsure at all n locations
tcacatgtggtactacgtggccgtccggcgatggcgcacaacaaagtanttcacatccacaaatcgcgcataaacccaccatcctctgttgctcacctacaactgagctcacgtactcccacgtagcccatagtcttgtgtctgtcaacaccgggtctccatcaatgctcgcaagcttgcgcaacattcaagtgattcaacatccaaatcatcacaaactaac

SEQ ID NO: 168152 - DNA, 408 bp, Glycine max
  unsure (1)..(408): unsure at all n locations
agcttgtgcaaatcaaatcactcctacattttatctctagcatgcattgnatgttgggctcgtcctttgtcacgggaagccggaaggtccatatcaccttcttaattgtacacatggggcactgcgcccccaaatgcgcaagtaagaagagataattttccgggctctcgtgtccgtaaaatgcattcatatcatgcatcgcataagcatctcttcataacatcataatggacatatcctgcatttgtccgttatcatattccagcctcacattttgcatgagtcatggcatcatcatgcgtatgcgttcaacaaactttttgatctgcaaaattgcataccatttgttttcatgttagctcatccttgcggtttcctctacaaaacaaaaacaaaaaagggggaagc

SEQ ID NO: 168153 - DNA, 305 bp, Glycine max
ggcggacgagtatgcccgagtatacactgaaaaagaagtagaggaagggtgatcgactcattacaccgagaggcaacaatgtggatggaccgatttgctcttactttgaatgggagtcaagaacttcaccgaatgctagccaaggccaaagcaatggcggacacctactccgtgcccgaggagatccatggacttctcagctattgtcagcatatgatagacttaatggcccatataatcagaaaccgctacgagatttgtattgtcactcagatcttgactacgtataactctctgagtaaaat

SEQ ID NO: 168154 - DNA, 425 bp, Glycine max
  unsure (1)..(425): unsure at all n locations
agcttatgagaccaaaacangatgatttttattttcaacaatctaaanctgacgctaatctagtaaatcttgtcctatcttttatatagttttatgattatccaactgatttaagagcaaagtgcaaccctacacatttgtgtggtatcgtggagtattgtataaaaatctttccgatcatcatcaataagcaaaacatggaggttgtcgccagttaattgaacaatagtatattaaaatcaaatagatatcttgtgacacaaaaatactaaaagcgcactcaattcacgataacaaaacaatcaagcgtacaatttatacgtacgagaaacaagagaaggacattcattattaatatagagagaatttaaagcacaaacaagggaatagaaaacattaacttgtcaacaattttgcattgggac

SEQ ID NO: 168155 - DNA, 396 bp, Glycine max
  unsure (1)..(396): unsure at all n locations
gctatgtatcttctctctcttgagtctcntctactttncaggnntctcactctaagaagtggattcactcttgtcttggatcggctangaatgaacgctcctacccttatttatactactccaccttcataatgaatggaggagattacttgtatcctacggtggagattaattctctagaatgctccacacattctangaggctctgcactcttttactccctttcatatacttccatactncttcataaggttccagaaggtttcacacatctctagaatattccagaggtttcttcattcttccacaaacttctagagagatatacactactctagagttcttcaggacgttctataagattctacacttttctatgaaagttcagaattttc

SEQ ID NO: 168156 - DNA, 426 bp, Glycine max
  unsure (1)..(426): unsure at all n locations
agcttatgtaaaagcacnnatatgataattgatttnttatgaanaaaaaggagataaacttttcataagctacaattagcttatgcataagttaaaaatcatatttttaaaaaaattatatgaaagaacttttacaaattatcttgtgcataagttgatttaatatttatttacgagaaaaaaaaaatcctatcttcaagtctcaagcatcacaaacggcatgataagtctcaatgagaatatttattaatttaaaaaataggcatttgattatgcctatctgaattgaaatttgattatatacaaattgaatgtagatacatatatatgaaatagttagaagtgtcatattcacacaataagtgaatgaaacaagatagattgatntctttgaccattacaggggaatcatgtggatgaagcaag

SEQ ID NO: 168157 - DNA, 317 bp, Glycine max
  unsure (1)..(317): unsure at all n locations
tcatacaacacaagagtctgatcgattagagagatatatctatatgcatcagctcgcttgttagaaagacccaacaatctctgcctactgttgtcacttttacttacctctgcttttatagtttctagcataaaagttagtctaaattctcgttgaaactatcaatcatacatgttctctcaacaatgctttattactgaacttaattcacgtaaacattagttccctgtgttcgatactcggattcatctcgtttaatatttaaatacttgacgatccggtgtgctatccggcanaccgaatttcccttgaatata

SEQ ID NO: 168158 - DNA, 403 bp, Glycine max
agcttggagcaccacgacgagtgttggttttcaagtaaccaccacgacatgagtagctcaacagtccagcacggaagcacgacagcgatgacgacgaccaccatgatgcgagtagctcagcgagagtcattttgggggtgagtagcttgaacaaggcagagtgagtgagtaaacagagtcgcgagattcatttttgggggttgttgcacgataccgtttcgggttttcgtaaacccgtggactcgacgcagactcgcgagtctaccaaaactcgtccaagtctacgtaaaattggacgagtctactccgatttcgatattgcttccgatttaactcgccaaccctttatagaatcataaaatcgtacgattttacgattcaaatcgcgatattaacaaccatg

SEQ ID NO: 168159 - DNA, 450 bp, Glycine max
  unsure (1)..(450): unsure at all n locations
gctgtatcgataccacatctatatcgataccaagtagttnttatgatacattctcaacagtcacatctttntatctgtttcttaaatggccatcaaacgcttgtatatatgtgactcgagacacnaaatttgataagagttttgaagatcaaaaacgtcttatcctcttaacaagcaaaaattgttttatcctcttaaaaattccttggccaaaacacttgtgattcaataaggaattatttgagtgctcanactgttcaatctatctctttcaagagagatttcttcttctcttcttctttattctgacaagggattaagagacccacggtctcttgttgtgaaagaattctacacacacaggaacgattgtctttgtgtgtttagaactcgtaaaacgaaattacacgatagtgaaactctcaagcgggttgttttgggactggatgt

SEQ ID NO: 168160 - DNA, 415 bp, Glycine max
  unsure (1)..(415): unsure at all n locations
agcttgcttctacacatactatattgtaacacatgatttnggatcattggcagtatttatattaattattaaatctaattttggtctctcgaattgtgtttttgtgtataatataggttaactcatttaatgtctattttactattcatccatctcgttttgtgtttaatctgtttgttcatgataggaataggactagagttagacctattaagataattaaaagtatagtaggttttatgatttgataagagaaatagaaaacaaaatgttgataagatgattaagataatgagtattactccttttactatccttttcctttggtcaccgtaactactatttttgtatgtgacaaatttattggtaaaaagcagtacggcgagagtcattgcttatagctaattcaatttaa

SEQ ID NO: 168161 - DNA, 419 bp, Glycine max
  unsure (1)..(419): unsure at all n locations
agctagagcgtagctacttctcacttcatctaanaactaagctcaccctcctgagaagctctcttgagaagctagagcttagctacacacacccatctaaaaactaagctcacctcctagacgaaatacatgaaaatacaaaagaaggtcctactacaaagactactcaaaatgctctgaaatacaacgctaaaaccctatactaatagaatgaccaatatacacggcccaaaagaaggagaanacctatttaatatttacaaagaagaatggatccaaccttgacccatgggctcaacaatcaaccctaagggtcatgagaaccctacggccgtctttagtagctctagcccaagcctcttggagtcttctatccaatacccattggcgggtaggagtgcatcaccttctaccataca

SEQ ID NO: 168162 - DNA, 388 bp, Glycine max
agcttatccgacctcccattaataggtttttcatataaaagtactgcatgccaaggcaagcacaacagcaggggcagaaccattagctagccgcagatgcaccaccgccgcctctacagtaaccaccgccgcctctatagtagccaccatccctagagtccatctctggtcacatgtagaggatggaactctatatgcagcatgtggctgaccagcaggcggccaatcataggggtcaagtgtagttgaatgagagtttttactagtacatcctgcatcagtagggccaggatcccaatccttacttgtggcctactcccgagcagttcggggccacaattgcatggcctggagataggcccaattttcaggcaggggcaggacccgc

SEQ ID NO: 168163 - DNA, 419 bp, Glycine max
  unsure (1)..(419): unsure at all n locations
tctacttatgtggcagggcgggcttccttcaccttcttgtctccaactctaactttgaccaatgttcttccttcctgcgatgcttcttttcatgtccgcctgagtgggcttatagcctaaaccatacttcccacgaattccttgggtatttatcaagctagttatgccgccgttgttttttcctaaacccatcccgggttcataaccgttccccaacataactcgggccatcattaccgctgcatcggacagacaaggctgcccaaagagggagtccacggaggaaatgctgaccacctcanaagactggaaagcagtttctaacgattcttctgcggcttccacataaggcatggaggatgggcagcttaccaagatatcttcctcgcctgacacgatgaccaagtgcccctccacta

SEQ ID NO: 168164 - DNA, 419 bp, Glycine max
  unsure (1)..(419): unsure at all n locations
agcttgcattaacttctcattccatacttaatatacaatnncaaaatcccatctcattttgaattgtacaccatatatcaaaaccaaaataatctaaagtagtacacaaaggccaaacttaatagttaagtcctcgttgacgcatgagtctattttaggaaaattgtatgtgtatgcctaagtttttattcatgatgaactcatttttagactcaaaattacccaaatccacccctattatacctagacatgaaactaccctacacctttcccacaaaccaataaaactcattttcctaattccaagagttgtagaaatctgatctttgcaaactatatattgaactcaagattttcaagtatggtgaattcattccaatggtcaaaatagaaccatatttactgaaaaaggctaaaac

SEQ ID NO: 168165 - DNA, 404 bp, Glycine max
  unsure (1)..(404): unsure at all n locations
acctctcacgttcgtctcataggacaacagctctatttttagaattatggaaatcgtgttacctaactctatttctttctattttttgaggtcgacanaagcggcgcttttgttcctacgtaccctcctttagagaggaaatcagacctacgtagttctttcacatgcgtgaatcaagtgattcttttttacttgaggggtgatcatcttaaggcgttggaccttaaaaatgatccattttacttggtaagaaactgaaatgataaactctcaaaaacctatttttgtggacgagcttgactaggcggattggttttagccttaatttcgctttagttattagtcaattcaattaagaatgagaaatcccacagagaaaacgttcgattgacttttcgctttac

SEQ ID NO: 168166 - DNA, 411 bp, Glycine max
agctttacagcatattttattaatgacttcctaacctagaattaaaataacttaatgccattaacgtagggaattataaaaaacttaatgactgagtgtaactgaaattgtggcaaccaaaagtcacccccaacagccaacaagtcagccaccatttggtcttccaaaaggctgatgcctaggttgccaattgggcccttattacaacttgaactaaacctaactaaagcccttttagttgattaacccaaaacatatttttggtcagccaactttacaaggattgggccattatttaaacaaactaaacactctaaaattgagacaaattggtgctatttaatcctcctccatttgggccatgatacaactcacaaccttggaattttctccttgaaacttgggcttgta

SEQ ID NO: 168167 - DNA, 299 bp, Glycine max
  unsure (1)..(299): unsure at all n locations
cttcttaattccacagaaatataagcgtaaagctattttggagcgtaggaacctacctctacatcaagggaccttcaattccatgtaagggtggacttctcctcacttgaaatctgacggtgtngggttcttgggagctataatgggtagttctactacgttattgcatctacgtagttgttttgaaggaaaatgttgtaaatcatgctcaaacttgatatgtntaatttaagcacaactgccgatgttgattgatggttaaataatgatgttttgatgtatatgtatgcttaaaatgc

SEQ ID NO: 168168 - DNA, 429 bp, Glycine max
  unsure (1)..(429): unsure at all n locations
agctttgatcacattaatnttgagtcctaatatatcattttagtaacgtaattttgcttggtaaaatttgctgacatgataagagttatgttgatagatcagcaaaaatgacaacattattatataaatcgatcgatttgaatttaacttctctaaagtgaaaaaggtatattcacctttaatatttactttatgtttggatgaggtgtaaattagaaaaaaaatagaaaaaaaataccagagaaatataaaatagaaataaagtgaaaatgatatattattcatatggaaagaaataagagaaaattaaggtgaagaaaantttctctacttatttaaatgagttaaaagtataataaaacacaaatgaataaattatataaaagacttcttaatacaaataattttagaaaattacactttaatatt

SEQ ID NO: 168169 - DNA, 303 bp, Glycine max
  unsure (1)..(303): unsure at all n locations
gaacattgcaactgtccaaacatcaaagtgccattctgtattctcattcacaaagcatgaaacttacctagcatgtccaaataataataaataaaaaaaaagcanataacttatgataatcacagggacagcttttttatggatgtgggatgggggctacaggaacatatacctgacaagagatgttagaaatgcatatcgcatggtatccattccaagcacaaacgtaatatgtatgccagctntaaatccctccatcaacacaacaacacgaggcttattatcaccttccttcatagttac

SEQ ID NO: 168170 - DNA, 365 bp, Glycine max
  unsure (1)..(365): unsure at all n locations
gacctctaaaattgtaagctaatgacagaatgcctcgtcttgtcccaagatgtgtatagcaaggaagcctaagttcttaatctttatgctctaacaaaaagttgggttgcagttccgacttaaagttatgaatcctctctttcaatgcaccatgcacgtgggggaatacaatagccacttaagtgtcatcaatgcaaaagcatgcctctcaggtatataccaccagaatgtaaaaatatggctatcatttcaagcggctcacatttaaaaatctgccagagcatggcggagtntttcttcccgccggacatttagtagcgggaatagaaacttgctgtctgagggcggccgctctaatgctttga

SEQ ID NO: 168171 - DNA, 322 bp, Glycine max
accaacatggcacgctgctcctttgccaaaaaaaacttcccaaggactaaccacctgaattctttatgtggcccttttctccctttacaaaagaacaagggacaaccggctgaattctttgtggcaccttctccctggtcaaagaattcaaaacgacatagcccaagaatccttttgattcctccctttccctaatacaaaagtgttcaaaggactaaccgcctgagaattctttttgatccccattcacaaagtaacaaagggttaactgcctgagaactctttctttcacatcggaggggacatcctctttgggacaagt

SEQ ID NO: 168172 - DNA, 335 bp, Glycine max
tgctctcgcgaagctgggtgtggagattaatctttcataatgacatcttcttatgcaagttatgctatagaaatatgcttgtcttacaagaagcacttcttacatataggtcgcaacacaaagtgcatttataggataaatcttcagactgtaatcattattttgtcggtttacaatctagaaaatttatgctaacaatcccactttttttaatgaagctaatcactttgaagcttacaacgcttaggtgtttttaaaacaatgcttacgatcccttgtgcttcaaacaattttttgataccttctacgtctatcaaagttgtatccattaaaat

SEQ ID NO: 168173 - DNA, 425 bp, Glycine max
  unsure (1)..(425): unsure at all n locations
agcttatccccatgcttggactattcatttattntttgnaccaccacatcacttttgactcttaaacaaataatcaacattgttggtgtttgtttgcacacaggctaatctatcatcttattgacgaatttacaaattaaacactaagtcttttttttcccaaaactcacaatatgttttggtggaagcttttcaacttaagaaaatacagagagaaagctcaaagaaaagagggaatatgatattcaaaatttggcttgtacttcgtaacttttaactcttcaaagcttctcgtatatatagccatcatcaaagagtagttgttgcctctaaaaggttttctttttgagtttgagcttgcatttgaagaaggaatcggttggtgaattaaatacacgcatcacatgctcgtccagtccttgttt

SEQ ID NO: 168174 - DNA, 259 bp, Glycine max
gaaaattctcttgacaggaacctcatcctaaagagctgattttggttagccaaagttcgaacaggaaacatactcatataaccctgactaggggtaggggaacatcttgttattgctgccctgagctttggatgccaaatattcctataactcataaatgtgatgtctatagctttggcatgctattatttgaaatcctacgcaggagaagaaaccttgacatataccatgctcgaagccacgaatggtttcctatatg

SEQ ID NO: 168175 - DNA, 403 bp, Glycine max
  unsure (1)..(403): unsure at all n locations
agcntaaaatgcgaatccttattgaactctaaccatctcctctacctcatgttaagctctttttgatcaaacaaatatctaaggctcttatggtcactaaacacctcaaatttagatccataaaggtaatgcctccaaagcttaagagcaaaaactacggctgctaactcaagatcatgtgtgggataattcctttcatatatcttaagctgtcgagaagcataggccactacctgtccccgttgcataagcactccacccaaaaccatcttggacgcatcacaatacaccacaaaagattcactcggattaggtaacactaagactagtgtagtggtcaacctttccttaagggtacgaagactactctcacattgggcatcccacacaaaaacttgacctt

SEQ ID NO: 168176 - DNA, 334 bp, Glycine max
  unsure (1)..(334): unsure at all n locations
acatggagggagaggattacatgggtggggaccttctataaactaaatggaagctattaagaggtaccgggcgtgccctttctatcaaggagaaattgaatgagttatagatgaatgttgtcatctaatatccatataacgagcataagaatgtaacgtcttcactatagcaaacactcttatttggctttactagacgtgagactaatgtgagaccttatctttcagaaagggtattgaggcagattgggcatgtacaaatgattccacgccggccacctcactattgtagtacgtatgagctttgtancaagtgtggcagaatggaacaaca

SEQ ID NO: 168177 - DNA, 403 bp, Glycine max
agcttgacggaaggaaggatgtgtctgttatataatacctatcctctgccaaagttattaacatctctagcacaaatggtatgacccgtaacggacaaatttttgtagcgcccgagcttctgatgcgagataaagacccaaaggggaaggcgaaagtgggcactaaataaagcgacaaggcaagccgtattctggatgaggaggtcccggccgggaggtttgctaagggagaggaagacttcggcagaaaaataatatccgtagaagaaacaaatgtgttccttcagatcatccagtaaagcgagttcaaggtaatcgagcaactcaatataaccccagccagggtctccctgttggagctactcatgaactccgagcctcatcggacacctttagtcaaaat

SEQ ID NO: 168178 - DNA, 356 bp, Glycine max
actagcttgacaaatctgctacataacctgaccatgtgatttgtatctacctcgaagcaaaaagaaagaggaaatttcaatcaagagaagcaaaagaaagagggaaattacaatcaagagaagcaaaagatagaaattccaatcaagaagggagaagtaaaaggaagagagaagaagaatctctgtcacgatcaagaaacaaaaaatggcaaaggtcttggacgacatattgacaacaaatgtaccaagaacaagaagaaggaacatactaagggcattcctttatgcaccaaattggtgtacgattttcgccgcctaacaaacagaagaaaatcaaaaggcaaaaagaaagtaaa

SEQ ID NO: 168179 - DNA, 415 bp, Glycine max
agctttgagggtgcgcagcccttcattttccatagtggagtaccgtatatgtgtctaccatcacgattatcgtctccctttccattattggggggaccacctgggccgccagatccctccaccttttgggcgtgttctttgaaaaatccgcccccctttttgcacatgttctgtagttgctttctattcaaaaccatatcaaaattgtactgatactgcctaacacaggcaaccattgggtccttccaagaatggactcgggaaggttcctaattttgtataccacgcgacagttgtcctactaagactttctcaggaaaaatgtatcagcagtttctcaattcttgcgtatgcccccatcttctcacaggacatctctagataggttttggagcgagtgtccccttgtcttgtc

SEQ ID NO: 168180 - DNA, 392 bp, Glycine max
  unsure (1)..(392): unsure at all n locations
ctctctcaacacacacatcatataggtgcacttattatatgtaaaattacaaaactacccctaatacaacaactagtctaggtgccctaaaatacaagggctgaacaatcctacattactatgataccctccctacactatgaagccctaaatacaaggcccaaaaataatgaaaccctaatctaatatgtacaaagataagtgggctcatacttagcccatgggcggcctanaatctaccctaagcctcatgagaaccctanggccttctcctgcatctctagtccaatcttcttagagtcttctatctaattcccttggggagtatgattgcatcagcgatgatttgttctttcacgtcgaaagggaaacaacataatgataattggatg

SEQ ID NO: 168181 - DNA, 405 bp, Glycine max
  unsure (1)..(405): unsure at all n locations
agcttggcaagttttttcttcttcaatttaacaaagctacagaatcaccatcatcntaagttattaaccattccaactcctttttcaacgcctccacctcccttcaagactctcccctcatctaagtttgtgaagacgtcccctccttctttaattctccaacccttcctcctcaagccaagcattttcgaacctcctcattaattgcgtgttgtcaaccacaatcgatttcttgtctgaatcccccatcattggggaatttaatgtctttgtccccctgtcagaatcaatcaccaaacactgttccagaattttcttctcttcttgacttttctccacatcaaacaccatgtcctccaccaaggcttgcccatttagtgggccctcataaacaccccagtcaat

SEQ ID NO: 168182 - DNA, 190 bp, Glycine max
ctaatgcatatcgttgtccattctgtgagatacaatcatcaccccttccatcgaccattccattaataactggcgaccactatcaagtctatgtgaataagcttgaacatggtataccactcccagaatcattctccttgtaaaaccgatgtgcatagtgaacaatacctttcaaaggctccatggatga

SEQ ID NO: 168183 - DNA, 382 bp, Glycine max
  unsure (1)..(382): unsure at all n locations
agcttgtacacatgtctaagtttctccttatctncaaatctagggggctgcttcacataaacctcttcatttatgaatccatttataaatgcactcttgacatccatctgatatagtttaatgtctttgtgtgctgcataggctaagagtattctgacagcttcaagtcttgctactggtgcaaaggtttcatcaaagtcaatcccttctttgttgattgtacccatgagcaactagtctagccttattcctaaccacttctcctttttcattgagcttgtttttgaatacctacttagttccaatcaccgactaaattctaggagggggaacaggaatttagaccttgttcttattgaactggtttggttcttcttccata

SEQ ID NO: 168184 - DNA, 394 bp, Glycine max
  unsure (1)..(394): unsure at all n locations
agttatctaatcctatctaacatacgatgtgatctctttgattatgtggctcangcgctcgggttaccgctgtttcttttccttcacattctttcctcgccaacgagaaatacaacttcaagagctcaattttgtcatttgggaaacacatcatacangcgtcatttgactgtatgaccctgagtgggactattcttctacccacgttctgatatgagaattctgaatattcatcacttgctaggctgacgcacatatacacttgtcaattctgactactcatgcaactatccttttgattactcatgaagctattcttagaatcctaacagagaagaatttcgaattttctcgctgagttcatcatcatcttatctgtttgagtcaataaaac

SEQ ID NO: 168185 - DNA, 417 bp, Glycine max
  unsure (1)..(417): unsure at all n locations
agcttcccacatagtcttgaacaaagtgttgtgtgggttgcagtgttgtaccatctatactctcaatcacttataacatttattccagatttgtgatgagaaccagcaagcaaaaaacttgtgattttcactctcctcagttgcattacaatgggcaccgcgtatcctcctcagccaaaggaatgtttctgttgctgagattgaattttgttggtaatatcaagcattaagccccatacaaaagcttgaatgctagatggaaccagaacatgacaaatacgcgagaaaacctcctcagattcagcctccaaattttgcgtttttgatagtggacactcctataaaagttntttttccaaagccacgagtcaagtctatcttccaataaccgagatccatttacctccttcaaaaacg

SEQ ID NO: 168186 - DNA, 192 bp, Glycine max
gaaaaagagaagggaaaatttcaatgaaagctcaaaaagacaagaaggaaaattccccaatcaaagagtgggagaaagcacaaaaaagaaaagaaggaaaatttcccaatcaaagagtgggagaaagctaaaagaaaagaaaggaaaattcccaatcaaagaatgggagaaagttaaaaaggaagaagaaga

SEQ ID NO: 168187 - DNA, 411 bp, Glycine max
  unsure (1)..(411): unsure at all n locations
cctgcggcatgcaagctntcttcaaggactttgctgcggcttttgttattctctctgcgnnnagagggaaaactggcaacaaaggagaggtcaggaacaggtgtgaccagttcaaccatattcccgtctaaaaacacacaaatcaatcagttcaaccatagaaagattagctaagattgtataaaaagtctccgatcatctgataatttctttagatgttgcatgtgtatctagagagccatgggtatacattgncatttgaatccttgtcaaaagaaaattgccatttgaatttttttttattcttttntttgttttccatttgatattttatgttttgggaaaggggcgaaaaacaaaaaacttgtgatggagaagatccagctttaacccatctaaaatatgggctct

SEQ ID NO: 168188 - DNA, 399 bp, Glycine max
atagatgttaattgatataatctcgtgagatgatgagaagaccaataccattacgtactcttttgaaagtgttatatggagatttaattataacgaaaaatgtaagagctaaaccatcgctgatgaatatgaaggtggataaagaagcactgctgataacaataaatgcagcagttggtgacaaatggagtgacgagttgagccgtgcttgtgaagtagcctacgatgaattggcagcagctattaataaggcataattagtatctattgcagtaaagtgtaatagataaactcttgtttacttataaacttcgtactattagacaagttcctgatacacatgtttgttaacataagtgaattatatagtattggatacaaatctacagtaatattcta

SEQ ID NO: 168189 - DNA, 423 bp, Glycine max
  unsure (1)..(423): unsure at all n locations
agctntgaaggtgcgtagcccaccattttttatatttnaatactggtaatgtgtctactatcattgtcatcgttttttttcatcattgaggtgccacttgagctgccaggttctccacccttgggcgtattctttgaaagatctgtgcccccctttntgcacatattttgtagttgcatcctatccgaagccattatatcgacactgcctaatgaaggcaaccattaggtcctcccaggaatggactcgggaaggttccaagttagtgtaccaggtaacaactaccccagtaagactttcttggaaggaatgtatcaacaattcctcatcttttgcgtatgcccccatcttccgacaatacatttttaaatggttcttggggaagtagtccccttgtacttgtcaagtctatcaccttgaact

SEQ ID NO: 168190 - DNA, 341 bp, Glycine max
  unsure (1)..(341): unsure at all n locations
gcttatatctgaagtcgtccaggtcatgtggtgccttgtatttacttttattgcttangacaccgactgacagagtgcgtagtaatctctgccatccacacactagcatcatatcagaattcaatgattggctagctgatatggaggtggaggatatcccgtgctttggaaaaccctctactcggttcacgccaaatggctcttgtaaagcatgctatacagagtgctgctttccgacgaatggatcgctaagtgcnctgatagttctcacctacaatcttgaaggaactactcagaccactgtcctatcatgttacaatccaaaacaacagactggggcc

SEQ ID NO: 168191 - DNA, 421 bp, Glycine max
  unsure (1)..(421): unsure at all n locations
agctttcctttcaacaaagagaagagaattatgattgattgaagaaatacaagtagtggggatgtctcctccacctccagaacctcacaattacctcacagactcatttcatgctctcaggatgggctcctcttcacgctcaattttctgctagtcttctcatagcaaaagctctaaaactctttggaacttggaccttnctctctctaaaaatctctaaacatgcaaaagcttcgagaatttcccaaactccgtctccatttctgatttcaggcttaaataagtggccttgctggtgcttgcgcgcttagcgcaactctggctagcttagtgcacattatagaatttcggcttagcgcgcgtctttttgctcagtggatggactcaagtggtgcgcttaagaggataaccctcgctcaaa

SEQ ID NO: 168192 - DNA, 466 bp, Glycine max
ctaagctggcccttcttatctgtaccgactattacagcattcttgttattacctaacacatctacttggcttggattctttgtttgcaggctcccctctgtaaaagcacttctccagccaacgttgaaagttggaccccactcagccaccgtcatcttgacgtgccacggttccgaattttggtcaaaacagcttgcgaataaaatcttcaggtcctttactattagtatcatgtgaactataattatattaaaatggaggacgaataatcattatcattttattcgatataatctcttattctatcattattattcataatatattgtagagtaattacatgtacgagatagactttcgcgtgctctctctattatatatataaaaatattataatacatatgtgtgacttgactttatcttgagttatcataagcatttaacattattataatattagaatata

SEQ ID NO: 168193 - DNA, 436 bp, Glycine max
  unsure (1)..(436): unsure at all n locations
agcttaaagaacgtaaattaaataaaattattgaatttatattataattaagcaacttcactcaattgttgttatcccaaatcaaacatgcaagtcaaggaggtctagcttaattggtttgattcttatggataataaaaaaaatcaagtgtgcaaatcacaaaaagaaaaaagaaaatagaagaactgttagaacaaaggagaatgtggatgaaagtttgaaaaaaaaaaagaaaaaaaaaagcttcaaatcctgcatcgctcatgataaacacttgaatagtgtttcactccctatatatagagagctcctttcttctttttntctttccccaattaagaagcatttcctcaacctttctttctccctcccatattttagccgatgcatttcctgcaaacttttccctctttctttttgtcgctctaaaatttc

SEQ ID NO: 168194 - DNA, 340 bp, Glycine max
  unsure (1)..(340): unsure at all n locations
agagcgcacaactatactntattattctattcggattaatctgcaattggagttcaacatacaattagctctttatctcttaagaagaaatgtaagacttatatattttggtgcagcaataaaatatacacacctattccacaagattcgtcttataaggcggagtcttctaagactgctatcgctatataccaatgtaagaaggggcacattcagagacagttataacattgatactgtcttagaatgtggcacattcaaagatggttatacacgtcttagaacctactatatcaaagaccactatgaggttataacccgctttgaatgtgtacattct

SEQ ID NO: 168195 - DNA, 266 bp, Glycine max
  unsure (1)..(266): unsure at all n locations
aaccctaacccagacccacccaacagggacggagaagaaaaagaaatcaacgaagacagggngaacccgcgaggccaacaaaggaagaagaagagaagaccaaggacgatcgacagagaagaggaaggagaacaaaaaggagaaggaaggagaacgaaccacgacagagaaccgaggaagacacaacacgcacgactcgggagggactggagagagaaacatcgagggcgtagaaaacgaggagggcaccgcccgtcaactcgaaa

SEQ ID NO: 168196 - DNA, 336 bp, Glycine max
gctgactaaggtgcattatcaatgtgtagacattataagctacacatgacttataaattatcagaagatgcaatgtaaacacaacaatgaagacatttgtgtctacatagtcaagaagcacacaccagaagttgtgaggaacaaagacatgcactagtgtactaatgcaatatcatgacagactcctcttatatcaatgatcaaatatgaagaagagagctagccacgtactactattcctatattaataagttaaccgcgagaaacacaaatgagtctctaacatctgcaatggtaacaagaggatctacaccattatgtagaagactcactttt

SEQ ID NO: 168197 - DNA, 424 bp, Glycine max
  unsure (1)..(424): unsure at all n locations
agctngaagagaagcgctacttatatctttatacatatataatatcattattgaatcatataaagttaagagtatcttacatgataacttatgagcagtttccatatatcattatatttccttatttaattagtatttgaacatacaagcatagaataattataaataatgttagagctttgcattttgtaccacattgtatcccaccaatatagataagagaatgttattcttattcatgggctcttctatctcaatttatctccatatataatattattattgatgaacacatttgaaaatgcaaaaagtagttcttttagtggcactggcatttgttgtgggtgtatgctctataggtcaatccaacatgatttcacttatgtataaatattactaggcatatgatttaccaaagagcaat

SEQ ID NO: 168198 - DNA, 316 bp, Glycine max
tcaccatggagatgcagcgaaagacaaaggaaaggacgtgagaggaggcgccatccattaacgaataagccatgtgagaaggagtctcaccaccaagatgagccttggataagaagctcggagaggatgcttcaatggaggaaaagaaagagggagagaaagagagaggggggagcacacaattgaaggaataaaagagggagagaagtggaactttgaagtatgtctcataagactctcattcatcaaagttacaacaagtgttacacatgcttctatatatagactacgtagcttccttgagaagatttcttga

SEQ ID NO: 168199 - DNA, 404 bp, Glycine max
  unsure (1)..(404): unsure at all n locations
agctngtgaaaagaatggaatttttcttttgtttgacacaagccgatcaattctgttcttataaatgtgacctaagcgcttgtgccataaagctccacagtttgtaatatcaattctacacttagtaccacgcaagtttgcattaaaggattcaccataggaagctccagtatcaagtaaatatagcttatcattagccaacagtgaaccagttccaataatatttgaattgaaagacaacctgagcattttgtttccaaatgaacacaaataacccaattttgtcaattaataaaatgaaaccaaatcttgtctaaatgacggtacaacaaaagtggttttctaatctcaaaaaaaaagtatttcttaattaatagtttaaagtgcccttataactcaacgtt

SEQ ID NO: 168200 - DNA, 408 bp, Glycine max
agcttatccgacctcccattaataggtctttcatataaaagaactgcatgccaaggcaagcacaacagcaggggcagaaccattagctagccgcagatgcaccaccgccgcctttacagtaaccaccgccgcctctatagtagccaccatccctagagtccatctctggtcacatgtagaggatggaactctatatgcagcatgtggctgaccagcaggcggccaatcataggggtcaagtgtagttgaatgagagtttttactagtacatcctgcatcagtagggccaggatcccaatccttacttgtggcctactcccgagcagttcggggccacaattgcatggcctggaataagcccaattttatggcagggcaggaccccgcagggccccaggagatgaagat

SEQ ID NO: 168201 - DNA, 334 bp, Glycine max
  unsure (1)..(334): unsure at all n locations
tctacttatgtggcagggcgggcttcattaccttcttgtcntcaactcgaactttgaccaatgttcttccttcctgcgatgcttcttttcatgtccgcctgagtgggcttatagcctaaaccatacnttccacgatttccttgtgtatttatcaggctagttatgccgacgctggtttttcctaaacccataccgggttcataaccgttccccaacataactcgggccatcattaccgctgcatcggacagacaaggctgcccaaagagggagtccacggaggaaatgctgaccacctcacaagactggaaagcagtttctaacgattcttctg

SEQ ID NO: 168202 - DNA, 417 bp, Glycine max
  unsure (1)..(417): unsure at all n locations
ctgcggcatgcaagcttcctgtgccgagaaaatatatattctgccattganngtaataaaaatgcgcattgaaggatgaaaaaatccgtcggggctatttaactaccgatgtcggctattgtgttttctattccacccctgaattatatttggatgatgcctattaagaaatgctcagacggtgtcatccggtcatgcttttttttgaggcctcgatctgactgttttcctagccggccgacgttggctagcatatttttcgatcaatatctgggtgaatcatgttcttttttgccaaggagggcttatgtttttctggccgacataatgaaaacatgcctgtgttggccgaaaacaatcccgcacaaaaaccctcaccgacctacattgtattgtttctgggataccgggcgaaaa

SEQ ID NO: 168203 - DNA, 382 bp, Glycine max
  unsure (1)..(382): unsure at all n locations
tcgagcgtctcgattatacgagcctaatctttatccgagtaaaagtatgcgccttcgtattggatcagagcttcaacattcaatttcgagcgtctcgatatgttacaggactcaatcagacatcagagaaaaaagttatcgtcgcttgagttggctcagagattcaacattcaatttcgagcgtctcgatatgttacgggactcaatcagacatccgaganaaaagttattgcgttgaattgcgtaagcttcacattcaattcagcgtctcgattgtacgggactaatcagactccgagaaaattattgcgttgaatggctaagcttaagttaatttaagcgttcgatatgtacggactaatcaacatccagtaaaagtatt

SEQ ID NO: 168204 - DNA, 412 bp, Glycine max
  unsure (1)..(412): unsure at all n locations
agcttgaaggcaaaccagatgcatnggttaactnggtaacccagctggccttgaattagaaatctgtacctgtcgcaagagtctgtggtttatgctcctctgctgaccactatacagacctttgcccttccatgcagcaacctggagcaattgagcagcctaaagctcatgctgcaaacatttacaatagacctcctcaacctcaacagcaaaatcaaccacagtagaacaactatgacctctccagcaacagatacaatcttggatggaggaattaccctaatctcagatggtctagcccttaacaacaacaacagcagcctgctccttccttccaaaatactgctggcccaagcagaccatacattcctccaccaatccaacaacagcaacagccccaaaaacaacaaac

SEQ ID NO: 168205 - DNA, 283 bp, Glycine max
tggacatcttcttgtcaagtcaaatacaccagagcctgagccaaaagaagactctgtccaccaccacaatataggattcctcgatgatgttgcacgcccaaagggtgctcaactggaaatagtttatggagtctttgggtacatgcaggtcctctcagcatgtttcatgtcatttgctcatggcggagacgatgtctccaatgccataggtccattggcgggtgcgctagctattcttcaaggtggtgccgcacgaactgagaatgtgattccaactgatgtt

SEQ ID NO: 168206 - DNA, 413 bp, Glycine max
  unsure (1)..(413): unsure at all n locations
agctagattcaagttatgttttatantgttctattcacactcgnactttaaaaaagcctttatacttgaattaatactcacgtgaatagtaattttaataccgataaataaatactcatatttggatccattactcgcactttaatgaatatcaaaatttagtaaataaataattattgattaaaaatacaatagtaaataaatttaaatcttatttaaagatttttttataaaacataatcttttacaacatgacactatttatctttattataagtaacatgatctatctttaattattggtattattatatatgcgggtatagataagttgggtactaaggtaccattaacaacacttgtttctgtgaaacctattgataattatccggtcccaaccccatatctattaa

SEQ ID NO: 168207 - DNA, 345 bp, Glycine max
  unsure (1)..(345): unsure at all n locations
tacacccttattactattaatcatatattatacataanacattggctactaaatttaaaataaaataattagcattcatttaagtagatgtcatatttttcattatgttaatnaatataatagttaagatattctaacatataatatttaaaataatataatacatagtgtaaatgatataatgattaaaataagtagtgtagaagacaaaaatccttattaaaaactaataaaaaaattgaatattttaaaaataaaaagagaataaaatctacaaagttaacagttattagctagcactctttaaaaattaattggaaaaaaaaacacaacttgtaagagtat

SEQ ID NO: 168208 - DNA, 418 bp, Glycine max
  unsure (1)..(418): unsure at all n locations
gctcaacattaatatcgagcgtcttttatattatgggactcaancacacatccgagtaaaaagatattgtcttttgaattggctcagaccttctacattcaatttcgaggttctcgatatattgcgggactcaatcagacatccgagtaaaaagttattgtcgtttgaattggctcagagcttcaacattcaatttcgagagtctcgatatatgatgggactcaatcagacatccgagtaaaatgttattgtcgtttgaattggctcagagctttaacattcaatatcgagggtctcgtaatattacgggactcaatcagacatccgataaaaagttattgtcgtttggaatggctcaaagcttcaacattcaatttgcagggttttgatatattgcgggactcaatcagacatccga

SEQ ID NO: 168209 - DNA, 217 bp, Glycine max
ctgatgagttcgtatataacagacctcaaatgatgttaactctggcaattaaacacaatactttttctcgatgttgatgagtccgaatatatcagacgctcaattgaagttaacttgatccatcaacgacataacttttatcgatgtcgatgagtccccatatagagacctcgaatgatgtgaactctaacaattcaacacaaaacttttactatga

SEQ ID NO: 168210 - DNA, 396 bp, Glycine max
  unsure (1)..(396): unsure at all n locations
agctnntatcttttgtgtctctcactaggtgntctagtatttgtctagcggggttacaactgagccccggggccctttatatagagaaacgggaaaaaaaacgacaaaggccccttcagtcaagaatagtaaaagttctattcggaaggaccttgtcaattttctggatattaagaagagtactgaagatcaataacagcccacactcattgggtattacgaagatcttattttcctctaagcaccaccctaaccataaaggacttccattattttttgaaacaaatatcaagggcacaccttttgcacgattacaaaccccacattttcgaaaaaaaaattcaaaggtaaataaacatgtggggtttaaatctattcccattttttaacaaagaa

SEQ ID NO: 168211 - DNA, 249 bp, Glycine max
  unsure (1)..(249): unsure at all n locations
tggaaaacccaatgcatatttattgtgcatagactaatatttggaagccatgaaatnggccttattacccacaccgtagaagagtacaatagatggagttatcaagtgaagcgtacaatagaaaacctagagataatggtctgataggataacaacgagtcaatcaacttaaagccacaacataataacatcttgcttggaaggatgaatattacggttcaactgcaaaggctacgaatgtggacactt

SEQ ID NO: 168212 - DNA, 224 bp, Glycine max
acgtcggcctgaaactaaaggcaaaatgcttcattcttcaaccacgactgataaaactggggcaatttaagagggtgaggataatggagatacccgccttgagacgtgccattcgagtgcgaccaaagttcctcccaacccatcatattctctactcagtcaattacattgcttttacatacacaccacccatgtgttcgcctaagccattcctaaaactccca

SEQ ID NO: 168213 - DNA, 428 bp, Glycine max
gcaagctttgtaaaaggctgtatctgcttattgtcattttcagagaaaatggcatccccattgctttgaaaaatgtgttaacctagtaccagaaagtaaaacaccttgagcagatcgacaacactgatctaagcaccccaaatattatttcgtaagcaccctaactttccacagagaaagtgggaggttgtatttaatttagacattaattaatctggcatttaatgatggcttgtctaagtcacgttgggaaatctttgaaatatgctgcaaaacccgaaaccatcataaagggaaatggctgcttaaaaggtaaaacaagtcctttattaattttcatcgcgagcagttagatttgattccttttccattaagaagttgactgctaagccttgaggaagagaaataaaaaaatgtagcttaaatta

SEQ ID NO: 168214 - DNA, 447 bp, Glycine max
  unsure (1)..(447): unsure at all n locations
gtactacattttttttggttggcttgtggatggaagatangaancaccaaatctgtgtcgtacttaagtacgcacgcacgcacgcatacctagttgttgctagtgacgtgtgtacacaaccaaatacggattgtcggatattggtgtcgtcaactttgaaatcttctctcttctactcgtccactctatacatcccttcttaagtgctacaaatggcaacgtgtcgtttgctttcctctctctgcaactgcaatggttaattgcttgccttccggtaatccaccaaataaaaaatgctagatatangtatattgtcttgtatatagatatagcacatacgatcacatcaaagacagaataagaataatagtttaatgtctatctatgtttgatgtaaataaattatactgtattaattataataacgtcaagatattatttaaaaat

SEQ ID NO: 168215 - DNA, 401 bp, Glycine max
gcttaagcaattaaacgtcattttttattagtcggatgtctgattgagtcccgccatatatcgagacgctcgaaattgaatgttgaatctctcagcaaattcaaacgacaataactttttcatcggatgtctgattgagtcccgtaatatatccaaacgctggaaattgaatgaagaagctcttagcaatttcaaacgacaatatactttttactcggatgtctgattgagtcccgttatatatcgagacgctcgaacattaatgttgaagctctcaccaaattcaaacgaccataactgtttctctcggatgtctgatatgagtcccgtatatatttagacgctcgaaatgaatggtgaactttagcaaattcaaacacaataactttttctcgatgttg

SEQ ID NO: 168216 - DNA, 399 bp, Glycine max
  unsure (1)..(399): unsure at all n locations
cagcgtctaatagatacgggactattcatcatccgagcaaaacgttattgtcatttggatatgctgagagcttcaacattcaatttcgagcgtctcgatattttacgggactcaatcagacatccgagtgaaaagttattgtcgtttgaatttgctgagagcttcaacattcaatntcgagcgtctcgatatattacgggactcaatcatacatctgagaaaaacagttattgtcgtttgaatatgctgagagcttcaacattcaatttcgagcgtctcaatatattacgggactcaatcacacatccgagcaaaacgttattgtcgttgggattgctgagagcttcacattcactttcagcgtctcgatatttacgggacttaatctgacatccgagt

SEQ ID NO: 168217 - DNA, 419 bp, Glycine max
agctttaactggtattgctttaagtcctttttgacttacattatgaaacaagtgttcttcgaaaaagctcttaagaaaactctattttatcactcatgggacgacaatccattgttttaatagaaactacttttcaatcactagataacataattcttatctttttatacaacttgttatcctgtgaaaacttttatttgggaaaatgtttatatctttggttaacacactattcaacccctttttctagtgtgatttttgatatttcaaaacttcaagagtcaaaatgacaacaaaaaggagattatggatcccaacgtaggctgcataaaaaaacaccacgatggtctctaaaaatacccccacaactagcatgcacaggaactcctttagcagcaccattaatagtatcacgatga

SEQ ID NO: 168218 - DNA, 367 bp, Glycine max
  unsure (1)..(367): unsure at all n locations
ccttgatctagcttactacttaaaaaaaactttgcccctggggctttatttttataattatnnaaaatatttaattactaaacaatntagtctttgtggacaattaacaagattaattcattggtaaagaaaacaaatataattgatgagataacaccaacgttagcaactcattgacttactgctagtcatgtantaattttttgaanaattatatttttaaatttctcgtcatctaacagaattatttttanaaaaatgttaatgatggagcaatatcgcatggaccaacaagacttgcacttgatttttattgacttggagaaagcgtatgatagagtgcctacagagattatgtggaaagctc

SEQ ID NO: 168219 - DNA, 448 bp, Glycine max
  unsure (1)..(448): unsure at all n locations
tcgacccggatccttgagtcacctgcggcatgcaagctttccatagcactacattgtattttataaganaganaaatgaatgtttaagcttcttccataaactaaagttagttttttggagaagctaaaaatcatttaacttctccaaaaaggatgattttaacctacatacaagttaattttagcttatgggagaagcttattttattttgcttatttttattctagtataaatacttaaagaaaagtttatccaaacagggcttatatcgagttataaaatcaagtgtagctactacaaatctacagtgatatagatacctggatggtgaataggaaaaggcatgcaaggcctagccatgaatgcaggctgtagaaattgtcaatgcccttgtcaatgtgaaacttccaagcagcccagacaccaatcaagctcaaaatgagagcg

SEQ ID NO: 168220 - DNA, 306 bp, Glycine max
  unsure (1)..(306): unsure at all n locations
aaaaagtgttgttcgtggataaatattcatacggccggtccaacggaaaaggagatgcattcgtgccaagacttggcttttttttattaaaagtggtgttggaaaagaaagacggtatgtggtttggtgtgcggttttatggtgcatatggaagaaaaggaatggtcgtatcttcaataatacaactttctgaagagaaacaggtgactggagatatataatatgtggcctggacgtggttgacgagtaagtgtacgtcgtttgattactcaattcctttcangtctctaaaccatggtgcgtgca

SEQ ID NO: 168221 - DNA, 420 bp, Glycine max
  unsure (1)..(420): unsure at all n locations
agcttgtagaacaggagagcattatatatgtcangtgttggccagcggctcgaggataaaggggatgtcctacattatttccatgatacacatgcaacaatgatgattaggaaattttatgcaaaactggtcatgcatgcacccatgtggacactcaagcatcaagtttttatggtcatgtgacactagggctcaggatttattttccctattttaagtcaacccagtatttccaaaatatgttcttctatcaatttgtgcattcatccgaatctatcttgggtgttcgaaaaacttttcacagcatttacccttcaaatgtgtacacacatttttttcaaaaaaactggtaaaatcaataaaatctttcaaagaaaaagtggaattatctcttttcacaagcatgttggtttttaacta

SEQ ID NO: 168222 - DNA, 355 bp, Glycine max
  unsure (1)..(355): unsure at all n locations
atattacaatcagaagtggaaacagtgtntataccacgagaaacaacaacagctgaagagagacactgcgagaattgatgctggaaactgaaaagccatcatgtccaacatctncttgtagaaggatntcattggaatcctgagaattgacacagcaacgattagcatgaaagccaacgaaaacacgaatgtcaagagcaaatntgttgacacttatgaggttcttagttatttgaggatcatgaagcatatttctaagagcaagattatattaagaatataaggagaaaggaaattagagtgtccacaagctgaaaatttcagaccttgtccattaccaataaagattttgtct

SEQ ID NO: 168223 - DNA, 352 bp, Glycine max
agcttacaaacaaatgacgtttattccttctaagcacattggaaaaagatattgaagtttttgaggtgaagacattgtcgtcttctaaatgcaaattgaggcaatcctaccccacaagggcattggatagaaaactccaaaaaaattggaccggagatgcaagagaaggccctagggttctcatgagccttatggtagattttgggcccatgggctaagtatgagcccgcttatctttgtacatattagattgaggtttcattattttttgaccttctatttagggctccataatataggtaaggtaccctaaaaatgtaggatttttcagcccttatattttagggcacct

SEQ ID NO: 168224 - DNA, 369 bp, Glycine max
atgctactgtcttcttaataccttatgatggtttatattacgttagcaatgcgattgttatgtttagattgtaagtacaatacataaaagttaggactcttttaggatgtgttaagggtagataattctgattgtgttgcatgtctgatatgggcctattacacgcctacaagaggaagtcaaaagacttcctcatctgtgtcttttctggaaaatgagacgaactcgctaagcgcgactggtgcactaagcgagttcatcaattaagccttgaacatatacatttccagaatagctcgcttatctagcatgcatgcgctaagcgagttcaaccaggtttgttaatgttcatcttcattatgaacatcg

SEQ ID NO: 168225 - DNA, 401 bp, Glycine max
  unsure (1)..(401): unsure at all n locations
agcttcaatccttgtttctatgaancaattttttggagttgcaaattcttctctgaggagctgggacatgtcaaactacatgtccctttgcagcacttggtatggcattgagtgtgaccatcatgacaacatgtctgtggtgtcacttgacatatccaatttgaatgcctcagggtcactttcaccttccatcacaggactcttgagccttgtgagtgtctcactccagggaaatggcttctctggggagtttccaagggacattcacaagctaccaatgctgaggttcctcaacatgtccaacaacatgttcagtggaaacttgagttggaaattctctcagctgaaggaactttgaacgctggatgtctatgacaatgctttcaatggctcaccttctg

SEQ ID NO: 168226 - DNA, 268 bp, Glycine max
  unsure (1)..(268): unsure at all n locations
tacgaagttgtgtcataataatgctgcggcaacatggacttttactcctatcgattagccttgtgatgaactcangcatgacctttatcaacacacttccattggaacctgttaagtactcaaaagtacactccccacattgacggtggacttgttattagtgtgtgatcccaacgacaagagtgaagacacagatacggttttgcatgtgatcaagctatcaattgcgagaacaanatacgcttcaccttgaatgagctcatcctct

SEQ ID NO: 168227 - DNA, 417 bp, Glycine max
  unsure (1)..(417): unsure at all n locations
agctttgagcaaattcaaaggacaataattttttactcggatgtctgattgagtctcgtaatatatcgacacgctcgaaattgaatgttgaagctctgagcaaattcaaacgacaataactttttactcggatgtctgattgagtcccgtaacatatcgagacgctcgaaattgaatgctgaagctctgagcaaattcaaacgacaataacattttactcggatgtctgattgagtcccgtaatatatcgacatgctcgaaattgaatgttgaagctctgagcaaattcaaacgacaataactttntactcggatgtctgattgagtcccgtaacatatcgagacgctcgaaattgaatgctgaagctctgagcaaattcaaacgacaataactntttactcggatgtctgattgag

SEQ ID NO: 168228 - DNA, 454 bp, Glycine max
  unsure (1)..(454): unsure at all n locations
tctggtgggacatcttgacttgctntccaatctgacattcaccacttattctgccttctntctatttcagaatgggaatgcctctaacagcacctttgtcaatgaatttcttcatgcctcttaagtgcagatgtccaaatctttgatgccatattctgacttcatcttctttggaggatagacatgtggaggagtaactggtttcttgaggtgtccatacgtaacagttgtcctttgatctgctgcccttcattagaacttcactcttctcatttgtcaccaagcattctgactntgtgaagtttacattgaatccttcatcacacaactgactgatgctgatcaagtttgcagtcagtcccttcaccagcagtactttgtccagactanngaagtcatcatgggctagctttcccattcaatngatcttctttagagccatctcaatgtacat

SEQ ID NO: 168229 - DNA, 421 bp, Glycine max
  unsure (1)..(421): unsure at all n locations
agcttggactcaaagagaaacttagaatggctctatatttattaaaaaaactataagataaagactcaacaaacctctagctttggcacttgttttcacagtaattttcaatngaaatttcggaactaaaattggtataacataggccccaattatagaataaattttgagccaaaacaacaagcgcacttccctttcactctttttttcctggatactgatatttctgccaacttgtgtgatatttataattttttcctgtaatccaaaacacttggttctttttttatcacttttttccagatgactagcaaattcaataaaactttcagctcaaaattcgaagaaaccaattctcagtaattttcacaagtttgtatgtccaagctgccacaccaacgattttattttaacatgggat

SEQ ID NO: 168230 - DNA, 326 bp, Glycine max
ctgatgttaagaatttttttgctcactgttgtaaaaaaccacatttactatgtatatttactacctgctttattttacataagttagttaatttgtgaatataacctactgttttaacatgcttattataacttactagctacatattcctggttgaactcgatcatcatttattttaaactgacaacgggcgttcggaacccatcaattttgaacatatgacaaaaaatgatgggagcaaactacttatctctttgaatgctacaactttgctgttagtgacatctataggaaatacacttatatggtggacattgattgtatta

SEQ ID NO: 168231 - DNA, 410 bp, Glycine max
agcttcaagaatcaagtgtcaaagaagctagattcttgtatcaatcaagttcaagattcaatcaggtttcaagaatcaagattcaagaacaatcaagatcaagattcaagaatcaagagaagactcaatcaagataagtactaaaaaagtttttcaaaacattgagtaacacaagaatttttcactaaatcttttaccaaagagttttactctctggtaatcgattaccagaaggtagtaatcgattaccagtagccaacattgttttcaaaactgatttacaaagttgtaatcgattaccaatgttttaaaatgttagatttcaaatttcaaaagtcacaacatgtgataaaaccttttcaaatccatttaaacttgtgtaatcgattacacaatacttgtgatcgagt

SEQ ID NO: 168232 - DNA, 146 bp, Glycine max
  unsure (1)..(146): unsure at all n locations
ttagagtttttcttttcggtaangggcttgtgtaatttgtttttaaaattataatacaaggatctttcttcatttggttctacgtctctacccattctcatccatttgcatgtttacttctnttctganacggcagatccgatgat

SEQ ID NO: 168233 - DNA, 432 bp, Glycine max
  unsure (1)..(432): unsure at all n locations
cacctgangcatgcaagctttactatttccattttatacattttacgcctcctttcttgttatgccccatcaacctaatgaaataagggatttactattcaaaaacttgactttatcaatgctccagaattctagcctttatattgataaatttgtaatgaaatctatgttgtttaatttacaactaaacaagagagaagtgtataatgctgctgtttccctattgcttatgtacatgggtgatcagcagcataacccatggaatactccataaaatttgcaacaggatggttgattctgtatactgaagctcaaccttggatttccactaaattgcatttatggagaggataatggttggaggtgtaaagaaaagaatactgattatgtttgggtattagatcccatagacaggacaaagagctttattac

SEQ ID NO: 168234 - DNA, 411 bp, Glycine max
  unsure (1)..(411): unsure at all n locations
actcatatgaaagaatcttattttttgtgacagaggaaagaaacttattttattttacccttttaatttcttttcttggtagtagttatcgataagtntatctatatatacatgaacaaaaagaaatggcaattatgcagtaacaaaaacatatactatatgggaaaaaatagctaggatctacaggttctatatattatgcttgtgatccgagtgataactctgataacatggaatatttttagaaattaaatatcaaaatgagttcttctaacatatattaagaatataatgagactactttgactgttgactcnattaactcactaacccaatagctatttcaatgctatgtagatggtcacactaactagtttgatgtaatggtttctttttttttaaaaaaaaact

SEQ ID NO: 168235 - DNA, 341 bp, Glycine max
agctggcattggaattgcgaaagcccctctccattattaggattagtacctgacatctcaaacaaacaaatcaaacgtaacaagacaattatagttgttgtttgaatacctcacccactcaagtgtatcacacaattatggcttttctctaatgaaacactcttgccttttaccactctaattccccttgagtgcttaggcaattcaagagattatggccacaacaaagaacaattcaccaatatgtgtcaggtaaggctagagagacaaggaaaaggttaaccaagaaaaaggctaacaatgtattgaataatatttggatgatgtccattaggaaatgt

SEQ ID NO: 168236 - DNA, 380 bp, Glycine max
  unsure (1)..(380): unsure at all n locations
gcttctgttttcaatttgagcatctcatatattacgggactcaatcggacatccttattatatgttatcggcgcttgaattntcttagagcttctgctctcaattntgagtgtaccgaactcaattggacatccgagtaaaaagttattgtcgttngaatttgcttagagctcttgttctcaatatcgagtgtctcaataatatctacgactcaatcggacatccgagttaaaagttatttttgtttacatttgcaacgagcatccattttcaattatgagcgtctcgatatattacgggactcaatctgacattcaagtaaaaaataattatcgttagaattggctcacagctactgtcttaatnttgagcatctcgat

SEQ ID NO: 168237 - DNA, 417 bp, Glycine max
  unsure (1)..(417): unsure at all n locations
agcttgtntaccctatgttgaatntgcttacaatagagctgttcatagcaccactaattgttctccttttgaagttgtttatggttttaacccactaactcctcttgatcttttgcctatgcctaatgtttctgtttttaagcataaagaaggtcaagcaaaggcggactatgtgaagaagcttcatgagagagtcaaagatcaaattgagaggaaaaataaaagctatgctaaacaagccaacaaagggagaaagaaggttgtcttctaacccggagattgggtttgggtgcacatgagaaaagaaaggtttctggaacaaaggaaatcaaagctttaaccaaggggagatggaccatttcaagtgcttgaaagaatcaatgacaatgcttataaagttgagctggccggcgagta

SEQ ID NO: 168238 - DNA, 173 bp, Glycine max
  unsure (1)..(173): unsure at all n locations
tccatcaagtggtatcagagcacaagagcttatgtatgtgctccttatacctacattgattntcagntataccttctcttccattggtgcttcttcaattctctccatgtatctacacacatgtcttgtgcctaaatgttgtaacatgattctttatagatttcaccgattaa

SEQ ID NO: 168239 - DNA, 436 bp, Glycine max
  unsure (1)..(436): unsure at all n locations
ggaccttaagtcacctgcggcatgcaagctgttacccatgtggaattngctttcatatagcngcncatagcaccactaatgggtctccttttgaagttgtttatggttttaacccactaactcctcttgatcttttgcctatgcctaatgtttctgtttttaagcataaagaaggtcaagcaaaggcggactatgtgaagaagcttcatgagagagtcaaagatcaaattgagaggaaaaataaaagctatgctaaacaagccaacaaagggagaaagaaggttatcttcgaacccggagattgggttcgggtgcacatgacaaaagaaaggtttccggaacaaaggaaatcaaagcttcaaccaaggggagatggaccattttaagggcttgaaaaatcaatgacaatgcttacaaagttgagctgcccggtgag

SEQ ID NO: 168240 - DNA, 437 bp, Glycine max
  unsure (1)..(437): unsure at all n locations
gagacttcccaacatatgtatcttctctctatagaggctctctaacttctagcttcctactccacgagtgaatcactcttgcttgagatcactcactctacggtggctcactcaagcttgaggatagagacttcttaagctatntatcttctctcttagagaggctcactcaagcttgacgatagagacttcccacgctatttatcttctctctcagagaggctctctaactttctagctttcttactctaagaagtggatcactcttgtcttggatcgactcactctacggtggctcactcaagctcgaggatagagactttccaaactatctatctcacaaatcctcccaactacttcaaaaatatccttgtctattaacccactctactaatatttttctaagctttgatacactactcatcgcaactatttct

SEQ ID NO: 168241 - DNA, 366 bp, Glycine max
  unsure (1)..(366): unsure at all n locations
aatagtctttaaaagaagcccnctacagtaaaattgccacatgtaagttcattttctcatatgggattgggtccacttgtcaagaaacaattttntataaaaactttttaggtaaatatctgacttatttcttggtaaaccttntcaatttcttatatgtcttatggttacaaggggatcaaatgttcacattcccgcatttgttttaaatttcaagtcttccccatatgcttagcaaacttccctttttccttcttgtatgaggatattgtagtcatttcccacgtgtgggagaataanaataattgttcgaatcggataacgaagagtatgtttatataatggtgctcttacatatgccatcac

SEQ ID NO: 168242 - DNA, 415 bp, Glycine max
agctttaatggatctcaggattatgttttgcgcctaaaccattaaatggcaaagaagtttatgatcgtgtgaagaacatcataactatctttgggaagacgcaaaaaaaatccgcaactgagacaaacatatggaagaaaaggcccatattctttgatcttccttactagtatgatcttgatgttagacattgtatagacgtgatgcatatggagaaaaatgtttgtgatagtttaattggcacccttcttaacattaaaggaaagacaaatgaaggtttgaagtgtcgtcaagacttggttgagatgggtataccagagcagttgcatccaatatcacaaggtccatgaacgtatctacccccggcatgtcacacaatgttaataaatgagaaacagattttttgtcattgcct

SEQ ID NO: 168243 - DNA, 238 bp, Glycine max
ttactgtcttcgtgcaacggatgtatctctctctgcggacattattctataaattccaccagttgaggtgtgagaatataagttccaaatgtggtatccaaatttcatgacgatccaacagttgacgaattcatgatcatacttttactgtgaccgtgttttgtgagatgaataacggaaaacgaaattgacaggaatatgaaacgtacagatgtatctctagtatgaaaactgacct

SEQ ID NO: 168244 - DNA, 420 bp, Glycine max
agcttctgtccctgagaaactggttcccataagactacagggagtgaagattgctgaaaaccctagccttgcaacaaattctagggaagtagacaaggagatggacaagaaaatccgcagtattgtgagtagcattttaaaagacgcctctgttcctgaagctgatgaagatgttccaacatcttccaccccgaatgtttctgtgcctgatgtcaagaaagatgttccaacatcctccgctccaaatgctgaagtactctcttcccccagcaaagagagatcaacagaggaagatgatcaagcgacaaaggagacccctgcaccaagggcaccagaacctgctccaggtgacctcattgacctggaagaagtagaatctgatgaggaacccattgccaacaggttggcacctggcgttgc

SEQ ID NO: 168245 - DNA, 409 bp, Glycine max
  unsure (1)..(409): unsure at all n locations
ggtcttcaccgacgaaggatcaaagtgggtntgaatatatgcaaatctgatcatcttggcttgataaatgcanaananaaaaaagcttgggcaaataaagagggtgaggatgaaggagaagcccgtgctgtgattgccattcctatacagccaagttttccaccaacccaacaatgtcattactcagccaataaccaaccttctccttacctaccgcccagttatccacaaaggccatccctaaaacaaccacaaagtctacctaccgcacttccaatgacaaacaccacctttagcataaaccanaacaccaaccaagaaatgaattttgcagcgagaaagcctgtagaattaccccaattccagtgtcctatgctgactngctcccatatctacttgataattcaat

SEQ ID NO: 168246 - DNA, 308 bp, Glycine max
  unsure (1)..(308): unsure at all n locations
acctatgatactaagcttgagtttctgatgttacgaattatccgataaagtntaaattttgttgctcgaacttaaatatttgatcacgttgtaatttgaaataatattgcgtataatttttttactaaattttatagcaagtagaacgtatagtctttagtaattctttaattaaataagtttaatattctaatttcataattccctgtaaaataattcgtattataattttttaaagaaatttttggaaccagtttgaatgaatagttcttatgaaatttataataaataagttttatattttatat

SEQ ID NO: 168247 - DNA, 388 bp, Glycine max
agcttatatagtttttataattaatatatattgatgggaattaatttatatttattgaaatataaataattaaacaatttgtgttgttcaattatttataataaaaaaatatgtctttagatttatatagatcaaaacatgttcgcaaagttgaatatcaaataatttttagtcaattgattggttttaattactaagatgttcaattaattagatgaaaagaaattcgttattaaaatatattatttccaaaaataaaacatgttataagaataaattatttttaaaatgaataataattttattttcaaaacacaatatgtttaacactctatgaaaaattcactcaaaaagatttaaaattcagatgtccagaacatattaatcg

SEQ ID NO: 168248 - DNA, 419 bp, Glycine max
  unsure (1)..(419): unsure at all n locations
cttggatcagatggattgaagaagtgaatntgaagctccacaagagcttgcacatcaatggagtccatttgagtctctcatgattcacaagatggatgctatgcttcacctccatctagagcactcagttgaagttcccaattcattggagaacatcactactctgttggaaaacatagaaattatgttgacgcttagcaacctcaaccttgatgaggatgaagcttagtcatgttttaagtgcttgtttcttgtgtttgttggtctatattgcttatgttctgtttgtctntgcttggtttagacgttatgatatcgcttaatacgttaatgattaagttgtaaaagtctatatgaatgaaatgctatgggtnctctcctcatattcttatatgtcattctatggatagctataaatg

SEQ ID NO: 168249 - DNA, 412 bp, Glycine max
  unsure (1)..(412): unsure at all n locations
agcttngagatagtttctggtctganaatcatctatgccaagagccagctgggagcaattggtcaatctgatcagtggatcaaatctgctgctgatctcctaaattgtggtcctctgcagcttcctttttgttacctagggctgcctataggtgtcaatccgagaaggaagatggtgtgggaacctatcatcaacaaatttaaggctatactgaacaaatggaggcagagaagcatatccatggctggtagaatcaccctaattaatgttgtcctaacagctctgccattgttttacatgtcttttttcaggactccttcagcagtgatcaacaaactcatcttcattcaaagaaggtttctttggggtgataatcaagaagggaggaagatagcttgggtggcttggactc

SEQ ID NO: 168250 - DNA, 347 bp, Glycine max
  unsure (1)..(347): unsure at all n locations
ttatgtttatgaccttatctntaccggcaatcacccaaatgtgtttgaagactataacgagtccatgtcttcgtgaattgatatgacagatatgggactcatgtcatattacttgagaatggaagtgaagctaacggacaatggtatctttgtctcacaatgaagctacacacaagaagtgttgaagacatttaatatgcttgattgcaatcccgtgaacacacctatggaagatggcttgagctatcaaagtttgatgaacgagagaaagtagactccactgtcttcaagagtcttgtggagagtataaggtgtctaaccaatactaggcccgatattctatatgc

SEQ ID NO: 168251 - DNA, 333 bp, Glycine max
cctcctctcacctcttctcctctggtttccgctgcatctccatggtggaaagaaaccctttaaggatctcattgaagctcacagaaccagcctccatataagccccccaagctagcttccacacttgttttaaaattttgaatttccgagacccatatccttttcattccccctagagcaattccaacaaaaaatggaagaaccaaaaagagatttggagccttctgaaagagaggtaacactcctttgtagatgatgggcaaaatgatcacattgtaagaaatttgttctccatcccgaaatgtaggaccagtcttttgatcctgattatag

SEQ ID NO: 168252 - DNA, 294 bp, Glycine max
  unsure (1)..(294): unsure at all n locations
catttatgtacccgtggtggtgcacacaatgttttttgtttttatncnaatttcaactaggttgtatacccccttttgagggcgttacccaatatttaagtatttttcgctaacaactaataaaaaaatccccccgatcgttgaatagaatatccgatacttcggtttaaagaattcgatatttcgtcggccggaacacgttggattcaaaagaggtccctattatatgatactcaaaataccttagtaagatagcgaaaatcatcgacgttactctttgcgattttattctta

SEQ ID NO: 168253 - DNA, 441 bp, Glycine max
catgatgttgagtcgagattgattctatttgttttgatgataacaagagatgatgaacaaagcctcatagaatgatttcaagattgagtcaaccattcaagaatcaagagaaagattcacgagaagtttcaagtttcaagttttcaagaatcaagaataatccagatccagattcaagaatcaagacaaggctcaatcaagatatgtacaaaaaactttttcaaaacattgagtagcacatgaagtttgcacaaaagcttttaccaaagagtttttactctctggtaatcgattaccagtttactgtaatcgattaccagtggcaatttttgttttcaaaaaggctttcaactgaatttacacgttccaataattctaaaatggtgaatcgattacatatattggaatcaattccagtgtgttgaacattgaattcaattc

SEQ ID NO: 168254 - DNA, 351 bp, Glycine max
  unsure (1)..(351): unsure at all n locations
tgacactcanatctctataatacgggcgttgctctgcactccattattatgttagaacgagggacacaagagatctggctattcttggaaacttacagaatgctaatcagctagaacctctacagaaattttttatggcggacataataatgatatggctgatcatgaaaaatgggaataacccactcaagcacatgttagatgcatggaaatcgcattgaaatcaattgccattagtgtcacacaagcttctttcatgtatatagttttaaaacgagcaaacattttaattctgattgcctggacctacacatagcaacgagagcattcacatattttattctgcaaaat

SEQ ID NO: 168255 - DNA, 474 bp, Glycine max
atccttaagtcacctgaggcatgcaagcttaactaagcatgcatcgaagataatagctataatcaaagccaataaggcatggttaaagatatgattagtcgaatcctatgtaaactagccgaaattaataattagacaaccaattagtggcctaacgtagtgaagcacaatcttagacaattatttcttatctttgtgtataaatatttgtttgaaaaatgttggacacacaatcaaaccaatcaatcaatacaggtatcttttccaggctatctttctttcaatttacttgtttgttagagacacaaccaaaccaatcaatcagtacacttgatctttttcgactatttttcttccaatttacttgctttctttctggctattctcaaattcatttatcttttagtcatatacatctctaaattttgtacaattcatttaaccaagattttcaagtacttggaaccatacaat

SEQ ID NO: 168256 - DNA, 437 bp, Glycine max
ttgctgtggacacagtgaatattatattttctaacacttggtgggcaagcggattgggagaggagcaacacatctgttgtatgcaaagatacaaccaaacatacgggaggcatttatgccaatctcagattttattcacaagcaattagcaaatgtggggtttcgttagtattattgtgcttgctcatttttttcctcagcatgagtccttgttctcgcttctgtataaatacggcatgcagattcattttatttatatggatcctttgtttggtttgacggatggcacgcaaattatgctttatgtaatgatactttttggattgtattataattttgtatattcagaagacaaaagcttttgtattggtttaatctgggacgtttagattatgaattggcgaggcgctgatcataattaattaattataatgaga

SEQ ID NO: 168257 - DNA, 382 bp, Glycine max
  unsure (1)..(382): unsure at all n locations
gtgttgcaaacttgtaacaactgcatttagcatcactttatctnttttccttatgtccaataatcgaataaccaaggtggttcacgtatcatatgtcattatcaatacaaacaccaatgcaccacggtgtttggttccccaatgaaccctcgtccaatgggactttctcactttccaagacaatgaaaaatagctacgtaactgttatccgcacactgtatgacttctcatccagttaaatgaaaaatgtaccgagacttcttctcagtttcatcaagagagccaaaggaaacacttcacagatctgaggtttactatctgagccacaaaatcaattgctaccaatacaatgcctcaatgaagatacacaatntatcataca

SEQ ID NO: 168258 - DNA, 345 bp, Glycine max
  unsure (1)..(345): unsure at all n locations
ttaagaatcgcagngtctgacctataacagcntctatttattttggcttctctaatctcaaggcttcatatcatggtggtcctgtgaccttaaattcgtctgacctttattgcctctattgaaaaattacacttgactacctgtgaactattgctgaatcttgcggccgcccaaattgggacaagaacccaggtgaatatttaatcttgacccaagaaccggacttattatggccactctggntcgccagctctctcttcccttgtcacacttgttcgcaagatattgctgaacatgcatctatgcgcangttgatcgtatactttactcattctctgtgtatcc

SEQ ID NO: 168259 - DNA, 363 bp, Glycine max
  unsure (1)..(363): unsure at all n locations
ttcacatccacaatgcgcgcataaacccaccatcccctgtggcccacctccaactgagctcacgtactcccacgtagcccatatcctcgtttctctcaacaccgggtccccatcaatcctcccaagcttccacaacatccaagcaaaacaaaattcaaacagcacaagctatcacagccaagcaaaacagggcaaagccagaaaactctgctcaacacaccacaagcattnttctgcacaaagccaaaattctgctgccctattttgacagcacaatatgcataagtgcagagttcgaaaatcacacttcctctcatccaatcttgcgcaatcaattcctacaagtccaaatcatgtataacc

SEQ ID NO: 168260 - DNA, 408 bp, Glycine max
  unsure (1)..(408): unsure at all n locations
tggaaattaatctatggataataaaatcaattcatttggttgatcagtcaatctaaaatattgatatggaagtaataattttaaatttaaaatcaacttgtttgatttaacagccaatctaaaattcgtttgtatctatcattcaaattaataagcatatatggaaataatcataatttcgacgatgatttattcctatttagtaggtacttaacaatcaattttaaatattacaatatcaattttaacatattattaaaacaacttcaattctgtatttatttttgccgcaatcattgtcacattattgaccgttaatttataagcatattctatacgtaatcttcgtacatttcatttcanattaatacgtactcatgaatcaattttaatattatgttacgatat

SEQ ID NO: 168261 - DNA, 396 bp, Glycine max
  unsure (1)..(396): unsure at all n locations
agcttggcttaaaaagtactagtattactattttttaattaaaaagaaactntatttagatcattcgcatcaacttattttaatactaaactttagtattattaatgagacaattttgattttatttgataaacaacatcataaatatgcaaagattaactactttattgaaagaccatataaatattcattggaagtagtacaatagataagttagacaacatataagtgagaaagattcataaattttatcttatgattttgggttaaagatagtctatgtcaagntgtgatccactcgtggtcattaactagtgaaaatctttccaatgtttattcttcatatcccattaattggtatcaaaataaatcgatggtcgaccaaggaactatgct

SEQ ID NO: 168262 - DNA, 432 bp, Glycine max
  unsure (1)..(432): unsure at all n locations
taattttactggagaatntatagttattcttctttaatggagnnttttcaaccaaccaagttttgtcctccacagaactttgaacttcagattttaattatttattttgtatatacacatataatatcatttgtaagttgttttattaacaacaaaaatacttattttacattctaaggtgatatacttatttcaaagaagtcagattcgtcataaatatccctacttacatttaataaataaaaaattgctttagacttggcgctaaaatcagtttaatagtgaaaaatctggatagttagtaagcaattttagatttaaaccataaaggaaaaaacatttggctgttaatcgggatacaaggcaaatcagtcgtgtatgttttgatagaaaaagttacaatttaacattttataaatatttgtttgacat

SEQ ID NO: 168263 - DNA, 460 bp, Glycine max
  unsure (1)..(460): unsure at all n locations
agctntgtgtggagcttcatggttaattatgaanaanagaatggcaacgtgagggagagagacggctgtctgaaattttctgttttgctgagtgaggagagagaaaagctttctggtcttaaataaaaagggttttccctttttccattattttatttatgcaaaagccacatgtctccatttgagtggagcaagaagggcccactttcccttttgactgtgacccacactcagccacaaaagtgagaaaaatctaacctttgaaatgctaaaatcctgcctcagtttgcgtgccgcttctctggttccaattcctcgcgtttctctgcgtccgtcggggccagttctcgaaagcacgcaatatatatatcacaacgctcagaataaaaccccgagcgtggttcagaggttggtttcgttacatttaagtcgcacgcaaacgatgattttaaactaatta

SEQ ID NO: 168264 - DNA, 445 bp, Glycine max
  unsure (1)..(445): unsure at all n locations
ntgtataatgagaatctatccttcaaacaagctctgtttattggcatctgaagtctgagagctctgggcagataagtctgctaaagttggaggtggggccgaagtagaagatgcacggatgccagctattggtgtaaaggaatagggaacatcagctgctctgagcttggtcttccttgtctctggaaaattaactgtttggtcattcgcattccaatagttctttatgatataagctaagtcaatggccagtcttatgttttcataggaggtaagggcatcagatccaactccccttgatctacacaaggctgtgattaaagctgggaagcctaatcgagaagggttagactgggcgatcatggtcatttgtccagagatcaaactgccaatgttcatcatgtccatccttgtgattaagccatacaccaacctagctctgtct

SEQ ID NO: 168265 - DNA, 409 bp, Glycine max
agcttcgcctttgccttttcctaaactactgtaggaatattagggtatggacgaatgggttagggtgttggggcacataaagttgggatgcaaatggttagcgtggcggtgtttgggttgggacgcaaagaagactgacggacgagaatgagtacaacataagaaggggaagggtttggggtgtcttgcgacgatgcaaaggacggtagggggtgggtttggggtgtcttgcggcgatgcaaaggacggtagggggtgggttgggagtgttgagtctttggctctaaaaaggaatttttttcatgcacgaagcaaatatggacgtgtgggaagttaaatccctattctatcgggtttgacatatacaactaacattgcttaggacattgtattactaccatattgctat

SEQ ID NO: 168266 - DNA, 453 bp, Glycine max
ggtcgaaacgaacaaccaacactcggaaagcacctcttatctcctgacgaagctgccggagcaactcggacaagattccgatgactgcacggtggtgcgtggactacacgcgtcggacaacacccgaagctgtaacggtgcgtggaggcgcgtggaagctccgatgacggagcgatttgcagggttttggtcgcacttttccgacgatcctaaccctgatgtcgccagagataatgaccgcggtggacggtggaacccgttctgatgccaacttgaagctctgagttttagtgagttgaaaagtagactcacttagcttaattttattgcctttaacacacatacatatatacacaatacaaggcataatgataagacagcttgatgggacattacaatgctgtcttctgaaacaagctaaacataaaatagaagccagcatgtatacacata

SEQ ID NO: 168267 - DNA, 418 bp, Glycine max
agcttttaaataggctagtgggtcaagcttggcttttatgtaagccgagccgagccttataaaaaagcctatgacaggtaatgagccaagctcaagccttacgtattcaactcaagccgagctcaagcctagtaaagcttggcttggcttggctcatttccacccttgtgctacattcaccttctatgtactttgccaaggtatttcttgttcccaagttgtcatctcctaaaatctatattctgttataaagcttctagagagtgaaaaactatacatgtacctttttcttcatttaaatggactttatgatttctcatttgaatatattcttcaacaccctaattaaagcttgtgtacctgaagaaattatagagattagggaaaagttagaacaaacgacttgaataattaatat

SEQ ID NO: 168268 - DNA, 439 bp, Glycine max
  unsure (1)..(439): unsure at all n locations
tgcacatcattcggatttagcttcccccgcagctctgctgaagtcttgtaatttttcttttagttcccaggtttgagatgttgctcttgctgccatcattntttcgttatggtatatatggcatagtagaaacaagattcactttgataatgtgatcatcccccttaggccaattttctctttgatgtaaactgatgatcacatgacaagaaatgtttctaaaggaactatgtcttcatccatagattacttcttcatcctaaagaatctttttgttcctagtcaccttagaaagcctcatgttatcaagtataagtgtgaggtgaagtcccacatcaagtaaaagtgaaaatgttgagcaccattataagtgaggagaagacccataaacctgagccttaaggttntgggttaaagtatggtgtcaagttccttatgt

SEQ ID NO: 168269 - DNA, 315 bp, Glycine max
agctttattataacatacttttcttttcttgtcgcgaaccttacattttaccatggctaaagccacacatacatcttgggcaaaatcttaagcatataagcattaatctaattctgtaggccttattcataccgggaaaaaaatgcatctaaggacacaatgagataataatcgtctcatatctcagtggggtacactgtatcacctagctaggggaggagaactattgcgtgacaattcaaaagtaggggacaacaacgcttatgcttctttttcagatatacatccatgatacccaccattcttattaatgat

SEQ ID NO: 168270 - DNA, 451 bp, Glycine max
  unsure (1)..(451): unsure at all n locations
agctcgtagaatggctagacatgatacatgtcaggggttggnttggntcaaggataaaagggatgccccacattatttccatgacacaaatgcaaaaatgatgatttggaaactttatgcaaaactggtcatgcatgcacctatgcggacactcaagtgtcaaatttttatggtcatgtgacgctagggctcaggattcgtttcctctattttaatcaacccaatgtctccaaaatatgttcttttatcaatttgtgcattcatccgagtccatttcgggcgtccggggaaatttcacagattcacccttcaggtgagacacattttccaaaaattggttatgatcaatgaactctttcaaagaaaagttggaaatcgtctcttttaaaagcatgctgcttttagctagacacctatatttcctttttctacttggtcttacttgccttct

SEQ ID NO: 168271 - DNA, 434 bp, Glycine max
  unsure (1)..(434): unsure at all n locations
ntgagggtgcgcagcccaccatctcttatattacagtaccgataatgtgtctaccatcacgattatcgtctccctttccattattgggggtaccacctgcgccgccagatcccttcaccttntgggcgtgttctttgaatgatccgtccccctttntgcacatgttctgtagttgcatcctatccggaaccatatcaaaattgtactgatactgcctaacaaaggcaaccattaagtccttccaagaatggactcgggaagattccaagttagtgtaccatgtaacagctacctccagaagactttcttggaaggaatgtattagcaattcctcatcttttgcgtatttcccatcttctgacaatacatctttagatggctcttgtgacaagtagccctcttgtacttgtcaacgtccacacctttgacttggg

SEQ ID NO: 168272 - DNA, 393 bp, Glycine max
  unsure (1)..(393): unsure at all n locations
atgaaagatgcagaatgtgaaccacaattgataacatacaattctcttattaattgattctgtaaatttgaaagaattcctcaagcttttgagtatctacatgagatgaagcaaagagggttgcaaccaaatgttgtaacttatagtacctaattgattcattttgcaaggcaggcatgacactggaagcaaataaattnttttgttgacatgatacatgttggtcttcaacccaatgaatttacgtatacatctctaattgatgcaaattggtaaataggtgatctcaatgaagcattttatctggaaagtgagatgcagtaggttggagttaacttaaatatcgtcacctacactgcattactggatggtctttgtgaagatggaagaatg

SEQ ID NO: 168273 - DNA, 307 bp, Glycine max
  unsure (1)..(307): unsure at all n locations
gagagaaaacgcttctgaatttctggtttggctgaatgacgagagagaaaaactctttggtcttaaataaaaagcggctttcctttctccattattttattcaagctctgccacatgtgcctatttcagtggagccaaaagggcccactttccctttttactgtgaccaacactcaggcacaaaagtgaggaaaatctgacctttgaaacgctaaaaatctgcctcggnttgtgtgtcatttctcttggttcaattcctcgcgtttctctgcgtccgtccgggccagttttccaaagtaagcaatat

SEQ ID NO: 168274 - DNA, 297 bp, Glycine max
ccatgccctctgattccacctgggaaattggccagtggagaacgtcccggcatttatgcaacaagcataatgtaagcctttacagtgttacaagcttcttagacgggcctatgctttacagctgttccttttgttgaggcttcgcgcccttcgatattgaaattataatacaccgaactatctatatacagggctggcctctactcattctccatcagttgcatgtttacttacttttctgagacgacagatccgatgacaagtcctcacgaagacttacacctgcgacccgtatat

SEQ ID NO: 168275 - DNA, 452 bp, Glycine max
  unsure (1)..(452): unsure at all n locations
ggatcttaagtcacctgcggcatgcaagctngtagcggtcacgagttagaactttattctctatgaaaccaaatttttattctgttagattatatatggtcagtataaaatagaaattccacaatttttatgctgttggatcaaatggcatcggaataaataagaagggcgggttgaattaattatgaacgtgtcttgactaattaaaaatttatccttcttaatgttactagattcaactaggcttttactactaagttaagaaagtgaagaacataaacaataacctaaccaaaagtaaaagcggcaattaaaagtacacagaggaaattaaagagtgttgagaagaagaagacaaacacaagattcatactggttcgacaacaacccgtgcctacatccagtccncaagcaaccaacagttcttgagattctttcaacctgtaaatcct

SEQ ID NO: 168276 - DNA, 388 bp, Glycine max
  unsure (1)..(388): unsure at all n locations
tattcatatntctcccaaagatagtgaatatgtgatctatggtatacaccaacaaaggccacttaatcaacaagcccaacaagtgatatcaaatgataccaacaagtcacttgtctttgattgattacttttgattatttttgcctatgattggtaacttttgattgagtttttgatgattgttctcgattgagtcttgattgtctttgatgattatttttgcttgagtttttgattatctttgaagaggtaatgtcttctaactatgagatgttgcataaagaatctattaaacttctcaaattagtttcatattntaagaaaactatttcaaatctacaanacgacattntgaaattgaaatttgaaagttcgaaattgaaacttg

SEQ ID NO: 168277 - DNA, 353 bp, Glycine max
  unsure (1)..(353): unsure at all n locations
aatgagtttcattcttcatcctagacttagattcctattcattctcttgttctagcttctctaataacttgaaattattattttgttttacttatgaagggaaactctaaaaaaattgaatatttttcattctccttcaagattacatgagttcatcaagaggtaaggggagtattttcaactcttgaaccatatgtttgttgataaacttccgtgaacatgttgctttgaaatttttatgcttgttgtcatgtcctgaatccatgtgctgagctgttntccttgagtttttttcgcaaaaatgagttctttgcatgttaaaacatagagttagccttaaatttcacgtaaat

SEQ ID NO: 168278 - DNA, 380 bp, Glycine max
ttataaagcaacattcatccagtgatgcaaatcattcatttcaccttgtcctcactcctcaccctcatgctccaaaatggtgttgcctctctatgacacatttctttacacacatatgctcatttaccaaatgcacccacagtggcaaaatccaattgtcataaaaactaccccaacaccaattccctgctaacatttgcttccttttattttcttgattaatcgttttgatactcttaattccctctacactatacattgtctgagttcgatttatatgtaactaggatttcaaaatatctgactatataagttataatctttggctttgaagtgaaatatatgggccttaaattaaatctgatgatctggggatgggg

SEQ ID NO: 168279 - DNA, 272 bp, Glycine max
ggaagcaatatagtacgcggttaagacaaccttattactgaccacaaaaccccaaacaccacatcccgtaacatcacacacgataaaacaaaaagcacactatccacgcattatacaaaaataggcacttttaaacaccaactcccatgaaaaacatacctaaatcacattgcacatgacaaccatcaaatttacagagtaaatgcaaagccacacatgcgaagaacatatcatgactaaactgaaaccagccaaacaaatatcaaacaatg

SEQ ID NO: 168280 - DNA, 423 bp, Glycine max
  unsure (1)..(423): unsure at all n locations
ctgcagcttgcaggaaggttcttattatttttctaaggaagctacctactctataaatagaagcatgtgtaacacttgttgtaactttgatgaatgaaagtcttatgagatacacttcaaagttccacttctttccctcttttattccttcaatttcgtgctccccccttctctctttcttttcctccattaaagcatcctcttcaagcttcttatccaaggcaattcttggtggagaagctccttcttccttggcttattccctagtggatggtgcctcccctctcctcttctcctttgccttccgctgcatctccatggtgaaaaatcaccattgaaggacctcattgaatctcaaagatccagcctncatangaagctcacaagcaagcttccatcaagtggtaatcagagcatcagagc

SEQ ID NO: 168281 - DNA, 361 bp, Glycine max
ttgattgatcaagcagtgagttcactaaaacactattgtttgtatggtacttaacctataagtgtgtgttgaccttttttaaaatctttaacgtattataaagaataaaataaaatgaaaattagttaggaatggactggtgaaagagcacagagagccaagagtgggattaaagagatatatggagaaagtatcatcttttctgcttgacaaactccttgtattctaaatcatctacagatgctgaggatgcgggatttgatgatgtcattgttgaggatctgtcataccccaatttcgtccgtggacgtttatttacaaccatttaaattcttgccagtcgaattgagatgcttaacac

SEQ ID NO: 168282 - DNA, 447 bp, Glycine max
  unsure (1)..(447): unsure at all n locations
gaccttaagtcacctgcggcatcaagcttattctaacctgaaaagaggatattattttgcacaaaagagaaagcttcctaacagaaattttcatgcaagtggaccttcttctagtaattctgacttgcagcagcctcctatccctcttccattcccacctagggcaattccaaacaaaaaaatggaagaagcagaaaaggagatcttggagaccttcaggaaagtagaggtgaacatacctctgctacatgccatcaagcagattccaagaacaaaaggaagctcaaaggcaatgaaaggattagcatgggcagaaatgtgtaagcattgataggtaaatttgttccttactttcctgagaaatgtaaggacccaggtactttctatataccttgcattanttggaacagtaaatttgagaatgccatgctagatctangagcatca

SEQ ID NO: 168283 - DNA, 403 bp, Glycine max
  unsure (1)..(403): unsure at all n locations
ctcaagagaggaaagagaccggncatgggtgcatgtgtttatcttaaaagaagagttanctgctagcgcaaggtccaagacgagtttggctcaacacttggatgccatggagcaaagcatgctatctatcatagggcagcacaaggaagagttgaaccactctgtgacccatgaacaaaagctagtggaggattttgcacaattgtacgccgaaaaagaagcaagagggagggtgattgatgcattgcatcaagaagcgactatgtggatggataggttcgccttgaccatgaatggaagtcaagacctcccgcgtctattagccaaagcaaaagccatggccgaagtatgtacgggccccgacgagattcatgggctaatcaattactgtcaacacatgata

SEQ ID NO: 168284 - DNA, 451 bp, Glycine max
  unsure (1)..(451): unsure at all n locations
agcttccatcagtaagtttccaaatttttcttttcaattcattctatgtacccgnggtggtccacattttgtttcatgtatttttattctcgttttcattcgctttttatacccccttttgatgtgcttaagccatttatttaagtcatttctcgcctaatctaaaaataaaataaatttccaccgatcgtttgaattgtatcatccgttaatttcggttaaaatgaattccgaccgttcggtcgtgccgtaaccacgttggaaatcaaaaaagaggtaaaataataatataataataaaaaaatgctcttttagaaaaataaagcgaaaaatcaatcggacgttttctctttgggaattctcattcttaattgaattgactaataactaaagtgaaagtaaggctaaaatcaactcgcctagtcaagctcgtccacaaaaatangggttt

SEQ ID NO: 168285 - DNA, 406 bp, Glycine max
ttgatctcagctaaatccgtcctcaagaaacgcaatgttttttggcttcttctcaaccgaaccgcgaagtaagtttggaagatttcccttcaattgaagggttcctctccgtgtgagggttcaacgcgaaactacgacggttcctggtggctactggtggttgtggtgatggaaaacaaacttgggacattggaaatggttatggaagaaggaaagagaaagaaatggcattctttccaggctacacgaatcacaaaggctgaaacactcaagtgcttctgctcttcgaaaaggaatggttctcacacgttagacgtcgtatcgccaattgcaacggtcagatcatccacacctatcgtgtgaacctccagactaaatctcgagaagatccaacacgttaccaatg

SEQ ID NO: 168286 - DNA, 379 bp, Glycine max
  unsure (1)..(379): unsure at all n locations
agcttggggccttttccttgattttggttatctcttggactttattcttcatatctagtttcacactcatattttcttcattntgatgtgtctaaaaaaacaaccttcttatcgatggttccttgactttgacagggaccatggcatccgtgttgtatgtaaagcgaaaagagctttcattggttgtcgtttggggtgaacaatcataagcctaaagtatgttggggagttcttccttccacagacccttggacttatcgagtcttgtgcacaaggctttaaggatgacctcattggttgtctcttcctgtctggggatgttcgacagaagtcacaaagtgcttgaaatttctcgcagtggccttgccttgattcactt

SEQ ID NO: 168287 - DNA, 454 bp, Glycine max
  unsure (1)..(454): unsure at all n locations
tncttgagaagctagagcttaactacacacatctctcttataactaagctcacctncttgagaagcttccttaagaaacttccttgagaagcttccttgagaagattcctaaagaagctagaacatcgctacacacacctctctaatagctaagctcacctccttgagatgagaagctagagcttaactacacacccgctataatagctaagctcacccccatgagaaaatacaagaaaatacaaaaaaagtccctactacaaagactactcaaaatgccttgaaatacaaggctaaaaccctatattactataatgaccaaaatacaaggcccaaaagaagaaaaaaatctattctaatatctacaaagaagagtggacccaaccttggcccatgggctcagaaatctatcttgacgtttatgagaaccctanggccttctttagtagctata

SEQ ID NO: 168288 - DNA, 431 bp, Glycine max
  unsure (1)..(431): unsure at all n locations
agctttaacattcttacatttaacatatttacttaagggagaataacaataatgcaattttcaacaataaaattaaatcatggtttcacataataaggcatgacaaatatgaagttaaagtaaacaaaacataaaaaaataaagaatgtattaaggaaacaaccaatgcaaagaaagaaaaaagtagttgtacttgcaacgaggttgaggtttccttcttttactattaagaagatatctcttcttcctggtagatactcttgttgtggaagggatccgagatgtacatggacatccatgagacacatgtagtcaaccccaggaaaatgaaaacaagggcaagggagaatggtatgaacttggacaacttgagtgtttcaacctacctttaaacacatngcatgaagtaataagaagaaactcaacaacat

SEQ ID NO: 168289 - DNA, 430 bp, Glycine max
taactatttattgagttacttgaaatttgaggtgaatttgttttcccaaatttaaaaaagaaatattttacgttctcaaattgaaacaaaagtatgttcttagttaataaacactaaatttaatggactaaaataattttctcaaaactggctctagtttttaagaattaaatttgagtaattaaaattgtattttatcaaatttaaggaactatttaaaaataaataaattgaggaacttatactaaattcatctcagaatttaagaattaaaaatataattaagtcaagagtctgatttgtgtagacttgaaaagattctattgaatattctatcattatgaatgggtgtcaaataattatcttatctataacacaatcatatttaataaatattaattaataacacatttttcttgttttatacact

SEQ ID NO: 168290 - DNA, 397 bp, Glycine max
agcttgcttctacataataatatattgttattcaaaggctaaaaacaaacaacggaggaaacacataagaagaaagaaaacacaccggattagataacacctcatttcaacagccaaagctctaataccaaatgataagagaacacttagggttgtcttggaaagaggtataaaaagaaaggaacttgaccctaacaacgactttccagtagaaccaacactatcagttcttaacccaagaacaaagaaaaggttctcagtagagaaactctcaaatttcattaatcttcttattctgccaacaaagtatttaaagagtctatttatactcctactgataaccctaattaggcccaagacccaatagttaatctaatattaaaagactttaaaataa

SEQ ID NO: 168291 - DNA, 406 bp, Glycine max
tgaaagagcccgggtagtcaaagagaagttcaagtccatatccatcaaagtctgaagagagtatgatgaactaagggacgttaatatggccaccgatgaagccttggaatgataaaccaagaaggcccgaaaggaagaacacgtgccaccaaagttttgaggggctttatatggcagcaatagtaagctcaagctccgaagaggtgaaaggaatcatcacgggtcaaaggcatgatcttgaaggacgagctaaaggttttccttatgtcgaaaagaaatttgtcccaacagttaagcgagactgaagggaatatgtgggccatcatcgataagtgcaaagagaagctcaatctagcggcgactcacgagcaaaggctagaggatgagtacgccaagatatcagcag

SEQ ID NO: 168292 - DNA, 463 bp, Glycine max
  unsure (1)..(463): unsure at all n locations
agcttcttttatccaccacttgttatcctcaaaccaatgggcaaacagaggtagtgaatcaaacactctcacaactcctaaggtgtttcatcaaaggtaatttgaaaacttgggaagagtgattacctcatgttgaatttgcctataatagggtaaccaactctaccacttctttttctccttttgaggttgtttatggttttaatcctttatctcctaatgatttaactcccttacctaatgattcttctattttgagtaaggatgggcttgttagaggcacttttgttaagggtcttcatgaaagggtgagaaatcaaattaagaagaagatggagcaacatgcacatcaagcaagcaaagggaaaaggtccatggtatttgaacccagagattgggtntgggtacatctaaggaaggataggtttccttcacaaaaatctaaactccaacctaggggtga

SEQ ID NO: 168293 - DNA, 393 bp, Glycine max
  unsure (1)..(393): unsure at all n locations
actcaagctcgaaggtgggagaagatgaatggagggagaacgagagaatgagttctaaatcttgcgtctcaaatgaggtctgaactttgaagtgtaattctcaaatgatcaaagttgaaaaaatacacacacaaagcctctatttatagcctaagncctacacacaattggatggaaatttgaatttctatctcaatctcacttgaatttgaatttgaatgggtggagccaaaatttcactaattattattagcgaattttagctatggttcagctcactaatccaagatcaagttcaagattctccactaagcgcggctaggtgtcatgaggcatgtaaaacatgaaagacatgcacaatgcatgactatatgatgtggcaatacgatgtac

SEQ ID NO: 168294 - DNA, 298 bp, Glycine max
aaaaatgcacccatatacaagcaaggcagcttcattacctagattattcacacgcacctccaaggcgtatttgttatttacatcacacacccctccctggccgaatttacatacatgcatacctcaaacatcttgggggaccaaaaactgcacatgcgctcatcttgggatttcccatacgcatacatatacaaactgcacgatgaatcctgactacctacacaaaaaggtgccacaattcatgcttttctatcaaggttctggtacccaaagccacatgcaaattcaagcatatttt

SEQ ID NO: 168295 - DNA, 455 bp, Glycine max
  unsure (1)..(455): unsure at all n locations
ggacctcaagtcaccgcggctgcagctggatagggctggactctggttatttttgccccatccccactcaagtcagaattcttgcactatgtaattctttttacgtttaattgtaaatttagctcttatttatcttaaattttaattttgatctttttataatttaattcccgaatttaatctctaatttcttaccatcttattattttagtcctcacttttaaaattggacattgacgataacgtgtcagtatagatcgtcacatatcgtatttttattggatgttgactgtcacgtgttccatttntattggacgttgacgttaaatatgtacacgacattaacatctaataaaagcgttccatgtgatggtcaatgttcaataaaagtgcgatgtgtgacgatcaacattgacaagttatagttaccgttcattcttaattggagactaaat

SEQ ID NO: 168296 - DNA, 440 bp, Glycine max
aaataaagtactcataatgacgaattttttcttgatatatacctgagcttttcaatctatgatagagttaaaaataaataaactcagctatgtgtcatatcaagattggtccaaactatagattcataatgatcctagatcatataataatttttccatcattacaactacgtaatatgatattgaaaggctgaagtattgaacacaaaccttaatagagggatgaaaagtggatgaggtatccgaagttgctatgtttgtcactgagggtacaccaatagactgatttgagatgctgcattgctttggaaaactaaaagcatgccgcactaagctttcatcatttgaagatgacgcaattgcactggtagaattatgacatacattactcccatcaacgctcaatccagcctgagacattatcatacgtcttagtcctc

SEQ ID NO: 168297 - DNA, 411 bp, Glycine max
  unsure (1)..(411): unsure at all n locations
ggatccttgagtcacctgcggcatgcaagctngccgctggagctgacccattaactgccctaactcctttagactggtggttcctaggctcttgaccttgacttgatagaatctccttttaagtgaaggcatttgacttgatcccatgttttactaaagtgaacaaaaatcggtgcgaatcaaaactccgacatctatcatgggtggaatggatgaatgcatgaagaaatgcatatgacacagatgcaatttatgaatacgggagcccgggaaattgtctccgtatttaagaaggtggcacggacccttcgttggtttgccaaagagaggggatcaaaacagaatccgtacgtgatgcatatgcgaaaggcgcaacacgggaatgtacagtatgacaatattcacaaaata

SEQ ID NO: 168298 - DNA, 429 bp, Glycine max
  unsure (1)..(429): unsure at all n locations
gccatggaagctcctaatatgtcccacactntttggtgtgggtcattcttggatggccttgattttctcagggtccacttggaccccatttctaccaactacaaaccctaagtaaactatattatctaaacaaaatgtacacttctctatatttgcatagagggtgtttttcctaaggaaagaacttgcctgagatgtcctaagtgatcatctaggctcctactgtacactaaaatatcatcaaaataaacaactacaaatctacctatgaaatcccttaagacatgatgcataagcctcataaaggtgcttggtgcattagtgagcccaaaaggcatcactagccattcatacaaaccaaacttggtcttgaaaacaattntccactcatcaccctctttcatcctgatttgttgataaccactttta

SEQ ID NO: 168299 - DNA, 436 bp, Glycine max
  unsure (1)..(436): unsure at all n locations
gctnntataattaaaagtgcaattaaatttgattgatgtgttgtaaacttgtaacaattgcatttagcattactttatcttttttctctatgtccaataattgaataaccaagcgggttcacgtatcatatgtcattatcaatacaaacaccaatgcaccagtgtgtttggtttcccaatgaaccctcgttcaatgggatgttctcacttttcaagacaatgaaaaatagttacgtaactgttatccgcacactgtatgactttctatccacgtaaatgaaaaatgtaacgagacttcttctcagttctcatcaagagagccaaaggaaacacttcacagagttgagggttactatctgagcatcaaaatcaattgtttccaatacaatgcctcaatgaagatacacacattatcatacatcataagctgaatcac

SEQ ID NO: 168300 - DNA, 322 bp, Glycine max
  unsure (1)..(322): unsure at all n locations
tatacactctcaagcttntaagaatcgcagggtccgacctataacattgtctaatcagcatggctactctaatctcaagttctcatatcatgttgttcctgtgaccttaaattggtatgatttttattgcctctattgacaaattacacctgaatacttgtgaaatattgctgaatcttgcaggcggtcgaaatacggaaatgaagcaaggtgaaatatgaactcgaccaaagaactggacttattatggacatcatggttgcctagctttattttcccttgttacacttgttgacaggatatcgctgaacatgcatctatg

SEQ ID NO: 168301 - DNA, 371 bp, Glycine max
agcttgaatgggcatcaagacttaattcattttcaataaaagttgctttggaggtataaggatggagagaagggacatacaaaaagtttgtggatttgttgaattgcaaggatatggattttccatttgtatatcttgatatacctataggtgccaatcctagaagggtggaaacttggaaaaccaattgcagacaaagtgaagaaaaaagtattattgtggaagcacacactactatcctttgtcgggaggatttgcctcatcagtttgatattatcttctcttccattattcttttatcttttttcaaaatgccaaaataggtggtggctctggtttggttggatggttggttagagggagagtgtttg

SEQ ID NO: 168302 - DNA, 441 bp, Glycine max
  unsure (1)..(441): unsure at all n locations
acagtctctgcgtgtcaacgggctcacttgtctctggttgacaaaaggtgccgataaccataaggtgtgtccgcatgctaccgggcccttgggtcacgatagcacaaatgacccccnnnngcggtctcggtcggttgtcgctgacatcttccggaagggtgcagatgaccacattggtctctacgtgtcaacgggctcgcttgcctctggttgaaaaaaggtgccgataaccataaggtgtgtccacgtgctaccggatccttggatcacgatagcagaaatgatgcttttttgcggtctcggccggaagacactgacatctccgagaaggtgcagatgacctcattggtctatgtgtgccaacgggctcgcttacctctgtgtgacaaacagtgtggataaccatatggtgtgtgtgcatgctacacaaccttgggtcac

SEQ ID NO: 168303 - DNA, 440 bp, Glycine max
agctctcttcttattttatattatcaaattgatatatcaggttaacaacattgagttatacagtttataagagataaaaaatcataagttatcgtcattttaaagaaaatcaaatagatacttgtttttttgtacaaaaaccaaatagatacttgataaagaaagtatctggaggtcattttctaagtttaaaattgcattattttatccagagaaggggtttattttaggtgtggagaaatattctcatgattattattcttaaaaatataattatgatatgtatgactattttttttttaaaaaatctgtgtagttagcaattcaaaatcttgaaaataattaaaatgtgaggaaatatattcgatttatttagaccaaatgaacaaatgtatggttgacactgaaagtctaatcaaaatactattgttaatattcaa

SEQ ID NO: 168304 - DNA, 467 bp, Glycine max
  unsure (1)..(467): unsure at all n locations
tctntgtctgcatctgacatttagagtacaaagtgctctttatgaatataagagaggatactggccagagtctgcacttacagagcagctatccagctatacatcagggacagctgatccactgcatttgcagccatcctaatgcatctattatcctcaagtgaaaaatctggacttgatgccataaatgaacaatagcaactccttgatgttaacaagcacattacctcttctgtggtaaatgacattgctgaacgaaaattcgggtatgagctggagaacgaacttgaaaaacagaattatatcctgaacatcccggcgcacgtagaagaggcagctgtataaaaagagataactgaagaagagaatcagcttattgatgctgcacaacgcagcaattcaatcacaccatctcacaatgtacatagctatccgttttatccccccacgtaaatcatgcatattat

SEQ ID NO: 168305 - DNA, 436 bp, Glycine max
agcttgtaatcgattacacacatactgtatttgattaccagaggagtttttcagaaaacattctcaacagtcacatctttttgtgtggttcttgaatggctatcataggcctatatatatgtgacttgagacacgaatttgacaagagttttgaagaacaaaaaggtcttatcctcttaacaagcaaaattgttttatcctcttacaaattccttggccaaaacacttgttatttaataaggaattatttgagtgctcaaattgttcaatctatctctttcaagagagatttcttcttttcttcttctttattctgaaaagggattaagagaccgagggtctcttcttgtgaaagaattctaaacacacaggaacggttgtccttgtgtgtttagaacttgtaaaggaattacaacattttgcttgggactggact

SEQ ID NO: 168306 - DNA, 438 bp, Glycine max
tgcctaattaacctgaaattgagagacaattattattattctcactaaaatgaaaatactaagtatctattacctatacttaatagaaaatacttataacactacaaaataaccataaattgaaggagtttgatacaatttacacaagttttatacacaaaagttagtcgttttcaccgactaacattgttgcaccataaagcccctcagaacttgttccggccgtgttcttccttccaggccctcttggtttcctgttccaaggcttcggcggtggccatgttgatgtccttcagttcatcatactcctttcggactttgatggctggtgatttgaacttttccttgactgcttacgctttctcaagctccgcctttatggcttgtacctcttcactctcttccggagcttcggcctcttcctctcttgcagccctt

SEQ ID NO: 168307 - DNA, 411 bp, Glycine max
agctttgaacaatatacttgcccttcattttactgtctctgcgcttggcggtcacgctcaacaaagtactttcgacacctactgtacgttgatttgaccaatgctgttatgggaatgttgcgacaatccttcaaaaccttattgatacattctgagaggttggttgtcatgtggccatatcgacatccttctctatcataagccatcatccatttttcctttgaaattcgatcaatccatgtggctatggctggactcacttcacgaaatttttctaaattctgatcaaaaatgtgcttgcaaggagtgtacgctgcataaaattagttatgaataacatggataagtatatatgaaagggtaataaatgggaccatcacatatgatatcttacccaattcttcaacatgt

SEQ ID NO: 168308 - DNA, 403 bp, Glycine max
  unsure (1)..(403): unsure at all n locations
agcttgacagagagcagctcttgttacttatggtatctgcaaagatagaagaaagtcagaaaactaccttagttataatacaatacaactgtgaaaaaataagaggggaagcgagcacgtaatcttaattcttgatagccccattctaaatgtttgaacaaattccttttatcttgttctctaatttaagttatttggctacaggaggactgaagttgcttgcatagtcattagtcacatgagacataatattacaactgaattgaataattcgtcagtattaagcagacaactttatggacaagttcaaagcaattgtagatactaaattttgataatggatgaagacaaaggcaaacaggaataaatncacttgtaaagaatactaatatgctaagaatta

SEQ ID NO: 168309 - DNA, 357 bp, Glycine max
  unsure (1)..(357): unsure at all n locations
tgtccgcanatgcctcacggtgaatataattgctgagatggtacaacacanacccgaaagncccaaagaaagcaatgaatggaagaatcacggtgtacaaaagagcttgctttgacaaaacattggacaactctgtgtacaacaacatgaacccaacggccatgggaaggttcactcacgttttgagaaagggtataatctccgcactgctccctctggcagttataaccagaacatcctttgtgtctctcagaatcgtgtaattgaacaggatgcagaagaacatcaaaccgagagggatgattttcttcaaggtggtgatctcgattcccaaaaagttggcgttttcggcgacct

SEQ ID NO: 168310 - DNA, 437 bp, Glycine max
  unsure (1)..(437): unsure at all n locations
agcttgcanaacanaagatntggatggagttttatatctttcagctttttttaatatttatctttttaaaccgagtcgtggtgagtttacggcaatgttgcggctttaattttgtaggtctagctatgatctctccatgttcacggctatccttctccttttggtttaggtactcgcattctgcaagcacatgtcatcgcggcttatacatgtgatattcttttttctttaaaatttaacatgaattacttattctattgcgattaatttcatagcttacatgatcgacatctcgggtacagaaaaattcgtgttattccccagttctggttcttttaccatattaataaagaaagagagaatttgataaacatctgaacattattgtcttaaatacgtatgtggatacgagaaaagatatggcagtgtttactact

SEQ ID NO: 168311 - DNA, 427 bp, Glycine max
tccatctgaatcctctccacaaattgtagatgagacactcttggcagaacttgctggagacaggctctcatctgaagcttctccaaaaattgctgaagagacaccactggcagaacatgttggagacaagctaccatctcaattctcttcagatattgttgaagacacaccactggcagaacatgctggagacaagctaccatctgaattctcttcacaaattgttgaagagacaccactggcagaacatgttggagacaaccaaccatctgcatcctcttcaaaaattgatgaagagacaccaccggcagaacatgtgacagacaactctgaatcctcttctaaaactggtgaagagtcaccactggccgaacatgttgtcgacaagctaccctctgaatcactacccaaattgctgatgagatgc

SEQ ID NO: 168312 - DNA, 448 bp, Glycine max
  unsure (1)..(448): unsure at all n locations
agctntgaacattntcaaaaaagtataatctaattcggctttcaatgggacaaattgaactcattataaaaaaatcaaggatccaattaaaacttttaaaaacaaagggaccaaattgaacataataaatcaaggaatcaaataaacctaaataataaattaagggactaaattgaaaatcttaaaaataaaaaaatgaaattaaacttaaaaattaattaaaggaaaaaataataatttaagcagattttttcaaaaaaatctaacacaacgaatatatgtttctatagtgttaattttttatgaaaaaaataacacaatagaaacttattntcattttctattgtaaaccaattaatacaaaacataactttgttttgtattgtctcggcacaccaataaaatgaanacatatntccattgtgtattatgaataatgaaaacatgt

SEQ ID NO: 168313 - DNA, 407 bp, Glycine max
ctcttgatggtgtgtgatgggttgcaatttgcatcatgtagcttgatgtagagcccccacaaacggcttctgtaagttcactgggaaagaagacaatgagagaccagcccgttaagacaaagaatcccggagcagtcaaaatcagtccatggacgctggcacggctgaatgcacaagaggtttccaatgctgctgcagaagcaagaaaaaaatcaaagattcttcagcccgtgacaaggcataataacgagccattcaggctggagccagatcgcaactctggcagcagtggccggcgaatgagccctatgattgagaccaacagaagacggcccggtcaacggattcgcctgcttggcgacttgcctatggaggccataccaaaattctctggcagcaacattgac

SEQ ID NO: 168314 - DNA, 210 bp, Glycine max
ttccacataaggcatggaggatgggcagcttaccaagatatcttcctcgcctgacacgatgaccaagtgcccctccactacgaatttcagcttttggtggagtgtagaaggcacaactcccactgagtgaattcacgggcgccccaacatgcagctgttgggggggttaatctccattattcggacagtgacttgacacgtgcgagggcc

SEQ ID NO: 168315 - DNA, 272 bp, Glycine max
  unsure (1)..(272): unsure at all n locations
agctntatagtgcgggtctgggagactattgtttagtggtcgcgatatgtgaagatgatgttccaagaactctggatttggtccgaccatgccctcctgatttccacctgggaaattggcgagtggaggaaccccccggcatttacgccacgagcataatgtaaacctttacggctttaaaagctctatacttgggcctaggctttagagatttcatctctgtaaggctttgtgtcttttgcttttgaatttataatacaaggatctttctt

SEQ ID NO: 168316 - DNA, 398 bp, Glycine max
  unsure (1)..(398): unsure at all n locations
gcttgtgcaacctcagagggttntttaatgttgaatgatttataggcagacagaccaatgtcattgaaagaaaaactgcacaataattttaaaggatcaacctagcactaaaagtagcactagtaacagtttttcatttgtgcgaagtcatacaattcctagaacttgatggaaatcaaattttctatcaaattgagactggtttgattgcaaattctaataataaactcttatcagatgcaaagttgttgaatttttgttaaaacttatgctttccctacaacagtggtgaaaaataatagttctagtgccaagagccttgtggggtacttatatggtggactcaacaccccgtctaatgtacctattttgcataaacactacatggacaacgtact

SEQ ID NO: 168317 - DNA, 433 bp, Glycine max
  unsure (1)..(433): unsure at all n locations
atgagttatctcaactcttgaagctaaaatggaatctgctatactcatccagagaagctgccaggtcaaatactatatatatatatatatatatatatatatctatatatattcaactctcaaatcctctatgcgtgaagtgtgtaacacctctttaatatactctctntgatattcttttattatacgtgcatttatatcttcaatcatttaataaaaagtagtgtcttataagaatatatttcttcccgctcattcaacgcaattcttttcttaatttttgttgaatcttaactctcctatgttagtatcttttatgaccacaacccttataatatatgctcaataagttacatttaactctcgtgataactaatctcttataaaaatactctcacaagatccctttcctacaacacttacttatcactga

SEQ ID NO: 168318 - DNA, 421 bp, Glycine max
  unsure (1)..(421): unsure at all n locations
agctnggaatggatgacgtgggtaccacttattatgagagaaaaagatngttgatcttcaagatcttgtgagttntattggtacggcgttatgtagatgtaagcgataccatctctggataccaatttgccgcgtgtatggcaaagtgttttgatctctgcttgtggccagctttcagttttaaatttactttgaagctgcagaaaatgtgaatcccataaccattactaaaccaagaacgtgattcatataaattattcattaacttctctggtctttttctaatcattcggtgtagtttattaattattagagcacgatcttgcgtgataaaatngaacaagactaagaaggaatacatagatcggacatgtatgttgcttattaatctagtgtaacgatgaaaatcttacttcataag

SEQ ID NO: 168319 - DNA, 433 bp, Glycine max
  unsure (1)..(433): unsure at all n locations
cattagcgcctcacatgttcacccgatactcatcatttatcatnntcctgaactctttggccggtttctcatcaagaattagaccacaagcaacattgcacagctgtggttctctcattttaaactggaagaatcaaaatgttccaatattttagtagtgaaacataatacactaaaggtagaaagctggaacctgtctgaaagatttaaaccaaccacatagggagagctttcaatgcggtcaccccggagaacttcccctagatcttctgcactgtcaaaaatgtgtttacgccgacaataaggcagtgaatagtatgagtaaggaagctgtgtcttcgtggaagccagtttgttcactttcaccctcaacggatctccctgtcccaatgaacacaaaataataaacaaatgttaccaattacgaaaagtc

SEQ ID NO: 168320 - DNA, 415 bp, Glycine max
  unsure (1)..(415): unsure at all n locations
ctgcagcttgtttcaggactttcagaatctgtcttatgtttattaagtttaaatgttggtgagcacgaagttctcaatttgaattcaaggcttcaggattttgatctcaataatcatgattccagttgcataattctggagaaagatagtaagttgatgcactataaagttaataatgtcaaacagtggtgctcatcatcaggtgaaggaatttctttaccagaacatatgcagtttaagacatgcacaaatgatgattatgaaaaaggaagaatttctgctatgcacctaatgaaagataagttttgctctatctatgaccaatctgatacacgttctgtatttgatgatttgaacctccccactccacaagccagggtaaatcaggaacatcaganaaattacattgaacaat

SEQ ID NO: 168321 - DNA, 205 bp, Glycine max
tatagaactctcaagcttaacacttcacagctctaagcgatctgaagatgattgcttgatatacaccatgtgaatgctcaatacccaatgtgcccaaggacacaccgtgtactatcctcagtcttacatactgatgcttctcatcatagcttttcatggatagatatcttttcatcaactatggatcttctaatgtcgacagcat

SEQ ID NO: 168322 - DNA, 365 bp, Glycine max
  unsure (1)..(365): unsure at all n locations
agcttgctaatgtaccctcaattattgattttatgccttactgcatgcttctgttgattgccaaaaaaaacttgttgtggactggattccanctagcaaccttgaaagtgcaactgccaaagaggtaacatcaattatgaataattaattatattacaagcatgttttatttattatcgttcataatagcaatttcagctccatttatatgttattgttcaatgttgcagaatcctgatgcttttaaggcagcatggaagttattaaaggtatcattcacagtcatgaaattaaccatttgttatattatcaatttccctcattttggttttgagaactatctccagtttgttatctaactaatc

SEQ ID NO: 168323 - DNA, 444 bp, Glycine max
  unsure (1)..(444): unsure at all n locations
tatgctgcannatattacaatagacctcgtcaacctcattagtcaaatcaaccacagcagagcaattatgacctcttcagcaacaaatacaaccctggatggaggaatcaccctaacctcagatggtccagccctcagcaacaacaacagcagcctgctccttccttccaaaatgctgttggcccaagcagaccatacattccttcaccaatccaacaacagcaacaaccccagaaacagccaacagttgaggcccctccacaaccttccctcgaagaacttgtgaggcaaatgactatgcagaacatgcagtttcagcaagagaccaaagcctccattcagagcttaaccaatcagatgggacaattagctactcaattgaatcaacaacagtcccagaattctgacaagctgccttctcaagcttgtcacatacccaaaaat

SEQ ID NO: 168324 - DNA, 461 bp, Glycine max
  unsure (1)..(461): unsure at all n locations
agctngtagctaacaaaaagatgaatttgtaatatcaaactatcttgaaattttatggattaaccgttgtataattattacattaaatatatgattattaatatcaattatgtaaataaaatatatgatatgttaattaatggatattagtttttgcctgatcttacaagttttccaatgatgggtagggtctcactcgatgtccacacgaaggatctctgctctcgtatggtgttttaaaattgttgtctcattagataatttttattatagctcacaacattgtgtgaaaactctatccaccaaacagagagtagtatttctctcatttagtggttgggattcaatcgagttattaaagacgaatttcatctcttctttaaatctacctcactaactatattatggntgtnttgcgcttgaataacattaaaattcttataaaactaatctctaaacca

SEQ ID NO: 168325 - DNA, 421 bp, Glycine max
  unsure (1)..(421): unsure at all n locations
cggacactaaaaactcagcttaaaagctttctatagtctgactgtgacctttttatcttatanagctttttaaaaaacttgaacttgacctttatagtataaaagttaagtcaagccgagccgagccttagataggtcgagccataagcccttgataagcgactcgactcatttttatccctagctaacatgccgtccaaaagcgaaataaaataaagagagaaatactcaagcctaataactattacgcgaatattgtcgaaaataaaattgatgacaaattctttaacattttttcctcactcactctttatgtgagatttacttttttttttacaatattatgtgagttttactaatgacttaatctttggttatttgataaaactcacttcaaacatattccatcattaaatatata

SEQ ID NO: 168326 - DNA, 288 bp, Glycine max
cagcttatcagccttaagctgttatatatctgtggaacaatcgcgtcatgatacagttaatattcactcggaagatgcctaactatatcctttattctgcgtctcctctcattctatctgatgcatcattggcttcattgcttcagtactgaatccccatattgcggggttgtgtatcttaacgcgtgtttctcacctattctgtcactaatctggtttagtttaaagtcaatttgatacgttcaagctttacaaatgatattccacatggttgcgtatctaatgcgt

SEQ ID NO: 168327 - DNA, 419 bp, Glycine max
tcacaatagaaaactaaccggtcgatgaacgacgaactatttagaacggatgaacaacgatcccgacaatgttatggaagtgcctcaaccttgatctttcttcttctttcttcttcttctcactaatttcactcaaatcttttttatttcaagtgctggacccttccttcaacccccctcacccctatctataggaaataaagggtggaggttgcacagcaactcgcccaggcaagctgcttacttcctcctaaagtaacttgctcgcccaagtgagctggctacttcatctctaaattttctagtgggcccaggggctggaaaatgtccccaaagtgaccattttgcccctcttttgaacatattgcgcatttccttctgaaacgtcacaaaaccctatggattgcgtggccattaat

SEQ ID NO: 168328 - DNA, 451 bp, Glycine max
agcttttacaatacacaatctcattatatataatattataaaactaagcttctacaaatcttaaaagataaaactaatatgtcacgcggatttagttcacttgattgagcacacttgattgagcataatgcatgagttaataaatctcctaacattatatctgattcttaccgataaaaaaaagataaaatggataaaattagcactaatttattttctcttttatcttttacattcataagtaaaaaaattacttagtgggccaattgctcccataactagaaacatggattggctcctaattaacatattataactataattgttcttaacatacgtgtgtatgtgtgtgtgcgcttgcgtatgtgcgtgtatatgtactccggtatatgtcctatactcaaacatgacccaacatgatctctactaaggaggtatgtgataaaatggt

SEQ ID NO: 168329 - DNA, 436 bp, Glycine max
ctcgaaaatatttatgatccaggagaatggacaactatttattaaaaatctacagctttaatgatagaaaaagatgcaattaggtttaacaatttccaattttcaaaagataaaaatagtagaaattttaattcatctttttatgaaacgatgttgcccaatggagagaaatatgataggaaatgactactttactttacagatctagataaagcttattgtttttgttgtaagctattttgctcaagcggtattagtcaaatagtacacgaaggaactagtgatcgaaaaaatcttacttccaaactcaaaagtcatgagacaagtcatgatccgcaataatatgaaaagatggattgaactggacaaaaagattataattaacgaaaaaatactatcgatcaaaattatcaaaacaattaataagaaaagatca

SEQ ID NO: 168330 - DNA, 335 bp, Glycine max
  unsure (1)..(335): unsure at all n locations
agctnttatccacaaagatcgcttgaatttgttcaagggccaacgccttaacggtatttttacttttatcggntaaaatgatcctttcaaagcttaaaatcaaccctttgtgtaactttcttgctttttaagaactatgtaggtttgagttcctcacccgccttgaggatatgtaggagcaagagccacgctcttgtcaacccccaaaaaataaaaaaacataaaaagggaaaataaataaatactgaagtcatgatttcgcacacttgattaaaggttgtcatccattgtgacgaacacatggggtgctaataccttccctgcacgtaaacaac

SEQ ID NO: 168331 - DNA, 478 bp, Glycine max
  unsure (1)..(478): unsure at all n locations
gacctataaaactaagcttttatccaggctcatcttggtggtgaagctccttcttttatggtttattccctagtggatggcgcctcctctcccctcttctcctttgtcttccgctgcatctccatggtggaaaaccaccattaaaggacctcattgaagctcaaagatccagcctccatgaagctccacaagcaagtttccatcagatatagtttattcagagttgagaccaaagagtacttgtgcggtgggctggtggtggtgtgcgagcaggggagtgcacgagtggcggcatggtgagaagcaagatgccagtaccggtgcgtgaacaacagtatagtgtgatgtgtgcggtaacggtctgctagtggtggtgtgtaaccgacaaacgatagtgcgtgaccgtgagaganaatgagtgaagtaaagttttcatgacatgagtgagtggtgtgagagagaagctacatgagaactc

SEQ ID NO: 168332 - DNA, 438 bp, Glycine max
  unsure (1)..(438): unsure at all n locations
agcttcagactaaagtaacacataatctatgtatccaaaacccctcaatntaatggattttcaaggtttgagaagtgaaattgagaatggggtaaatttggagcaaactctcacctcacacaagtctataacatcaatttaaacttgttcaaactggatttacacctaaaattccaccgaaccaaaatttgactcctcaacacccaattttaccctagaaatggctctttgttcactttggtcatttgtttttctctcttgcacagcccaagcttcctcataagtcctaaatgacatttcaaactaggattaactcactctaacctccaaataccactaaatccagatttggcctcccaactctcaaaaactcactctttttccactcataacaccatattctcactttctaaccctaggttaactctacccttcatc

SEQ ID NO: 168333 - DNA, 447 bp, Glycine max
  unsure (1)..(447): unsure at all n locations
tagcgctgaacaaaaattctcanaaccttaatgtgtgaacactagtcttgcttagcgcatagacacgcttagcgggctcatcacttacgttcatcagcaaggatgaatgcgcttagcgcgacatggtccacttagcgcgttcatctggatatncataattttaacaactgcaatgaacaggctaagcgcacaggcacgcttagcgcgttcatcgcgatttccagatagaaccacaggggtcttcacccctttcagccacaatgcccctaatgggcttctaagttacctaaaatcctacatagactaaccctaaaactaataaccttaacctaacagcatacaactaagaaaacaaaaagtcatctatcctaacggttgaagaatgaaaaataanaatggaaatatgctacagtacttggatcgttcttgaaatgaacaaccaagatg

SEQ ID NO: 168334 - DNA, 321 bp, Glycine max
  unsure (1)..(321): unsure at all n locations
agnctgctaaaggtagggaaataaagtcatgatactttgaagaagtgaaatgtgttaagaaaggtctacgtgacaaaagtattagttggcttacaaaactgtttaacaagattacgaggtctaagaaaattctgtacaaggggataaagcccatgaatcatactatgaagttattggtaagggcaattgagcaaagattaatacaagatatacattactaaaatacaatttaattttatgccaaggagttgaaccatggagtgatatactataatgtttccagctctggttggtatgagtgataagggatcttcgctctta

SEQ ID NO: 168335 - DNA, 448 bp, Glycine max
  unsure (1)..(448): unsure at all n locations
tnaacaaccacattcatggctacacactataataggagtttattaatcatgcatttacacatcaagagagacacattcattcaacgcatatatacagttcaaaaggctctcacaacaccaatacacacatcaagagagagataagcttattaacaacatacacgtaagaagataaaggctcattaacgcattatcaatcaatatcaagactacttgcatcacctaacggcttgccataatgtcctaccacacttcacgaattatacagattgtcagtctcatagctcgcgactcagcagtagaattatgatatagcatacattaaggatacatggcatattatgagcatcaattagtctcattaaatcatgtgaaaaggaaaaataagcaacaatctaacataaacaacaaaataatcacaagaaatcacacagagtatacaacagaa

SEQ ID NO: 168336 - DNA, 395 bp, Glycine max
  unsure (1)..(395): unsure at all n locations
gcaagcttctagcccaagggacttaccttgaattaattcctttgatagcccttttgagccttgtttccctttccttgttttgaagctcactacaagccttaagtgaaaaaccatgatatcaccatatccttaaggaattttggagctttggaattgctttgggaataagtgtgggggggttttgtttcattggacaattcgttttgttggctatgcttcatgatgtatcttgggccatacttgatgtacattgtatattggttaaatgttggacatgctgaatgaaatgttgtttctcaaaggctatagagtaaaaacaaaaaaatcgaaaaanaaaaagaaacgcaataaagttgagtgataagatcttaaatggcacaagaatgatgaaactc

SEQ ID NO: 168337 - DNA, 457 bp, Glycine max
  unsure (1)..(457): unsure at all n locations
agcttctaaggaaggacctcactactctcttctttatntggagngtgttgacgcaatcctccctaggaagggactagtcactagagccatgagcaagaggctccaagaggattgggctacagctactgaagaaggccctagggttctcatgaacctcaggatagatttctgagctcatgggccaagtttgggcccaattctctttgtacatattagactaggatatcattatatttggtccttgtatttagggctccatattgtaggtagggtacccaagaaatataggatttttcagcccttgtcatttacggcacctagactacgttttgtattaggggtagttttgtcatttcacatgcactaagtgaatatttgattgtgtggttggaataaattaattgaatgggagaacccaatccattaaatttaaggggaggaagcattgctactaccc

SEQ ID NO: 168338 - DNA, 416 bp, Glycine max
  unsure (1)..(416): unsure at all n locations
agctcgccctttttcaattccatgggaaatatttttctggaatnggatcccttaaaaccctaacatggaatcagaatcagaggtccaccagagcggggatctttcactgaaaccgtgaactcagaccacaatcgacaactagtcaacaattgttgactagaggtagctttggtaaagtaacgtcttaataattcggagggtaaacgtcgtcgttgcgttgccactaatgttatgttagcccaatcaatagtcgagtgctgctacgcgcacccaatagtagatgcaaaaatatctttgtattcctggcttaattattctaaaagaaaaaaacagttcatctctctccctccctccctcccgcgttggccttcttcttcctcgagaacccttcaccatgtttcttcttttcgctgcat

SEQ ID NO: 168339 - DNA, 312 bp, Glycine max
  unsure (1)..(312): unsure at all n locations
accctatgaagactatcccggataacaccatggggaacgagatacccactctggcctcctgctccaccttaaagatccatccccgaatgaactatcccagcccgaacatatgaccgccatattccggcctcacccgcacccgtaaaagaatctgctccctttgccgaagataagggaaagattgacgcgcttgaagagaggttacgagcactcgacggcctcggtcattacccattctcgcgattggcagacttatgtcttcgtgccaanatccgcatccctcccaaattcaaagcaccacactttgataag

SEQ ID NO: 168340 - DNA, 210 bp, Glycine max
  unsure (1)..(210): unsure at all n locations
ccctctcgccgcagtgctcaccccccncaggggtgtgtctgagcacgtaaaacgcgcgcaccgcgcgaaggagagtcattttgcggccccaccccccaaaaaccagccccgccccgggcatcaccccgggggcccggggacaaaacccgagggcccggaccccaagaacgcgacccagccacaggcccgcagcaagagggggggagggac

SEQ ID NO: 168341 - DNA, 156 bp, Glycine max
cacacccgggagagaccacggcacacgaaacgaccaccacgcaaccaaacccccacaaggcctgaccactcaaccgaaaccgcacgacccctcacaatgcgagacaaccccaccagccacaaacccacgacgaacggcccgacaccgacacgccac

SEQ ID NO: 168342 - DNA, 438 bp, Glycine max
  unsure (1)..(438): unsure at all n locations
agctngcacaacaagtttctaaatccatttttgtacaaatngaagtaactaactaacatccatgaatatatacacggcctaaagaagggatgggtcttgattatgcccatttaatttacttaattaaactaattacacaaaaccaagtccaaattcagagtctaattattcatgttcaaaggttctgactctcaagctcaatntgaccatcgaaatgatagaattggtccaagcttatntgtgacaaaattgaagtgcttgctgacaaaattaaagttccttttcttagctttccggggatttttaacatgctccatatgaagttctgtagtgtcatatatgccttacacaaggtagattggtcaagtaagcattatatctataaataagcaacaattatcaactaagctcaatcatttgcctaagactaaatcgatt

SEQ ID NO: 168343 - DNA, 419 bp, Glycine max
  unsure (1)..(419): unsure at all n locations
tgtgagagtnctttgaccgcaattcgtcttccatctggtataatttcctgacaaaatacaacaaccaataacaacatattgaaagaatataacaaacaaaatatagaatgtatatccaaaattccaaatcatttaaaccttgctaacagggccatatccaccttcccctagtttaaatgcttctgaaaagctatcactactctgctgaattgcgattaatgggattgtaggcacgtctggattcaatgtttcctcagttcgaacattttgatatgaggatagacgaactgtgtgaggtatcagtccatctacagagaccagtttctgagttctttctcaagntctcaactaaattaccacatttcagatttctgaaataaaccatcaaataaattctaacatgtatccttgcacgaaat

SEQ ID NO: 168344 - DNA, 448 bp, Glycine max
ggatccttaagtcacctgcggcatgcaagctttcataggcgctaatgttattttatgctagcattaactcactttaacctccatttaccacagaattcagacttagcctttcaacccttaaagtgtcactcttttttttttgcactcataacatcacattctcactgtctaaccctacgttagttctacccttcgtccctaacacatttccatcagcaatttcagcatataaacatcacaaacatcatcacaaaaaccctaaaacagaatgggtatgtttaactcatccaaacatggcaatttcaacaagctttcaaaaatgtcttacaaataatcacacacagcagaaccctgcaagattaccatcatatctcccaaaacccataccacgaaatttagagagaaagaagtcccccaacctgaatttcgaagtccactcgagccccac

SEQ ID NO: 168345 - DNA, 395 bp, Glycine max
  unsure (1)..(395): unsure at all n locations
tgccacacagctngcccaagcgagcgtaggtagctttctttcataaggcaccacctctctggagaaccccctggaaggctcaagcgggccagcctgccatctcgatcctctgtctactaaatacacccgctcgtcctttctcgctgattcttcttcccgcacgccacccgaatcctacgaattacgtaaccacactcgcttccctctcgcactgtcacgaaaccctaccgatcacataatcatccctccttgccctctggaacgttacggaactttacggatcgcgcactaacactctctttcaacttctggcatgtcacggaacttcatggattgccgcacaatgctttcttttgacttccggcatgctacggaacctcacgaattgtctaacg

SEQ ID NO: 168346 - DNA, 345 bp, Glycine max
  unsure (1)..(345): unsure at all n locations
tatggcatggatggataagctctaatacttttattttcaattactataactccttaatttgcaacagagttaaattctaagagagaatagatcctagactcacccaatttatttcttttgaatttatgtagctcactcacttgccttgcatttggccttattacaacaacacacactctctttattctcattttactcttttttttaacacgtaacttatttggtgggtgtgggatgtgcttactttttcacttaaatcccaactaactctccaaatttggggaaattgcctngaccatatgccccctagcacctaagcagggagatggagatattcatccagct

SEQ ID NO: 168347 - DNA, 451 bp, Glycine max
  unsure (1)..(451): unsure at all n locations
tgttctacccatgtcgaatntgcttacaatagagctattcatagcactactaattgttctccttttgaagttgtttattgttttaacccactaactccttttgatcttttgcctatgcctaatgtttatgtttttaggcatacagaaggtcaagcaaaggcggactatgtgaagaagtttcatgagagagtcaaagatcaaattgagaggaaaaataaaagctatgctaaacaagccaacaaagggagaaagaaggttgtcttcgaacccggagattgcgtttgggtgcacatgagaaaagaaaggtttccggaacaaaggaaatcaaagcttcaaccaaggggagatggaccatttcaagtgcttgaaagaatcaatgacaattcttacaaagttaagcttacccgtgagtataatcgtagttccaccttcaatgtctctaacttatctc

SEQ ID NO: 168348 - DNA, 484 bp, Glycine max
acctctgagtcacctgcagctgcagctaataaatcattgcaaattattttctttatataaattatatcaaaacaaattacatttgtgtcgtaaagcttacgaacaaataaaataccttgtgaaatcttcaatatgaaacgtactcttaaattattatttttagacaaaatcttcaaaattgacttgaaagaaaaaaacacgatttaaattttgaaattgttcacatgaatagagttttgtttaatcatttcgtatgactcaattaaagattaacttttctatgaacaagattaatttcatatctatatcaacagaaatacttaatcatatgagatacatctttgattatacctgaggaattgacgcgagaataagaaactacaattctttctctacaagggataagaaactatgaatactcagtgattattacatatcacgtaaatctacgacgattaaagtttatgctgcctcatataaaatc

SEQ ID NO: 168349 - DNA, 383 bp, Glycine max
cttgaagttcaatctttataaataataatgtcacatgaattgctcaaaagccgcctcataataaacattctttgacttcgtcaatataatctcggtcttaaaactatatttgaaacaatacaaaatatagtaacatacagcatcttttatcttacatttgctgccttatagtaaaatgaatgctttttttatgagagaaagaaaagtgaactgctcccatgtcttaacgaaggaaagcgtactcctaaacaaaaaagacagaaagacacgacagtgtcacagatacattggtaatatattttttaaaacggaagttaacacaccttggacaaattcttttaaaaatcatgtcaaaaatttcgctcttaatacaaaagaagttc

SEQ ID NO: 168350 - DNA, 389 bp, Glycine max
  unsure (1)..(389): unsure at all n locations
agcttgtccactaaaaaaagtcactaaaattggtttgaaagtttatcatttcattntttccttatcaagtaaatggatcatttttaaggtccaacgccttaaaatgatcacctttcaagtaaaagaatcgcttgattcacacttaaagaaagaactacgtaggtctgatttcctcttcgatggagggtacgtaggagcaaaagccccgcttttgtcgacctcaaaaaataaaaagaaataaaagttaaggcaatacaatttccacaattctaaaaaataggctgttgttcttcgagaaaaatgtaagaggtgataatactttcctcaagcgtaaatataactcccaaacttagaatttttattttgaccggtttccttcggttttcccg

SEQ ID NO: 168351 - DNA, 436 bp, Glycine max
  unsure (1)..(436): unsure at all n locations
tctaagaatggtcttcactactctgacattntccatggtagcttctccaaaaaacacagtgtcgtccgcatattgaagaacgttcacaggaactttgttctttcccaccaaaaagcttctgaatttattttgagaaattgcttctctcatcagtcctgtcaatccctcagccactatatcaaagaggaaaggtgccaaggggtcaccttgtctcagccctctttgaaatgcatatcagtgttatcaattgcagattgcggaaatggcggaaagccaataattttttctatatgatatagtggatatcgtcgctaacatatagcgaaagttacataacagttgaaatataagatatatatcaattatatatgcataaaanaattatgtcgtatgtaaataatattaaaatacatcgacaatgacataatgttaactc

SEQ ID NO: 168352 - DNA, 379 bp, Glycine max
  unsure (1)..(379): unsure at all n locations
aatggcgacaaatctgaacctcattactaatanacaatcaacggcatccacattacaaactctttaacaaacaacagggactcaaacttgacacataataatatcaagcgaatcaaatacaacctcaaataatacaattaagcggacctaaattgaacaatttctaaaaataaataaaatgaaattaaacctaaagaattaattaacaggaaaaaataataatctaagcagattttttcaaaaaaatctaacacaacgaatatatgtttctatacgtgtaatcttttatgagaaacataacaccatagaaacttattttcattctctattgtaaaccaattaatacacaacataattttgttttgtattcgcttgcaca

SEQ ID NO: 168353 - DNA, 405 bp, Glycine max
ctcctgatggcgtgcgatggactgctatttgtatccattcccttgatgcaccgcccccagacacggcttctgtaagtacactgggaaagaagacaatgacacgacagccggttaatacaaacaatcccggagcactccaaatcactccatggacgctggcaccgttgaatgcacaacaggtttcccacgctgctgctgaagccagaaaaaaatcatacattcttccccccgtgacaaggcataataaccagccattcacgctggagccagatcgcaactctggcagcagtggccggcgaatgagccctatgattgagatcaccagaagaccgcccggtaaacggattctcctgcctgccgacttgcctatggaggccataccaaaattttctgccagcaacattg

SEQ ID NO: 168354 - DNA, 350 bp, Glycine max
agctgaagaccagactatacgaggtatctttcttgggtatagcaatatctctaagggctatcgtgtctacaacttgcaaactaagaaactcgtcatcagtcgagatgttgaagttgatgaatatgcttcttagaattgggatgaagaaaagtggagaagaacgttcttatacccactcaactacctcaagaagaagctgaggaagaagacccaggtgaaccaccttcacctccaccacaacaacaagatcaagaactatcatcaccagagtctactccaagacgagtaagatctttggtggacatatatgaaacctgtaacttggccatacttgaacctggaagctttga

SEQ ID NO: 168355 - DNA, 409 bp, Glycine max
  unsure (1)..(409): unsure at all n locations
ggaattaactactcagatgtacaaatttggatcgtgtaacactatcaagaagaaataattttttgtaaaaaaaaaacgaagaaagaaataattatacagtacccccaacatcacaagtgcataatgtataccttgaacattcttttcaatgttagttgttaattgtaattgttagtatattgttaatggagagaattaaacctgaaaaattttcttttttatttttntaccaccaaatcaatcttataagtacttatttggatgtaatagagacataatataatgatggtttcatcgatcattcttgtaatactggttcaaaataaaaataaataaataaatctaaatataatattttttggtagtttatcttcgttttaagagaaacaatctcatttgagtgacatgt

SEQ ID NO: 168356 - DNA, 454 bp, Glycine max
  unsure (1)..(454): unsure at all n locations
agcttccaccctccctatcctttgttaatttatttgtggcgganctgagccatcctggttgatatatggtcttaattggattttgtattacacttgggtgaacatatggaaatcatttttacattgaaccattcacatatacagatcaaaaccccattctatgttatcttgtcaagatattttgttaaaatctttctattttcattgtgcttgaaaaattttggattatctttttttttctattagtctcaaatttctaaaaagtgtcagttgcaataatcaaataggtttaagtttgttgtaattctagggatttgatacaaaggcgagaaaagtgcatggagtatattgatgtattatacccctagctatattatattaatcatctacgttatgaaatataactagtacaaggtcacttctaacactcctaatgtaggaatgttataattta

SEQ ID NO: 168357 - DNA, 456 bp, Glycine max
  unsure (1)..(456): unsure at all n locations
gcctccacttctatcttagatntattacagactacatgctcaatacagaagtaggtcactctcaacaagtggttctatgatttatacagaggttttccactcaagaagatacaatcttttacttctatcttagatctattacagactacaggctcaatatagaagtaggtcactctcaacaagaggatagaagtagaaattgcaaatttctcacatagaaattaggcttgagtttctctcactggaatgcttcaacttatcttcaagatgctcttcaaacatatcttaaatctccaaagaagaccgttgaagtgggttccactcaactgacagacttctggagcaagtagaaaaactcgacaggtgtcatgaaatgacaacttgtagaaccattttgaggatcccattatgaggaaggtttctcatgagcattctgaagcatcattataataacca

SEQ ID NO: 168358 - DNA, 377 bp, Glycine max
gctcgcttgagaagcttctatagaggctggatcttcgagcttcaatgaggtccttcaatggtaattctcaaccatggagttgcaatgaaagataaaggagaagacgggagaggatgcaccatccattatggaataagccttggaagaagaagcttcaccaccaagagagtgtcttggataagaaacttacagaggaagcttcaatggacgaagagaataacagagagaaagtggcctggaaaattgaaggaagaaagggagagaagttgaactttgaagtgtgtctcacaagactctcatttcatcaaagttatgacaagtgttacacaagtcactttcatttcatgtgaatctaagaggaatattcaaggatatgc

SEQ ID NO: 168359 - DNA, 376 bp, Glycine max
  unsure (1)..(376): unsure at all n locations
ttctagtcgtccatagacctcctctgtggtacggcctagctatctttgtcatctgcgcattcatcgcatccactaacagatcgtgagcgccgtccaactgatggtactcgtcaccaccaccacctgctccagccataattcaacaggaaaaaaaaatgtgcaataaaaattattaaggtttcaagacctcacaacactctactcacgtctcttagatggcagtacactcgtgtntaatgctctcaataggcttttgtgtaatgtattccctcttgcctttaccactcgtgcttcctcttaagctcctggatggaccaaattagacacaccaggtaacataaaataaaaggaaagaccatataatgatccacaaccg

SEQ ID NO: 168360 - DNA, 274 bp, Glycine max
  unsure (1)..(274): unsure at all n locations
tataagacacagcctaaccccgatggccccatatagaaacacacggcgaggctactagctaacggttactcatagccaccccgaattgactacaatgagacatttgcaccaatacgcccggnctgataccataagagctctaatagctcttgcgtcacaaaaaggatgaactatccatcacctacatgtcaaatccgcctcccctaatggtgcacttgaagaagagatctatgcggagcagccacactgatccacgtctgaaggcaaagaacgc

SEQ ID NO: 168361 - DNA, 450 bp, Glycine max
  unsure (1)..(450): unsure at all n locations
aactaagcttatcagagacaaattntactgggagacaacagtatgtttcaacctttcctttgaatcaaaaccaagaagcaacaaccacatccaagcaccaaaaactgttgaacatgaatattaatttgaaaatgcacaacaacaaaattatgttacataccatgcaacacagcagagagactcccctgagtgtagtaatcatataccatgagtttctcatctttggaatagtaataccccttcagctcaacaacattctcatgtttaagattcccaacaacctccatgagctgctcaaagtccttctttncaacagccacctccttcaacctcttcacaacaacagtggtagcatccttcagcgcagccttatacgcacgaccaaacggtcccttcccaaaacctagcagaagcctcacaaattctccaagtaaacgataatacaccctc

SEQ ID NO: 168362 - DNA, 420 bp, Glycine max
agcttattaagtgcacgcatcaacaaattttaaggtagtgcaagctagtgtaacattgttctttctacaatgttggagggatccatctataaccatgtgtttgaacataaccagctttttccagcagtaatttatctgcttctacaggacctcttgttccaggttggtaaggggttgacttgaactcccccttatcaatgcggcgcaaaagtggggtgaagatctcccatgatgcctgatgagaaacaaaatacaatcactgaagttgtaaataaaaacacttgcaatagtctcacgcatgtaatgatattaccttcaactcatctctgcgaacaaaatgttgttgatcacctctaattctgtgaaacaaattccatttctcaataatattcgttcaaaactaattccttcaaacaaaac

SEQ ID NO: 168363 - DNA, 459 bp, Glycine max
ctcaagaagattcctaaagaagctagagcttagctaacatacctctataatagctaagctcacctccttgagatgagaagctagaacttagctacacaccccctataatagctaagctcacccccatgacaaaaaacatgaaaatacaaaaaaaaaagtccttactacaaagacaactcaaaatgccccgaaatacaaggctaaaaccctatactactagaatggccaaaatacaaggcccaaacgaaggaaaaacctattctaatatttacaaagataagcgggctcatacttagccgatgggctcgaaatctaccctaacgctcgtgagaaccctagggccttcccttggatctctagcccaatctacttggagtcttctacccaatgtccttgcaggataggattgcatcattactcttagtcaaagagaatcattgggtatgagataataagctc

SEQ ID NO: 168364 - DNA, 450 bp, Glycine max
  unsure (1)..(450): unsure at all n locations
agcttgtgcacatggaggtttagtatatttatgatnggagtgcttcaacatgatgactcaaaagtatggcataaaccctggtatagatcattattcttgtatggatgatcttcttggtcgtaaaggacatctcagagaagctttagaaattattaaaagtatgccttttgaacctgattctggaatatggagtgcattgctctctgcttgcaaacttcatggtaagatggagatgggcaagtatgtgtctgaacagctatttgaattggagccccaagtggcagttccatacgtggagatggctaacatatatgcatcacctgaaatgtgggaaggagttgcagctatcacaagaaatatgaaatatcttcaagtcacgatatctcccggcatagtattattcaagtacatggaacacctactatatttacagttgacgataggggatca

SEQ ID NO: 168365 - DNA, 442 bp, Glycine max
  unsure (1)..(442): unsure at all n locations
tatacaaactcaagcttactaaatatcttatataaagaacgcatgatcatatattataacgtcgctagcctcaatntagttggaataactcaattaaaacacttttaaaaattatagaactaaattaaccatttaatatttacaagatcaaactaaataccaaaaaaataatctagcaaaaaaaaactatctagacaaacctaaattgaaataacaaataattacgtgactaagtgtgagttaatctcctataaaaaaaagtgagttaatcttgagataaaatttcattttggtccaattattgctaatgggccgagctcattgattgtcaattcaagaaaaaaaaggttcttactatatccaatttcattttttattaagtacattcctcttttttttaaaaaaacaaagtaaattacttaacaacctgtattccacaaaa

SEQ ID NO: 168366 - DNA, 377 bp, Glycine max
  unsure (1)..(377): unsure at all n locations
agctngaggatgctcatgctacaattgtctaatcttaagagaataattngagacaaattgaacaagtactgtaacattgtcagtttcattggacaaagaaaacttgaggaaattgagtgaatcttagctttgctaagttaacacgtttcattgtatttgaacttactgtgtaaacactcattgagtgattagagtacattttctatcaaacatatattgtttgtgaaagacaggagtgacttaatgacaaaatacttggatcttaatcctagggggagattaattgtagtgccaggaatggcccacagagtactcgttgtagccaaaagtgacatagagaatacttgcgttgtaataaatatttgattagtggaaca

SEQ ID NO: 168367 - DNA, 451 bp, Glycine max
ggacactatgaatctcagcttaagaactcaaagttacttgaagcacatgagcattgttttatagaaaggaatcctgagaagcacaatgatcaagccttacaagcccaaacaagcagaaaatttgacaagcaaggagacaaatccaaaaataaaaaaggaaagtggcatgatgagaagtggagaaagactgaagattcaaaatgtggtgattctggatcatcttcacagaaagctgtgtcaaatccaagaagccaattctcagggaaaaagaaatgggtcgacaagaagaaggtgcagtgttacaactgcaggaactttggccattttgcagctgattgtagattcagtagaggatttcaagtgaaaggtgaagaagcaaggttggcacaagaggagaatctagaagatgatcattatctgctgatggttaccaccaaaaatgatcttcagt

SEQ ID NO: 168368 - DNA, 402 bp, Glycine max
  unsure (1)..(402): unsure at all n locations
agctnttccggtggcataacaaaaccttgtttttttattgcccaaacagaaatgcctattctaacatttgctcattgtaagctgagtgctaccctagctcttaagaggatggggtccattacgagacttcaatattctgttgctgataggacattcacttctggttccgtggatttgccggcttccaaaacggactctggtcgagtgaatcggaggcggggaggcggctcatcctcggtatatagcccgcctactttatcagaaatgaagaaggagaaggcagcaataagggaaaaggttatgagttcttgagggccatnggcattgctcctgatgagcttgatggtcttgaactccctgtgactgttgatgttatgagggagcgcgttgattttctttcat

SEQ ID NO: 168369 - DNA, 397 bp, Glycine max
  unsure (1)..(397): unsure at all n locations
aaatggattaaggtgaaccatagaaacatatttctttatgtgtactaattactcctctaattgaaaaatgctaccaagtactaacatagtaacatgcccttagtccaagttattcagtaatatccatcgcaaaactttatccaataatatttgaaaagtgatcaaaactagaagtagttttgatgctgccctagatttttaagcatacgaaggtagtaatttaagccacaactcattatgccttttaacatgctatcctatcaaattatgacaattttataaatttataatcattactctcanaattcttgcaaaccatacaatgttccgctagttttctttcttttggatatcctttggcgagagtaaaaactaatttttaaagactaatatcatt

SEQ ID NO: 168370 - DNA, 452 bp, Glycine max
  unsure (1)..(452): unsure at all n locations
agcttacaattcacattagaagacatctttttgtaatggngacattccgtctaaagatctgagttctttnttttcagcttgtcaagttcattattagtaagagttcattctttntgaagtaagattttttgtttaagcatttccttgtgcctttctttcgaatcttcaaaagttatggttaaggattttaccctctccttcaagtcttgaaaatccttaagaagagttttttgtccattggatacctttacgtccagtagtgccttaacttcctcacaaacagaggcatcttgtacattgccaggtgttcacttccggcaagtgcactggatcgcacaagtagtataaaatggtaagaaccgagtatcgaactctcggcgaacttgtgttatttggaagctatctaacaaatacgtgtctggtgtgaanaataagtgtaatatgaaaagtgt

SEQ ID NO: 168371 - DNA, 425 bp, Glycine max
agaaacacataatggcatgacactgtatctatcatgtgaaacctactatgagctaatttatttcaagtttttcccatgaagtaacaaattaatattaaaaaaattagtgtttgatcaagttttttaagaaaataagaatgtactgaaaaaatgatttctgattattttgagaaactactttgagtaatagtctctatttttttttgtttgttatctacaattcaaatttagtgaatttagggttttatataaggatactatcctagcctctactaaagactgaccatttttcattactctaattagagtcgcctcttaaaagttgaccttcatttaattcatcacaacatttattatgatctgtatacagtacgggaagattcggggcaatctagtccaacaaataagatctgacaagtatatac

SEQ ID NO: 168372 - DNA, 431 bp, Glycine max
  unsure (1)..(431): unsure at all n locations
agcttgtccaaaagctacttattttattttatatcaacactagangcgaaaatatctcagctgggcactacttatatataaaaggcattgcgcatgcaaatgagggattttgagagaaatttgacaaaactacaaatgtattagtgtaatttacatagacaaatctaataccacaagtcaacagaacattcaaatagcatttagcaaaatgactttcttttattttaagaacgatttacaatcatataatagtatttagctatttctctctgtactatttggataaatcgactcagtataacaaatatctatgccctctaaacttaacactcaagtgtctatggaccatccaagtgacgactctctagaacgggtaggcctcttaccctcttaatacattcatgaatatcaatatttcttggatcaataca

SEQ ID NO: 168373 - DNA, 468 bp, Glycine max
  unsure (1)..(468): unsure at all n locations
agctttctcggggccattcctgcgaaggttatcattttgaaagttagtttacaaaaaatataacaatcattacaaacaagggccaaacaacacttctcatggcacgagtgtcaacatgcactttataaaataatcatattggggtcctgctattttatgacacatacgtattcgcacacataaaaattttgtgtgaaacattttacaacacctatccatgtacatatttttttgacaaaccttttcaatgctacatcctatatatatacacacattttttggaaggcttcttttgttacctactcacaaatacacatattntgaaaaacacttttacgctacccatccaacactttgtaaggcactccatgctatatatattcatattatgcaaggcactttattgaacattctgcaaggcattctcatgctatatatatattcacatatatacatactgttgaaagg

SEQ ID NO: 168374 - DNA, 443 bp, Glycine max
  unsure (1)..(443): unsure at all n locations
acaaactcaagcttataagaacaaaggtgcctcactcatgttcaaatatgcatgtttattaggacgcatcaacaagaatcaagccaacgctattgtgcaagcaatcaatggggcacaacacaccaaatgattatgatgatggatggctcaaattctcacaaaggtaaaatcatcactctcaaattgagctntccaaactatcatgacatgtacagaagaatcaaggatttcaagtcacacaatgtcaagaacttttattctcaaaacaattacccatttcttgaacatatcctataattcaaagaanaacatgcaaagtcgtacgtgcacacaaaattgacccaaaatattaaactaaaaatccgacgaaactaacaacattaacaaattaacacaactaacaaattaacanaaccaacataactagcataaccaaagaacac

SEQ ID NO: 168375 - DNA, 338 bp, Glycine max
tgagagtttgggaccataactacccaagttgaccatcccacaaactaggatattttccatatgagtaactaaggcttcaggggtgctgctctcaccagaaagcctactatcttatataatcattttacttggcacggctcttgaacacatcaagacccatctcacgaggatcagctgcctgcaactccacttgaattccatccagctccctcttgaatctgtctttggaacccgcataaatcatcttgctcctcacccctgatgtgggaggggaccctacaacagaagcaacaaccacactaatgcctattaaaacacagcaccatggaaagccatca

SEQ ID NO: 168376 - DNA, 388 bp, Glycine max
  unsure (1)..(388): unsure at all n locations
gcaagctttgaagaagactcacagccgccggtggttcctctatacacatctcatatattataaccgcccaagtattatcaaacaagcggccccgcctgccaaataaatccacattacatcaaagcctgcaatcagtgatgcacaacaagaaacatgaccaaaagccttgtatcttacatccagctaaatccagcagtgccttcctttgattcatgagagcaaatgattgaccaaaactcttctggctcatgagcctgtatctcccagaatctttcacgacaaatccaagcgtaggaaactattgtccaaacaagtacaacggaaattnataagaactaaataccttctcaaacacaattaatagctaaacaatacacgatctaatttt

SEQ ID NO: 168377 - DNA, 460 bp, Glycine max
  unsure (1)..(460): unsure at all n locations
ctatcgcatactcaagcttcacccaacaataaanaggcgaatagtatctgttttggtctcatttaagcaaaaacgctttattgatgaaagttcggggatattttaaaactacctcacgggctcgacaagagtgacttataagctgcaatataaaatgagaccacatgcccatgccgaaattaatcgcggatcacattttcaaacgtttcattgaataggttaagaaaatttactcctaaatcaagaatacacaaaccagccgagatttcggatgcaaaacggaaacttacatccaaccatccttcgctcgtgttcttcaatatttggataggcctgcactacaaattccacaattagtcgactaatacattaaccaaaggtcaacaaaattctggattaccggcatagtcattcaacgacagaggttcaagtgcanacaccttcttactcacatatcacc

SEQ ID NO: 168378 - DNA, 462 bp, Glycine max
gcttgtaggattatggggtacccatcacatgtggtactaggtggcggtcgggcgatggcgtaagacaattctccacatccacaaatcacttataaacccaccatcccctgttgcccacctccaactgagctcacgtactcccacgtagcccttatcctcgttcctctcaacgccgggtccccatcaatcctctcaagctcccacaaaatccaagaaattcaacatcccatcatcacaaactaacaaaaccaagcaaaatagggcaaaggcaaaaaactctgcccagaacacaaaccacaaatcacagcttttcacatacaaatactccagtaacattttctttgttccaattcgttaaccggcggatcgactcgaaaattctactagaagtctctagtacataagtctacattttgagccgtgggatctactagcaaacatcgagaactcattctatactac

SEQ ID NO: 168379 - DNA, 417 bp, Glycine max
ttcgtttatgctcagtttccttgtgagcggtttgacccgaatcgagagtggcatccgataattaacaaaacgtttttgtttgcaattctacaggctctgctaacatgtgcgtgttgctgggttctcttgatcaaggtaacactaacttgtatacttcatttgacctattttatttcttctgggtagtaataagtaatgttgcatgatttttagtaatgtgttattctgtttgcactataacacagaatgaaccatgatttctgtacatggatccacagtgttagcaagtggcctcacatgtaacatcccaattttctaaactagattacaaacgattgttatttataactcaatagagtctaaaatccatgaccacatcttataaataaatacataacgagatctcattattaatta

SEQ ID NO: 168380 - DNA, 375 bp, Glycine max
  unsure (1)..(375): unsure at all n locations
tntaatgaaagtcaagagcataaaagcgtgccaattctattatactagcatcaaggtcttgagcaggtcgaggacatcaatattatatctggaaaaacccacaagaagctgacaagtcaaactcgcatatgaaaaaagaagtcgacattgttcgatcttccatgctggtccaatctaaacggtagacattgtatcgacgctatgcatgtggagaaaaacgtgtgatagtgtcattggcacgtttcttaacattcaacgcacaacaaaggatggtttgaatactcgctaagatctagctgagatggatgtacatgaccacgtacatccaatgtttgatggtgacaaaatatacttgcgtcccacatgtcatacttt

SEQ ID NO: 168381 - DNA, 330 bp, Glycine max
  unsure (1)..(330): unsure at all n locations
attaataaagaacaaacagacaatccagtgcttgacttgcaacacaacaaaggaaacaggtccagaacaccttgctaagcaccaataacaaagtgagcaacaggggggactctgggcaacaaggaaatagatgaaagaattaccttgttctccagatacctgactgagcaaaaaattggagacagggaacatggcttggatatggtccgaaatttgggagatagaggggagggcaaaaatgaggtagtatcaggggaaagcactgatggctcttctgattactttggctantgaagttgatgaagaagaagaaatacaatctacagctga

SEQ ID NO: 168382 - DNA, 402 bp, Glycine max
attgtcttgtaaaacttcattggtttagctttcatttcatttttttggctttggctattgcttgtctctttgcttccttgcttgtgagctgccatatacggaattggaaaggacgattggtgccatcccttgaagaatttgattcacgaagcaaggggccaaccaccttaagagctattggactaagaagcactccaaattgagtgaatcaccaaagagaacaaccaccaaaattgagcacgttttgtaattctttaatttgccatttacttaccttcattgctttcaagctttgtaacaaaaaggcctttcattggaagtgtgttgggaagctccaatacgttaccaaacttccatttgtgtgtaataattaaggcaattcttctttacgatagtgagtgc

SEQ ID NO: 168383 - DNA, 366 bp, Glycine max
aataccctgatatgtattcccatatgttcttaaaactggactgattcatttgcttccaaagtttcatggccttgcaggtgaagacccccataaacatttgaaggaatttcatattgtctgctccaccatgaaacccccaaatgtccaggaggatcacatatttctgaaggcttttcctcattctctggagggagtggcaaaggactggctgtattaccttgctccaaggtccatcacgagctgggatgaccttaagagagtattcttagaaaaaattttcctgcttccaggaccacagtcatcaggaaagatatctcaggtattacaccaactcatggagagagcctgtatgagtattgcgagtga

SEQ ID NO: 168384 - DNA, 443 bp, Glycine max
  unsure (1)..(443): unsure at all n locations
tccatgggcgaagagaacaagttcttataatatatgttcttacaaaccaanaaccattcgtacgtatatttcttggctcattttactttaccttctagcgatattgattgcataaaatataaattatcacttatgtctgatgcagcaaataagtagtacaaagggcaatagttaatctgcacaacacctatctataatcagtttgcacactaatagagaaattaatatcttaaagctcttgttaacttagtatcggcaatatttatatacttacaatttagtgaaacaatttctaactttgatgctcggtaatgatgattggctactaaacttgactttacgacattctcctgttcaaatacaatctaatgaggtaatctttcaattatccaaaacaactaagaaaaaataaatcacaaattaacagctgagaatgaatttct

SEQ ID NO: 168385 - DNA, 299 bp, Glycine max
agcctaaaggaagtgaacggattcttatgtgtcttaatgtctccgcattgattggcaaatctgctcctcacattcctgaaaaatgcaaagatccaggtacattcagcataccttgtattatagggaatagtaagtttgacaatgccatgctagatttaggagcatctattagtgttatgcccctggcctattttaattctctatctctaggccccttgcacccataggaatgttttcttatcgggttgtctttggaaaggaatgtcatcctccactggaaattgaacacacaacttact

SEQ ID NO: 168386 - DNA, 279 bp, Glycine max
tccattcattgacaatgacaaagggaagcaaactggggtctcgacaaccacgccgccatatggctttaaattcaactagaccgggccattttggcgccattcattgagtagtatgctcccgcagtgcgggatgcgctactcaacaatcaatggcaaagaacacaccattgccctcaatctccgagaatcccgagtccaactagcttcctcatgcagctatgcaatgcaagtgatcatgaatgagaaccaccacgctttgcccatgtcagctactcactg

SEQ ID NO: 168387 - DNA, 328 bp, Glycine max
tgatgacttcttggccgaactcaccattatcaatcgcctccgtcacaaaaaccttgttcgcttactcggcgagtccatttaattcctctctttttttttttatttccaattattgcttccattcttcttttacttttattctcgatcgtaatgaacataatagtttggtttacgatcgatttggttatcactttcatgaacgcgccataaattcgacttattaagacttacgatctacatccgacagtggttctgtccagatcattatcaccatccttaacgaatctatgaaaccaatatattagtacgggcaattattgctaaactc

SEQ ID NO: 168388 - DNA, 348 bp, Glycine max
ttatctagtgtgcaccaaacattaattatgatttaaacttatcttgcttttatcctaccgcatttttgttgggtgctctcatatcctataagttgtgttgtaattttacgagtccaaagcaattattttttcattgtgagtttccatatgaatcgaagccacgaggataacaataactcacatactttgttcaatcaactaagctagaacccttggtaaaaaaaaatgatatgcatctgaatgacaattgtcatgatgagattcgaaaaaaaattactcttattatatatgtgtgtgtgctgtgtgtgtggtgcgtgtgagtgccgtgtgtgtcgtggcgtgtgtgcg

SEQ ID NO: 168389 - DNA, 412 bp, Glycine max
ggatgctcacgtcattacaagtacacttcaaagcgtcatgacattcactctttttattccaatgtcaattaaaagaaagaaaaaccaacagaaataagatcccttttatttctttagattgaattacagctggctgtcacaaattgatgtagtgagtatgctaatgtgtatatcatgttccttaagcagagcgagtctaccttgtggagcgttaaagctttttgttaaggaggctttagaagtgcacggcacgaactcatgaagcatgggtggcaatgaaaacccgaacaaccaaccgaatacagagctgtgtgatgctatcgcccaaacgaagatgaagaccaagaagcttacttgaagatcattcacagataatctgttgcttttagattgcctaattgactgctgatgc

SEQ ID NO: 168390 - DNA, 316 bp, Glycine max
aatcatgggtgataagctattgcagtatctcatgcaactcgaagtggtaccaccaataaagaatttcctttaagctttccgatcaaaacgcacgaatcaaaggtattggaggcatacaaaaatggcaaatatatatattctacattggcatgtcccgccaattagattggcggcatgcttccagcattttaatatgggtgtgtctcacaggaggaactgacgagatcagtgcacatcagcatgtctcgcctgtgccactggcgacaccctccagttagcgtacttctcgccatctgcaatggcggaacacctatgt

SEQ ID NO: 168391 - DNA, 416 bp, Glycine max
  unsure (1)..(416): unsure at all n locations
aatctgatttcaccccctttttttcacccctttttttatgcccctatctgacgctcactcgcctaggcgagttattttttttttaaaaaaaagttataatcctgtaataagctttataattacgtataaatcctagacaaattcatgagataattcaaaaagaaaattgaataataacaaatcgcaatagaaagcataaggcatacaattaaagaacaaagtttagagatactatgttgccttctagaagcacttctttaatgtctttagctggatgcatggntgcggtcgaggcttcgctatctcatccttcataattcatttcttcgaatgcgagccaatccgatcatggacttagtacctgttggcacatgctctaatgccttgaaaagaaaaggtaacatgcaaatgttaaa

SEQ ID NO: 168392 - DNA, 369 bp, Glycine max
  unsure (1)..(369): unsure at all n locations
gcttgcctcttctcttgctcttctaagtttgtctcttctctctcatttngaaatacgcttgtttttcttctcaacctatatgttaattttcttttctattgagaattgttaaatcggtatttgctttttcttgttaccattaaattcctcatcaagattgattctatgaaactctcatcgattatctttcaaagattattttgttcaaatagaatcttagggtttggaatctcctcaaaggctgtgaacacattaaaatatgaaatttttgttgagagctgctgtaatgatgtgttgtatctaatctttaattagaatatgcatttcacaaaatcttttgaacaaatagtcatccaatcataccaaaat

SEQ ID NO: 168393 - DNA, 429 bp, Glycine max
taaggttatcttccttccattcttatcaatcagtcacataattcccatagtggacatggccacaatcttcgccatgcatgacgcggacgtcactatcatcaccaccacgttcaacgccgcgcttttccaaagctccatcagtcgcggtcaaaacatcacgacgcatgtcatgaaatctcccgccgaacaagtccggcttcctgtccgtgctacactttcaccgccgaaacgccacctgactcgcaccgaaaatctatgctggcctcgagatgctgacgccacatgaccaacaacctcttcccgagctcccacctgatccgcttctgagtacatgttccacccttggaccgggacctgcccaaaagctggtcttcctcacaccctcctccccgcgagtgttctgtcacatgtcgttcaccctcgccaccc

SEQ ID NO: 168394 - DNA, 426 bp, Glycine max
  unsure (1)..(426): unsure at all n locations
ctgcagcttaatgacaaaccaaggaaccttattttaattgaagttatatttcacatattttccatgtttttaatttatcataaaatggaaaggtatgtaaaaaaataatgaaatggaatttttttgttaataatttacacttgtattcaatatcgacctttctgttatacatgataaaatgaaaagaaagataaaccaagaagaccaaagaatagataggaaaaaatacaccaacaaaatatgcccaaaaaacaaaattctaagaacaggtgaaaaggtaatccataatatttgctcgatacactgagatgatgtccagtattggcgaagtccaccgtatgaagttgcctccttagccattttttccctgagagatcgcacaaaactatattaanaacacttacaacttgatataagtttaattat

SEQ ID NO: 168395 - DNA, 447 bp, Glycine max
  unsure (1)..(447): unsure at all n locations
agcttgccgctggagttgacccattaactgacctaactctnttagactggtggtccctaggctcttgaccttgacttgatagaacctctttttaaatgaaggcatttgatctgatcccatgttttactaaagtgaacaaaaatcgatgcgaatcaaaactccgacatctatcatgggtggaaaggatgaatgcatgaagaaatgcatatgacacagatgcaatttatgaatacgggagcctgcgaaattgtcttcttcttagatacaacgtcttggggtagcacagtgcccgacatacgtatttaagatggtggcacggacccttcgttggtttgccaaagagaggggatcaagacagaacccgtgcgtgatgcatatgcganaggcacaacacgggaacgtacatagtatgaccatattcacaaaatataagcaaaagggtacatg

SEQ ID NO: 168396 - DNA, 458 bp, Glycine max
agcttaagccaaggccagactctcttgcatgcagaggcttctcagataaaatgccaaactccctcacaagatctgaatcgcttaaataggtgggttggtccgtgctcacgcgcttattccaaatctgaatcgcttatcgcgcataagtggattgtggcataccacgcttttgtcgcttaacggatgagtcgaagcagtgcgcttgatgacctggagcggtgcgctcagcgaacttgacagctcatcttcttttggatgtttccttgcgcttagccattgagtttcgcgcttagcgaatgctcgctaagctggcttagcgagaaagtgaaaaaaacactcttgcccatttgcctaattaacctaaaattgagagaagtcgttattatacacacacaacacaagtatgaattatctattacctatacttaacaaaacagtacttataatattacaacaca

SEQ ID NO: 168397 - DNA, 354 bp, Glycine max
gatgttctattattatgacttccaaatcttcggtttcctcgattgtcacaacaatgggctcaaatttgggatttaacgagcgtagtatcttctccataattcttacgtcttctaacttctcaccatttctttttagctgattcgaaacaccgagaattctcgaaaaataattggaaatgggctctgactctttttgtagaagcaagcttcatgatgatgaatcatgttgattccagtagttttgatgatgacaaaaagcccaagagaatgatctcaagaatgagtcaacaagttcaagatcaagattaatttccaagttccatgagaagaaaccaacaagattcaagattcaag

SEQ ID NO: 168398 - DNA, 345 bp, Glycine max
  unsure (1)..(345): unsure at all n locations
tgttcccagcctttgatgacagctttccaggttctgctatccagtgatttgaggaaggccaccattcttgctttccagtattcatagttgcttccatcaagaattggtggtctgttcactggtcctccttctttctccatgttcatcagaatttatctccccagatctcactctgtgatttcgagtgttggctctgataccaattgaaattctgataccaggggacagatgtcgtacaggatgtcacgacatcacgcttcagaacatgcagtttaagtgtgtccgtatgaacagattaaacaagtaatagcacaagagaattgttacncagttcggtgcaacctc

SEQ ID NO: 168399 - DNA, 367 bp, Glycine max
  unsure (1)..(367): unsure at all n locations
actcaagcttgactggagaaaacacctctttgactatgaagagcaagctgcacccactttcttggatgatatctcgcggcgtcatattgatcgctggacatcacactactgggtttggaaacccgaacctaatggccacgtttctacactgagcgcatactgtatgctactagaacgaacaaccaatcagactgtggatgacgctntagaggacctatggcagctcataatccctttaaaaccaacaacatctgcttggcgatcgatcaaagatagaattccaactaaagggaatttgccgagaagacagctggagaaaggctttgtccaacccctacactattggtctaggaatctatcaacacta

SEQ ID NO: 168400 - DNA, 356 bp, Glycine max
cgcttctcaacactaatatcaatcgacgtacgaaagtttttatatctcgagagaactctgaatcccaacttcaacagagctcactgttccttcataattatgaacactgaccaaaataaagcattataccttacaaagaatgcgggccttagagcaccaagcgaacgcccgccgaaagagatggaaagaccgaagccaacagtggtggtgttttgttggaaatggaaggagtggacgtaatgaagtgagcgcacaagatcaatgagagggaaatttggactcaaagctcacaggacacagtgtggagtaagacaagaaacgagtgagtgcgtgcggcactagccgatgcgctacca

SEQ ID NO: 168401 - DNA, 290 bp, Glycine max
ttagccacgcctaacgattcaactttatcggataaaagaacctttcgaagtttaaaaccaaccctatgtgtaactctcttgctcttaagaactatgtaggtttgagtccctcaccgcacttgaggatatgtaggagcaagaccacgctcttgtcaacccccaaaaaataaaaaaacataaaaagggaaaataaataaatactgaagtcatgatttcgacacttgataaaggttgcatccatcgtgagaaacatggatgctaaaccttcctgacgaaacaatccaagctta

SEQ ID NO: 168402 - DNA, 360 bp, Glycine max
cacaaagacaaacatttattattctgcggatctgccacgccccgattcaaagtaggttgcaccaccggctccgctttcataactgtactggaggcggttgcggcggctttactctctatggttttttggagttttaacatgacctccgagatggaagccatttgatcttttaaggccgatagatcagccttcatctgttcctgcacgcgctcttcattatccatttttctggatcgagtgttataggggtgccttggtgttttcttagttatgatgaaattcctaaagaaataaacaacggtgagtatgccaccaaaacatgagtatgcaaatggatgatcggagcacttggatccaccc

SEQ ID NO: 168403 - DNA, 397 bp, Glycine max
  unsure (1)..(397): unsure at all n locations
accccgttgaatattcaagaacgatgaagaacgaatgaagaacgtcgaagaacgggtgaaacctttgcgagattcctcacggaaaacgttacggaaacgtttcggaagcgcctcggcttagattttcttcacggaaacaatttttccaagcaaattcgaaagagagagaagtgcctaaggcgctgaaccccttttcttcttcacttcctcccctatctatagcacaataggggaggtggttgccgcccagctcgcccaggcgagctcagctcgcccaggcgagccaggttgcttcctccagaagcaacagccttctggaggaatattctatagggcccaagtgggcctgngtgctatttgcaccccattttactaatacaccccctctgctgttttt

SEQ ID NO: 168404 - DNA, 348 bp, Glycine max
  unsure (1)..(348): unsure at all n locations
ccctttgtttttggaagtccaacaatggttggcaaaggttgtaaccaatggtgtaactagtctaatagtgactatctatgaagtccaatgaggttgctggcaagttgttgaaatctagtggttggttggtccagtaatggttggttgtgttagtgaaatcttatcttgaagggtggggactagatgtacncaaagtttgggaagaaccactgcaaaaatcattgcgcatcatctttttcctctctctttgcattgattttaaactatgatttgctaattattttataagtcctctaaacaagtaaactcttttagaaagcacttaagacataatagtctaaataattg

SEQ ID NO: 168405 - DNA, 395 bp, Glycine max
  unsure (1)..(395): unsure at all n locations
tagccctagaggggatggaccttttaggttttggagatgatcaataacaatgcctataggttggacctcncagaagagtatggagtcaccaccactcttaacatttctgatttaactctttntgcaggtggagctgatattgaggaggaggaactaacagatttgagatcaaatcctcttcaaggggaacgggatgatgcaatcttccctatgaagggaccaatcactagaaccacgagcaagaggctccaagaagattgggctagagctactgaagaaggccctacggttctcatgaaccttacggtagatttctgagcccatgggccaacggtgggtccaattatctttgtacatattagactacgatgtcattatatttggtccttgtatat

SEQ ID NO: 168406 - DNA, 344 bp, Glycine max
tatcttgacttcctcaaaattactgatgtgggagatgtttatatatggaattcaagaaccacataccttgtctacccatgaatctttatactccacaagaaatgggattcttaatctggagaggagctccatctaaaccgatcaaaagaaaaaacaaatgaattatatactgaatcatacccaaaaatatctcatatcaaatgttttgagacaacagaggttgttaagttacagcctaattcatagaggtttgaaacttctttcagccaatcagaaaatgaaattcctctagagcacacacacacacacaaaaaatatagtgcagcatgaaggaaggaaccatg

SEQ ID NO: 168407 - DNA, 393 bp, Glycine max
tcttacgatcttcttcattaatggatgcctttgtttcttggaagaagacaggaagtgggatggagatcgaatacagagacgacatcccacttcaaggagaagatgagtctacaagaagctcaccaccatacgaggccattcccccacgctccgcacgacaaacgatattatgaaaggagagggagggaatagcatcaaattttgtgctctaagagagctgtgaaatctaaagtttaattttcaactgatcaaagttgaaaaacttcttacacatgagctctatttatagcctaagcgtcacacataattggagggaaatctgaatttcaactcaaatttacttgaatttgaaattgaatttgtggaccctaactttggagacacaatctacta

SEQ ID NO: 168408 - DNA, 399 bp, Glycine max
aacaatgagaaatctcaaagagaaaacgtccgatcgatcatttgctttattctactaaaaggcactcttccgattattatattatatcccccccctccctatttccaacgtggtatgggattaccgaacggtcggaactcattttaaccaaaattaaccgatgatgcgatatccacgatccgcggaaacttattctatttttacattaaccgagaaaagacttacataaatggcttaagcccgtcaaaagggggtataaaaagtaaatgaaaaccagaataacaatacatgaaacaaaatgtggaccaccaccggtacatataatgaatcgaatagctcggtctgaggtacttacccgctgaagactgaagacaacgaagaacgaacgatggatcttga

SEQ ID NO: 168409 - DNA, 411 bp, Glycine max
agctttgacctaacatttaataccttcattttattctctatgtcaaatattttctcttgtaaaaaatattctccttaaatctgtcaaattcctatgaagaataaataaagtccacattctggaattgttgatcttcatcaaaagacgtgctatgttgatgtagacttgctataatggaattaatgactttcctggtgaagtgtaagcacgtcaacctatcaacatggaattttcatgaagaaggggcgtacatttaatgcaagcattaaatgctctaacaacctcaagactttagatgaagagtagagtgaagaatccatccattgagagacaacaaatacttcaagacgaatgctataaatagaataagctttgaagatacaagacacaaatctacttgcgtgaaaacat

SEQ ID NO: 168410 - DNA, 490 bp, Glycine max
  unsure (1)..(490): unsure at all n locations
tacggacctatgaaactaagctgttgaaatataatcatgcaagaccccttgagagattttgtttacatgtcctccagttggtcactagagttgacaaactcaatggtgatttttcctgagagcactttctctctcacaaaatgacagtcttctactgtgtttantccctcatggcagaccggattatatacatgtggagaacggcttgattatcgcanataagattggtggcttgagtgtctccaaattggaactgctggagaagtttccttagccatgtaatttcacttgtagttgcacgcatggcacggtattcagcttcagcactggatctagtgactatattttgtttcttgcttccccatgggatcaaattttctcaaataagaacacaataaccaatcatggacttcgtggctgatggtgagtctgcctaatcagcatcagagtaaaacaaatgatcttggcattgcctttgccttcatatagt

SEQ ID NO: 168411 - DNA, 419 bp, Glycine max
agcttgttcagggtctctgtaagggtctcaatctgcttggctaagagtttgttttgagctagtaatgcatcttgagacgtgagctcaagaagacttttctttgtaggtgtgtaagcttgatcacaaaggatgacatggtcactggctgccatattttcaatcaactccatagcttcattaagggtcttcaatttgatttttccaccagttaatgcttctagaagtttcttggaatggggtcgcatgcgatcaatgaatatgtttagctgaacaggctcactgaacccatgagtagaagtcttctggagtaaaccatggaaatggtctagagcttcacttaatgattcgttagggaattgatggaataatgagaattccacctctccctcagcggtcttggactctggaaaatatttctt

SEQ ID NO: 168412 - DNA, 432 bp, Glycine max
tccaacaacattccttaacattcagataacatgaagtaataatctctacttttaagaaccaataataagtaatattattttcttccatcatttacatctcaattaatattatggtcaaactctaataagttaacatatgccttaagccctcacttcctcctctcattcaattgtttaaccaaggtcttagtagaactcaaactcattgcctagtattcatatccaatgttcattcaactagtattctaagacattaggtgtttgaaattaaaatatagtaaatattttttttacataataatgaataacttgttattaatatgataatctcaaaccaaagaaaactattatatttcttcttgagaatttctattgacaatttaagtatgttaacattaaaaatacaattgagtaattcatgatcaatttaca

SEQ ID NO: 168413 - DNA, 380 bp, Glycine max
  unsure (1)..(380): unsure at all n locations
cacctgcggcatgcaagcttgtccgccacgacagagacaatgttgtctcttgctttcaaacaactgtctaccacgcaggtttgtaacaatggttcccctcttagtacttgccagggaaaataaaaacttatattccaacataaaccagctatcatccacgcatggatcagtgccactctgtaatccaatgtttaattaattttctcagggttttttattataatgattctcgaagaaactcctcacccattgtgaggttttaagtctaagaacatagaccctttcccccctcatcgtccaatatctagactaaacccttctttttttctaccaggatatntccaccagcactattagagatttggtcccatatctttttg

SEQ ID NO: 168414 - DNA, 396 bp, Glycine max
atatcaagctcataaaatgcaagtgaaggtcttgcttttatagactcttcatgtctggccaagaaaaccattgcgaccctcccctcgagaaaatctataaaaaccattggaagagttacatctcttgatttttattcaaaacttgtcactggtaatcgattaccaaaaccatgtaatcgattacacaaagctttttatgaaaagatatgactcttcacaatctaatttgaatttcaacgttcaaatacactggtaatcgattaccaatatattgtaatcgattacaccatctaaaaaacaatttgaacgttgcaaattcagttaaaagcttttgaaatcaaactctgctactggtcatcgattacacgagactggtaatcgttaccagagagaaaa

SEQ ID NO: 168415 - DNA, 407 bp, Glycine max
  unsure (1)..(407): unsure at all n locations
gtcacctgccgcatgcaagctntatgacgaagtaacaaggaattattgtgtttttgctcatagcaatgatgacaacccacgacgttgacattagtcatgaacaagaagcttcccaaactcatagaccgtccatctcaacaacactttcatcaattctaagggttgcagaatccagaaaaatgtacgactctatattaatgcctgctggcaagatcacgattcgagtctctcgagaggcctgatctctacacattagatcaacactcaagactcatcacccacgaatgatgataagactggctcccgagaactctggggagctttttctaatgtttgagtagcacatgagtgtgtgacagaacctcgtccaactagtccttactctctggcaatcgattaccatgttg

SEQ ID NO: 168416 - DNA, 155 bp, Glycine max
ctataaatactcagcttgatgagtgtactatggcctcgtgcgcgtctacgtttactattgcttaaccatcgacacaccacacgacgtcctcgtctttcttgtggctgcctcacggcacgacaacaacaatctctgctatgcatctattgttccat

SEQ ID NO: 168417 - DNA, 383 bp, Glycine max
  unsure (1)..(383): unsure at all n locations
agctnnggccaattatacgatnggttttatttttctcggaagcctgaacctcaacacttgaataattgggctgcgagtttgggttccgctttatgtaattaccttaactacgcggatcagatgggcctaatcaagacccaccccttccttatgagtattcactctatatattagtggaagtcacctagttacttagatcattttgcaaaaacagatttaattacttattatgccagctttgggctcaaactctctcctctcaactattcttcattcttcctcctctctacactttagtaattccattctctcgcacaaaattatgaaccttttccattggtgatgaccatggaaggataaacacttcatcaatcccaagatcc

SEQ ID NO: 168418 - DNA, 444 bp, Glycine max
cgcatcaaagcggtctttaacataacgatcaaagtatttttatatctcattcaataagccatattctgaatcagtgcatcatacacatgcataataaagcaaagcaacatgcatccaaagaatattgcataaatttttacatccacgctcgcacctattgaataagcacagatccaccgatctgtgaataatcacaatgcacaccccacacgctactacatcagtgtggcacggaatagaatcatactcaaaaatggtaaaaattcatttttgtttcaatttctaacacacaaaatagtcttccaacatcaaaattcacctaagttcaccacgccattcgcaatcaaaccgtgtatattcagcacatcaaaaccaacacccacaaaacataaattcaaaccgaagatcaacctcgcctattaatcacacattaaaaaaaaaaaa

SEQ ID NO: 168419 - DNA, 416 bp, Glycine max
agcttggtattggagtaagaacacaatattttgttctcaagcccaaatgattcacatattttagtccaagcaaagaaggactaatctctccaatcaactccctatagggagagcccacaggtgtgtccagattgatttccatgacttgaccagtgttgttgcagggaacccctggccatgtacagcaatccgatttgtcagaccatgatgaaagcctgtttgaagggtctgctagtccatgcttgaagctgtggagtgcattcctttccttctcactgcaagccatattgagccttgctgccttgcttgcactgaagtggagagttgttgcagtggacaatatcaagagaagaacatgagttgcaaataccactgccatgaataagaaggaagacgaaaaaggttgaatccacaat

SEQ ID NO: 168420 - DNA, 325 bp, Glycine max
gtcccatacctccattggagtatagttgtgcctgagcttgcttccctatatttattaattttgttcatgtttatgtgtgagttgaaactttttagcacgaccacaaggtcaaaaaattataatataggaacgaaaataaatgtttaaaaatatagggagtaaaaagaaaaattattacaactatcaggactaaaagggtagttaaaccaaaataaaataaactagtgcaaaataatggtggtgtgattagacacttttaatcctatatggcttgctgtagacatatatacctctacatatatgtgcattctgtaatcaccaccat

SEQ ID NO: 168421 - DNA, 408 bp, Glycine max
accttagctaaacaccctcaattacgacggaccatgtttttactctacgccacaacatacaacacaagagcatgattcatcatagaaatatcctcatatgcattacctcgtttgctaaaaaaacccactgctctttacctatcgcccccccccctcctcacttgcattactgtttatacataaaaaagtctatttctattcttaaccatcaattatcaatgctcgttccacaaaatacactacttctgactaaaaccttctctacaaagcaacgtccctcgactcgatactcggatcacttcgtttcaatattaaatacctgcacacccagcgcgttcggctgcattccattctccttgaatatatccgtcaaaaatcggacaaacacgaacccatatggaaagcgaa

SEQ ID NO: 168422 - DNA, 418 bp, Glycine max
agcttatgctgcaaacatctacaacatatcttctcaacctcaatagaaaaatcagccacaacagaacacttatgacctctccagcaacaggtacaaccccgggtagaggaatcatcccaaccttagatggttgagtccttcacaatagcaacaacaacaacagccttattttcataatgctgctggcccaagcagaccatacgttcctccaccaatccaacaacaacaatagcaacagacccagaaacaacaaacagttgaggctcctccgcaaccttcccttgaagaacttgtgaggcaaataactatgcaaaacatgcagtttcaacaagagaccagagcctccattcagagcttaacaaatcagatgggacaattgactacacagttaaatcaacaacagtcccagaattctgac

SEQ ID NO: 168423 - DNA, 468 bp, Glycine max
  unsure (1)..(468): unsure at all n locations
ctacaagcatagatggttgaatccgatgacttatataatagttctgagggatccacagacgatgaagtggctcctatgtccaagaagttcaaataaatgatgaaaaagaaaggaaagttccatcattcctccaacatcgacacccaattcaagaagaaatacaataggaaagcaatgaaatcatttacttcgaatgcaaaaagctttgacacatgaatactgagtgtcagttcaaatgatgagcaatccaatatttgtatgatggcagatgtagaagaaaaagttaacgtaaaaacctgctctgaatctgatacctcttcttgctcttcactagacaatgaagaagatatgccctatgatgttcttcttcaaaatagtcatatgatttctgttcattacaaacagtataaagagaaatacaaaatatttggttgcgaanacactaaatngaagaaatcaagtgaagat

SEQ ID NO: 168424 - DNA, 413 bp, Glycine max
  unsure (1)..(413): unsure at all n locations
agctacanaatatacacgcactttttgtgattggaaggactgacgaccaaaacactcgtcacctactccttcaccaccttgtacgacgctgggtgaggcgggaagaacgccaacttcgcagccatcgatgatgtcattcctcccatcgatgccgttgctattaacttattgttatatatctatcacacacacacgaactatcaagttcgtcctctgaataaggacccgtgcatctggttgtgtgtttgtgggaggagaaatggatctctttgtgtctgcaaacaatggacagggacacaccgaagagaccgaatgtgacgtcggccaactccctatttattcatctattcattatgatgctaactctcctcaacataacgcttatctctccggtcctatatatcgatcatatc

SEQ ID NO: 168425 - DNA, 461 bp, Glycine max
ttggccaattcagtcatttcaagggttaaattgttcttgtaagttagagcctctgtacttgaagaatagggttgtgagtttgggctattgttttgtgtaattagtttacttaggtagttagttagttaggtagttacccgtacgtagttagttactaacactcacatattggtgttactttgatagttagggactgaacttcattgggagaacttgaactttattttgtacaaaacttgttgtgcaagctttctcttttatcttttctctctctttttctctcaattgttcttcattcttcttcatattttcacttctgttccaccattttctaacacaaatttcgtggtttctccattggtgatgatcatggagggctaacacattaatcaatccaaggatgcactctcaagcaagctgaagttgagttctagttcggtttatctactctttgtgaatgt

SEQ ID NO: 168426 - DNA, 376 bp, Glycine max
atgaaagatgccgaatgtgaaccaaatttgataacatacaattctcttattaattgattctgtaaatttgaaagaattcctcaagcttttgagtatctacatgagatgaagcaaagagggttgcaaccaaatgttgtaacttatagtacctaattgattcattttgcaaggcaggcatgacactggaagcaaataaatttttttgttgacatgatacatgttggtcttcaacccaatgaatttacgtatacatctctaattgatgcaaattgtaaaataggtgatctcaatgaagcattttatctggaaagtgagatgcagtaggttggagttaacttaaatatcgtcacctacactgcattactggatgggcttt

SEQ ID NO: 168427 - DNA, 471 bp, Glycine max
  unsure (1)..(471): unsure at all n locations
tgtggagcttcaatggtgaatgaggaagaagaaagctacgtgagagagagggagagaaaaggcttctgaatttctggtttggctgagtgaggagagagaaaagctttttggtcttaaataaaaagggttttccctttttnnatctttattcaagctctgccacatgtcctatttcagtggagccaaaagggcccactttccctttttactgtgaccaacactcagccacaaaagtgaggaaaatctgacctttgaaacgctaaaatcctgcctcggtttgtgtgtcatttctctggttccaattcctcgcgtttctctgcgtccgtcggggccagttttcgaaagtaagcaatatatatatcanaacgctcagaataaaaccccgagcgtggttcagaggttggtttcgttaaattctaagtcgcacgcaaaacgatgaattttaactaattaattacgaagtaacccata

SEQ ID NO: 168428 - DNA, 429 bp, Glycine max
  unsure (1)..(429): unsure at all n locations
gcttccatcaagtggtaatcagagcacaagttcttttagtaagtgctccttaaacctccattaatttttttttttgctttaacttctcttccattgttgtttctccatttttctccatgtatctcctcacatgtcttgtgctaaatgttgttaacatgattctttggagtttccactgatttaacttgctatagaagctagatttgattttctatggttcaaatttcttgttcttgttcttgaaccatgaattatgttgagtttaggttcctttgagttttgtctagttattntttttggctgaaacctaaaccataaaattcttacaaaaatattaaagtagaagaaaacctcaaaaatctagagtgacttgttcacctattgtagttntgtcatagaaagcatgttagtcatgaaacttgtcacata

SEQ ID NO: 168429 - DNA, 463 bp, Glycine max
  unsure (1)..(463): unsure at all n locations
actcaagctntgatgcaacatatggagaggttaatgaaacaaccagatgattcgctctatgagaggttggatcaaatggagaatagagatcataataaagaacaaaggaggagaacagggaatgatggtgttcctagacaaaaccgaattgatggcccaactcaacattcccccctttaaagaaagaatgatccggaggcctacttggagtgggagatgaaaatagagcatgttttctcatgcaacaaatatgagagggaccaaaagatgaagcttgccgccatggagttttccgactatgctcttgtgtggtggaacaagctacaaaaggagagagcaagaaatgaagagccaatggttgatacatggacggagatgaaaaagatcatgaggaagcgatatgtgccggctagttactcaagggacttgaaattcaagctccacaaactaacccaaggcaaca

SEQ ID NO: 168430 - DNA, 417 bp, Glycine max
  unsure (1)..(417): unsure at all n locations
agctngctcacctttgagaatgaaatatatctactcaatgagtcgtgggttgtgtctggactgggtcatgattataaaattgatactcagcccattaagacagcttcggtgctacactacaatgggaaaatgaaaccttggcttgatctgggaattccacagtataaaagctattggaagaagtttctgaacaaagaggatcagctcttaagtgattgcaatgtaaattcataataagttgttgttcctgtggtgcatgtttgggaaattgtagggttgatctcttaaacaagaggatgcctgtgctttgggtgctcaattttctgatctagttttcgaaggggttttgtggaaagaagcaatggtggaccggtggtgatgagcttaacacaccaattaaaaaattaatcactcaat

SEQ ID NO: 168431 - DNA, 468 bp, Glycine max
  unsure (1)..(468): unsure at all n locations
ggaaaacttgcattattntattgaaaataacaatcttttttgttntgaaaggtgaaactaacagtcatgtaaaagcaactaataaaacttttataatatttttttaatcaaaacttttataatcataagatatagtaaggataacacataaaaacagagaaattccagcaccgtaaaatgaaaataaaatatattatctcttaatacggtagaaaagatattatattctaactatgcattacataagttttgattgcaaggagtagatcttgagctttgcaagatatgtaatttactaaccttacctccctcccttaaaagaaatgtgttgcatccccgtatgatttaattttctgtacaccttcatttttattttatccacctacccagctaccctgttaacgtcaggagaggtgtccccgtaacgtgccagaacttataagccttattcataanacaataaaaata

SEQ ID NO: 168432 - DNA, 376 bp, Glycine max
taacagattattataaggagccactatattatgccaataaactgaaagaatattgatatttgaacacctctttggtatgacctacactttaacatgtatctttttattcatatctctttctatcatatcacatatcatacttatatgactatatttttgccttctggctttttatcttaggcgtcaaacaacattgagtgtccggacatcattttccaaactggaaccttcaaataaacaaaaaggtcgtattctttctgaaaaacttattcaccagaggcacattattttgtgctgggaaatgtatacgatgttgaaggaagactcgatgcttgacacgataatgtgagcaacacatccatcgatgcgctagcat

SEQ ID NO: 168433 - DNA, 465 bp, Glycine max
  unsure (1)..(465): unsure at all n locations
tgtaggaaaaatatnttttgtatattatgtgtcaattattatttaaatgtataaagcagaacttaaagcattgaaacagaatgtatataattgctattcaaattgttttactttagtgaatagtaaggcaatgtatattaaaaccctccactacttatgcctgttagaagggctatattcactaaggaaaagtaatagtcaatttaagaacataataagattcttccagtgctacactttatgaaagcagcttaacattcaaatttaatgcctaaaccacaaaagcgtgatggggcaagttcaaaaacctttttaaatgcaaagagagaatagtttaagacccaatttggggaaatcgtggaactctcgaagagaaaattatatatatcgagaaatgtcaaaattatggaactgtggaaaagcaaaagcaaaactaattatgcagctaaccttgtttgacaaaaa

SEQ ID NO: 168434 - DNA, 438 bp, Glycine max
  unsure (1)..(438): unsure at all n locations
agcttaaatattttgatcgaatgctctgtttagtttctcttgantnacntaaaatgtaagttcaatgacaaaccggctcaacaactaactgtattgaaattcattcccacccaattcaaacttatttaagaaaagtgggggaatgaatggtttcagaaattgtaaatatcacctgatttctctaaatcttctctaatggaggtcattgaaggattaattacaattgcaaagtgtgaccctgcataattgaaaaggtctcttgttgaaaataatcagtattttcacacacaacaaaaagaaaggggggctcgttgagagagacctgcagagacatcactagacactagttattgtagtgtggaccctattaagcacgattgtttaccacgtgaaaggttgcatgttcacaccaaattacattctgagattgcgagtgtc

SEQ ID NO: 168435 - DNA, 447 bp, Glycine max
  unsure (1)..(447): unsure at all n locations
ctaagctttccttactgcagataagtaaattatttcatatattatttatgtggatttatatttacccagatgattgatttctaagtatctcttttcattttgttagtataatgaagtttaaccatcaaacatagttnttaacgccaggcattaccaagcttcatttatatggataatacaaaactatcacctttattggaacatttaaagagaatgagacttgttactgaacatactgaccaggttttcctctacttcctagcttgattacttgtttaaaataaaagagacagttgtgattgtcataaaattgcatttgcatattntgtacacattttttactgtagagagcatacatataccttgtatactgtgtgtcctgtactcttaccaatttgaaaatttatatccccaaaatgatcatatcttttattcattgatgaaata

SEQ ID NO: 168436 - DNA, 414 bp, Glycine max
  unsure (1)..(414): unsure at all n locations
agctagccaccctgctcgcctaggtgagttcatttcgcccaggngagctaggctgcttcctctagaaggcaccgccttctggaggaacttcctagaaggcccaagtgggcctggttgctatttgcaccccctgtttactaaatacacccccttccattttttgctgattctttctccataacgttacggaactttaagaatttcgtaatgatacttgtgttctttccgcaatgtcacaaaaccttacggattacgtaatcatcccttttttggctttcggaaagttactgaacctcacgaattgtgcaacaatgcttccttttgacttccggcctgttacaggacttcacggatagtgcaacaatgctttcttttgactttcggcatgttacagaactttacggattgcctaac

SEQ ID NO: 168437 - DNA, 243 bp, Glycine max
  unsure (1)..(243): unsure at all n locations
tgatgcagtctggaaaatgagggncgtaattatactgtgccagttagagatgtattttcccgctgctttctttgacatcatgattgactcgattgtgcatctggtcagagaaatcaaatgttgtggtcctgtttatatacggtggatgtacacggatgagcgatacatgaagatcttaaaagggtatacaaagaatctatatcgttccgtagcatctatcgttgagaggtacattgtataaga

SEQ ID NO: 168438 - DNA, 429 bp, Glycine max
agctatatctgctcgtttggaataggcaatgttggttataatggaggctgttgctgctgttgtgccacaagagagggatccccaacttgtcttgcttgagcttctccaagtagcctcctcctcttttgtgactccaaacattgaagaagttgctccaattccctcacaaactctatagcccctccaattatagaagcttgatcaccctatacataaacaaaaaatgaaggaaggaaaaaataggacaacatatgcaagatttgctatggtattcagagaaatcaaagagttttggtataattggttttttgagtcaatatatagttgaatgagtttctttttgttcataaaaattaaagacatatacaggaggactttaacaacaatctatgcactttgcttaattaattgagttagactttctcatat

SEQ ID NO: 168439 - DNA, 427 bp, Glycine max
  unsure (1)..(427): unsure at all n locations
agcnttttctatttatagccttcatcttatttatccattgntncaccggatgaattcttcattctattattcgtccgaagtctttgaggtctttagagcatttaatgcttgcgttaaatacatgttccttctttatgcaaagtccatgctgataggttaacatatattgtacttcaacagggaagtcacttctttcaccatagtaggtttgcaccaacagagcacaccttttgatgaagattaacactctagactgtggatttcatttgttctttataggacttggacaaatcctatgagaatgttttctgtaatagagaatctcagacacaatattaaatgaacgtcttaaatgcacttcttaatgctatgccagattatcttatatgaatgtatcgtctaaaaattcagatcatgatctgatagc

SEQ ID NO: 168440 - DNA, 446 bp, Glycine max
  unsure (1)..(446): unsure at all n locations
ttgaaaccactttcaacctaaacggtgaaatattatattttgtttatttgggtgcagtcatgtttatcgcataaaaaaaatgcacatttaatgtttcctatagcatagatcgaatcgcaaaaaacaaacaaagaaggttatgtccccacacacacaaaccaagaatgaagtcaaagagaaagcaacgatgataatggtgcgcgaggttgacgctgcacaaggttgtgggtgcacgacgttcatggaaaaccaggtttacggtgcgtgacgttgacgtaaattgactgagacaatgtgtaaaaactgttttttttttccacctatttacaaaattgtcacggcgccttatattaaaatgattctctataattctcgtaggtttcataacgtagaatgcagttnttgtagcagtgaaccatcagaaaaatttataaatctgagatata

SEQ ID NO: 168441 - DNA, 428 bp, Glycine max
  unsure (1)..(428): unsure at all n locations
agctttcaatcgaagctccctgaatagttttatgcttgacttctccaagtgtaatggagtccttgccaatactaagagaactcacaaaattctcatataaaggaggagagaggctaacaaaatcatttccagatcttcatcttttatcttggcatcaatgtcacaaagctccatcagaacaaagtttaactcatcaagatgtttttttagtggtgtacattctcacattcggaggccaaacacacattgtttcaaaagcaacttgttgtagattgattttgtcatgaagagtttctccagcttgagccataacgcaaaagcaattttctcttcagatacttcataaagaacttcattagataacaacaaaagaatcaacgagcaagctntntcatcttgcaactcaagaactgacttatcagcctttg

SEQ ID NO: 168442 - DNA, 467 bp, Glycine max
  unsure (1)..(467): unsure at all n locations
tatcccatgcttctttggtcgtcgttgcgttggatatcttcttatatgtatcttcatccaccgattgataaatgagaaagagagctctcttgtctctctttcttgactccttcaacgtgtcctttacaccttggcttcttatccgctcctccaagtcattctctacgaatnccacacatcttgagctcctagtagcgccttcatcttgatactccaattatcatggttgttctttgtgagcattggcatttggaaaggaaaacctctattcgccatcttttgaggatcttgaagctctgataccactctattggaaataaggttttttatgtttatgaaaagtgtttacgaatattggagactttgaatagaaacttgataggaaggagaattctttatggaggagagaactttgtatttttgcttcatacaaatgtatacgattacatctctatttatactactct

SEQ ID NO: 168443 - DNA, 409 bp, Glycine max
agcttgaaggtaaactagatgccttgttttatctggtaacctaactggccatgaatcaaaaatcaacacctgtcgccagactctgtggtttatgctcctctgccgaccaccacacagacctttgcccttgtgtgcagcaatctgaagcaattgaacagcctgaagcttatgctgcaaacatctacaatagacctcctccacctcagtagcaaaatcagccacaacagaacaattatgacctctctagcaacaggtacaatcccgagtggaggaatcatcccaaccttagatggtttaatccttcaaaacagccgcagcaaatacaacagccttattttcagaatgctgctggcccaagcagaccatacattactccaccaatccaacaacagcaacagccccagaaaca

SEQ ID NO: 168444 - DNA, 470 bp, Glycine max
  unsure (1)..(470): unsure at all n locations
ntgagacgcatgtgatcctttggcatcatcaaaatattatcttgatcctttgtctacacatgtgatcctttggcatcatcaaaacatcagcttgatcctttgtctacaatctccccctttttgatgatgacaatcctgaaattccaccagctctatgcaagatgatagcagttcacacaanccttacttcccctatcttttggcatgtatgcctaacttttcttaatgataaatttctaattgataattgatttctaacccaagttctctcaagttctctccccctttggcaacatcaaaaagaactaagcaacacaatcaaaatccaaacagagccaaacattaaaccaaaataaatccatacattgtcataaccaaccaaagtactaataataatagtgcaaaagtactataactagagcaacaaaaattcaaatacacgacgataaaacaaagtactaataatactt

SEQ ID NO: 168445 - DNA, 175 bp, Glycine max
caaatttttttatagtagaaaggtttagatatgggtcaaatttgatgaataacaggtataacccccaggtttttgagggatattataaggctaaaatgttggtaaggaaatttatggctctcccaattcgctttaacctctttcctcatatcatgtttctttctttactttcaat

SEQ ID NO: 168446 - DNA, 427 bp, Glycine max
agctataatgcaaggaaacatgcttatgtgtttgaatccaaaatttggttttaggattagaaaagcatgaaaatagggactcttttgtaaggatttgagctgccccatgattggcactttgcacctaagtaacgtggaagatgcttttcaatggtgtgtagatatatgtgaatatatggcataaaaatatgttgcaaagtgtgtgaatatatggcataagaataccttgcaaagtgaatgaatagtaaataatgcatttcaaaaaatgtatatttgtggataggtagcataagaggcttttcaaaaaaaaatgtacccatgccaaaatggaacaagaatgcttcccaaatgaatatatgatgtggaattgcccctccagtgtagataaatggcatgaaagttccttttcacatgccagtgtgtgtgc

SEQ ID NO: 168447 - DNA, 401 bp, Glycine max
  unsure (1)..(401): unsure at all n locations
tgaacctttcgacatatctccaacgccaacccatagataaagcaacttaagacgaacgatggaggaagactgatgatatggttggcaagactctcaaactcagagagataattgttgattgtgccacattgtgtaantctaataaagcaccaatggggtcatcgtttgtgagggcgcaaaacgcgcctacaaagcctgaaggaaaacagaccaagaagcaagtttaccattgttggtcatccactgaagccacaccaacgtgggtccttccatatgaaaagaagcaatggtgaggcgctcttggtcaggggtagaatggtattcaaagaactacatgatcctaaagatctagcccaacgaattgaaaccatcaaaatgaggtacttcaagctttctgtggt

SEQ ID NO: 168448 - DNA, 437 bp, Glycine max
agctttcaacaagagtcttcacaaataactattatgtatcttaaaactaacaaaactacccatcatgtctcccaaaaccccatacccacgaaaatcaaaggagaaagaagtccacccaaacctgaaattttgaagtcccactcgtagacacgcacttcacgaccccgaaaaagccctcctttcacgatttggggcagaaatgatggccaaaggttggaactttgtttggagcttcaatggagaacgaagaagaagagaatgacaacatgagggagagagagagctgtctgaaattgggctgagtgaggagagagagagtctttttagttttaaaaggttttttccctcttttattattattttatttaagctatgccacatgtctccatttgagtggagcaagaagggcccactttctcttttgattgtgacccata

SEQ ID NO: 168449 - DNA, 463 bp, Glycine max
  unsure (1)..(463): unsure at all n locations
gatatggtctttaccgcacaaaggatcaaagagggtctaaattatgcaaatctgatcatcatgctttgataaatgccaaaaaaaaactagggcaaatgaagagggtgagaatgagggagaagcccatgctgtgactgccttcgctatacagccaagtttcccaccaaccaacattgttattactcagccaataaaaaaccttctccggacccaccggccagttatcaacaaaggatatccctaaatcaaccacaaagtctgtctaccgcacttccaatgacgaacaccacctttatcacaaaccataaacaccaaccaagaaatgaattntgcagcgagaaagcctgtanaattcaccccaattccagtgtcctatgctgacttgctcccatatctacttgataattcaatggtagccataaccttagccaaggttcatcaaccttcatttcttcgagaatac

SEQ ID NO: 168450 - DNA, 432 bp, Glycine max
  unsure (1)..(432): unsure at all n locations
agctntactggtatggagcccaaganaagagtctattaaccatcaatttattcagagaaacccaatataaaaataaccaattgaatatttaagctataaatttctattttatttgaaatctatttgttttggtttaacttatcctcaactttttaaaatggcataaaaattatcccaaatgacatactaagatgaagtgggaaccaagaaagtgcttcactaacctgaaattctgataccaatgacagatgtcgtaccagatgtcacgacatcacgcttcagaacatggagattatatttgactgtatgaacagattaaacaagtaaataacacaagagaattgttaacccagttcggtgcaacgtcacctacatctgggggctaccaagccagggaggaaatccactaaaatagtgttagttcgaagatct

SEQ ID NO: 168451 - DNA, 449 bp, Glycine max
atggaacgacaactacttgtgtgattcggaaggatcaagcgaggggttatgaatcctattgtgcttgtgccaccaatgcctggaagaacactcattctatacatgactgtgttggatgagtcgtgggatgtatgctgaggcatcatgagcgtttgggaaaaaggagcgggtcgtctattacttgagcaagaagttcatagcatgtgaaaggaactactctttgcttgaaagaacatgttgtgccttggtatgggcagaccaccgtctaaggaaatacatgctgagctacaccacttgactggtatcgaagatgaacccagtcaagtatattttctaaaagatcactattacaagacggatcgctcggtggtaggttctgttgtcagagttcgacattggttacgtcactcaaaaggtgatagagggaagcaccttggtagatacctagc

SEQ ID NO: 168452 - DNA, 431 bp, Glycine max
agcttgggggagaatttgagggtgaagaatggcttctcccctccccatttaatatttctggtgcaaacatgctcgcctaggcaaggtcagctcgcccaggcaaggtcagctcgcccaggcaagctcagcttgcctaggcgagctaactctatgtgtttatcactttgttaacatctatggccgcaaataaactaggcatattcaaataaaattcaagaaatagataaataaaagcatgaatcttaaagaaactggattagagatactaggctgcctcctagaagcgcttctttaacgtcttgagccggacgcaggatgatgatttactgatcatgggcttagcacttgctcgtacctgcccctaagctttggaacaaaggaaatggaattatgcagtaaatgtgaaactaatcacagaatacccatattac

SEQ ID NO: 168453 - DNA, 466 bp, Glycine max
  unsure (1)..(466): unsure at all n locations
tgtcaagttccccagcctggacaagtgttngttccggctgcttatgtcaagttgtacaacgtggacatgcttttggttttgcatgtgaggtctaacatgtcacgtgagggaagcctgttatttggaactctgtctttttaaccccgagaatgcattgaagacaaacttatgttttgtctgttaatgcagctgcgtgtagtgcacacgtagtactcttgcacacgtgtcactcgtggagtgggcacgtactaaatacgtgttgcgtgggatatgaagttgttttgtggtctcctcttgccagtgaccaccgtcacttcaaatttctatcttctttctctcgaagtataagttttccctcacctacacagcacgtgtcgttgcagacgccacgtgaagctagcaaatccctgatgaatctgcaagataactgtctaagcttgccggagtgataactctcttttttgag

SEQ ID NO: 168454 - DNA, 475 bp, Glycine max
  unsure (1)..(475): unsure at all n locations
actaagcgtgaactctagcactttctttaagactagtcacttataatgttatgaatcttgaaagaatatttagaaacaagtcacttgaagaattgtgactgttggaaatgtatttttcgaaatcaatcattggtaatcgaataatattaaggcgcaccgattacacattaacaaatgtactatgtattntgaattttgaagatcttaacattttanaacactggtaatcgattacatgattatggtaatcgattacagctatgtaaatcagtatgaaaaacaatgctggctactggtaatcgattaccacaagataaactctttggtataagattttgtgaacactatatgtgctactcaatgttttgaaaaacattctagtacttatcttgattgagtattctcttgattcttgaatcttgaagactgaatcttgaaacttgaaattcgattcttgaatctttactcttgaaac

SEQ ID NO: 168455 - DNA, 421 bp, Glycine max
agcttaaaggaagtgaaagaatagcatgttcttatttgtctccacattgattggtaaatctgctccccaaatttctgaaaaatgtaaagatccaggtacattcagcataccttgtattatagggaacagtaagtttgacaatgccatgctagatttaggagcttctgttagtgttatgcctctgtctatatttaattctctatctcttggccccttgcagtcaactggtgtggtaattcatttagctaatagaagtgtggcctatccaactggtttcatagaggatgtcttagttagagttggtgaactgattctccttgttgatttttatatcttgaatatggaggacggattttctaaggatcaggtcccatcattataggcagaccctctatgaaaactgctcgaactaagatagatg

SEQ ID NO: 168456 - DNA, 404 bp, Glycine max
  unsure (1)..(404): unsure at all n locations
taaagaatgttcaaatacaaggaattgcaatataaaaaaattcactacttaattgttcttgtcgcaacctaccctttggtgggagggcgacnttcccctcaccgctgcgtctttaagggagaagatgcatatagtatgcaccaacgtttattccttgacaacgtcgaaaaaactgtgaaggtgtggtttacgaactttaattgtgaaaggcttgagagttgtgtttactcactgagaatgtattaacaccccacgtgttcgtgacaaaggacggtaacctttaacaagtgtgcaatatcatgtctttcatctgtttaatatccctttatatgacttatgtacattgatttttttaatattgtgggaagacagggtgtttacctgctctatgtatactaattgga

SEQ ID NO: 168457 - DNA, 80 bp, Glycine max
  unsure (1)..(80): unsure at all n locations
ccccccccccattccctnccccccacacgaaaaaactncccccagcganttgatgcctgacccgacanaaaaaccgcgcg

SEQ ID NO: 168458 - DNA, 317 bp, Glycine max
  unsure (1)..(317): unsure at all n locations
cgaaaaaagcattttatggaaagaatttttttttttgggccaaacaaaatggagggggaggtgctagtacgtatctcggtgtaaaattgatttattcgaaatcttatgtcttattttgccgacggcacantgtgttaaaagatatattagtaaatttattttgaatgattgttactaatcgagatgtttttgataaagtgtctgattgtaatgaaagttatttactgatatcgtattatgaataatggtttagataaagtcctattggtagatttttgaaggaaaatagttagatgctagtgtggggtgatgtgata

SEQ ID NO: 168459 - DNA, 407 bp, Glycine max
  unsure (1)..(407): unsure at all n locations
caagcttgaagnggtagtcatcatgtacgtcttaactttgaaccatatatttaccgcatggacttttctattctctcaaaaatagcccatatcccactaacatcacatctatccatattgaaagtgaatagaaggcgtttgcgcattaatcttgaattaacatggctctatcaaacagattgcaagtaaacataactctgtagcatataatgcgactattgtacggaaattatctacccatactgacttggtgggcaattactttaatgacttgacttcaacagggcacattgaacatacatgctgactcataatacgactcgaggccatagttgagccatgagctatttctaggagcttcaaataccatgaatagcgcaaacctcatgatgatgtttgtataacat

SEQ ID NO: 168460 - DNA, 433 bp, Glycine max
  unsure (1)..(433): unsure at all n locations
ctaagcttnccaaacatggagagctaaatactctgttggttcttttttgtatgtacttgatgtaaatacttgtattctattttatgatgctttatgtgttctctgtgctatcggtacgtcattatagtgtgcttttgccttgataatgtcgccgcatgctttcgctacgatcattcaaagtggaaactggttaaatataggtaatagataatttatacttttgttctgtgtgtttaataatcaatttctctcaatttcaggttaattacgcaaattggcaaaagtgttgttttcaccttctcgctaagccaatatgctggcttagcaagcatgcgctaagcgcgacactcagtggctaagcgtgaggaagaatncagaagaagatgagctatcaggctcgctgagcgcaccgctccaggtcataaagtgcatt

SEQ ID NO: 168461 - DNA, 430 bp, Glycine max
agcttgttggatacacagacaatgatctgtctatatatattgaaacaagataaagcaaattatggtacatatttcatctaggtgcaagtgcagtaccatggtctttaaggaaacaaccaattgtagcactttcaatggctgaagctgaatatattacaacaactagttgtgccacgcaagtagtgtggatgagaagaattttagaagtgatgcattataagcagaacactcccacaaaaatattttgcgacaacaagtttgtcattgaattaaatcgaatttttcatgggaggtccaaacacattgatattcgatatcacaagatttgggagttgatacttgttaaagaagtggggattaattattgtccgattgaaaatcaagtagtggatatttttaccaagccattgaagatggagttattccacac

SEQ ID NO: 168462 - DNA, 365 bp, Glycine max
  unsure (1)..(365): unsure at all n locations
ctgaaattgcatgataggaacaaaagatgagtcaaatgattcaggaataagttcagcaatatntacgcaccccccgccatatgctttnatattataattatatataaagctaagaagtattttaagcagcctaaaatataactgactctataagagaaaaatatatacacaagaatttcttgaactcttaccaatcagattttgatcaccttatgaagaaaactacaactgcatagcaaaaagaattatattatctctctatcaatcccttgccttctttattctttttattagagattctattgatgcttggattctactctcttctggttgcatcactgcttgagatgcctcacgtaaatgct

SEQ ID NO: 168463 - DNA, 426 bp, Glycine max
  unsure (1)..(426): unsure at all n locations
agctntaaaagattggctaagattntgttataatataagcacttanacaatgaaggaaagctggagttgctgcacatgatgtccaacgttatgtcaaagaataagatcgggctgcacaatgcacaaggcaagataaagtgtcaaatgaagaattgaagctgtaggattcacgatgtccgatacaatgtccaggacatcctgcctgaaaatactggaattgctaaaagcattgaagctgcaggatccacgatgtcggatacaatgtccaggacatcctgcccgaaaatactggagttgctaaaagcattgaagttgcaggatccacgatgtctgatacgatgtccaggacatcttgcccgaaaatactggacatatatatctngtatatctttacagattatcgcgcagtacaagagatatatgatc

SEQ ID NO: 168464 - DNA, 460 bp, Glycine max
  unsure (1)..(460): unsure at all n locations
actcaagcttaagtgaagtgaagaataaaagggtggtgctatgaatcttatcaacctanaaacttctttaagttagaagcacctaatacatcaaaggagagactacaagtgatatattctgatgtgtgtgggccatttgaggtaaaatccttcgcacgaaatacttattgtgtttcctttttgatgagtttactataaagacttggatttaccttatcaaacagaaaagtaaagtgttcttcaggtttaagaaattcaaactgctatgtgaaaagcaaagtggtagatgatcaacgttctgtgaatcgatggaggtggagagtataattccaatgagtttcaagtaatatgtgacaaagagttaataatgcatgtgactattgcaccatacgcaccataacacaatggtgttgctgagagaatgaacaagagcattctgaacacaaccgacaatatgatg

SEQ ID NO: 168465 - DNA, 463 bp, Glycine max
  unsure (1)..(463): unsure at all n locations
ggtactatctattntattntatatgcaaatatatatgtctagatttagtacgagtaggatcttatgatccatcttataatcccatgattaacatgtccccccccccttctaatcctacatagaatgctgagttccaacgggcaaaatttgagaaccaaaagaatcaaaccaaagctaagggtatagccaaataggggcacagcaatccaaagctatgaaccacatcagaccaaaatgaggggcataccaaacaacaattggggcaaaacagtaactgtcaacaaactagagtcaaacatagacaaaacaaaaccaagagaaatcataaaagaaagacttgaagataaaacaaggtcaaaacagaacaaggaggagacaacaaggagcgacagaaagtgggtatagccaaaaacagcanaacaagacatgagaagcatgcaaaagcaccatgtggaggaataca

SEQ ID NO: 168466 - DNA, 287 bp, Glycine max
  unsure (1)..(287): unsure at all n locations
agcttgngcacatggagggttaattatatttatgatcggagtgcctccacatgatgactcaaaagtatggcataaaccctggtattaaacattattcttgtatgggtgatcctttctgggcggaaggacatcctacaaaacctttaaaaactattaacagtatgccttttgaacctgattctggaatatggagggcattgctctctgcttgcanacttcatggtaagatggagataggcaatcctgtgcctgaacagctttttgaattggagcccccatggcagttc

SEQ ID NO: 168467 - DNA, 461 bp, Glycine max
  unsure (1)..(461): unsure at all n locations
tgtctgagcacgaaaagtgcatccaatgcagttttctgtatagcctatgaacctgtctttaacgctgtaaccagatggggaatgctaagggttgctggttcagttgctctaagtattgggaagttggtcaatatataactaacggctctctcagatactcgttatttaagttncagaagcccataaatctttctcaatagcggctataagaataaaaaccttgttataaatataaagtggggaggggtagatgtgtttctgcttatatgaatcaccattgttcattaatcaattctgtgaaaaaactgcaactatatacatgtaaattangctttgaagtgcaatctgtaattgttcaaattacattaattgaatacttaaaaagcaataagtgtctatttttgctacaagaggctatataagcacaactgcagtcttgatgtttaaataatgtgacaata

SEQ ID NO: 168468 - DNA, 432 bp, Glycine max
cgtcccggatccttaagtcacctcggctgcaagctgtatacttgacaagctccttgtttaattgcctgaaaccaagcatccggtcttgattttctctcaggtttgtttttgaaaattaaaactggtttagcggatgtgcttcttgatataattggaagcttttagctcaacaatgtttcatcatactttttctttagtttagctcaactatgaagtctactttttgttcagttgcaataaatataaaatgttcttttagttgctttaaagatgatctactggaatgtttgtgtgatcacatttttatgtgccaattattcacttaaacttggtggtgtggaatgtatttcaatgacgtatatcatattaaactataatatatttctgccttctgtctcttggtgttattaagcatgctcatttagctgtcat

SEQ ID NO: 168469 - DNA, 387 bp, Glycine max
agcttttgcccgcgaaaggatcatttgaaaccgtttcaaggtcaaatgccttaacggtcttttttacttttatcggttaaaacaaaccgtttaaaagtctaaaatcaacaccccacataactttcttgctttctcaaaaaactacataggtttgagttcctcatcgcaattgaggatacgtaggagaaaaagccccacttttgtcgaccccaaaagataaaaaacataaaaaagggaaaataaaaataaattgaaattcatgattttgcatatttgattaaaggttgccgtcctttgtgacagatgcgtggggtgctaataccttccccgtgcataaaaacaactcccaaaccttttattctttaagtttgtagatccgctttttat

SEQ ID NO: 168470 - DNA, 193 bp, Glycine max
aaacggctaccggataaaacaaagagactattctactgggcgaaattggaagttccgagcgatgcctctggctgtgcaaacctatacttcagcgggatgatagatttaggatgtttaaaatgataaggttatgagattatgatagatcttttgagtgttgaagctgaaaattgataagactgaaaactgttaa

SEQ ID NO: 168471 - DNA, 423 bp, Glycine max
agcttctgacagtaagacaaagaagaaatttttttatacagtcggggagcggtggaggcagcttaaatctgacttgactaggaaatgggcacttgcagccgacaaggacggtgtggacgacattgtctatgaaaaatacgacattagcaaggagaaatgggcccagttttgtcagacccgcaaagacccctcgtgggaggtatgtactttttcattttcgttattttccacaaaaatatcagttcttataattcattgtagtaatcattttcattaatgtttgattttttcaggatgtgcggaaaaaggcacagaccatctagaagcaaaacactgccccccacgtgttgtctcgtgggggttatgaatatttagaacaaaagctcatggctgagaagacaaataaaatactggaagaagctg

SEQ ID NO: 168472 - DNA, 468 bp, Glycine max
  unsure (1)..(468): unsure at all n locations
ntacatggagctacatcatgtggtatcagagcatcttcatctatgtgatgttcttttgcttcctctatcttttgtttgatcaattcactttaattccttgttcttcattttcttcttcatgtatctcctccattttcttgtggtttccgctgcctacagtagattcaaaaaataaactgattaaatcttagatgtacacttgttcttgcatttctatggttcgaattttatagatctactcttgaatcttgtttttgtgttgattttaggttctatattttttcagtcataatcctcttgtgctgaacctttagatctcatttttcttgcaaaatattgattagaaaagaaaacacaaaaatataagtgtaaatcacttcatttatgtcgtcttagagtcatgtttagtcataataattgtcacattatgttctaagcttgtcgtgaatattgattttgttgattgaa

SEQ ID NO: 168473 - DNA, 338 bp, Glycine max
  unsure (1)..(338): unsure at all n locations
tggtttttatgaaagttggctgcctctcatcaataagaacagatatcacttgtctcaatctatttggtaataacttagctatcaccttggacatacatccaatcaaggagatgggtccgtagtcatcaaatgactggggatgtttagttttgggaatgagagatatgaaggaagcattactgcctctagggaaactgccatgtacatggaattcatcaacaaatcttctgaagtcagctttcagcatatcccagaattctttaatgaatttgaagntgaaaccatcaggtccaagacaattggtcccatcacaactccatactgcttctttgatctcc

SEQ ID NO: 168474 - DNA, 397 bp, Glycine max
  unsure (1)..(397): unsure at all n locations
ttgtgtggagcttcaatggagaatgagggaggaagaatggtatcgtgtgggatagagaaagctgtctgaccaaaaaaaatgagggctgagtgaagtgagagagagagttgctttttggtttttaaaaggctttttcctcttnttttctattctattcaagctctgccacatgtcctatttgattggagcaaaaagggcccactttctctttttgactgtgacccatactcagtcacaaaagtgagaaaaatatgacctttgaaacgctaaaatcctgcctcggtttgcgtgccgcttctctggttccagtatctcgcgtttctctgcgtccgtcggggccagtttttgaaagcaagcaatatatatatcaaaacgctcagaatgaaacccccagcgt

SEQ ID NO: 168475 - DNA, 414 bp, Glycine max
  unsure (1)..(414): unsure at all n locations
ctgcagcatgcaagcttatntgaaaagaagaattcattatctttgcttactctaacatcctactgagaaaatagggatcaaatgcgtgacatcacctctttcaatgaagtaataagtaaaactggttacaacgatgtctttatatctaacacatttcttcctcactagcatgatgtaacctgagcatgcacttgtgtgcacatattcaaaatgtggcttgaaaaaaatatcactcataatgtacgtctgcatatttattttaacaaaagaaaaaatatcacacatcttgctatgaatatgcattgaagaatcaaaggtgctagctagttaatcggaatctgggggggaattgctgaactatcttccattggggcatttgaacatctatcgttacatcccaattttcatacatga

SEQ ID NO: 168476 - DNA, 485 bp, Glycine max
ggaacatagaaactaagcttctaaggaggtgtgtgtagctaagctctacattttttgtagtttctcaaagaagattctcaaggaagtttgttaagaaagcttttcaaggaagctaactagcctataaatagaagcatgtgtaacacttggtgtaatttcccgacacgagagtcttgtgagacactattaaagttccacttctctccctcttttattccttcaatttcgtgctcccacctctctctttctctccatctttgttttcctccattgaagcatccttccaaacttcttattcaaggctcatcttggtggtgaagctactatttccatggcttattctctagaggatggcgcctactctcacctcttctcttttgtcttccgctgcatatccatggcggagaatcaccattaaaggacctcattgaagctcaaagatacagtcctcatataagctccacaagcaagcttccattaagtgg

SEQ ID NO: 168477 - DNA, 403 bp, Glycine max
agcttgcctcaaagagatctaggaaggatttattactgaaggaaccagttccgctcctgaatatgacagccaccgttttaggagcgctgagcaccagcagcgcttcgaggccatcaagggatggtcatttcttcgggagcgacgcgtccagctcagggacgacgagtataccgacttccaggaggagatagttcactggcgttgggcatcactggttacccccatggccaagttcgacccacacatagtcctcgaattttatgctaatgcttggcctacagaggagggcgtgcgagatatgcgatcctgggtgaggggtcagtggatcctgttcgatgcggatgctctcagccagttcctgagataccctatagtgctggaggagggccgggaatgcgagtat

SEQ ID NO: 168478 - DNA, 450 bp, Glycine max
  unsure (1)..(450): unsure at all n locations
ttacatctaaagcgaacacacaattgacatgctcctgatattcattagtcgatctcgcaagcaactcgattagactagcgattgtttaccacatttcagcgtaaacaggtgtcaatgttggcggagttgtgttgtcaatgttgcggcgcatgatagaactagatcagaacagggaaatcattntattcgaattagaatgctacaacttaaggactacacactctcatggatttaaggtttcatcaccctcctattctctccaattttttgtccaacccctgactaacccctcccaaagctatttatagcctcttatctaactacaattggttataactaactaactaactgttagttataactaactaacatatatcttaactgtnctacaactaagagctctctaactctttcaaggatattntctaacataaacatttccccatccat

SEQ ID NO: 168479 - DNA, 404 bp, Glycine max
agcttctcctaagccacgggggagagtattatttaccagaaaaaaagactcataagctaaactaaacctacatgaaaaatcatctttaagaaaaatctaatatcagaaaaagcttacaaattaacccgcataaactaattatggccgacggagaaatcaatcccattttttcttatattagaagttctttagataaccttattcaaacatgttataactaaccaagtgacttatcacaattaatcaacgcgctgaagtggaatcagttttgaaacggaatactaaacacaggcacaaagaaatatgagcaaaaatatgagtcaccaaggtctattctgtgactccccagaacccacaaatatgtgaggcaagcttgctacggcccagggacattcgccaaagcc

SEQ ID NO: 168480 - DNA, 429 bp, Glycine max
tagtaccacaaaccctgaagagctcacaccacacattattgattacaacgggatcccgatccgaaaccaaattgcggggaagaccatgacgtctgcacacaatgtcaaaaaataatcgagctaccttgaaagaggtatattgtcgcgccacgcccaccacaatgcacaccctggaaaaatggtctaccacaacaaggatcactgtatagtttgaagatggaggcacacatgtgacaccttatttctcgtcaaatacaatgaaaatgatttctttaaaataaatagtcttacaaaaattatgacatttctatcattaaataaacaagaaacaataactctattaattaagataatggtttgaaggaaaataaaacacatattctattcattcatttgattggacataaatagagtcatgttttcaataac

SEQ ID NO: 168481 - DNA, 408 bp, Glycine max
agcttgccatcttattattggtagctatttatttcattcactattagccaatcacttatatgcctctcttttttctccctaccttcaaccatttccgctttatttttggtctcttatactatccaaatggaatatgtaccattatgggaatatggaagtccataacatgatgaaaatacataaatcaatacaagagtcatgtcttctcttatttgatttttcatcctgcaaactaaaccatatctggatatactttcccatatttagttcggttttatatagaaagaatcacaatgtctatagaaagaattaaactgctataaatatatactacacctaccaaatcatctctccttgtcaaagaaacctataacaggtgagatccttaaaaaaatatatccttcttta

SEQ ID NO: 168482 - DNA, 437 bp, Glycine max
  unsure (1)..(437): unsure at all n locations
aactaagaacttgtttattgtttacgttcactactttacttaattaagttagtcaaatatctgggacncagtaatggataataaatattaggtaagtaagtaggtgaagtttggtcgtcacactaatttactaactttatcaaaatggagatgtatcttaaccttagttacttgaattagaatagaatttagatactcgaaatgataaagacttcagctatttttgtaagatttcgtgaactttttcacttgagaaaacattcgtttaatggtggggcgaaaataatattaatcaaaataatactttagaatgagtggtgctctctagaaataaaaatataaacgttataattgttatattaaaaatatatattggatgaatttaataatttgttcggtgcgtatatatatatatatatatatatatatatataata

SEQ ID NO: 168483 - DNA, 398 bp, Glycine max
  unsure (1)..(398): unsure at all n locations
agcttccagattggtgtgccacgccactgctgtttcggctaanctgtcttgaaagaagtgcattaacagctcttcgtccatagaatatgcccccanttcttggcaatacatccgaagatgaccttttggacacgtcgtccctttgtatttatccaaatctggtactttaaacttgggaggaatgatgatgtcaggtaccagacacagatccactaaatccgagaacggatagttgccgaggccttctaccgctctcagcctctcttcaagtagatcaatctgtcccttgtcttttgcaaagggaacgagttccttaacgggtgcggatggagatgggacgtggcaaactatgtttggttggggcaactcatggcgggctggttccttgaggggaagta

SEQ ID NO: 168484 - DNA, 449 bp, Glycine max
  unsure (1)..(449): unsure at all n locations
ttgagaaagtgtaagaatattaaggctattgttcttattatcgttgtgggctcgganacatactagtagtattattactggacctaattattgttaactaatataaataggaatattggttgtgatattgttaattccacccatatcttcaatgtacaactgtacccaaatttttttattttccttcttctttacctaactcctacaatttcaaatttcaaatatttaccaatcttcaatgccaatctgatttcctcacaaaattcctaactaaattataagtnccatgcctaaatttacactacacttcataccacatctgaatatatagttagcattcatttactttagtatttagaataatgggattactctatgacctaatgggcaatgaagcttgatgtcacaatgcacaattctaaccttcacaatncgcaacgaagtgagat

SEQ ID NO: 168485 - DNA, 427 bp, Glycine max
agcttagtcataaagcccttttctagtaattgacctaagctgaggagattacttttcataactggtacaaagagtacatcagtgatgcaagactgaccttcatcctttgtttttataaggaccttcccaattctttcagcattcaaagttctatcatcagcaaatttgacttggctctttacagattgatcaagattgagaaaccactctcttcttcttgtcatatgagctgagcaacctgtgtctaggtaccaacaattatcacttgccccttcaatttgagtagttaccattagcagtacctgttcaatgtcatcatcttcttcctgagctaattttgcatcattgcctttacgttctcttttgttattagggttggtggaacactcatcagcaaagtgcccaaacttttgacagttaaagcatt

SEQ ID NO: 168486 - DNA, 466 bp, Glycine max
  unsure (1)..(466): unsure at all n locations
cttgtcttcattaaaatacactctcaccttttctaattctcattgtctaatacaggaaatgaagtccttgaagatgattggtttggctaaattaaagcatggattataccagttgcagataacaaggatgtaaccaccattcctaaagtttccttcatcaatacttctccaccccacctattaccgaaactaacctttggcactttagactataggtcacctttccggtaaacgtctcaatgttcttcattctatttttccttttatttctaaacatgttgaagaaaattgtaatgtttgtcacttagctaaacaaaagacattgtcatattctcctagtattaatagagcttccaagatttttgatttggttcatatggatatttgnggtcctttctatcaacattccattcatgcgtcataaatatttttaactatcgcggatgattctagtcgctatacatcg

SEQ ID NO: 168487 - DNA, 356 bp, Glycine max
taaagctccaaataataatgactgataagaaaaacttattaccgataccaaattaactagtcacattgtatttttctaatgacctgacgcaccactttagcaaggtttttgagtattaaaaagcagttctgagatcacaacttaatcgaaactttgtgaaaatcttaattttagaacttaagatttatcaatgccactgcatttgaacttactaatactatgggctatttcaataaaactaccacatcaacgtgaaatgaaggaattaagaggtggagaactcttggcagtaataactggcatggaatacaaaatctttatgatgtctacacatgggaaagattatatgttgtatt

SEQ ID NO: 168488 - DNA, 409 bp, Glycine max
gcttatttgatataatttagatctggacattgtttaataactaagtaaaaaggtttttattgttcataaaaaaaagaaaaagagttttttctttttctttttttgagtggttgtcattggaattaatgcatatggtatgcttgagagctttatactcttaaaatttaaattttggtccaagtcaatctaaaagataactaaggatcaggtgaaggttgttttgcacttttatatatatatatatatatatatatatatatatatatatattacacacgctcaaaatttataaaattaaatatctatgaatgatttgataacaatctaataatgagttcaataataagtgttcaatacacctaacaactctattatgatagagtttaatatcataagagaatttaaatat

SEQ ID NO: 168489 - DNA, 349 bp, Glycine max
gtggctgaataacggatgacctttgttgatgactgagcggcgggcaatgagaaaggctgatattggtacgagcaatgacactcgtgagtcgctaggaaacttggacatgcagaaacgacagccacaacatgggctccttcctccttatcatcctctctatttgccctacgccttttatctgtccaagccggacgatcaaatttgcctcttttctgacccacttcgatccttatgccaacgaaaactaaacccacaaagcttgaaggtgtgtaacccaccaccttctcatagtacaacactggtaacgagtgcactatccatcgtatcatctctccctccatcactgggg

SEQ ID NO: 168490 - DNA, 445 bp, Glycine max
ttaagtcacctgcggcatgcagctcaaatttatgatagggcctattttataaccatcgcagggatcacagccttgaaatattcttgtctaaacagcttttctgcttgctacgtcagcatgtaataagagagagaaagacacaaggcacaatcctttttttagtagcgtttaccttatcccactactacaaaaatagttcgcacataaaatattttgattatgcctttggcttaccttaaaaacaaatacttgaaattcaaatgaagacatattttcaaaaaggcgacaaacattttaacagaatcatccttgatcagaacacatgtgtatattcattttgtcatacgagataaaacttagcgtaagtataaattacagctctaagttctctctattctttcggactacaagcaacatagcacattggatactagttttcataaaa

SEQ ID NO: 168491 - DNA, 404 bp, Glycine max
  unsure (1)..(404): unsure at all n locations
ttgaaccgcaaaacaaaacntgcatacctcctgatttcacgcaccgcatcatcaaaattatgacgagattgtggaaccaacgactctcaacatctatttttcgcacgccccaccacccccagagttaatcatgttctaaagaatcatgcttcaagaattaagtctcatagaatcaacagttaagcatgttccacacaatcacgcttcaagaatcaagcctcaaacaatcaagattcacgaccaatcaagttgcaacaatcaccattcaagaataatcacgatcaagattcaccaatcaacagaagactcaatcaagatacagatcaaaaaaagcttctcaaaacattgagtaccacaagaatactcacaaacattttaccacacagtttcactctctggtaatc

SEQ ID NO: 168492 - DNA, 423 bp, Glycine max
gcatgcaagcttcctcgggccattgtctatgaagacttatatttggaaagttagtctacaggataatgcttattttaacacaaaaatgatatgctaatctttccgatttagaacaaactcatgcacacattaatgtggcccatttatgaacatgcgtatgtgtaaaatatcctactatttatgtcaacatacaagaacattcaacacattctagttaccacacatatatatatacatctttgaaaagaacacacattctcgtgctcaaggcattgtgtcaaaatttacacctaatcacattctaaatattctgctatcacaaactacctatacatattggaagtatttaacacacaaatgtatgttgtttcactcacatctctttatatgcacatcggaaagctaattacgccttgcgcatac

SEQ ID NO: 168493 - DNA, 396 bp, Glycine max
agctttggaaaacgatgtctatacatatattgtttatatgaagcgactaacactggcgcttagctcgaagacacagagaacattttcttctacagagtaggcttagcgcacagctacagttagtctaagtctacaattttcaaaaccgcaaaggattggagcttagcgcagcatgttggcacttagctcagcctcaacagaaagacactcaggcttagcgcacatggcgcgcttagcctgactacaaaaacttaaaagatagaaagggattggagcttatcgcagcaaggcgcttagctcaacacacaacaagggcttagcgcacagacgcgcttagccttatttcagaggtagagaaatagaacctaagtgatgtcattttaccctccaagggca

SEQ ID NO: 168494 - DNA, 423 bp, Glycine max
  unsure (1)..(423): unsure at all n locations
atgtttatatatatgatgttgtaatattgcatgatatgtcaaagaaaatatgatgtttttacttgcatgatgtgttataatatatgatgtgtatatatattgcgcaatgctgctgtggataaaaatgttaattanaaaatgtatatattttttggttaataaaaatgattaatattgcatgatctgtttaataaaaatgtttattaaaactgtttatatataatatatgatgttaacatttttaaaactgattataaaacagtttaattagataaaaatgttaaaactatagaaaaaaaatgtataataaaactgttattcttaaaactgtttaattagagtaagacattatttctttgttgttattcgaaatttcataaatatgttatatagaatgatatatgtngatgaagatgatggatg

SEQ ID NO: 168495 - DNA, 428 bp, Glycine max
acttaagcactgagctcagctcagagaataacgtgactcttgtgtgtttgatgataaccacgacgacaacaaaagatgatgaccaaagcgacgaaccaaaagctcacgagaatcaaagaacatccctctccaaaaaatctagaacaagtcacagaggtcaacaatcaagacaaattcacgactcaagaagaaagcctacaaacaagatcaagatcccagactcaagagactcccgatctccagaatcaagatcaagattcatgactcaacgatcaagaatgaagaaaagactccctcacgatacgtattaaaaagatttccaaaactttgaaagcacatgagtttctgacaaaaccttaccacaaagttttactctctggaatccataccatatgctgaatccacacccagagcaaatgagctgaaat

SEQ ID NO: 168496 - DNA, 449 bp, Glycine max
cgcctagcgccataacgcgctaatgcactgctacgtatattaatgattaacataacagaacagacatgaagctctagttatgcatgtgcatgccacaaggcacaagaacaagaatctttgctatagataattgtagcatctatcgccgccctctccacacagacactcatgaagagagagagagagagagagagagagaagatgttgtatatttgagtatgacagagaacgaaaagacatggcgaagacgtttacgcatgtaagctatgaaaactgattcaatactcactctccttcttgtcggctcgtgggcggagataatttacgggaagttgccagcagctatggagaatatatgacctcgtggatacttgtatgatactaatgcggcctcgagacaacccactgtactacgatcatgcttacgccctcatacgaacttatagctt

SEQ ID NO: 168497 - DNA, 331 bp, Glycine max
agctcctatagaaggaacgctgcttatttctctacaatcgcatcacctctcatgagctgggaagaaaatgggccttacctgggggaaaacaagacaagcccttgctttgctcaaagaaaagctcactaacgcacttgtcctaactcttcctgacttttctaaaactcttgagccacaatgtgatgccttcggagagggagatggagctgtatcgttacaaggtgggcaccctattgcctattctagtgaaaaaccttatagagccaccctcaactaccccatctatgataaagagctttatgccttaataagagccctcccaacttgggaa

SEQ ID NO: 168498 - DNA, 424 bp, Glycine max
  unsure (1)..(424): unsure at all n locations
tctcagatccggtatggaagacttggaactgtctttatttgtagtaccaatataacatggatatggcttctgatcggaaccaacttcaatagcatgactaagcggcaatatgagttcattaaagaatatgcttaaangtgcgagacctagcacgccaagttgtgttgctatgattgatagggaaatgatcacgattatggtagatacattgcccacattctactatgagaagctgataggatatatgtcggctaactttgcagacctcgtcttcgccggagaaagaattaagtccggactgagaaaaggcaagtttgaatatgcctccaacgctacccccaacaacaatagaagagccccagtggtgggcacacggaaaaaggaaggagatacacacgcggtgaccaccggcccaacatggatg

SEQ ID NO: 168499 - DNA, 429 bp, Glycine max
agcttgtgttaatctcatatgggtagagctttcttgcaaaacagagtgatcctgattggtccctttatgattttacttagtgagagtgatctaacattctcattgtggcgtccctaaagtaatgactggtttaatagtaatgatttaaataacaaaaaccatggtaaatttttttttctttttctttttcatttctttctcttttcactataattaggtttagaaggaaaatcctcactatagagtcctgaatggccagttcacaactctattcggagtcatttctttcttaccactcgtaatctctaaactattttgctgtttcaaaaggaagagtgtaccagccattactttaggtcatcacgtgaaaataatagaataaaatgcgatccatacactctttacaaataaagtttgtaatgctttctt

SEQ ID NO: 168500 - DNA, 411 bp, Glycine max
  unsure (1)..(411): unsure at all n locations
tctcaacattcttgcaatctcncgtctgagccgatttatctaataaccattaccttctgaccatcccacagatgagcataacataatcaacaacgccaagcagggtaagccgcctaaaaaactttcatttacttagctttcgtcgccccccacctgcttctctacaaaccaatggtttntgtaactgtaattattatgcctgcattattgcagatgaggaattcgagtatgaggcacccttgcatgttacaacttattgctgcattccacaacgacaaggtgatatttgactactcttttattcatattcgttctctgcttgactccttctacctgataaataacacttaccgctacacattttttggccaggattatatacaaacactagcattctaccatgaacagcgg

SEQ ID NO: 168501 - DNA, 342 bp, Glycine max
  unsure (1)..(342): unsure at all n locations
agcatgagtaactacagaaccatcttcacatgcatcacctcgtctgtgagacaaacccaatgctctttacccccgcccgccccccctcacttacttgatttactgtttttactatacaaatagcacatttctacttctaaccatcaattatcaacgtctgctccacagaacacctcacttctgcataaaactctgtatacaaaccacgctccctgagttcgatactccgatcactctctataaatctaaacacttgaccacccactgcgtttgcgcagctatcatttcccttgaatacaatngttaaacattcgagaacaacgaaccatacggcaaagtgaa

SEQ ID NO: 168502 - DNA, 455 bp, Glycine max
  unsure (1)..(455): unsure at all n locations
tgaggtttcttaaactagcacaaacagtacctattacataactatcactgcaccaaaagagaattgacatgccccaccaacatattcaccggatattctagttaactctaaaagttgtgagaccaaacattttggacngcgcacatctgacactaaaatactgtaaagggcatgacctggttctaaaggaataaatcacaccaactgttcaaagacaggacatgtctaacttccagcaagtagatttttagagatttaaattatcctttcaagctaatttcctaccttttactagttacaaataagagaatggcttgattcaatccctgtacatgtatactagttgttgattaagtctcgagccttctatatatnactcagcacctcaaactcaacctcgagaatcacgcatccacacatattaacatcgcaacaagaaccaattctttcactag

SEQ ID NO: 168503 - DNA, 426 bp, Glycine max
  unsure (1)..(426): unsure at all n locations
agctngtttgacagcaagagcatccatgccatctacctgcacaaagtataaatatttacttccaaaaaaatctcaaaaaattgtggtcacgaaaagactacaacacattcaatcagcacatgtatatatcatagctatcaatcttggattgcaacctgccaagcttaagctactgctaaccagtaacaaaattgctatggaagtagagcaaacagtggaatggctgcgatgccaaagttttagataaaacataaaaattatttattatttatgatatacatatatacatgcttacaagcccaaaaacaaaaaagacaattataattgaaaagatagacacaacaagagaaaggaggttgaattgtgttgtgttatattttttctacaggtcacaagctttgtatgagattcctttatagactgttg

SEQ ID NO: 168504 - DNA, 484 bp, Glycine max
actaagctttaattttatccctaaacaaagtgagatttatttttagttctcaatactacgtgacactcgctaaacacctgtgttgaatgaaagttcaagtgacactttgatgcataaaaaatgcgctcaaggatgattgtattataatcattacgatacatggatctaaaagtgtgaatatataccctagggattaatattgatttccaaataactacggttaagtataagctaacgaatcacaattgaaagttatatcaacgattaattgtaaaagtaaagataaactgcgagtaagaaaaatgaatggaagttcatatataaagagataggattgtgaccataacatagcttaatgtttctgctaattgtatttcaattaaactcaagttttctttcaattactaactaatcattcttcttagattgactaacatacttaggccatatattctagtcatctttattctactctataccttat

SEQ ID NO: 168505 - DNA, 428 bp, Glycine max
  unsure (1)..(428): unsure at all n locations
agcttcaccatcaatgcgagaagaaaactattatttgattcagatgatgaagaagatttttctttctttgtgaagaaatttcataaatttatcaagaaaagaagaattgacaggcatcaaaacttcaacaatggaagaaaatcacaagaagattctcaagtccttagatgttacaaatgcaaccaaattggtcacatcaaggccaattgtccttcaaatgaagagtggcccgagaaaagcgaaaagaaaaggtttgatgaaagaaggactaagaaagcctacattgcatgggatgacaatgattcatctgatggttcagaaaaggagattaatcttctaaccaaggattatgaaagtgatgagaacatctctcaagaatgaaaaacaaggagaaaaagtatgatcctcatctntgaagatctagacac

SEQ ID NO: 168506 - DNA, 472 bp, Glycine max
  unsure (1)..(472): unsure at all n locations
gatcttaaattaatcttgaaccaatccttggttgatgaatttatcttgtattaatcttgaagcaatgcttaacctttgaatgtttgttgaagtaatcttgaaagaaaccttgtttgattattctttggcatcatccaaaccatgcctcatacattcacactattgtggatgaggccatacctcaagtttagatgatttctccaaccacgattatagatgttagagtaaggattatattgttgttatgtttcttggagtgtggaacatgcatttgttggatgatcaggagcacaacagataccacctaaccttggttgattggctgccattacattctgttgttgaccaatgggtagctgcctcacaatggatgtcaactctgtaagtttattctccagcctctgattatcaacaaccataaaaacaaanacttcactcgcaacagctctggatgaagcaacaactctagtac

SEQ ID NO: 168507 - DNA, 392 bp, Glycine max
ttgatgataacaaaagatgatgacaaaggtgatgacaaaaagcccaaaggtcaatcaaagaatgagttcaagatgttcaagaaggaatcaagaacaattcaagactcaagaggaaaagatgaagaatacttcaagattcaagaagaaggatgaattcaagaatcaagattgaaggatcaagcttcaagaatcaagatcaagattcaagattcaagactcaagaatcaagagaagacttaatcaagataagtatgaaaaggatttttcaaaaactgagtagcacatggatttttcacaaaaaatgtttaccaaagagtttttactctctggtaatcgattaccagattgctgtaatcgattaccactagcaaaattgttttgaaaaagttttc

SEQ ID NO: 168508 - DNA, 387 bp, Glycine max
atatttctttggcctaataggaactccattgtttttgcagcttctaatgttatgattggtttggccacaccttccacatgtaaagttaggcaatttttcttagcctatgtcctatgacattgtcttatctacaaatctccttctatttttcttacgccttcctctttggacctttttatgtggtggaataggttgtgcatactgtgtctgggcccaatattgtggtccttcgaatggttcaataaaatggtggtatgtcttattataagcctctattgacagccactcatgacacatgtcctcaggcttgccttccttgtgagttattgttgcaatggcatgtcagcatgacattcctacatcaaagatgtaaaatcagagacatgt

SEQ ID NO: 168509 - DNA, 422 bp, Glycine max
agcttaccaccctacaggtctcccttggggattcttgttattccatggcccagaaattcgatgagctcttactccggctaccctccacttccccttctccatcacctcaacctacaccttccatttcccctgtacctgcacataaccacagaatgaaattagacattccgcgttttgatggtactgaccccttcgggtggatattccagattaatcaatattttcagtaccacactaccctcgaacacgacagacttaccattgtgtccttctacatggacggccgggctctcgcctggttccagtggatgaccacgaacggccaactcacctcctggcctgccttcattcaagctctttagacccgtttcgcaccttctcactatgaagatcccactggtagtctcttcaagctcactcag

SEQ ID NO: 168510 - DNA, 431 bp, Glycine max
  unsure (1)..(431): unsure at all n locations
gttgtttaaaattatggtaatttgctatttatttttccacacgatgataattgggagaaggggatatagtgatatcttgtataattagtgttttgaactgctacgagttcgtaaaatgtattggcnntttcccctcactcatattaacttactatataatntttgcactatatccctaatttcatttctttagtggagctctagtttctgtttttacagatttgattctttagtttgatcattaaaattcattcggaatcggagtctttctagatgaaatgttctctcttgaaattaccacgtttgaatactaaatactatcatgattactaagatacaaccaanagacagtgtaagatacaaagacaagaaaagaaaacacgcattttagtacgtgttttctatatgatgacgatttgaagaattgcata

SEQ ID NO: 168511 - DNA, 423 bp, Glycine max
tgcttcttgcgtagacgctctaggcgctctttttattccaaaaacaaatccctcttattactacctattttgaattctttagttcctgaatgtacaaccttcaagttgttgctcgttcccctctttgttttatgccaaaaagaaaatcaaaatgaaacaaaacatggagagaaatgtcatcgttattattactcgaaccacaatgaataacatctaaacaagccattcttatcttagaatgtgaaaactctggatatttatggagaacatggggtatggaggcacgtcaggatgacaataccacacgtcattttctcaaagccaacggcttgattaattgctataggaaaaaagcctacatctactatattgtttggtttgcagctgtttggaccattcggccttcaaatactttactataat

SEQ ID NO: 168512 - DNA, 155 bp, Glycine max
gaggggcggaaaccttgccccccgaaaagagcgccttcagcccacgaacccgcctccaagagacggaaaacctgagggaataccccaaactgcggcagcctacagaaccccccgggcccataacacaacgacgggaggaacccaacgcacagcca

SEQ ID NO: 168513 - DNA, 426 bp, Glycine max
agcctgatagttccccataagaatcattttggagtaaacattgtaaataaatcttgcttatggttaacactgtctctagaacaattccattggatttaatgatgaaatctgtgcattttcaggcgaaaaagaggctaagttttgaattgcaaaaagtagcagttgggctaagcgcatatccatcgctaagtgcagcttcagcacacttagcgcaaaggagaatctggcaaagcatcaacatcaaagttgtgcgctaagcacaacaagtgcctttagccacgctaagcacgagactggcgctaagcccaatttcacttatctgtgctaagcgcaaaggtggcgctaagcacatcattcggatttcagggcctatttaaagctggtctcgtgcataattagggtacaacttttacaccattctaccga

SEQ ID NO: 168514 - DNA, 413 bp, Glycine max
  unsure (1)..(413): unsure at all n locations
gggcgatggcgcacaagaagttatccacatacacaatgcgcgcataaactcaccatacactgttgttcacctccaactgagctcacgtaatttnangcgcccatgatgctcgtttatctgaanaatgggtttcatgaataatataaagctttcacaacattcaagtaaagaaacattcaaacagcataagctatcacagccaagcaaaagcagagcaaaggcagaatactctgctcaaacaccaaccaagatcacaggttttctcacttaaagagcacagtaacgaattcttcgatccaattcgttaaccgttggatcgactccaaaatcttactggaagtctatagtgcataagccacattgtgaccgtcggaattactacatagataagaactattctgtctactctatca

SEQ ID NO: 168515 - DNA, 422 bp, Glycine max
agcttctcaaggaagctacctagtctatattttgaagcatgtgtaacactcggtgtaactttgatgaatgagagtcttgtgagacacaactcagagttcaacttctctccctttttcttccttcaatttcgtgcttccccctctctctttctctccctctttcttttcctccattgaagcatcctctccaagcttcttatccaaggctcatcttggtggtgaagctccttcttccatggcttattccttaatggatggcgcctcctctcacctcttttcctttgtcttccgctgcatctccatggtggaaaatcaccattaaaggaccccaatgaagctcaaagattcagcctccataaaagccccacaagcaagcttccatcataggcccttattttttagctaatcaaacgcaccctaac

SEQ ID NO: 168516 - DNA, 462 bp, Glycine max
  unsure (1)..(462): unsure at all n locations
cgttaagtacactacatattattaaatcaaatgcattattaacaggacataagctgatttaggagcatgcttatacataatacatgaggaagtcaaggatatccaacctcttgccaagaaatgttttcagtatgattctccctctaatttccaaaagatgctccaacaagtcgcatctttaaaaactgaaattctttgatacattaatgaagaattctgaaattattatcaatccgtctaaatctttcacatgaacaaactgcatgaaaccttttgaaaaaataatagatggttgcatccttaggcacaaagccgttctacctttgaagatactattgaacccgctntttcttcaccatcttcctggtttagccattgctaccctttccatccaaaagctataatatcagtcagttctggtaacatgacagtgctacttggtaactgaacaacttcacaact

SEQ ID NO: 168517 - DNA, 318 bp, Glycine max
  unsure (1)..(318): unsure at all n locations
ctaaataatggcccagtccttgtaaagttggctgacccacaatatgttttgggttaatcacctacaagggctttacgttggttcagtccacattgtaatacgggcccaattggctgctgaggcatcaccatttacgagaccacatggtgattggcttgatagctattggggtgacttttggttgccacaatttttgctacactcagccattaagtgctttcatctcctatgtgaatgacatattactaaatcttagtggacttgtatttcctttattgaagcttttgtacaacttgatggnatgcctctctataagct

SEQ ID NO: 168518 - DNA, 383 bp, Glycine max
  unsure (1)..(383): unsure at all n locations
acacgacgctacttggggggtttatgaatgtactcatatatgcactcgagcgcattgtcgnccatcttaaaaacccagaacaaggagccgttacgcgccgctccctgcttgtgatgtaaaaatattatggattttaaacctgaaataaaatatgaaggagcagataggaatatagattaattgacatgttgggaacagggttgttggttgctaacgaagttactgatgttggaaaaggaaattctactatccgccatgtttactctgagcaatttggatctttaatgaactattggaaaaggatattaacgcggttggttgataaaaaatgatggaaattgtcgtaatttaatacttgtggcggaagaagctggtgatgatga

SEQ ID NO: 168519 - DNA, 218 bp, Glycine max
ccccccccctcccccctttactccaacatatacctccttcagcggaattgtgctcttacggacttaatcacgagctgcagcgagaacggagccttttttaactacggccagaataaattcaccgcaaactgggcctgttctccgataccacaactcacctctgacatccagcatgaaaaccgactagctgaacatttaacactctataccaccacaca

SEQ ID NO: 168520 - DNA, 435 bp, Glycine max
tacaccagaatcatcttatgctatagactcatgaatgttatattgtcctgtacacaccccgtcaccatcgctatttaatacaatccctggaaacaaaatacttgaaagctacaacttccatagaatgtagaaattataaataactgcccctccacccacaccgaagtttcagtttaataatatatttaactgtcccgtgcttcctcctagaatatattcacccagccagcccatgttagctacaaagcaagctgtattcctcgtgcaacgtaaatctgtttgtcagagttacaagaatgttatattcttcacttcacttctctcatgtcccttgctattcaataaagtactagcacccacgcacgaccaagaggatagagaaaagaagctgcacaaccagcactggattcaaacgcagtacaacacctttcgact

SEQ ID NO: 168521 - DNA, 436 bp, Glycine max
agcttcttgcacatatgtgcagcagttgtctttttttcccgctgaactcctgttgatatattaggaaggaattacgaaaccatttacaatataataaaaggaatgttatcagaattcaaaaattggatatgggtagtatcttacagaggatatcataattgttcacaatgcacttacgatatcatcttagttcttattcaaatccttgaaatactttaaaatgcaaaatcagtacttggccttaatttttaattgagacgcagcaaatatttactaacatgataatcagtcatatacaaagtaaaacagctaaatatttaattactttgtgggaatggcgtaacaagcctattggataaatcttgaaaagccattagaacaaatatttactaacatgataatcagccagccatattcaaagaaaaacagctaaata

SEQ ID NO: 168522 - DNA, 421 bp, Glycine max
  unsure (1)..(421): unsure at all n locations
agctntattatgccctctcccctctgtgtggatttcttcttcgacgaaggcaagatagttgttggcagtgatattattgaccagccctccgaaaccttctaccgagatgtcttgggccacatgggcctcgttcagaacttttattagcagagcccgatgaggctcggagctcatgagtaactccaacagcgagaccctggccggagttttgttgagctgttcgataaccttgaactcgctctgctgaattatacggaggaactcactggcttcctctagcgacacctcctttttaccatcctttttctccgaaagacctatcgctggaatatctttattcgaagcgtggggtgcttcaccatcttgttcctncaccacttttccttttcccttgacgttcgcgggttggactggtaggttc

SEQ ID NO: 168523 - DNA, 404 bp, Glycine max
  unsure (1)..(404): unsure at all n locations
aacatccatttataattaataatatttcagggtgttacactgaacccgttcccgtcagcctttcacacctatttataacacaacggggaagaagcttgccgccaagcaattggtgacttactccagaagcaacttgctcgcctacgtgagctggttgcttctcccctaagtcttctaatgggcccaggtgggcccaagggctgaagaatgtcccaaaatggaccattttgcccctactttgagttttttgcccatttccttccgaaacattgtgaaaccttgtagaatgcgctacaattggtgttaagcaactcaattcggctggtgagaatctcaaatgtggcaaacaattgtcctcgaaagaaattanggtatggcagctgcctctatttacttatctttta

SEQ ID NO: 168524 - DNA, 409 bp, Glycine max
agcttaatatttaaaacaaacaaacattattcaagtcatcaacatgtaactttgtctgactataccggataattaacattcaaatggttcataacctcatgcatatatggtttacgtacatagcatgtaattaaactactcgatcgtttaaaacaaacattaacatcagtaactagttatcatatactgatataactaattcttactcattatctctatctctaaggtgtgatacaagccttcactaatcactactatgattccacaaccacacacctgcaaagagcatataaaaaagaaagaccatcagcaaaattaaaaactaattaaaacaaacgttaactctgaatttggaacagaagatacaaggctaatgaaatcaaaggcaagagtaagaatttacttttta

SEQ ID NO: 168525 - DNA, 398 bp, Glycine max
  unsure (1)..(398): unsure at all n locations
taagctccttcaactgcacaaggctcttaatatttgaagagtatacttgcggaaccttcacccgacgaagacactgacaaaaacttatcttctccttcttggacaaagtatggcaggctgggggcaagtaaattttttctcatcacaccttggatgcaactgtgacgtatacccatatcagctagatcttgacgagtattcaagccatccttcatcttgccttgaatgttaaggagcgtcccaatcacactgtcacaaacatttctccacatgcatgacatcaatacaatgtctaacgtcaagatcacaccagtacggaagatcaaagaaaattgacctcttcttccatatgcaactctgacttttatncttcttttgggtcttcccaaatatagtat

SEQ ID NO: 168526 - DNA, 455 bp, Glycine max
  unsure (1)..(455): unsure at all n locations
cgtaccggatcttaagtcactgaggctgcagctgttttacttgaacgactattatgctcaactgaaaaaatagactttaattctaaatagcaataaaaagatatataataaacctgtttctgaaaaagcttcctcaaaagggaggctacttcaatctagtaccgtagttgacttactaagtactaaacaacaaattaatgagactgctgactactgatttcatacaaagatttaggaacatgaggagtaagaaatgtttggtaaagcttctaggagaagaatatgttactatgtcttaaagtaaaaaaatatttatgtttaaaagatgaattatgattcataattattttaattaaatataaataataaaagttatatataatatattattggatcataattcataattttatgtttgcattttcagtcaatacattgattaaacaatntagcat

SEQ ID NO: 168527 - DNA, 383 bp, Glycine max
  unsure (1)..(383): unsure at all n locations
gatgatggacaagaaagttgtgagaaatnttgctctattaacaacattaaagttgtccaagactgaagaattgaatttggcaaatgaataaaaccgagccttagtattgatctttgtttttttccaagtatttctgatctaaaataaaaatctccaccgagtgatgtgggtagatcatgcatgaggtcatgcatcacaaaacatttgcgatgaggcgtacttgaacgttggaaaaatgatctcgaaacaaatcataaaatactcatgaccaacctctttaaagtgtacctttgcttgatttttcaaagatctcggcatcacaaaagataattattttttcaaatggaatcttgggaacaagaaaataaaaagcacgtttaatg

SEQ ID NO: 168528 - DNA, 425 bp, Glycine max
agcttgaacgatgtaaacattatggtacttatttattatagcttgagttatctattttggcttatggtgtgaaagctttatatggtgtgaaagcttgccctgctgaaggattgcttgtaactagaatgccaagaagcattataagtagaaagtatggcaattactctattgtaccatatctgacagttgtagacaccaataattaacagtttaatagaatatcactggtcttaatcctaacttaatctttatatttttctgtcaatgcatagcatgccaatgagacgcatataactaatcaacacacatataacacataacacatatgagcagaggcaaggaggcaagatgaagaggtggcataaagccacaagcaatagaagttgcgcttataacacataaatgaatatgttagtgaatgataa

SEQ ID NO: 168529 - DNA, 471 bp, Glycine max
  unsure (1)..(471): unsure at all n locations
cttagccatgctgcttggaatttaatcaatgaatcaattattttattgaaatttggaacataaatgaacttctcccttactatcattttctttctctattttttctctctctctagctgccttgttatgttatatatctatnntgactacaacacgacacctctctttttacttatggtgaataattaacctacctacgtctacaatgagggactaaaagttccaagagaagagtttgaatccagagaatatcagctgtggcagcaactaaacttctatattttgctgcaggggccacttctatatcagatgtggctttgtatctattgatattgccatcacaattaataatgatcaagcaaataagagaaaagatttatttcatatacattgacctaaacattgatctactaacccgtgtgcttaacgaccatatacactacattggttaaaagcaaacgttgcatagtg

SEQ ID NO: 168530 - DNA, 430 bp, Glycine max
  unsure (1)..(430): unsure at all n locations
agcttccatcacatgggctcaaaaatctaccctgaggttcataagaaccttaaggccttcttcagcagctctagcccaatcctattggagcctcttgctcatggatctggtgtttggtccattcctaaggaagatttcatcatcccttcctccttgaagaggatttgacctcaaatctgttggttcctcctcctcaatattagctccacctgcaaaaggaattaaatcacaaatgttgaaagtggtgctggcttcatactcctctggaaggtccaacctataggcattgatattaatcctctccaacacctaaaaaggtccatcacctctaggactaagcttggatttcctcttagtagggaatctatncttcctaagatggagccaaacccactgcttctcattaagaactaactcatttcttcctcta

SEQ ID NO: 168531 - DNA, 455 bp, Glycine max
  unsure (1)..(455): unsure at all n locations
gaaaagattcctaaagaagctagagcttatctactcacacctctctaatagctaagctcacctccttgagatgagaagctagaacttaactacacaccccctataatagctaagctcacccncatgacaaaatacaaaaaacgcctactacaaagactactcaaaatgcttgaaatacaaggctaaaaccctatactactagaatgaccaaaatacaaggcctaaacaaaggaaaaaacctattctaatatttacaaagataagcgggctcatacttagcccatgggctcaaaatctaccctaaggctcatgagaaccctagggccttcccttggatctctggcccaatctacttggagtcttctatccaatgcccttgcggcgtaggattgcatcaagttggaatatgtttatgtaaaggaagagtaagcatatcatgtatatgttatgttaca

SEQ ID NO: 168532 - DNA, 418 bp, Glycine max
agcttataataagaaagtgaagtccaatcttttttgttggagatttagtttggaaggctatcctgcccatggatagtaaggatcgagccttgggcaaatggtccccaaattgggaaggaccgtttaaaataattcagatctattcgaatggtgcttatgaattagaggaattaacccctcagaaacgtactttgagtataaatggtaaatatttgaaaaaatataaaccaacattgctcgaagttaaaataagcatagaatagacagaagtaatggaaacataaaaatggcgataacagtaaaattgccacgaaagggcatgtgtcaatattacatcaagagtagaatcgaaatacagaattcgaaataaaaaatcataagttctactaatgcatgactaagtcctcatatagtttct

SEQ ID NO: 168533 - DNA, 411 bp, Glycine max
  unsure (1)..(411): unsure at all n locations
tacctacctcatcattcttcagcactcttaagaaacaatgtatatgtaaaacatcttggattttgtaacctgtgtattatatataatggtttattacatagattctgtgaaatatacaatattacaaatttacaatgctttannnccacgctgggtacagaattatgtctgttggtgttatttntgtagatatgttaattatatagtaatatttctcatgccatggcttccttggacaggaatttatttcagaattcataattaatctacgtccattcttagtggggttaattttcccttctatatttctgtagttctctgtcaccnccatccactacgatgttatatgtataccagaaaacatgcatggggagatgctgcgatgaatatgataaattataaagccaaaat

SEQ ID NO: 168534 - DNA, 207 bp, Glycine max
ggggggggggaatttggggaaaaaaattaataaatttttttttttaaacaaacaggggggtggtttgattaataagacacatttataatttgtttgtattgggtgtgagtaaatatttgcgagaccgcatggaatgttatgatatttataaaagaatgttatacttataatgaagactaatggttttagttttaaataaatgtatgt

SEQ ID NO: 168535 - DNA, 385 bp, Glycine max
agcttccaaacaatgataagcgaattttcttctaatcttcaataatgcacggagggggatgtcaccaatgtggaggaacacatgactcatacttatgcatggtccacgacaacgcatccaatgaagttaaccacatggacagtcataatcatcaaggattccatcaaagaggaccacccggatcttatcagagcgataattttttgtaggaccacgatgggagatattattcaagtaacaacttcaaccaagggggtgcaccctatcatcatcctagcaaggggccgagtcatcaagagaagcctactaatatagcagaattgctcatacagctcatgccggaaacaagccacatattaagaggactgacgccgcaattaaaaat

SEQ ID NO: 168536 - DNA, 424 bp, Glycine max
  unsure (1)..(424): unsure at all n locations
agctttgaagttctagtcattatttacgtttcatctntgttccatatattttcggcattttctattttattctcttaaaaaaatcccaaataacaataactacacatttattcatattaaaagtgaattgaggtgtttgtagaattaattttgaattaacatggttctatagaattgattgtaagtaaacataagtttgtagtatataatatgattattgtttggaaatttgctaccaaaactgattttgtgggcaattactaaaatgacttgagttcaagagtacacattgaacaaatagcatgactaataatacgactcaagttagtgttgattcaaaagctatttctaagagcttcaaattcaatgaaaagtctaaaacttagaatcatgtttttaaaacaatgttaaattaaatatcata

SEQ ID NO: 168537 - DNA, 435 bp, Glycine max
gtgagacatcaaacgctagtattctaataaatgtgggtatgaaaaattcaccaaattgatagagagaaatctaaaattatacattttatgcaaataaggcatgctatccctcaacattattgcattttgattccatcgcggacattcaaatcgttgtttatttttctgttattttttactttgccttagtctaaatttcaaacttaaattcggatctctttcttcttttgtttctcctcatttcttaataattggatttgcatcacttaagtacaaccaaagcccctctggattcaacagttgaacttcaatttcaatctttactacttgtgataaaattaggacacttgtcaatctattaacaagtttttggcactgttgatggggactttggttatcgtacttgcgtgttacaaattccaatttgagagcaat

SEQ ID NO: 168538 - DNA, 427 bp, Glycine max
agcttacactctgagctccaccattcttttcgacgactaccgcgagattttctgcaccgccaaagtgtcctcgctcgattccttgtttccaacccttgaactttcaaagctcaatgagaggaaaaagaacaaaaatgtttagtgctccaagctcgattacttgaaagtcttgaacgggttaggaatctagatgttgctatgatgccttttgaagagcttgttgttgatcctaggaagaaaggttgcttcaaaacatggtcatttttcgtcttgattttttctttttcttttttggcattagcatttaacttaattatggcttggaatattgaattttcatgtgttttgcctgaaatccaaattcaatccgagaatgtttgttcttcaaacctggctttgtttatgcatccttcccctcttgactaca

SEQ ID NO: 168539 - DNA, 302 bp, Glycine max
  unsure (1)..(302): unsure at all n locations
agagaatgatggtgaccaggtgttgagaggaattattataagggctacgtgggagtacgtgagctcagtgaaggtgggcaaatgtggatggtgggtttatgtgtgatctgtggatgtggagagttgaattgantattngcgaccgccacctagtatcatatgtgagggtaccctataattctacaagcttgaaatgaggaagtgtggaagggtgagacttcctacttttatttattgaccacagagtggtacttggagatatgtcgcggtggttaggagaccttggggacgttatgtggggt

SEQ ID NO: 168540 - DNA, 426 bp, Glycine max
agcttcggcatgaagacaagctgggaatgtactactgcaaagactttactaatttctctctaatggatgcacgatcctcactcatggtcctttcactactacaagcagagttagcctctgagagataaggagtgcaatgtgcagattttggtaaaacatcttggatagtgggtttgacttctttgtgtccatggccatcaacttggtcatctttgacactttcgcggaaaagctctaacaatttctttttcttttctggggatgtttccgccatagagccacgaattctactcctagaaggggttccaaaagtgtggtgaattggtgtggtccctcgagatggtgtaaagtctgcataaaatgaaatagacaatgcagctgaaggtggttggcgagattaatgataatatttgaaagacaaactac

SEQ ID NO: 168541 - DNA, 457 bp, Glycine max
  unsure (1)..(457): unsure at all n locations
ttgctctttaattgttgatggaggaagatgtaccaatgttgtatgttccaggttagtgtccaaactgaatttcaatataagccctatcctaggccatacagacttcagtgacttagtgaagatgaagaggtaaaagtgatttacccgctgagacgtgtttcaccattggagatacaatgatagggtgttgtgtgatgtggttccaatggaggcgactcatatactattacgaagaccatgacagtatgacaccaaagcagtgcatgatgacttcaccaacaagatttctttcctgcaccatgactagaagattattcttacnactctatctcttagaaaagtatgtgatgatcaaatcacaatgagagaacaagataagaaagagtgggcaccaaagagaatagtgaaagaagatgatacactgacagatatgtgatccactgagagaaattattgt

SEQ ID NO: 168542 - DNA, 399 bp, Glycine max
  unsure (1)..(399): unsure at all n locations
agcttcatgcgctgatcattntgttagatgtattgaatcaacgcttcttgcgctgatcattaaagtctcaatttgaatttgttgtccaaatctagaagtagttgtttcatcctccacttggttaactgttatcttcatgattctcttatccttggagttgttgtagggattggagcgcatgtcctctatgatcttgatggcatcaattggtggcttcatcatcatattgccttgacatgtagcatcaaggcttgtcctattgtgggagggcactccaccataaaatatgtgcattatcctctgctggttgaacccatggtgtggacaacttttgagcaactcctggaatctttcccatgcttcagacaaattcccttgaagcttatcgatatttatcac

SEQ ID NO: 168543 - DNA, 448 bp, Glycine max
  unsure (1)..(448): unsure at all n locations
agatggccatttaagtgcttgaaagaatcaatgacaatgcttacaaagttgagctgcccggtgagtataatattagttccaccttcaatgtctctgatttatctctttntgatgcagatggaaaacccgacttgacgacaaatccttctcaaagggagagaatgatgaggacatgaccaagagcaagggcaaggatccacttgaaggacttggaggacctatgacaagggctagagcaaggaaagccaaggaagctcttcaacaagtgctgtccatactatttgaatacaagcccaagtttcaaggagaaaagtcaaaggttgtgagttgtatcatggcccacatggaggaggactaaatgacaccaccttgtcttcaatttagagtggttagtttgtctaaataatggcccaatccttgtaaagttggctgaccaacaatatgtttt

SEQ ID NO: 168544 - DNA, 439 bp, Glycine max
  unsure (1)..(439): unsure at all n locations
cggatcttaagcacctgggctgcagcttgggataattcttaggttttattctcctgacatcacaacagctcctccttctgtgcctttttaatttccatttgacattagaacagaatgtgcttggctttgaaacttagctagccatcgtgattttccaataaattttctcgtgcattttactaagcttatgcgagagtatttgaaaatcttgctctgatgtgtttatgggccttcccaacttaagagtgctaactagcaaaggtataattttcgacatttaagtcgttgaaaataagtcactgatttgagcatgacccataaatgaaacactcacactcacgactatttgggtataccatacccttggattagtgaagtatatnttttaaacggaccgaaatatattattaagtgtaaaatgaatgataaatatctttaa

SEQ ID NO: 168545 - DNA, 459 bp, Glycine max
  unsure (1)..(459): unsure at all n locations
tgttctctntgcaagaaacctctcggcgataatagagacatcttcatgtacaggtctgttgccctaattccatcttcttattacacctcccaattacttgattttttcaacttttaccaatcttgattatgattcttgcctaaagctttcttttcctccctctcgcattgcttagaaattagtacatgcctcagattccgagcaatcttcacgtaacatgtgattgagtatattatgatttctttcactgtaaattgaaagtctcagtcataagttacataaaagtttgggtcttgggaattgtggtgttctgggactatgtaataatttctcttgcgttgctgacattaaaattcgatattcatatacccaaggggggttcattttacgatccgctaaaaatgaagggttttactctntttgtttttgaattttctctattgcgttcggtatcattct

SEQ ID NO: 168546 - DNA, 418 bp, Glycine max
agcttgccacccagctcgcccaggcgagcatggttgcttcctccagaagcaacagccttttggaggaatcttctggagggccccattgggcctggttgctatttgcacccccatttatactaagtacaccccctgccttttttttggtgattcttttttcgtaaagttacggaaacttacgaatttcgtaacgatacttgttttctttccgtaatgttacggaaccttgtggattacataatcatcccctttttgacttacggaatgttacggaacctcactaattgtgtaacgatgcttccatttgattttcggtgtgtcacggaaccttacggattgtgcatcaatattttcttttgttttccggcacgtcccggaatttcacaaattgcctaatgatgggtgccaagcaccttac

SEQ ID NO: 168547 - DNA, 419 bp, Glycine max
  unsure (1)..(419): unsure at all n locations
tcatgtggatcgacatacataatgaggaataaagaaatgaatggatgaacacaatagcaaaagtgtgttagagttagagatatggttatgttgggagttggggatatgaccctatactcaatgggaaaacgtnctttacgctccactccacgtgtattgacacaaccttatttanggattaatgcttctcatcatgaaatgagtgaggaattgttagaagagagatgaatgacatataataggttcactaggggacggttcaaatggttcaaagaaacctgcgggaatgttgagttgtgataacccgactaaagaaatatccgattagtttagaagactcacaagcctcacttgtcattcctgactagagcagagtcgtatccatggttggtgagagttncatgtcatatattgacatg

SEQ ID NO: 168548 - DNA, 432 bp, Glycine max
agcttataagaatggggcaagaatcatgtgtttcttcttatttagcaataaaaaaaggaatggatcggatctgttgatgtctaccagtttgggggtatttgtaaaaaataaggttattgaaaatgtttctgtgtagtgaaaaaatgattcttatttgtttggtaggcactagctcgatccggttacaacgctttgttttgtctttatttttttaaggttgtttttgttaacaaaaacggaagaggaaaaaataattgaaaatagaagtgagtaggggtcgaactcacatttcattgaccattcaataaccaattaagcaactattaatattttatatattctacatgttatgtaatatgtttaattgcacttaaaaaaatgtatacattatttcataagttgtaatcataaggatatatgtttaacttttat

SEQ ID NO: 168549 - DNA, 118 bp, Glycine max
  unsure (1)..(118): unsure at all n locations
agccaccgaaaaaccacataaatttttcgcccccccacacaccaatatattaagntaatatacaggctacttaatgaaaacaagccaaacaccacacgcaccacagactgacatacca

SEQ ID NO: 168550 - DNA, 428 bp, Glycine max
agcttgagatgaggaagtgttgaagggtgaaacttcctgctcttattgttgaccacagagtggtacctggagatatgtcgcgggggtcaggagaccttggggacgtcaggtggggtgctattgcccaaaaccaagcttgaccaatcccgacccaacccgggcatagtcggtcagtgagaacctgtgatgtacctaagcaggcgagctcctggcagtcaacagataaaaggaacaaagaccacaaagcacggaggcttgtggtggctggccacctgtgaatattgtgtgatatgtggattatggcctctggtaatcgattaccaagggtgggtaatcgattacaaggcttaaaaatgaagacagggggctaagatggtctctggtaatcgattaccaggggatgtaatcgattaccacgcttgaaaacc

SEQ ID NO: 168551 - DNA, 424 bp, Glycine max
  unsure (1)..(424): unsure at all n locations
tatatctaaaaaaaattgtagctcatttccttagcttttatggactactcatatgattcatctggagttctgtagcatcctataggtcttgcacaaggcatataggtcaagtaagcacaaaatccgaaaataagcaacaattattcgccaagcccaattatttgccttagacaaaactgagttaagatcaaaaaataagagtcaaagagaggtcaaatgtgctaagaataacaagaaaatactaaactaaaaatgctcaatcaattactttccaatcatatccatttccatatttgtctatggaacttctatagtatccaaacactttgttaagattatttgttccactgacaaaattagctaaagtagtttttaaggttctaatttnctcatgaagttttacaacatcttgagaatgaccctt

SEQ ID NO: 168552 - DNA, 430 bp, Glycine max
agcttctacttatgtggcagggcgggcttccttcactttcttgtctccaacgcgagctctgaccactgtccttccttcccgcggtgcttcttttcatgtccgcctgagtgggcttatagcctaaaccatacttcccacgatttccttgggtttttatcaggctagttatgccgccattgtctttgcctaaacccatcccgggttcataaccgttccccaacataactcgggccatcattaccgccgcatcggacagacaaggttgcccaaagagggagtccacggaggaaatgctgaccacctcaaaagactggaaagcggtttctaacgattcttctgcggctttcacataaggcatggaggatgggcagcttaccaagatatcttcctcgcctgatacgatgaccaaatgcccctccactacaaattt

SEQ ID NO: 168553 - DNA, 401 bp, Glycine max
tagagaggaagcttcaatggaggaaaagaatgagaggggggggggcactaaattgaaggagaaaaagagggagagaagttgaactttgaagtgtgtctcacaagtttcacattcatgaaagttatgacaagtgttacacatgctttctctatagcctacgtcactaactaaataaagcttttttgagaagcttccttgagaagctagaacttagctataaacacccttctaatagctaagctcacttctttgagatgcttccttgagaagctagagcttagctacacacaaccctctaattgctaagctcacctccttgagaagagaagctagagcttagctacatacactcctctaatagctaagttcaccccatgacacatacatggaaatacaaaaaa

SEQ ID NO: 168554 - DNA, 432 bp, Glycine max
agcttaacaaaaggcatgcgaagtgggtgttttttctaaagcaattcccttatgttatcaaacataaaaagggaaaaggtaatattgtagccgatgctctttctcggcgtcatgcattactttctatgcttgaaacaaaattgattggtcttgaatgtttgaaaaacatgtatgaaaatgatgaaactttttgagaaatttttaaaaattgtgaaaatttttcagaaaatggtttctttagacatgaaggctttcttttcaaagaaaacaaattgtatgtgcctaaatgttctacaaaaaagttgcttgtttgtgaagcacatgaaggaggtttaatgtggcatattggggtccataagactctagaaacattacaagaacatttttattggccttatatgaaaaaggatgtgcttaaattttgcgacattg

SEQ ID NO: 168555 - DNA, 420 bp, Glycine max
  unsure (1)..(420): unsure at all n locations
taagcttctccctattatgctataaataggggaagaagtgaatatatatttggttcagccncttaggcacttgtttctctctcgaaattgctgaggaaaattagttccgtgaagaaaatacaagccgaggcgctttcgtaacgtttnntttcccttccgcgagtaattactcgaagatttcgancgttctttaagattcatcgttcgttcttcgttttcttcggtcttcaacgggtaagtacctcaaaccaagctttttaattcattctatgtacccgtggtggtccacattttatttcatgtattattattcccgttttcatttactctttatacacccttttgacgtgcttaagccatttatttaagtcatttctcgcttaatctaaacataacataaatgttcaccgatcgtttgaa

SEQ ID NO: 168556 - DNA, 422 bp, Glycine max
agcttggactgtgctagagagaaaaacatatgatcaaagtgaataaagagccatttctagggcaaaattgggtgttgaggggtcaaattttgattcggtggaattttaggtgtaaattcagtttgagcaagtttagcttgaggttatgggcttgtgtgaggtgagagtttgctttgaatttacctcattctaaatttcacctttcaaacctagaaaagccattgaatggaggggtgttggacacctagattctgtgttgctgtgctttaaagcttgaatttggtttagacatgattgatacatgatttgggacttgtaggaattgatttgggcaagattggatgggaggaagtgtgattttcgaaatctgcacttatgcagaatttttgctgtgaaattgtgcagcagaattttgcacaagt

SEQ ID NO: 168557 - DNA, 477 bp, Glycine max
  unsure (1)..(477): unsure at all n locations
ggaactatgaaactaagcttagagtntttctttgtaaggctttgtgtctttcgtttttgaatctataatacaaggatctttcttcatctgttcctacgtctctacccattctcatccatttgcatgtttacttctttatttttaaaacggganacgcgatgacgagtcccttgaaagtactatacctgtgacccgcctatcaacttcgagcaagaaacaaatcaaacggtagatgaacggaacgaggatgtgggacttcccccggaattagaaaggatagtcgctcatgaggaccaagaaatggggcctcatcaagaagaaacagaactagtagaattgggaattggcagtggaaaaagggaagtaaagataggcacaggtattaccgcacctatccatgaagaatctaataaactgctaagagactaccaagacatntattgttggttgtaccaagaatgcccggttgagtatgac

SEQ ID NO: 168558 - DNA, 428 bp, Glycine max
  unsure (1)..(428): unsure at all n locations
agcttnttacttcgccacctacaccactcatatcctgaaaataacaaacactcacatgtgaatcatagatgacgatagatacaattgtgcatgcatagcttatatactagctagcattactcaaagagataaagggcatgttcggttaattttcagttgggaggctcccaaagtctattaaaaaagtaaaattgaaaaagactcttgtttagttttcagttgggttgcattgtaaattgtgtttagcttcaatttttccttaaaacttaatttgaaatgaaagaaaagggaggactatttttgcaaactcggtttgaactttcaaacttaaatttgtaaattntaatccaaacaagcacaaaatcattgaaaaaagaaagtcaagtattataagtagtagtagtaccaaggagaagtcataatcagag

SEQ ID NO: 168559 - DNA, 455 bp, Glycine max
  unsure (1)..(455): unsure at all n locations
tatgtcttgccaaacaaatagttaagcaattcttttttatttataaatctcttcgntgctttctttatatgactatttttgtttttgcaataaattgaattttttttttatcagtagtagtaataaagtccatttanntggtccatgttcaacttaatgactatacttattgaatttggctgcctactttatgattcattgcgctaaatttgatagtgccctagacactatttaaaagctttaagttgcaatgggctgtatattcctcaaatttacgtacattgcatgttaagcaagttcttctcaaacaaaccaaaatgtccagagttaagtaaaattgattttcatttaaataattctaaattgttgaaggcgaataaatataatttctttatatataatttagattgaatctaaattctcatacttttgttccaactcccattactaagccg

SEQ ID NO: 168560 - DNA, 425 bp, Glycine max
agcttgtaacaacattgagctgcagattattgctgaccttttccaacctccatcacccttgttgcccaaatttctttgatctctaagtacctcagccaatacacggccaatacacgttccatctccaaatttcatgtaaaataacttattctttcctcattattttttcctaaaacttttcttttgcccgtcattttttcattagatgactccattgaagttaatgtcacttatttaacctgcacaacaaatattagatacaacctactttattcatttgactagtccactgcacaatcatagaaaatatttcaagcaaagtttttatgtaatagcaaagtacataaaagtctatcttcaatagcaaagttcaatagtaacaaagcacacaaagtttgtctgcaatagcacattacatttaaaaa

SEQ ID NO: 168561 - DNA, 448 bp, Glycine max
  unsure (1)..(448): unsure at all n locations
tgtccttggtttagacatgattggtacatgatttgtgacttgtatgattcaatttgggcaaaattggatgagggaaagagtggttttcgaaatctgcactttatgcagaattttgctgttgaaatgtgcagcanaattttgtcgcgcgcacaaaaatgcttgtgtatggtggttgtgaaaaaggaagtaaatatggggttctggccatttgctagcagatcccaacggtcaaaatgtagacttgtgtactagagacttccagtaaaattttcgattcaatccaacggttaacgaattggaatgaaggaaatgttactgcggtatttgtatgtgaaaagctgtgattttgagttgtgttttgggcagagtttatgcctttgccctgttttgcttggtntgttagtccatgatgtttggaagaggaattacctggatgttgtggaagctt

SEQ ID NO: 168562 - DNA, 427 bp, Glycine max
agcttatatccaaaatactagtagaatattataatgagaaaaattaaacaaaatgagttttttcataagttcagacttacttatgaattatttgtagaagttgtttaacttttaaagaaactatataagagaatttttacaaattaacttatgtatgagttaatcttagtttataaaaaaagtttatttcattttttttttaaaaatttaatcctaaaagtgcttttaaataaacttagttaaacatgtgctaaattaatataaaggtttttgagtgtggagtttgaagtccctttttatgcataaaaaagaagaaacaaaatcatgcaaacagtgtcaaaataaaagcttcaacaattggttccttatgctattaattatgggaatcgagactgttatagttgatacgagtaacttatatatagga

SEQ ID NO: 168563 - DNA, 170 bp, Glycine max
  unsure (1)..(170): unsure at all n locations
tctagacatacatagaaacgttgaaactgaggtggagtattgcgaataggaatacaatcaatcttagttgttgaccctgtgttactcctaagtaactcatgagcatagtcccaaatctttgcgtattgttggttaacatnacccccaccaactgtcttgcttcttttaat

SEQ ID NO: 168564 - DNA, 397 bp, Glycine max
agctacttataaaagaatagaaatctttattttaattaagtctcaaataaaaattagtctcattgattcaaagatttaaaacttataacaataactcactatctaaatccagaaaaaaaacctcaaaatctcaattgtgatggttacaaaaactattttatatttcataaatactaccattttttctgcccaaatcaaaaaaaaagttagacatttccttaaattacacttttctcctcgaagaacataacataagatgcattttagtcaattttaatataaaaaatctttcaaaaatatttttcactttttgtatgactcttaacattatcctttactaattctgagcccataaaactttgagactaccacacatcaaattaagattttgattgaa

SEQ ID NO: 168565 - DNA, 404 bp, Glycine max
tatatatatctctaacaacttaaattgtgggcactcttgttattgctctcctaattaaaaatctcttggttatgatcatttgttctttatttttggactttgttaattaacaattcaacaaatgtttagaatcataattttcgtcattacacagaacaaaaaaaggttggagcttatttcatttaattagtctaagaagattaaaagttctgctgttaagaaaaggttattccatggactgaagactgactaattatcgaaacggcatgtctatctgaccctgaaatcttagctattttgtgtttattaatggctttagaactacaattaaggcttctacactgtcatagacgggtcttgattagtgccatctataaacatggttgctacttgctactgatgtg

SEQ ID NO: 168566 - DNA, 442 bp, Glycine max
  unsure (1)..(442): unsure at all n locations
tatgttacattcatgttatgtatttattanataaatacattcaattcatagcaacggaaaaaaaaaaaacattatttataacaatatttttcaataagccaaccaagtagtttatgatatgcgcgagcacattatgaagaaagattttatttctgggtctttgattttattcatncaaaaaaaaattcatctcgttaaaaaaactcaaatgagttatatataaatgtttggagattaaaaaataaagataaaaatattactttgtcgcctaactgtattttttgtttcaattgtattttctaacttttttaaaaaggttgctctcttatntctctcttttgtgggtcctatatgagcatttgaaagttattagctatttgtgatggtggcaaaaatgtcacaattttttaagaagtgtacaatctggaaaaaacaatagata

SEQ ID NO: 168567 - DNA, 412 bp, Glycine max
caagcttaacggctcagcgcgctacatggtatatcttttcctctatcgggaacaatacagaatataatctgtttctactcaccatgcataaaattataaaatctccctctatccgttcatatttcaaacaactgctgatcattgatcgataaactgtttttatctttcaccacattaaaatttaccataaaatcaaataaaatggtaagctgctcaaacgtatcctctaaagggcatggatgtcaccactatgattcaatgtattacagtcatgtattgataagggaataactcttagttacaacaatgcgtgaatggtcatgttctatctaaatgtacacaggagttccactgccactgctaaaattaactaagtcccaatggtgatatgaacatgatctacttccgaatt

SEQ ID NO: 168568 - DNA, 298 bp, Glycine max
tagtgatttgaattaatgaattttttttttactatgaattatggatatagggtgaatttattatattgtttatgaatatgaaataaatttcttctttatagtggtgtgaaaagattagtattaagaaaatgatcaaaaataaaattgagagtcgtagacgaaaatgcaaaaaactaaaacaaagttatattgggctattagaaagaaaagaaaaaaaataaatgggtatctaggaacctttttatatccctccttttttgattattatattttataataactgtaggtaaaaattttg

SEQ ID NO: 168569 - DNA, 412 bp, Glycine max
agcttctacatgtctagggttttctatatagagaaaggtccaagttccagagagtttgagagattctgctgtgtgaagagctgtagacaaccgagcttgaagaggaagtcgtcctgagaacttaagatgagtttgtgagtgattgtgatgttctacaggtggaggagacatccccaccacttgcatttcttcaatccttcatctttctcttctctttgctgtaaaggaagctccccagttatggaaagctaaatcctctgttggctctctcttggtgggacttgatgtacatacctgtatatctatttaatgatgctctgcgcgttcactgtgctatcacaacttcattctaccatgctttggccttgatcacgtaaatgcatggggtttttcgatccttcaacactggaaa

SEQ ID NO: 168570 - DNA, 405 bp, Glycine max
gaactataaaactaagcttctcggggccattctgcggagggaaacatttggaatgtttattttaccagcgggacactactcttaaagcaaaaatggcatataacctccataaatacaaacatcaatgtaaatttagagcaagcttatgcgcatacgcgctctacgaacgttctcttgcacaagaattctattaattaagaaaaatgcacccatatacaatcaaggcagcttcgttacctagattatttacacgtacttccaaggtgtatttgttacttacatcacacacatctccttggctaaattcacatacatgcacactcaaagcattttggggtaccaaaaattgcacatgtgcacatcttggtatttctaatacctatacatacacaaacttcatgatga

SEQ ID NO: 168571 - DNA, 315 bp, Glycine max
  unsure (1)..(315): unsure at all n locations
cacgacaggaactttcctctgaggccatttccggaattcaccccactcccaatgacgtacgaagatctttngccatccctcatcgccaatcatttggccgtggtaactcctggaagggtcctcgaaccccctttcccgaagtggtatgaccctaacgcgacctgcaagtaccatggnggtgtcccggngcattccgttgaaaaatgcttggcccttaaatacaaggtccaacatttaatggatgctggatggctgacttttcaagaggatcggcccaatgtgagaaccaacccgctcgccaatcatggaggggga

SEQ ID NO: 168572 - DNA, 470 bp, Glycine max
  unsure (1)..(470): unsure at all n locations
tctacttatgtggcagggcgggcttccttcactgtcttgtcttttcgcgagctttggccactgcttttccttcccgcgatgcttctcttcatatccgcctgagtgggtttatagcctaaaccatacttcccacgatttcctttggcatttatcaggctagttatgccgccgttgtctttgcccaaacccattccgggttcgtaactgtttcccaacataactcgggccatcattactgctgcatcggacaagcaaggctgcccagaaaaggaatccacggaggaaatgcttaccacctcgaaagactggaaagcggtttctaatgactcctctgcggcctccatataaggcatagaggacgggcagctcaccaagatgtcttcctcgcctgacacgatgaccaaatgcccctccactacgaatntcaactttnggtggagtgtagagggaacaactcccactgagtggat

SEQ ID NO: 168573 - DNA, 142 bp, Glycine max
  unsure (1)..(142): unsure at all n locations
ttgcgatacatantacgcacccgtggtggtcgacaacctgtgttatgtattgacaaacacaaagacgtanactttctatacggccttgagacgtgcttaagacgtatgttcaggtcgttgccgagctattctaaaaactctt

SEQ ID NO: 168574 - DNA, 460 bp, Glycine max
  unsure (1)..(460): unsure at all n locations
agctntgatggagtcgagaagaaatcacgtgtttgtcatcatctaaagggggaaatgtgaatgtatgtatacatgattntgatgatgtcaaaagaagaatcaaacaaagttgtttcaaaagataagcatggcttcaagattaatacaagattgcttcagcaaacaaagccttgcttcaagattaactcaagatcaagcctttccttaaaacaaagtgctttcaagacattcaaggctctagtaatcggttaccaggcagtgtaatcgattaccagaagacagggttgagaaatagctgttgaaaagggttttgaatttgaattttcaacatgtaatagattaccatatgtctgtaatcgattaccagcaatcaaactcctaaaattcaaattcaaaagtcatgacccttcaaattataattgtggtaatcgatacacaaacattgtaatcgattaccagt

SEQ ID NO: 168575 - DNA, 426 bp, Glycine max
  unsure (1)..(426): unsure at all n locations
tatccttatggcctgcctncagacttcacccgccatgctttcctttaagatttaagccaagcccctacttttgaggggcaactcccaccttatgaagactatcctgggcaagacgatggggaaggagatacccatcttggccccctgctccacctcaaagatccatccccgcatgaactaccccagccgaacatagtccgccataccccggcctcacccacacccgtaaaagaatctgttcccttcgcggaagataagggaaagattgaggcgcttgaagagaggttaagagcagtcgaaggcctcggcaattacccattctcggatttggcagatttatgtcttgtgcccaacatcgtcatccctcctgtcgcaacctacccttcggcgggagggcgacgcgagacttgcgggattgcgtgtcca

SEQ ID NO: 168576 - DNA, 455 bp, Glycine max
  unsure (1)..(455): unsure at all n locations
agctttgacctaacatttaagaccttcatttaattttctatgncaaanattttctcttggaaaaaatattctccttaaatctgtcaaattcctatgaagaataaataaagtccacattctggaattgttgatcttcatcaaaagacgtgctatgttgatgtagacttgctataatggaattaatgactttcctggtgaagtgtaagcacgtcaacctatcaacatggaattttcatgaagaaggggcgtacatttaatgcaagcattaaatgctctaacaacctcaagactttagatgaagagtagagtgaagaatccatccattgagagacaacaaatacttcaagacgaatgctataaatagaataagctttgaagatacaagacacaaatctacttgcgtgaaacattctttcattctttctcgtaaagctttctacaaatttctgtatata

SEQ ID NO: 168577 - DNA, 430 bp, Glycine max
  unsure (1)..(430): unsure at all n locations
tataatcaatgcaagaccccttgagagatttattttatatgtcctccagttggncactagagttgacaatactcaatggtgatttttcctgagagcactttctctctcacaaaatgacagtcttctactgtgtttagtccattcatggaagaccggattagatacaatgtggagaacggcttgattatccgaaataagattggtggcttgagtgtctccaaattggaactgctggagaagtttccttagccatgtaatttcacttgtagttgcacgcatggcacggtattcagcttcagcactggatctagtgactatattttgtttcttgcttccccatgggatcaaatttcctcaaataagaacacaataaccaatcatggacttcgnggntgatggtgagtctgcctaatcagcatcagagtaaaac

SEQ ID NO: 168578 - DNA, 394 bp, Glycine max
  unsure (1)..(394): unsure at all n locations
cttgcccttgcaccacacattancctagctgcttcatcataggccctagcagcatcctcagctgtttcaaatgtaccaggccatatcctagtcttcctgcacaaaaaaacacatcattaatttttatttcatgtttggtttgattcaattagacaacgatagcaaaaacaaccaccttttctccatctgctaagctttggttacatgaatgacagagcatcattcagcttgattaataataacttttcataaatattttaagaagtaatcaaagaattactggattgtggaaaaaaattataattaacaaaatgcgatcattctcttattagttgttgagcattacgatttgcaagcatatacactaacattnattttgtttctggaaatgaat

SEQ ID NO: 168579 - DNA, 451 bp, Glycine max
  unsure (1)..(451): unsure at all n locations
tactaagctttgactcgagtcatcaagagattataaatatgtgaccatttgttgattttcaagaattatcaagaatcatcaataatctatcatctatctttcaatatattctttcatctctttcaacagatctttctgattttatttctcttcatctttctaaaagttttttatcaacactgtctctttcaagaaaagttctttgttcaaaaacttgtgttattcatatttttcattctcttctccctttgccaaaagaacgaaggactaaccgcctgagctcttttgtgtctctcttctcccttacaaaagattcaaaggactaaccgcctgagaattntttgattcttcccttccctttaagaaaaagatttcaaatgactaaccgcttgagatatctcttggttgcccttacaaagattcaaaggactaacccgctgagaattctttg

SEQ ID NO: 168580 - DNA, 104 bp, Glycine max
aaaacaacaaaccaaaggaaggccaaaaagacacgacgaaatgcgagcaacacgaaaaaccagcaacaaggaaaaacccaccgagagaaagaccggcagcggag

SEQ ID NO: 168581 - DNA, 464 bp, Glycine max
  unsure (1)..(464): unsure at all n locations
aactaacgctggctagccaaattaactgtgtcttaaggtttttacttcaagcttttgcatcaatttttcctcaaaagcacttgtaatttccttcttttgaatcctgctggtaaaaaattaaaataatattaaaattctcattatttcattaaaaataacaataaaatagagaaattttaatcattcttaatcaaaattgaatatccattaaatctaaatttcgcatttatcataatgcattcctcatttaacacataattaatcttgttgctcaataattggtcttgaggaataactagggcttacttcaaccttaccattaccttgacttgatgtatgctcttgcaccactacctcatnggccttcgtacattcctccacatnggttttccttatttctcccctanaacaattcattgatccttttagtgaacgaagcaacccccacaaaagcaaattgtatg

SEQ ID NO: 168582 - DNA, 391 bp, Glycine max
gataatatcatcactaatgtgactgcaaacacaccagcacaagatacttctgacggtataaaattgttaaaaatttcttctccaccagaaaaaataagagaaattgcgatgtgttcaaacttattatattctcagttactcctctatgatgatgatcgtatgattacctccttgatccagattcaactaatgccagaggaaattgagaatggcatacgtctaagtagattgtggtcttctttattctctattgcggaagaaaattgtggcagctctgcacttgtagaaaaagcttatagtagtcttaataaacagaaaactatctttcttcacccacttagtaatgatgttaaacacgaaactaaacttatatgtctatgtaaaggattat

SEQ ID NO: 168583 - DNA, 393 bp, Glycine max
  unsure (1)..(393): unsure at all n locations
actaagctatattgggcaattcgggacaagcgagaggttgagttctttacacaagaatcaaaacacagaagaagaatatttgaacaaaaaaaaaaatagaagtagtaattcagtggctgcacgaagattatattacagcagacaaaaataaccataatagttgaaagaaagaaagaatgggagggatagaaaaatagataaaggatgtctttttattttctatgcttaaaatttgcagcgtgtttccgtgttgatgcagctgcagcactcatattcaacaaggtgaatacactataagttagaattgaaccatcgttattttcgttatatctaaaaacttgatgtntgtcactctgtgatacactctagcattggagcagtgcactgaacgac

SEQ ID NO: 168584 - DNA, 399 bp, Glycine max
  unsure (1)..(399): unsure at all n locations
tcttccataatactcaccacctctattagttctaataaccttcacctttatgtgtaattgtctttctacttcatttaagtaaatttctaaggcatccactacttgagatttctcatgaagtaagtagacataaccgtaatgtgaatagtcatcaataaaggtaataaagtatctttccttttcgaaagaattaacatcaaaaggtccacaaatatcagtatgcataatttcaagaagcaaagnacttcttgtagctcctttctttgtatgttttggttgtttcccttaatacaatccacacaaatatttagatccataaaatttagatcaggaagaatttcattctttattaatctttccatcctttctctagaaatgtgacctaaacttttatgtcac

SEQ ID NO: 168585 - DNA, 442 bp, Glycine max
  unsure (1)..(442): unsure at all n locations
ntgtcctcagatccctcttgttggactagacttatactatcttcattattgtaacagcatatttaaaaccaaaacttaatccgcagatccatcttgtaagactaagttccaattctgcttcattcaagttctaaggcaacaatacatttcccaatgctaagtcacctaactaagcacacaaatgggtgattagaccaagagcatacgaaatttaagcactgaaagaagcattgaacacaagaaacacaattaattagttattaaaataattacatcagttgttctttagaaatccccaacaagggtgtttagccagccattacagaagaaaccctagcaataatgagcttacaaaacctagctatctctgcaaaagtngctcctcttgctgcctccagagcttttttcccaaaataggcattgtagtgtgctctggaatttt

SEQ ID NO: 168586 - DNA, 457 bp, Glycine max
  unsure (1)..(457): unsure at all n locations
agctntaatcaaaagcaagtaagactcctttatttactccgntctccattctgctaaaacgtcaccaatgtagcaccacaaacaacatatgtgccataaattatatggtgtagctactatgcaaagaaacaaaaatgccataactctgcatgataccgtcatcaattatttcatcatactgcaacttcttatctagtaaaaattgctggtctgtttagatggcatttcaaaatatatgggccgaatactttccccacaaccatttatctatctccaaaaccacctgcaccccatctgttcaatgaaaacctctgaacacttacaataacacaccaactccaaactgctgtaaactntccagaaatgcaccttanagaaaatttcatcatcagactttttcctaataataacaaaataaaagaacaaacttcacccttcacacactacacacttcaat

SEQ ID NO: 168587 - DNA, 448 bp, Glycine max
  unsure (1)..(448): unsure at all n locations
acttagaaactctcgcntaaagcctttgcaaacctaaggacaggcatgctttatattatttccaggcaatgcaagctgaccgtatttgagcgagcccaaacacaagaaatgggcgaatgcaaggagcgttgctcacccgcaatggacagcagcaaaggagcctttcaataccaaatggtacttatgcatctccatatcaccatcagtttccccaaccatcaccaaaacccaatggcaaagcatacagctgatgaaagatttctttttctttttctctttcaccctttacaccatttcttactttcttcttatagatgtaccttctcttagagcatagcatatgctgctttatgacgctatgttaacttatgggtgttgaccccctttatcttgaaagaatgtgacggtgagagcaagtgaagcttattgagctactatgtcttatctc

SEQ ID NO: 168588 - DNA, 460 bp, Glycine max
  unsure (1)..(460): unsure at all n locations
agcttgatcaaaaactcaatattctttgttataccaagtcacggctggctctaaaaaaatcaaaagagatttgttggttgttgtcacaacatgggccacaacagaacgacaataaaaaagataaaaaaaggtcttccaaaaaggaaaactgggggagtcgccaccaatgttgatttaaagaaaacgtcaagaaaataaaaaaaggataaggaatgatctatggtttgagaaaaaggattcaaaaaccatttacgtatggagaaggtgttagcatccccacgcacccgtcataaagacgataacttttaatcgtgtgtattaaacataaagtgactttttaattatttattttcctttgagaacgagttaagtttgttatattttttatttatttagaanaagaaagcgaatttttaattttaggaaaaaaagaggaatttatatttttttaaatttttag

SEQ ID NO: 168589 - DNA, 457 bp, Glycine max
  unsure (1)..(457): unsure at all n locations
tgtgtttcagcatgtttatcttcagtcttcacctcanattttaattnttcagaattagtttcgttactctgatagtgctggactgaaccatgctaggcttggtcttgtaggctatctcaacttcattgaagacaacatcacgactcactaaacacctcttaaaaccagtctccaaacagcacagcttataccctttcactcctttaggatatcctagaaaaatacacttgacagctctaggttccaatttatcttgcttgatgtgagcatagacaacacagccaaatacctttagctgttttagactcggtggatggctagatcaaatctcctcaggggttttgaaatttagagctgttgaaggacacttgttgatgagatatacaacaatcattggtgcttcagccccaaaaatcttgngtaatcctgcactcagcaacatacatatcactctctc

SEQ ID NO: 168590 - DNA, 403 bp, Glycine max
  unsure (1)..(403): unsure at all n locations
agcttagctacacacacctgtctattgttatgttcacctccttgagatgagaagctagagcttanctacacacccccttataatagctaagctcacccccatgacaaaatacatgaaaatacaaaaaaagtccctactacaaagactactcaaaatgcctcgaaatacaaggctaaaaccctatacaactagaatggccaaaatacaaggcctaaacgaaggaaaaaaaacctattctaatatttacaaagataagcgggctcatacttagcccatgggctcaaaatctatcctaaggctcatgagaaccctagggccttcccttggatctctggcccaatctacttggagtcttctatccaatgctcttgtgggggaggatagcatcattccctccaccttg

SEQ ID NO: 168591 - DNA, 426 bp, Glycine max
  unsure (1)..(426): unsure at all n locations
tggtatgaggtatgtggatcatgattggataatgtttgtatagcctgctgctggaaatgttgaagagatggaagaagatgatgaaactaaagctcaacatgagcctacaccttaatggagtccttttgagtctcttatgattcagaagatggatgctatgctcattgtggaagcaatgacttccaagattattgtgatgatgccaaagaatcaagagttaagcaagttccaaagaatcagaagtcaaaaagcttcaagaatcaagtttcaagattcatgattcaagaacaatcaagtttcaagaatcaagattcaagaacaatcaagatacaagactcangattcaagaatcaagagaagactcaatcaagataagtactaaaaaagtttttcaaacattgagtacacaagaatttccaaaatctt

SEQ ID NO: 168592 - DNA, 403 bp, Glycine max
  unsure (1)..(403): unsure at all n locations
agccttgtatttatgatcagtatattatctattaagcttcttgggtagaagtaactactggttctatttgtgagaatatatgtattagatacaaagcatttcaactgctctaagaatgaacatcagactttcacttcttctcttttgagtgtatttttattatttctaattntgtgaatctcttgtgccaacagtatccttctacaaacttaagttgaatctttagccaatgaattttcaaaagctaagtcttatttgtaagtttcatgtattctgcaaatggaatggaattgtatatgaagtttcaaattgtatgttttaattatattaataacctcttaaaaaaaagatgatattggtgttattaggttaggtagaatattttatttggttttttgtggat

SEQ ID NO: 168593 - DNA, 429 bp, Glycine max
  unsure (1)..(429): unsure at all n locations
ntgaatagcacatgagtttttgacaaaacctttaccatttagtttttactctctggtaatcgattaccatattgttgtaatcgattaccagtagcaaaatgtgtttgaaaaagttttcaaactggatttacaacgttccaaatattttcaaaaggctgtaatcgattacaatgttttggtaatcgattaccagtgtccttgaacattgaaattcaaatttaaaaatgaagagtcacattgtttcactcaaaagctttgtgtaatcgattacacttatttggtaatcgattaccagtgtttgtttctgaaaaatctaaagatgtaactcttcaaaaaggttttgactttttcaaatgggttttaagtttttccaaaagttataactcttctgaatggccttcttgaccacacatgaagagtctataaaag

SEQ ID NO: 168594 - DNA, 374 bp, Glycine max
  unsure (1)..(374): unsure at all n locations
atttgataacatacaattctcttattaattagattctgtaaaattgaaagaattcctcaagcttttgagtatctacatgagatgaaacaaagagggttgcaaccaaatgttgtaacttatagtacctaattgattcattttgcaaggcaggcatgacactggaagcaaataaatttttttgttgacatgatacatgttggtcttcaacccaatgaatttacgtatacatctctaattgatgcaaatggtaaaataggtgatctctatgaagcattttatctggaaagtgagatgcagtangttggagttaacttaaatatcgtcacctacactgcattactggatggtctttgtgaagatggaagaatgagaga

SEQ ID NO: 168595 - DNA, 444 bp, Glycine max
  unsure (1)..(444): unsure at all n locations
ntgtgtggagcttcaatggtgaatgaggaagaagaaagttactttagatagagggagagaaaaggcttctgaatttctggtttggctgagtgaggagagagaaaagctttttggtcttaaataaaaagggttttccctttttccattattttattcaagctctgccacatgtccctatttcagtggagccaaaagggcccactttccctttttactgtgaccaacactcagccacaaaagtgaggaaaatctgacctttgaaacgctaaaatcctgcctcggtttgtgtgtcatttctctggttccaattcctcgcgtttctctgcgtccgtcggggccagttntcgaaagtaagcaatatatatatcanaacgctcagaataaaaccccgagcgtggttcagagggttggttcgntaaattctaagtcgcacgccaaacgatg

SEQ ID NO: 168596 - DNA, 422 bp, Glycine max
  unsure (1)..(422): unsure at all n locations
tctcacgaagtggagggtgagccatgttcttaatatgaaaattagtagttgaatgctcaaaatcagaatatttaaaatcaccagcaacataatgctcanaaatgcatagaacgatcaggatgcacaccattcctaactaatctatgaaaggttctatctatttcaggatcaaagggttgtaaatcacctggatttcccctagtcatgcactatatgccgcanataatgtgttcttaaataagcaccagcggagggttaaaactacaactatagtcaaatgatatccaaatgagctgaaattttgtgaacaacaccctataatcatgaanagatagcacaaaaaatttcaaacaaaaattaaaattctaactatgaaaactacttaagaaaagtttataanaatatgacaataatacttggat

SEQ ID NO: 168597 - DNA, 454 bp, Glycine max
  unsure (1)..(454): unsure at all n locations
tganagtggttgaaagtattcatctgataaaaaaactttgcactattgaatgatgtggaatatgggtggctaagtggatgcttgattgcaagtggtccagtgactatcacattcaggtgatgaatatttataatcatatttaaaaacagtttatagattataatatgacatatgttttgtaaaatggtaggatgacaataaaacaagaatggagctagcattggatgtggccctagattctttgcaacacaatgaaagatgaaatcataagacaagctgccattaactggcaaaatgtgttggagaggaaaaagcgtctagcagcttattgattcaaaataccttcgggattcaagaaaaaaatatagttntggaaaggaaatatagttaagtaattttgtcaactatgactggtnntggtgtttggtggtaatnnttgttctatggtatcttc

SEQ ID NO: 168598 - DNA, 186 bp, Glycine max
tctcaaggaagtttctcaaggaaactacttatgttgtaaatagaagcacgtgtaacactaggtgtaactttggtgaatgagagtcttgtgagacacacttcaaagttcaacttctctccctttttgcctcgttcaatttcagcctcccccctttctctctctttcttttcctccatggaatcttcc

SEQ ID NO: 168599 - DNA, 441 bp, Glycine max
tgtacgtgagtatctttggcatcatcctgatacagtgaagttatgcaatgcatgtaatttggtgtttttgatagataatgtctacaaaacaaacaggtacatattctgttacttgactttgttgtgctgcaaaataaggccgcaattatactgtgccagttggagatgtattttccccttgctttctttgacatcatgattcacttgattgtgcatctggtcagagaaatcaaatgttatggtcctgtttatttgaggtggatgtacccggttgagcgatacatgaagatcttaaaagggtatataaagaatctttatcgtccagaagcatctattattgagaggtacattgcagaagaagccattaaattttgttcagaatacattgagaaggctaacctattggccttcctgagtctcggcatgatgacagagtgggtg

SEQ ID NO: 168600 - DNA, 400 bp, Glycine max
  unsure (1)..(400): unsure at all n locations
gttgctttaaaggacactactaataaaaagaagaatgaggtaagagatgagaggagtcagtggagagaaaaaccaataattgttggaagggaagaaataaaagacaatgaaaaagaaatagagggagaaaaacaaaaagaaaaagaacaagttgaaaaaaataaaaaagaagaaaaagagtgaaaaagcaagagaaaagaaataagttcaaatgagggaaaggaagtgccataccctttggtaccttccaagaaagataaggaacgtcacctggcaagattcctagatattttcagtaaactagaaataactatgccatttggaaaagctttgcaacaaatgtcactctactaaaanaatttaaaagacatgttgacaaggaagcacaagtacatacact

SEQ ID NO: 168601 - DNA, 393 bp, Glycine max
  unsure (1)..(393): unsure at all n locations
tgccgccatggagttntccgactatgctcttgtgtggtgtatctttctacaaaaggagagagcaagaaatgaagagccaatggttgatacatggacggagatgaaaaagatcatgaggaagcgatatgtgccggctagttactcaagggacttgaaattcaagctccaaaaactaacccaaggcaacaagggggttgaggagtatttcaaggaaatggatgtgctcatgattcaagcaaagattaaagaagatgaggaggtaactatggctcaatttcttaatggtttgactaatgatatccgtgatattgttgagctgcaggagtttgttgaaatggatgatttgcttcacaaagcaatccaagtagagcaacaattaanaaggaaaggagt

SEQ ID NO: 168602 - DNA, 460 bp, Glycine max
  unsure (1)..(460): unsure at all n locations
agcttaattacacttttaattctttaactttatctatttattcattntataggattnnttttattcctctaaaatttgaaagtaccatttttaatctctacaaaatgagtgaattttagttttaatgcctgcatttttaaattttattttattttcatccgtcaatattttaattaactatattttgttactaaaatttattttaaaataaataaataacatttattttaagtgattagatttttttttaaaaaaatgacacatgatgatacattatcacaaacattagtgggtcatgatcagtaataattacatgactttgtataaaataaataagtcaatcattatgaataaaaaaaatgttattagaaaaaaatcttatcanaaagtggtcaattaatttctatttctctaaaagaaactagtaaaagtcagtgaatattttatattaataacttag

SEQ ID NO: 168603 - DNA, 428 bp, Glycine max
  unsure (1)..(428): unsure at all n locations
tgtgctcacttccncggccggtaggtgcgtaatttgctataattctatttttcccttaacaatcacaaccacaaccatgtgagtgcgtactttgattgattgaatatgtgggtgtgcagtgaggctgagatatacctgtttggaggtttcattacttcttggaaagttcccagtggtaaggacctcctctttgttcgccccgacgctgttttcaatgggaacaaaccgataaggttagcttcttctcttctctttacttcatatctttaatctttaattactcttttaagtctctccacctatgcttttttcatccactatgcaaaccaattctttnttacgttgtaatttattaattctggatccttcagacactgattcattttatatatttgggcagtgcgggtgtccgcattggtttcacagtt

SEQ ID NO: 168604 - DNA, 258 bp, Glycine max
  unsure (1)..(258): unsure at all n locations
atatccgccaanggtattagcgagagaggcgtgtctatattgatgcgccnncggattaaaaattcgcgagtattgagtgttgagtattcagggtttcagtttaacaatcttgtgagaaagctttatcttgaaaatttatgagcattaagtgttaagtgtccgtctttttaaagttcgtctctgaatcaataagtaacacccggacttctctcgtactcgggctatttacctaaagtaattattttgagtttcaacatg

SEQ ID NO: 168605 - DNA, 453 bp, Glycine max
  unsure (1)..(453): unsure at all n locations
ttaagtcacctgcggctgcaagctggcaatagatactcctgtattttatctctagcatgcatngtatggtggtctcgccctttgtcacgggaagccggaaggtccatatcaccttcttaattgtacacatggggcactgcgcccccaaatgcgcgagtaagaagagataattntccgggctctcgtgtccgtaaaatgcattcatatcatgcatcgcataagcatctcttcataacatcataatggacatatcctgcatttgtccgttatcatattccagcctcacantttgcatgagtcatggcatcatcatgcatatgcgttcaacaaactttttgatctgcaaaantgcataccatttgttntcatgtttgctcatccttgcgttttcctctacaaaacaaaaacaaaaagggggaagcgtgagacttcacactacattcttcgtttcat

SEQ ID NO: 168606 - DNA, 424 bp, Glycine max
  unsure (1)..(424): unsure at all n locations
tgttgctaaggtcagngttgctaagaccacttcttctatcatttatgatgaagtaggcacaatcttggcttacaggctcttgaaatgtgttctctaaatatttgttaatggtggcaacattatatctcattggtacaccatggatctatgctcttcttgtaggttcactagctctcccaaggtaagtgtttgcataaaactcatgtaccacctcctcattgatcttgagaggaaaattagtcacttagaccacttcctcttggcgatttaatcttggagctcttgaaattccccaatcaaaattttaacctccctctccttgatgagacctcagttgacattgttcttaaacctctcttagttaggaaggaccaagaattttcccttttggaagccctaagaagaaatgttggtggtagtggtg

SEQ ID NO: 168607 - DNA, 451 bp, Glycine max
  unsure (1)..(451): unsure at all n locations
agcttctcttttccaccacatgtcgtcctataaccgatggtcaaactgggcataagaatgctcaggctaaagttgagtatgagaaaagaatgcatgagcaagtgaagatacaaagaagaatgaaagttatgccaagcaagccaacaagaacaagaaaaaattggtacttgaaccaggcgatgattatgaacatttgagggcaaatgttttccaagaaggagggaatgatgaaaatcctaaaatggcacaaatacagggacctatgaccacgagtaggaccaaacagtcagtgaatataccctccaataattggtatcagacatacttaacaaggcccaaatgggaaaagatgaaggcctagaggcaaagacactaccaagaatattaattggtgctaaagacccanactaatttgaaggcccatgtcaaatatgttcttttttaattatat

SEQ ID NO: 168608 - DNA, 431 bp, Glycine max
  unsure (1)..(431): unsure at all n locations
ntaggaganaccatanaaactaaggtagttcctattcatttatcaattgaggaagcttcgccaagtatccccattgaaaaacctttattcaaacctttcaaagttagtgagaaggctaaacgaaaaattagggaacttagaaaaactaaatccttaactgaaggcgtaggtgacaatcatagtgaattactaaacaagatcggtagtttacttaaggtcattccagatactccccaagcctcggaaaatacttcccaaatggtaacaagaagtacctccaaattaattaatgttattaatgaagatagtgactaaaactcagataccacaactgagatagggtcaatgtcagaaaagaatataaatccaattaattccaaacactggaaaacacccttcaaattatattatcaacgttcgactggccctga

SEQ ID NO: 168609 - DNA, 381 bp, Glycine max
  unsure (1)..(381): unsure at all n locations
ctctgcccaccatctttgagctttgccattgtaaatatctcgcgactatacataaaaaaataaaccataattcagttgttaagtcatcatatcatatgaactataataacattgacacgtacatcagaattttggaaatgaacaatgcaatcttagtctaaaaataatgaaaaagaaaaaatattgacagctgaaccgttctactttttcattnttttggctttgttttgtcagctctattgtcattntttcttctttgaatcttactgatataactatgcttttttctatgtgtatcaatcaatgtatggaatggttcgagagactaagctngaaacatccaactggtcgcaatttgctgctatgatgaaatatgtatat

SEQ ID NO: 168610 - DNA, 449 bp, Glycine max
  unsure (1)..(449): unsure at all n locations
tctaatggtcagactcaaacatacattgtctcaaattgtatcttcaagtcagctnggaaaagctatatacccattttagtagtcattgtggattgctcttctgtatagttattcattcttatcatcctagttttagatacctcataccatgtattgttgtattgttcactttttgtttcttcattttcttctgaatgccctggtgatcttgcaggcattaatatgctcagtagcattgctgatcgtaggagctattcttatgttacgctccccctaatgctagttccggtaataaagcgagaatcaataattgattaagatggaaatcaaaaatagttgcacgtgtatataacanaatatgaagaaaaaatatacttgaagatactacatacgctgtaccattagagaaggatgagaaatcacagccttggtaaattcgtgtattaagt

SEQ ID NO: 168611 - DNA, 441 bp, Glycine max
  unsure (1)..(441): unsure at all n locations
agcttggaagaggtagagagcatgttagttctttgagctcctagnaccaagtgccacaaacctaagcactaagcaccaaatctagtactaagcgtaacatgttttagcgctaagcctcaaacaagaagaaaacatcctcttaggaataagcatgggggacttctgcgctgagcatgtgatccatggacctttttcatgagaatgatgaatgaattggactcaggtgcttgatttaccatgcactctgaattctctgtggacctttttcatgagagtgattatcatttaacatgatgtatgaagttaagtttgttctaatttgaggccctttgttatttattcttcaaatttgtgttttaattggtgaatggtctgagtgtttatgaatgcttaaatttttaagaatgctatgttggttgtggttgagactattctcttcct

SEQ ID NO: 168612 - DNA, 418 bp, Glycine max
  unsure (1)..(418): unsure at all n locations
ntctgttcacaacatcataataacaataaaatctttatttcttactaacatttgccgataaaaaaaaatacaataatcataaaaaccaacaattaaatcaaacaaatttcttattatttcctcaacaaagaagaagaagaaggtggtaaaaacctgngctttccagttggattcagcgtccttcttctggcgacttagcgttgaatcgtcctgcacgatttttaatttcaattttaatgaaattattattatttttttaaaatgtgacgaaattgaaagagaagaaagggttatagagagcttgtgcctgatcgagagaagcgcgagagaaaccgggaggatcgggaatgtcgcgagaagtggaattgtcggagaagtcaacgccccatcttcttcctcccgatcccatcactccctt

SEQ ID NO: 168613 - DNA, 438 bp, Glycine max
agcttcttatccaaggctcatcttgggtttatactccttcttccatggcttattccctagaggatggcgcctcccttctcctcttctcctttgcctgccgctgcatctccatggtgaaaaatcaccattgaaggacctcattaaagctcaaagatccagcctccatagaggctccacaagcaagcttccatcagagacgctcgcaattagacaacggaagctctcgagatattcaaatggtcataacatttaactcggaggtccgattcaggcacataaaatatcgagacgctcgaaattgaacaacggaagctcttgagaaattcaaatggtaataacttttaactcggaggtcggattcaggcacatcacatatagagacgctcgcaattgaacaacggaagctctcgagatattaaatggtcataactttaactc

SEQ ID NO: 168614 - DNA, 397 bp, Glycine max
  unsure (1)..(397): unsure at all n locations
tcaacctanaggagacggaccattccaagttttttagtttatcaacgacaatgcctacaagattgacttgcctagtgagtataatgtaagtgccactttcaatgtgtctggtctatctctttttgatgcagatggaggagccttggatttgaggacaaatccttttcaagaaggagggagtgatgaggacatttgataaaatttggtgagagtttctctctgggttccttgttgaaccaattatcagacttatcaaggtaatccttgtggcgtctacccagacttatcttccttcattggaagtggcgtctacccggacttatcttccttcaccggaagtggcgtctacccagacttatcttccttcactggaagtggcgtctaccctgacttatct

SEQ ID NO: 168615 - DNA, 384 bp, Glycine max
  unsure (1)..(384): unsure at all n locations
agttccatttggtctcctatgatantttggaattgtaaaaacgaagggaaacaccatcatgaactatgtagaccgttgttttcaactggtacaaatttgcattttgaggtggacagcctctccttgttttcttttgtacactaatagctggtatatgtcgttctgacttctaaagttctcaagcattgatggatacatctgcatgtgttctgaaaactaattaaaaatgctcttacaattggtgtatgaatggcagttaagccagtaaaaaactaaaaatggatatggtcctcactttggtggtctccttggtattttgtggtagtaagtttttgttaatacgggatctcctgagtccttttccttgaatacccctgaaacctg

SEQ ID NO: 168616 - DNA, 383 bp, Glycine max
  unsure (1)..(383): unsure at all n locations
actatagaaatactacgctntgaatataacgaattacttttaccaacctgttttgtatttttcactcaacatttccaacatatcattaaaaatacaaatatgagcattccactctaacaaattacacaattaaattttaaacacagactgaccctcgcctcacaaaagaaatttaaacaaatttgttataaattttgcattatatcttcagcagcagtatcctcaggaatagacctcaaatttggcacaagacgaagcaaagcaacagctttatctgcaatgcgtccagcaattaataggaaacaccccatcaacggaattgtataagtggggtgcagatcgaaacaccccttctaacacanttaactgcttctcttctgtca

SEQ ID NO: 168617 - DNA, 399 bp, Glycine max
  unsure (1)..(399): unsure at all n locations
tgactataaaaaaaatcttatcttcggtatctttaaaagattcttttagaacaatgatggcgctaatagctcattttgatttcgagtttcatcaaatgaatttcaagactgcatttttaaatggtaacattgaagaaacgatttatatggtgcaaccagaaaactttgtgtcaagtgactcanagtctgcgatgtgtaatctgaagaaatccatctatgggctcaaacaagcttctcatcaatggtattataatttccatcaagtcattacctcatatggttttgaggcaaatgtagttgatgattgtgtgtatcataagttcagtgggagtaaatacatattattgctagcaatgatatacgcttcttggaagaggccaaaagaattctaacgaaaat

SEQ ID NO: 168618 - DNA, 378 bp, Glycine max
  unsure (1)..(378): unsure at all n locations
ggagnntgtgattctcagtggattgttcaccaaggtcttccctcactagggaatcaggtactttgtttgtcatgatttctctaaacttgacatttttactcaaaaatctggctggaatttatgcttattaatattccttttctttgcaaggtgaatctcaaacagggaaatcacggtggcagggggtatgttactatgttttacatgttcaatatttttcagctgaatttgtttgattacttttctcaagaatcgttgatatggtatttggcttctttctatctcacattaaaagtctaatgaagaggttgtgtgtgttataatggaagtagtctaaatgttatgtatcttgataaagacaattgttgatgttaaaat

SEQ ID NO: 168619 - DNA, 284 bp, Glycine max
  unsure (1)..(284): unsure at all n locations
gcaatatttccaaganattcataattctaggttcaactttcaatgcagaaaacaaaaaatcttaacacattgccatataaatcattaccagcagcataggtactagactctggattattagaactataacgccaccttccatcactntggctcagagcctgccaattaatgcaggacatgaaatcacattgcacatgacagttcanattgcaattacagcaacaaaaacttatgtaagtngtgaaacanaaccaatataacagggggaatctcctgtcgccatg

SEQ ID NO: 168620 - DNA, 460 bp, Glycine max
  unsure (1)..(460): unsure at all n locations
caagcttaacggtactataccaaaggagattggtttcttgtttaaccttgaggggctcgaatngaatcaaaatgtcttccaaggaccaataccatcatcaattggaaatctccataggcttcggagattggatcttcacaagtcaggactaaattccagcatcccaaccaaccttacttatcttgatatgtcaggaaatagcctcacaggttccttatcttaaagggaattagcattaactcgttgtccttaaagagacttagcattaacttgtcgcccttaaagggacttagcattaactcgtcgtccttaaagggtcttatagttgtgtgattgtacaattcatagttcacaactcaatgcacacaacatctcaatcacatacatacacacattatcacatacactcgatttcaatcataatggtataatctcaattaacacgttatcacacctcatg

SEQ ID NO: 168621 - DNA, 417 bp, Glycine max
agcttaaccatcaagagaatgccttggatattatgtttatagaggaagcttcagtggaggaagagaatgagagagggggggtgtatgaattgaaggagattagggagagaagttgaactttgaagtgtgtctcacaagtttcttattcatcaaagttatgaaaagtgttacatgtgtttctatttatggcctagcacatgggaagcttccttaagaagcaaggaaggtagcttccttgggaagctagaggaagaaagtttccttgaggagctagaggggggctactcacacctctccaatagttaagcttaccccatgccgaaatacacaaaaatgcacaaaaaaaatccctactacacaaactactcagaatgctctgagattgtatgctaaaatcatatactactagggcatcct

SEQ ID NO: 168622 - DNA, 434 bp, Glycine max
  unsure (1)..(434): unsure at all n locations
ctaagcttcatcaagtgggaatcagagcacaagagcttcaagtttttgctcttaacctncattaaatttcagctttaccttctccttcaattggtgcttcggcatttttcaccatgtatcttcttacatgtcttgtgctaaattttgtaacatgattctttagagttttcaccgattaaacttgctataaaagctagatttgattntctatggttcaaaattcttgttcttgttcttgaaccatgaattgtgttgagtttaggttccttttagttctgtcttgttattttttgtggctgaaacccacaccataaaattcttacaaaaacattaaagtagaagacaacctcanaaatctagagtgaattgttcacctattgtaagttttgtcatagaagtcatgtctagtcatgaaacttgtcatataagatttc

SEQ ID NO: 168623 - DNA, 450 bp, Glycine max
  unsure (1)..(450): unsure at all n locations
ttaagcaccgccgctgcagctaagacttatatacgttagactgtatttattatttgggaacatngaatgtctgatatgtcttttagaggcttgaaaaatgcaagaaaatgaactgcatttctgcattttctggaaaacacaatgaactcactaagcgagcatgctgcgctaagcgagttcatcagtattcattgaatatacgcattcctggaagaactcgctaagcgcgcctactgcgctaagcgagttcatcttttaaggatgaacactcatcctcttgctgagatgcctgtggctaagcgaggatgaattgctaagcctaggtaacttagtcaaattttttgttgatagtcgtgcgctaagccgaacttccctgagccaagcgcattntgttacggcatccatcgagttaagcgagcctcgctcgctaagtgaacctagactagtttt

SEQ ID NO: 168624 - DNA, 455 bp, Glycine max
  unsure (1)..(455): unsure at all n locations
tactaagctntctccaagtcctaaatgacatttcaagctagtagattctcttcttaacctccatttaccacagaattcagacttaaccttccaactctcaaagcctcactctttttccactcataacatcacattctcactttctaaccctaggttaactctaccattcatctctaacagttttccataagcaatttcagcatataaacatcacaaacatcatcacaaaaatcctaaaacagaatgggtatatctaactcatccaaacatggcaatttcaacaagctttcaacaaatgtcttcacaaataatcatcacacagcagaaacctagcaagactacccatcatatctccccaaaccccatacccacgaaaattaaaggagaaagaagtccacccaaacttgaattttcgaagtcccactcgtagccacgcacttcacgaccccgaaaat

SEQ ID NO: 168625 - DNA, 190 bp, Glycine max
aagaaacaatcaatcatcaatcatcgttgggtcatctatctctcaatctttttcaacatcatcgcggaaacatctgtcaagcaatctgtcaatagctttcgacagaactttgctgagtcatgtctcttgatctgtgctaaaagtgggtatcaacacttgttcttccgagaaaagtgcttcgtgcggaaac

SEQ ID NO: 168626 - DNA, 479 bp, Glycine max
  unsure (1)..(479): unsure at all n locations
taatactaagcttctagggcctttcctgcaaaacacattgaaagtattatatggagaaatgccattttaaagtaagaccaagcaaaaacggcatacaactccccccaacacacaaacatcaatgtaaatttaaggccagctcatacacacatacatttatgaacatacatgcacgcaagatatcccgctacctaaaaattgcactcatgcacattcaaagtatctttgctacctagattacatacatgcatttcaaggcatatttgctacctaaatcacatacatgcattntntttgctaaatttacatactgcatactcaaggtactttggctacctaaagagcacatacacacatgcccaagatnattttcctaccaaaaaattcacacaagcatattcaaagtattttggctacctaacatatattntatgcatattcaagtatttttgctacctaaantacgtatgtgcatattc

SEQ ID NO: 168627 - DNA, 408 bp, Glycine max
  unsure (1)..(408): unsure at all n locations
tcgacaaggttgaagtagaggagaccttcaatcctataacgcaacgtggcggacaaaagtgggctgttaacttgaatggccattattgtcaatgcgaaaagtattttgcgcttcactatccatgttcacacattattgcagcttgtggttacgtgagtatgaactactaccaatatatatatatatatatatgttgtttacacaaatgagcacatcttgaaagcttactccgcacaatggtggcatcttgggaatgaagcggcaattcctccttctgatggcgcatggacacttatccccgatccaactacaattcatgcgaaaggttggccaaaatcaacaaggataatgaatgagatggatnggctcgaaccatctgaacaccgacaaaaatgtagtatatgtgga

SEQ ID NO: 168628 - DNA, 448 bp, Glycine max
  unsure (1)..(448): unsure at all n locations
ggtatgatngtatctttattttgccaaaaatggttatattatttcaacaatgcccttgtttcttccttaacactgatgtttgtgttcaatgccttgtttttgtagggaattgggctatagggcttatagacttgaatctgttgatcatcttcacaatccatttgtgtccatttactttggtgttgcttatttagcatggttgtcagaatgtgcaggaaggtatgtctaattaggttaccccgctaaagatttttatttttggataaagttaccctagtatgcaaataatttccacttttaatcataggggtttcgaacgaccttccatgtccatgtgttattccaatccctttcactctaatggtctgtttggtggagctaacaatctcaagttaggggttggacactaatttatatttttgattcggctaaagcacatcgttttata

SEQ ID NO: 168629 - DNA, 456 bp, Glycine max
  unsure (1)..(456): unsure at all n locations
gcacctgcggctgcagcttgagcaattcaaacgacatttattttttttcggaagncnganaggagcccgcaanatatcgagnngcncgaaaccgacacccgaagctcngagcaaanncaaacgacaanaacnnnnnactcggaaggcagaaggagncccgcaananancggagcgcncaaaaaggaacgccgaagctatgagcaaatctcaacgacaataacgtttcactccgatgtctgactgagtcccgtaatatatcgagacgctcgaaattgattatcgaagctctgagcaaattcaaacgacaacaactatttactcggatgtctgattgagtcccgtaatatatcgagacgctcgaatttgaatattgaagctctgaacacattcaaacgacaataacttttttctcggatggctgatcgagtcccgaatatatcgcgtctctcgaaatg

SEQ ID NO: 168630 - DNA, 267 bp, Glycine max
ttccgagcaaaaaccgagcgggcgggcatttatctcatagcttctgtctccactcacgagcatcttgatatattacaagaatcaatcggacatccgagttaaaagttattgtcgtttaaatttgctacgagcatcttctctcaattacgagcgtctcgatataccacgggacacaattgaacatcccagccaaaagttatcgtcgtttgaaaatgatcagagcttctgctttcaatttccagtctagatatattacgggactcaatc

SEQ ID NO: 168631 - DNA, 441 bp, Glycine max
agcttgcataccatgtggatgaaatgtattttacacggcgggttgtgaaattggtgggtagcatgccgaaatgagcttcctttgagaagttgtataccacggtgaggatcacagtagccccttgatacacaagctatccagtgatgaaatccaaagccatatctttccatgatcgggatgggggcagaatgagttgaagcaacctcgagggtttttgcaaaatgtacttggtatgctagtaatctgaacaggtcatgatgcaattctgaacgtccttcttcatgtttggccaaaagaaattttgttgatatggctcaaagtcttagccaggccaatgtgacctcctaacgacaacttatcatactcttccagtaagagaggaatgaacgagtttccctgtcaactagatgtacccttatgaaaaagaggtcttatgaatat

SEQ ID NO: 168632 - DNA, 409 bp, Glycine max
  unsure (1)..(409): unsure at all n locations
tgtttgaggtttatgatttcacaatgcaagtcacttatttcttgcaaccatttcagttcaaattaagatatcaagacaaacaccgtttactaaaaaaaatggtcaaaatataactatcatgaaaatgctagatcaaaccactgtttaaatccaaaaacaagtaaaaataactaaataaaaactgtctaaaaaacaagagaattaaatggaatcctgtcaatcatcagtcttgtgttggtgtgagccatggatcccaggtcccttgcgctgcaatgacgtctgttacataatcagtgtccacatccgcctctgctgcacttgtatccttcttagcctnctgagcctctagggtatcctcaacaagcctctcatcctctaaaggccctcagtagcctgggcctatgtatct

SEQ ID NO: 168633 - DNA, 352 bp, Glycine max
tatataaaccaaaccatggcttctgattttcgtgtactaaagctaaattcatctaatgcataacacacaacaaccacttaaccacaatacacgacacataaatataaatataataataataaattaaaaataagtaacgggagttctagaaaactagaaagaacgctaagaaagaaaacaataaagataattaagaatttggcctccctcattcattccttgaataacgaatgtttcattgttcagcaagggctttgggaagtgaagatttgaaggtccagcttggtcctgcaaacggcgcaaagagggtgcttggagagccaggtgtcagcgcaatggacatgaaaaccat

SEQ ID NO: 168634 - DNA, 452 bp, Glycine max
  unsure (1)..(452): unsure at all n locations
caagctataattaagcatgggtatatatattttatgtctatccattagagcataagaatttgcatgtcgtgcaagctggtaggttaggtttcctcctttcaattctcaaaattacgtggcagaacttagtatgaaacaactccactgcatgcccataacacactgtgaagtgagagtcaatgtatgaccatgaagtgagagtcatattgttgataaaaggctttaaatacactgtgggtaatttctgtatggttttttttaaggttatcatttactactgctaattggcgttgctgtggaagctctttgattatagcaactccaggtacgtatgtacggtctactatctttatatgtattatgatagactactatntcacacacacacacccacatacactcacccacacacacaaacactcacacccacactcacatacccacatacacac

SEQ ID NO: 168635 - DNA, 423 bp, Glycine max
  unsure (1)..(423): unsure at all n locations
tgtagggttaaagtctcacgagtgtgcacgtgctcttgcttatatttgnntagccgggctatacgagacagcttgccaaacaaagtcaggttaacgataactcgcctatgctttttcttccattctatatgtagcaaagtcattgatccagtcatgtttgatgagtttgaaaatgaggccgcaattatactatgccagttggagatgtattttccccctgctttctttgacatcatgattcacttgattgtgcatctggtaagagaaatcaaatgttgtggtcctgtttatctacggtggatgtacccgattgagcgatacatgaagatcttaaaagggtatacaaagaatctatatcgtccattagcatctattgttgagaggtacattgcagaagaagccattgaatttttgtcagaatac

SEQ ID NO: 168636 - DNA, 453 bp, Glycine max
  unsure (1)..(453): unsure at all n locations
agcttgcacctacagcaaactctttanatanttttatngaangngagccattgacttacactaagttttattattacacattaatggagaagggctcttccataaaaataaaaataaaaaattgtacattaatgacaacggaggtagtatgctgtagttacaagtgattgtgtgaaaggctcgtaaatcaacacataatgttctttctattacaaaatcaaacataatgtacacgtatataccaaccggagttgaaaatcacaatataatataataaatcaaggttctgaaatttgaatcttcgctaaaatatgtttttatatctaatatttaatcatgaacataattacacaaaataagagagatgataaaaacattgtgtgacaaactctntcaatatcttactctnttattaaaatgataaaantttgtgactatatatatatatatata

SEQ ID NO: 168637 - DNA, 385 bp, Glycine max
  unsure (1)..(385): unsure at all n locations
caccaaacgaaacaaggacgggtttaaaaaatatatatacgacacccacaacaaataaaaattaaagctataatttgntatatttagaaggaaaaaaaatgttagtagttatgattgtatgattcgtcacataaacaatatataactacatgttgttagcttcttagcatatagggtaattaattaattgatgaaaattttacaatgtttgattctttatgttgatgtacaagcagacacttaggttcacaaactctgaacacattgtgatcactgggttgacttctgaacatagtcaaaaggttcacatactgataaatgcatgccacaacgtgaaaatgcatggagtgaagctcatggctgatggaaacagccctaacactga

SEQ ID NO: 168638 - DNA, 415 bp, Glycine max
  unsure (1)..(415): unsure at all n locations
agctngtaagataatggagtacccatactattggtactaggnggcggtcgggcgatggtgcacaacaagtttccacatccacaaagcgcgcataaacccaccatcccctgttgcccacctccaactgagctcacgtactcccacgtagcccatatccttgtttctctcaacactgggtccccatcaatcctcccaagcttccccaacattcaagtaattcaacaatcaaacaacacaaactatcacagccaagaaaaacagggcaaatgcagaaaactctgcccaaaacaccaaccaaaatcacagcttttctcacttaaagaccccagtaacaattcctccgttccaattcgttaaccgttggatcgaactccaaaatttactggaagtctctagtgcataagccctaaatttg

SEQ ID NO: 168639 - DNA, 370 bp, Glycine max
tgaaggcaaactggatgcattggttaacttggtaacctatctggccttgaatcagaaatctgtacctgttgcaagggtttgtggtttgtgctcctctgctgaccaccatacagacctttgcacttccatgcagcaacctggagcaattgagcagcctgaagcttatgctgcaaatatttacaatagacctcctcaacctcagcagcaaaatcaaccacagcagaacaattatgacctctccagcaacagatacaaccctggatggaggaatcaccctaacctcagatggtccagccctcagcaacaacaacagcagtctgctccttccttccaaaatgttgctggcccaagcagaccatacattccttca

SEQ ID NO: 168640 - DNA, 398 bp, Glycine max
  unsure (1)..(398): unsure at all n locations
aatggaagttctaagtatttaatacctatacttaacagaaaatacttataacactacaaaataaccataaattggaagaatttgatacaatttatacaagttttatacacaaaagttagtcgttttcaccgactaacaccaccctactttcatctgtgtgtaataattttaagcaattntccctaaggatagtgagtgcttttttgggaaccttaaatgagatcatccaaactctcttaggatccgcctagtttacatttcttgcactttaatttcttgcttaattacatagcttattntctttactagtctcgcctagtttatcttggtgttgcataatactttcttcttgcctatcatgcttatcttgagttcttttaatactatctcttactttt

SEQ ID NO: 168641 - DNA, 389 bp, Glycine max
  unsure (1)..(389): unsure at all n locations
tgagaatgccaatccttaccctcggaagcaaaaaaaaagaagagaaggaaaatttccaatccaaggaaaaaggagaaggaaaatttcctattcaaggaaaggaaattcccaatcaaagagtgggagaaagcaaaagaaaagaaagaaaattcccaatcaaagaatgggagaaagaaaaaaagagaagttaaaaagaagaaagctcctggtcaaagaaaccagaagaaatgtgccgagaggtccttggactagacgatatctgaacaatacagaattgtcaccaaatgaacaaaagaaagaaaaggaaaccatgacctaaaagtggtcttctcccttngattaccaaccaaaatcctgtgcgctagcgactttttcgccccgcactaaac

SEQ ID NO: 168642 - DNA, 466 bp, Glycine max
  unsure (1)..(466): unsure at all n locations
tcaacattcaattntgagcgtctggatatattacgggatctattcatacatccgagtaaaaggttattgtcgtttgaattggctcataggttgaacattcaatttcgagcgtctagatatattacgggactcaattagacatccgagtaaaaagtcattgtcctttgaattggatcagaggttcaacattcaatttcgagcgtctcgatatattacgggactcaaccagacatccgagtaaaacgttattgtcgtttgaatttgctcagaggttcaaaattcaatttcgagcgtcccgatatattacgtcacggaatcggacatccgagtagaaagttattgtcgtttgaattggctcagaggttcaacattcaatttcgagcgtctcgatatattaagggactcaatcagacatccgagtaaaaagttattgtcattcgaaattgctcaaagcttaaacattcaa

SEQ ID NO: 168643 - DNA, 176 bp, Glycine max
  unsure (1)..(176): unsure at all n locations
actagcttgaatccctttncatagggggggagatgtgttaccttaaccaacttttcccagtttgtaattgttattattccatcgctggcatggaaaaggcttaattgacatatgagaatttcctttaacttgaaaagcgtctataaattatgtttatgatgattgcattgatgttg

SEQ ID NO: 168644 - DNA, 405 bp, Glycine max
agctttgtaaacatggtctgaaactagtatatggggcataattagacaatacacagactgaaaatacaaatattaagccaggtctaaagagttgtggttactttttcgggaagggtgaggaataggatctgaaataaaaataggtactattggaagtgcaaatatttaagatatatgatgaatagaagtccttaacacaaaacatcctaaaacgatattttagacatgataggatttcatgaccccaccaaaaaaaaaatacacaacaggatttgatctaagctactgagatttaattgtaaaattctctgaaaaacacaagaagcatggagacaaattctcaatcatcaataaacaaatttatcccaatataagaataacattatatttaatacaggtattaac

SEQ ID NO: 168645 - DNA, 402 bp, Glycine max
  unsure (1)..(402): unsure at all n locations
ggaaggaaaactagatgcattggttaacttggtaacccatctggccttgaatcagaaattngtacctgtcgcaagagtctgtggtttgtgctcctctgcagaccaccatacagacctttgcccttccatgtagcaacctggagcaaatgagcagcccgaagcttatgttgcaaacatttacaatagacctcctcaacctcagcagcaaaatcaaccacaacagaacaattatgacctcttcagcaacagatacaaccctggatggaggaatcaccctaatctcagatggtctagccctcagcaacaacaacagcagcctgctccttccttcaaaaatgttgttggcccaagcataccatacatttctccaccaatccaacaacagcaacagccctagaaaca

SEQ ID NO: 168646 - DNA, 453 bp, Glycine max
  unsure (1)..(453): unsure at all n locations
agctntatgacctgtgttgccacaaacatatcacttacccttncnnnncagaatcttgctatcaccttagttgatattagtgtgtgttttcttttgtccttttttctgaaatcgtttttcttttccttttgacctgtgttgatcagcaaactcaacaacattagcattaactgaatttacagaatgtaaaacatgcttatctttaagtcggttggcctcctctgtcttcatatgatttattaattcttgaagtgacaagtccctcttcttgtgtttcagttggttgcggtagtcactccacgaaggtggaaatttttctagaagcacattagcctgcaatatctcacacatcttcattccttcatttagtatatcaccaactagattctcatactcatgaatctgctccatgaaatggttgcatccatcatttgaaacgcagccaattcctac

SEQ ID NO: 168647 - DNA, 450 bp, Glycine max
  unsure (1)..(450): unsure at all n locations
gacctatgatactcacgctgtaaagccncaacttggacaagtgttgcccagactgtttttgtcaagttatccagggtggacatactttttattntgcagccaaggtatgacgtgtcaagtgagggaaacctctgtatttgacaactctgccccttttttgattgttggagagtgcattgaagaaaaatgttatgttttgtcccttattgcaggcatgtgcgacgcacttgtagtactattacatatgtgtcactcatggagaaggcacgtactcgagacgtggtgcgtgggtgagtagggctgcatcgtggtgcaaaaaattagggcaccacttcagctcccgctagttaacgaagagtctgactcctctttaaatgcagtggatgtttgattcatgaccaccatcacttcaatttctatctnttttctcanaatttctttgctttcatg

SEQ ID NO: 168648 - DNA, 404 bp, Glycine max
  unsure (1)..(404): unsure at all n locations
agctnttctttatgggttgaagggttctatctcgtagaaaggcatgatcattggttgacatgttctcaattagctcagttgcttcttccggggtcttcagttntatctttccccctgcagaagcatttaacagttgcttggtttgtggtctcagcctatctataaacatattcaattgaattggcttgaaaaacccatgggtgggagttcttctcaataaacctctggacctctccaatgcttcactcaggcaagtacactggatcgcacaagtagtataaaatattaagaaccgagtatcgaactcttagggaacttgtgttacttggtaagctatttcagtgaataggtgtctggtgtgaaaatctaagtgtgaatatgaacaggtatgtaaactatctacg

SEQ ID NO: 168649 - DNA, 380 bp, Glycine max
  unsure (1)..(380): unsure at all n locations
ntggagtttccaagtgccaattcgtcctcttctttattccagtcttcttctggcttcaattcatcagtgggctttccttctgtgtccagcatcttgggatgttcccagcctttgatgacagctttccaggttctgctatccagtgatttgaggaaggccaccattcttgctttccagtattcatagttgcttccatcaagaattggtggtctgttcactggtcctccttctttctccatgttcatcagaatttatctccccagatctcactctgtgatttcgagtgttggctctgataccaattgaaattctgataccacgggacagatgtcgtacaggatgtcacgacatcacgcttcagaacatgcagatngtatgtg

SEQ ID NO: 168650 - DNA, 408 bp, Glycine max
  unsure (1)..(408): unsure at all n locations
actctgaccgaaataggtcatagtcacttgatgatttccagtgagtccatagaaatctctgagttttgtccatccagccagtagagttgagctcaccagatcttggttgtatgtaacaaattcatgttgcaattactgtctaatagatgtcgagtatgctctagttcatccttccatcttatagcaaatgaattactgacttcatcataagactacatttaacaagcaaactaatataagaaaatgtgctatatcacatcatgtttatttgagaatagtcttgaaatttctaacctgatccataatgtgaattgtgttgaacatttcctttgngtttttggtaatcttaattattgtattatccatttcctttcagttctatggatcttcatccatcgtttctaaaat

SEQ ID NO: 168651 - DNA, 441 bp, Glycine max
  unsure (1)..(441): unsure at all n locations
ttatgcaagtcaattntcagaaggcatctcagattcttataattctggtaactggntttttttaacagccctattggtgaatatgtagttatgtgaaatctggcagtgatataagcattgtcatatcatactttctttaagaataagcaaacattaaagaataaaaaaatcctgctttctttttattgttatcgggcgggtatgatgatgtattacaggttatgcaaaattatggagatagcaattttaataccatgtcatactttttaatcaaaggtttgattgagaagtctctatctatggcgggaagagaagttttaatcaaagcagtggaacaatcaattccttcctatgtttgttgaagattaatctacaaaagtatagatgtataattcgtggtccattatctagagagttctacacctatgaagatgttgtagt

SEQ ID NO: 168652 - DNA, 350 bp, Glycine max
  unsure (1)..(350): unsure at all n locations
aggcaaccaacgctaccaaaggtggcatgggcaaannattcttttgtattattgcaattattattatcttttgacgtaccacacatattttttgttggtttaacatattttcttaagtatatattgcgcttgatttacttattttttgtgtttgtaaactatttaaacaacacgtacctagtagtaacaacaagagtctattctattgattcacaaaacaaacatcaacaactaaacaaacacggataatacaacttttcttataacaaaataaaaaacaatgtatgatttttataaaataaaaacatgactgcacanaattatcatacatcaaaagcaatgatcctatt

SEQ ID NO: 168653 - DNA, 432 bp, Glycine max
  unsure (1)..(432): unsure at all n locations
tctgttggaccttangcaaatcctcaaggcagctttatttatctactgnccactcgcggtggggcccttntctctctccaaagcttaagctcgctgttactgccccacaaagcccctcggaatttgtttcggtcatgttcttccctacaggcccttttggtctcttgttccaaggccttggtggtggctatatttatgtctctcagtttgacattctcctttcggatcctaagagctgttgatttgaacttttctttgacagtttgggctttctcgagttctgtcctgagggcctgcacctcttcgtcctcctccggagcttcaacttccacccccttagtggttctcaaattcgggagccaatccaaaccttgcatgtaggctttcaaccacctatggtaggcaccaactgggcccgtgctacctgctctg

SEQ ID NO: 168654 - DNA, 332 bp, Glycine max
  unsure (1)..(332): unsure at all n locations
aaaaattgaacctctaaaacttggaccatggccagtgtcaactactctttatatatgtaaggaatctgcattgttcgtccaagatcaagtttgtaggtacatgacacaatgatatgatatcagaaagcaactaataaatatgtagtttgactcaaacaatttgcaggtgcaaaatggaaatacacaacaataagatggtaaagagcattttgagaatcaaatcatgacaagtaggaaaagaggaaaatgcaatttaggacaatctcaaggatttaacagcactttgctctcatcattaatatanaaacaatcanatagtcaccgagtatgag

SEQ ID NO: 168655 - DNA, 405 bp, Glycine max
  unsure (1)..(405): unsure at all n locations
tagccctcaccatcttcatctcctctcttaattntttcttattgggaaccaagattcagataaagacgcttcttccttgtgaactcaaccccaaggtttcctttgagaggaagtagtcatggctggacttgtgcctccatttactttacttgcacaagaatcaattatgaagagaaaatgaatttttaggaaaatcctacatgtgaaatctatttgtatatcttatggcatttatctttttgttgattttattctctaaatttttttgggggaagtccaattacaaaggagactgcctaaattttattaagttttaaaaccaagcctttcaaggtattttcaagaattttccaagagagccagtggctaaaattatgatttctctggaacaacctccactatctc

SEQ ID NO: 168656 - DNA, 371 bp, Glycine max
  unsure (1)..(371): unsure at all n locations
attgctccacccatatgtgtataagccacccaaagatgaaacagaaattgtatgccgccaaccacaagcaaccatgaccatcttgtcacactgcaacattaaacaagcaagaattatgcaaggggaggaggggctgtaaaaaacagaagttctccatccattagtatgcatgtacaccaatcgtgcatgaatcttaacagcattntttagacaaatcaacaagttaacacctggaaatgctgcttcttctattaaacagcgagaattgttttttcagaaatcaaagaatatcaaatcacatatggtccatatataatcagagtctaaacagaaaaggtaacatgataccagtttgaggacatacatcaaca

SEQ ID NO: 168657 - DNA, 441 bp, Glycine max
  unsure (1)..(441): unsure at all n locations
tggagtaaagaacctttcaatttctaattcccttcatcatgagtcatttcaatatgnaanctaatttgaggatgaaatataaataaaactctcaaaaaatacaaggcataaaatagttgtatgactgggtagctaatgcaatatatttcatttcatattggaagatccatacacatgcaaacatgcatgtacatacattgaaagtggaaagaatctatgaatcaatgccaattaatcatttaaaataatgaatatgaaaaagaaaagaatgaacttacagtggcaccttcaaatgttccttgttcagacccagcctgtttggcattatgaatgaccagattcctctgtcttgcctttctaagaagttgagaaagtacctggaaaggaagaaaacaagcaattactgctacaaattcaatgatcaatcattntatgcatttc

SEQ ID NO: 168658 - DNA, 413 bp, Glycine max
  unsure (1)..(413): unsure at all n locations
cccttgcgcttagcgngacttagtggatttgagcttagcgccagtcatgcgctgagcctggctaaagacaaccgtcacgcttaacgcgcggccttgatatttatgctctgccagattcttctattgcactaagcgcgctgaagttgcacttagcaatggatgcgcgctgagcccaaatggatagctgagcacaactaccacttttagcatttcaagacttagcctcatttaacttgaaattgaacaaatttcatcattaaatccaatcgaaaatattctagagacagctataacaataaaacaagatttatttacaaatccctacaaaataactataaattgggggaaactatacaagtttggaaaatggtttctatacaaaagttagttgtataagacgactaacaataacg

SEQ ID NO: 168659 - DNA, 451 bp, Glycine max
  unsure (1)..(451): unsure at all n locations
gggtttgtgagttgattntagccttagtttcactgtgattattattcaattcattcaaggaaactttcaaagaaaaccgttcgattgatttttttttattattttttttctagatattttaattattttattatttttttgaagatattttgatattattattttttttaagatattttgcttattttattattattttgattnttttatttaaccgaagttacaacgtgaacgatcggttggattttattttaatagtgattaaacgagattacaacacaaatgatcggttgaaattcattttatcaattattaggcaagataacggcttaaataaatggtaaaaagcttgttaaaagcggcaganaagaaaatcaaaagtgaacgagatgaagatgaaagcaaacaaaacaaganatgaattgaaagtctcggattcgaacacttaccg

SEQ ID NO: 168660 - DNA, 406 bp, Glycine max
  unsure (1)..(406): unsure at all n locations
atttcttcaccatgaacatattggctaaccaagtggtgtagtctactttatgaataaggtcaatcttcaataacttgctagttcctaccactattgtttttctccaagtttgtgttttctctaagctactggtttcacataagagaaaatggaaagcttgtggcaaatgaagttagagtcaatgcatggcatgccaaatgcactccaagaaaataggtcatcatttcttaggagcacttgttctatttctttttgtactgcatcctccatttgtttgccgattntggtgcattgatgtgactcccttccaatttggaaagattcaatgtcttctataggtgttggtcgtcgatctttcaaaattgatcaaggatcaagatccttcaaagtggtgataattgcattt

SEQ ID NO: 168661 - DNA, 422 bp, Glycine max
  unsure (1)..(422): unsure at all n locations
ntatctgngctcgtaataggatgttatgatattctatagttgttgtgtccttaaattggaatagtattaacatatggtgttaaaaaatttcaaatgttgctctcttttctccaaatctcatttgtcaattctctgaggctatgatgatctggaaaacttgtgttacaatgggagtttcaagtttcaactgctttggggtttatcggcagttcagcacaagtctatgaatgtggtaagcaaccactgttgttgtggagcttggatagctctctgatggctgtgaacaatgaagtgtaacttttatccctttttgggctttttgtcccgtcaagggttgaaaaggattntattgcacatatttcataccaatttaaggtgcatactatnttccataatgaaattaatcagaaagagggatcaac

SEQ ID NO: 168662 - DNA, 413 bp, Glycine max
  unsure (1)..(413): unsure at all n locations
tgataacaaagataatgacaaaaagctcaaaagtcaagaacacttcatgttaacaaagatgatgacttcaagaatcaaagaatgagttcaagaatgaatcaagaacacttcaaggttcaaaaggaaatttgatttcaagaatcaagaatcaagtttcaagattcaagttccaagaatcaagatcaagattccagactcaagattcaagaatcaagagaagactcaatcaagataagtattaaaaagttttttcaaaaactgagtagcacatgaatttttctcanaactctttgccaaagagtttttactctctggtaatcgattaccagattattgtaatcgattaccagtagcaaaatggttttcaaaaaagctttcaactgaatttacaacattccaatggatttcaaaat

SEQ ID NO: 168663 - DNA, 427 bp, Glycine max
  unsure (1)..(427): unsure at all n locations
tgaatccnctccctgngatacagagcttagcaaccaatttttgatgatcaggcctcangagtgcaaatctggaataagtacacaagttctccaattcctccaaaattactggggtcttcagaaatgtgtttaaagtatcctcatcaaacttcactaggtgacctctcaccctcacctgcttagttgatttatcctcggggtaatagaggttggcgtaaaactcctttacaatggcgatgtctatgctactgccagaaaaatcagtcagcttctcatcctaatgtcttctctcgagttcctccttgaactcatcaaactctgcgtaataaactactacatttctctttggtagtagctttcaaggcaccacaatgtctgtatatctctcccaagcatcttgggatgtgaacctagatctatcaaatct

SEQ ID NO: 168664 - DNA, 198 bp, Glycine max
  unsure (1)..(198): unsure at all n locations
ttcacttagtgcactacaaatatctggaatgtgtccgctaacataacttccagcgagaacaaccctctacaacctgntgagctaccaaagtctggtggaatttcacctgttaaaccactttctaatactactagtgactgaagggtcttgagggcaccaaaacttgaaggaatttttccaatgagacctctatttgat

SEQ ID NO: 168665 - DNA, 454 bp, Glycine max
  unsure (1)..(454): unsure at all n locations
agctngtagtccgcggagttcgtattgtctccttttattntccaacgaacgaaattccttgttatgttatgttatgttgagttctgttccaacaacaacagtttcaccgcgatcagaatccattcttgtcttgtctgtctaatgctaattctcgttccagtgttcagactcagactcactacgccaccccctaactgaaccgatgatgtgtccctttttcttctctctttcgacacttggattgttttctatgtatcattacgtattacttatctgctccagtagctgatgaaaaaaaaccggcactaatagaaggattaattataaattattttacatattttaatttggttgtcaaatttaaaagtaaataaataaatttcattctcaaattcttcaaaataagtatttttaaatctttaacaacttaatttgatcctaggttttcaaatat

SEQ ID NO: 168666 - DNA, 460 bp, Glycine max
  unsure (1)..(460): unsure at all n locations
tcctatattngataagttaagtgcacccggctaagctgtatttgtcatagnnnatgtttgctataatgttgttagtaggttactatagtaggggaggaagaattattatgtagggtaatagtgcttggttatgcttcaattatataaaaattaacaaatataaatatagcataacttgtggttatgaggttggactatgaagtttattccatagcaacttttgttgcacaatgctttggtactccagtgcctttgaagtttatgtgcattcttgactatattattgatatataataatctccttgaaagagatacctcaaaagcaaatcatgtatatctaacaatatagttaacatggataaccaataaaacaagctgatattaatattatataatttgaaaagttgtcttctggtttatntaggttactatactagtatgtaagttggtgcaatgcatg

SEQ ID NO: 168667 - DNA, 435 bp, Glycine max
  unsure (1)..(435): unsure at all n locations
agcttgcacctagagagcaaaagatatattctactttagagagatgttagcaattgctgaagctatagctaaggtcagacactacttgctgggacacaaatttattatcagaactgatcaaaaaagcttgagatcattgatggaacaacccctacagacacctgaacaacatgagtgattacacaggtttttgggatatgattttgtgattgaatacaaggccggaaaggagaatctagctgctgattctttgtcacaaatgatgatgctgtcttggtctgaacctcaagctagtatactgcagaagattgaacaagccactgcagagaatgttgcattgcaggaactgatacagttgtgtaaacaacaaccagaatcatagagaaattactcaatcaagggtaattngttgtatagaaagaatcgggtagtaat

SEQ ID NO: 168668 - DNA, 425 bp, Glycine max
  unsure (1)..(425): unsure at all n locations
ntaaatagactggtgagacaagcagtggagaagattttattcagagggttcccagngggcacaaacagtgtcaagatcagcattttacagaatgctgatgacacaatattttttggtgaggcatcaatgagtaatgttaaggcaattaaagtcattctgaggacctttgagcttgtatcaggcctcaattaatttcgcgaaaagctgctttggggcaattggaatgtcggatcagtgacagaaggatgctgtaaattacatgaattgtagcctgttgcacataccattcatctacttgggtataccaattggggcaaacccaaggcgctgtgagttgtgggatcctatcatccacaagtgtgagagaaagctagccaaatggaagcaaagacacatctcttnttgcgggagagtgacccttatac

SEQ ID NO: 168669 - DNA, 448 bp, Glycine max
agcttcagcttttgttctcccaaaacacttttgttgtcatcatgtctttgcctttatgccagtctagactcatggataatttgttgtggcgatacactgacgatggagtatgtaaaactgtcaggtcaccacttggctaaaacattgtatggaacagaagttgagtctacaatagatgcaaaggatcccttcttgacaaaattatgggttgttaaggcaacaccaaagtgcaaaacactggtctaggacgcatgcttagactccctgcctatatgctctagactacgctactgcaatgttgatgtggatccagtttgcagcagatgtggtttacctctaagtacttgatatgaacccagagtaaccaacttgtctcactcaaggaatggttgtgacctcttcttatgggagcaaatgatgaacttgctgctgatattttcaatataat

SEQ ID NO: 168670 - DNA, 396 bp, Glycine max
gtgacctatgaaactaagcttgggcaattggagggaataagaaggagggaggttctctatgctatgactgccattcctacatggccaaatttcccaccagctcaacaatatcaatacttagccaatatcaacctttcttattacccaccaccctatcagccaagaacacctaatcatccataaaggccacccctaaatcagccacaaaacccgtctgctgcacatttgataccaaacaccacccttaacacgaaccaaaacaccaaccagggaaggagttttccagaaaagaagcctgtagaattcaccccaattctggtgttgtatgctaacttactcccatatctactaaataatgcaatggtagtcataatcccagcaaagggttctcaacct

SEQ ID NO: 168671 - DNA, 455 bp, Glycine max
  unsure (1)..(455): unsure at all n locations
agctngagctataaaacattaatcttattttgtttacatgtgtcatccaaaattatttttacattgtcaaatttaatattaataataacttctattatagattttaaatttttttgccaaaagatttgttagcacaacaagtaagatttaatttggataaattatatttttcatttcttgttatttttctaaagcagtattattttgattttttttatctttggataaaatatatttgaggtctctataaaatttgaaaataattaatttcattattataaattttttcatattaatttggtccctataaaaataaaacatatctttgttgatccttaatggtaactnntggtaattggtgtgactatcacactaacacacatattttgattacaaataaattaaataattggtaacagttaaaactcttnaaaataaatgaattaaatgactaa

SEQ ID NO: 168672 - DNA, 446 bp, Glycine max
tgtggattatgagtagtgatgaaagggtgagcattaatgtgttgatcattaatatcgatagtggagaaaggaaagcagttctcataaaaaataacatgtcaagacacttcaatggttcgtgtatggagattgtacacaaggtaacctttcttgtgggatttaaaacccagaaacacacaaggtaaggctctaggatcttgcttttttctgttagcactgagagtgctagtgtaacatagacagcaaaaaactcaaagtaaattaatatcatataatgcagaatagagtttttggtatggtgattcatttttctaaaaaggagtaggaataatgtttatcaaggtagcagtatgaagtaaagcatatgaccaaaaaatgtttggaaggttagactgaaacaaaagggctcgagttacattgagtaaatggtggtattttctttcaac

SEQ ID NO: 168673 - DNA, 374 bp, Glycine max
ataactaaaaaaaaaaaatacttgttaacatttttttcaaacaagagttggtacgatttaagttattattctcattgattccatttccatctacttgattcatctcaatctcaaatcatttcactaataagttgcaacacgaatgataaatagttgaatctcttaaattgtcgtcaaatttcaattcttacttttctaaaaaatgattagttcagttcccttgtgaaacaaaataatcccaaattgcttttatcaagcataatcaaaataattggtgatacttttgtgtgaattttaggtcgtatgaccagaaatattaatttctccgatcaaaagtaattccaccgctttaaatgcccacaataatagtaaaa

SEQ ID NO: 168674 - DNA, 463 bp, Glycine max
  unsure (1)..(463): unsure at all n locations
taagatgcattaaaattagtcttataatagtatttgatgtattggaaaaaaaatgttaatttgataacggctggggaaaaaataaagagaaaaaaaaactaattgaagttaataatttaagcaagagtacatcgatattttttttttaatttcaagtacatttactgtgttagaaaaaagacaaaaaatggtcaaacaaaagagaaaacatgtatttatataataaagttatacaacaaattaatacaatattttatttctagaaagaagtatgaaaaacgataatgtgactgataaataaaaattataatgctataaaaattatacaaaaaatgttgagtggaatataaataanaacatgtattagagagtttcattcagatattcctactgattaattntatttctactttctagattatattattgcatataatggtgaaagtatctctcgtagctagag

SEQ ID NO: 168675 - DNA, 451 bp, Glycine max
  unsure (1)..(451): unsure at all n locations
agcttagcaagacaacaacttttgtacctttataattntctcctttntacctgaaattgaggtgaaatttacattaaattcattaggaaggcttctaatgagcacatatgaaaactaagctagaaatatttacaatcctaccaaaaataaccataaattgggagatctatatacattttggaaaacttttctatacaaaagttagtcataaaagacgactaacacatatcttgagagaattctttgcaaagagaatcattagttgacccaaaaatgatatcatcaacaaagatatgtactaagagtatatcattcaattttattttaataaaaagggtagtatcaaccttacctcttgaaaaacccttttctaaaaggaatttactcaaacgttcataccaagccctaggggcttggtttnaccatataaagctctttttaagttaaaaac

SEQ ID NO: 168676 - DNA, 381 bp, Glycine max
  unsure (1)..(381): unsure at all n locations
tagttntagctnttctttctaacatcttggttaactggtctattgnttaggagttgaagtcaaatacatgccaaataattctgttctactcactcagcaagtatattagcgacctactgcaaagaacaaaaatgactgaagctcagatcatttcctctcctatgacatctagttgcaagttaaccaagattggttcagatctgttttcggaccctactatgtatcaatcagtagtaggagttctgcagttcactactattacaagacctgaacttagctttgcagtaaacaaagtatgtcagttcatggaaaatcctcatgactctcattgggtggctgtaagaggattctcagatatcttaagggatccttacatcatgg

SEQ ID NO: 168677 - DNA, 398 bp, Glycine max
  unsure (1)..(398): unsure at all n locations
catgaaccaacctctgtcaaaaagataaacttgtaacctgttaggtgaagacacacatggttttatgttatatatctaacaatagtaatctattaatatagcttacaggttcattatgcatacnaatttaggtccaagtcatcgcatatattntcatgaaggaaatcaggacctgcatattcattattagattcatatataaatttttgtccgtacttccatagtgtccattaacacattttcagcatatgattctcttttctatctctttctccacaacaatgagcccaaggagcagagttttcttatgagcatcaatcaagaacgtacaattatttatattacatgatagaaaaactaaatttagtttattaatattgaacacttttttggataat

SEQ ID NO: 168678 - DNA, 439 bp, Glycine max
  unsure (1)..(439): unsure at all n locations
tgcctcanagagatccagganagacaaggcggttgaatgttctcagttctgctcccgaatatgacagccatcattntaggagcattgaccaccagcaacgcttcgaagccatcaaaggatggtcattccttcgggagagacatgtccagctcagggacgacgagtatactgacttccaggaagagatagttcgccggcggtgggcatcgctggttacccccatggccaagttcgacccagacgtagtcctcgagttttatgccaatgcttggcctacagaggagggtgtgcgagatatgcgttcttgggtgaggggtcagtggatccctttcgatgcggatgccctcagccagttcttgggataccctttagtgctggaggagggccaggagtgcgagtatggccagaggaggaaccaagccgatgggtttgatgagga

SEQ ID NO: 168679 - DNA, 419 bp, Glycine max
  unsure (1)..(419): unsure at all n locations
actctananagaacagtaggtggagctcttcaatactccaccataaccagaactgagctaagttttgcttgaaacaaagtctgtcaattcatggtcatactcttgaaactcactgagcagtagtgaaaagaattctcaagtatctaaaaggctctttacaccatggcctacttctcaaagctgctactccaggaattaccattcctattaaggccctatgtgatgcagattgggcttctaaccctgatgatcacagatctactttaggagctgctatttattttggtcctaaccttatatcttggtggtctaagaaacaacagattgttgcaaggtcaagtactgaagctgagtatcgaaacctatctcaagctacaactgaagtagtgtggatttattagaattctaacagtatcata

SEQ ID NO: 168680 - DNA, 465 bp, Glycine max
  unsure (1)..(465): unsure at all n locations
tctacttatgtggcagggcgggcttccttcaccttcttgtctctaacgcgaactntgaccattgttcttccttcccacgatgcttcttttcatgtccgcctgagtgggcttatagcctaaaccatacttcccacgatttccttgggtatttatcaggctagttatgccgcccgtgttttttcctaaacccatcccgggttcataaccgttccccaacataactcgggccatcattaccgctgcatcggacagacaaggctgcccaaagagggagtccacggaggaaatgctgaccacctcaaaagactggaaagcagtttctaacgattcttctgcggcttccacataaggcatggaggatgggcagcttaccaagatatcttcctcgcctgacacgatgaaccaagtgccctccactacgaatntcagcttttggtggagtgtagaaggcacaactcccactga

SEQ ID NO: 168681 - DNA, 418 bp, Glycine max
actatagaatctaggtcaacacgaacaaagtgctataacgctgtcagatttgttggacaaaaaaaacttgagtgaatcaagtgaaccttatagcaagtttccattgtatttgaacctactgtgtaaacattctttgagtgattagaatacatattctatcaaacatttattgttgtgaaagccaggagtggcttcgtgacaaaaaatacttgggtcttaatctcagagggatattaagggtagtgccagaagtggcctagagagtacttgttgtatcaaggagtggcatagaggatacttgtttgtaatcaaaattttgattagtggaaccctgcatgttttgaaggagaactgaacgtagcccaagagttgggtgaaccagtataaaacctctgtggtttctttactgcttctatat

SEQ ID NO: 168682 - DNA, 390 bp, Glycine max
  unsure (1)..(390): unsure at all n locations
ntatacttaacttctaaggagtttctagagacagtaacatgtttcttagacttccatgaaatcaaagaattatcaagatatatggcataaccaataatagatcttcttgtatcaatacaaccagcccaatttgaatcattaaatcctttcatatggatgttactatcagcagaaagaaaaatctctgcacctggggaccctttgatatattgaagaatcttgaaagtagcttgttgatgagctgatgttggtttcgtaacaaaatgacttaaaatgttgcacaacataagtgatatttggtcttgtgttagtgagataaatcagtctgacaattagtttcttgtatgaagaagtatcctcaactgaaagagaggagcacgaatgctaatg

SEQ ID NO: 168683 - DNA, 461 bp, Glycine max
  unsure (1)..(461): unsure at all n locations
agcttgcttgtggagcttctatggaggcatgatctttgagcttcaatgaggtcctctaatggtggttttccaccatggagatgcagcggaagacaaaggagaaaaggtgagaggaggcgccatccattagggaataagccatggaagaaggagcttcaccaccaagatgagccttggataagaagcttggagaggatgcttcaatggaggaaaagaaagagggagagaaagagagaggggggagcacgaaattgaaggaagaaaaagggagagaagttgaactttgagttgtgtctcacaagactatcattcatcaaagttacaacaagtgtttcacatgctcttatttatagactaggtagcttccttgagaagctntcttgagaaaacttccttgagaagcttctttgagaaaacttccttgagaagctagagcttagctacacacacccctctcataa

SEQ ID NO: 168684 - DNA, 442 bp, Glycine max
  unsure (1)..(442): unsure at all n locations
nttcctctggttgctctgctagggtttccaagcgttagttagttggataagggattgaaaatccattccattgtcctcgtgcgaggggtattgctttccccatagacattctgtcacaaatctcaatatgatgaaatgtattccaaacttgatgtccaaatttcatgacgatccaacggttaacgagtccgagatcacatttttactgagataggtttgggtgtgtgcaggaaaaacaaagagctacttgcaagggacattccccttaccacatacattattttgaaaatcccaacggttggtatgtgcaaaaataagtaccaaacttgatgttcaaatttcacgatgatgcaaccggtaatgattctgagatcgtcattttgctgagatacggttgggtgtatgcgggaaaaaagagggtttatgagacgaaaagaaaact

SEQ ID NO: 168685 - DNA, 455 bp, Glycine max
  unsure (1)..(455): unsure at all n locations
ttaagcaccgccgctgcagctttatgacataagatgggaatttgtgctctagtagatactgccgccatttcttgacggcggcgattatggctgccaactctcagacgtatgtggatgcgctggccattcttggacaaaattgcttattgaaaaaagcaatggggtgacccccctgagatagaaccgcgcccatacccatgttcgatgcatccttctccacaacgaagggtactttgaagtctggtagcgctagcactggagctccggtaatggcatctttcagcttttggaatgcttcagtggcttccggcgaccactgaaactggccttgactcaaaaggttagttaatggtgatgccagaatcgtgtatcccatgataaatcgacggtaaaaccctgcgagacctaagaaaccacgtaaggcccgaggagagcgtgggatanaccatgtttga

SEQ ID NO: 168686 - DNA, 451 bp, Glycine max
  unsure (1)..(451): unsure at all n locations
ggcgggttagccaagaactggacatagtctgtaaggttttattttattaatataattctttgtcttatatgtgtttatttctcttctgctttaaacagacctaggctttgagtttgattttattttgcaaagactgtttctggtgtcttaataagtgtttacaaaaatttgttatttgtcttacaaagtttttcttcaaacaacatctttcaaaatttctaaaatcaaaattcaaccctcttcttgtgatatttgtctttacatgttatttcgcatgagatgttacatgttcaaattgtagacaatattgttatttattcttgatatcattgcttgaatttcttctaanaaacacattaactaaattaggacaatgaaagaagtatagacacgcctaaaatcanattatttttatgagacaagtcagtacccaaataacaacttccacact

SEQ ID NO: 168687 - DNA, 424 bp, Glycine max
agcttgcgggatacctgaggtcccactttgtgttcaaggccctaatgagaatggttgaataaaaacaaaactaaagtgattatcaaaattcgtgatgaagcacggctccacaatttagtatttatctgctctaaagtgaaatcatagttgaaattttgcttgcatccccatgatctcatatgcacagttttgtatcatcttaccaagcaatagccaaaaaaataaagaataacagaatgaccaacttccccgctattttccatccatttttctcaaatcagtattgaagcggaagataaaaatcagaaaagaccatgatgtgaagtgatgcacctgaagaaaagaccatgcgaggttgaaaagcgtaacgagccagagaagggcataataggaaacgacaacataggagcctcgacgacagacg

SEQ ID NO: 168688 - DNA, 456 bp, Glycine max
  unsure (1)..(456): unsure at all n locations
ntggccttacacgtggacaatcaatttcattcatgctattgctacccgcagaatgttgtctctactttctagtacttccttcatcttacttgttaaagaataataacactttttaaatatatatttttattattaattcaaaatctataaaaattattctattttataagttttaactcgtaatattcaagggtgtactaagaaaaatagaaaaaataattatataccaacatttcaaaataattttacattatcatcctacaaaaaattatcatttatgaaaaatttgttgcatttaaaaaaaaaaattcttaaaatttatatttggaataatttgtgattatatgttgtggcgggtacttttttttntaaatatatattcctatgaaaaagaagtaaaatttaaagatggaaaagggagtaaaaaaatactctaatttagtatgaaanaaatat

SEQ ID NO: 168689 - DNA, 391 bp, Glycine max
cggtgtttggcctcaaatgtgcgttcggtggattttgtggccgatttgggggaggccttagtcgatgattaggcgttctcatttggtagggtggcgggttatgacaaggacttacattggtccactattgatattgtcggtctaatgggaaatttggccatgtaggaacaatatccacaacatgggtttctcccttcttattccctctatttaccctaggcctcttatcatccgaattcatcgaattagtgtaatttaattcgccttctttgatacttactctcattctatcacccgcaaacactaaatctgcaagctcgtaggcgtgcacccatcatcttctcatagataacactgttaatgtgtccactatcattgtaatcatttactc

SEQ ID NO: 168690 - DNA, 391 bp, Glycine max
tcatgcttaactatgtatggcaaaagctgattatttttttttcaagacatacaagtgagcttgcaacaaatcttctacacttggagtgatcacatgcagtcctcttgaacccttaccacccactctgtcatcatgctgagactcaggaagcccaacaggtttagccttctctaagtattctgaacaaaattcaatggcttcttttgcaatgtacctctcaacaatagatgcttctggacaatatagattctttgtatacccttttaagatcttcatgtatcgctcaaccgggtacatccaccgtagataaacaggaccacatcatctgatttctctgaccagatgcacaatcaagtgaatcatgatgtcaaaatagcaggtggaaaataca

SEQ ID NO: 168691 - DNA, 439 bp, Glycine max
  unsure (1)..(439): unsure at all n locations
agcttcanactgctgagagtgcttgnattctttntaaataatncttgtcatcttattactgtttgttttattattctaatggttgactataaatgggttgttaggagggaaaatctgcactatcacccgagactctcttgaaatacatagatgaacttccattgtgtgcaaggtattacggtttaaaaattttcttgttctaatttagatttgcttgacaatgagtttaccccttggttaaaattaatctaggaatcaaacagttgatcatccgactcaaaaaagcatgtctgagggtttgtcagaattggtgacagtgcagaagctatggagcactgcagttctggtaagatttagcaattgctttttgatcctgtgcactcatcatccactcttatagtcttattggttattgcttntgaaacttcttctgttaatc

SEQ ID NO: 168692 - DNA, 385 bp, Glycine max
  unsure (1)..(385): unsure at all n locations
ntcatgtcacacccctggtggtaaaaaagttacattattaatgtataattgctgtttataaatacataatattagatcgaattagaacgatttgacgttgttctcaaaatgcttaaagtctaactttctaatctttaataaacccgtcaaaatttcctttgagtccagcctagtcagatgggtcgtgaggagtcataataccccttattagagttctaggaaatttattttgagtaaatatttatttttggttgattcaattggatgtgaatatgtatttttaaaattaaataaatacaataatttttcaaagtcaaagatttatcactaaattattatttttaaaatgtttaataatttatgaaaacaataccatattaatagt

SEQ ID NO: 168693 - DNA, 455 bp, Glycine max
aggctatgtctcttttcttaaatttgtttttttttagcagcatttcgcattgatctccgagtacacgaaatgaaaatgatgatatgaattccaccacaatcaagtatgcactcagagaacaaagtaaaatgcattgtaccataatttcatcaaatttaagaaaaaagacttaacctatacatatgaatctactataaaaaatgactatttccaaactgtccaaacaaacaattcaagattcaatacaccgatttatccaatatgtctggaagaatcattatattgaatctcaaatgggaaactaaggttcactcataataaacataacttgtatataaagtaatagtcattaatcacataatacaagttataaaagcattcatgacaaataaaagcctataaagagtatgaaagacattcgtacctttgatgatgatcactaacaatctgcaaca

SEQ ID NO: 168694 - DNA, 463 bp, Glycine max
  unsure (1)..(463): unsure at all n locations
ctacgcttcctatgatccaatactntaccttatggcattttattattactgaccccaaacctttcagtaaaacctatgctttcattntaattgaagatcaaatcgaaaggagtgaagtagatatagactttagtgctaagtcttatggtgcttttatcgaaaagaatgtgcaagatattgaagtggtttctgatgaagaacatatagctttcctggtgtattgggtgtcctcgcatcttctctgcactcactctcttcaaattcccatgtgtagttacaacttggctcaagatcttcatttcagagaagatatttgtcttagtaagtttttactaacttttgtttacaaggtaatcgatgaagctgtcaaaattatggatacccccgacaagatgaagcacatagttgggcttttatggatggtgcaatcatgaattattgctattctagaaaatcacataac

SEQ ID NO: 168695 - DNA, 453 bp, Glycine max
  unsure (1)..(453): unsure at all n locations
agctntttggcaaagaanaagcnatggctttggttagagaaagaatgtgaaaaagaattgtttggtagaatatcatatatgtgtattgaatgtgtgccaaagtcatgcttttatagactcttcatgtttggtcaaagaaactattggaaaagttgtgactttagagaaaaccatgttaagagttataactcttaactttttcttcaaaattgttcactggtaatccattacacaatgcattttatgaaaagttgtgactcttcacaattggatttgaattccaacattcagattcacttgtaatcgattactaatatagtgtaatcgattacactatttgaaaaacattgtggaacgttacaaatcatttgaaaacattctgaaaaccaaactggtcactggtaatcgattactggataatggtgatcgattaccagagagtaatcactctgg

SEQ ID NO: 168696 - DNA, 380 bp, Glycine max
  unsure (1)..(380): unsure at all n locations
tgaaggtgtgtagcccaccatcttttcatagtagaatactggtaatgtgtctactatcattgtcatctttntttctccgtcattgaggtgccacttgagctgccaggtctctccacctttgggcgtattcttttgaaagattcgtgccccctttttgcacatgttctgtagttgcatcctatccgaagacattatactaacactgcctaacaaaggtgtcataccctaatttcgtccggggattattacttgatgacatgcaacctttggttagccgctttgagattacttggcgtcctttgttgcgcaataaatgaagtcccgagacgtgtcagaaatcaaaaggaagcaggcttacgcgatccatgaaattccgtaat

SEQ ID NO: 168697 - DNA, 405 bp, Glycine max
  unsure (1)..(405): unsure at all n locations
agctagtcccgcaagcctcttatctattttgtccatgaaaggcaaaggaaaatgatctttccttgtggcttcattgagcttgcggtaattgacgcatattctccaaccagtgatagtcttcgttgggattaggtcattcttgtcattccgaatgattgccataccccctttatttggtaccacctggactaggcttacctaagcactgttggaaatggggtagataagcccaacctctagaagcttgagcacctctttcctcacctcttccttcattgatgggttaagccttctctggggctgcctgactggtctatagtcttcttccatcattatcttgtgtatacagtanggcagggtttatcctttaagatctgatatgtgccatccaattgcttccctatg

SEQ ID NO: 168698 - DNA, 409 bp, Glycine max
  unsure (1)..(409): unsure at all n locations
tataagctaattagtttaatccagagtgtttagtttgtctagctaataagntaacttataaatgttaaggctatattcaaaaagttagttgatagctagaagctaaaaaaccaatttattaaattataagtgttcagtaaaactagttcttgaagtaactaaaaagtgtaactagaaaaatggataaatatattaaagatagaaatgaaagaaaatacaaaaaattaaaagtttgttttaaaaaacactacttcaagtaacatttcaaaaaatgtcaaaagttattaagaaagtttgtttaccgaatcgtcaaacaaacttttaaacaagttttttagctggtaaaaaatgctagaaagtagaaactagctgaatgtcttgctgaacatggtctaaataacataaaaag

SEQ ID NO: 168699 - DNA, 392 bp, Glycine max
attagcaaattaacattcccatagcctttattgagggacatggataatttttgctgcatttcagctgatatgggttttaagggaggggttcatttgtctcttatgcaatggaactggtttctcttttgatctatagcttgtcttactgctatatatgtctttcttgtgcgcaagaaatactataaattccatgaggcaggggcagggggcctagattaaagaatgaagtttagtgttggttcattttacaggagcagaaagccagcgcagtgcattctacaactttaatagacatcaacagcataatctgaatacctgaccaatccacccagccaactcatcaggatttgcaacaggtgctgacaggcaaataagttgaacttctttaaggc

SEQ ID NO: 168700 - DNA, 462 bp, Glycine max
  unsure (1)..(462): unsure at all n locations
actataaaactaagcttacaaaacttctttgggattagggaaattcaatattatttacttgatttccatttcattgatgaacccattcattctatagcccttagacataacatcaatatatttaaaagctaacttcacgggagatataaggttgacttagtggtgaaggaagaaaggaggttgtgggtttgaatcccccagctaacaaaagttaacaactaacaactaacatttgccgataaaaaaaaagaagctaggattcatgaacaagtcttacaaacatatataatctcctcanatcccttatgttaaagtagtcctaaatcaacaaataactcaacagtatacaacagaaactatagtcagatctatattcataggctgttcatacatctcatcaatcttcaatttcacactaacacagcttcatgatctagctagcctgcaaatggaataactata

SEQ ID NO: 168701 - DNA, 443 bp, Glycine max
ttgagccaattcaaacgacaataactgtgtactccgatgtctgattgagtcccttcatatatcgagacgctcgaaattgaatgttgaagctctgagccaattcaaacgacaataactttttactcggatgtctgattgagtcccgtaatatatcgagacgctcgaaattgaatgttgaagctctgatccaattcaaacgacaatacctttttacttggatgtctgattgagtcccgtcatatatcgagacgctcgaaattgaatgttgaacctcttagccaattcaaacgacgataactttttactcggatgtctgattgagtcccgtaatatatcgagacgctcgaaattgaatgctgaacctctgtgccaattcacacgacaatacactcttactcggatgtctggatgagtcccgtaatataacgagacgctcgaaattg

SEQ ID NO: 168702 - DNA, 453 bp, Glycine max
  unsure (1)..(453): unsure at all n locations
agcttagtnacactgatagtcctttattttatatgcaaaagtgtngtacctcaacataattgctttagaagtaatataataaccaagactagaactatgtaaggagacataataaccaatgatacaaaaatcagaaatttcactatacaattatctacaaattgtgacatttttggcaaaaagatttttataaataagacaaacataatagattcgcaacttgctaaataacaaatgatcctaggacttgattttatcacacatgataatagatcaattactattgcaaaagataatttattaatctctacaaactcacaaatatcaccaataataaatgaactcacattagagttatgaacaaagcgcggtgatacccctaccaaccctacacctacccttaattnccaatgtccttgtgacatacctggaagttgtaaataaaagaatcac

SEQ ID NO: 168703 - DNA, 463 bp, Glycine max
  unsure (1)..(463): unsure at all n locations
tgannatcaaatttagaaaggtagtttggactggatttatatctttcatgtctagagtttctagagagaggaaggtctaagttccagagagttttgagagaatttgctgtgtgaagatctgtagagaccagagcttgaagcaggagccggtttgagagcttgagatgagtttgtgagtgattgtgagatcctagaggtgaaggagacatcctcaccacttgtatttttgcaatctttcatcttgttcttctcttggttgtaaagaaggcttcctggtatggaaagctaaatcctctggtggatcttccctgtaggtacctgatgtaaatatatttctatctatttaatgatgttntgtgtattctctgtgctatctgcttttcactccagtatgcctttaccttgatcacgtagatgcatganttgtagggtcactcaacagtggaaactggtctgactctaa

SEQ ID NO: 168704 - DNA, 455 bp, Glycine max
  unsure (1)..(455): unsure at all n locations
agcttgtgcatccaataccctgatgaggatgttctatatgtncntaaaactggactgatccatntgcttccaaagtttcatggccttgcaggtgaagacctacacaagcatctgaaagaattccatattgtctgctccaccatgaaaccaccagatgtccaggaggatgacatatttccgaaggcctttcctcattctttagaggcagcggcaacggactggctatattaccttgctccaaggtccatcacgagctgggatgaccttaagagagtattcttagaaaaaattttccttgcttccaggaccacgaccatcagaaaggatattttaggtattagacaacttatgtgccagttgccctcaccaccagatntcagagtagcttcctctccaatatttttatgaatgactcagtaacatggagagaagcatgatagaatctgccagtggtg

SEQ ID NO: 168705 - DNA, 438 bp, Glycine max
ggtctcaacgtctatgcgagacagagaccagacatgtagctattttctccaagcaccaagaagagttgggtctagccacggcccacgagcatagaatcgcggatgagtatgcccaagtatatgcggaaaaagaggctagaggaagggtgatcgactctttacaccaagaggcaaccatgtggatggatcggtttgctcttaccttgaacgggagtcaagaactttcccgattgttagccaaggccaaggcgatggcagacacctactccgcccccgaagagattcatgggcttctcggctattgtcagcatatgatagacttaatggcccacataattagaaatcgttaggaaacttgtatggtctctcagaccctgactagatatgactttctttttgaaataaaatgagttggtcccaggtttctactcccaaaag

SEQ ID NO: 168706 - DNA, 278 bp, Glycine max
cctcttgctggttcttcttgagcattacttcgcagaaaaactgggtcaaaacggcctcgtagccgggcattttggcgtacccagggaaatagttgatatcaatgataagaaaacggcttccgcatcgagcgtgtcttatgacatcaaaattgacaatgtctgacttgagggcgcgcctgaggcccccagcgatgtcgacgacgaaggcgtcggagggcatttcggtgtcgtcgtcgagatgcatcaaacggtaatagccgtcgcaatcgttcacggtg

SEQ ID NO: 168707 - DNA, 385 bp, Glycine max
  unsure (1)..(385): unsure at all n locations
tttggntgagatatgctcacactaatgatgtagtanctgcatgcttcagggtgctaaagctttaaagcaattacagtttgtatgcttcgttctttctaaattgtttgcttgttcaaaatagatacctggtaattgtacttttaatttgtagctaaatataacaagaataaataatatatgtacatagtgtaaagttgtaaagttttaatacgatgttatttaattataattaatcatgtataataaatttattttcttttataatagttatcttaaatgttatattaatgataacttctgattgataaggtaacaaatttaatattgataatgccagactacttttttttttaataataatacgtgccagatattaacttataat

SEQ ID NO: 168708 - DNA, 454 bp, Glycine max
  unsure (1)..(454): unsure at all n locations
actaagctaataaagctctagaagatgcagagatgagcgatcaaanttanattcccaacgggaaaagggaaatgtttatctattaatatttgagtgtttgaacccttgtaatacaattttctgtaatgctgcttgaatacacttccacggatatttcaggaagggaagcatattggaggctatgaaacgatatgatgatgtatgaatataatagccttttgcttagatttgattggaagctatttactctgttatgttttgggattcttatcctactgtgtctgcttgcgtgaatatttgtatgtactttgtaggctntagcttnctttcagatagcattgcagtataacccacaaagtccagaagtatcacaaaagataaagaagataaaccaactggtgaaagatagcatgcgagctcaagaagtggagaatatgagatccaatgttgacat

SEQ ID NO: 168709 - DNA, 366 bp, Glycine max
  unsure (1)..(366): unsure at all n locations
agccttgtgtggagctgcaatggtgtattgtgtgagaagaaaggcaacgtgagggagagggatagagaaagcttctgcaatgtttactgctgagtgaagagagagagagttgctttttggtttttaaaaggctttttcctcttttcttattantttattcaagctctgccacatgtccctatttgattggagcaaaaagggcccactttctctttttgactgtgacccatactcagtcacaaaagtgagaaaaatctgacctttgaaacgctaaaatcctgcctcggtntgcgtgttgtttctttggttccaatttctcgcgtttttctgcgttcgtcggggccagtttctcaaagcaaggaatat

SEQ ID NO: 168710 - DNA, 447 bp, Glycine max
  unsure (1)..(447): unsure at all n locations
ntgagaaaattcanaccacaataacctgtgactcggatgttcgattgagtcccgtaatatatcgagacgctcaaaattgaatacgtaagctcctagtaaattcaacccacaataactttttgctgggatgtctcattgagtcacataatatatcgagatgcttgaaattgaaatggaagcttctagaaaactcaaacaagaatgattttttactctaatgtctgattgagtcccgtaatatatcgagacgctcgaaattgaatacggaaactttgagaaaattcaaatgataataactttttagtcggatgtccgattgagtcctataatatatcgagacgctcgaaactgaatatggaagctttgagcaaattcaaacaacaataacattntactcagatgatcaattgagtctcgtaatatatcgagacgctcaaaaataatatg

SEQ ID NO: 168711 - DNA, 438 bp, Glycine max
  unsure (1)..(438): unsure at all n locations
gtcacctgaggcttgcaagctttacattttattagaaatgactgtatgataatgaccaaactgtgtagcttcatttatgttttaacacaaacaagtgaaactataacttgtttcaagtatttccaataatgtcttagtgtgccttttgaaagccattaaacactatgttcaacgctaaattacaattttctttatttcatgctattggaaagtttagtgacgtaatgattataatttatgctaattaattgtagttatccaactcgggagctgacttgactttatcatttccatactaattattttttcaacttcgatgcgatagagtaatgcatactcacaaaaccaataacttgttattgaatacaaatgatatcttccaccatacttatactggctgctcccaagaatattgccttnggaatcatatataatatg

SEQ ID NO: 168712 - DNA, 451 bp, Glycine max
  unsure (1)..(451): unsure at all n locations
tggaaatcagtaaagcctaaagactactctattntggtatcatgccaaattgcaatctcagaatatccatcttcagtagcacacgctctgaacatgcctgttgtattaaaaggcattgcaacttctcctttggcagacacagcaaccaaaccaacagtgccttttggtgtgcgctcatgtacaacacaattagcagcttccacgagagaaagacccttaaactccatcagagcagccacatctcttgccactgtcccacgtattattgcttcacctttgcctgtcgctgaaaccgcacaacgtgcatccgcataggtaccagcaccaatgactggtgtgtcaccaattcgacccaccattntgttcactaatccaccagtagatgttgcagaagccaaattcccaagactatctacagccacacacccaacagttccatttggctatcaca

SEQ ID NO: 168713 - DNA, 379 bp, Glycine max
  unsure (1)..(379): unsure at all n locations
agcttgcttctacaatagactagtgtattttatatagttaagctcccaaatttctttaatgaaaccaaagtaagggatggaagctacacggggattgtcatcatgtacactaacgaagtgttgagattaagcccttagggtaaccccactgttttgcattgtacttttatcgtcttgtgcttttgtatagaagaaatacttgtttatatcatatccttgccaagttataacatttcttttaagtccatctgctagctttcttaacgtttcagaagcantttcattagcaaagattgtatctntaaaccaatctaagaaagtcttgttatgctctttcaagaccccgttctttgatattgttggattattttccttcact

SEQ ID NO: 168714 - DNA, 453 bp, Glycine max
  unsure (1)..(453): unsure at all n locations
ntacacanaatttcaaaatgctagagtgtaggtttttatctcatttattcaaagcttctagtatttataagtcattttctttaggtgtttgttgtctttaaatagacagaaatcttcacttgagctcgtgtttgaagattgttgtcattggagcatttaatgcttgcattaaatgcacattcttcttcatgttggaaaaccactctctttagcttccttgaagaacactttagcaggaaaccacttgctttttgtcaaagcaggtctatcacagcaggatgtatcttttaatactatttgaaattccaaagttctgaacttcgtttatttttcttaagattttgacagatcctagaagaatgtcttgtaacatagttcctgcaaaacanatctcaaacacaaaatattaaatgaagtcttaatgcattcctaatggtgatcacatgtaaagat

SEQ ID NO: 168715 - DNA, 409 bp, Glycine max
  unsure (1)..(409): unsure at all n locations
agcttgagacaatacacacgactatatattttttactcggatgnctgattgagtctcgttatataacgagacgctcgaccatgaatgtggaatctctgagccaattcaaacgacaataagtntttactcggatgtctgattgagtctcgaaatataaccagaccctcgaaatagaatgttgaacctctgagccaattcaaacgacaataacttttctctcggatgtctgattgagtcccgtaatatatcgagacgctcaaaattgaatgtttaaacttctaaccaattccgacgacaataactttttactccgatgtctgattgagtcgcgcatataacgagacactcgaaattgtatgttgaaagtcttaaccaatttaaacgacaataacttnctacttggatgtct

SEQ ID NO: 168716 - DNA, 422 bp, Glycine max
gacactaaaaactaagcttaacaatcaatttcgagcgtctcggatattactggtctcaatcagacatccaagtaaaaagttatcatcgtttgaattggctcagagcttcaacattcaatttcgaacgactcgatatatgatgggactcaatcagacatccgagtaaaaagttattgtcctttgaaatggctcagagattccacattcaatttcgagcgtctcaatatattacgggactcaatcagacatccgagaaaaaaattattgtcgtttgcatttgctcataggttcaacattcaatttcgagcgtcttgatatattactggactctatcagacttccgagtaataagttattgtcgtgtgaataggcttaaagattcaacattcaatgtcgagcgtctcgatatatgacgagactca

SEQ ID NO: 168717 - DNA, 404 bp, Glycine max
agctagcaatatagagataattctctattgtggttgcatctagctttcaaaggtttctagaggtatcatcccctttgatatcaaacattgtggcggtagggactaccagcaacaatgtatcatcaaagagaaaaactctagataaggtttcactatgatcaagcaagtcggagacttagcatgaccacagattcatctccacttcctatgttcccatggacctgagtatagggccctgaacaactcacggtgtgtgcaaaaagtgtaggtgtcgtgggtgcatcaaatgaataaatatttatcaatgcatatattaaataaacaattactaaaagcatcaaagagttatatgcatacaaaaacataagagaaattaagggaaacacacaaaagagtgagtcatg

SEQ ID NO: 168718 - DNA, 442 bp, Glycine max
  unsure (1)..(442): unsure at all n locations
tgctgctcgagccatcaaatgtgttttccttggatattctcatatacagaaaggttaccgatgttactctcctgctcacaatcgttattatatctctgcagatgtaatattttttgaagaaaaaccataatttgctccctccatggttgagtccaatactcttcaagaattttttcctattccctatcttggtccatcaccttctttgtaggaatcagagtcaactatagattctaccatagatattcctgacaatcctccacttgagcagactcaaagatcacccattatatcgatgtcgtcctcgaattcctgacgcagaacttgaaggtattgaaagaccagttgaatcatgtnctactccaacggacaacccgatcatggagctacctaaagagaatcttgacttgcccattgctctcagtctacacataatccttat

SEQ ID NO: 168719 - DNA, 300 bp, Glycine max
ctgaaaatgctcctgtgtagcgaaaaaaaagactcttatttgtttggtaggcactagctcgatccggttacaacgcttggttgtgctttattctttaagggtggttctgttaacaaaaacggaagaggaaaaaataattgaaaatagaagcgagtaggggtcgaactcacatttcattgaccattcaataaccacataagcaactataaatattttatatactctacatgttatggaatatgctgaactgcacttaaaaaaatctatacatcatttcatacaggctaatcataagattat

SEQ ID NO: 168720 - DNA, 468 bp, Glycine max
  unsure (1)..(468): unsure at all n locations
actaagcttagctccttcatctgcacaagactctgaatatttgaagagtattcttgtggaaccttcacccgacgaagacactgacaaaaacttatcttctcctttttggacaaagtatggcaagctaggggcaagtaaattttgttgccatcagaccttggatgcaactgtgatcgtatccccatatcagctagatcttgatgggtattcaagccatccttcgtcttgccttgaatgttaagaagcgtcccaatcacactgtcacatacatttttctccacatgcataacatcaatacaatgtctaacgtctagatcagaccagtacggaagatcaaaganaatggacctcttctttcatatgcaactcttacttttatccttcttttgggtctttccacatacaatattcaggtgttgaacccgctggtatacctgctcaccagtcaacgatatgtgtgcatatcat

SEQ ID NO: 168721 - DNA, 437 bp, Glycine max
  unsure (1)..(437): unsure at all n locations
tctcntgacctttggcanccttaactcagctgtcattatctatgccttgacccgcgactgatctcttttagctctttgtagcttaagctcattgttgctgccccataaagctccttggaacttgtttcggccttttgcttcctttcgggccctcttggtttctcgttcccaggcttcggtggtggccataatgcgtcccttagtttgtcgcactttttcctgaccttgatggccgttgtcttgaacttctctataactgcttgtgctctttcaagttcctcctttagggctctcacctcctgatgcaagctccattggagcttgtaggcctaggatcttcttcatcaatggattcctttgcttcttggaagatgaatggcagcggaatggagaacgaagagggagaggagacgccacttcacggagaagatgagtct

SEQ ID NO: 168722 - DNA, 429 bp, Glycine max
aaacatgcagttactgctgttaatcgattaccatatatgtgtaatcgattacacaatgcaacctttgaattcaaattttaatagctgttgtaaatcagttttggccactggtaatcgattacatcctctcgtaatcgattaccagagagtaaatttgttgaaaaagaatttttaacttaaaattcttggccaaaccttttgctacttcaattggaattcccttcctatttaatataccctttctaagactctaaagactgtcttgatcatccatcttgaatatctttaatttctttgtcttggataaagctctgagacgcatgtgatcctttggcatcatcaaaacatcagcttgatcctttgtctacaatctcccccttttagatgatgacaatccctgaaatcaagacaagctatatacaagatgat

SEQ ID NO: 168723 - DNA, 414 bp, Glycine max
  unsure (1)..(414): unsure at all n locations
gcttagccctagaagggatggacctttcaggtcttggagagtatcaatatcaatgcctataggttggaccttccagaagagtatggagtcaacaccacttttaatatttctgatttaattccttttacaagtggagctgatattgaggaagaggaaccaacagatttgaggtcaaatcctcttcaagggggaagggacgatgcaatcctctctaggaagggactagttaccagagccatgagcaataggctccaagaggattgggatagagctactaaagaaggccctagggttctcatgaaccttagggtatatttttgagtccatgggtcaaggttagatccactcttctttgtaaatattagaataggttnttccttcttctgggccttgtattttggtcattctagtagt

SEQ ID NO: 168724 - DNA, 431 bp, Glycine max
agcttcagagagaggaaagggaccaatctctagttataatttgatcttgaaagatgagttgaaggtttgcctaaggtccaagagaagcttgtctcaacgtatatgcgagacagaggccaacatgttagccattgttagcaagtaccaagaagaattaaatcaagccacggcccacgggcacaaagtgacggacgagtatgcccgagtgtacgcggaaaaggaggctagaggaaaggtgatcgactcgttacatcaagaggcaacaatgtggatggaccgattttcccttacggtacccatcaatacgcgcaacatcacccgagcttcagtacccatgtcgtcacttcagcacctgcatggatcaagccgccgcagatttctcacggtacccatcagtacacgcaacatcacctgagcttctcagctcatgc

SEQ ID NO: 168725 - DNA, 435 bp, Glycine max
  unsure (1)..(435): unsure at all n locations
tcggaagaaagtgatgaggtacaagctcctagaggcaaagcttgttatagcccgggtagncgaagagaagttcaagtccatagccatcaaagtctgaaaagagtatgatgaactaagggacgtcaatatggccaccgctgaagccttggaacaagaaaccaagaaggcccgaaaggaagaacacgaccaaagcaaagttttgaggggctctatatggcagaaatagtgagctcaagctccaaagaggtgaaaggaatcatcatgggtcaaaggcatgatcttgaaggacgagctaaaggcttgccttatgtcgaaaagaaatttgtcccaacagttaaagcgagactgaagggaatatgtgggccatcatcgatgagtgcacagagaagctaaatctagcggcgactcacgagccaaggctagaggatgagtatg

SEQ ID NO: 168726 - DNA, 372 bp, Glycine max
  unsure (1)..(372): unsure at all n locations
tagaaaactcacgctntgacaatatcagctctcgagcgcggcggtgcattattttatcagcgacnacccaactcactgtttatgtatttttttaggtgcattctacactgataattttgctttcctttcgaccatatcaaattatattctcttattttctctatattttatctttattgtaaatcacatttaaataatacttttaaggataaaatatgcatttcaaccctatgaaatatttgaagctcaattctagcttctctaaaaaaaattaacactttaattttaaaacacacccactttaattcctcatatactatttaaactctttgtcatcctcaacatagtgctagctaaattactttaaacacc

SEQ ID NO: 168727 - DNA, 186 bp, Glycine max
cacacacacaaaaaaattccacgcccgtaaacgagacaaatgtccgacacagaataacataacgccggaacataaattaagcaaggatacgcggtaatacaagcacaacgcaccaagcacgattcctgcttatataaaatcaccacttccctaccactacaaacatacactcgagtcatgcatggg

SEQ ID NO: 168728 - DNA, 454 bp, Glycine max
ttcaactattgatgcatacatggaggaagcaaaatgatgtgtatggaaaatcggaaataaaaaacccaggataaaaggtaaaaaggttgcaagcgtatgtgatttttctttaatagaataaccctgaaaaagaataacccaaaaagaataagacacaggacaaagaagaaaaaaaagtagcaagatgaaggaaattgaaaaaaaaaaagaagaagaaattataaaagaatgcaattgggagaaagaaggacaaaataaagaaagcaataaactccatacattaaagcatgaagagagaaaataattcttacctgatatggcaatataggagtcttactggagtcagtatgaggggatcaaatgaagtcagtgtgaggaacaaagaatgcatagaagacagaatggtatagggaaaaagagagaatgtgaatgaatgcacgtatgtgaagtgagt

SEQ ID NO: 168729 - DNA, 449 bp, Glycine max
  unsure (1)..(449): unsure at all n locations
agcttcttttggaccttgaacaagccatttacntttctttcagaaccacgctatgtgctcgcgactggtccctntcttcccttcgcaactggagttcactattgctaccccatagagctccgcgaaatttgttccggccatactcttccttgcgagccctcttggtctctcgttcaagggctcttgcggtaattgcattctcttcccgtaacccggcacactccttccgaacgtgtgtagctgccaacttgaacttctctttggcgagatttgcctttcctaactcgcttttgagagcttggacttcctcgtcctcttccggtgcttcaaaattctctgtgctgacgacttttaacttggctagccaatctaaacctcgtatgcgaactttcagccattcgtggtcccaccaatgatgcattacgatgcctctaactcttgatctttct

SEQ ID NO: 168730 - DNA, 434 bp, Glycine max
  unsure (1)..(434): unsure at all n locations
tnctcgggtgatctattagcgatagttggtgctcttgttatatttctttcatattcgcttggtagtcgtgttattatttatactgaccatgcaactctgaagtacctgttgaagaaggctgaatcaaagcctaaattgatcacgtggatgctttggatccaagagtttaatttggagatccgtgatcggagcggtgcatataaccttgtggctaaccacctaagtaggattgagtgtgcgtctgaggactcacccattcgggatgattttttggatgaccatctgtacattttgtataatatttctgattccttcccncactccttggtttgctaatattgtgaattatttggttgcttctattcttccttcttcagcatccacagctcaaattgcataaattaaaagtgatgatacgcattatattngggatg

SEQ ID NO: 168731 - DNA, 452 bp, Glycine max
  unsure (1)..(452): unsure at all n locations
agctntatgatgatgagccaagcatttttgttgatgccgaaagccctagtgattgattcaagacttcaagatcaagcatcaagaatccaatccaatccaagattcaagattcaagaaaagaaatcaagaagcaacaagtcaagacttcatataggataagtattaaaagaatnttttaaaaaccaaatagcataattttgttttacaaaagaattttgtcaaattttctaaagttaccagagtgattactctntgttaatcgattaccagttagcagtaatcgattactagtaaccagattggttttcaaaatgttttcaaatgatttgtaacattcaaaaatgattttcaaatagtgtaatcgattacactatattagtaatcggatacaagtgaatcttaaccgtggaattcanatccaattgtgaagagccacaacttttcataaaata

SEQ ID NO: 168732 - DNA, 427 bp, Glycine max
  unsure (1)..(427): unsure at all n locations
ggcttctacaatcatagtcacttcattctatgttgtctgcgctgccttggtgtggtaccaatggatgtacaaaaatggtcatattcactcttggcctcaatttcttcaagccttagagactcatttcgctcctacgatgtttgacaatcccgagggcaagctttttaaattcacttaatcattaactattgccacttgagtgattttgaggccttggctaatcgtatgggggagggagggttaaacccatccttcttgctaagntgttttatcttaagactaaagctggtgatcaaacatgaagtgcttgcacatcaaccaagaactctcacctaagctgcaaggttagctcatttgcaagaggagaaattacagggattgttccaattagctcgccatgatacttgcttcttctcttacgccgcac

SEQ ID NO: 168733 - DNA, 435 bp, Glycine max
  unsure (1)..(435): unsure at all n locations
agcttgtctaaaccaggagacaaatcatgtacttttcaggtacaactaaacactttaggagagacatgaaaaagtggatcatgaggaaagacaattgagtgagggatttgattttcaagggaagaagagggcatcctattgattaggaaacaagcagtaagcaccgcgtctccccaatgatgtgtaggaacattcgaatttagcattagggaacaaacagtttcaagaagatgtcgattcttcctttctactataccattttgttgtggtgtgtgtggacatgtggactaatgtataatacctttggaagacaaaaaagaagaaagatcatgagagaaatactctttagcattatcacttctgaaaantttgatggtntttccaaattgattctcaatttcattgtagaatgacacgaatataggcaaaagttca

SEQ ID NO: 168734 - DNA, 425 bp, Glycine max
  unsure (1)..(425): unsure at all n locations
tgttcttctacaacccgaggttgacttcccggccggtgttaaccttcccgactcgaaattgcagttcatgaagaaatgaggttaagcttcttttaaccttcttttaggttaagcttcgaagaaacccagtcaataaggttcgtgtgaggtcacaaagcttgtattactactaatgtatgctaatgttggtggcagggaagatgcaagtcacgaatgagttattggtgaacaatagctattgggctgaaagagtaagcacggntgtgctttataatcatatcttctaattgttagggataactgcgtaagtgcatcctagcttgtgttgtgaatcgtaaaaatgtatgcccttgaaaggacatgtttgatattttaattttgttggaagagtcatatagtannaatatgaaatattagctactcat

SEQ ID NO: 168735 - DNA, 343 bp, Glycine max
atcgggaagaggcatatgcgaaactttcgtcgtggctaactgtcataccctaatttcgtccggggacctttgcttgatgacatgccacctttctttggtccttgtgaggtgcttggcatccatcattaggcaatttgtgaaattccaggacatgccgaaaaaccaaaaaaatattgatgcacaatccgtaagtttccgtgacacaccggaaatcaaatggaagcatcgttgcataattaagtgaggtttcgtaacattccgtaagtcaaaaaggggatgattatgtaatccgcaggggtccgtaacattacggaaagaaaacaagtatctgtatgaaattcgt

SEQ ID NO: 168736 - DNA, 457 bp, Glycine max
  unsure (1)..(457): unsure at all n locations
tgcgttnggaaaacgtggtcgttagaactttatttgtatgcattaaattcccatacttcttcatgttaggaaatcttcactgctggtgtgttgaacactacaacaggaaaccacctccttttgtgttagaacaagtttgtgtagtaagactcttcttttaatgacgattaatgaatttcaaaacttgacttcatttattcttcataggatttaagagatcctatgtgaatgtctttgcaaaacatatctccgacatagagtattaaatgaaatcttaaatgtcaagtctaatgtcatgtcatatcatgattctatcttgttatgtctgaaatatcaaacgcaggcttcgcacaacatggtgtgatagcgcataagacacaacctttgtgttaattacaaaaatggtgcacgacacaataatggcaaccaaatctgtgaaatggcaacctaataattc

SEQ ID NO: 168737 - DNA, 450 bp, Glycine max
agcttggaacgagaagaagccatcttcattatctctaagggctaccgtgtctacaactaagtctagaagaacctagaactatcatgatactaatctatcatgaaaactctagaaaaacctaaagtaatgtagaaacattcaccatcattgagaggttggtgacttgaacctataaataggcaattagtatgttgtaattgataatccaaaaaatcaatgacatagccttctttctaaaacaattctctaaaactatcaactatcaattatcaactatcaactatcatctgaccaactaccaacgtgcgcggaatatggagattttcaatgataagaaatgacaaccttggttacttaattataaatcaagcaaaaataacatatgatattgctttctctccttcccccaattcaatggctcagaacaaccgcttacagtatctggtccct

SEQ ID NO: 168738 - DNA, 385 bp, Glycine max
  unsure (1)..(385): unsure at all n locations
tcttatccaggcaattcttggtggagaagcttcttctttcttggcttattccctagtggatggagcctgccctatcctcttctcctttgccttccgctgcatctccatggtgaaaaatcaccattgaaagacctcattgaagctcaaagatccagcttccattgaagctccacaagcaagcttccatggccgcgaaatgtcgtagaatgctacccatggtaaaacatcctacatcggntntcctaataaccgatgtagaatgcttaattcttttaattntttttcctttntgttcctgaatggcaataacaatgcaaatataattgaacctaatgtgtatgagacttactctataattgaattacgttttataattacatataag

SEQ ID NO: 168739 - DNA, 438 bp, Glycine max
ttaatcacctgaggcatcaagcttctatccagggaatgctagagggagatttcttcttttccttggcttattgcctagcggagggtgcctcccctatcctcttctcctttgccttccgctgcatctccatggtgaaaaatcaccattgaaggacctcattgaaactcaaagatccaccctccgtagaaactccacaagcaagcttccatatagtggtaatcagagcacaagagcttcaagtcggtgctccttaaacctccattaatttttttcctttaccttctcttacattgtggctactacatttgtctccatgaatctcctcacatgtgttgatgtaaatgttgttaacatgattctttagagtttccaccgattaaactggctatagaagttagatttgaatgtctatggctcaaatttcttgttcttgttctt

SEQ ID NO: 168740 - DNA, 335 bp, Glycine max
cgtcctaagccattattaagtcattctcgccattaaaataaaaaattccccgatcttcgattgatctccgttattccggtcaatgaattcgatcattcggtcgtgcgctaccacgttggaattcacaaaagaggctacatactaatatattaatcacaaaatacctcttttgtaagtaaagcgaaaaatcaatcgcacgttttctctttgggatatctcattcttaattgactcgactaataatataagtgaaactaaggctaaatatcttcctcccgaagtaagcttgtacacaaaaattagtttcttgacagttatcattataccgttttact

SEQ ID NO: 168741 - DNA, 437 bp, Glycine max
  unsure (1)..(437): unsure at all n locations
cacctgaggcatgcacgcttnctcttttggcaactatactatcctctttttatgagtttatagaactngacaggggcaggtgcaggtgctactactgttggaggcactctgaattgggtgccagacctcaaggtgatggcactcacatttttcggattctgcatagttggcgaaggcaattcgtcagaattttgggactgagcttggttcaactgagtattcatctgccccatctggatttattagactctgaatggaggctcttgtctcttgctgaaattgcatattctggatggtcatttgcctcactaactcttctaaggaaggttgaggatgagcctcactcgcttgtagcctattgtggtgtcgtgctgctgcattgggggaggaacatacggtttgcttgtccagcacattctgaaaggagggacaacttt

SEQ ID NO: 168742 - DNA, 407 bp, Glycine max
  unsure (1)..(407): unsure at all n locations
tgaggcatgcaagctttcataaacaacaaagagggacatgggttgtcggtctgctttttcagctctaccganataaggttttatgaattctttaagaatcttagaatccttcaattagagttgcttccctacaacgaggacctcataggtgtctctagtcatcatataaccctaataggatacttaaagttgcgcgagacctttgggaagacaacattaacccgaaccatcatcatcagattcatcgttgtctgaccttgaatacaatgggagttataatctcaatagtttatcaggccatgaagttcctcaacgatgagatgcaagtcataacattaagaggagactagaagaaagctcatgagagctattaagagtcaccaaagcacatagatattgacaaaatg

SEQ ID NO: 168743 - DNA, 391 bp, Glycine max
  unsure (1)..(391): unsure at all n locations
cactaataacctctcatatgaacagtagtgtatatttattacacaaatataacactacagttcatgttgtcttttctctcttcctgactgcaaagagtttatggttttaacttataatatcaatgaaacgtgaacatatatatttataacatgagacactaaacatactccgtcatcattggcatgttcttaacattctataccctcaaagaaaaataacaaatgacggccactaatgtataaatatatatattccataatactatattctatcacgnatacaatatttcctctccacttataatatacacatataaaatattgcatgtgaataacagtttacatttttcgcgaatatcaaaactcttaatgctcgaatagcagaaatcga

SEQ ID NO: 168744 - DNA, 412 bp, Glycine max
  unsure (1)..(412): unsure at all n locations
gacctgcggcatgcaagcttgcctcatagagatctaggaatgtataatttgttgatggaaccanttccgctcccgaatatgacagccaccgttttatgagtgctgagcaccagcagcgctacgaggccatcaagggatgatcattcctccgggagcgacgcgtccagctcagggacgacgagtataccgacttccatgaggagatagttcgccggcggtgggcatcactagttacccccatggccaagttcgacccagacatagtcctctaatattatgctaatgcttggcctacagaggagggcgtgcgagatatgcgatcctgggtgaggggtcagaggatcccgttcgatgcggatgctctcagccagttctcgagataccctttattgctggaagagggccaggaatg

SEQ ID NO: 168745 - DNA, 397 bp, Glycine max
ctgaacttcatcaacttctttggtctaccagctgcacgtttgtaattatgaggcaatatctcaggatcattagtcttaggccattttttcctaccatcgattgctgtaatactatgactataacatagcttgtaagtatccctatggtaatatttgtcatcacagtcttctgcatgctctcctttgtgattgattgcagctatagcatgcttgcaggggattcccaccaactgcaaaaagttgcaagaacatgaatgcttgctcaaatcaacaacaaaccttacaatgaataagataagcagtcaataaaagagagatgagggagagagagagagagagagtgacagagagaagactcaaccgagagaaagaacattggagagatgagagacatgaa

SEQ ID NO: 168746 - DNA, 476 bp, Glycine max
  unsure (1)..(476): unsure at all n locations
tgcaagctttgattaactctttaacaggggtctggacttattttatttagaagggcaagngttccatcagntttggagttgaaaggctanatattgaatgacattaaagaatagtaatgcctactaaatgcattattgatgataaaatacctatatataatacatgcatttgttccctgagtttatatatttcattttcgtctgatatatcatttataaaaagagcatgagagcttaaaataattaaaacaaaacagttctttcatgacaaagactaaaaatatattttgattttttttttgcattatctttcattttattatttataacatcacatgtttaatattttaatcttatattnttttattatgaaaaaatgaaaattaatttgcattcaacgtggttgaaataattttcgaagcacacttttaattaatattaatcgtcaatgaatcgatcatcaattncaacgaaat

SEQ ID NO: 168747 - DNA, 435 bp, Glycine max
  unsure (1)..(435): unsure at all n locations
taattgggtcactatcctacanattaatctagatgcttttaggccaacttgaagaatcactttgggaagcccaatttacaagacaagaagcattcatgggttgagttgatcaattttggtggactattaatattgggctgattagataataattaagcccaacatgctcataaatnttaaccaacttttagaataggattnttttttcattttttaatttcattttggccttgtttttggacttgtaatggattgtcgtgaccttctattgttattntaaagttctttttaattattaaattagttgttggaccttacgcctaaattagggttagtagtaggaatataaatagactccttaaacacttctgtgagagaatntgaagataatgaaattgagagttctcaattgcanaacttttctttgtccttggt

SEQ ID NO: 168748 - DNA, 440 bp, Glycine max
  unsure (1)..(440): unsure at all n locations
agcttatctcatgtcagacaccctaatatcatttttgctaacaatcacagtntacttggtgccaacttaaagtggaattaaacaaggaatatacttaaagtgcataaaaaagttaaataatgctcaaaataggcaatcctagcttaaatcttaccctttccttgatgtcacccaaagttggcaagtacagcttatagaattcctctctgaatgcaaccacaaacctaaataaagtttagaaaccagcaagaataagacaattagaatctgtttgattttgaataaatttaagggacaacaagatacatctactatattatagtattttcacttttaaaggactaaagacgaattattgaccataattgatatattatcatttgtatatcactaactcgctcttacttaggctgtctctcaacttgcaattacaacttcat

SEQ ID NO: 168749 - DNA, 417 bp, Glycine max
  unsure (1)..(417): unsure at all n locations
cactttanacatgagctgaagattatagtcttatgttgagctcactaatatggaccggtatgccatgaagaggttctaaagactgaaggaatgtttctctagtatagaacctgatgaanagttacctgcagatgcagttcattatganattgggtgatgctatcaaaccctgaagcacactngcttctctcaagaaactcttttcaacatggttgtgtctgatcatacctttcatttatggtgttccttcccttctccatattcttcttcatacaccacgtggatcctattatcgaagaagttgaatctggtactgaagctagttctgattccatggttgttcaagtgtatgatccctcatcttctcgcgtttatgctcattttcttaaagctgaacttgccataagcagagaaact

SEQ ID NO: 168750 - DNA, 364 bp, Glycine max
  unsure (1)..(364): unsure at all n locations
agctttggnanagactgagaggagggacatcttctcatattttcgaaacnagaccttgacgggaaagggattccgatgtcaccccctatatatgatttggtttatatcagtccgtatcatgtgggtgacaataactagtgtgccatactatgttaacatgtgatgggaaattagattcgtattataaaatcgtgcatgcagtggggtgaacccattggatgtgcgcgaacaaacaagaggaaaaatgcatgcattacattacagtaatttacatttgacaatttaaagatacataaagccttcttaagccactctctttttacacccacctctggtcaactggcactagatatttatttgaata

SEQ ID NO: 168751 - DNA, 107 bp, Glycine max
ctccacaatactttccgtcaacttgaacgtcttggatcttcttattctcatatagctaatattatgacgatgatttccctcattctcgacctctagttgctgctgaa

SEQ ID NO: 168752 - DNA, 443 bp, Glycine max
  unsure (1)..(443): unsure at all n locations
agctntaatcagtgtctggactggttcaatgttttgtccgggtttaaaaacattagttttatgacctagagttcatgcattgaagtcctggaaacagcctctctgcttgtggggcataagtctgcttacatgtaccttctatatactgtaatatggtattagagctaggttattcttaacagaggaataatgaaagtggttctccaccgaggacctattgcccccaatgaacctttctgctcgctgcatatcttccagcgaccctttctccttttccaatgcttctccagcaaccgctatcacatgccaaacaattttcttttctttctttcagacatgcgttttctgtttgcatgaacagtaacatgaagcgctgtgagcttccgttcaccattgctgagtcttctttctccagcgcaaccacactcatggaatcgcccccc

SEQ ID NO: 168753 - DNA, 488 bp, Glycine max
  unsure (1)..(488): unsure at all n locations
tgcaacacaacanatatatatatcatggtgaaaactctctataacgtggttgggcttatattggccatctcttccactgttntcatcggttctagctttataattaacaaaatgggtcttaaaaaagctgccgaccacggcaacagagcaggttcaacacctctcatatatatcatctgggttattcacgtattaaacttttttttattctattttaacatatataacaatttttcattgatttgatcagccacgggagggcattcgtatctgtatgagccgtggtggtgggctggaatgatttcaagtgagtgattttcaattctctaattctaatctatatattaacgtagtggtttctgcatcaatcaacgtatgctatatatatcattatatatatatatatatatatctttctgtgttctctacgccttaattntcatagtgcagaataattcacacatacagctcatagaattntgtgacgt

SEQ ID NO: 168754 - DNA, 428 bp, Glycine max
  unsure (1)..(428): unsure at all n locations
agctnagnacgatatanatatgctcctctcattgatcaagggcgganngngatagcaacaaaggacccatcgactcagcaccatgcatcagtacgtgacccagcgccatgcaacaaacccacacgtgtcgtcactatataagcccaagtatctagaagattacgtataagggtacgagacaagcaccaaaccttgatctttctgtcataacagaaaggatattagctattgtaatagtctataaatactacactacgtgcatgaataaagcagcgaatcctttgagtactttaacttttcgtgcgctttccttcttaggtactcaaatttggtactcaaatttttaagaacttgagtactaatataaattatttaagataatgtgagactaaattgattagttttaataactcgataatcagattgaa

SEQ ID NO: 168755 - DNA, 313 bp, Glycine max
cagaaactgctctttacagccgcgaggaagaacgtcaacgccaagtgtactttggcacacatcttcaacatcaagaaggaagtagcatatgagatagaggatcataccccacgtgctgacgtttacaacaacaataagataaaagttgcagagatgaagatgaaagaatactttggcgcagatatcttccgtctcttctacagcctcacatggacaccactctcgccatggcctatgtcatcctccttgatcacatgtttccatctccatctcgatcatccttcactattcactttttgatatatatattcgg

SEQ ID NO: 168756 - DNA, 354 bp, Glycine max
  unsure (1)..(354): unsure at all n locations
agcttcatgaagaatcaagagcgatgcaagatgtttgangatttcttcagganaacaaaagatgatgactgaggtgatgacaaagagctcaaaggtcaatcacaaaatgagttcangatattaaagatagaatcacgaacacttcaagattcaagaggaaagctgatttcacgaatctagactcatgatcaagattcaggaatcaggagatggcttaatcaagataagtatgaaaagtttttctcaaaaattgagtagcacatgatttttctcaaaacatgtttaccaaagagtttttactctctggtaatcgatcaccagattattgtaatcgattaccagcagcgcaatgga

SEQ ID NO: 168757 - DNA, 454 bp, Glycine max
  unsure (1)..(454): unsure at all n locations
tctaatcatcccaaaccactcaattgatattattgctctttcgancattcgcaaacactcatttcataccaaacagcccagtgcatatcattcttcaatcaattcactgttcacacatgtcttatggtacaagccaacaactcagagtgttgaaatttaaataactgaaatctaaagaactgaaatataagaactgaaattaacatgactgaacataaatcataaaataactgacaataaactagaatgttcaagatgcacaaattcaaacatcctgctcatgctgtggctaatctttattaagatccagtgctggagctgctgatgaatcctatataggatgctctggctctgtgactggagtagatgggcatgtctcctcacgaacacgtgcacgagatggctcaagtatctgatctgtggaagtacactcctcctgagcaatgtatgcgtc

SEQ ID NO: 168758 - DNA, 471 bp, Glycine max
  unsure (1)..(471): unsure at all n locations
agctntagtagatactggttgttcctttactttatatgcaaaagtgttgnacctcaacataattgctttagaagtaatataataaccaagactagaactatgtcaggagacataataacaattgatacaaaaactagaaatttcactatacaattatctacaaattgtgacatttttggcgaaaagatttttataaataaggcagacgtagtagatttgcaacgtgctaaagaaaaaatgatcctaggacttgattttattacacatgataatagatcagttactattacaaaagattatttattaatctctacaaactcacaaatgtcaccaataatagacgaattcacatcagagtaacgaacaaagcgtggtgatacccctaccaaccctacacctaccctcaattcccgatgtccttgtgacatatctggtagttgaagaaaaaagaatacaaaagtattgaggata

SEQ ID NO: 168759 - DNA, 401 bp, Glycine max
gagcattctcgcaaaagcagtgttttctttactagtcttcctatgattctactaagtgtgatgtttgttaatatatgatagttgagattgttagaagcatcatttttattatgttggtatgaaggcatgttgatctgaatttctgaaaataaaagagatatgttgttcattcttccctcaaaattaatgtatctaatatctatttgctttgtttttattgtagagatgagtacttctaatcaagcaacaaaacaagaggatgaagccaaacctctatggagatatcgttcaaaattaagaaagactgttattggtggaaatcttgagatcaaatgcaacatatgcgaagttccattcaatggatcttacactagagtaagggctcacttactaaatttctc

SEQ ID NO: 168760 - DNA, 283 bp, Glycine max
aatggtgcaagaagtgtcgtaatagcaaggtaacgttaatgaattgcatttttgacccataactgtatttttcacatcgaaacagaacatagctagaatctccgtgagttttctctttggcctatttggtttcggcttttacatgagtacaacattagagtgtatgatctttaaaataatcggcatttgttaagtattgtataatgtgtttaacattgaccgatcacaataaatggtatcttcaagggggtattaagtgatgcgcatacatcacttggggaga

SEQ ID NO: 168761 - DNA, 440 bp, Glycine max
  unsure (1)..(440): unsure at all n locations
agcttgtggtgcaaaagattacatctatacaaaggaatttttgatggggcagcctccaagactccattaagattccttgggtgaggtgggacatagtctgcctacctaagagtaaaggtgggttagggatcaaagatttgattaaattcaacgaggctttgcttgctaaatgggggtgggagttggcaaataatcataatcagttgtgggccacaattctattgtgtagatatggtggttggagggatttgatttctcataggaactgcagtttacactctccttggtggaaagacctcaaggttatcttcaagcagcagcaaagcaacacaatttgtaaaaatagctttatttaggccataggtaaggacggtccatggaatacaaaccaagtacttattggttgacaacaaaaaaaacactcatnggaaatatatatg

SEQ ID NO: 168762 - DNA, 365 bp, Glycine max
  unsure (1)..(365): unsure at all n locations
ttgagggcaactcccgccttatgacaactatccccgacaagacgatggggaaggagatacccatcttggccccctgctccaacttaaagatccggtcccccatgaactacccccaccgaacatagtccgccatatnccggcctcacccatactcgtaaaagaatctgttcccttcgcggaagataagggaaagaatgaggcgcttgaagaaaggttaagagcagtcgagggccttggcaattacccattctcggatttaacggatttatgtctcgtgcccaatatcttcattcctcccaagtttaaagtaccggactttgataagtacaaagggacgacatgtccgagggggcatcttcgatgta

SEQ ID NO: 168763 - DNA, 470 bp, Glycine max
agcttgtggaagtttgtggaaacctctagaatatttgtttatgtgtggaaccttatggaagagtatggaaggatatggaagggagtagaaaagtgtagagactcctagaatgtgtggagcattctagagaattaatctccaccctaggatacaagtaatctccaccattcattgtggaggaggagtagtataaataagggtaggagccttcattcttaaccatccaagacaagagtgaattcacttcttagagtgagaaagctagaaagttagagagcctctttgagagagaagataaatagtttgagaagtctctatcctcaagcttgagtgagccactatagagtgagtcaatttgtaaacacatccttgtaaccctactattcttttgtatagttgaagaatctccatattggagaaatataatcatgtgctcctattactaccttctaatactaagtgcctatctt

SEQ ID NO: 168764 - DNA, 352 bp, Glycine max
aactcttatccatccatgataaccaccgatggcgccatttctgatgcctctaacctccttgtgctttctcaacggacttgtacacgccctgtggattctctggatcaccttgagactttgcgcgccttgatccctcacaaggagagacggtagactcctttctgtggcgctcccctcatggggaacctcaatgtttatggcgagtggggatattattaattaacccctttccctatgatggacattacggtattccacacagaaaagaacttttcttggcttcttcacaggaacaaatgttgactgccctatcccccaatgtggtccatgattttctttccggctggccata

SEQ ID NO: 168765 - DNA, 272 bp, Glycine max
acatggcggaaccaaaacaaggaacacaaccaaaagcaccaaacaacaacacaagggacatggggcaaagaaccccaccacgcacaccgaaaccgcccggcaaaaaaaacggccaggacgagtaaaccagaaaagacaggccacacaaggaaacgataacacacaacccaagggcaaaaacacaacacacaagaaaacaagggggaacccacaaccacccaccaaacgcaagcgggaaagggagagcaaaagaacaagacgggaagccaaaa

SEQ ID NO: 168766 - DNA, 168 bp, Glycine max
  unsure (1)..(168): unsure at all n locations
caaaacgcggcacaaaaaacaaccattctnaaacagcacaaagacggaaacgacaacaccaaagacagcaaccgagccacagaacaaacgagaaaaacaaccaagaccccgggaaaaaccaaacacccacgcaacaccaagacgaaaccaaaaaaaaggcaacaaaaa

SEQ ID NO: 168767 - DNA, 373 bp, Glycine max
ggagcattctcgcaaacagcgtttcttgtctgtcttctatgattcaccaagtgtgatgtttgttaatatatgatagttgacattggtagaagcctcattttctattatgttggtatgaaggcatgctgatctgaatttctgaaaataaaagagatatgtctgtcatttttccctcaaaattaatgtatctaatatctatctgctttgcttttatcgcagagatgagtacttctaatcaagcaacaaaacaagaggatgaagccaaacctctatcgagatgtgtttcataagtaagaaagactgttattgcgggaaattttgagatcatatgccacatatgcgaagcttcattcaatggatcttacactacagt

SEQ ID NO: 168768 - DNA, 274 bp, Glycine max
  unsure (1)..(274): unsure at all n locations
cctacccttaanngaatttggagctttggaattgttctgggaataagcgtgggggggggggggtatntcctcccctctacctcttcttccctactctccttctttaccttccctctccctacttcatctttcttctccctatctcttactcacactctctacctccactcctcaccttctccacactcctctctctcctacctttcttcttctacctctccttctcacttacattactcaccctctcctcttcccttccccttctctcttctct

SEQ ID NO: 168769 - DNA, 371 bp, Glycine max
  unsure (1)..(371): unsure at all n locations
tttacaaagttagttctacgctgatatgcagaggaagtggaaatctttattccaggaatgaccttgggtatnttttctgctttctttcttactctgtctgagaggatatcttattctcctctatactggacacacttcctttctctcttcattaaactttcttctttatagagatctgaacttgtggaatttgtgtccaggttatgcaacagttgcagtctatgactctgatgaccaatctcataattttctttgtgtttctcttttgttatttctcaattacacatccgttgtttatactctgttgtttctaatcgcttctatactagttgttcattgtgcttaatatagtttcttctattttaatctca

SEQ ID NO: 168770 - DNA, 447 bp, Glycine max
  unsure (1)..(447): unsure at all n locations
gctttgagccaaaatcctgactcaccataaacctttgttcttgngngagaangncaatccttaccctcggaagcgaaaagaatagaagggaaatctccaatcagagaaaaggaaagaaggaagatttccaatcaaagagaaagcaaacaaggaaaagaaggaaaattcccaatcaaagagtgtgagaaagcaaaagaatagagagaatatcccaatcaaagaatgggagaaagtaaaaaaggaatacgaagaaggaaagaaagctcctgatcaaggatcgaaagaaaacagaagaaatgtgcagaaaggtctttggaccggacaatatctgaacaatacagaattgtcaccaaatgaacaaaaagaaggagaggaaaccacgacctataattaagggaaacgcattataaacgaaatgctaacattcaanatctcagttaagggtat

SEQ ID NO: 168771 - DNA, 448 bp, Glycine max
  unsure (1)..(448): unsure at all n locations
gtgctcgcgactggtccctttcgttccttcacaacttgagttcactatcgctaccccatagagctccgccgaaattgttccggccatactcttccttgcgagccctcttggtctctcgttcaagggcccttgcggtaattgcattctcttcccgtaacccggcacactccttccgaacgtgtgtagcagccaacttgaacttctccttggcgagttttgcctttcctaactcgcttttgagagcttggacttcctcgtcctcttccggtgcttcataattctcttcgctgacgacttttaacttggcgagccaatctaaacctcgtatgcgaattttcagccattcgtggtacccaccaatgatgccattacgaatgcctctaagctcttgatctnttcttaacggggtttcccatgccttatggattctttgatagtcttggaatct

SEQ ID NO: 168772 - DNA, 444 bp, Glycine max
  unsure (1)..(444): unsure at all n locations
atcttaagtcacctgcggcatgcaagcttgccacccagctcacccaggcgttttcttttcttccaggcgagcagggttgcttcctccagaacaacagccttctggaggaatcttctggagggcccaagtgggcctggtttctatttgcacccccatttttactaaatacgccccctgcttttttttggtgattctttttttcgtaaagttacggaaacttacgaatttcgtaacgatacttgttttctttccgtaatgttacggaaccttgtggattacataatcatcccctttttgacttacggaatgttacggaacctcactaattgtgcaacgatgcttccatttgatttccggggtgtcacggaaccttacggattgtgcatcaatattntcttttgttttccggcacgtnccggaaattcacaaatcgcctagtgatgg

SEQ ID NO: 168773 - DNA, 149 bp, Glycine max
aagaaagtgatgaggtacaagccctaaagcatagcttgtattagcccgggtagtcaaagagaagttcaagtccatagccatcaaagtctgaagagagtatgatgaactaagggacgtcaatatggccaccgatgaagcctttggatgag

SEQ ID NO: 168774 - DNA, 471 bp, Glycine max
  unsure (1)..(471): unsure at all n locations
agcttagtttaaattagtctaaacctacaaggtctatttaagttaagcctagtccaacaagagggatccgaggatgaagcttgagttaagctagcctaatgagggatcgaggtttagtactttaggctacaacataaaacacaaaagcatgattgattagagacatatccttatttgcatcagcttgtttgttagaaagacccaacacttttacctactactgtcaatcttacttgcatttttactgtttttagcctagacttagattaattttgttctaaaccatcaattatcaatgtttcttttaacaatgccttatttctgaatttaaccccgtctaatactagttccctgagttcgatactcggattcatccattntaattntaaatacttgacgatgtggngcgcttttcggtgcttcatttccctttaatataattggtgagaatgggagaaaaggaaccatatg

SEQ ID NO: 168775 - DNA, 454 bp, Glycine max
  unsure (1)..(454): unsure at all n locations
gaagaaagtgatgaggtacaagccctaaattcatatcttttatagagcccggtagtcgaagagaagttcaagtccatagccatcaaagtctgaaaagagtatgatgaactaagggacgtcaatatggccacagctgaagccttggaacgagaaaccaagaaggcccgaaaggaagaacatgaccaaaacaagttttgaggggctttatagggcagcaatagtgagcccaagctccgaagaggtgaaaggaatcatcacgggtcaaaggcatgatctggaaggacgagctaaaggcttgccttatgtcgaanagaaatttgtcccaacagttaaagcgagactgaagggaatatgtgggccatcatcgataagtgcacagagaagctaaatctagcggcgactcacgagcaaaggctagaggatgagtacgccaagatatcagtagaaagggaag

SEQ ID NO: 168776 - DNA, 471 bp, Glycine max
  unsure (1)..(471): unsure at all n locations
agcttctatataagccgaacctttttttttanatttttcaaggngaggnngattcagaaaatcagagtttatctcttttatctttgagagagtgattctcctaaattcttgagtgattcaagaacactctggctgtatcaaaggactttcacaacctttgtgtgttgccctcgctggaaagagtgattctttccttcctttcatcttcacccttgttctttcaaaccacaattccagaaaatccacctctgcccagaattatctagtggccataactcccattttacgcactcaaattaagtgattcttgaggctaaattgaatttcaaaacgagacctttcacctcgttttggaatcacctcattgggatccctgtagcttcagttattgccatctttatatttctgtccagccaccacttcttaacctacgttttaccatcccattcatccattatatgccaagaacca

SEQ ID NO: 168777 - DNA, 465 bp, Glycine max
  unsure (1)..(465): unsure at all n locations
tggagtgaggatcctcactaatgataagtctttttatcggcncataatctntagcaattcttgctctcttacctcttcgaggctctatatctggttctggttgtgcaagattntcactactaatagcaggaagataattggatgaagtacccccactatcccttaatttaaaaggaaatttattttcataaaaatcagcatcatttgactctatgatcccttttgcgtttaggtcataaaacctatacactntgctgttaatagcataaccaatgaacacacattcataggctctacttgcaagtttaaccctcttaggatctgggatccttacataggccaaacatccccaagttctcaaataagacgaaattggttggcttttctttaatatctcatagtgagatgtcttgctttctgatttggggattctatttagcacataacaaacagttaacaaaattt

SEQ ID NO: 168778 - DNA, 460 bp, Glycine max
  unsure (1)..(460): unsure at all n locations
ttacagtcacctgcggcatgcaagctttaaacgtttttaaaaaatacctgattagatttctacaaaactacctatcatatctcccaaaaccccatacccacgaaaatcaaaggagaaagaagtccacccaaacctgaaatttcgaagtcccactcatagacacgcacttcacgactccggaaatgccctcctttcgcgatttggagcagaaatgatggccaaaggttggagctttgttgggcaacaatggtggaggaagaagagaanaaaaaggctgcgtgagagagagggagagcttctgaatttttttgctttggctgagtgaggagagagaaaagcttcttggtttaaataaagggttttctcttttttctattattttatttaagctatgccacatgtctccgtttgagtggagcaagaagtgcccactctgccttttttgactgtgacccatact

SEQ ID NO: 168779 - DNA, 492 bp, Glycine max
  unsure (1)..(492): unsure at all n locations
atgtgagatcgagaccaacatgttagccatcatcaacaagtaccaagaagaattaaatctagccacggcccacgagcacaaagtggcggacgaatatgcccgagtgtacacggaaaaggaggctagaggaagggtcattgactcgtttcatcaagaggcaacaatatggatggagcaatttgctcttactttgaacgggagtcaagaacttccccgattgctggccaaggccaaggccaaagcaatggcggacgcctactccgcccccgaggaaatccacggactcctcaactattgtcagcatatgatagacttaatggcccatataattaggaaccgctagggagtttgtattgtcactctgatcttgactagttataactttctgaataaaatgagtntcatcccacgttttactccaaaatcagtgcaaatcacatcanctccacattntatctctagcatacattcattntntacatactcctcacg

SEQ ID NO: 168780 - DNA, 433 bp, Glycine max
  unsure (1)..(433): unsure at all n locations
agctntacagcagaatttagtaatgacccactattctctttatttaaaataacttaatgccattaacctagggaattaaaaaaaacttaatggctgagtgtaactgaaattgtggcaaccaaaagtcacccccaacagccaacaagtcagccaccatttggtctcccaaaaggctgatgcctaggttgccaattgggcccttattacaacttgaactaaacctaactaaagcccttttagttgattaacccaaaacatatttttggtcagccaactttacaaggattgggccattatttagacaaactaaatactctaaaattgagacaaagtggtgtcatttagtcctcctccattggggccatgatacaactcacaaccttggacttttctccttgaaacttgggcttgtattcaaatagtatggacagca

SEQ ID NO: 168781 - DNA, 466 bp, Glycine max
  unsure (1)..(466): unsure at all n locations
tacccatcacatgtggtactaggtggctgtctgtctatggtgcacaacaacgtttccacatgcacaatgcgcgcataaacccaccatcctctgttgcccacctncaactgagctcacgtactcccacgtagcccatatcctcgtttctctcaacaccgggtccccatcaatcctcccaagcttccccaacatcaaagtaatacaacattcacacagcacaagctatcacagccaagcaaaacagggcaaaggcagaaaactctgctcaaaacaccaaccaaaatcacagcttttctcacttaaagaccccagtaacaattccttcgatccaattcgctaaccgttggatcgaatccaacaatttactggaagtctctagtgcataagcctacattttgaccgttgggatctactagcaaacatncagaactcattcttcactactctntccacagccaaccacaca

SEQ ID NO: 168782 - DNA, 503 bp, Glycine max
  unsure (1)..(503): unsure at all n locations
ttacagncacctgaggcatgcaagcnttaacacctacattactatgcgggagatttttatatattttagcatngagncaaggctatcaataccctttttattttggtacaatataaacaccttttatatatacatatagagacatttattaattaaaaactaaatatttattatacaggaaaacacaaattatttattacaattaaattttaagtagttaaaaaaattaataagatttattaaacgataatatgtaaagaactaatctaaaacaacttatctaaataatgacctaccattcaccacgtacatatggaccaatgcaaagcatggcataaagtccttccttttgaatggttttaataaatttgacgagatccaaatttccagagaaatcatactgaaaatatagaaattaaaataaataaaattaataccacacgcgaaatatgtagtatgaacatgaacaaaacatattattagaataaaaatacctatcggga

SEQ ID NO: 168783 - DNA, 405 bp, Glycine max
cgagaagaaatcacatgtgtgtcatcatcagatatggggagtatgtgaatgcatgtatacatgattctgatgatgtcaaaagaagaatcaaacaaagttgcttcaaaagataagcatggcttcaagattaatacaagattgcttcaacaaacaaggcccttcttcaagattaactcaagatcaagccttgcattaaaacaaagtgttttcaagacatgcaaggctctggtaatcgattaccaggcagtgtaatcgattaccagaagatagggttgagaaatagctgttgaaaaatgttttgaacttgaattttcaacatgtaatcgattaccatatgtctataatcgattaccagtaacgaaactcctgaaattcaaattcaaaagtcatgatccttcagattat

SEQ ID NO: 168784 - DNA, 467 bp, Glycine max
  unsure (1)..(467): unsure at all n locations
agcttaataaagtggggggtcaaatcctcaaattttgtgaattgtgaatttgtgatgcatgaaatgaaataaaaatattgaagaaagatttcaacttgggttgcttgagcttttaatttgcttgcgtgacaaaaaggggttggtccctcttgttgcctagtcccaccctttaatttcgggaggttattctttcattcttttagtttcagtttcagactttcagatccaaaggccaaatcttagggtcatgattttggtgttggtgagtcttggatatgtcatgtgatagtccaaccaaaccaaacaacaaacaaaagaacagcacccttctgactcaaaggtagcaacttgagacagtttctcaggtttgaacatcaaagagcacacaagggtccaattggattcctaagcagagagatggngttccaagaaaacgggaatggngaaatggggttgtctggaatccc

SEQ ID NO: 168785 - DNA, 398 bp, Glycine max
  unsure (1)..(398): unsure at all n locations
ttctgaatctggcaaacatatttccttcgattcagattaggaaaccncaagtaggaatcgagagaatntgtcaaagggatattcagatcagagctaagttgggtactcaatgctcgggaaacattttgagagaacatgactatggatcttttatcattaattcttttcccataagccaaacataagatatctagaattctctctaaaagttcctccactgctaggatgatgttgttggcaaaaaaaaggtgggagataggaatgccattagccttaccaaagaacaaaggtttccacttgccctcatttgtaaaatcttggataacgtaagcgagtctatcaaggcataaaacaaagaggtagggggacatagggtccccctatcttagccctcttgt

SEQ ID NO: 168786 - DNA, 415 bp, Glycine max
  unsure (1)..(415): unsure at all n locations
atccttaagtcacctgcggcatgcaagcttagcctatctatggtgccaggattgnatatttgttaaagctctgcctctttatgttgctcaatcagaagcaagtgtacttcattcgatatgaaattttgcttgggatatattaaacttaaagttgtttttatgttgtcatgtcaaacagctctgtaaccaggaatccatctctcacatgaaaccagagcagacagtagaatgtgttgcattcagacttggcacttgctggcattgtggagacaaagcagatgggacagactgtttggtttgtgattcatgtgaggagatgtatcatctgtcctgtattgagcctgctgtgaaggaaataccctacaaaagctggttctgagccaattgtactgctaatggaattggatgtcgacac

SEQ ID NO: 168787 - DNA, 476 bp, Glycine max
  unsure (1)..(476): unsure at all n locations
atggtggtccacattgtgttttgtatatntctatacatcgttcatttactggttataccccctcttgacgtgcttaagccattctacttaagtcatttctcgcttaacctagaaataaaataaatttccaccgatcgtttgaattgtattatccgtaaacttcggttaaaatgaattccgaccgttcggtcgtgccgtaaccacgttggaaataaaaaaagaggtaaaaaataatataataattaaaaaaacatcttttatgtaaaataaagcggataatcaatcggacattttctctttggaatttctcattcttaaccgaattgactaataactaaagtgaaactaaggctaanatcaactcgcctagtcaagctcgtccataanaataggtttttgaagtctgtcatttcaatttcttactaagtaaatggatcgttttttagcgtccaacaccttataatagtcacctctta

SEQ ID NO: 168788 - DNA, 412 bp, Glycine max
agcttattcaaattatagtcttagtcttgttgttttcacttaaaatacctttagaaatagttgctaaggttcctgacctatgtcctcttatccccatgggcttttcttcactatctcttttaaaaatttacattgttctcatttctagtaggaagagcaatgatagtatccatatggtagaattgtttaattggaaaaatcaaggaatacttcaacctagtacattgagggaaacaagacataaagcaaccgtgcttaatgaatcatttagggatttccttaagtatgtttttcttgcattaaaatcctttttccaactattttagccctctaaaaatgccgaatttataggaataacctttttccaagatggagtatggaaactatgacttaggcatattggacaataact

SEQ ID NO: 168789 - DNA, 486 bp, Glycine max
  unsure (1)..(486): unsure at all n locations
gcgggacctgtctgctgccttttatttctcttacttttgnttctattaattcttttatttagtctaactttaactttagttagtgatcttacttttgtttttattggttctttaattttaatttagtccaactttatctttaattattgattagtgatgctcacacggagtttgttcttttcaatttttcttttcgttttaccatatatacttccacgtaacaactttcgttttcacattgcagttttcgtcctttcacatctaaattttgaaattctaatattaattaagccactgtgatcagtaaatgtttataaaatttcaaaagattactttgtcaaagaaggaacattacacgccaatttttttataaaattgtatgttttacagaatcactttagaaagaatattcaatgtaataaaactctttaatgtagcatanaacatttgcattctcaagtatttacggattaagatatgcgtcat

SEQ ID NO: 168790 - DNA, 446 bp, Glycine max
  unsure (1)..(446): unsure at all n locations
agctntataagcgcgggtctgggagactattgttatgtggtcgcgatatacgaagatgatgttccgagtacattggatttggtacgaccatgccctcctgatttccagctgggaaattggtgagtggaggaacgccccggcatttacgcaatgagcataatgtaaacctttacagttttaaaagctctatagttgggcctaggctttagagtttttcttttgttaaggctttgtgtcttttgtttttgaatttataatacaaggatctttcttcatctgttcctacgtctctacccattctcatccatttgcatgtttacttctttatttctgaaacggcagatccgatgacgagtcccccagaggtactaatacctgggacccgtctatcaacttcgagcaagaaatgaatcaaacggaagatgaaggaaacgaggatgtgggac

SEQ ID NO: 168791 - DNA, 427 bp, Glycine max
  unsure (1)..(427): unsure at all n locations
agaggttaatgaaacaacgagatgatgctctccatgagaggttggatcaaatggagaatagagatcataatgaagaagaaaggaggagaagagggaatgatggtgttcctagacaaaaccgaattgatggtattaaactcaacattcctccatttaaaggaaagaatgatccggaggcctacttggagtgggagatgaaaatagagcatgttttctcatgcaacaactatgaggaggaccagaaggtgaagcttgccgccacggagttttccgactatgctcttgtgtggtggaacaagctacaaaaggagagagcaagaaatgaagagccaatggttgatacatggacagagatganaaagatcatgaggaagcggtatgtgccggctagttacttcagggacttgaaattcaagcttcaaaaact

SEQ ID NO: 168792 - DNA, 424 bp, Glycine max
  unsure (1)..(424): unsure at all n locations
agcttggtgncgggtggtgagcgggtatgcaatgtcatgtttatgaganncgaaggacacctgtatttatagtataatgattggagggtgtgtggtccttgtctgtaagggctattgttagccttgtagatatttcccggcttatagataatagccgggagcttaaagataatgttagagataaacctttgaattaatgataatggtggatgatactcgcaccttgcagataatatggcgttgtagatagtttaataccaacaaatagataagatattcaaatacatttgaatagtagttagggtagagataacactgttgttggtgaacccaactactaagggccaagtgtctgcgctcctatagtagggctgatgtggagggttgacacctgtttataagtgtcaaatacgaggccacatat

SEQ ID NO: 168793 - DNA, 451 bp, Glycine max
  unsure (1)..(451): unsure at all n locations
gctcaagacanaatataacatttcaatccactcaattcatactttttctcattcaaatcaatcacaacacttcatttcatacgaaatcagaccactgaatcatattcaaccaattcactgttcaaactgttcaatcatgcttttgtacaagctactactacaaacaaaataactaaaatttaaaactgacatttaaagattgaaatttaaataattgaacatcaacatacaataaactaaaatagaataataataaacttttcaaaatgaaagataagaatataaagatcctgtcaatcctcctgtgggtgatcctctgcatgctcgttcagatctagcgctggagtagctggtggatcctgtgaaatgggctgctcttgctccaatgctggtacggatggcagggtatcctcacagatatgtgcacgggatggctntggaatacgctctg

SEQ ID NO: 168794 - DNA, 451 bp, Glycine max
  unsure (1)..(451): unsure at all n locations
cgatccattatacaatggttaactatatcaggtatttaaaacctacacaaatgctgagttgcaatgaatctgtaattgcaagtngagagacatactaagtaagagcgagttagtgatatacaaatcctaatatatcaattatggtctataattcatctttagtcctttaaaagtgaaaatactataatatagtacatgtatgttgttgtcccttaaatttatacaaatcacacagattctaattgtcttattcttgttggtttctaaactttatttaggtttgtggttgcattcagagaggaattctataagctgtacttgtcgactntgggtgacattaaggaaagggtaagaattaagctaggattgcctatttttgagcattatntaactttntatgcactttaagtatattcctcgttaattccactctaagttggcaccaagaaat

SEQ ID NO: 168795 - DNA, 478 bp, Glycine max
  unsure (1)..(478): unsure at all n locations
atccttaagtcacctgcggcatgcagctataaaacaaaatgccttatcattttcaaaatcatgtgaataggacgcatcaacaagaatcaagccaaggctattgtgcaagcaatcaatggggcaaaacacaccaaatgattataatgatggatggctcaaattctcacaaaggtaaaatcatcactttcaaattgagctttcaaaactatcatgacatgtagagaagaatcaaggatttcaagtcacaaaatgtcaagaacttttattttcaaaagaattacccatttcttgaacatatcctataattcaaagaaaaacatgcaaagtcgtacgtgcacacaaaatngacccataatattaaatctgaaatccgacgaaactaacaacattaacaaattaacacaactaacaaattaacaaaaccaacaaaactatcgaaaccaaagaacacttcccccccatacttagacaacacatt

SEQ ID NO: 168796 - DNA, 429 bp, Glycine max
gaactccgtaatcacacaggttaaccatggagtaactagatataaccatctgagtattaaatccaatcagcccaactcattatcaagaacaatatcaaaccagaattcaaataacataaaatgtccacaatcactaaatatcctagactggaacacctcgaaaaatagccaagttcttagcctaataatgtaaattctaagaaactaaaagccaaaatacacggcttattaaagataaataagcagaatctaaaatcttacaagaccgaggatgtggtggaagatcaaaactctgacgaacgtatccgaccatctcttcaagctgcgtaagacgaatgtgcataccggcaaagcgtgaatctaacgagtcaaagcgggcaccaacatactaacgaataacctgtcattcagagaggactttattcatga

SEQ ID NO: 168797 - DNA, 473 bp, Glycine max
  unsure (1)..(473): unsure at all n locations
agcttcctcggggccattcctgggaaggcaatcttttggaaagttagtttacgagaaatataacaatcattacaaacaagggccaaactacacttctcatggcacgagtgtcaacatgcactttataaaataatcatattggggtcgtgctattttatgacacatacgtatttgcacacataaaaattttgtgtgaagcattttacgacacctatccatgtacatattttttgacaaactttttcatgctacatcctatatatatatgcacatttttttggaaggcttcttttgttacctactcacaaatacacatattttgaaaaacacttttacgctacccatccaacactttgtaaggcacttcatgctatatatattcatattatgcaaggcattttcatgctattcatattttgcaaggcataaaattcaacattntgcaaggcatttccatgctatatatattcaca

SEQ ID NO: 168798 - DNA, 471 bp, Glycine max
  unsure (1)..(471): unsure at all n locations
agcttaatnntcattttgtctgttaataaactattatctatctttattatgcagaattaatagtaaacaccaaataacaatacatattattttcatgtaggactaaaatataatgtcaattttaatgaaggactaaaattcgatgtattcttcatataagaactgaaaaaaaagtctatcattcatatataatgttcgactatgggtatacaaatcaatatttagtttaatgccattataatggtttcaaatgataaaattgaaaatgtaatgtaaactgtacatgaaaagtaaaatttgttagttttatataaaactattacataaataaatacaaaatacatatcttgtggcgactattatattattttttgttaactctaattgtacaaattctcattaatgggatagaaaaattcaaagctaacaagacataaatatatttattgacacaaataaatcgaaatacta

SEQ ID NO: 168799 - DNA, 367 bp, Glycine max
  unsure (1)..(367): unsure at all n locations
agcttgcagccattaaaagagaaagaacttgtgtcttttattatgaatcaaaatgttagtcagtttgtcagattgattgtgaaggaatgcattaactgtatctcggtgagagtgtgatcctaaaatttggagagaaacgactatcatttagtactgatttttgcatgaatctctgaagtatggattgaatgcatgaaattgaggatgatgaaggccatgtttgattgtgatagccacttaaccaaaaagcttactacgtgcttgaatgatttatcccttgcacccagttttgagctgaatgattgaaccttaagcctatacaattntatctcctgctaccttatcttaggttgaaggagagcatcat

SEQ ID NO: 168800 - DNA, 321 bp, Glycine max
atggtctgttttgcgagaatatatgtattagatacaaagcatttcaactgctctaagaatgaacatcagactttcacttcttctcttttgagtgtatttttattatctctaattttgtgaatctcttgtgccaacagaatccttctacaaacttaaattgaatctttagccaatgaattttcaaaagctaagtcttatttgtaagtttcatgtattctgcacatggaatggaattgtatatgaagtttcaaattgtatgctttaattatattaatcacctcttaaacacaagatgatattggtgttattacgttaggcaca

SEQ ID NO: 168801 - DNA, 484 bp, Glycine max
  unsure (1)..(484): unsure at all n locations
tatccttacaggcacctgcagcatgcaagctntcacaatagaggccggcgagcaagattttgttatattattctcaagcctggctatagagcggcgcaaacactaaaggcttcatgcctctttaaggctagggtttggctacataggaaaaatacaaaatctatcaccgtcaaattatacatgatatcatgaatacatatgtctagctcagtctattggtccgctcgtatctataattctcacagactaaaaaaaatatccactattaattaattatattctgagaaggaattatctcttattcttaaagaaccgaagacatatacctatatataatatatatatcataattatcacaactttctgagccgcttttcgacattttaattatataaaataaaatgcttttgaaattaaaatagggaagtgaaaggatattataaacttatataatacaaagtcttcatatatgacaacaaaaatc

SEQ ID NO: 168802 - DNA, 429 bp, Glycine max
  unsure (1)..(429): unsure at all n locations
aaaatgtgggataaaaatggtcattgactantcccttttccatgacttaaccaaattacccagtgacggtgtgccatttgaaggtacactgaatgacaactggaaatatgatttctctgcccatgatgcccgccaggtggttcgcaccaacaatgcggatatgaccggacgtcttcttgccgggtcattggcttatgaaagccgcatccttcactatttaatcgtgcatattatgcttccacggtcttccaaccttgcccaggtttctgaggaagatctaactatcatgtgggcctttcatacagggcgtcaacttgactgggcacacttagctagatatcgcatgcataaggtatcgcgattaaatgctccactaccatattcactagcttgcactcctctttatccgccattatcaaattcctcttg

SEQ ID NO: 168803 - DNA, 433 bp, Glycine max
gaaagccttgtaggaaagaggtatgcctatgttgttgtggatgatttttccagatttacctgtgtcaactttatcagagagaaaacagacacctctgaagtattcaaagagttgagtctaagacttcaaagagaaaaagactgtgtcatcaagagaattatgagtgaccatggcagagagtttgaaaacagcaagtttactgaattctgcacatctgaaggcatcactcatgagttctctgcagccatcacacctcaacaaaatggcatagttgaaaggagaaacagaactttgcaagaagctgctagggtcatgcttcatgccaaagaacattcctataatctctgggctgaagccatgaacacagtatgctatattcacaacagagtcacacttagaacgggtgactccaccaccctgtttatatctggaa

SEQ ID NO: 168804 - DNA, 479 bp, Glycine max
  unsure (1)..(479): unsure at all n locations
agctngaacctaattgatatttattattattattaaatattnnatnnnatttnataagaataaattaaagatttttttttaaattattaatatgtcacatgtgtgttgcacaggaaaatcaagttaaaaattattaattgatagtaagacctgttttgtgaagggtattaatgtaagagtgccaaaatttcctgtaaatttactctcttttatatcatcaccttgcattgactcgaccatatattggtaacccaagaaaaatctcgtaggtccagatcattggagaaaatcatgtgttatcagttagttgcccattcatgtcatagcccttgcaaagtaatatcacatcaacaaatacacccaattacaatcacaagtgtatatatataatctcactgtccaaaccatttttttttaatcttattcaatagggatacattntatncntattattcctanatatngtaaatatgagtatt

SEQ ID NO: 168805 - DNA, 445 bp, Glycine max
  unsure (1)..(445): unsure at all n locations
atctgagctgacacagcagctcacttgcaagaaatatgttaggaagaagctgcaacaagaatcattatgcataaaatgaactctaatgccaaaaaagtaattcaatacagtagaagatgtagtgctgtaggtgaaaagaaagggaccacacttgctgccagtaaacccaaattgaagaatattggatattaaccaaaccaagctctgggagcttgtttaaggccatacagggctctttntaacttgcagaccagagatctgtctgaggattcaaatcctggtggctgaaccatgtacacttcttcttctaggaaaccatttagaaaagcattatgaaatctgcttatttagtactgtgggaggaattatcggaacagcagcaggatggagcattagaggtgaggccaagggtgacatccaggagtatcatatcagactgtggatg

SEQ ID NO: 168806 - DNA, 477 bp, Glycine max
  unsure (1)..(477): unsure at all n locations
agctntanataggcattgaatctgcgacgttgttcttatctcccccttgcgcttagcgtgacttagtgggattgagcttagcgccagtcatgcgctgagcctggctaaagacaaccgtcacgcttagcgcgcggccttgatatttatgctctgccagattcttctattgcactaagcgcgctgaagttgcacttaacaatggatgcgcgctgagcccaaatggatagctgagcacaactaccacttttagcatttcaagacttagcctcatttaacttgaaattgaacaaatttcatcattaaatccaatcgaaaatattctagagacagctataacaataaaacaagatttatttacaaatccctacaaaataactataaattggggaaactatacnaagtttggaaaatgttttctatacaaaagttagtggtataagacgactaacaataacgcttgtgtatngatcgatattg

SEQ ID NO: 168807 - DNA, 437 bp, Glycine max
  unsure (1)..(437): unsure at all n locations
caagaaatataacaatcattacaaacaagggccaaacaacacttctcatggcacgagtgtcaacatgcactttataaaataatcatanttgggtcgtgctattttatgacacatacgtatttgcacacataaaaattttgtgtgaagcattntacgacacctatccatgtacatattntttgacaaaccttttcatgctacatcctatatatatacacacattttttggaaggcttcttttgttacctactcacaaatacacatattttgagaaacactnttacgctacccatccaacactttgtaaggcacttcatgctatatatattcatattatgcaaggcattttcatgctatatatattcatattctgcaaggcattttattcaacatcttgcaaggcatctccatgctatatatattcacatatatacata

SEQ ID NO: 168808 - DNA, 250 bp, Glycine max
tacattctattttattcagactctattctatctagattttatgttgcgcagaatttattccctccgagcttatctcatctcgtccagatcttattgtactttcgttatgggcctggactctacaacagattcgtatcttttggggatgacgaactatataacagctccaggggtttagcttcaggagtcttctttccgagaggagattcattctatggatttagatctccacgttctatacttgttcatg

SEQ ID NO: 168809 - DNA, 412 bp, Glycine max
agcttcgaatggtcatcgctttattcttgtggttatagattacttcaccaaatgggtcgaagcgggtccttatacgaatgtcacgaggagtgtggtggtcagattcataaagaaggaactgatttgtcgatactgactccccaggaagatcattactgacaatggcacctatctgaacaacaaaatgatgcaggaaatgtgcggtgatttcaagatccagcatcataactccaccccttatcggccaaagatgaacggggctgtggaggctgcaaataaaaatattaagaagattattccgaagatgatagtgtcatataaatgattggcataagatgttgccttttgccctacatggatattgaacctcgatacgaacttctactgtggcaacgccgtattccttggttta

SEQ ID NO: 168810 - DNA, 495 bp, Glycine max
  unsure (1)..(495): unsure at all n locations
tcatgatgaatcaagattgattcaaggagctttgatgataacttagatgatgacaaanagctcaggagtcaagatcacttcatgataacaaagatgatgacattcaagaatgagttcaagattgagtcaagaacacttcaaggatcaagaggaaatttgatttcaagaatcaagaatcaagattcaagactcaagactcanagattcaagaatcaagagaaaaattaatcaagataagtattaaaatgttttttcaaaacattgagtagcacaagaagttttcacaaaatcattaccaaagagttttactctttagtaatcgattaccagattatagtaatcgattaccagtggttttaaaacgttaagattntcacaattcaaaatgaagagtcacatctgttggatgtgtaatcgatacacctttatggtaatcgattaccagtgactgatttccgaaaattcattttcaaaagtcacatttcttcaagtgac

SEQ ID NO: 168811 - DNA, 466 bp, Glycine max
  unsure (1)..(466): unsure at all n locations
agctttagggcaatactntatgtaccttctttgctccttctcttcaaagcatgaaagtcttcatgtgccgtgactattttgtcttgaattaatctgattcctacaaaggtactcttatatggagaaattaattatgttatagaaccctaaacttaacagtaacacaataatctttgcaataacttaacattaaaattatagggttcgattatgtgtctaaagtgatttatagtctctggttgtgggagtttagaaactatggtcacaagagtttctatagagtaaacagatcggtatagtgttaggattgcattcataagtctgtaaaattaaccttccaaccatgccttactgtcgcctttcaatttgtgtaagcatatcctatatctttggattgtagtagcatgaaagaggctcttgttattatctccccaattcagtcatttcaatctaaattcttaccccc

SEQ ID NO: 168812 - DNA, 444 bp, Glycine max
  unsure (1)..(444): unsure at all n locations
agtatctcanaggatctccaacacccgagcagattgttagtattggcacagagtgaacacataaaatgtttactaaaggcccgaaaactatattttcaattccctcaaataaaaaagaatgaagtattaattaaaatttctacagaatacaaccaccaagtatttggcaaaagaatagagaaaatntacagttatctgcagggggagggggaacccaaaaatatcgcttatcctcaataaacagtggaagatgaaatttgtctaaacaactggccaaccagtatcgatagaagatttctcagaaggagatggggatccagacttgggaggcttctttccaaacaaagatgacttgctgtcaaagaaactggagaatgattgccgacctgacttttcttcgtcgtttgtctgatcttttgagacagacttcctcaatagtttatc

SEQ ID NO: 168813 - DNA, 478 bp, Glycine max
  unsure (1)..(478): unsure at all n locations
agcttgtagaatggcatgacacgatacatgtcttggttttgttcggttcaaggataaaaggggatgtcccacattatttccatgacataaatgcaacaatgatgatttggaaattttatgcaaaactagtcatgcatgcacctatgtggacactcaagtgttgaaaaatttttggtcatgtgatgctagggctcataattcattctctctactttagtcaacccagtgtttccaaaatatgttcttttatcaatttgtgcattcatccgagtctattttgggtgttcgaaaaaactttcacagcatttacccttcaggtgtatacacattttttttcgaaaactggttatgatcagtgaatcctttcaaagaaaagttggaagttagctcttttcacaagcatggttgtttttagctagacaactttgtattttattatntcttttttcttcctgcttttctttctacttgtctcttt

SEQ ID NO: 168814 - DNA, 468 bp, Glycine max
  unsure (1)..(468): unsure at all n locations
ttaagtcacctgcggcatgcaagcttacctcgaactcaacactgacaatggcatttattttctgctattcaatggcaacgacaataggtctcacaggtcacgacaagttccccaatccttgaaccaaaaaccaaaaaaggtccttaggttaaccgaaggttccagaaacagacctagctattcaatggaacaacacagctagacgaaatgacacgagcctgtcacgaaagtcttcaaatgttaacgaagaagaagagagcgctgaataatacacggagaataagagagcgccagagaataatacacgaagaagaagagagcgcgagcaaaataggtcgcatcaaaataatttaaaatttaatctcaacatcagttttcaataaanaaaaaccgatgttaacaanatgatgttaagtgtaacatcgattttattaaacacaccgatgttaactgatctaacgttatcat

SEQ ID NO: 168815 - DNA, 405 bp, Glycine max
gccaaaaaactaggggtctctataaaccgtctctaaactcgcaaagtataatatcattctatactcctactttaataattatagacaatttaaggagtgtaactcaattgacgcacaaatcaaatttgtgcgaatgaatgaatacatttttaggaatgaagacaaaccatgctcggacggaagatttaataacacttaaaccttctcttttctctcaatcaaagttatattctcaaaatttacaaatattgtttttttagagtgatccacttaaaaaaagtgaagtttctcaattgtaaaattcacaaaaaacacatttgactaacttcataatttactatatttattcaataatctttcttttccaaaacgatgattgcttgagatagctcaaagatgtttttt

SEQ ID NO: 168816 - DNA, 320 bp, Glycine max
ctaagctatcttcccatttcctccccatgtctctacgcatataatcgacttctatcttgacattcctctatggctcagcctacctatatctctctttacttactatacctacgccctactcataagaaccatacaccatagcataactgaactgcactaatccattaatagctgaactatttatacaacaacgctcgacgacactattcttgtatcaaaacagatcactaattgaaccagtgtaagaacattatacagtgaaccactgaaccttaacttctttgctaagatgactgagagctgtcaagggaggtgcctct

SEQ ID NO: 168817 - DNA, 457 bp, Glycine max
  unsure (1)..(457): unsure at all n locations
agcttgatgtcattcanaacacactatgtagacttaattgaagactaaacattcattgtttatttatttgtattcattatgtgatataattcgctgtaacccgttactaaccaattaatattatcaactactcgtttggttaagcaaggaaattgttggtccaacaaaaatcatttacgcgtgcagcatacatcattgtcataattgacaacacataatgacatgcatgcgtattacagtttgagcgtgacaacacattggttgacttcagtacacaatttgaaactagcagtcgctcgacaacacattggttgacttgactacacattatcgacaacacattggctgacttgactacacatttacgcgtgtctatttntttgttaacaaagataaacaaaggctcggtcacaaccatctatatatatggcagactaggctactagatcacacatta

SEQ ID NO: 168818 - DNA, 398 bp, Glycine max
  unsure (1)..(398): unsure at all n locations
cttgattcttatagtacagtanacaagtaagtcgaacttaaaccgaatcataagacttggctcatttccctccatagctagaaccaaatttaatatgggtggaattatccaatagaaaaaacctagagaacaacgacaaaaatttgcggaaaaataaaacaaactcgatcccaaatatatgttgattcatcttcaacatcatccaaatctggtgcgaaaattgcggacaaaagaattggggaaaagataactcgatcccgcgaaggactagaattgacagataaagacacaaacaccaaaacgtcaaggactatatctaacacaaagctagtgaacaccggcgtctccgatcaagctttctcaactgcgctcatctctgattccagcactgccttaca

SEQ ID NO: 168819 - DNA, 372 bp, Glycine max
atactatgcaatgtggcattaagaacatttttgagcattaaaaagactctcatcataatgcatgacatattagactagatcatgtctgtgataacaagattcttcttaaccaattcaattatatgcattatagtataaaataatttcataaaacatgaacatgactttgtgtataagggacaacaacattttgaacaatatcattttgatgattaacaatattttgagtactttagctagaacaacaactttctgatggctaaatcatgatcatcacataacacctcagagatacattcatctatgatacatttatctatgtagtaatattctgaacatgagcaaatgcacattgacattataggttcttat

SEQ ID NO: 168820 - DNA, 208 bp, Glycine max
atacacaacatgactcacaccaccgtccaatcccaaggaccttcgttccgctcgtaatgaagctggccttgcaacatttcctgggttctcttggatgcactacctaagatttacaagagcattccctcttatttgtccttttcctttttgacctcaaaatcctcctcctatctctatcctactagcatacaatgacccccaagcccca

SEQ ID NO: 168821 - DNA, 391 bp, Glycine max
  unsure (1)..(391): unsure at all n locations
agctatgcatgcgttggaggtgaatgtttgttttatatttaaggaaacttgagcatggagttgttaatgttgttgaacctgggaacaagtacctaacacactgctcaatgaggggcttggtaagatgaatgcaccacctaagagtgatgtaccaggcaagcttgctagccttttctacaatatcggttcacaaggtggtggacaagagactacaacataagcaccctctatcgnagttcttggtttcttattctattaccaagatacatcaaatattaacatgtggaatccttgataggctcaacaaatatatggtggtaaaaacaatgaggatgataaagaaactcaagcaagctgcataatggttccttgccttcatattagatcatac

SEQ ID NO: 168822 - DNA, 245 bp, Glycine max
cggcttctacagttggaagtataaaatgttgagactaaccattgtcttggaatcggaacccatgacaaacactgtgatagtggtgaaaaggtaaatgacagtgacttggagaaatcggcctatctccggtctgcttttccaacacaatgcactatcgccttgagacatatacaacaacaccatgctagttggattgatttgcagaactatacctcactgaatatgtacatataaaacattggaac

SEQ ID NO: 168823 - DNA, 414 bp, Glycine max
  unsure (1)..(414): unsure at all n locations
agcttgacaccacactctaacccagaaccttattgctctgttttatgggtcttctcctcacttatatggtgctcaacctttccacttctacccgatgtgggacttcacctcacacttgtaacccaacacatctccccctcaagtgtgagtctcttccacatggtagtctccccctcgagcggaagtctttatcatccacgagtatagccatggccacctgcggtagttgccctgcccactagccattctggccaccccgctacacctgcggggcacgttgtaccgctagccattctggccacctgcggtacttgtatactcgtctgagccggtcatcaactagaaccatcggctctgataccaatggtnggggagattcgaggggtacatctgtggaccacgagccaccacata

SEQ ID NO: 168824 - DNA, 421 bp, Glycine max
tcaacaaacaatcaagccgatggctattgtgcatgccatccatggggccaaacacaccaaacgaatatgatgatggatggctcaaattctcacaaacgtaaactcatcactctcaaattgagttttacaactatcatgacatgtataggagaatcaaggatttccagtcacacaatgtcaagaacttttattctcaaagcaattacccatttcttgaacatagtctataattcaaatgaaaacatgcaaagtcgtcatgcacacaaaattgacccaaatatatactaaaaatctgagaaactaacacattacaaattacacatctacaaattaacaaacctacaaactagcataccaaaaacactctcccatactaaacacacattgcctaatgtagccaataaagataaaacagtaatct

SEQ ID NO: 168825 - DNA, 476 bp, Glycine max
  unsure (1)..(476): unsure at all n locations
acctgcggcatgcaagcttagnnncccttgagaacacnnaagttccttttcttttttaatcaaaagaaagcattaaagtcacaaagaatgacccaaggaccccattattataactatatatcttcataaagtcaattaactcatatgtctaagacctggaatttggtgtaatttacaaatgtttggcagaaaagattgatgttctgctatacctggaaataaaaaataaagagagcagaaacaaataacaggtcaagtttacagccacaaaaaatggcctaagaatggaaatgatactgataaacaagaacaccactttctaaacatcaagcagagacattatgaagtatgagctatcccagaagtaatcagttccacactttcagtgtttcactacctcccaagatttgctatgccatgtangtaacttaattagcacaagatacacaacaataaaagcataaagggaaatttca

SEQ ID NO: 168826 - DNA, 379 bp, Glycine max
  unsure (1)..(379): unsure at all n locations
agcttggctgcacacacccctctaatagccaagttctctttcttgagatgaaaagctggagcttagctacacacaccccctataatagctaagttcaccccatgccaaaatacatgaaaaaaaaagtccctattacaaagactactcaaaatgccctgaaatacaaggctaaaaccctatactacgtgatgcaatcctcaccccaagggcattggatagaanaatccaanaaaatcgtgtcagacatgcaagataaggccctttggtttttataagcttaatggttgatatcgtgtcattgggcaaatactgagcccacttaagtgtgacataattaaaatgtgtgatatttctggccttttattgacggttgatcttg

SEQ ID NO: 168827 - DNA, 433 bp, Glycine max
  unsure (1)..(433): unsure at all n locations
gtcacctgcggcatgcaagcttagcgaaacactaattatacacctctcatcnattttatattcaaacatcattttgccacataatgtaatagggtggtaaaacaggttgaattcatcaaaccaacccacataatccgccaaataatggcggagtatattatgtgattaaattcatcatcccaccttgtataaattgtcaacttaaggagttggaggctaaagaactaacttgctcagtggtatcaagactataccgatcatgattcgatcagggcaccaggttgatgggtcaatggttgaactgaacgtgggtcgctacccgaactggtatatattaaatatttaaattttatactaaatatatatcatatataaagtatttctttcgtatctatatcataaaattatgtgtgatcaagagcggtggcacaat

SEQ ID NO: 168828 - DNA, 317 bp, Glycine max
  unsure (1)..(317): unsure at all n locations
agcttgnctcagcctntatgcgagacagagaccaacatgctagctatcttctgttagtaccgagaacataaggtatatccgcggcccacgagcctangattgctgacgactatgctccaatctgcgcgcgataagaggctagaggaagggtgatctactctttactccaagaggctgccatgtggacggatcggtgtgctcttaccttgaacgggagtcaagaactttcgcgattgttatccaatgccaaagtgatggcaaacacctactccacccccgaatagattcacggacttctcagctcttgccagcatatg

SEQ ID NO: 168829 - DNA, 464 bp, Glycine max
  unsure (1)..(464): unsure at all n locations
gtcacctgcggcatgcaacctgngacatgcggagaatatgtttcttttctcttacagancngnatattgnacggggagtcacgctgactggcggacatacccgagtggttatcctcataaacttacttttgctatctctaacactcaaagcatgatatcaagctgagggggtaaacgcgcagatacatattctgcacccttcatcattcaaaaactaacaagatgagtgggtaaacacgcagatacatattctgctccctttatcattcaggaacaacaagctgagtgggtaaacgcgtagaaatagatgttgcgccctttatcattcatattccgcaagttgggtgataaacacgcagaaacaaattctgcgccctttgtaattcagcacaccttttcgccacccaggctcgatcgtgtccaacataatgcagagacaaattatggtcattctgcgtgctgta

SEQ ID NO: 168830 - DNA, 413 bp, Glycine max
  unsure (1)..(413): unsure at all n locations
agctctaggtntgatggccccaatgacgtctatccctacatggaaaaaggccaaggggcggacataacattcagaggatgtggcagaacattgacattgtccgcgtacgcttgacatttatgacatttccttacatgggtgcagcaatcgcttttcatagtgagccagtaataaccggccctaaggatcttcctggccatagcatgcccattggcatatgtcccaaataaacactcgtggatttccttaatcatgtagttcgcctctttggcatctacgcatcgaaaaaggggcatgtcatggttttgtttgtactggatagcaccactcacaaagaaaccagtagccaatctccttaacgttcttttgtcattgtcggaaatccctggtggatattctttgttctcaacata

SEQ ID NO: 168831 - DNA, 413 bp, Glycine max
  unsure (1)..(413): unsure at all n locations
gaaaacagagcaaaggcagaatactctgccaaaacaccaaccaaaatcacagcttttctcacttaaagaccccagtaacaattccttcgttccaattcgttaaccgttggatcgactccaaatttttactggaagtctctagtacataagcctacattntgaccgttgggatctactagcaaacatccagaactcattctgcactgctctttccacaaccagcaaatgcctagtattnttctgcacttgtgcaaaatcctgctgcacaatttcacagcaaaaatctgcacaaaatgcagatttcgaaaaccacacttccnctcatccaatcttgctcanatcanatcctacaagtcccaaatcatgtatcatacctgtctaaaccaaagccaagcttcataccacaacaacac

SEQ ID NO: 168832 - DNA, 451 bp, Glycine max
agcttctttgagaaaacttccttaggtatctattgtctttctacacacacccctctcataactaagctcacctccttgagaagattcctaaagaagctagagcttagctacacacacctttctaatagctaagctcacctccttgagatgagaagctagagcttagctacaaaccccctataatagctaagctcaccccatgagaaaaatacatgaaaatacaaaaaagtccctactacaaagactactcaaaatgcctcgaaatacaaggctaaaaccctatactactagaatgaccaaaatacaaggcccaaatgaaggaaaaacttattctaatatttacaaagataagcgggctcatacttagcccatggactcgaaatctaccctaaggctcatgagaaccctagggtcttcccttggatctctggcccatctactggagtcttta

SEQ ID NO: 168833 - DNA, 478 bp, Glycine max
  unsure (1)..(478): unsure at all n locations
aagatacaagtatcattcaaggtaatctatttggtcaaaagagcttgtgtctatacaattcatggccttcatcatgttctgagttatacaaatcattctagaattcagagatttaagcaaagatcattattcatagttagtcgttcactcacagagtaaggtcacactctcactggtttttggttcaagcttntctttcacaatcagtttgtctagtgactaaccattctattataagttcacactcttgttctttctctgttcaacatgcacatttgctcaaattcatgaaaggaaacacacatttcatcataagcatgcattcaatttaaaacaaggcataaccattttcacaaaataaataaactacttcactggtcgtaccatcaaaagtaagttaaactgttcatgatgcttcaagatgagcaactatactactcatgcacaagactaaataaaagtactaatgactaacatc

SEQ ID NO: 168834 - DNA, 422 bp, Glycine max
  unsure (1)..(422): unsure at all n locations
gccttacagtagatgccactcttctncaagttttggaaggatatgctgacttggaaacacaagtatattcaccaggataagatcgttgtggaaggaaattgtagtgttgtgattcaaaagatccttccaccgaagcatgaagaccctgngagtgtaaccattccttgttcaattggagaagtcactgtgggaaaggctcttattgacctgngagccagtattaacttaatgccactctccgtgtgcagaaagttgggagagttggagatcatgctcactaggatgactttacaacttgttgaccgctccattaccagaccatatggagtaattgaagatgtgctagtcagagtaaaacattttatcttcccgcagactntgtgggtatggatatctataaggaatatgacattcttgtaata

SEQ ID NO: 168835 - DNA, 351 bp, Glycine max
cccagctgagtagtataaataaatatgtaaaatttgcagcatatacctactaaaaggattctaccacattataaaaaactcataattagtaggacgggcaaatgaacttagcttaatgggctggcctaaccaacccgctgttacggctaggctggggtcaaaactaggtagctcatataaaaatgagccttattggcttgaccgtaaaagggtcaaatggactttggccaaattggcccaggtaataatatatagttaatattaaatagaatataccaactcattaatataatgtataacgttatatttattttttaataaaggtagcacatataactgtgacgttgaaca

SEQ ID NO: 168836 - DNA, 455 bp, Glycine max
  unsure (1)..(455): unsure at all n locations
agtctcatgattgtcacgtgttgacgcaactattgttagtcatggctatacgagacatcttgccaaacaaagtcaggttagccataactcgcctgtatttnttcttccatgccatatgtagcaaagtcgctgattctatcaagtttgatgagcaggaaaatgaggccgcaattatactgtgccagttggagatgtattttccccctgccttctttgacatcatgattcacttgattatgcatctcatcagagaaatcaaatgttgtggtcctgtttatttgcagtggatgtccccggttgagagatacatgaagatcttaaaagggtatacaaataatctatatcatccagaagcatctattgttgagaggtacattgcagaagaagccattgaattntgtttagaatacattgagaaggctaaacctatnggcctttctgagtctccgcatgat

SEQ ID NO: 168837 - DNA, 442 bp, Glycine max
  unsure (1)..(442): unsure at all n locations
agctntgcgggtttggtcttctccagtgaatgttttctatgtgggccgaaaagaggcaaatttgatcatcctactaggacgactgagaaaactggggcaaatgaagagggtgagaaagagggagaaacccatgctgtgactgccattcctatacggccaagtttcccaccaaacccaacaatgtcattactcagtcaataacaaaccacctccttacccaccacccagttatccacaaaggccatccctaaatcaaccacaaagcctgtctaccgcacttccaatgacgaagaccacctttagcacaaaccaaaaaaaacaccaaccaagaaatgaattttgctgcgaatagcctgtaggattcaccccanattccggtgtcatatgctaacttgctcccatatctacttgttaacgcaatggtagccataacccctgctag

SEQ ID NO: 168838 - DNA, 344 bp, Glycine max
  unsure (1)..(344): unsure at all n locations
tcanggtgctcatngactctagaatggtgcaaagaaggacaattatctatatggtgatctacagaagaacatagaccacagactcttgcaacaggtgtagaatttttattcatggcaagctgagttactangttgaccaaggcatcaagttttccttcaagcttcttagtctcaactgatgaagatgaattcgtggctacttcatgcaactctctaatgacaatagcatcatttcttgcgcttaacaattgggaagtggaaagccatcttctcaattaaattcttgtcttaataaggggcatggtcttaatccctcattaaaatattggagaaaaagctgcctc

SEQ ID NO: 168839 - DNA, 449 bp, Glycine max
  unsure (1)..(449): unsure at all n locations
agctggctcacaaaatntcaagtcattgggatattatttattggtatctgtagttcaaacctacattgttacttgcataagaagacaactagttgtgtgcatgctgaatgtagtgtatgactagaggcaatccatctgacttacaatccttggaacctaatatagataggacatttcatagattagttagacatcattttataccttttgagcatcctgagcattctgttactggagagtatgtgcattctgttattggagattttgaacatcttgattttgagcattataattttgaacattttgattgtgaacatattgagaacatggcacaacctccacctcgtgagaggactctaagggaaatggttgcacctgatttcacctacgaaagcctatgcatccagtaccctgatgaggatgtcccatatgttcttaanactggactg

SEQ ID NO: 168840 - DNA, 407 bp, Glycine max
cttattggttccaccaccaccaccaccactctgtagaagtgcctgtcctgtaataattaatgaccctctacccccacctaactccccagatgattatttgacccaaagtcccaccaaaaacatcaaaatctgcaaatacttgatcataagtttcttcattgcagcaaccgctctcattgtcctcagcttctacgccatctacgccaaatttttctctcctcggaacaggtcaatacgaagaacactatcacgcccagaaacagaacaagatttcttggacgaggaagaacaacaacaacatggtcctgtcgttgaccaccccatctggtacatacgcaccaccggtctccacaagcagtcattaccgccatcaccgtctgctaatacagaaaagatgaaggcttgat

SEQ ID NO: 168841 - DNA, 476 bp, Glycine max
agtcttacttgagaataagttatatagtgatatgagtgtccgttttaatcttgattcgctctccccctttggcatcaacaaaaagccaaagttcataagaaatataaaacatacataaatgattaatcatacaagataatagaaaataattaaataagataatttaaccattcatcaaacttagaaaggtgtgaaatattgaaaccatacataaatgacatacacaagaatagaaaacaatcaaacaagataacttaaccattcatcaatcttagaaagataatacttcatagaatgtcatataatccagacagtcattcataataaccaaataaaactactaatgcgggaagaaaaatactagtaagtgtttttaagacatagccaaatacacggctttgaaatcaaaatactaataatattaaaaataataaaatctaagatgatggtggtggtggtggtagatcaaagcatat

SEQ ID NO: 168842 - DNA, 314 bp, Glycine max
caccatctcgctaagccaatctgctggtgtatttaacatccgataagcagcaacactcctgtgctaagcgcgacgaataatctctaacaatatgagctcgataggttctgctaagcgcacggcttcatctctctaagcgcaccagattattccatccgctaagcgacatacgcacgctaatcctaaaatcactaacgtgcgctaagtggaccatacctgcgctaaacgcatgagctcgaacaaggtctccttatttaaacttgaaataagattttgtgaacggagcttggaatgggatacaaagctttgcatgt

SEQ ID NO: 168843 - DNA, 216 bp, Glycine max
  unsure (1)..(216): unsure at all n locations
agctnggttgctcacacctctataatagccaagctctcttttttgagatgaaaagctggagcttagctactcactccccgtataatagatcataccaccccatgcccgattacatgataaacaaagtctctattacaaagactactcaaaatgccctgaaatacaaggctaaaaccctatggtacgtgatgcaatcctcaccccaagggcattgga

SEQ ID NO: 168844 - DNA, 199 bp, Glycine max
atcatgccgacacttacacatgatgagataaacgccctagtttcctttggacaagcgatagaagagtcagctacttgtctagaatcaacatcaaagagcacggtttcgatatggatcaaacgaatcctcgagataccatttgagaaagcctggcttcagcttcctaagagaggtgatccgttgcgggattgtggagctt

SEQ ID NO: 168845 - DNA, 451 bp, Glycine max
  unsure (1)..(451): unsure at all n locations
agcttgataaccatgctaagcgcgcnttttcattattctataattacttncttctttgggggtacaccaaaactctacccaaatacaatttaaactaatttaacttcaatgaactaaaaaaaaattaaaaatattaatttataacttattgagaacaaattaagcaataaatgaagaaaattaagataattgttgtacaaattcaataaaaaaaaaactaaacatacacaacaattatcttctcccaactttggccattataattcgtaacatgattatttcattatgtaatgtggtaattaatttgttaacaatagattctaggttaattagagacaaagtaaaattataaatgttcctgaaatttcttttctaaccataactctcatgttgacgcgtgagagtacataataataatgaaataaaaataacagagtagtgtaataaatat

SEQ ID NO: 168846 - DNA, 393 bp, Glycine max
  unsure (1)..(393): unsure at all n locations
atctgaanagactattaagtctcttcgaacagactttgatggagagtattgctcagatgaattttctactttctgtgtcaatcatggaatctccgaaggagttgacaatatcatatacaccataacaaaatggtgtctcattgaggaaaaatagaaccattctcaacatggtacgatgcctcttgactaagagtggcatttcaaaagaattttggcctgaagctattaattagagtgtgcatattctaaatataagtcctacatttgctgtgaaaataatatgacatcacagaaggcatggagcggaagaaaacccacagtggaccacttcaagataattggatgcatcgcttatgcccatattctagataacaacatatcacaagctgatga

SEQ ID NO: 168847 - DNA, 454 bp, Glycine max
  unsure (1)..(454): unsure at all n locations
agcttattacgggacacacgaaatatctcatggtcattttgaataaggttgcgaatatcctccaaagcttcaataatcaaataagctcccatcaaagcaacgcctcaaaacttattttgatagatacccttgttcatctcttgctaggacatacaaaacaccccactcaaacttactggcaaccttgtagtttgttaacaaaaaaatcacccataaactgtatgcgtgatgcaaaaagttgaatgagaaagatagaggaccagccaaagaagtcatatgcaaccatgtttccttcagtcatgtgccacagctccttcaaagtcaatttatcaggcacctcacgtgcatacttgctgaacatgaattccaaatttgttggcatgaacctacaatacttgatgttagcactcaccanaaataggcatcaacatgtcattcttaattaatttactta

SEQ ID NO: 168848 - DNA, 474 bp, Glycine max
  unsure (1)..(474): unsure at all n locations
ntagcgttccacctaattaattatctcttccgcaccaatgcacatgatagccgacaagaagnttttggctctcaacccacgatccaaatcctcttatcattttatctaaacatagctcacaaatgcgtttactgaggatccctcggtttagtcagatcatagattgatgtggaaaccccacctaagattctgttcagatgttagaattttcttaacattaagctaactcctatatatatatatattggttgatgatatatccaagtttaatttgcaaataataaaaaaacagttgaattgataatttaattcttctatatatctttaaatcgatcttatgtaatcatgtgaattttttagtgacaaatattatgtatacatgttcattanggtaaagtataattaataagtgtgtatttagttctcagcaaagtaatagacgtacaagatgttctaccggtgaaacacaatgac

SEQ ID NO: 168849 - DNA, 433 bp, Glycine max
  unsure (1)..(433): unsure at all n locations
agctngttgaaattgccatgtttggatgagtttatcattctccattctgntttatgggtttcgggatgatgtttgtgatgtttatatgctgaaattgctgatggaaaactattagagatgaagggtagaactaacctagggttagaaagtgagaatgtgatgttatgagtggaaaaagagtgaggctttgagggttggaaggttaagtctgaattctgtggtaaatggaggttaaagtgagttaatactagcttgaaatgtcatttaggacttgggagaaagcttggactgtgctatagagaaaaacaaatgaccaaagtgaacaaagagtcatttctacggcaaatttgggtgttgaagagtcaatatttgattcggtgagaatttaggtgtaaatccagattgaacaagtctaaatagaatgtatggactg

SEQ ID NO: 168850 - DNA, 443 bp, Glycine max
  unsure (1)..(443): unsure at all n locations
acattttactaacctcaagtcatggaagcttgggatcttaaccttgtggtctttgagcggcgctgagctggtgtctaatgcaaagagtcaaaagggatgcgcgagaaagtggaaggagaaatgaaagggatatcaaaggaggctagggattttaaagtacacatgatagtggccattctgtaatcagggggattaaaacaacggcatttttacatataaaaccattgtcattntttcgttcctcctaattacactgtagtacattctaagacgattctgtaaaatcgtcttagaatgtgcgccataaaaaaattcattctccttaattacaaaattgtcaccatgtgacattctaagatggttacgtataatcgtcttagaatgtacatcgtaaaaaagtaattntttagtagtgatatatgtgcgcgcacgtgctctatgtc

SEQ ID NO: 168851 - DNA, 417 bp, Glycine max
  unsure (1)..(417): unsure at all n locations
agctntntggagtagaaacatgggaccaactctttttatttcaaaaaaaaaaaaagaaatcatatctagtcaaggtctgagagaccatacaagtttcctaacgatttctaattatgcgggccattaagtctatcatatgctgacaatagccgagaagcccatgaatctcttcgggggcggagtaggtgtctgccatcgccttggccttggctaacaatcggggaagttcttgactcccgttcaaggtaagagcaaaccgatccatccacatggttgcctcttggtgtaaagagtcgatcacccttcctctagcctctttttccgcatatacttgggcatactcatccgcgattctatgctcgtgggccgtggctagacccaactcttcttggtacttggcgatgatagctaacatgt

SEQ ID NO: 168852 - DNA, 361 bp, Glycine max
  unsure (1)..(361): unsure at all n locations
tactaagctgtcatgtgtgttaagtgtcacaggcagcctcgcaagcttggtcgtacctccttcactctgaccgttatgcggtaagtaccaatattgttttcaactgccattgtttgttgttcgtgttgtcctcgataaactacgtttcattcatgcatgtcntggtgttatgatattatcaaattgtgacatctggaagttgtgtttngttacatccttaattaacttagttgtaaggagaaaatccttttcatcgtttccaagcttagtgaaaaaaatggtccgtcttgtatggcggcagtaaatcttttaatctccctctggcactggtatgtggattgtggagcatcattcctagttt

SEQ ID NO: 168853 - DNA, 344 bp, Glycine max
accgccgcgacatatacacaggcaccactctatggtcaacaaacataagtcggaagactgactcttccatgctctctcacatcaaacttagtggattatggggcacccatcatatggggcactatgtggagatagggcgatggcgcaaataaactctcccacttccacaagtcaaacataaacacaccatccccagttgaccacctttcgactgagctcacgcactcctacgtggcccttatcctcgtacctctcagcaccgagtccccatcgacccctccaagccttcacaatatccaagcaattcatattccaaatatcatggactaccctatccccacaaa

SEQ ID NO: 168854 - DNA, 228 bp, Glycine max
cgaggtacttacccgttgaagatcgaagaacgatgaatttcttttgaagaacgttcaagaacgggtgaaatctttgcgaaattcctcacggaaaacgtttcggaaacgctttggaagcgcctcggcttagattttcttcacggatacacatgtttcacagccaattcaaagagagagaaatgcctaaagggctggacgcccttctccttacttcctccccttttatag

SEQ ID NO: 168855 - DNA, 455 bp, Glycine max
  unsure (1)..(455): unsure at all n locations
ggcttctaatattggccacagcgtacttgtaagataatngatgatctctttcttagctttctagatactgcctactatcatgatccatttggagttctatagtgtcctctagaccttgcacaacatagataggtcaagtaagcacaaaatccgaaaattagctataattctcaattaagctcaatcatgtgcctaagaccaaaaatgagttaaggtgagacaataaggatcaaagagatgtctattgagataagaagaatagaaaaataataaactacaaatgctcaatcacacgtacgctgttttgtatnccaatgttccacttgccaacaaacgacatatgagacgaagaaacccattgcgttactccaaccattgttgataccatcaaaggtgtggcaagaattgtcccttaatctcatcatanggctgccatcatcacacgaatttactac

SEQ ID NO: 168856 - DNA, 467 bp, Glycine max
  unsure (1)..(467): unsure at all n locations
agcttcctcggggccattcctgcgaaggcaatcttttggaaagttaattntaccagngggacactactcttaaagcaaaaatggcatataacctcctcccataaatacaaacatcaatgtaaatttagagcaagcttatgcgcatatttccttacgaacgttctcttgcacaagacattctattaactaagaaaaatgcacccatatacaatcaaggcagcttcgttacctagattatttacacgtacttccaaggtgtatttgttacttacatcacacacatctccttggctaaatttacatacatgcatactcaaagcattttggggtaccaaaaattgcacatgtgcacatcttggtatttctaatacctatacatacacaaacttcatgatgaatcttgactatctacacaataaggtgctacatttcatgctcttttcaagttttgctacctaaagccgcat

SEQ ID NO: 168857 - DNA, 424 bp, Glycine max
  unsure (1)..(424): unsure at all n locations
ntacagcagattntagtaatggcccactaacctagaattaatataacttaatgtcattaacctacggaattaaaaaaaaaacttaatggctgagtctaactgaaattgtggcaaccaaaagtcacccccaacagccaacaagtcagccaccatttggtctcccaaaaggctgatgcctaggttgccaattgggcccttattacatcttgaactaaacctactaaagcccttttagttgattaacccaaaacatatttttggtcagccaactttacaaggattgggccattatgtagaaaaactaaacactctaaaattgagacaaagtggtccatttagtcctcctccatttgggccatgatgcaactcacaaccttggacttttctcctcgatacttgngcttgtattcaaatagtatggaca

SEQ ID NO: 168858 - DNA, 258 bp, Glycine max
cagcaagaaaaaaagttaactccttcttgccaaacccatccctacttgccacacttcttctcatccacatcaccctaaaggaagcctttatgtcaatcacaggtaaccccattggggagttgaaggccactctgaatgaaccctctcaaatcaattaagcaaaaggctcataatctcatgacgtctctgtatatggatgacaccaatgtattaaggaatgatgaaaaatacattttaaaactgggaagggtcaaaaaa

SEQ ID NO: 168859 - DNA, 231 bp, Glycine max
  unsure (1)..(231): unsure at all n locations
tctacatcctgtattccattgatcccagcatctttcgaattgtttngccccaataatgcaactgaaggaagtgtgtattgcaggtaactaagaaattcaaaagattgccaaaaatctaagaatagtatgcatgcaacttgcacaacttagaacctgctgaggtcatctgatattggagggaagtagtaaagcagcctctgaatcaagaggagcaggttttctgttgcgtgc

SEQ ID NO: 168860 - DNA, 321 bp, Glycine max
  unsure (1)..(321): unsure at all n locations
ctctatgtgaaatgagagaatctactattacatctctagaaangcagaacaagagggagtggaacgaattaatcgattaccacgcttgataatcgatcaaatcaaccttatctgttaaaagtataaatacccgcacttgtgctttatcattagggactgtagattcaaccttatctgttagaaaaacactttctaggagccatctaaggtagcgactttaaattgcaacaagagattcatgttgatcaagatgcattaatgcttcatcatgcgtcaataatcaaaggaagagcttgaagacgttgtgatatgcacaacaag

SEQ ID NO: 168861 - DNA, 261 bp, Glycine max
taagccaaacagaaagcccaaacaaagagagatctaggaccttcgcgcgaacaaaggacaaccagctaggccaaaacaaaagaaaaaacaaaacctgagaaaagaaccccacgaaaacaaaagaacccacaaaagagaagtccaagaaggagatacccacacaaatgctcaaccaacaaggagagggaaacccctaaaccaaaactaaaaaccaaaataacaagttacaaccgcggaaaacaaggtcacatcagcaaacac

SEQ ID NO: 168862 - DNA, 474 bp, Glycine max
  unsure (1)..(474): unsure at all n locations
agcttctanagataagaaaatgcagagaataaatcctgttcattgttgaggatctggaagataaaaaattgtccaatcttctttctccataacgacactttctcaaaactagcaggattggttgttgaacaatgccacaagttgaaacatttttctgtatctgcatttaatgatcttcccaacatggaggttttgatcgtaaacggagtcattgaactagaagatcttattggaagtgaacaagtaaaaggtgatcatataggaaaggccaaagttgagcttccaaaactgaaacttttaatatttaggaaaatttgcacttttggtcccccactttatctccaatttcgcatttgatcccccgataatttaattcacgaattngatctcccttgtttataaaatcctgcaatgttggtcccggacacctcaattatacgttgaccgttaactcagacgttgactgcgcatgta

SEQ ID NO: 168863 - DNA, 385 bp, Glycine max
ccttagataacatactgtggaaagggtgggactggaacgactcacaacggcttacttgatgagagagacatgatagatcggacgaacttactgtgagatgggagatcccacttattagcttctacacccacctagtttaacacttggaaaggaccatataaccgacgggagagtttatcattaatcctcttgaccaaagatcttctgttgtcaagttgcgtctcgagaacacccaatcactgactgcatattctatgtcccgacggcgtttgttgactttagctcacatgatatctcgagacttcaacagactttgtcttagagtaaccaatatttcattccgagcagatgttactgattgacttcttcaaagcaggaaggaatg

SEQ ID NO: 168864 - DNA, 395 bp, Glycine max
  unsure (1)..(395): unsure at all n locations
agctntagttggttgaaatttttattttaattttatttaaaagagtaaaatntatagtattcttattgtgttccatcttgtgcttgaaaccattgcttagaaaagataaaatctcactttgaatgccacctggatatataagatttttagaggaaatttatgaatggacatttttgaaagtaaaacatggattaagtcacaagaatagaacttgatacgtattcactaatacaaatataaattaataaataaatagatgacaaagtagataatcaatgatatatatatactcagaaactaattttatcacaaaaaattataccatgtataaacacacacacatacacttcaagaacttataaacangaatacatgtttattataaagaaattttc

SEQ ID NO: 168865 - DNA, 413 bp, Glycine max
  unsure (1)..(413): unsure at all n locations
tgccacccagctcgcccaggcgagctaggatgcttcctccagaagcaaccgccttctggaggaattttctggaaggcccaagtgggcctggttgctatttgcacccccattattactaaatacaccctcttgctctttgttggtgattatttttccgtaacgttacgaaactttacgaaatttgtaacgatgcttgttttctttttgtaatgttacgaaaccttacggattacgtaattatccctttttttgccttccggaacattacggaactttacagattgtgcactaacatttccttttaattttcggcatgtcacggaacttcacggattgtgctacaatgctttcttttgacttccggcatgccacggaacttcacgaatntgctaacgatgggtgccaagtatctc

SEQ ID NO: 168866 - DNA, 451 bp, Glycine max
  unsure (1)..(451): unsure at all n locations
agctngcttctacattattgatatagtnttccttctttttattgncatctaaggctcggcgatttcttttataataaacttacccttgcaattttgtactgtgtggttggtacctgtgatgattacgaaactttgttcgtgggagcatatgagcaacagtaaatgatgtgaagggagattcttttgtgggaaccatcaagccgatgtgatgacattgagattattttgggagggagttatgttttgttatcaactcctctatagttaattctttgattctattttgaattggacatgtaaatcacaagcttagatacatatataaattaaattactttctatcatgtggatgatgtatgatggntattatatatatatatatatatatatatgtacctatctatatatatatgtgcattgcatattgaatgtatatggcgagaaattactc

SEQ ID NO: 168867 - DNA, 444 bp, Glycine max
  unsure (1)..(444): unsure at all n locations
ccgagttccaaccaaggttgtcttaaagacaccttttgagttatttaagggttggaaaccaagtttgcgacatatacgcatttggggatgcccgtctgaagtaataatttataatccacaagagaagaaactagaccctaagactattactgcgtatttcattggatatgctgaaaggtctaaagggtataggttctattgtccatcccacaacactaggattgtggaatcaaggaatgcaaagtttcttgaaaatgacttgatcagtgggagtgatcaatntcagaacatttcttctgaaagggatcactatgaagctgaaccttctgggacaagtaataggttggtagtcattcccaccccttaagttaaaatgggtgttagacaaccagtgattgaacgttcacagctgttgaaagtgatatgtagaatcaagttgttgtg

SEQ ID NO: 168868 - DNA, 471 bp, Glycine max
  unsure (1)..(471): unsure at all n locations
agcttgtaggattatggggtacccattacatgtgttactaggtggcggncgggcgatggtgcacaacaagtttttttttttttcacatccacaatgcgcgcataaacccaccatcccctgtagcccacctccaactgagctcacgtactcccacgtagcccatatcctcgtttctctcaacaccgggtccccatcaatcctcccaagcttccccaacatcaaagtaatacaacattcacacagcacaagctatcacagccaagcaaaacagagcaaaggcagaaaactctgccaaaacaccaaccaaaaatcacagcttttcccactcaaagaccccagtaacaattccttcgatccaattcgttaaccgttggatcgactccaaaatnttactggaagtctacagtgcataagcctacattntgaccgttgggatctactagcaaacatccagaactcattctacattac

SEQ ID NO: 168869 - DNA, 145 bp, Glycine max
  unsure (1)..(145): unsure at all n locations
tatgtagcccaagacatctccatagaaggctgtggaggactcttcaataacatcaccgccaacaactatcttgccttcgctgaagaagaaatccctgccgaggggagagggcataacanggctttgcatgtgtcagtcaaatgca

SEQ ID NO: 168870 - DNA, 479 bp, Glycine max
  unsure (1)..(479): unsure at all n locations
gaccttaagtcaccgcggctgcaactggggattatatatccccaatgccttaatctagagngaaangccttaaacgagagagtgaaaaagggtgcctttgcttgtgtcgagaacgagagagctagctgctgcatcttacttcgtcttctttcattttctaaaaaacttgtaagttatatattgaatattttgtatgttttatttatgtagatgtttatattctgataatggaatagttttaggtactgtaacttaataattttgtatagtttagtttcagttcttaattttatatggtagattagatttagtttaaattttctatataatagattaggaatagttttaggtattgtaagttattaattttatatggtagaataggaatagtttaaacttttatatgttagaatacgtttagcttaaattctttataaagtaaattaggaaatagtttaggtaccgtaacttattaattt

SEQ ID NO: 168871 - DNA, 446 bp, Glycine max
  unsure (1)..(446): unsure at all n locations
tctctgccagagccagctcaaggagatagccctcatcatatgtacaccaaattcctaacaccctctgagcccaagatctcattcctcagctttgagatctcaaactctgacagcgacctgtggaggtgcacacgttttgacatcacatttgctacctcaaaagaaagaatacctatggtttctttagtatctgacctcttgtggctctgttttctctttgtcacagtttcaaaaacaagggcatgctcgagattggaacttacctggttacccatctntacaatccaagcttctgcaaccatagctgcagccacacacacactntcttcacaatggggtgtcccaaaaactctgatatttcaattctacaacccaaatgtgtacctgtggaacatatgaaaccaagtgaaatcagacacccaatagatggctttggagggaattga

SEQ ID NO: 168872 - DNA, 419 bp, Glycine max
  unsure (1)..(419): unsure at all n locations
agcttggtggactangttaattatactgagttatgatatcgaaacagaatggctctcaaaccatggctgtacgagcaaatgaaagaaatggcctataggaaaactaatattaaataaaataaacagttaatcaaaatcaaacaaaatatgactttggctataaaagcttggtggacttggttaattatactgagagaggagatcgaaaaagaatggctctcaaacaatggctgtacgagcaaatgaaagaaatggccttctctaccttttatctatctcttttcttcttcatcagcgtcctctacttgtttaacctcacaagaaaaaccaaatccaaaaccaatctgaaattgccaccatcaccaccaaaactaccactcataggcaatctttatcagttaggctcactaccacatcga

SEQ ID NO: 168873 - DNA, 332 bp, Glycine max
tgaagctgttagcatctattatgtattataataaccttacaactaaagaggattttgaatacatgaagagagataagaaagttccatttgaaattggttactttgaggtctttcataaaacccgactcaatctgttcactctaccaattagatagcgagatactatctcttcttatcttttatctttgaacccaaccaaacccataacataatttaattcattattatttaagagtcaattatttattacaaaacacatttatttctaccaccatagtctctaatctattaacataaactgttcacgattctctttgtttttaagtcgcttt

SEQ ID NO: 168874 - DNA, 298 bp, Glycine max
caaagttgatactccccccactggattctcattatgaaactcccccttggattttggtgcatgaggttgtggttcactaatgattttgcagtgctgaaactaattgtttctggtttaaagcccagctttgtcctgtgagcttgcctcatgtaatactgcataacaataattgcagtctatgcatcagccttcttgcttgtcggcctagtctcttgatttgaccttgctgacatgcatatgttggcttttgaaataaatataagtatttaactgaaaaaactagatgctataaaaaaaa

SEQ ID NO: 168875 - DNA, 347 bp, Glycine max
tgatctcctacggtcttctatatgccaacgaagttctggcccgtatggctgaaactgagtacgattacttgcccatgtagagttgacatcatgtcaatgtgaactccatcccatgtgattcacattgttggataattatagttctcataaacaaaattattcacactcacaaaaaattgtgcgaacacaataaatattatatcgcacaaagacctatatcagcacacataatttaacatcgctgacacctattatctatgttcacgaaacactttaaacggattattttctcagaaaaatgatctcatagggtgattacccccgcaaacgattatgctctacaccca

SEQ ID NO: 168876 - DNA, 249 bp, Glycine max
tagaggctggccaaccaatcaagactggacatctcttccaatcgcaacactgacttgctcccaacccagctataagccctacttatgtggcaggcggctccttcattcttgctcaaccagcttgacacttcttcttccgcaagctctttccatgccgctgaggggctataccaaaccatcttccacatttcctgggattataggctttatgccgcgagccttgcctaacccacccggtcaaaccgtccc

SEQ ID NO: 168877 - DNA, 398 bp, Glycine max
agcttgtcctcatcttattcagttgaccgtttcattttctattgtttcactttttttatttttctttttgtatgaattgcttgttatttttgaaaaagaatgccgggaaaaaaccaaaaagagaataggatacctcatattcacgtcgggtttttttggtacagatattcacgttggttagaatagttatagctattttgttaaaataagtttaaatgtataattagttatttgaaaaaataaatattaacggtttcaaaaaaatgtagttttttttagtgaagaattgtttagttggtatttcatgtgttaactttgcaatgggttgctgacactacatagtgtttatgacttgcgatagtggtgtaacctaaccgattggaggatgtcgattagat

SEQ ID NO: 168878 - DNA, 409 bp, Glycine max
agcttagcttcgaaccaaaaaaacaacacatttctattttgtgaggatgaaaaacatactgaaaattttgcaaggataaattccaaacattttgatatttataagaacaaaaaatatattttagccttgtttttattgttaaaaaaaaagagaaatgctactaacatactctttaacacactccttcatacacactttctcttatgtgttaaaatgtatttagttgaagaacaagttccacaaaatcttgaacctaccaagtgtgatggttgggattggtatgagtgggatcatttgccacaccctttggttgggcctcttgagaaaatggtcaaaggagctttcgacccatttccaatttgattctggtaattggtaatgatttttttgtgaggattcttggataatc

SEQ ID NO: 168879 - DNA, 336 bp, Glycine max
tgagcctcttactttacgagatcatctctcaaatattatggaagtgtgtctggctctaactacttcttcaccttcaagcagcatcttttggattataatgattgacctgatcttaccgctgaacatccagatatgtggattgaatatctgggaccattcctgaacttatttcattctacttaaccaccggtgcttgtacctccaaagtaaaaaactcactatcttcttagtggggtagatcatttttacatgtgaatggatagtggatctcctttttctaacacactttatttctattgttagcacatatatggggtcttttacgtgggagagaaa

SEQ ID NO: 168880 - DNA, 365 bp, Glycine max
  unsure (1)..(365): unsure at all n locations
agcacgaaattgaaggaataaaagagggaaagaagtggaactntgaagtgtatctcataagactttcattcattcaaagttacaacaagtgttacacatgcttctatttatagactaggtagctttcctgagaagctttcttaagaaaacttccttgagaagcttctttgagaaaacttccttgagaagctagagtttagctacacacacccatctaaaaactaagctcacctccttgagaagcttccttgagaggctagagcttagctacacacccctataatagctaagctcacccccatgacaaaaaaacatgaaaatacaaataaaatcctactacaaagactactcaaaatgtcctgaaa

SEQ ID NO: 168881 - DNA, 455 bp, Glycine max
  unsure (1)..(455): unsure at all n locations
cttcttagtctcngttgatgaagatgaatttgttgctactttatgcactcctntaatgacaatagcatcacttctggcactaaattgatgggagtttgaagccatcttctcaattaaatctctggcttcaccacgggtcatgtttccaacggctctaccactggcagcatctatcatacttctctccatgttactgagtccttcataaaaatattggaggagaagctgctcacaaatctggcggtgaggacaattcggccatagtttcttaaatctctcccactattcatataagctctctccactgagttgtctaatgcccgaaatattctctctgatggtcgcggtctcggaagcacggaaaatttnnttttaaaatactctcttgagatactcccacctcgtgatacaccttggaccacagtatatactcaatcctctgcactcctctaaaa

SEQ ID NO: 168882 - DNA, 408 bp, Glycine max
gctttttgaaaacaaaacttgccactgtgttttgtatttagtaaactgcgaattgattaccagagagtaaaaactctttggtaaaaacttttgtgaaaacttcatgtgctactcaatgttttgaaaaacttttttgtactaatcttgattgagcctttccttgattcttgaatcttgagtcttgaatcttgatattgattattcttgattcttgattcttgaaaacttgaaacttgaaacttctcttgaatctttctcttgattcttgaattgtccttgactaaatcttgaaatcattctcatgggcttttggtcatcatctttgatatcatcaaaacaccttgaatcaatcttgattcatcatcatgaatcaatcttgactcatcatcatgaagcaatgaagcttgc

SEQ ID NO: 168883 - DNA, 461 bp, Glycine max
  unsure (1)..(461): unsure at all n locations
ccgctcgcacccagcttgccaagcgagctggtgcttacttatatatttnctgagggcacccccaagattgatcagttcacccccctccccttttttcatctccttatgaaacgtcatgaaactttatgcgattgtgtggcaatgaaattccaatttggctagcaaaagttccacatgttgacaaacaaattgtcccggacgaaattacggtatgacaaaaatgctcaaaattgtacacgaaagcccctcgcaatatcaaacaacaataacttaatgtctgattgcggacaataatatattgagacactcgaaattgaacacgacagttcttggaaaactcaacaagcgatatactttgactctgatgcttgaatgccgagcataatatatcgagaccctcgaaactgatatagaagctccaagcaattccactctcgaatactcttgacctgaatatctga

SEQ ID NO: 168884 - DNA, 411 bp, Glycine max
agcttttacttttgatttcttgggtgtgaaacttaccaacacgtaagggaagtaattcccttataaatgcacctagacatgagaatatgcccttaagatagctggcagaggaggggttagtcttgactcaagctgtcactagaaaatcttgcagaacaaaaaaggagaaagacatcctttagaatggaaatgtgatttaatagaattttcttggcaggaactttttctgatcagctattgatctatctatcacctatttatggccaaatgacttaaatgagcttgtagaacatgaagtaatttgatgggccatgaagcacatgaaatgtttttattcacacatggatagaacaaaatggagcatcttgtgctattccgttttggtttcacccttttagtggaactaaaata

SEQ ID NO: 168885 - DNA, 327 bp, Glycine max
tcttgcgtagtcgctcttggtgctcagaacatcccatttacaaatccctcttattactagctatcttgaattctttatgtcctgaatgtacaactttcaaattgctggtcgttcccctctctgttttatgcaaaaactgaaatcaatatcaaacaaaacatgcatacaatcgtcatcgctattgttacttgaaccataaggaataacatctaaagaagcactttaaaacatttatttattttttttggcattttttgaattacaactctacttcaatatctaattttttaatgtacttacgtggacgatgttgacgaaaacaacgac

SEQ ID NO: 168886 - DNA, 180 bp, Glycine max
tgacgaaaaacaaaagtgccagaaacaataaagctaacgaggaacaacacaaccacgactaattggagcaaatcgagatatcacaccacgactgatgtgctcacacagaagggaagaactgaagctgaccaataatctgaacaccagatacctctcacaccaaacatcaccgaaaaacca

SEQ ID NO: 168887 - DNA, 399 bp, Glycine max
agcttattcacaaatggtggatcggtttcttttatctagatagaggatcgataaacaaaactatggagattagtgtatcttataattacctcaacagtggccatttggaatgcaaagagggaaagtaataataggatgaagtatgaactctaaaggaaagcttataataaaagagagtggttgtgagttgatcgaagtaagagaggtttaaatatatagttgtagagtcttcaacactaataccttcctaaagagtgtgaggaatggccacttccaagaatcttgtttaagcagacaactcatgccactatataccaaaaaattaaatattataataacagagatcaccatttccagtggtaaatgaatttttgttccctttatttatttttcaaaaat

SEQ ID NO: 168888 - DNA, 348 bp, Glycine max
  unsure (1)..(348): unsure at all n locations
agcttaagctagcttaaggttcatcaataatataaattattagtttntattaaacaaaaatgtcacatatattaataaaaaaagtgcatattttagcaaaagattcactatataactctctcgtttaaagctaaaagaatctctgaaaatttattttaggtctcactcattgttgagtcggtcttgtctttcggtctcaaatatgagaaaaaaaaggaataaaacatgttttaggttctcgataaattaacgacatttattttgggttcctactaagttgcatttcttaagaaattaaagttaattggttaggatcatttacttgtgtcaatttcatttaaaatataa

SEQ ID NO: 168889 - DNA, 362 bp, Glycine max
  unsure (1)..(362): unsure at all n locations
catcgacatatgtacgaaagttattccctttacatcngttgtgaanaagcggngccagcatctcttgggccactcattcacaatcatcactgaccacatgagccttaaggaattgttgactcacgtcatccaaactccccaacaacatatgtatttggcctgctcgatggggtatgactaccagattcaatacacgtctgggaatcataataaggccactgatgctctatccaggctaccggaaaccacatcctcactcttgatgatactctcagttccttgtctgacctttctcgaggaattacaccaacaatcggcctctccatctcaatatcacagtcagcgtcaagctatcctagatt

SEQ ID NO: 168890 - DNA, 257 bp, Glycine max
  unsure (1)..(257): unsure at all n locations
ggttaatccgaaccgttcatcgatggtcggcaagtatgatggtcttaatgatgatcctacacgtatttcgtgtgtatctcacaggcggntttaaaaaacctcgcgaattaacttggggtacgggtgtaattttggctgtattgactgcatcttttggtgtaaccggttattccttaccttgggatcaaattggttattgggcagtcaaaattgtaacaggcgtacccgacgctattcctgctactggatcgtctctg

SEQ ID NO: 168891 - DNA, 356 bp, Glycine max
ttcagccccttaggcacttctctctctctcgaaataactgaggaaaattagttccgcgaagaaaatccaagccgttcttcaagattctcgaccgttcttcaagattcatcgttcgttcttcggtttcttcagtcttcaacgggtaagtacctcaaaccgagcttttcaattcattctatgtacccgtggtggtccacattttgtttcatgtattttttttctcgttttcatttactttttatacccccttttgacgtgcttaagccatttatttaagtcatttctcgcttaatctaaaaataaaataaatttccaccaatcgtttgaattgcatcatccgttaattttggttaaaa

SEQ ID NO: 168892 - DNA, 446 bp, Glycine max
  unsure (1)..(446): unsure at all n locations
gcagatctggtatttgcgggcgaaaggatcgaagttgtcctaatatagggaaaattcgattacaccgcatcaacaagtgctgacaataggaggactggaacaggtggggcaaagaaaaaggagggagatgcccatgccgtaaccacagcacccacacaaccaaattcccaacaaacccctcaatatcccatgtaccaatatccttcacaccaacataattactcggccaacatcgggtctcccccccgcccgacgcctgtccgaacaagcatgcccaatgaatcacaaagacctccttaacacaacccacaaaatccattccncacaactcccagaccaaatgtaaatcccaaccctaatacaaacaccaacctaaggaggaacttcctagaaagaaaacccccagagttcaccctaataccaatgccaatgccatatgctgacct

SEQ ID NO: 168893 - DNA, 413 bp, Glycine max
  unsure (1)..(413): unsure at all n locations
agctcgngactcttgacaatttcataaaactatttttttttaaagttgcgacttttgaaaaaatcttcataaataagtcacttgaagaattgtgacttttggaaatatatttttcgaaattagtcactggtaatcgattaccattaaggtgtaatcgattacacatcaacagatgcaactcttcatttttgaatttgaaaattaaaatgtttagaagctctggtaatcgattacaagtattttgtaatcgattacacaagtttaaaatactttaaaactgtttaaacataagttataactcttgaaatttgaaatattaccgttttaagacactggtaatcgattactgccttctggtaatcgattaccagagagtataactctttggtaatgattctgtgacaacttcttat

SEQ ID NO: 168894 - DNA, 351 bp, Glycine max
atgatgacaactttgaattctatatacacatacacacactttttgctagttgatctgtcactcaatctttccatattcctcccctttgactctgagtctatgcttcacttgaaactaagctaattacttatgtgagtccttgaattaatccctatttctctccccccccccccctttggcatcaacaaaaagccacagtgcgtaacaagagaaaaacatacatccactactaactctacacaagacattccttagagagtataaacccatcatgaagcaagaaacatcgacataatccgatatactaaacccccatctcctatgacatattcattatttctcaatcccccc

SEQ ID NO: 168895 - DNA, 409 bp, Glycine max
  unsure (1)..(409): unsure at all n locations
agcttgttgggttcaacttcaatatttcgctctgtgcatcctatggactgagcgaaaaggctcatgtcatcaaatactacacatcttttaaagcacaaagcgaggatcggaacctcaaccctacgttcttttgaaagactacgatgagaaaattacagaggacatgaatccctgggggaaaccctgaagaacacacaaaaataaaaacaagcaacgacttccttaattgccccagatcttaagcgtagtatcgcttgacaacgtcggagttcacgggtgagggtagctcctcgacatccatgttggcgagcaccagggtcccttcggagaaatccctttntacaacgaaaggcccttcgtagttcggggcccactttcctctattgtctttcagagctggggagacttt

SEQ ID NO: 168896 - DNA, 371 bp, Glycine max
cattattgcaacaacatagttaaaaccaaaacttaatacgcacatccctcttgtaagactaagttttgatcctacttcaatcaagttctaaggcgacagtacatttcccaatgctaaagtcacctaactatgcacacaaatggatgatcagaccaaaagcatacaaacattaagcattgaaggaagcattgaacacagaaaacataatcaattagatattaagtatctacatcaactgttcattagaaatcccctaactagggtgtttagccagccattacaaaagaaaccctaacaataataagctcacaaaacccaggctcctctacaaaagttgctcctcttgctcgctcaaaagctctttttctaaa

SEQ ID NO: 168897 - DNA, 406 bp, Glycine max
agcttggtgggtatcacttccaattattttttgtttatcctatggactgagcgaaaaggctcaggtcatcaaatactacccatcttttaaagcacaaagcgaggatcggaacctcaaccctacgttcttttgaaagactacgatgagaaaattacagaggacatgaatccctgcgggaaaccttgaagacacacaataataaaaacaagccgcgacttccttaattgccccagatcttaagcgtagaatcgcttgacaacgtcggagttcacgggtgagggtagctcctcgacatccatgttggcgagcaccagggtccctccggagatatccacttttacaacgaaaggcctctcgtagttcggggcccactttcctctataggctttcagagctcgcgagactt

SEQ ID NO: 168898 - DNA, 412 bp, Glycine max
  unsure (1)..(412): unsure at all n locations
agcttgtagattaattggcatacgattttattttctactgaggtcgcgagtatccaaattcatctcctattgattttgagtatagtcccagtacttaaatcttaataatatatnttaaaacataatattcatatttcatctctttaaagttagaagtaatatttaaaattaatagatagagcagttatgtatgtgtgtgtttgtttcatgagattagtgtgttatttatccaacattttaatctcttcgatgtttctaaatcataattaattgtctcaactgcatggatgtacttaaaaaacatatttgcttataattataaatatcaaacaatcattaaacaatatataaattgaggaattaaaacacatttatgaaaggccttttaattaacatacttggctaaattaaa

SEQ ID NO: 168899 - DNA, 376 bp, Glycine max
  unsure (1)..(376): unsure at all n locations
ngagatgaggaagtgntgaacggtgaaactttctgcttttattgttgaccacagagtggtacctggagatatgtcgcggnggtcacgagaccttggggacgtcaggcggggtgctattgcccacaaccaatcttgaccaatcccgacccaacccgggcatactcggtcagtgagaacctgtgatgcacctaaacaggcgagctcctggcagtcaacagatcaaaggaaaacaagaccacacaccaacgaggcttgtggtggctggccagctgtgaatttcgtcgaatatgtcggatggtggcctctggtaatccattaccaacggtcggtaaccgattacaagctcaaatcgatgaaggacgctaatatggtcctc

SEQ ID NO: 168900 - DNA, 403 bp, Glycine max
agctctttggagtagaaacacgggactaatttattttatttcaaaaagaaagtcgtatctagtcaaggtctgagagaccatacaagtttcctaacgatttctaattatgcgggccattaaatctatcatgtgctgacaatagccgagaagcccatgaatctcttcgggggcggagtatgtgtctgccatcgccttggccttggctaacaagcggggaagttcttgactctcgttcaaggtaagagcaaaccgatccatccacatggttgcctcttggtgtaaagagtcgatcacccttcctctagcctctttttccgcgtatacttgagcatactcgtccacgattctatgctcgtgggccatggctagacctaactcttcttggaacttggcgatgatagct

SEQ ID NO: 168901 - DNA, 419 bp, Glycine max
  unsure (1)..(419): unsure at all n locations
acctgaggcatgcaagcttaaagtatgcccgagttatttttctttatatagcngctgaagaatcggcgatcagaatttccattccttggattaccgggttgaaccaagctcaagcttttacaaaaaggttcatcaagtctagttgaaatatggaagtaaccatcctgcaaaattggggcaaaagatgaatccagtcacatcactgcttcgtctactgccaaacatatttaggattattgatgtccttgttacttccagtttcaccttgacaaagatgtcatggaccatgttgaaaatctaaattgattcaaccccatatcctgcgtaaaaattcgcaatacttcgactgtacatcattcgcatgcatccatgctnttcattggttgcattgctcattgcattctttccttgaaaaataa

SEQ ID NO: 168902 - DNA, 413 bp, Glycine max
  unsure (1)..(413): unsure at all n locations
gatcctccgaggcacctgcggcatcaagcttgtaaacctgggaagtatttttgtttatctccnnccaacactatataccttttcgagcgcccattgatctgctatccatgcatttcaatatgtgatggtgtactccaacactcttgtctaatggacgccatgaatgtaggaacaattagtcgctcgttttcttcaaccattgcaaggatattttttcctatgaccgtggaacctatcttattatgatcttgcgaaatggtaggcatgacgcatgtgccaagactgtcaatcattctaattacccaaacttttaaatcctttcgttcaaacgttctaagttttcactggcacccctcaactcggcaacataagacccatgtatccttcgtacacctcttgtattcgaaagtgac

SEQ ID NO: 168903 - DNA, 381 bp, Glycine max
ctgcagctttactcgagattgattaggctcttttttttttttacgctcgaaaatgaacaaccgaagctctcgagaaattccaatggttattacctttaactcggaggtctgatttaggcgcataatatatcaagacgctcgaaattgaacaacggaagctctctagaaatccaaaaggtcataactttccactctgaggttcgattcaagtgcatgatatattcagacgctcgaaattgaacaatagaagctctcgagaaattcaaatggccataacctttaactcggaggtcccactcaggcgcataatatatccagacgctccaacattaaccttggaagctcttggccattccaatggtcataactcttaacccggac

SEQ ID NO: 168904 - DNA, 186 bp, Glycine max
ccaccgccacaaaccaagctggaccaatcccgacccaacccgggcatagtccggcagtgagaacctgtgatgcacctaagcaggccagctcctggcagccaacagataaaaggaaaacaagaccacacagcaaggaggcttgcggcggctcggccactgcgaattccgcgtaatatgcggatggcg

SEQ ID NO: 168905 - DNA, 409 bp, Glycine max
  unsure (1)..(409): unsure at all n locations
agcttctcgatatattataagcctgaaacggtanctattgtgaaaacttatgagcattttaatttctcgagagcttccgttgttcaatttcgagcgtctgcatatgtgatgcgcctgaatcggacatccgagtgaaaagttacgaccattcgaatttcatgagagctttcgttgttcaatttccagcgtctcgacatattatgcttccgaatcagacatccgtgtgaatagttatgaccatttgaatttctcgtgagcttgcgatgtctaatttcgcgcgtctagatatattataagcctgaatcggacctcagtttgaaaagttatgaccatcttaatttctcgagagcttccgtcgttcatttttaagcgtctctatatgagatgcgcctgaatcggacgtctgagt

SEQ ID NO: 168906 - DNA, 392 bp, Glycine max
tgagatgaggaagtgttgaagggtgaaacttcctgcctttactgttgaccacagagtggtacctggagatatgtcgcgggggtcatgagaccttggggacgtcaggtggggtgctattgcccaaaaccaagcttgaccaatcccgacccaacccgggcatagtcggtcagtgagaacctgtgatgtacctaaacaggcgagctcctggcagtcaacagataaaaggaaaacaagaccacatagcaaggaggcttgtggtggctggccacctgtgaattttgtgtaatatgtggatggcggcctctggtaatcgattaccaagggtgggtaatcgattaccaggcttaaaattgaggacaggaggctaagatggtctctggtaatctattacc

SEQ ID NO: 168907 - DNA, 411 bp, Glycine max
agcttgcttgggcgagctcactgctacaggtttatgttttagctcgtttggatgagctgcaactgccccaaagtgacccttttcctataaataggcgtcctaagggtgttttaaggggttctaagatttagaagtggaggaaattgaaagaactaataaagaagaagaagaaagaagaggaaacatagccgaggcgttactgaatcgcaattgtgatcattacctacgtcattttcttgttctgtgttcttcgtgcgaccgccggttagttttattttttgggattgaatgtgatctatgtacccttaggggtcccccttgatattatgtgcgcattcattttctccatctatactaccaatcttatttcttcttgtaatgttaatcctaaccgattcctactgttgcgaa

SEQ ID NO: 168908 - DNA, 319 bp, Glycine max
tagtcgaaggatgactgttatcttctctgactaatggaataggtgagaatactttacaactagaagagctaactgaagaggtggtagatgatgcaacggaaggggaattatgtaagataggtgaagctggttcagaaacagaattacgtgttgatgctgccagactgaatagtggaatcaaaaacagcaacctctgtaggaaaagattgacgtgacgcttgtggtgaggcaatacgattagtggctgggtaagaacaaacagaaggagcaacaatgcgttgctcacaaatagtacgtgggtctgcttcttataacacct

SEQ ID NO: 168909 - DNA, 416 bp, Glycine max
agcttgtgataaccattcctttcggtgaagccctcttatagatgcagatgtacaccaagtttgtgaaagacctcctaagaaaggaaatgatattaataatgaaaatattgtggtagaacaaaattgcagttatattatttagaaaattctaccacaaatattctaggatcttggaagtgtgactattccatgctccatcaggacggtgtctgtaggaaagactctcattgatttgggggcaagcattaacttgatgccaatatcgatgtgccgaaggattaggaatctgaagatagttcccaccaggataactttccaattagcatatcattctatcacaaagccatatggtgtggttgaagatgtccttggaaaggtcaagcaattcaccttcctgtagattttgtcatcatgga

SEQ ID NO: 168910 - DNA, 315 bp, Glycine max
aaagatcgatagatttctaaatctatcttgggttatttcaaattgaattaaagggttgtatatattgtaattcacatttgagaagataattgacttgattagatattctaggttttatctttgatttatttcaattttgatttaaaaattctataattggaattccttctatatgaataaaaagtttatgctctattgataaaattgagattggttctctttcattcttcgtgaataattcaacagccgccgaagcgcgttaaacaattaaagaaaaggcctagttcctcatgctctatcttccaatccgaaagt

SEQ ID NO: 168911 - DNA, 336 bp, Glycine max
ccaagatgggcggacttaaagctgacttctaccacttcattgccttgcttctttatcctcttcgtcgtcttaagaggtttcctaacatcaatgaaaactctgatgcgcaaatagggatgccatggattgttgctcttctcatcatactcaagatattcccctaggcagttgcctatgctttggccaattgtttgtgacataaactgtagaaccaaaatgactttggtgttttgatgatgatcatgatgatttgatgcaaatgatgcaaatgggcttttcaagtttaaatccaagacaatgattcaagaatacaagccacaacatccagatgatcac

SEQ ID NO: 168912 - DNA, 346 bp, Glycine max
ctagcttttcattggtgtattttgttctcctttcggcgctctaaaatgtgggaatgtgctcaaatatgtggggcaattctggtttgttttcttgcttgattgggctggattgcgggtttccaactcccctctctccctccacactccgcctctctctctctctacttcactcacatccactctctactacaccaccatcctcccctccctcctatccatctcctccctacacccccccccccactctccttctcttcacctcctctacccatacctacctcccctcctcaccctcactctcctccccctcccttcccccatctcctacttcccctctcccctcctc

SEQ ID NO: 168913 - DNA, 422 bp, Glycine max
tcttaaataatattaaactcaccgaaatatatataatattcattatcaacacaccccacgagatgcggatgttccactatgttgagaaactgatattgatttcataagagaaaatacaattggctcaaatgaatctcttagcactaatagatatttatagagcagagattctaactatgtaactaactgatagctgtactaactagaggttaactctaactagtagagttaacttacaaagaatacactcatacaataaacttttctacattaagaacaactgattcgtgtacgggagaaggtttcctaagttcaaacacacgagataaatacataagcaacacgtacgagtaacacacaacggaaaaagactgttaatcacatacagaactaaaattaaacattattactataattattac

SEQ ID NO: 168914 - DNA, 399 bp, Glycine max
agctcaacttactctggggcgtttcgttgatattgatcgccgccgagttatgctctattttaagttttcgtttcgctaatgtcatgcatatatttttgggattaaaattatttaaacgacaaactgctgatttgcgattttgcattgtaatattgtttctgctacatacattgctaataattatatgcctatgagaatgaatgagagagagcgacactgtgagagagagcgacacctaaagagagaaccaaacactgtgagagagcggaacatacgaagagagccaaacactgagagagtgcatgatgatgtgagtgagactgagtggatgaccgtgagacataggaagaataagaacctgccaccacgccgttatggaaggagtgggaccgccacgaa

SEQ ID NO: 168915 - DNA, 329 bp, Glycine max
actaagctaataccaccaccatctacacacggatgtttttatattaaatccgagacaagatgaacttcccatcatttatgaaccctatctactacccagcatcaacatgcgatgcagagacataaaaggacgcttgatgatctgtcaattgtatcatatcacgcgttatccgcacatcacatgaggatatacaaaagaatactcaatcaaacttttgtgtgaagctttggagcttgtccacaccataaaagatgtaccaatatatctttacgagaaaatatttcaggaaagcacatctccgactcataaacccacttaaaattcctata

SEQ ID NO: 168916 - DNA, 412 bp, Glycine max
agcttatctcgtgaaactaacttcccaaattgtttgtctttttaggaaatggccccaaggaagcttgcctcaaagagatccaggaaagacaaagcggctgaaggaaccagttccgctcccgaatatgacagtcatcactttaggagcgctgagcaccagcagcgcttcgaggccatcaaaggatggtcattcctccaggaaagacgcgtccagctcagggacgacgagtataccgacttccaggaagagatagttcaccggcggtgggcatcgttggttacccccatggccaagttcaacccagatatagtcctcgagttttatgccaatgcttggcctacgaaggagggtgtgcgagatatgtgatcttgggtgaggggtcagtggatccctttcgatgcggatgccctca

SEQ ID NO: 168917 - DNA, 294 bp, Glycine max
  unsure (1)..(294): unsure at all n locations
acactatagatactnccgctcgcctgtattgatgagaataataggcatacttgaacttcttggttagccttttcttctagaatgaatctaaccgagagggggaaaagctattcaaaggccatctcagatatagctctggccacaaccaccaacccgtaatgaagatatgcaggcacatcgcattctcttattattaaaatcgaactacgaaacccatatatatatatatgtgtgcgtgcgcgtgtgcgtgcgtgcgtgcgtgtctgtgtgtgtgcgcgcgtgtgtcgcgcgcgc

SEQ ID NO: 168918 - DNA, 403 bp, Glycine max
  unsure (1)..(403): unsure at all n locations
agcttctatttatggagntgttgcttgcagttttagnnatnnactagatatcgncatcccatttcaggctcatacttcttatccttgtggtgatccttattttggtagttcaatagttgcttatggaccacaggctattgtaagttttgtcaagtacatttttgtagtgcatggtcttcgtatttggatgagattttagtactctttcatttaatagaataataatttaatatgtcactgtctttttaaatttattagaatcaacaaatggtgccccagatgctgggattagcatccaccagaattgcattaccagttgatcttgcagaagatgggcccatttatgtcaatgccaaacaataccatggtatactgagaaggcgacagtcacgagcaaagcttg

SEQ ID NO: 168919 - DNA, 462 bp, Glycine max
  unsure (1)..(462): unsure at all n locations
ttataccctactcccatttagatttaataactcattactagaagcctaaacagaaaaaacaatctctcttttcacgtaatccacctaatacagatatccacgattcactcgatcaaacttcaaactttcgaagagcttgcgattctgtactaaatcccgaagcgtgtcattccttgacttggaaattgtcttgggtggccttgaggtatcaaactatctgagaactttgcttataaacactggcaatgaaatgtgcacatgtggctgccaaattgcgagataacatcaacaagacatgcataacctccaactgccataacctgaaacgaataatgcggtaatgcacccaatatatcaaataaagcacagagtaacaacgagtgcatcaccatgtctgagctgacctanacccaaggtactaacaacaactcaatagcaatgatcttgaatcagaacataccc

SEQ ID NO: 168920 - DNA, 415 bp, Glycine max
agcttctagccaaatggacttaccttgacttatttcctttgatagcccttttgagccttgtttccctttccttgttttgaagctcactacaagccttaagtgaaaaaccatgatatcaccatatccttaaggaattttggagctttggaattgttttaggaataagtgtgggggtttttgtttcattggataacatgttttgttggccatgcttcatgatatattttgagccatacttgatatacattgcatattggttaaatgttggacatgctgaatatgatgctgtttctcaaaaggctacagagcaaaaaaaaaaatcgaaaaagaaaaagaaagacagtaaagttgagtgaataaaacaagaatgatgagactcttggttctactctttatgttaaattttatctttact

SEQ ID NO: 168921 - DNA, 383 bp, Glycine max
agttaaaaactctctttaaatcagaaatgttttttctacttcaaaaccccttgaactacttcacattgatttatttggtccctctagaactatgagtttaggtggaaattactatgtctcggcaattgtggatgattactcaaggcttacttggaccttgttttcaaaaacaaaaaatcaagcttttgatgtttttcgcaaacttgccaaggtgatccaaaataaaaaaaaaggtctttacgttgtttcagttagaagtgatcatggagatgaatttaacaatgagtcttttgaaaacttctatgaagaaaatggaattcaccaccaatttttagccccaagaatacctcaacaaaatggtgttgtggagaggaaaaatagat

SEQ ID NO: 168922 - DNA, 413 bp, Glycine max
  unsure (1)..(413): unsure at all n locations
agcttccgntcccgagagcatctgttagtgttgtattttagcctttgctttcttgcagcttaagaaaaatgccatttcttcttctttctttcttccaaatccatttctaaagttccaagtactttctccatcacccacatccaccattagccaccacaaaccatcattgttctccattgaaaacccacaccgagaggaacccttcaaccgaagcagaatttccaacttggcttgcggtttcggtagagaacgaaaaccctaatctgatctttcgtttctttcgaggtaatcatggttctatgattggatcttgttagattcatcttgtctttgcatcttttctgactatggaaccgccattgcttgtcttatgctctctttgaaaaaccttaaagaaagagactttgtaaaca

SEQ ID NO: 168923 - DNA, 393 bp, Glycine max
  unsure (1)..(393): unsure at all n locations
gttgaagaggtttggccatgacaaattgtattatttctgcancccaaatgagaaaccggaaacattaaatttcgcctactacgaaatccaaaggggggaggtgcaaagtttacaaaaacaaaagcaaattcacaaacctaacataaaaagatcaatgattgaaacgaggggtttgtttcttaaaacgaaaaaaagaggctatgtctctgtctgggagcgaatcaaatgaaacaaagatgaagttgaaactagggttaggcttgatgttgctttgttttgtttgagtccaacacagaacgtctacttatactttctgtatacgcctacaatcgtcccttccacaataagcttgttgtgttcaacctttttcaaaactgaccctaaatgatattt

SEQ ID NO: 168924 - DNA, 344 bp, Glycine max
ctcaagctgtacgtgtatattttaatattgacgcctcttctgcaatggtcacagattgcattatgaggatatcattatttatagtcaaagttcattaatacaactttgacactagatctatgagatgtcagaacaacgttttttcatggtgatctcgaagaaggcatataatggagcgacttaaaggacttgctaatgacaataaaaggtctgacgatgtcatgacgatgatgggattcttgagacgcacctatcagaaatgtgtgtacatactaagaggagaagacaagtgtggcttaacacctactcttgtaagcggactacagcctaatagtcggtgctgg

SEQ ID NO: 168925 - DNA, 407 bp, Glycine max
agcttgtcataggtcaaaaagatgcttgtcctaactattgagcaagaccgaaggaaatatgtgggccatgatcgacgagtacaaagaaaagctagacctagcagcacccatgagcaaaagctagagcaagagtacaccaaggtattagtcttgcaagtggaaagggaagtaagggaaagggtgatcgattcattgcacaaagaagcaatgatgttgatggacagattcgcctttactttgaatgggagtcaagatcttccccgactactagccaaggccaaggcaatggcagatgtgtactcggcccccgaggaaattcacgggctcctcaattattgccaacacatgattgatctgatggcccatataattaggatccgctaaggcaattgtatcgtcgccttgat

SEQ ID NO: 168926 - DNA, 384 bp, Glycine max
tccatcccatatggtatcatttgttacgacataccctattcatgtctacaaacctacgcagcaagcgtcgaggtcagcttgctgtgcacaggcaacatcatctcatctcaaagtcattttcaacatcaacatcatctcatcttaatgacattatcatcattaacatcatcttatatcaatgacattgctaacatcaacatcatctgattccaatattatcatcaataataacaccacatcatataaacatcatcatcgattacaacatcctcagtaatcacaatccacaaatacatacatataaatctcatgcccaagattcacacttccgaagccttcacatacataagtctcaaataacaacaatccatactatcatgagac

SEQ ID NO: 168927 - DNA, 416 bp, Glycine max
agcttgtttgttggtgtgtattgcaaccacagtagatgaatgtctccgtagagaatgtagccaagattggagatgaggttgtctaagaaaaaaaaagttaaaaatcacaggtcacatcacatgacacatgaagtaaatggaattaacaaaagtgttagttttaaaaaaaaagtaaatactaagggagttttatataggatgtatcacgataggacgacaatataaaattaaatattttttttaaaatagaaaaatttggagaattgtcattaatgtttatttaagaaaaaaatatgaaaaaactaaaaaaaataaggaatgatctataatttgagaaaaaaaaaaagatttaggaatcatctacgtgcggaaaaaatattaacacctaacatgctcgtcatgaagacaacagtctt

SEQ ID NO: 168928 - DNA, 329 bp, Glycine max
catagaattaatctgcttgatctaatatgtttaaaacatactccatatgaaaagatccttcacgtgaatgtgcgatctcattactcacatttttttattcaaaagaagccttctatgaatactacgcttttcatgaaattacggctctatatccacttccatagtcattttttctgtggattctaaaacccatgcaaacccgctcttcctataatgtttaaataactgataagaccttcttaatgatccatagcaacatccatatgcctatcttttgagtggagaatctcgctacagaattgacaccacaaaaatcatcccaatttctt

SEQ ID NO: 168929 - DNA, 189 bp, Glycine max
aaaagagccacgacactccgggctggtagacccgcgacaaaccgaatacaagacccaggggggttcaagaacccaaagaacacgacgcaccgtcaatcagattgatacgtgcattgggaccgcgcctgaccatcaaaaacaggccaacataaatccgcgcccaacaaaaaattgacggctcgccaaccg

SEQ ID NO: 168930 - DNA, 234 bp, Glycine max
agcttcttagtttcagatgatgcatctaagtttgtagctaccttatgcactcctctaatgactatagcatcatttttggcactaaactgttgggagttggaagccatcttctcaattaaatttctggcttcagtaggagtcatgtctccaagggctccactactggcggcatctatcatacttctttccgattactgagtccttcataaaatactggaaagcccttggtttaaa

SEQ ID NO: 168931 - DNA, 474 bp, Glycine max
  unsure (1)..(474): unsure at all n locations
tggttgggcaaatattgcacanaagttcaatatatgcttctttattcgatatatgaatatacacaatttagaaatacgtgggattctttgaaaaaggaatgacaattatgggctaagcttattgggaaggacacacgtcttgtctgggatggggagaagaaaaccattgctgctagtgatgaatgctgggaagccaaaattcacgtatgtattattcaacgaaaatatagttcttgtggaggccagtcttttgttcttttgttttttatgtgcgattctgtttcaatgaaagaaggattaatagtttatcttggaattctgataaaaaaaatagataatcatgaaattgaacaatgtgttttaattacaaagattcttgatctatgacaaacaagattaattcttgattttacaatagaacaattacgcacatctatgttatgtaacacaccattctttacatcactctatatc

SEQ ID NO: 168932 - DNA, 412 bp, Glycine max
agcttgtatccatagaacatttgatgttttattattatgaataaataggagttaatatcattccaattgctgttacaaaagttattagtatttttgtgattaaaagatatttttggctagtaattattcccaataagactatcaattctgcaacaaaaccgctcatgcccggcaatgcaagagaagccatcgataagatagtgaaaaccgtgacatattttggcattgggatagccattccacccatttcgtcgagataaagaagacgtagtctatcataactcgttcccgccaagaaaaaaagcgcagcgccaataaatccgtgagatattatttgtaaaatagccccgttgagacctgtatcgcttatagaaccaattcctataagtaagaaacccatatgagatactga

SEQ ID NO: 168933 - DNA, 401 bp, Glycine max
  unsure (1)..(401): unsure at all n locations
ctntaatacaccaaatcgtcatagtgggattctgttcttccagaatcacttatttcaagctctatccttatacgcgtaataagtatcggcactcaccacatctatttctcattctcgctgacaccgtgaactattctatctaatttctatcacagctcccccaataactaacctaaaataaaaacacatctatgccaatacacaaacctatattccttcgatcaattacacccataaaaatgaatcgactctattgatctgctgcgtttagaacatctccccagttcacctcgactcccgccttccgtccctctccccgcgtcttactctccgatatgcctcctggaccctcactcacccctggctcgcgtctcgcccctcccctgcctcctctctctcca

SEQ ID NO: 168934 - DNA, 409 bp, Glycine max
agctttcagcaggaaagctaagtgtgaagtatgccattctgcacaggattggagctgcaaactgggttcccaccaatcatacttccactgttgccacaggtttgggtaaatttctgtatgctgttggaaccaaatccaaatttaattttggaaactatatctttgatcaaactgttaagcattcagaatcttttgctatcaaattacccattgccttccctactgtattgtgtggcattatgttgagtcagcatcccaatatgttaaactacactgactctgtgatgaagagagaatctcctctatccctgcattacaaactgtttgaagggacacatgtcccagacattgtctcgacatctgtctcgacatcagggaaagctgctgcttcaggtgctgtgtccaagga

SEQ ID NO: 168935 - DNA, 377 bp, Glycine max
aacttttaaatgcataaagtgatttctctatattatgttaccaccaacaaagaatgtagtagcaaaaactgaatccacatccactggaaaaataagagataatgtcatatctcatctattctgatcaacctgtgtcgaatatttggtcgtcacttctttctttttcccttcccctccgccctggagtaaagaattataatattacaacattttttcctacttgaaaatcaaataagatggataaaaattgagtgcgtaagttaactataaaaaaaagtatttaacaattcgcagttttgaaatcaaatcttataagaatgccaatcgtagtttgtggatcaaatttcataagaaaaaaatgctaacctttgtaatct

SEQ ID NO: 168936 - DNA, 382 bp, Glycine max
  unsure (1)..(382): unsure at all n locations
tactcacgcttcgtatacctgctctcaccaatccagacattatattatgttgccagcncctcgaccaccctatattctctgtcaatgcgatatcttctgctactctctcttgtggcgctcgacatatagctgtcgccacaaaccaatgcgcgaacgccccgtgctcctatgggcaattaatcttctctagtgatctctgtctggctactctataacttcagtgcacattcctctgtcgttgtgcacgcaccctgttcgttcaccaaagactgctcaagtcctaattcattgcacgacatacgtttcctcaccctaatgggcaaatcgtttctaccttgcgaaggtacatcgaacaccttctccacttcttccctcttctctt

SEQ ID NO: 168937 - DNA, 399 bp, Glycine max
agcttattcacgggcctaaacccatataactcatgctttcaagcccaatcccaacgcctcaatttcttcttctatgttttttttcttttaaataatcattttgtctcgtaacgtatattttgctgtatattttgctgacaaataatgtctgaaagataaaaatacaaaatttagttcttgaaagtataaaaaatgcaacaaatatattcgtccgttaacttccgtcgatcaccattaataaaagagcttacatgacacggagagacaaatttatcattgaaatgatggctaacgtaccatatttgttataatatttctttgactttttgtctttctatttcgctgacaaatgcatccctgaaaaatgaaaatgtaaaatttagtccccgaaattataaa

SEQ ID NO: 168938 - DNA, 430 bp, Glycine max
ggctggtatatccatacctgaaacttgtctatggctcacagcactggatccgatgacagtgtttgccaaagattcctcctcactactcaacaggagattgctatggctaattcatatcaatataactctccagataatcagtttttgtatttttcataccttcgcgacgaagaccaccaccaatatattgatgatgatgatgatgaacaaactgcatataaaagggtacttattttttgttatgcatgcgatcacctatgctaacggaatatttaattaatttcttccatatatgcaccttgcacatacaatcagttacactctcttttctatcataaatgtcacctgttagatattatcttgtaacttttattagtaaaaaataaaattcatgactctgtttttccttttaatcatccaaccgatctta

SEQ ID NO: 168939 - DNA, 407 bp, Glycine max
agcttttcaatttaatgaggttgaatgacaaacctacttggtaccaaaagcaagcaatatattgatgcaccttcaatacttcattcttatccattgactctgttatgttcgttcgcctcaacatctccatttttctccgattgattgcattttttggattcttacaaaatctgtccattggtccttttttagtcccacactttgtctttgtagtagcattacaagagtctgcaaactcatcttcacttccatcaaatccaattggttcaccaaattcaaaatctcttatatttgtcacattaccactacgagaactactataagtggtcccactttttttgttagccatatattccttaagctctttgactacatttggtggagttttctggcaagattcaacgtta

SEQ ID NO: 168940 - DNA, 414 bp, Glycine max
  unsure (1)..(414): unsure at all n locations
ctttattaatatatatgtgaggggtagagggtgtcacatataactaatcatcgatctcataaattactcttcaaattcctgacgcgcatttctgaaccatgatacttactgttccaaaagggctcatgttttacaacttgcattttagttttctaattttaggtttcgcgaaaggtaaaaaaaaattaaataaacaacgattgtgactaaaacgagagttgttacaacttcaaaattatttactatctcctaagagaaatgataaacaatgatcttcccaaatatcacagtttcctgagaattgttacttacttgagaaagtgtccatccttctagcctctgctctatgattgattgttntatcgaactctgtattccgaatttgctttgatgcgggaatgtctgaaaagaaaa

SEQ ID NO: 168941 - DNA, 401 bp, Glycine max
agcttatgtccccagagtttcaaccctctatatagcagctgatccaatttcttcccacaacctcgtcaaatcttgatgttttcagcaacatttcctgttactgtaaaggatttcaaggataggtatcttcaaaatctatagtggaaatatgaagagcttgacttgttgcctttgcttgtataaacttaaatagaaaaatattcttatttcctcattggtagcatttaagtatgactactggttattcttttcatggaacagaaattttttgaagcccgttgaacgcatgggatttgaggatctctctaaatatgggtcataacacatatcggaagatattctactgattatgtggggacttcagaattatccaaaaccttattaaatgtaaaccagacact

SEQ ID NO: 168942 - DNA, 398 bp, Glycine max
  unsure (1)..(398): unsure at all n locations
ctccgcttgctngcctctggtgggcaaaaggtgcagataaccatattgtatccctgtatgtcatcggctcactgtctctggatgacaaaaggtgcataatacgacgttagtctctgcgtgtcaacaggctcgcttgcccctggttgacaaaaggtgcagatgacgacgttagtctctgtgtgtcaacaggctcacttgcctctagttgacaaaaggtgcggataaccatatggtacacctgcatgtcatcggaatcgccgtctctggatgacaaaaggtgcgagactaaaaatagtctcggcgttctttcactaaaatgcgaacatgctttagtaaagaaacaaaaacttccaatcgatcagagaataatgtaatttggagaaaaacagatgtgtcta

SEQ ID NO: 168943 - DNA, 409 bp, Glycine max
  unsure (1)..(409): unsure at all n locations
agctncaccggatgatgccgatcgaacattttttattctacatcatccaattgttattcagggattgaataaaataaacaatggccggtgtcggtccttatatggcctcgactgatatttttcagccgacattgcgcaactttttttacaaatgctggccgataatgtcctttattacgatagaggaagttttttggtttggtgctgcctacaaaatttacaacgtaggtcggctaggtttttccgtgcgacctcaaccgagggttcgttccgaccgacactggcatgttgatcttttcatttaggaggcctagaaaacgttggcccaccccgcgcaaaacaaaaaaaaacattatccacggaaattgatctaaaaaaatgattgctgacgtctgcatggagagatgac

SEQ ID NO: 168944 - DNA, 392 bp, Glycine max
agcttaactatgagacgggcgtgtgtatcttatctctaacttcctaacgaagtcttctcaaagaagcttctcaacgaacttctctccagaaagctctctcaaggaagctacctattctataaatagaaccatgtgtaacacttgttgtaactctgatgaatgaaaggcttatgagatacacttcaaagttccacttccttccctcttttattccttcaatttcgagctcgcccactttttcttgttctttcttcattaaagcatcctcttcaagcttcttatccaaggcaattcttggtggtgaagctccttcttccttggcttattccctcagggatggcgcctccactatcctctcatccttcgcctttcgctggactctcatgatgaaa

SEQ ID NO: 168945 - DNA, 410 bp, Glycine max
  unsure (1)..(410): unsure at all n locations
agctngtggataggtaccttaggaggttgtcgtgttgttaatccgcctctctcaaaattcattgctattgttgaaactataccagattttgcaaggcatgatcatgatgatctgtacagagctattgacatttatctcaaggtaatgttttgattaacaaatttctatttattttcagaattacttcatgttgtacatggcaggaaaaaaaaaatggccaacaaagaggggttcctggggggctctggttgaagaacatgtttcaatggtgggacagaattggtggataaacaactcgaccttgaaatcttgtctcattcaacattttttcgtggcttaggtatattaggatgacccaccacatatttggtgtgaatgtggccactctctgactaacacttccagtttct

SEQ ID NO: 168946 - DNA, 390 bp, Glycine max
gaccttaaatctaagctgctctttattttcttaccttcgtgtcggagatttgttttgtgagaattgctcgttcgttgctgtgtcttctttggcggaggtgcattgtttacgatggctcgtgggcaagtgatgattgctgccgtggttggtatggccactaacagcggacgtaaagtgtctgatttggtttttttcgcgttataaccatggattgataatccgtaagtttgtatacaatttacgaattgataatccgtccgttgtatataacttacgaattgatcatccgtaagaaccttacggatcttccatctatcagtcccttctaaactaggtttaatattcttttattgacaatccatatgacttatatagattggtgatccatat

SEQ ID NO: 168947 - DNA, 406 bp, Glycine max
  unsure (1)..(406): unsure at all n locations
agctttaaaattngaattcaaacgcgcagaattctgtgttaatccaccaccatatatgcgtaatcgattacacagtgcaaattttgaattcaaattttaatacctgctgtaaatcagttttgcccactggtaatcgattacatcctctggtaatcgattaccagagagtaaattttgttgaaaaaaactttttaacttaaatttcttggccaaaccttttgctacttcaattggaattcccttcctatttaatataccctttctaagactctagagactgtcttgatcatccatcttgaatatctctaatttctttgtcttgaatcaagctttgagacgcacgtgaacctttggcatcatcaaaacattcagctagatcctttgatacatatatgtttttattctt

SEQ ID NO: 168948 - DNA, 415 bp, Glycine max
  unsure (1)..(415): unsure at all n locations
agcttgtanaatggctagacatgatacatgttatggtttggtttggttcaaggataaaagggatgccccacattatttccatgacacaaatgcaaaaatgatgatttggaaattttatgcaaaactggtcatgcatgcacctatgcggacactcaagtgtcaaatttttatggtcatgtgatgctagggctcaggattcatttcctctattttagatcaacccaatgtttccaaaatatgttcttttatacaattgtgcattcatccgagtccattttgggtactcgggaaaattttcacagcattcacccttcaggtgtgcacacatttttttttcaacaactagctatgatcagccaattttttcaaagaaaacgtggaagtcatctcttttcgaaagcatgttggtttttca

SEQ ID NO: 168949 - DNA, 507 bp, Glycine max
  unsure (1)..(507): unsure at all n locations
taattattannnnnaagccccggtatcgtgcatcaggaccttaaatactaagcttgctttaaggtcctaccttttcttcgcacttctcctatagggctctaaaacctaacctaaataaatccttaacatagaaaattctaaagctaaaaccctaacctaaacaacaatgcaagctaacaaagcaagaaatcgtctatcctgaggttcaaaacatgaaaatgaagcactacttactcggattatgttggaatgtaagaagaagcaaggaagtacgaataacttgaagcaaaggcagcaaaatgcacaaaagcactaatgtgggcacaaacaaaaggcgagtaaaggtaactgcctatggcagtcctattttattctagaatattcatttggcccacttagcgcataattgcgcttagcgtgtcaacatgatgtttgagcttaaacgccatgcgcttagcctaacctcgtgcttaggctaactcgaagtttaaatttcaaaaagatctg

SEQ ID NO: 168950 - DNA, 407 bp, Glycine max
agctttaatgggttctctctcgttttttactaactgcagcaacagttgcaacccaactattcgatagtgatgacaatagaatcaatgccttcacctcatcctcaaatttgatcttgcaccgacttcaactgggcaagaatagtattaaattcattaatatgattagttatagagatacctttctcccatcttaagggtgaacaaccgacgcatcaagtatactttgttggctatcgacggcttctcgtacatatctgataacgccttcattaagcttgcaatagtcttctcgtttatgatgttgaatgcaccgttcttggctaatgtaaatttgatcacaccaagagcttgtcgatctagcaagttccactcttcttgcttcatgccgtctggcttaacccctgata

SEQ ID NO: 168951 - DNA, 306 bp, Glycine max
tttgagagaccatacaacttacctaacgatatgtaattatgtgggccattaagtctatcatatgctgacaatagccgagaagcccatgaatctctttcggggtggagcacgtgtctgccatcgccttggccttggctaacaagcggggaagttcttgactcccgttcaatgtaagagcaaaccggtccatccacatggttgcctcttggtgtaaagagtccatcacccttcctctagcctctttgtcgatatatttaacatactcatccccgattctatgctcgggcccgtggtagacctaacttt

SEQ ID NO: 168952 - DNA, 351 bp, Glycine max
  unsure (1)..(351): unsure at all n locations
agcnngaaaagggggcgtcgtggtgtttgctttctattttcactgncaatgatggacagacactaccatagtggaatgtcccttgaataagcacttgatctcgctgataagtgccttatggagatcagatccaggctcgctgttgcactcacctaactttgttattaaaatcgtggcacaggatggtgccacagagtacccctggcgtgactttgtccaggatgatcctgttccttagcttgagtaactctgttcctaatatccataggacttgcttcttttcgaattgccctgctttcatcttgctacaatctgtctactggccctgtcatgcctccgaaaatcttggcc

SEQ ID NO: 168953 - DNA, 405 bp, Glycine max
agctttgcagtagattatagtaattatcctttattctagaattaaaataacttaatgccattaacctatggaattaaaaaaaacttaatggctgagtgtaactgaaattgtggcaaccaaaaatcacccccaacagccaacaagtcagccaccatttggtctcccaaaaggctgatgcctaagttgccaattgggcccttattacaacttgaactaaacctaactaaagcccttttatttgattaacccaaaacatatttttggtcacccaactttacaaggattgggccattatttagacaaacactctaaaattgagacaaggtggtgtcatttagtcctcctccatttgggccatgatacaactcacaacctcggacttttctccttgaaacttgggcttgt

SEQ ID NO: 168954 - DNA, 376 bp, Glycine max
agcttctcagccaaggctggacctggagtattctcaccagtggcaagcataacctgagttgcccatcaatataaacattgagaaaaaaaaatgaagagagtgtatggaaattttttctttctgcacattccaaagaacgaaataatctttaacaaaccttctttagttcatctttagagtcccacctaatactctttgtcctagctttaaaaaattagaaatatgacaaaagcattatattacaaatgtgaccaccgtaaagaccaccaccaaataagaaaataaaaaattacacaaatgatatcacagatacaatatactaagaataaaaaaagaccttgtcctaaggtggcaacccccttgaggagattgatgg

SEQ ID NO: 168955 - DNA, 287 bp, Glycine max
caaattatagaatatataagtgagaacgaatctttactctctaacttaacttttatgattaaattaagtctaaactcacgttaactagtgttctctatatataatataaagttcccttgatggtcaagactaatttaattgtcaaataaaaaacaaaaaggtcacaacgttgaaatgttttagctaacacaaattaataacctaataattaatatctcttgataaacaaaacagacaaacctttctatatatattaatctctctgtcaatattcaggactccaacct

SEQ ID NO: 168956 - DNA, 396 bp, Glycine max
  unsure (1)..(396): unsure at all n locations
agctngtggggcttatgtactatactttccttaaagctcaacacatacttaaatcatggccccccctcatgctcaaatcgtcgtaaccctcaactaccacccacgaactcagccacaatgcttagaggggtagttcatgaatattgcgtgactcccacgacaaaagacgtgcatatatagaccgagaggggagaccccaggggcattttcctgatcctagtgagaggcgcataaacaccttagagtaccactgacttactcattggaatcccttttgtaggtaccttctcccatctcaacaccagagatcagaaattccattgaaaagaagaggatgagacagctcaacaagaagatatataatatcattgttctttacaaaatatataattacac

SEQ ID NO: 168957 - DNA, 288 bp, Glycine max
tggcgcactactacattcatcagcacaatcgacaatttcagactcatcaccaccatttcgctttgccttctcacactcattcaagaatgtattgaatgcactcttaacatatttaactgcgtccggaacactcatgttctcagttaacttgtcggggtatatactctctctatgatccccattcagagctgctgccatttgtaccacattcttttgaaattcactcaacttggccctttcttgagcacgagcttctccgtaatttacaggttcatgcaatttccctgc

SEQ ID NO: 168958 - DNA, 253 bp, Glycine max
tcgcccatctcccacctacttcatacctgtttcacacttcccacaccccccgagcatgatccttaatcctggaccccagagcaccgagcatgcactggctacctgcggaggagcggattctttaatctcacactaccttatcgacctacaaatcttgaacaaccgccatgctggaataaactctcccttataaagtcgaagaaacatctctccgccacagtcccaaccaatttggtgccctcaacatgaaaca

SEQ ID NO: 168959 - DNA, 234 bp, Glycine max
  unsure (1)..(234): unsure at all n locations
agctncggataagncccttcgttgccactttttgttctctaccccaccttcgngtccgggctgccggcgtggctgatagcccactccatgaaggactctttgaattttctcacggagaggaaatgggatttgaggctctcgttcgcgtccgggggaatgccctcttcccacttcgccctcttcaccgaccttttcacttccgctatcatttgccacggtgtccccgattccttc

SEQ ID NO: 168960 - DNA, 328 bp, Glycine max
  unsure (1)..(328): unsure at all n locations
cgacctgcanggcatttgcaagctnatatnnttttatnttggaatggtgatttgttgttttattatcgtgggccgcaaaggggttatgagtttcaatattctgtccagaagaatggacaactccaacgcgaaattggcgatatcagtctacttcgaatgtgataaagtaattatgtgtgaactaatttttcatgttacttctagccatgtcaattggtttccatactgatctctcaccggatttaatgtaattaccacatatttgtacctatccatcaagagatacattggtgcttggcagctatcaataagaaagataatacattct

SEQ ID NO: 168961 - DNA, 401 bp, Glycine max
agtctttaagtgaaaggatgtgactcttcactattttatttgaattccaacgctcaagcgtactagtaatcgattaccaaaacattgtaatcgattacagctttttgaaaataattggaacgttgcaaattcagtttgaaaactttttcaaactcatttttgatgcaagctccattggagcttgtacgcctaggatcttcttcatcaatggattcctttgcttcttggaagataaatggcaccgtaatggagaatgaatagagagaggagaccccacttcaaggagaagatgagcctagatgaagctcaccaccataggaggccatggataatagcttggaggaagaaggagatgaatgaatggagacggatagaagagcaccaaattttgtgctcaaagg

SEQ ID NO: 168962 - DNA, 389 bp, Glycine max
actaacctcagcgccgggagaagcttccatcacacgaccccccaagaagcttgagcttagctacacagacctctctaatagctaagctcacctccttgagaagagaagctagagcttacctacaccccccctataatagcgaagctcaccctcatgacgaaaaacatgaaaatacaaacaaaagtccgttactacaaagactactcaaaatgcgcccaaatacaaggctaaaaccctatactactagaatggccaaaatacaaggcccagacgaacgaaatacctattctaatatttaaagagacaagcgggctcaacttaacccatgggctggagatctatcctaaggtgtatgagaaccctaggacgcttcctttgatctctagccc

SEQ ID NO: 168963 - DNA, 416 bp, Glycine max
agctttagtctccttttctaaagaattgacttctattcagcttacgcctcttttgtgtttctatgggaccaggttcaagtagaaagctaacttaagcttaatttccaactcatagtacttcaggattttgtccctctgtctttattttccattttgaaacaaaacccctatagttctttttttttttgttacataaatttagagggaggagatgatattccgatctaaggtggaaaattcttcaggctcaaaacacttataaaagtatttatatttacatcactttaaaaaaaaacgaatgaagatttaaacctacaatatgttaaatgtaaaatcttgttttgtttcattctaccagctccttgaagctatatatgttttctttccgacaataatagaatacttttatattgcta

SEQ ID NO: 168964 - DNA, 380 bp, Glycine max
  unsure (1)..(380): unsure at all n locations
ctaagcttacaaggcccaacgaatgtctgtcttcaagccttccttacattctttccatccttgccaacaaacgctttttagtatgaaaaaattcccaaaagattggttgttccaagatgaggccttgcccttgaaggaagaaacaacctcatcccaacaaaggcgccctcccaagcatctctgacaatatcattgaaggagttatcaactagccaggtagtcatgaacttgaaatccctcttaccataataaatgtgatgatgctctaaagagaccaacacaagtctgtgatctaatttgaaaagagaaagatgagtaacttatatcaactntattcactacctaaggaatcatcttttctaactcaagtatgtatctgc

SEQ ID NO: 168965 - DNA, 53 bp, Glycine max
ccacccccacccgcaaccacacctgacgaagcgacaccctcccccccgcgccc

SEQ ID NO: 168966 - DNA, 408 bp, Glycine max
agcttctaagccatcatgaccccttatatttcaagatcagcagtagtgcattcatcaggattttgtggaccaaatttggcttcgccccagcagacaatagagttgcaaccactttctccctgaagatacaaatattaaatcaaatgtataagaaaattttaattcaaagttcaaacagtctacttttcccaaaatcatgctaaatccacattgattatgttaatgtgcacctttatgtagggaaaagagaaacagaaaagaacatgaatggtgaaaccatgtcaaaaaatgattgttaggtcaatgtatttatagaagggctaatggtttaaacaagtgggatgtttgtgtattataccttccacaatatgttgcccaatgaagagctgtccattcacacctatcacg

SEQ ID NO: 168967 - DNA, 413 bp, Glycine max
agcttccacaacatccaagcaaaacttcattcttacagcataagctatcacagccaagcaaaagcagagcaaaggcagaaaactctgctcaaacaccaaccaaaatcacagcttttctcacttaaagaccacagtaacaattccttcgatccaattcgttaaccgttggatcgactccaaaattttactggaagtctatagtgcataagcctacattgtgaccgttgggatctactagcaaagatcaagaactcattctgtactactctttccacagccaaccacacacaagcattttctgcaccaagctaaaatcctgctgcacctattttgacagcaaaattctgcataagtgcagatttcgaaaatcacacttcccctcatccaatcttgctcaaatcaaatcctacaag

SEQ ID NO: 168968 - DNA, 410 bp, Glycine max
agcttcacaacatgtggatgatcctccagcttattatcatcctgcaaactaggtatatcgcacagtcttcatcagactcttcagtcgaggagttatcctcacctcgcctcgtgttatcactgcaaaccaaatacaaagaacgaccctccatcgagtcctccatcaaatatgtattatataggtcattattagtccctaccttaatgtaagatttaagcaaaacttgtgccttgactcaaattaagactctagccacatctagatgcatcctattagtagtatactcatttgcatacatatagtcaccataggagctacaatccgatttgaaaaaatcatcattccattcatgagtagggacattaagcaatttcacccataccaagttttcatggtctaccaagcgagcg

SEQ ID NO: 168969 - DNA, 433 bp, Glycine max
actccgcttcttaagagaaagagataagaaaagtgagcaaatacttgatagtgagaaaaagagggaggcacttgagaggaaaaagagtgaacaacagaagagtgaaacacttgaagcgagggagagctatttagccacaaaaagtgaggccaagaggttgtttcgtgctaaacagtcactctatatcttgttttgcaaaaatcagattttgaccactaacacttttgatgattctgaagtgccttctagtgttaaaactcttttgcaggattttcaagacatgtttccaccaaatgtgccaagtggactaccacctttgaggggaattgagcatcacattgatctcattccacgagcttctttgccaataggccagcctatagaagtcattcacaacacaccaaagagactcaacgacaagtggatgaactca

SEQ ID NO: 168970 - DNA, 394 bp, Glycine max
agcttgagatgaggaagtattgaagggttttatttcctgctttgattgcagaccacagagtggtacctgcatatatgtcgcgggggtcaggagaccttggggacgtcaggtggggtgctattgcccaaaaccaagcttgaccaatcccgacccaacccgggcataatcggtcagtgagaaactgtgatgtacctaaacaggcgagctcctggcagtcaacagataaaaggaacaaagaccacaaagcaaagaggcttgtggtggctggccacctgtgaaacttgattgatatgtgagatattgtctctggtaatcgattaccaagggtgggaaatcgattaccaggcttaaaaatgaggacaggaggctaacatggtctctggtaatcgattac

SEQ ID NO: 168971 - DNA, 383 bp, Glycine max
actaagctttctaatcgtcggttagggtgataagagtttacatatcatctatgccgagtgtatactatttgttaaccatgtttaagttggacgtacgctgtgtcttcttcacagatagagcatgcatgatagtcgttaacactggatccacttaaattcccatatgctagaaagccattaatggtacaaaattgcattgcatgcaacttgaatgtctcattttgatacccatcaaacatgacaacccactcgtccaaaactttgtcacatcttaatccatggactaagataacattgatgcatttcctggctgtctgagcccaaatcatatagacacatcatgttttttgcttctgcccacccatgagggaggtgcaaatact

SEQ ID NO: 168972 - DNA, 384 bp, Glycine max
agcttggttcgaggtacttacccgttttatatcgaagaacgatgaacaacgaatgaagaacgtcgaagaacggttgaaacctttgcgggattcctcacggaaaacgttacggaaacgtttcggaagcgcctcggcttagattttcttcacggaaacaatttttccaagcaaattcgaaagagagagaagtgcctaaggggctggaccatttccttcttgctttcctcccctatttatagcaaaataggggaggtggttgccgcccagctcgcccaggcgagcagggttgcttcctccagaagcaaccgccttctggaggaatcttctggagggcccaagtgggcctgggtgctatttgcaccccccattttactaagtacaccc

SEQ ID NO: 168973 - DNA, 360 bp, Glycine max
  unsure (1)..(360): unsure at all n locations
ttgaaaangtagctattcaccttctcgctatctcttctgctggcttcgcgagcgtccgctaacacaacactcatgggctaagcacgaggaagactttcgaagaagatgagctatacaggttcgctaagcgcactgcttcatctcactaagcgcactgcttcagttcatccgctaagcgagaaaggcacgcgctaagccgaaattcactaatgtgcgctaagcggttgatgtgccattattttctcctatttcttaaccctgtctgcaccattttaattactgattagtcttaattgtcaaatcaattatgcagttttatcatctgggcctactggattaattctgtgtcttctactaaat

SEQ ID NO: 168974 - DNA, 396 bp, Glycine max
  unsure (1)..(396): unsure at all n locations
agcttctgcatgtctagagagttctagagtttatttttctcaggtccaagttccagagagtttgagagattttgttgtgtgaagatctgcagagatcagagcttgaagaggaagccatcttgagagtttgagatgagtttgtgagtgattgtgaggtcctaaaggtggaggagacatccccactacttgtatttctgcaatctttcatctttctcttctctttggtgtaaaggaaacttcccagttatggaaagataaatcctctgttggatcttccttgtagatacttgatgtaaatatttttttatctatctaatgatgttttgtgtgttctctgtgctatcagtatttcattctagntatgctttaccttgatcacgtagatgcatgctttgt

SEQ ID NO: 168975 - DNA, 396 bp, Glycine max
  unsure (1)..(396): unsure at all n locations
acactgatttggtaatcgatactattgattatttctgaataaatcaaaagatgtgactcttcaaaaaggttttgactttctctaattggttttaagttcttctaaaagttataactcttctaaatggtcttcttggccagacatgaagagtctataaaagcaaggctttgatttgttattcaatatacttttacacttattcaatcaatcctttacaagccttgaatctctttgaacttcttcttcttcttctttgtgccaaaagctttctaaagtcttctggttttctaaaccttgaaaacttatgctattcatcttttcattctcttctncctttgccaaaaagaattcgccaaggactaaccgcctgaattctctttgtgcctctcttctccc

SEQ ID NO: 168976 - DNA, 360 bp, Glycine max
  unsure (1)..(360): unsure at all n locations
gggccaaggtatattcaattgcagaaatggccacccaccggaaattgggatacagtctacttgaatgtgataaagtaattatgttcgaactaatttttcatgttacttctagccatgtcaattgggttccatactgatctttcccggatttaatgttattaccagatatttgtacctatccatcaaaagatacattggtgcttggccgttatcaataagaaagataagaaattccagtatcttgactcaatgaaaggagaggatagtttngtgctacaaaagctggtaaacgttttgttctatgttatctaactgaaaattccacagcccaagatctaaaatgcttattaaaaatattga

SEQ ID NO: 168977 - DNA, 278 bp, Glycine max
  unsure (1)..(278): unsure at all n locations
actccagagttggggtatgatttacatataaccggtgaggggattattatattttataccgcgattggntcgcacacgttaaggtaaaaaactcataaagatcactcacgtgactgagtcgctgctgtgtaacactattgcagccattgactgtggccagaaatgtgattcatgagctttgacaataaagtgcttcgagacagcaacatacgtctgaagagggctgcactgatgactatatgtgtgcttcaactcaatcgtgtctgatcacatgaact

SEQ ID NO: 168978 - DNA, 410 bp, Glycine max
agcttaactagactctttcttgggcccccttatgtttgtgtttggttttaattacttttcccagagtaaaaactattcttttaatatttccactgttctggtggcaccccactttaagacttgttgatgtgttgtttgctttattcgtttcatggattaaagtgttgagtttgaagtcactagtttctccgaagtgttgtccttatattggtacaagcatgtctctggcttctctgttttactttaactcctccattgtgtggggcatttttgaaggattttaagtttaataaatggtttgattaattcctgacaccgacagataatgacatttaatttaagaaagagtttgacattaatgttagatgagaggaaggaaattgcatgccggaaaatactagttatattta

SEQ ID NO: 168979 - DNA, 458 bp, Glycine max
  unsure (1)..(458): unsure at all n locations
ntgagatggtttctgggtagagaattaacttcgcaattagtttgtttggtgctataggccaacctgaggaatggtgcaattctgctgctgtctaccttaactgtgcactgttacagcttcctttctgctacttacgaattacaattggtgttaatccaagaagaagggtggggtctgggatccaattataagcaagtttgaggctaagctgagtaaatggaaccagagaaatatctctatggttggtagaaccactcttattaatgttgttttaacagcattacctctgttttatctgtcttttttcagggtccgctcagttgtcattaataggatctctgccatccaaaggcaattcctttggngaggtaaaccataagggaggaagatcgcttggatatctggagtcttgctgactcctaacatatggaggtcggggacaaagacataaaacctcc

SEQ ID NO: 168980 - DNA, 411 bp, Glycine max
  unsure (1)..(411): unsure at all n locations
agcttgtctcancgtttatgcgagacagaggccatttgttagctatcatcgccaagtaccaagaagagttatgtctagccacggcccacgagcatagaatcgcggatgagtatgctcaagtgtatgcggaaaaagaggctacaggaagggtgatcgactctttacaccaagaggcaaccatgtggatggatcggtttgctcttaccttgaacgggagtcaagaacttccccgattgttagccaaggccaaggcgatggcagacacctactccgcccccgaagagattcatgggcttctcggctattgtcagcatatgatagacttaatggcccacataattagaaatcgttaggaaacttgtatggtctctcagaccttgactggatacgaccttctttttgaaataaaat

SEQ ID NO: 168981 - DNA, 374 bp, Glycine max
taagcttcaactgaatatgcaacgctccaattgattcctacatggtgttatttttaccacatattggcaatcgattaccaacgtgtctgaatgccgaaatctaaaatgccttgtgaagagtaatatctttccataaaacgcttcgcgtaatcaaatacatggccttggcaatcgatcaccgacgacaagcttcgaataaaaagtccagagatatacctctttcaatggatttcagatctttcttaaggctaataactttccaatggtcctttgaccacacatgaacagctataacaccaaactctgaatgcatttcaaaacttctgaatatactttgaacctctcttaactcttctctctttctttgcaaagct

SEQ ID NO: 168982 - DNA, 398 bp, Glycine max
accttaagccacctgcagctgcagcttaacattaatttcaatgttttgatgattacgggaccaaccagacagcgaggaaaaggtaggccgacgaacaccgcccgcaataaacaggcaattacgagccgcccgacataataccggactcaatcagacatccaagtacaaagttgttgccgatcgaatttgctcacagctttagctctcaattttgagcgtctcgatatattacgggactcaatcagacatccgagtaataagtatatggtcgttgaattagctcacagctcccgaattcagtttcgagcctttcgatatattacgagacttaatcagacatccgagtaaaaatcatctgtcctcgaattagccataacatcaacattatattccgagcg

SEQ ID NO: 168983 - DNA, 355 bp, Glycine max
  unsure (1)..(355): unsure at all n locations
tccaaccttgggttcggactgtcagccacttatgatagccgccgatgatcccattactgcttcccctaagctctttgtcctttcttcatgccgcatnccatgccttgcgaactccttggagtaccctcgcgtttgtggtcactgaaaccccatgcgatgaaaggcatgatgctttcatctgatggcacttctctcatggggtagccaagctgtcttatggcgaggacgggattataattaatacacacccttgttcccatcaagagaacatttggacatccttcgcatgaagatagaatcctcgattcttccttccttctagcgaggaaacccattaacagacgcccctccatgc

SEQ ID NO: 168984 - DNA, 252 bp, Glycine max
  unsure (1)..(252): unsure at all n locations
ccgccgcgcagcacngacgcaggggaattttatgaaacccccagcccaccaacagcagaagcccacaagggaaacagcacccacaactaaaacaaagacacaccaggcacacgaccccagaaaccccgccggggacaaccaacaaaagagcacaacccaagcccacccaaagccccaccacaaaacaaaagcccccctccgaccagccaaggtaccacaaaaagaacggccccaccacacccaaacaactac

SEQ ID NO: 168985 - DNA, 412 bp, Glycine max
agcttcttatccaaggcacattcttggtgtttatatctccttcttccatggcttattccctagtggattgcgcctcctctcacctcttcttctttgtcttctgctgcatctccatggtgggaaatcaccattgaaggacctcattgaagctcaaagatccaacctccatagaagctccacaagcaagcttccatcaagagccatcaacaacatcacggtaaatatagacatcccattcctaggctagacgatatgttggatgaattgcatggagcctgtgttttctctaaaattgatttgaaaggtgggtaccatcaaattaggattagagagggggatgaatgaaaaacaactttcaaaactaagtatgggctgtatgaatcgcttgttatgccctttgtgctaaccaatg

SEQ ID NO: 168986 - DNA, 436 bp, Glycine max
  unsure (1)..(436): unsure at all n locations
tgtccattgaatntacattttcaaatattccatattgtgtaatctaaaataacagacaattgattgtacaaaacaatgataggagtaaaatctagtaacatcataatttaaactcactgcaacggataaatgacaatcaccatactcaagagcctcatggataatgataagatcttcactaccctaatctaagaaaattagacgataaaacaatttatgtttggtgattacatagtggcactaatatgtaaatgcaaaaatgctgacctggccatgttcattgaaagtatcgagtccaacaattccaaggtcaagatctccagataacaattctcttgtgatgtatntgggcctctaaaaccaaactttgagtctggatagctgccataatgccagagactttggttatggtcatgtagagatatactacattgat

SEQ ID NO: 168987 - DNA, 401 bp, Glycine max
agcttcgacatcagaccacttttgggtgctgtatctacttcacatggatttgatggggcctatgctggttgaaagtcttggaggaaagaggtatgcctatgttgttgtggatgatttctccagatttacctgggtaaattttatcagagagaaatcagaaacctttgaagtattcaaagagttgagtctaagacttcaaagagagaaagactgtgtcatcaagagaatcaggagtgaccatggcagagaatttgaaaacagcaggctcactgaattctgcacatctgaaggcatcactcatgagttctctgcagccattacaccacaacagaatgggatagttgagaggaaaaacaggactttgcaagaggctgctcgggtcatgcttcatgccaaagaac

SEQ ID NO: 168988 - DNA, 408 bp, Glycine max
  unsure (1)..(408): unsure at all n locations
agcttggttcaaccccataatctcaggaatggcaattttgatcgccaatactcgacaacatttcatagagatgaaagacttgggaatacgtatgctatgcatggaaaatgtaattatgagatcgagatgcccgaagaaacatcttttcttagttaaccatgcattaggtaccatgttcaatcattntgtttttaagtgaaacgggtttatgatcccaacatggttggctcatggtaccgaacatatgcaactaagaatgcagcgtgaattttcatgcttcctttttttgttttttttttttgcaaaggaaaatgcaaggattatgcatgagtaaacatgaaaacaaatggtatgcaaaaaacacgttagatgcatatgcatggtgatgaaatgacttatgcaaaatgc

SEQ ID NO: 168989 - DNA, 337 bp, Glycine max
  unsure (1)..(337): unsure at all n locations
ngaaatgaggaagtgtcgaacgatgaattcttttgctcttattcattgaccacacagtggtacctgcagatatgtcgcggcggtcacgagaccttggggacgtcaggtggggtgctattgcccaaaaccaagcttgaccaattccaacccaacctgggcatagtcagtcagtgagaacctgtgatgtacctaagcaggcgagctcntggctgttcacagataaaagatacaaaaccacaaagcacggaggcttgtgtggtggctggccaactgtgaactcttgttgatatgtgggttatggcctctggtaatcgattaccaagagtgggtaattgat

SEQ ID NO: 168990 - DNA, 378 bp, Glycine max
agcttctaaaaagagattgtggtggtttattttctaacttactctgcaaatatacttattttccaaaatctcgttgagccgcggttatagcattttctacctgtctcgcttgaaattactttgattacaaacttggagtgagtgagaatcattaccatgttttctttgtgcggggacctaccttgtaaaagaccaacaaccactagctaccacgttaattttgtttaccagtaccgatcaagttgctaaattaggtgtgatgattggcgagaataaaaaaaaaaaatagttgattatgaagcaagattaaagctttcaactttcatgtcccggcaagtgatggatgaacttgaccaatctttgaccaacatgcatttt

SEQ ID NO: 168991 - DNA, 416 bp, Glycine max
agcttgatgtcattcaaaagacactatgttgttttaaatgaagactaaacatgcattgtttatgtaattgtattcattatgagatataatttgtcgtaagccattactaaccaattaatattattaagtactcgtttcgttaaaaaaaaacatagttggttcgacaaaaatcaattattcgtgtacgatacatcgttgccataattgacaacacataatgatatgcatgcgtattaaagtttgagcgcaacaccacattgactgacttgactacacattttgaaggaaacatatacacgaaacatgttcacgcgtgactattctttttgtaaaaaagtgaagcaatctgttggcgagaaccatgtatatatatgagacacgacttaataattccacattatcttgcgttcacatac

SEQ ID NO: 168992 - DNA, 309 bp, Glycine max
tggcatcaatcaccttgctgaccaaacaaatgaggaatttgttgttctccataatggatacacacacaaggcatcacattcacaaacaccattcaagtatgaaaacgctactggtgttcctaatgcagtggataggagggaaaatggagctgtcacatcagacaaggaccatggccaatgtggcaattaaggaacacacattcttctatcagtatggaactgctgcacgaccaccgggagtttacaacaacgtacatgttttgctcaactaactgagctagacccccttcgttaacacagactatcaac

SEQ ID NO: 168993 - DNA, 412 bp, Glycine max
agcttgtagagtgtccatcacccactctctttttaatgcagcagcatttcgcttgtcaaaactccatatgtctcgccaccataatgaccatttagtcgactttggctgtgagtaaggctcattctggaagtccccatattttattttcagcagccccgcccacaaaacatcccttttgtcgaagaaatctccaacaccatttagccaacagactgtcgttgaacgatcttaatttaattaaaattaaattcaaaatgcatcatttgtgttttaaattttgtagtttaaatataaatttatcgacttaaaaaaataaagcaattaaacttttcttcttcttcttcttttttttaacaaaatcaagtttatgattggtaacgtgcagttgagggcaaatccaatcatgcatata

SEQ ID NO: 168994 - DNA, 477 bp, Glycine max
  unsure (1)..(477): unsure at all n locations
tcttcacttaattcccttccncactcaatcatggcctatatcgtgagagaaggtccacctgagaattctttttctattttaattnttcaaaataatattccttttatacctttttcacatcccgacactaaaggccaaataaaaaactgtaacgttataataaattcattaatttattcatttttatagatttttcaatattttaatatgtatttagataattagatcagttttccaaatattttaaaattcctttatagaaaatactctttctaatttatgaaaaggtattgtaatgcttcttctctttttaactttttactcttaaaactaatatattgtttgggaaataatataatcttccatttcagctatttcatgataagaaaatagatatgtgatctataaaaacgtttaaatatattttagtacttgtaacttgtcatcttctttgctcttttccttgtaaaatatttt

SEQ ID NO: 168995 - DNA, 406 bp, Glycine max
  unsure (1)..(406): unsure at all n locations
agcttggtggggtaggggtgtaagcgggtctgtttttgtttgatttggngaaatccatgacccaacccaattaaatttgaatggtttggtttggatcggttttctaaaaaaataataaaattcaacccaaaccaacccatttgaaaaggatttagtaaggttgagtcaacaagtcaaaacatttaattttgtctatttttttaaaatacaatattttttataagctaaattttatattaaatgagtcagacacaactattttttgttacattttttattaaaaagaaaattatgatgctggtacatcccactccactcctatctatttatttatctatccatggagggtgggaaattaaacatatcatttttaatataagcagtttcaataaacataacgatgatg

SEQ ID NO: 168996 - DNA, 363 bp, Glycine max
ggctaggaaacatactagtagtattattactggacccaactattgttaactaatataaatacgaatattgggtgtgatattgttacatccatcagccatatcttcaatgtacaactgttacccaaatctttctatttgccatcttccttacctaactcctacaatttcaaatttcaaatatttaccaatcttcaatgcgcatttgatttaatcacaaaattcctaactaaactataagtgccatgccttaattcacactacacttcataccacatctgaatatatagctagcatccattcactttagtatttacatccatgggattacttcatgacctaatgcgcaatgaagcttgatgcaac

SEQ ID NO: 168997 - DNA, 368 bp, Glycine max
  unsure (1)..(368): unsure at all n locations
agcttgcttttacaaacatgacttcttagacctttttttaaactttngagccttttcatccacaagattaaacatcagcttagtacaagtcatggcattttgcaagcaaaatttgtcggtttaaaataaattaaacaaatcagtttgacatttaacaggtaaaataacaataaccataaaatacaaaataaaatttaaatcaccttgaaaagatctaactttggctagttgcatcaatacaacaacattttgtacttcaacaaaagccaaaaatgcatttaagtcatccatataatgcccaaacaaagggcattgaaccttattgctatttaaatgcatacaatagacattataagtgattaaaacat

SEQ ID NO: 168998 - DNA, 439 bp, Glycine max
  unsure (1)..(439): unsure at all n locations
ntagctatatcaaggtaagtcaagtcggcacaacgataaaattattatatgttatcgattatttattcaagatacgaattcttattccttctcgatgcctcattcttttaggcttaatatttttaaattagctttaaattacgcacatctacaaattaaatagcataaaatcaaaggaagtaatacattgatttttctttaaaaaaataaaattttaataaaatctaatggatacattaatgacccactctagcttttattaaattcaaataactttgaaattgaaatgataaaaaaaattcaattatattttaaaaccattcttgtaaatacagaataattaatctttcaatactataattcatgaagaatatcttttaaaaaaataaacagtgtattcaattgatgcaactattgaatcatatatattgtaattcta

SEQ ID NO: 168999 - DNA, 399 bp, Glycine max
agcttggcacagtatacagaagctaaaatacttgaagagctcccaaagttgcatccctcaggaactattttcaaaataaagaaggtttgcaagaagtggaacctctaaagatagagttttagaagaaggtgcacttgtggacacccatttctagactcttgccaatgtgtcctattgatataaatctatcacaagaaaaatacttatccccagtcaaactgcacatctcaagggccaccaacatcaagatggtttactaatagagtgtgtctgcctctaccagtgtggggtactccaaaggaaaaaggatttgagctttattgcaaagaagacatgcctacaaggaaaatgaaggtggagattgtgaacttccctcgtagctggagcttgttgtttaat

SEQ ID NO: 169000 - DNA, 350 bp, Glycine max
actccttacagatttacaaaactctttttttaaactacaaactaccctcatatctccaaaacgccgtacccacgaaaatcaaaggagaaagaagtccacccacacctgaattttcgaagccccactcgtagccacacactttacgaccccgaatatgccctcctttcgcgatttggggcagaaatgatggccaaaggctgaagctttgcttggagcttcaatggagaacgaagaaaaacataatggcaacgtgagggagagagagagctgtctgaaaagtgtcggggctgagtgaagagagacaaaacctttttggtctaaacacaagggtttctcttttctattattta

SEQ ID NO: 169001 - DNA, 407 bp, Glycine max
agcttgagctctataatctttgcatgatgatgatctggcctctgtgcaggctctgtaacatagcaaataaagtctcaaagctgaatgaggaaggtcctgtaaaaactagagtaggaactggcaaaggagtgaatgctgaagctagaactggtaaagatgaagctggaatagatggagctgcagtagaaggagctactgatgggggaatctcaaaagatgggagagtctttgaccttttccccttggccttgcgaggccctctaaaagtgattgaggggtcatcgacgttccaccaatctttcttcatgtaagccaaattaatggttggactgagactctcaaaagataatgaatcagaagtgactccctaggctctgcataaagcagcgatgagggcggtgaaacct

SEQ ID NO: 169002 - DNA, 368 bp, Glycine max
ctcaagctttaattcactctatgtacgcgtgggggttttatttagattcatgtatctttatactcgctttcatttactttttatacccccttctgacgcgcttaagccatttatttaaatcatctctcgcttaatctaaaaataaaataaatctccaccgatcgtttgaattgtatcatctgtcaatcatggctaaaatgaattccgaccgttcggtcgtgccgtaaccacattggaaatcacaaaacaggtccaataataatataatcctcataagaaaataccctttattaaaggagagcgaataatcaatcggacgtttcctctttgcgatctctcattcttaactgaattgactaataacttac

SEQ ID NO: 169003 - DNA, 392 bp, Glycine max
agctttgaagacatgaacaactaattgattctctcatattcaaatcctttcttgtcaaaacctctttgtcaattcttgtaaagtttagaatagctctcaaaactctttgattatcttgagagaaaacactacctgctaagattgtatattcgtttgtaagatgatcgtaagttactcaatgtgcaaacaaacaaacaaatgttctgatttgtattagagccaacaatggcttggtaggacaaagaatactatttgtagaaggcttggtgtaaacctagagttgtagagccagatgtaacacccttaaatataatctctcaaataacccattaattctacttaaccaacaagtaaaaatcgattctattaatgaaaactcaaagttagaaaat

SEQ ID NO: 169004 - DNA, 408 bp, Glycine max
  unsure (1)..(408): unsure at all n locations
agctttgacaaccctatcttacttcttcttgtaccgngactctccgntgccatcatagagagcgggggagagagaagaaacactctctggcctctcatcttcgagctccgatggagatgagcgttgcgggggagatcgtggtcttgctgttggagacatacgttccaggtttccgaccgccactatggtgccttccacgccaccaaccacgttgcagtcgaggaggttaaagtttttttaaactctcttcttctctttttctaatcctttcacttcactcatctctttatcccccttttccctattttcatcttcctatgcatttttctccgattccgattcatgcattttcccgctgctttaggaccatccttcaatacggcgccgcttcttcttcctagggtttct

SEQ ID NO: 169005 - DNA, 411 bp, Glycine max
  unsure (1)..(411): unsure at all n locations
tgaagaggatgctctaatggaggagaagaaatagagtttgtgggagcaccacaatgaacgaataaaagagggagagaagcggaattttgaagtgtatctcataatactttcattcatcaaagttacacaagtgttacacatgcttctatttatagactaagtagcttccttgagaagctttcttgagaaaacttccttgagaagcttctttgagaaaacttccttgagaagctagagtttagctacacacacccatctaaaaactaagctcacctccttgagaagctagagcttatctacacacacccctctaataacttagctcacctccttgagaagagaagctagagcttagctacacacncctataatagctaagctcacccccatgacaaaaacatgagcatacaa

SEQ ID NO: 169006 - DNA, 410 bp, Glycine max
agctttgctactttttctgaaaaagatagtttattgatgctgcctaactccctgctagaaagttaaacagcgcgcaataattgaaaattaaagaggaaataatttgcaattaggatccataccatataaaactggttaatggcaacttttgcagtcactcgtgatggatgatcctatgatggtgaaggaaggatggggttggagattataataccgtggtggggatggatgaatggacacggtggcctatcctaatttgaagcgtggtgttccatcatcttgtggggctgtgatgaaaacgaaatgaaatgaaggcagtgataattgaagtcagcaactcagcatcaagctgctctgggcgacaattagtatttgagtcctggtcccccaacactgtactgtttccttga

SEQ ID NO: 169007 - DNA, 350 bp, Glycine max
ataaaactccgctcgcagactcttataaccatgtcctctccatagttttttcttcaaagcgaaacgaactcggttctcctatgtctttccgccctcattatatcaagaagaaattgaccactggaatacgaaaaataaaagaaaaacggcaccgacaacatttcaaatcgattaagatatactccgtagttcatgtcgtatcgacaaaaacatcaaaccacaaactcaaattaattgcttacctctaattacggcaccggctaccgaaaccgtttgttgtagatgtcgtcgaacgtgaaatgttggaaaatgctttgtcttgtactgctgctgaagtgaggactgaaact

SEQ ID NO: 169008 - DNA, 410 bp, Glycine max
agctttgagctacggatgagattaacatttcatctctcagcctcctcataattcaaatttaacttctcagcaagcactctgaaaaaattaaaagttttggttgttactacaaatccccagtacgtcatttaggtgtgttacatgaaaagtagaccacaggtaatcaacaagagaagcaattaagcaaatacagacagagaatatgtaacatacaaaaaaaaactaaaattgagaaatacagataagagttaatgtaaaagctttcaaggccacaaaataaaaggaacaactccttattttgtgccttaggttttgacagacagacacacggatcaatgacacagaggctacattgtgtttttcacaggtgcaaaattgtagcatatcagaaaaattataaagcccagagc

SEQ ID NO: 169009 - DNA, 397 bp, Glycine max
  unsure (1)..(397): unsure at all n locations
acctataaacactcacgctctgnttccacacttttatccggagtttcttatatgatattgagctattctttgtggctatggaaaacttgaagaaagctcttcaactctcatgaacaagttgcggtctgatactacatggattatggaaaaaattgagcctaaagttacagacattacgtctacctcggataacttcgatatatgtgcaataatctgaagactgcttgagctacacaagacaattcgagattactctaatggatgtggaactctaagagaaagatctacatatctcatgaagaagtcgtggggtaataatgcttagatcttggaagaaactaatcatgaagatactctgaagattatttatgtcgcagcggacaaatgacataatacc

SEQ ID NO: 169010 - DNA, 91 bp, Glycine max
tgcaagctcgaagatatatatatatatatatatatatatatatatatctatatgtatctatatatatatccccatggatatatatatataa

SEQ ID NO: 169011 - DNA, 339 bp, Glycine max
  unsure (1)..(339): unsure at all n locations
tctaaactatgtacatgaatgaagctatcgattctccttcgttatacnactgcggctcacatatctcatgacagggcgttgaattcacatattgtcaactactctccaataaaattctctttaatgcaatgcaagttccaagtctccttaaaaatgaatactctacataatgacttaaattaaacaatgctgaatataagtgtacagcaatactaaataaacacaacttaacggaagacaaagtgcaactagattttactggttcgncacaccctcggcctacctccagccccaagaacctgttgagagtccactatttgtaaatcccttacaagctct

SEQ ID NO: 169012 - DNA, 405 bp, Glycine max
agcttagttattgtcaacttgtcattttatgaactatagctggaattttaaattaatttttaaatctgatacataatttattatatgaaaccgtgcgttaccgcgctatctttttttaaaacaccgaagaaaacatcgagaataattatatctctcaaatgtgaacgtttaaaagcaacaacgtatttttcaaattacgaaacattgccatataaataaacagaggaatacaaaattttattcctcgcaaaaaccacgtaaatattaacgggcaaacacaataatgctgacttttgttgtttattaagctgatctgattcatgtatttgtataaagattaatccatagaatatactacatatataaaggtataaatataaatattatagattaatccttacgata

SEQ ID NO: 169013 - DNA, 426 bp, Glycine max
tcctagatgcttactccgaatacaactagattttgatgcatgccctaaatgaggagaacatgacatttatcactgaagatgccaacttttgctaaaaggtcatgcccttttgcctaaaaaatgcaagtgctccatactaaagattgatggaccggattttcaagcaacaaatcgaacgaaacgtccaggcttatgtcgatgacatggtcgtcaaatctcatagcatagcccaacacatggtagaccttctggcagaattcacttggaacgaccaaaccaccccagattggtggagcctctatgctgacaatgcgtccaacatgatgggaagccgggcatgaatcattcttgaaggcctcgacactgtcaccttagagccagccatcaaactcaactttaaagcctcaaacaatcaaacccagtaca

SEQ ID NO: 169014 - DNA, 144 bp, Glycine max
gccttgaactaactggctccaagttgtgctaaagcaccaatcagtttttttcaactatcaaacccaaaggtgtgcactgcttgcgattcaatagaaatggcccttagatctggtcactttcaagcctcctttttaccctgatat

SEQ ID NO: 169015 - DNA, 235 bp, Glycine max
ggattttggtgcatgaggttgtggctcactaacattttgcagtgctgaaactaattgtttctggtttaaagcccagctatgcactgtgagctgccccatgtaatactgcataacaataattgcagtctatgcatcacccttcttgcttgtcggcctagtctcttgatctgaccttgctgacatgcctatgttggctcttgaaatacatctaactatctaacctgaaaaactacat

SEQ ID NO: 169016 - DNA, 422 bp, Glycine max
  unsure (1)..(422): unsure at all n locations
atttataaagaagccaatggtgatgataacctatggcttctatatgcaaatgaagttatggtacgtatggctgagattgagcaactttantagcacatgtcgtgtgagacatagtcaagtgaagtcaacccatgtgatcaacattgttggataattatagttttcacaaacaaaattattcacactcacaaaaaattgtgagaacacaataaatattataccgtagaaaaaataataacaaacacaagaatgtaatatagttcacacctcttatctacgttcacgaaacagttttaaacgtatgtttttatcacaaaaatgattacaagattgtaactcaccccacataatgtattatgctacaaacccgaatatctcactcaatggttacaagaaatgataatactctcacataaagattc

SEQ ID NO: 169017 - DNA, 294 bp, Glycine max
acactggatatcataaaaaacaagtctctataactttctaactaacatagagttggcaccattcaataactatatactcacactcacaatcacataaactttaacttaattgctagtggctaaactaaaacaaaggaacactataataatcaagaaagtgtgatatgaattattgaataagaataataaatgtaataaaaggaaaaaaaaagacaattacttgttggaaacttcctttctgtgaagcttaacgggagttcctgaacgaggagaagtaagatgagaagtagaaag

SEQ ID NO: 169018 - DNA, 475 bp, Glycine max
  unsure (1)..(475): unsure at all n locations
tatatgaatgtgttgcanaattaccaacaacctctttcattcatttatctgctacatcctcctacgttgtttccctacatgccactacctcttcaatcaatgagagaaaattctcaaaatccttcttaatgcattcgatacttgccattaccaccaccaccaccaataacttataagcaagcatcttttaccgaaaattctcaaagtttttcaaacctttcctttggtgccataaaacaccttcaacacattccataagcatcctaataaataattgtagttgtgaaaaaaatcctttaaatgaagaagttgatacacaattttctactcaaattgagtgagaaaatattacaatagaggaaggaggagagagttctacaacgaagatatatggcacaagaatattcttctcaataanaaagataacgtcttattagtcgtggttaatgtctcactcgattcgatagtcggtgat

SEQ ID NO: 169019 - DNA, 411 bp, Glycine max
atctttggtcgttcgcttaatcacattctttcataagaatcaaaagaattcttagactgtgtcgttttgaattctttgacaagggagaagggagacacaaaagaattcaggtggttagtcccttgttcttttggaaaagagagaagagagacacacaaagaattcaagttgttagtccttggcgaattctttctggcaaagggagaagagaatgaaaagatgaatagcacaagttttcaaggtttggaaaaccagaaaacttcagaaagcttttggtacaaagaagaagaagaagtttaaagagattcaaggcttgtaaaggattgtaagagattgttagaaagattcttgaaatgtaaaacaaagccttgcttttatagactctccatgtctggtcaagaagaccattca

SEQ ID NO: 169020 - DNA, 342 bp, Glycine max
acaatgtgctcaatttgggatctcatgagtgtagtatcttctccataattcttacatcttttaacttctcaccattttttttagttgatttgaaatagtgagaattcttgaaaaatagtcaaaaatggactttgactctttcatatgtaaggatttgagctcacttcttagagtttggagacacaccttctttactttgtcttcttctttgtcagaggtttgaagcttatcccatgcctccttagcgtatgtttcataagaaattttctcaaactcatcatcacctaatgcttgatagatgaggaagaaagctttcttgtctctctttcttgaatactttaa

SEQ ID NO: 169021 - DNA, 452 bp, Glycine max
  unsure (1)..(452): unsure at all n locations
tctttttcttngtggacaatcttgatggattcagcaacattattttttagttntctatttctatttctttatattcattttgtaaaatgaggtttgacccattacctataattttatgctaaatcaacctgttaaatggcttaaaaaactcaagttaatgtcagggaaatagaaatataggaagaaaagagaacaataataagaaatgattatggttttgtggatcttctacgctagattgattgaaatcggataatcttacaatatgtaagacttgctagcatcgctattttgggtttagttaatgtcattctgaagtttaaactattatatgttttcctattaattttaatttctactctacacccgcctcccaaaaaattgagtaaaagagttagaggcttgaagtctggatgcaactcttattcacaaanggaacanaattaaatgat

SEQ ID NO: 169022 - DNA, 369 bp, Glycine max
  unsure (1)..(369): unsure at all n locations
atggggcatgcatgatgacccttaacattgtaaccgttgagattcccatatgctggaaagtcattaatggtacaaaaaagcattgcacgcatttcaaatgtctccttgcaaaacgcatcaaacactacaaccccctcgtcccacaactttctcagatcttcaaccaacggacttagataaacatcaatgtcatttcctggttgtcttgggcccgatatcatcatagacaacatcacgtatnttcgcttcatgcacaaccaaggaggcaaattgtaaattactagcagaactgcccatgaactgtgttgagtgcttaaggtgccatatggattcattccatcactggctagtccaagtctaagaattctt

SEQ ID NO: 169023 - DNA, 456 bp, Glycine max
  unsure (1)..(456): unsure at all n locations
ctcacgcgtactatggatactgagctcgacggacggcttgtttaatgaataataataatttttattatcctttcataactctatttgatgcgatcttatcggatccagattctattctatctcaatgcattgtattcagactttattctatctagattctatttcgtgccgattttatttcatccgagcgtatctcatctcgtccacatcttattttatttctcttatgggctgggacgtcaaatagatgtgtcagctttgcggatgaagaactatatatcaacacccatgtggtagaataaggagtcttttttgagagaggagactccttctatgagtttagaattccagtttttattactgcgcatgcacactgtccacgttgaataatatccattttctgctattcatctgtaatccatacattctnccacacgatgctcgttctttattttc

SEQ ID NO: 169024 - DNA, 404 bp, Glycine max
  unsure (1)..(404): unsure at all n locations
agtacctgctggggaccagattccataatggattccctcatcactagacttctccgcgtgcctcatttattgaaggatgagaatcctactgatggagtggagacgtcagccatggttgcgtctcgagggagaggaagcggccgcaacagtacaggaggtcgcagtggaaggggcggacgtcctcattgcacctattgcaagaggataggtcacacccaagagacttgctattcattacatgggtttcctgacaaggtcgcacaagtttctaaatcagagaaagcagagtccagattctctgatgaggagtatcaggagtattngaagctcatatccgagatgcccatcaatcaagcacaaccctcgtccgtaccatgtttntcaacagcgtgtatctctcaatc

SEQ ID NO: 169025 - DNA, 409 bp, Glycine max
gcttcgccaagtatccccattgaaaaacctttattcaaacctttcaaagtttatatttttctttcatttattatactgcattcttacttcctatctgtccgtttgatcctactccgctgacctctgatatatatatacgtcaaagattaatactgtctctggtctcatatataagcaaaaataattacttcccatagattaagaaagttagttgaaatcatttaattttactaatctcaagtagaaagtaaggctattcttaaaatgtcctccattcaaacctgataccttgaataaaaatgactccataaaaatcgaattacaattaaatgaagattgtttatgaatgacatcaataaatatgagtatagaggactctcttgcttatatatgagtatagacggagtat

SEQ ID NO: 169026 - DNA, 315 bp, Glycine max
aaacaaaagtacttaactttcaacttatgtgttcaaaggtgaaagaggaagtgaaggtaccaaaccaaaccaccaaaccaatggaagatggcagagtacttcaccacacccaactctaccaataattaatgttacaaattccggaatttgaacatataacgattcgtcacctgtaggaaattatagccccatttcccatactcacagcatatatatatatatgccacaagatcatggtattttgtactttcagagcaccatagatggttggcattggcaagttgagagaaatatatatataaatagacatttaac

SEQ ID NO: 169027 - DNA, 419 bp, Glycine max
  unsure (1)..(419): unsure at all n locations
taaggatgaatctctagtgtgcaacacatcctgcttctttctgaangaaangaaactctcattcatgcttgtatcttattactgtgatataattaacataaaactactcaatcgtggtgtaaaaagggcttgccttcagcttcatgtatccagtttctttgataagccaccagtgttcacaccccaactgtagatattatcatattcccttgagtcctagaccatattttaacgatcatgtggaaacatgaggaatagaggccggaatacttgtgaataaggataacattttgcgaacaagtacttattagaaaagtgtattctagagtgttctttctctttttttctctttacaaagaaaaagtgtcattggtaaagtactcatgaatgttaaaatatatcatgatgcagcttgatta

SEQ ID NO: 169028 - DNA, 325 bp, Glycine max
tctgcactccctcttcgttatccatcttacttatggatcgggtgttataggggtgcctttgcgcttttttagttatggtgagttccctaaagaaacaaacagtggtgagtatggcaccaaaacatgaatatgctaatgaatgatcagagcacttggatccacctgaaggcctttttagacaacgtgatgagtttcagaacttctctttttgtaaaaaggaacaaaagcttttatctagccaagatcatacaaaagtgttacaacaaaaactaacactttctaattatatgggccattaaatctatcatgtgttgatagtaattga

SEQ ID NO: 169029 - DNA, 388 bp, Glycine max
acagacaattgtaatgtcttgtctgtattatacctaagatctgaaatgcttgaatgcaatcaaaagtttcagcagataagaattccatatcaatgaacttagggtcgataatggaacgagatgagaaaagatttgagtaccgtttctgctgttcttcggaagaaaacagtgtggaagatgataatgagggtggaattggtgctgttgatgcgctgttggttccgggacgatgagctcttgaaactgaagcggaggtggatgaacccttacgtttctttgatgattctgccatatgatggagtttttgcagatttcaatcggtgaaatcaaaagaacaatgaaaaagaagaagattgccagttacgggagtcgatttgatgataaaatg

SEQ ID NO: 169030 - DNA, 248 bp, Glycine max
cgaatccaatccaagattcaagattcaagagaagaaatctagaagcaacaagtcaagacttcatatccgataagtattaaaagaatttttcaaaaaccaaatagcacagttttgttttacaaaagaattttctcaaattttctaagttaccagagtgattactctctggtaattgattaccagttatcagtaatcgattaccagtgaccagtttggttttcaaaatgtcttcaaatgattttcaaata

SEQ ID NO: 169031 - DNA, 425 bp, Glycine max
ggaacttaaaactaagcttgtatatggttgggcttccaaagaaaaaaagagttttctatattacaacaaagcatcaaggggttgagagagaaattgtcaaatgaattacataaaatgtctcactctcatcatttcataatgaaaaccattcctaactcaatcagccttttgcaattaaatcatttgtcaccatgattccttgattctccttttttttctttcttcttattcatatcattttttaataggaactaaataaaatgaacaacaagtattcatgtcacatgtgaagagaggacaaactacaattagtgacaatctttttaaactcaacaattctatgccaattcaaatcaaccattaaacatgagttttttcccgcaacctaaatggaccccccttcatgcacaatttctcttgtacct

SEQ ID NO: 169032 - DNA, 343 bp, Glycine max
  unsure (1)..(343): unsure at all n locations
ttcgacacctactatatgttgacttgaccaacgctgttattggaatgctgcgacaatctttcaacaccttattcacacattctgataggttggttgtcatgtgaccatatcgtcgtccagatgtatcgtaagccatgctccattnttcctttgaaatgcgatcaatccatcttgctatggctggactcaattgacgaaatttttctaagttgtgatcaaacacatgcttgcaaggagtgtacgcntgcatcaaattgttatcatcaaaagttgtacgtagaaatgaaactcacattaaattaatgtataaaataaaccttacccaatttcttgaacatctctt

SEQ ID NO: 169033 - DNA, 459 bp, Glycine max
  unsure (1)..(459): unsure at all n locations
agctggctcttttcattggtagntacttatgaaacatgttttagttcgtctctgttaaatctatagactgcttggagcaccagtagagattactagtgataaggatcctgctattgtgagtaatttatctcactatctcattattttgcattaaacaggttcataacaagttactgacacttcttgcaattattttggagtttgggggacttgtttggtatgtcacaaatattccaaatgccttccatataaatttgtttgatatataacttatactgtggtgtctgcccttaacaaatgctgattgtctttcatcaacaaggtgattcaagaccttactaagcctattagataggactntagcaataattttgtagacacaacctatgagggatatgggtctaaaatcacttatatgttgaggatccttgagcttanggatatgagcaatgaatgatg

SEQ ID NO: 169034 - DNA, 243 bp, Glycine max
  unsure (1)..(243): unsure at all n locations
agtatgctcctaatgtctttagtttttaagaacattaatctatagcatttatctcataactattgcataactatggcacaataccttaagagtttagtgaaatattntgttgtttcatcatatttgtacattagatgcttgaaactcaattctcctaacaactctggagagtatcactattttcttttattaccctgttatataataaccacattttcttttgcaactattacgcaaacatcg

SEQ ID NO: 169035 - DNA, 443 bp, Glycine max
  unsure (1)..(443): unsure at all n locations
tgttggaagatctcagagaatctatgctttggtcttcctttatgagacagggncgccgctcatggtgacgaaatttttcttcactgagggtatttacaatggcagcaccctaagcattcttggaaggaaccctaccctcctaaaagctagagaagtggcaattgttggaggtactgggatcttcaaatatgcaaggggttctgctgtgcttaccacatatatgtttgattataacgctggtgttgcaattgttgaatacaacgtgaccgtccttcatgtttgagaaatacgttgaatttgaagctgcgttctctatatagggttctttcgaggttgagtgagcttgaagtctttcctgttgattccctaatttgttttaaatgtgtccttaactgtctaaagacagatccctcttaaagtgagtaattctcagtgtaatatca

SEQ ID NO: 169036 - DNA, 394 bp, Glycine max
aatgatgtttagatttcatagaattataaaggggtaattaaggagtgaataaacattttaattcctgtctttgtacccattttgcaaatcaatctttatctttttgaaatgtaaaaaatagttcatatctttacatccgatatacaaataagtccctactgttaaaattcaatttccactgttagtcatatatctatgtgataagtcttagttcatgtaagcaaacccatgtaacaagtatttggactgaattgaaaaattatgataagttaagataaacaaatggacattgcgcaccagaatatggtacactatgcacacctttggacattgcacgcagaagcaaagcaaaccttcatgaatcgcccaacttgaaagctgctcgctccaacac

SEQ ID NO: 169037 - DNA, 471 bp, Glycine max
  unsure (1)..(471): unsure at all n locations
ngagtcaatagcacacaggttgcacagaaacacctgcttgttatctattcatatatggaactgtgaaaacctcaaatccctccctgaaagattgcatttccttgtgaatttaaaggagatcaaaattattggttgcccaaatttggtttccttcccagaaaaaagtttgcccgcctcaagtctgtcagaactttccatcatgagctgtgagaaactagtggccctgccgaacagcatgtacaatctcgactccctgaaagagctggagattggatactgtccaagcattcaatattttccggaaataaactttccagacaacttaacatccctttggatcaatgaccataatgcctgtgaagcaatgttcaattggggcttatacaagctctcttttcttanggacctcaccatcataagtggaaatttgtttatgccacttgataagctggggacaatgctctcatccac

SEQ ID NO: 169038 - DNA, 377 bp, Glycine max
  unsure (1)..(377): unsure at all n locations
agtcaggcagaaagttaaccctagttcttaaggaggaagccttgtcctcgaaattaaggcccatactctcttttctctctccctccctcactcgtcttcttctctatctccttccccaccaccagcgtctctaacattggtccgacctgccgccgccattgccatggctgaccacaccaccagtaaaaccaccactgatagattagaagatgcagttactcgcctcacccacaaccaagcttctcttaatgagaaatacacaaagctatcaggtaaggtcgactccattcttgaccacttgcgtctncacgaggcaaccccgagccattccagtcctcgagtctccttctcacagcgaaacaatgtcaagctagata

SEQ ID NO: 169039 - DNA, 428 bp, Glycine max
  unsure (1)..(428): unsure at all n locations
ctcaagccaggagtaccttcacttctatacctctcagtggctgacaaagttgtaagcttaacctttgtacaagaggacgggaaacaccagcttcccatctattttaccagtcgtatccttcatgatgctgaaaagtggtaccagatgatagagaaggtagtgctggcactcataacctcagatcgacgcctcaggttgtacttccaaagtcaccaagtggtagtcaagacaaactaccctgtcaaacaggtgttgtgaaagcctgaactggaggaaatgatggtattatggtcctaagtcgacccaagctatgagtacctttacttgtatacctctcaatggttgacaaagttgtaagcttaacccttgtacagaaggatgggaaacaccagcttcccatctantttaccaatcgtatccttcatgat

SEQ ID NO: 169040 - DNA, 465 bp, Glycine max
  unsure (1)..(465): unsure at all n locations
actaagcttaagttgctcggatagcaacttgttctggaccaacaaattcttttgtgatgtaaactccaacacgcttcttttggttgggatgtgtgctctatctcgcaagattgcatggtcactagcagtcatattctcaatcaattccatggcttcttcangggtcttcaactttatttttccccctgtagaagcatctaaaagttgctaggattgtggccttaacccgtcaatgaaaatatggagctggattggctgtgaaaatccatgagtaggcgtctttcttattaacccacgaaatctttccaaagcctcactcaacgactcgtctagaaattgatgaaaggatgagatgacagctcttccttcagcagtctaggactctgggaagtatttcttcaagaatctttcaaccacttcatcccaagacttaagactattatctctaaatgaatggagccatct

SEQ ID NO: 169041 - DNA, 437 bp, Glycine max
  unsure (1)..(437): unsure at all n locations
tgcaactgatctgatacatctatatgcagtcaatgagtctgttatacaatgtaatattccgcgagaagatgctgatgtgttttaagagtatatgggaaacaccaattccttcgaagatggctgcttttgtaaggagggttgtgcangatatgatacaaacaaaaaggaactcgaggaggagaaatatctaattacagccagcagactatgtgtgtcccttttgcaatctagaagaggaacctatggagcatttgatgttaagctgtacattttcatcaagcatctggaataagtgctatgctcggttggggatacatactgcccaacagatattctaaaatgcacctaatgcaacattcatgtgggatctttggaaagaagttggcggtgaaacagatggtggtatggtgtgcaatggtgtgatctctatggtcaca

SEQ ID NO: 169042 - DNA, 338 bp, Glycine max
ctaagcttaaagatagacagagcgcgagcaagaaggctcgcgtgcattattttaaaatataagcccaacttcggttttcaatacaaaaccgatgttaaccaaatgatgttaatgttaacatcgattctctgagagaaatcgatgttaacttatcatacattaacatcggtttcataaaaaaccgatgttaattaaaagacgttaacatcggttcttcaaaaatcgatgttaacaaattaatgttaagatcggctgttcaagaactgatgttaatgttgttggatcaatggcctttgaattattaacaatggggggcggaattaattattaatgaaccc

SEQ ID NO: 169043 - DNA, 291 bp, Glycine max
  unsure (1)..(291): unsure at all n locations
tttgtcaaggattgtacgatttgaggttacaccattcaggttgtattataattcttttccacctagtttttaatatagttttgtacttatctattaatctcatggctaataataactgtacattgaaatgattcttatgaattcagtgttaagcatgaatatgaaggtaaatggaatgagaatacccgcttaactacctgtgatccccatgcaaaaaagctagtcactagctctgaatcntctcaagaggttgaacacaagaaagaaatcattctttcctatgatgttgag

SEQ ID NO: 169044 - DNA, 415 bp, Glycine max
  unsure (1)..(415): unsure at all n locations
aatagtattaggtggaaattcaaagtgaaggtactagataaatgtcaaatcacctaatttagaatagctccatccgatgggaaggatagacacacgaaggcaaattgacactcaactctaacctataactagaaatctcaaattttgccttcttgtatacttacaaaatcaaattgttccattaaacatcttatgtaattggcatgtcaaacctcaaacaatatttggctcaaatgtcttgaaaaacagcttagttgtcatgccaaaataactaaagcagacataagaattaccaacacaaaccacatcatgcaaagatgaggcttaccaacactgagacactgcaatttgatgatgaagaattagaattaacaagctactctttatcaacatcccatagcataatanatgatat

SEQ ID NO: 169045 - DNA, 461 bp, Glycine max
tatattgtagtgaatgtgtatgttctggcggcattttttgtgagtaaaactttcaatatttgtgcaattacctgtgaatcaattatcttaaagtatttaaccttgtgtttctaatttcaaaatttcaagtaaatctgaaatggctaaaatctgaattgctttgatttcaaaatttcaagtaaatttcaaaaccttgtatttaacctgcattttgcttgttcttgttcatacaagaaactcattcttttgtgaagtaaaatatgatcttggcacaacaaattggtgcggtgaacgtggagcgatttttgagttcgattcaagaaatgggctcggccaagtatgaggttgaaaaattcacaggacaaaatgatttcgggctatggcgattgaagatgagagctcttcttgttcaacagggcctggtggaagcacttgatggagaagtaaactcgaaagatgat

SEQ ID NO: 169046 - DNA, 269 bp, Glycine max
ccccaattcatctatccaatcattgaattttttgatgctattaaaccctgactctctttggcatgtaccaaatctttcccctggatccctgatgttattaaaatcacctaatatgcaccatatatctccattctgtgttattttcagctgtttgatctgctcccacagcgcccttttatttctgatatcgcaaagtgaatatattgtgactatgttgattgcaatgcttttttgaccattccccacttacaaatgaaccatggctgata

SEQ ID NO: 169047 - DNA, 172 bp, Glycine max
acagcaagcacacgcgcataaccccctacaaacgctctcacgcacaagacacttaaccgaaaaaaaatgcacccacacacaacgaaaggagcgcccgcacctacaaaactcacacagacccccaacgcggataagtcacgcacatcacacacatcgcaccggccaaacacac

SEQ ID NO: 169048 - DNA, 359 bp, Glycine max
  unsure (1)..(359): unsure at all n locations
tatcatttagtcaccaaccgccatcaaagtcccctgaatcctaccttgaagcacttccagataacgccaaaaagttctacgagttgcaaaattagggcttgcataaacccctgaacaaaaccaggtacttcttccccttgccagctntagggtaatacactagggcatcaagtcctcaacaactaccaaaaggcaactcccttctgacacaaaccccaaatattgcctaactgtcttgtgcctcctcctctactaccatcttataccctaacatgtcccataaccactntatcttttcacnttgcatatgtgtttcatattgaanattttaacttttgatgaaaacaccttactaactc

SEQ ID NO: 169049 - DNA, 470 bp, Glycine max
  unsure (1)..(470): unsure at all n locations
ntagttcacatgcaaacaaccactttggggtgtctcatgtttttcttttagtgttacaaacaatctagatgttgtagtgactcttatgtctgtataacacttaatannntgttaatgcaatttcgtatgcaccgaaataatcagacaatttcttgttttggcatttggtttttgcattggtacgcaaattatttgttgtgcaaccaagctggaaattatttgcaggtgttttgacaggtgtgaatccatagctacaaatgattgcaactatactgttctcaactttaagggcccctaagaaggtaaatcgtaatcatttaagtttttcattgaaatgtgacatgcatggtgcctaactgtgttttttcattgttaatcgaatgcgctatgtgtataactcacacgcatgtcaaaaaccttacaacattttagtcgacacatcgactctatcacaaacctctatgatgatg

SEQ ID NO: 169050 - DNA, 341 bp, Glycine max
ctgtcagaacaatactagaaggaattccatgcaaccttactacttccttgatgtacaactccacgagtttctccattctatacttcatattcactgggataaaatgaacagatttggtgagtcgatctactatgacccacacagcatcatgtccacgactagtcttgggtaaactagatacaaaatccatagatatgctctcccatttccattccggaatctccaatggcttcaattctcccgatggtcgttggtgctcaacctataccctttgacatgtcaaacatcttgctacatattcagctacatcttttctcatgccatgccacccaaaacttctc

SEQ ID NO: 169051 - DNA, 459 bp, Glycine max
  unsure (1)..(459): unsure at all n locations
tctaaactntatacaagaatgaagctctgatacctcttgtttacaagtggcctcagatatcttaagaaggggggttgaattaagatattgcaaactatttccccaattaaaattctatttcaatttcaatgcaagttacaagttcccttaaaaatgaactcttcaataatgattcaaatagaacaatctgaatataaatgtaaagcaataataaataaaagagtttaagggaatagaaagtgcaaactcagatttatactggttcggccacacccttgtgcctacgtccagtccccaagcaacccgcttgagagtttcactatcttgtaaaatccctttacaagttctgaacacacaaagacaatccttcctttgtgttcagaattctctacaacaagagaccctcggtctctcaatcccctttgagaattagaaagaaaaaagaaaaatctctcttga

SEQ ID NO: 169052 - DNA, 375 bp, Glycine max
  unsure (1)..(375): unsure at all n locations
aattcatctatccaatcattgaattctttgatgctattaaaccctgactctctttggcatgtaccaaatctttccgctggatccctgatgttattaaagtcacctaagatgcaccatatatctccattctgtgttattttcagctgtttgatctgctcccacagcgcccttttattttggatatcgcaaggtgaatatattgtgactatgttgattggcaatgcttctttgatccattccccacttagcaaaatgaaaccatggctgatgatcttattctgtagcttaaaggttctttcacaccataaacaaagaatnacctcagctgtattagtagcttgttcatctccaactgacctaccatctcccacatga

SEQ ID NO: 169053 - DNA, 432 bp, Glycine max
  unsure (1)..(432): unsure at all n locations
ctataaaactaagcttcctcgggccattcctgcgaaggctttcatttggaatgttatttntaaggggacattactcttaaagcaaaaatggcatataacctcctcccataaatacaaacatcaatgtaaatttagagcaagcttatgcgcatatttccttacaaacgttctcttgcacaagacatttaaccgaaaaaaaatgcacccatatacaatcaagggagcttcgttacctacattatttacacgtacctccaaggtgtatttgttacttacatcacacacatctccttggctaaattcacatacatgcatactcaaagcattttggggtaccaaaaattgcacacgtgcacatcttagcatttctaatacctatacatacgcaaacttgatgatgaatcttgactatctacacaataaggtgctaca

SEQ ID NO: 169054 - DNA, 303 bp, Glycine max
acttcaaatacaagtctctaaactatacattgagctactcttccaccaagcaagcttttacacttcagcatttcactgaaatattcccgatggacaaatttaactttcctccataactacagaataaaagccagagaataaaaaaggctaaccggatatttgaacgcataatttccacttgaacgttatcttcacgaaatgatatagtgaatcacgagataaaaagagagagagttgaagtgtgttcacgtctcataggatgcattcgatttcgacaggaggagctagatatgaaaggagagc

SEQ ID NO: 169055 - DNA, 260 bp, Glycine max
caaccaacaactcaattgagatcatccattgtgtatatctcatctcacgggaatattctcgaaccttcgagcacgatctatggcattgattaaagcctgaaacaaataagattactaagacactgttactctttccagagtattctgcatcagttaacacaaatcaaaagaagatctgctgttcaaactaatgtgtcggcaagatctttatttgtgctgactatctagacatgatcaatctgtattgctaggaatatgga

SEQ ID NO: 169056 - DNA, 378 bp, Glycine max
  unsure (1)..(378): unsure at all n locations
tgttgtaagttgtttggagtgtacagccaagttttggattttgttgttgcaggataaccaacgtgacatgctgtatttattatctctaaaatgtaatgctacagacaagactcttgtgagttggtgatgtatcataaaaagatcatattcaaatattcatgattaacatttgtttatattactagcaacaacaagaaagctttattttacacgttacaggaattacacgacattatttgataaaattaaaaatcaaaattntaaaaatattatgtaatttgatgtcttctttaacgatatctttgacttgattgttggtccttcctttctttttaaatgactaanaaatcatataatatattattctaactaacactc

SEQ ID NO: 169057 - DNA, 485 bp, Glycine max
  unsure (1)..(485): unsure at all n locations
tactaagcttcagaccaaagcaactcanaatctaggtatctaaaaccctttcttttattggattntcaaggcttgagaagtgaaaatgagaatggggaaactttggagcaaactcttatctcaaacaagtctataacattaatctaaacttgttcaaactggttttacgaagaaaactctaccgaatcgaaatttgactcctcaacaccctagaaatggctcttgctttcactttgggccactcattttcctcctttgcacagcccaagctttctcacagtcctaaatgacatttcaaactaggattacctcactctaacctccaattaccactaaatccagatttggcttttcaaatcctcaaagcatcacactgttccactcatatcactacattctcacttttaaaccctaggttaactctacccttcatctctatcagttgtccatcagccatttcagcacacaagcatcacaagcatcat

SEQ ID NO: 169058 - DNA, 361 bp, Glycine max
  unsure (1)..(361): unsure at all n locations
ctatttttgtntttagttttagtctctcttctctttctcttttattttcgttttttacaattccagttcagacttttagttttatcaataaaattttgttctctatttgattaatggaaggctaagtccgcaacgttgttttctcttgaggatcaagcacaattttctttgaggttctattattactgttaaattttgttcagtttttcctcttcaccaattactctgaatttgttgctattaattcatgcatgcttagtgcttgattaatngtctctgcgcttaatttacgttcatgcttaatgatcgtttatgagtaattggtgtgtgtgatgcttaatcacctaatgaatgctttatg

SEQ ID NO: 169059 - DNA, 469 bp, Glycine max
  unsure (1)..(469): unsure at all n locations
catacaattngtacccactaatgatcaacttgttgtcttttcatacccctaactaaagaaaggttgattgtgctaaagaataaaatcggaatggactttataaaagaatgagttaatgtttatatgtcctacaatctaacttagtgtctagaggacccatcatccaatgaatctaagttgatagatgcacatcatttatatattatgtgtgcccaatgtatgaatattttcatatcatcaacattgtgttatttaagatgaaatgtagtgtcttgggtaagataatgttattgtgctgttgatgagtcaccctttgattggtggaccttatgattgcatttcaaaaagcccaaaaaatgggttcatcttcaagaatcaaaacaaccatcccttctcttatcaaaccctctaattacaaaaattccccactttctttctcatgtttattctctctctgaaccctaaacac

SEQ ID NO: 169060 - DNA, 316 bp, Glycine max
  unsure (1)..(316): unsure at all n locations
atgttgaattccgcacataacataaccctcttcttaaattcttttaatccttgtctagatgttcgtganagcctcttaacagcaacctcttgtccatctggtagtattccctacacacataacatttgtgcgaaagaaagttaaacgtagtgactaaaaatnttcaggtgttgtcatttcttatttatcagtagtaaattgctcacataccttgtatacaggcccaaaaccaccttcaccaagcttattgtcatgtgaaaaatatttgtggcatgtgctattgaggaaggtcaaataaaggtagctcacaatcttc

SEQ ID NO: 169061 - DNA, 420 bp, Glycine max
catcccaatctcgagcgaccatcaacgatccaatctcactctagtgcaaggtacttcttatccattatacatgattacttttaaaaactgtggatatacacctagaaaaccaaagctgagtcatttgagaacttcaagtactggaaaactcttgttgagaatcaaacaaaaaggaaagtaaagaggtttacgactaacaatggtcttgagttctattaagattactctaatgatttctataaggaacataggataacaaggcacaaaatagtagttggtactcagcaaaatgatgtagcagaaagatttaatagaattattctggaaagagtgagatgtatgttgttgaatgcaggttcgccaaatatctcttatgcacaatcaattatgattctcttgataaacaaatgtccctccact

SEQ ID NO: 169062 - DNA, 360 bp, Glycine max
  unsure (1)..(360): unsure at all n locations
ataggactatnttttacatttcaaaataatagggactaatctgccaaatgggtccaaagtcaaggaccaaaatgcctattcactcggcaatgattattgtaaaactgctaccaatcttttttaattatgctatcttttaaataatgatgttaatatgcttttataagttctaatgggaatcatttatcccaattttacaatgaagtttatccgcatgtgtcttcaaaaaaacacatatatatatatactcgacttataaagaacgtattaatttattgacatgtatttcaagaatacatgagagttgtccaggacatgtttgatctataatttggtgcacaccatcttcattcttaaccc

SEQ ID NO: 169063 - DNA, 398 bp, Glycine max
  unsure (1)..(398): unsure at all n locations
tgtaatcgattacattcattgtgtaatcgattaccaaactcaattttattcttatntcaagtctgaagagtcacaactctttagaaactacctgtgtaattgattaccacatttatgtaatcgattagcagtaaggaattttcgaaaataacccccaagagtcacaattgttcaagaattgttgaatggccatcaaatgcctttaaataggtgacttgggatacgaaattccttagagtttgtctgaacaacattatcttatcctctcaaaaccaaattatcttatcactatcaaaatattccttggccaaaacacttgcaaattcaataaggaatcatgatcgatattcaatggtaatatccttatcttaaagagagaaaattctttttcttcttat

SEQ ID NO: 169064 - DNA, 325 bp, Glycine max
ataatcaacggccatctcatcctctcaacatcactcctcacttgattccaccgcactaaggcatatccctcaaactccatggaggccaatttgatctttttctcttcattgaattgtagcaagcaaagactttctcaaccttcatctcccactcaagatacacttccgaatcacaagtccctttaaaagtagggatcttcaccttcactccctcaatcccttcctctctttgtccacctccatatcttctatgaattcttctctccctatacctctcattcctccatcctccctcatcctcttcataccgatcaatcttctcatg

SEQ ID NO: 169065 - DNA, 415 bp, Glycine max
tactaagcttgagccaaatctgactaccatagaccttgaccagcgtggatatgcaatccttaccctcggaagccaaatatagagaggagaagagaatgaaaatttccaatcaaagatgaagcataaaaaggagataaggaaaatttccaatcaaagaggaagcataaaaaggagagaaggataatttcccatcaaagagaaagaaaagaagaggataggaaattcccaatcaaagagtgggagaaagaaaaaagaaaagaaagaaaactcccaatcaaagaatgggagaaggaaataaagaagtaaaaaagaagaaagctcctgctcaaagaaactagaagaaatgtgcagaaaggtcttctgaccggacgatatctgaacaatacaaatatgtcacccaatgaacaataaaaaa

SEQ ID NO: 169066 - DNA, 293 bp, Glycine max
  unsure (1)..(293): unsure at all n locations
ccaccatggagatgcagtggaagacaaacgacaacacgtgagaggaggcgccaaccactatggaataagccttggaagaaagagcttcaccaccaagaatgtgccttggataaaaagcttggagaggatgcttcaatggaggaaaagaaagagagagagaaagagagggggggggggggagcacgaaatcgaaggaacaaaagacgtatagaacttgtactatcaagattgcctcactcactctcattcatcaaagntacaacaagtgttacacatgcttctatatatagact

SEQ ID NO: 169067 - DNA, 325 bp, Glycine max
tacttttatgggttttaagcaagcatttttttatgaacgcgctaagccggaagtgtgtgctaagtgcgtttttatgtgtttgaatgtgctcatgcacttttgggttttcgatgaatgttcatgcaaggggcttaacgcgcaatcttgcgctaagcctcatcgtttcatggtccaatgccttaaatgaccttctgttcgtaattaaagtccatcattaaaaaaaaacaaaaataatttacacataaactctcagactttaaaactacgttgtctaagttctcttgctctcaggatcctaggagcaagatcatgctttgtcacccaa

SEQ ID NO: 169068 - DNA, 404 bp, Glycine max
acctccattaattctgtgctttaccttctcttacattgtctctttcttcattttttctccatgtatctcctcaaatgtcttgtgctaaactttgttaacatgctgttttagattcttcacctattaaactcgctatagaagctaaattttattttctatggttcaaacttcttggtcttgttcttgaaccatgaattgtgctgagtttacgttcctttgagttttgtcttgctattttttgtggctgaaaactaaaccataaaattcttaccataatattaaagtagaagaacacctcaaaaatctagagtgacttgtcacctattgtagttttgcatagaaatcatgtctagtcatgatacttgtcacataagatctcttatgctgcgcctgatcttaatttc

SEQ ID NO: 169069 - DNA, 379 bp, Glycine max
aattttacccgtatatttgaataagttcggtaacctatcgagacacacaaatatttaacaaggaagactcaggcgaattccgacgggccaaagttcggactcggatgtctgagtgagacccataatatatcatggcgctcgagagttgatatggaatgcccacacaaatttggaggaccataacttttgtcccgtatgtcagattgatgtttatgatatattaagacgctttttgttggaaaatgaagcccatcacaaatacaaacgaccataacctttcctacagatatttgcataaggccagaaacctattgagacacccagaaataaacaaggaagactcggggaaattttgacgtgtcgaaaatttgactcggat

SEQ ID NO: 169070 - DNA, 380 bp, Glycine max
caccaagttatgaccgtccgaatgtgcttcggctttctatcttctctttcgagctacatgatgtattatgggcgctaattggacatctgaatcaaaacgtttgcccgtcagaattcgcccgagtttccatgttcatttcttgatgtctctataggtttccggccttatgccgagatccagatgaaagggtatcgccatttgtatttgcgatgggcatcatttttcaacaacgactatctgaacatatcatgaaaatatatcggacaaccaagtcgaaagttatggccatccgaatttgtgtcggcattcgatttccactttcgagctcaatgatatattatcgggctcaatcggccatccaagtcaaaactttcgcgtgt

SEQ ID NO: 169071 - DNA, 246 bp, Glycine max
gtcactactttgcttgattatgacaatgtgtataccatatcaaagctactagtggtgacggacaatggtctcttacaaatccctattacatagagacatactcatttaaattattaaaacacattctattacctaagccctacacaaacatgatgatgatgtctttacttgaacaaaatgattgtcatacacctaaccgatacatataacgcgatgcataaaataatctcttggtgcgcgactttt

SEQ ID NO: 169072 - DNA, 354 bp, Glycine max
actaagctggaagatgcttcatggatgcaagaaaagggagagttctattatgggggagcccgacattgaacgaatcttagagggagacaagtggaactttgaactatgtctcacaaaactctcattcatcaaagttacaacaagtgttacacatgttactatttatacactacgtaacttccttgagaagctctcttgacaaaacttccttgagaagcttctttgagaaaacctccttgagaagctagagcttatctacacacacccctctaataactaagctcacctcattgagaagctcccttgaaaagattcctaaagaagctagagcctagctacacacacctctctaat

SEQ ID NO: 169073 - DNA, 276 bp, Glycine max
tccagttggttggatttctaaacaaaagtttacttctgaaatccactactttaactctctggtaacaaacaagcctaatttacttgggaacgactcataggtgaattgctcgacagataacgatggatgagtgatggcatcatttttgagcaacttacggctcttcagcaagtagggagtgtagatgagatgagttaatacaggaatgtgataagataacacacccaggtgatgcgctcgcccgatgaccaatattttgagtatttcattcatgga

SEQ ID NO: 169074 - DNA, 405 bp, Glycine max
  unsure (1)..(405): unsure at all n locations
cgtcatcttacattcatgtttaaataaccctaaccctgnctacatatcgcttgctagctactacaacaaaaaacaaatttacaaaactcttaagacaaaattagtccaatggctaacaatttctctctattttttcctttcattcaaacttgttgtctccatattcatggttgcttccatctcattcatctgtatcattagctcattgtttaagcaatccaaaaataactctcttctcatgaatattcatttcaagatcttaccaataaaaaaaaagtgacatgctcttctatccgatacatgtaaaacaacaaaaaatgaaccagttacatgcttatccttatcaaacccattacaacaaaatccatagaacaaccaaataaacacaatgtagtgttgcatacc

SEQ ID NO: 169075 - DNA, 365 bp, Glycine max
cacacgcacagccttctggaggaatcttctggaggccccaagtgggcctggttgctatttgcaccccgcattttactaagtacaccccccttttctatttttttgtaactctttttccgtaacgttacgaaactttacgaacttcgtaacgatacttattttttcttccgcaaggttatgaacccttacgacttatgtatttactcttttttagctttcgaagaagttacggaaacttacggattgcgcaaaaacacctctttgtgacttccgccacattacggaatttcacggatcgcacaagcctgctttcttttgatttctgagacggctcggaacttcattatttgcatgtcatcagtaat

SEQ ID NO: 169076 - DNA, 464 bp, Glycine max
ggtctcagcgtctatgcgagacagattctaatatgttagctatcatcgccaagtaccaagaagagttgggtctagccacggcccacgagcatagaatcgcggatgagtatgcccaagtatatgcggaaaaagaggctagaggaagggtgatcgactctctacaccaagaggcaaccatgtggatggatcggtttgctcttaccttgaacgggagtcaagaacttccccgattgttagccaaggccaaggcgatggcagacacctactccgcccccgaagagattcatgggcttctcggctattgtcagcatatgatagacttaatggcccacataattagaaatcgttaggaaacttgtatggtctctcagaccttgactagatatgatttctctttttgaaataaaatgagttggtcacatgtttctactccaaaaagcctgtgcaaatcagatcactcctac

SEQ ID NO: 169077 - DNA, 296 bp, Glycine max
gatttgctgcttcgatgaattctggagatagaaggcctgtggcaaatagagggaataagaaggagggagaaacccatgctgtggctattgttcctgcatggccgaattttccattagcccaacaatatcaatactcggccaatatgagtcattctcattacccaccaccctaccagccaaaaatgcccaatcatccacaaaggccacccctaaatcagccccaaaacccgcctgctacacatctgaggctaaacaccacccttaatacgaaccaaaacaccaactagggaaggaat

SEQ ID NO: 169078 - DNA, 419 bp, Glycine max
tagtgtcttcaaatccagaaggcgcctccctttccagtttcatggggacgctagaacgcgctagagggtctgatccacaattccacctcgagccacgagaaaaaccccaaaaagcaaacgtctcccttgcctctcacatcaatgtcagagcagttggaaaggaaaatgaacttagtgggaaaagcaaacgtctcccttgcctcttttccatagttctcttatacactttctctctttcttcgcttaaacgttgccctttctcactatctcactctgcttgttctccttcgccacatagatcttctccttcttcttcgacgtgaatgtctgctacctcgcgagcgtgtccgtggctgaacaacatcgattctggaaaggattgtcgcatctccactttttatgtatatttatttatgatg

SEQ ID NO: 169079 - DNA, 290 bp, Glycine max
cggtgattggagatgccactttgttagtcatcttatacgactaacttttgtatgaaaacttttacaaaatgtatatattttccccaatttatggttatttttgtaggattctaaataaattttgctttgtttttatctgtgctcagtagaagccttgtgtatggaattaatgtcaatttctcttcaatttcaggcaaaaaggagttattttgaagaagtgctaaagttaatgtctcgctaagcgagctcaatgcgcttagcgagtgtcatcctctaaccaagtcatcaat

SEQ ID NO: 169080 - DNA, 455 bp, Glycine max
  unsure (1)..(455): unsure at all n locations
tgtcaattgaacacatcaatagccgtgcatcctttctcattattttctctccaaaaatcaaaacttggaacctcattcttccccattttgcatgagatcttcaaggaggaagaggccacaattttcatcttcttccaagctccatcatattgttttgactttttctctcaaagccttggtaagaagcccttaaacctttcttttccttctaatttctttctcatttttatgaaaaattcttacttgaggttccaaatttatttttcatcctttggaagcttgagacttcaacatctaagcttgttttccttaaccattttgtggaagcttcactcaaggtaaggggagtctttccacttcttaaaccctaaccttgttgcctttggaagctangctctattacatgtcgtgatgtttaaaatntcatatctgccgcttacaacccaatgtgattc

SEQ ID NO: 169081 - DNA, 333 bp, Glycine max
  unsure (1)..(333): unsure at all n locations
ttctctctcgaaaatttctgaggaaaattagttccgtgaagaaaatccaagccgaggcgcttccgtaacgtttccgtaacgtttccgtgagtaattacgcgaccgttcttcaagattcatcgttcattcttcgttttcttcagtcttcaatgggtaagtacctcaaaccaagcttttcaattcattctatgtacccgtggtggtccaaattttgtttcatgtatttttattcccgttttcatttactttttatacccccttttgacgtgcttaagccatttanttaagtcatttctcgcttaatctcaaaataaaataaaattccaccgatcg

SEQ ID NO: 169082 - DNA, 468 bp, Glycine max
ctaagcttaaccctctagctcaagtgatagatggttgcattcactccctttaagtacaaataggtgttagacaaccaatgattgaaaatccacaaattattggaaacaatcatacaaatcaagttattgatgaggaatatcaagataatgttgaacaaccggttgagcaacaagttcctcaagaaagtgatgaggtaacatcaagaaaacctactagagtcaaaaggtcagcaattcctagtgactatgtagtgtatctgcaagaatcagactacaacattggagctacaaatgatcctgaaacgttttcacaggccatgagttttaaagaatcaaacttgtggcacaatgccatgaaagattagatggattctatggcgtttaaccaagtctgagatctcgtatagttgcctagtggtgtaaaagccattggatgtagatgggttgttaaaaacaagaaagactcac

SEQ ID NO: 169083 - DNA, 357 bp, Glycine max
  unsure (1)..(357): unsure at all n locations
ttgattaaaacacagagttttatcttctgaagaaaatttctaactctgaaaattttcttttcactcacacatgatgatgcatgatgcacaaatgatatgatataaactaagatgcaacatttaatataacaaataatacaaatgtcattcaagagagttggaaatgtaaaagataaaacttcttcaagcttcaaaactaagtcttcaatgttgctcatgttgctccctctatctttaacataatattcaagtatctttttatcatcaagttatttttaactctcacacaccaggtgtataaatattttcaagaaataaactcttacatagagaataaggcaatgcanaatgaatact

SEQ ID NO: 169084 - DNA, 452 bp, Glycine max
  unsure (1)..(452): unsure at all n locations
gtgtcttctttggatgctgacttgtggtaagaagccattctcgttgagatggattctttanaatctaacaagcacctaagcagtggcatgaaaagtttgataattaatagtctcgaatgggtttaaagtgaatgaaagtgacaaatgcatttactacaaatctgtaaataatatttgcactatcatatgtgtatatgtcgatgaccttctcatatttggttcaaatattcatgtagtgaacgatgtgaaatcattgttgtgtaacaactttgatatgaaagacctcggagaagcaagtgtaatccttggtattaagattactacgtcaaaagagggaatttctctggatcaatatcactacattgagaagatcttaaagaaatatgactactctgaccgtaaacctgctagtacaccatatgatccaaatggtaaactgtttaagaacactg

SEQ ID NO: 169085 - DNA, 411 bp, Glycine max
  unsure (1)..(411): unsure at all n locations
gctggaatcatttatcctatctgcgatagcccgtcgttttttctcgccacgtacncccgaaaaagactggcctcacagcgatcagaaatgagaacgacgagctgattcctactcgggtgcagaacaatcggagaatctgcattgactatacgaggctgaaccacgttaccaaaaaggaccattttcccctgccattcattgatcagatgcttgaatgcctggcatgtaaatcccactactgtttccttgatggtctttctggttatatgcaaattactatagcctcccaggatcacgaaaagaccccattcacctcgccctttggcacttttgcttataagaagatgcctttctgcctgtgcaatgcccctattacctctcagcgtgcatgattagtactttcagtgattt

SEQ ID NO: 169086 - DNA, 298 bp, Glycine max
aagtcaacgctatggatcatttataaacatcctctcctctcaaccttgactattggataaatgatccataaccttgatttgatagaattgatgtcacaacactaaacatagctgcatgattagtgtcttgaatctttcaaatattccaaagcaaatatatgagcccttctgaattgcatcttacacacaaacaagtgaacaactgtaagtctctgtgttggacaatattctccatatagagcctagaaagaaaatcgatagaaattgtctgatgaatagaacagtacgggaaatatta

SEQ ID NO: 169087 - DNA, 460 bp, Glycine max
  unsure (1)..(460): unsure at all n locations
ctaagcttgcacccactcgccagcgactgggagtttccttttttaactgctntctggaagaatattctggaagccccaagtgggcctgattgctatttgaacccccatttttactaaatacaccccctcttgctttttttggtgattctttttccgtaacgttacgaaactttacgaatttcgtaacaatacttgttttcattccgtaaggtcacggaaccttacgggtcatgtaattactccttttttagctttcgaaatgttacggaactttacggactgcgcactaacacttccttttaatttctggcatgtcacagaacttcatggatcgtgctacaacgcttttattttggcttccggcatatctcggaacttcacaaattgcctaacgatgggtgccaaatacctcgaagtggtcaaacgaaggtcgcattccaacagctgatggtccccggac

SEQ ID NO: 169088 - DNA, 240 bp, Glycine max
ccttcgcgaaattccttacggaaacttttcggaagcgcctccgtttagattttcttcacggaaacaatctctccacgcaaattctaaagagacagaagttccaaacgttgtcttgttctcatagcctcgtagggaggaagaatgaaagaagctcttgattcttgcaaaaagaattctccaaggacgagaaatagctgaaggattgttttagttgatggattaagtcaaatgactcctatg

SEQ ID NO: 169089 - DNA, 452 bp, Glycine max
  unsure (1)..(452): unsure at all n locations
tgcctagagaaggagtccacggaggaaatgcttatcttctcataatactggaaagcggtttctaatgactcctgtgcggcttccacataaggcatagaggatgggcagctcaccaagatgtcttcctcgcctgatacgatgaccagatgccctctcactacgaatntcaacttttggtggagtgttgagggaacaactcctactgagtggatccacgggtgccccaacagacagctgtaaggcggggttaatatccattatttggaaggtaacttgacaggtgtgagggcctatctgtactgggagatcgatctctcccctaacctctcggcggttgccgtcgaaagcacgaaccaccattgaactcggttctaagtgggaggcattgaatggtaatttctcatagtgctttaggcatcacgtttaaactggaccattatcgatgacacttc

SEQ ID NO: 169090 - DNA, 298 bp, Glycine max
  unsure (1)..(298): unsure at all n locations
ttctcttctgcgtcctcttctttcgannnnngcagctctggcctctcagtgaacatgggacccgaggagcataatgatccgcatgaaccctgaccagtgtggatgaaaatcttatgatcacttttataatatttatgagaaatcatattacttaatgagagttaacgagaatgataataatttaaaaaatgttctcgttcaaaaattattattttaacatataggaggatgataaaaaaacaaggaatctaatatattggtttccatattttcagcattttgcttagtgaatgagttt

SEQ ID NO: 169091 - DNA, 147 bp, Glycine max
acaacaaaacacgaaaagacaaaaaaaaaaggccggaccacaaagacgacccaaaacgccccgaaacacacggcgaaaaccccacaccaccagaaggaccaaaacacaacgcccagacgaaggaaacacccagccaaagacggacaa

SEQ ID NO: 169092 - DNA, 282 bp, Glycine max
taatactcattcctttatttatgatcgaaataaactgtctacagcatccctgctttctgtgtaatgagatgtaacatagattttataccttttaacactgtaattacgtagtttggtgagggggggggggtattcttctcttctctcttacttctctaatcatactcttatctttaatatcttttagttactcattttcttctatctatttatcatttacttattatactatcctatacgttttacttttcttataattctttacctatattatctctcttt

SEQ ID NO: 169093 - DNA, 356 bp, Glycine max
  unsure (1)..(356): unsure at all n locations
aatataaaaaaaaaaaaaccggagttgatgctgcttgcccacggaacaaaaaccagcgggccgcaaacacacccaacaaacgagaattctttataatttcgatgaaaacgcgggagggagaggccgggacgttaaaaaccgcagcccacgccttccgaaactacagctgcgcaattgcaaccaagatccggctaagcccgacaagcacatatagacgcctggncggacatagacccctctgcaaatcccacacgaaaccaacccggaggaggctgcgggcattctgactaccgacacggtgaacatattgatgcctcctccaaggcggaacatccccacgagtggactatgatgaa

SEQ ID NO: 169094 - DNA, 179 bp, Glycine max
ccttggatttctcaaacaaaaatttacttctgaaatccacttctttaactctcttgtaacaaacaaacctaattttactttggaacgactcacaagtgaattgcttgaccataacgatggatgagtgatggcatcatttttgatcaacttaccgctcttcaccaagtagggagtgtaca

SEQ ID NO: 169095 - DNA, 462 bp, Glycine max
tgtcatcttacattcatgtttaaataaccctaactctttcttcatatctttgtctaactactacaacaaaaaacaaatttacaaaactcttaagacaaaattagtccaatggctaacaatttctctctattttttcctttcattcaaacttgttttctccatcttcatggttgcttccatctcattcatctttatcattagctcactttttaagcaatccaagaataactctcttctcatgaatattcatttcaagatcttaccaataaaaaaaaagttacatcctcttctatccgatacatgtaaaacaacaaataatgaaccagttacatcctctatcttagcaaacccattacaacaaaatccaaagaacaaccaaataaacacaatgtagtgttgcatacccttgatatcccacaaccaaaaaaccttctcctcgggttatcctcagtacatgccatt

SEQ ID NO: 169096 - DNA, 346 bp, Glycine max
  unsure (1)..(346): unsure at all n locations
gatttaaacctttctcataatcatatccatgccttccatggtgagcttggggacaacgttgaataatgcaatatctatccaaactgttgatctaaacacatatcacttatgtggtaaattgccctatctttcaagtgatgtgtttcagttaaatctttcaagcaattcattctctgaatccatgaatgcttttttatgcaacgatcatgacaagccactgcaattaaaatttctgaatcttgcatcaaataattngttaagagaaatacctgattgctggatgaataggacatttcttgtggatgaaatttacaaaccacccttttgtggcaacttanccaatcca

SEQ ID NO: 169097 - DNA, 358 bp, Glycine max
  unsure (1)..(358): unsure at all n locations
tactcaactttgtccttttataaaaagaagttctttttctatcacattatctnaaaaacgccttgacgtggatccaagtgctctgatcattcattagtatattcatgttctggtggcatactcaccactgtttgtttctttatggaactcaccataactaaaaatgtgcaaaggcacccctataacactcgatccagaatgatggataacgaatagggagtgcaagaacagatgaaggccgacctatcggccttaaaagatcatatggcttctatcacggaggctatgctaaagcttcaaaaaactatagaagataatactacggcggccactttcaatacagctatggaagtggaac

SEQ ID NO: 169098 - DNA, 298 bp, Glycine max
cgcaagttcttcaagggaaggttgcggaggggcctcaattgtttgttgtttttggggctgttgctgttgttgttgttggattggtggaggaatgtatggtcggcttgggccaccagcattctgaaaataaggttgttgttgttgttgctgctgttgtgaaggatttgaccatctaaggttgggatgattcctccacccgggattgtatctgttgctggagagttcataattattttgttgtggctgattttgctgctgaagttgaggaggtctattgtagatgtttgcaacaatagct

SEQ ID NO: 169099 - DNA, 421 bp, Glycine max
  unsure (1)..(421): unsure at all n locations
tactaagcttgtaagcctcctaccttacaagtgttgttaagttgtttctgttaagttatccaaggtggatgcacttttcgttgtgcatgcaaggtcaaacgtgttgtgtagaaaagatgtttgtatttgacaattttgcccttttctgaacgttggggaacgtattgcagacatacattttgattgtcttttgctgcaggcgaatgtagcacacacacgttactcttgcatacgtgccacccgtggagtgggtaagcacaagacacgtgatatgtgggtgagtggagatgcatcatggtgcaaaattgtagggcatcatttcagctctcgccaattacccgaagagtcgtgcctctactttaaatggnagttacttttggggtttttttatcaccgccattcttgaattttgctttctctc

SEQ ID NO: 169100 - DNA, 348 bp, Glycine max
ctatatgttgatttgaccaacgctgttatgggtatgttgcgacaatccttcaaaaccttattgatacattctgagagattggttgtcatgttgccatatctacgtccttctctatcataagccatcgtccatttttcctttgaaatgcaatcaatccatgttgttatggctggactcagctgacgaaatttttctaaattttgataaaaaaaatgtgcttgcaaggagtgtatcctgcataaaattatttatgaacaaaaatcttaagtatatatcaaacttagattaacctgaccaccatatatgaaatcttacccaatttcttcacatttcttttttgttgcatta

SEQ ID NO: 169101 - DNA, 434 bp, Glycine max
  unsure (1)..(434): unsure at all n locations
tcattccaattgcaacgtggaagattggtttttttgctntcgcggatatgaacttatgtggattgaatggtcaatgatttgaaaaagtaatggcttatgaaattaggtttccaacagtatttgcgttaaatgcacccgatatattatcaattgaaccagccctgaacgaactcattagcttaaaatgtgaaattataacatgtcatataaacttgtataaaaattaagacatgtaaatctgaaatttaaaacttacttataaataaccatatagacttatgtattaatcgaaatcaatatctatccatttcgctgtacatacaatatatcttattctaaacactagattctaaacaagttgaaaacaaatattgaatattaactaatagtagaatgtgttgttgaaattttcttccagataaagntcacttgtg

SEQ ID NO: 169102 - DNA, 279 bp, Glycine max
  unsure (1)..(279): unsure at all n locations
gcttttgcccaaaaccaagcttgaccaattccgacccaacccgggcatatttagtcagtgagaacctgttatgtgcnnnnnnaggtgagctcctggctgtcctctgataaaaggaacaaagaccaccaagcaaggaggctcttggtggctggccagctgtgaatcttgtgtgatatattggttgtggcctctcggtatccattaccacgggtgggtcatcaattcaaaggcttanaaatgaagacagatggctcagatggtctctgtgtaatccattac

SEQ ID NO: 169103 - DNA, 306 bp, Glycine max
  unsure (1)..(306): unsure at all n locations
tggcaatacatgaagcggaatggggaatggtgtatcatgtacaggaaaagagagagctagagactgaacatatctagattcacgtagagatcatgtgataagcatactattattgcaaaccattaaagccttgtttatatataaacttctccataagcacttgcaagagaagaacataagatagtaaaatgaattgagcttctcttataagctacaatcaacctgtgcagtngacttacataactctcatctactttctcaaaactaaggacataatttgatttaaatatggaagaactcattcat

SEQ ID NO: 169104 - DNA, 257 bp, Glycine max
tatttttagatgccgcctttactagaatcttaattttataacgcctaactttctcttattatctctctattcctcaaattgggattaaaatcactctttattcttttaacatacagcatgatctattttttatgacaaatgttaactagtagtatcccaaaggtaacggctcagaaagtaaagagggaatcaaaggtgtctattaaaatgcagaacaaaaaaagtgctctcgtatgatgcttaaaagcgcctccaca

SEQ ID NO: 169105 - DNA, 316 bp, Glycine max
tgggtgattttgtttttacatggagttctaaaagcaaggcattgtgacactttctacttgtgaagccgagcatgtagctgcaacttcttgcacatgtcatgccatttgactaagaagattgttggaggaacttcagttgttgcaaaaggaaagcacaaagatctatgttgataatagatctgcacaagagcttgccaagaatccggtgttccatgaacgaagtaagcatatagatacaaggtattcatttattagagagtgcattaccaagaaagaagtagaattgactcatgtgaaaactcaagatcaagttgcg

SEQ ID NO: 169106 - DNA, 478 bp, Glycine max
  unsure (1)..(478): unsure at all n locations
tatgtctganaatacagggcatcatttccttatataagcttatgtcttatcagaaaaataacagaataaacttccatatggattttggtcacaacccaacatggatgcatgtgaaagtagttcatgataggctaattttagatattcaaggacatcaagctaggtttacttcttcatgatggtatgactcggactcttctaatgctatgttagccatcatacaaaagttagcttcttcgctatcctcatccgacaatgtgtcgtctaagtcttcccgagtactcataagctccttcttatcttttgatgtgataaataataatgagagagatttattaatggattagtggtctcattaataaatttcttatttcttggaattatttattggctattatataatatcttttaatataataaattatttcatatatatatttatatataaaataaaaccattattcctgctataataata

SEQ ID NO: 169107 - DNA, 406 bp, Glycine max
gttccttataatatgctgacatacagactttcttttttctctcacccctacgggaatgtgcaagataagagaaaggaaattccacttgagtacaattgagatattgagttgcatccctgcaccagccctctgatttgcccaggcatccgaaatggattttataataatctatcttaagaccagaaaccttctcaaaacacctcatgatacattctaagactctaacattatcctgagtggcacaaataactaaagcacaatgaatttgggtaattctctgttgccctgttggctcgttgacatggtctacaggttcaatatttacctaccaataagaccttgatagaaatactttttagaacattgaaaacttactcagatgacacaacaaccattgagtacttgc

SEQ ID NO: 169108 - DNA, 311 bp, Glycine max
tcaaatgatcataacttttcactaagatgtccgactcaggcgcataatatatctagatgttctaaattgaacaacggaatcttttgaccaatccaaatggtcaaagctcttcactcggatgtccgattcaggcgcataatatatcgagaatttcgaaattgaacaatggaagctcttgagcaattcaaatgatcataacttttaactcggatgtccgattcaggcgcataatatatctagacacttcaaattgaaccatggaagctcttgacaaattcctatggccatacctttcactcggaggtccgatt

SEQ ID NO: 169109 - DNA, 464 bp, Glycine max
  unsure (1)..(464): unsure at all n locations
tacggaacttagaaactaagctctcttggtaatntcgagcgtctcgatatctttttctcttgaatctgacctccgcgcgaaaaggtatgacaactttgaatggtcgagagcttccattgttcaatttcgagcgtctcgatatattatgcgcctgaatcggaccttcgagtgaaaaattatgaccatctgaattgctcaagagcttccattgttcaatttcgagcgactcgatatattatgcgcctgaatcggacctctgagtgaaaagttatgaccatttgaatttctcgagagcttccgctgttcaatttctaggtcttgatatattatgcgcctgaatccgacctccgtgtgaaaaatatggacatttgaatttctccagaacttccgttgttcatctcgagcgtttgatatttatgcgcctgatcgcgcctccgagtgaaagtttgaccattcgaaatctc

SEQ ID NO: 169110 - DNA, 368 bp, Glycine max
aaccttcacgaaattcctcatggaaacgttttggaagcgcctctgcttggatattcttcacggaaacaatttttccaaccaaattcgaaagagagagaagtgcctaaggggctgaaccatttttcacttcacttctccctctatttatagaaaattgggggagaagcttgctacccagcttgcccagacgagcagggttgcttcctccagaagcaacagccttctggaggaatcttctggagggcccaagtgggcctggttgctatttgcacccacattttaactaatatacaccccttgcctttttttggtgattcttctttcgaaagttactgaaacttacgaattccgtaacatacttgttttct

SEQ ID NO: 169111 - DNA, 382 bp, Glycine max
  unsure (1)..(382): unsure at all n locations
tactaagcttcttcacaatagttctttcaaacttcacaccggttcgttttctacttgaaacggacccccacctaaaactactcttgcttttgcttattttaattgatgaaacttgtttttcttataatgcgtctgaccaaatgtttctaataaagtcaaggtcttttctggcttaattctttaacttcacattttgtatattattccttttttggtaaaacgcttgactacgttgcattttgtgtttcgcttgaacatgattttattaagcttgaacgacccgataagcttcttcataatcagttctttcanacttcacaaccgcttgtgtcaaacatgaaattcattttcacctaaaattactcttacctccgcttcttta

SEQ ID NO: 169112 - DNA, 249 bp, Glycine max
taaatttctaactggggtatttgcaagttaactatttaagtgtgcttactgaatgaaatcatattaggtttcggttccagcctcacctttaatatttggcattgaggcaatagtatcctagatcatgagactatttattatatatgcatatgctttgtcttgaaaaaggacattgagtctgcattatatatatatacggagattagggtaatcttagtgatcaaatgatttgctgatcagttacgggac

SEQ ID NO: 169113 - DNA, 183 bp, Glycine max
gccaccgacctcgcatcgatacccactaacccccacgcgccacagcatgtcgacaccggaacgcccgccccgcaccaacagcaagagcggacaatgcccctacgcaccaacaacccaacacaatgacgatgaccggcccgccgcctcgacagcaaggacgacagactggcaaagcaaggccca

SEQ ID NO: 169114 - DNA, 434 bp, Glycine max
ggaacataatactaagctggaagagcttaatggagaaagaaagaggttattatatatacggggacacaaattgaagaattacagaggagaaacggacttgaacatgtctacaacaactcattatcaaagtacaacaagtggacacatgtttctatttatacactacgtagcctccttgagaagctttcttgagaataattccttgagaaactgctttgacaaacacctccttataaacttgagcttatctactcacacccctctaataactaagctcacctcattgagaagcttccttgaaaagattcctaaagaagctagagcttatctacacacacctctctaatagctaagctcaccttcttgagatgagaagctataacctaactacacactccttataattactaaacttatcccatgacgaaatacat

SEQ ID NO: 169115 - DNA, 283 bp, Glycine max
aatctcatgatttacattctccccctttctcaagaaaattcttaattctgcttgacatcatcaaaatcttcatgatttacagcctcagctggccttgcccttggtcttctggccccacaaataataattgttggatcatcagggttccaacaattcttccttatgtaggccagattaatgaccgggctcagacgttcaaagacaagactgtcggaggcaactcctctggtcctgcataaagctgtgataagagccggaaacacgacttttgaggagttagact

SEQ ID NO: 169116 - DNA, 469 bp, Glycine max
  unsure (1)..(469): unsure at all n locations
tgaagtgagaaagtgtggaagagtctgtctttctactnttattcgttgaccacagagtggtacctggagatatgtcgcgggggtcacgagaccttggggatgtcaggtggggtgctattgcccaaaaccaagcttgaccaatcccgacccaacccgggcatagtcagtcaatgagaacctatgacgtacctaaacaggcgagctcctggcagtcaaccgattaaagaacaaagaccacaaagcatggaggcttgtgtggtggctggccagctatgattcttgagtgatatttcgaatatggcctctggtactcgattaccaacggtgtgtaatcgattacaaggcttaaaaatgaagacaggaagttaagatggcctctggtaatcgattaccaacggtgtgtagtcgattacgaggcctcaaaatanggtcacgaagttgagatggcctctggtaatcgattaccacg

SEQ ID NO: 169117 - DNA, 351 bp, Glycine max
  unsure (1)..(351): unsure at all n locations
ctctcttaaacagaaatggcatacaaccttcttcaataaacacaaacatcaatgtaaatttagagcaaactcatgcacatacttccttacgaacgttcacttgcacaagatattctcctaactaagaaaaatgcacccacgcacaatcaaggcaccttcgtcacctagattatttataagtacttccgaggtgtatntgttacccacatcacatgtacttccttagctaaatttacacacacgcatactcaaagcattttggctaccacaagttgcacacgtgcacattctggtatttctaataccaatgcatataccatatttgtgatgaatcttggctatctacacaat

SEQ ID NO: 169118 - DNA, 409 bp, Glycine max
cgaaggcaaactggatgcgttggtcatcttggtaacacttctggccttgaatcagaaatctgtacctgtcgcaagggtttgtggtttgtgctcctctgctgaccaccatacagacctttgcccttccatgcagcaacctggagcaattgagcagcctgaagcttatgctgcaaatatttacaatagacctcctcaacctcagcagcaaaatcaaccacagcagagcaattatgaccttttcagcaacagatacaaccctggatggaggaatcaccctaacctcagatggtccagccctcagcaacaacaacagcagactggtccttcctttcaaaatgctgctgtgccaagcagaacatacattccttcaccaatccaacaacaacaacaaccgcagaaacagccaaca

SEQ ID NO: 169119 - DNA, 397 bp, Glycine max
  unsure (1)..(397): unsure at all n locations
cttacttggtttagcacatgaaggctggttatgtgtttttattgaaagctgtgatcaatttattcctgtaactgttgagtacttgttcatcttgttacttgcactccaaggattgcattgaattgcataccaatagacaataccatatttgaactgtgtgaattgaattcaatttaatgtagccataaatgagtgttaatcctaccttttaaattataaatgacccggaagttttattttgacacaaaatcagttcacctttntaataattttgaaaattcttcgggaagtcgccattttatttttatttttgagaaagaatagtcatatctgatactcatgagtgaatattnttaattcttcacgaagtgccatcnttattnntattttacctata

SEQ ID NO: 169120 - DNA, 451 bp, Glycine max
  unsure (1)..(451): unsure at all n locations
gacatttacaagcttaanaaattcacagttgttgttaaatctatctattgaaatgaaattactgtcttatgaaaagctttccaaatgaagtggcattagtaccctaacgacttcaaaataccaaaacatcatggatttacattcacatatgcaagaaaaatggatatataagaagggggaaaacaatcatgcaagatcaaccacacatttgtaatcactaatatttgtttgtgatttacaaagccaaattaccatcaaccctctaaagtaaactgcacacacaaagcttccaattataaagcaacattcatgttgaaacatccttaccctgccaaagaaagtgctaaattccacaattagaaaaaaaatacgaattgtttatttgaacaacggcaacaagaaagttanattgagataaattgtgacaaacatgcaatcaatcatcatatat

SEQ ID NO: 169121 - DNA, 340 bp, Glycine max
  unsure (1)..(340): unsure at all n locations
aacacccagaccggttgcggaagagacggccagagacatcagacaggcgacaaaataggcggcaatcatcagcaggtaaggggagttaatatactgcaatggttttgacgccagcttgaccaccatatcattcgcgccgatatgggtcatgtaagcggcaaatccacacagcatcataatcatcatgccgaggtcgccgccgcggctcattagtaatattntaacgtattcaacgatatccgtggcgctgtagcctgttgaagcctggctggacggtaacactttgtgccccataatggcactgataatcagcaataacaggccancgacaaataacaca

SEQ ID NO: 169122 - DNA, 443 bp, Glycine max
  unsure (1)..(443): unsure at all n locations
tactaagcttagaatttttatattactctgggcctggaacttgttttatttgctgacattcattgaactccttattgnggttgtggttatcgtgggtgtagctcgctacatcattaaagggtattccgccactggtgtgttatttgtcggtggcctgttattgctgattatcagtgccattatggggcacaaagtgttaccgtccagccaggcttcaacaggctacagcgccacggatatcgttgaatacgttaaaatattactaatgagccgcggcggcgacctcggcatgatgattatgatgctgtgtggatttgccgcttacatgacccatatcggcgcgaatgatatggtggtcaagctggcgtcaaaaccattgcagtatattaactccccttacctgctgatgattgccgcctattctgtcgcctgtctgatgtctc

SEQ ID NO: 169123 - DNA, 302 bp, Glycine max
gaaaaccggaagctctcgagaaattcaaatggtcataacttttaactcggaggtccgattcaggcgcataatatatctagacgctcgaaattgaacaacagaagctctcaagaaattcaaatggtcataactattcacttggaggctcaattccggtgcatattatatcgagacgccgaaaattgaacaatggcagctctcgagaaattcaaatggccataacttttaactccgaggtccgattcatgcgcgtaatatatcgagacactccaatcttaaccacggaacctctcaaaaattca

SEQ ID NO: 169124 - DNA, 464 bp, Glycine max
  unsure (1)..(464): unsure at all n locations
acagcagatttagtaatgacccactaacctacaattttattacttaatgctattaacctanggaattaaaaaaaaacttaatggctgagtgtaactgaaattgtggcaaccaaaagtcacccccaacagccaacttcatccaccatttggtctcccaaaaggctgatgcctaagttgccaattgggcccttattacaacttgaactaaacctaactaaagcccttttaattgattaacccaaaacatatttttggtcagccaactttacaaggattgggccattatttggacaaattaaacactctaaaaattgagacaaagtggtgtcatttaatcctactccatttgggccatgatacaactcacaaccttggactcttttccttgaactcgngctcgtattcaaataatatggacagcacttgttgaaaacttccttggtttccttgcttacccttgcata

SEQ ID NO: 169125 - DNA, 363 bp, Glycine max
acacatccttctatacctaagctcacttccttgagaagcttccttaagaagattcctaaagaagctagagctcagttacacacgcctctctaatagctaagctcaccaccttgagatgagaagctagagcttagctacacaccccctataatagctaagctcacccctatgaaaaaatacatggaaatacaagaaaattccctaatacaaagactactcaaaatgccttgaaatacaaaggctaaaaccctatactactagaatggccaaaaaatacaaggcccaaacaaagaaaaaacctattctaatatttacaaagataagcgggctcatatttagcccacgggctcgaaatctacccta

SEQ ID NO: 169126 - DNA, 481 bp, Glycine max
  unsure (1)..(481): unsure at all n locations
tccattaagtcatgtacaattgtatagcaaagtaattgatatctcataatagtgatgttcatgacattataccaacactactaggaagcaattatggccatggcaagttttaaatagtgtcaagtttccttatagtaactataacacctgcaattgtggcaaaaaatgcaattgttcatggcattataacaacactacgaggaatcttttcaaaatgtcatgtttaacccagaaataatgttggattanggatcttttatgtgacaaagttgagattttctcccctttataaaacagaagaaaaaacatagtagttagtagtgctaaatagtggcactaagtggctcaagcatgctacaaaaattgagtagtgtcacagtttaaacaaatggctattgcagctgcaataatgaacaaagttgtcgttgatgcatgttgcaagaaacctatttaaccatggaatggcatcacataacactat

SEQ ID NO: 169127 - DNA, 263 bp, Glycine max
  unsure (1)..(263): unsure at all n locations
tccaaggcatatatactattcaaaaggttttcacaacactaatccacgcatcaagagagagataagcttattgacaacacacacacaaaaagacaagggcttattaaggcattaattatcattattaagactacatgcatcacctaataactcgccataatgtcttagcacaactcccatattataaagatggctggtctcataactagcgactcaatattggaattatggtataacaaacattaangacaatacatggcaca

SEQ ID NO: 169128 - DNA, 449 bp, Glycine max
tactaagcttctatacaagaaagaccctacaaaatgctatccgacctctcgtgcgtgtggtaagttaccatttatggtctgaaattttctgctaagcgttcccttctcctttttggggatgaaagggagcataagaatttcattgaaccaaatccatttcatcaaataatgtctagcgtacaactggcatcaacttacaggaaactttagccaaactcatgatgtttttgcaatacaacagaaccacaaggaaataaaggacttcacccaaaaaataaaataaaggtgaagccaatgaaataataattattctaaagcaaattccttctaagattgattgtccattaacaaatatcgtgacaaaaaagaaataaatgtctaatatctcttgtcacgagataggcctcctttccaatatgaatcgttgtgtattatgtgagtgttacttt

SEQ ID NO: 169129 - DNA, 463 bp, Glycine max
  unsure (1)..(463): unsure at all n locations
cttctccatntctctatctctcacatctaaccatctgctcctcatgccagctccttcatctatccttattctcttcatctcaactccctttnnnnnnncccttctgggctcccaggttgatcacctatgagagggggctgttacttgcaccctcgagtggtcccgacaaactcagcacagttccctaagtgaaagtgtcgtgtggacacgcttaggctatttcctgagatttggttgttgttggtacataccacattgcatctgagtgttgagtcacgtgcatccatcattntgtgcagtcttgattgggtccatggatgaacgatgagtaattgttggatgtggatgatgaatatttgtcggatatgagtgttgaataatgaatgttgngatgctcatcatgtttgccaatgttccttgctaattgaggntatttggaattgagattggttctttttataat

SEQ ID NO: 169130 - DNA, 371 bp, Glycine max
acttatgatagccgccgatgatcccattactgtttcccctaaactctctgtactttcttcacgccgcatgccatgccttgcgaactccttggagtaccctcgcattgtggtgactaaaaccccgtgcgatgaaaggcgtgatgctttcgtctaatggcgctcctctcatggggtagccaagctgtctcatggcgagaacgggattataattaatacaaccccttgttcccatcaagggaacatttggacatactctgcatgaagatagaatcttgattcttccttccctctagcgagggaaccaattaacagacgcctccccatgctagccaagagttggcccaattcgcctttctttgtcgaccacgagc

SEQ ID NO: 169131 - DNA, 388 bp, Glycine max
gttgaagccttggaggaaagaggtatgcctatgttgttgtggatgatttctccagatttacctgcgtaaactttatcagagagaaatcagaaacctttgaagtattcaaagagttgagtctaagacttcaaagagagaaagactgtgtcatcaagagaatcaggagtgaccatggcagagaatttgaaaacagcaggttcactgaattctgcacatctgaaggcatcactcatgagttctctgccgccattacaccacaacagaatgggatagttgagaggaaaaacaggaccttgcaagaggctgctcgggtcatgcttcatgccaaagaacttccctataatctctgggctcgagccatgaacacagcatgtttcatccacaacag

SEQ ID NO: 169132 - DNA, 398 bp, Glycine max
actcagcttaaattaatttcagcgttcgattatgacttttttttctactccgataaaaagtattgtcgttgaatggctcacacttcacattcaattcgggttctcgattattgcgggactcaatcagacatccgagtaaaaagttattgtcgtttgaattggctcagagcttcaacattcaatttcgagcgtctcgatatatgatgggactcaatcagacatccgagtaaaaagttattgtcgtttgaattggctcagaggtttaacattcaatttcgagcgtctagatatactacgggactcaatcagacttccgagtaaaacgttattgtcgtttgaattggctcagacgttcaacattcaatttcgagcgtctcgatatattgcgggactcaatc

SEQ ID NO: 169133 - DNA, 341 bp, Glycine max
  unsure (1)..(341): unsure at all n locations
cccactatnacccacaaccacccagcagacttgtcttcggttacacaacgacacccgcaggaatgcacccgacaagagaacagggcctctgctccacccgcgaagacaagactcccactaaccactcgcgccccaacaagccatatcgcgccccacagcgcgaagaagaggatgaacccgcaggacaaccagacccaccacacgaagtcgagacacgcggcgaccccaactcgcaagatcacgaccccgtccacaacgcctcaaaaagcgcaccaaggcctggaacaacgacacgccacggatcaacaaacggaccgggagagcacgatccaccacacaac

SEQ ID NO: 169134 - DNA, 280 bp, Glycine max
  unsure (1)..(280): unsure at all n locations
attggcacttagcgctttttgacccactaagcccagcttataagctcaaattacagaatggatctggggcttacctcatgatagcgcgcttagcgctgctatcaatcaaatttttccagagaagaagaggcgcttatcgcatcatccacgctaagcccactgattaagattcaattacattgaagatattgggcttagcgcagngttatgcgcttagttgaactattccgccgaccaatcacgggtctctgcgcttaccgcgagcatgctcgggctgatc

SEQ ID NO: 169135 - DNA, 427 bp, Glycine max
  unsure (1)..(427): unsure at all n locations
aatattntctggtgcgatattacacaggattattattgttcgcaatcttgctcaagcatgatagaatcactaaaggtaacaaacaaaattgtcatttcaagtatttaatacagttacatacaaaatcatttattaagcttgagcgactccataccagttaatccatagcgctaagtggtacttcacaagcttatagtggagtagcaacttttatattccttaattgcttttattctctgacgaacttatcctttcccacaagatctttacacaaaccggttttcaaacagaacataaaatttgtgatggacatgcgagtccactttagtctggtggtagtcctaattcccaaggtgggaagcaatagcaatgtgacaaaagcaatttcctttggcagatataatacatagaagctgaatcaactaat

SEQ ID NO: 169136 - DNA, 271 bp, Glycine max
  unsure (1)..(271): unsure at all n locations
ttgtgtaaagtccctgtcccactcanaagttttaccatttagagaagataatgtcttgatacaagataataagcttatcaaaagttgttctcttagctctaagcactttgttatttataaacatcccttaaaagattatcaataaggatnttatggcgtctttctttatctttcgtcttcaacaaagagaagtgtctgttaggtattaaatgcaacattaaatgtctttcaccaattagtcactctaataagagaaaacttctcatttatc

SEQ ID NO: 169137 - DNA, 443 bp, Glycine max
  unsure (1)..(443): unsure at all n locations
agagcttcatgctaacaaanattaataaatgaatagataatatttctatttaataaaatattctgctcttgttttgggtcaattgtcttatttcctccgttgtggcaagttatatttacaactctgggccagctcatgggcctgtttccagtaggtgtttggtacttggactattattgcaacttaactttataataattaacagactgggtgcctataagatgtaagaatagcacatttttctgtttgaaagaagtgtaaaatagcatattaattcttcgaataaaagcatatgattatataatatggcgtcctctaatacataaaattgtttaacaaatggtggcatttcagcttaattagtaatccttctggtgtgaatataaaaaaaataatctcgcgatcgatgttaatattaataaatctaataatttacatattga

SEQ ID NO: 169138 - DNA, 319 bp, Glycine max
aagagggagagaagtggaactttgaagtgtgtctcataaaaactttcattcatcaaagttacaacaagtgttacacatgcttttatttatagactaggtaacttccttgagaagctttcttgagaaaacttctttgagaaaacttccttgagaagctagagcttagctacacacacccatctaataactaagctcacctccttgagaagcttccttgagaagattcctaaagaagttagagcttagctacacacacctctctaatagctaagctcacctccttgagatgagaagctagagcttagctacacacccctat

SEQ ID NO: 169139 - DNA, 411 bp, Glycine max
  unsure (1)..(411): unsure at all n locations
aaacaaatatgagtgtggcacggagaaaggagaagaaacgtaaagtggaggggggtgtagagaatgttatgttacaagaaatgacctataagcctttttaaagccccatcagggactactcacaattctgtatcaaactggataaaatatttaggatccaaaaggataaaagaaaaaatacatataaaactctaactaacctcatcataggttcggctagcatgagctttgggagcaagactttggtggttttctttgagtttatctactcaatggacagtagtaaaaaaatgtgaatttggtcatgcacgtcctgcttancacatatcaatggtgcatatttgaattgggcccctttgatgtgaatattacaaacattaaaaaatgaacgaaattaatgctggacttacg

SEQ ID NO: 169140 - DNA, 135 bp, Glycine max
aggaggcgccaaccactatggaataagccttggaagatagagcttcaccaccaagaatgtgccttggataacaagcttggagaggatgcttcaatggaggaaaagaaagagagagagaaagagaggggggggggg

SEQ ID NO: 169141 - DNA, 428 bp, Glycine max
tttgctttattgcatccagcagaggtatgtttacctctactttcctaaatgtttccaagatctccttctctgcctcatccattttgttgttggaaattgctcttggagggaatggaagagggatatgctgcttctctttagattcacctgcatagaaattgttaggtaacttactctctaaatttttgtcatcatctttttctggagtagagtgaggttgggcaggttcatttgcggatgaagaagatgctactggttgaggtccttgacactgctttcctgaccttaatgtaatggcactcacatctttgggattttggacagattgagaaggtaatctatcacaattcctggactgttcgtgatttaactgtgtagccaactatcccatctaattagttaagctctaaatggaggctctggtctct

SEQ ID NO: 169142 - DNA, 332 bp, Glycine max
  unsure (1)..(332): unsure at all n locations
aaaaaactagggccaatgaaaatggtgaaaataaggggaaaacccatgttgtgactgccattcctatacagccaagtttcccaccaacccaacaatgtcattactcagccaataacaaaccttctccttacccaccacccagttatccataaaggccatccctaaatcaaccacaaagcctgtctaccgcacttccaatgacgaacaccacctttagcacaaaccaaaacaccaaccaagaaatgaattttgcagcgaaaaagcctgtagaattcaccgcaattccggtgtcctatgctgacttgctcccatatctactngataattcaatg

SEQ ID NO: 169143 - DNA, 415 bp, Glycine max
  unsure (1)..(415): unsure at all n locations
tccatcatgacacctncggcagaggttcgaaacccatcatttatttcgtcaagttgcaacttggacctaaaccagcgcagtgcatgtggctcaatanggacctctctaatcatgagcatcgacgcatcaccaacatgctatgtagaaatgcatatctatttgcttggcagccatttgacatgctgggaatccatcccgacataatctgccataaacttgccatttatctgctggaaaaaccaatattgcagaagaaaaggaagagaagagtggcataaagccgtcgaagaagaagttgacaagctactctgtgcaaacttcatcatagagatcaagttctctacctggctcaccaaccatcatggtcataaaggccaacgacaaatgacgaatgcgcaccgactacactgatctg

SEQ ID NO: 169144 - DNA, 372 bp, Glycine max
atcacatatgctaacaatagccgagaaatctatggatctcctcaggggcagagtaagtgtccgccatcgccttggtcttggctagcaatcaaggaagttctcgactctcgttcaaggtaagagccaatcggtccatccacattgttgcttcttgatgtaacgagtcgatcacccttcctctagcctccttttccgcgtacacttgggcatactcgtccgccactctatgctcgtgggccatggctagatttaactcttcttggtacctgctgatgatggctaacatgttggtctctgcttccctaaccactgagacaggtttcttttgacccttgaccaaccttcactcatcttcaagatcaactgctactc

SEQ ID NO: 169145 - DNA, 461 bp, Glycine max
gtgctcgtgttgatcatatgatactgtatcttctgacttttcttattggacttgccaattgccatactacttgagcataataaaccaaaaattggtttaagcttttcatactaaaacgaggaggacgagagatatatggtgggtcgtcgggtcaccattgtaaccacctcattgagtattttgaggtaagaactaagacatgtctgaaaacaatcaaatgacatttatagtaattcatgatgcttgttagttattgatattgtagtactatctctaatcctactctcaagcagaagattgaaggggttggtaaaatcaaagatagacataacctaacagcttggatgttggaagctacaacttcagcacgagaaatggatctgaatgttgactgtgctgatatatacacacattcagaactacatagctaagttggtgacagtgtactagtgtactcaaca

SEQ ID NO: 169146 - DNA, 272 bp, Glycine max
tgattcttgcattttgattagttataagtttgggtggatgacttgtttgtgtgatttggatggaccctatgattcaaaggttctgagtttgagtggaagaacagagggaatgggtcaagaacaggaagaaaaatatatcggaaatttttttaataatcgatcttaaatattttgatatttatagacataaataatatattttatttattccttatttaaataatctcgttaataactgtggcttgcatattaattaagatcataaaaaaata

SEQ ID NO: 169147 - DNA, 412 bp, Glycine max
tatgatgtgaagcataaatgtaaaaggttgttgtggattcttatcttcttggagaggacaaccatgaggatgaccgcagcagacctcttattcaaatctgaatttgagcttgaagacatgctcaaagtcaaggcgagagtgatgatatgaccacaaattacgattatcatatctaaatcttgaattatttagtttatcttttctgatttcatattcttatttaaacgaagttttttgcagccatcctcattattgttctctttaggtatctgaatcgaaaacaaaccttgtacgtttatgcttcacttcataagcttcatggtctcatttgtagcacatgcccttagctcttctttcagccatctccagcttgttaattttttcgtaatgacgcagaagaatctccttatta

SEQ ID NO: 169148 - DNA, 289 bp, Glycine max
atacatgtcacgcgctggtttggtttctttgttaaaaggatgccccacattatggacatgacacacacgcacatatgatgacttggaaactctatgcgacactggtcatgcatgcacctatgccaacactcaactgtgaaatctctatgggccatgtgatgctacggctcaagactctactactctatctgaatcaacacaatgcccacaaaataagtacttctatcaataagagcatccatccaatttcatctcgagcgttcggagaaacttcacaacattcaccctt

SEQ ID NO: 169149 - DNA, 417 bp, Glycine max
  unsure (1)..(417): unsure at all n locations
tacatcttcaatctctactcttctataccttccctcttaattnacttcctctccctaatccccttcttcccctaaananactcaggctcttgggtactaatcttcatgcagctaatcgtgttgttataattgatggttcttggaatccaacatatgatctccaggccatctatcgatcatggaggtaagatcctgttaatttttcccttaatcaagataagttttcttctgattaaaaaattatttataaaatataaagtttagaatttgatgtgactgtctcctttacggagaattctttcagtgagcagtatcttacctcattgtctttttagaggggtttcccttatatctaacaataagatgtgaaagttgagacttacactcttaattaccgtcaccaatattttcttattc

SEQ ID NO: 169150 - DNA, 444 bp, Glycine max
  unsure (1)..(444): unsure at all n locations
ggaattaatatagctgagaatggtgtcaccaatgcagccttttttttcttgttnggtgcgccgcggagtagcggggacaaaactagagcattgcggatgattttggagatgttgagcaacggtgttgatcctgataggatcacatataactcactgatatcaagtttgcgcagagatggaatggtggatgacgccattgggttgttggtggacatggaacggagcgagtggcaacctacggttattagttacaacattgttcttcttggattgtgcaaagcacacagaattgtagatgccattgaagtgctggctgtcatggttgacaatggatgtcagccaaatgaaactacttacacgttgttggtggaacgggttggttatgctggatggcgaaactatgcactggagctagctaaatcccttgctagtatgaatgctatt

SEQ ID NO: 169151 - DNA, 401 bp, Glycine max
  unsure (1)..(401): unsure at all n locations
gagttacaactgtctgactgcttgtctctcccaagaatagccatagtttttgtaagacttgggttgatactgaaacttgtgctttcttacaaggttaggttgtgccatatatatagatgagttttaatatcaatgttgcattttttaaagattgaaaatacgcatgcacatgctttctgtatgtgttgtaaactacacgaatgacatgacatgctntanctagcatcagatctgcatgtgtagtcatgttgtgcagggtcctttcacgcactttatgttaatgcaaacaacaatttatcatacacggttttccacaatgtgtagtctactcagacaacgatatatcatacatgcttttttagaaataagtaataattttgtgtggacgtaacaataaatac

SEQ ID NO: 169152 - DNA, 442 bp, Glycine max
  unsure (1)..(442): unsure at all n locations
caaagagattcngttctcgttttgatcgatngaataagtgcgaaagtgtattgaaaagaaaatcaaagccctgctcttatagactcttcatgtttggccaagaggaccatctagaagagttataacttttagaaaaacttaaaaccaatttgaaaaagtcaaaataccttttgatgagttacatcttttgatgtattcagaaacaaacactggtaatcgattaccaaattagtgtaatcgattacacaaagcctttgtgtgaaaggatgtgactcttcacatttgaatttgaatttcaacgttcaaaggcactggtaatcgattaccaaaacattgtaatcgattacagctttttgaaattaattggaaccgttgtaatctcaattacaaactttttcaaatcatcttgctactcgtaatcgattacacaatatggaatcga

SEQ ID NO: 169153 - DNA, 318 bp, Glycine max
  unsure (1)..(318): unsure at all n locations
tcgctagaggcggtactgtggatcgcaatgtatatgtgcggtcacgaataaggcaatgcacggatcacgcatgaagacatttataaanttttaggaaaatttatagactatgtttatcatataattttatttggcaacatttttgttttaacaaatttatttgaattttttttatattactattgacaaacgtaaatgtattaaccctaaagcataacactaaaccctagtctgcaaaacccatagtttgtttatgttctactaaacttttgttttcacgtcacaattaacactaacaacgcatgtaacactaaaccc

SEQ ID NO: 169154 - DNA, 392 bp, Glycine max
acacttctcttcctccttcgtagggcgaccttcctcatgtcggcacgcataggctcgtatcccaccccaaaccttccgcgattctgtgtgaactccaccagacttgccacgccattgccgttttggcccaaacccattctgggctcatatccatgccctaacatcacctgatctaccactaacgcgacaccatatgagcgaggctgtaccgggagagactccacgtaagcattgctcataacttccaatgcctgaaaggacgtgtccaacgattcctctgtaacctctgcataatgcgcataagaacgacaactcatatgtatgtcttattgtcccaaactataatcaatcgtccctccaccacaaactttaactcctgatgtcatgctgat

SEQ ID NO: 169155 - DNA, 197 bp, Glycine max
  unsure (1)..(197): unsure at all n locations
tatttctagcttgttgagaagctgtcctgtatctgtcaccataagctngctgagccttcatcatgaactatttttgtactattggaattctcacatatatatattatacatatatatatatatatatatatatattatattatatatcacaaactacgctgagacctttgtggcatatttctactcaacatttaata

SEQ ID NO: 169156 - DNA, 371 bp, Glycine max
tgtaaataaatcgatttggactaatgttttattttatttgtataagaagtctaattgtataatatgtgtaaaacaaaattaaatgcaacgataatttttttatagctattaggtaggaaacaatcttatgtaaaaaaaatgataggaaatgaccatttttttaaaaaaaaaattgatgtgcaagggtcaattttttttaaaaaattgaatgcccaactcctatccttcttcccattttccttttcagtcgcgtccctcacatcactcctcctttcctctttttttttctctggttcaccctctcctccttctcctttctgttttttctcacgctaccccatcactcaccctgcgatgtgtcacccatcatt

SEQ ID NO: 169157 - DNA, 317 bp, Glycine max
gttttggtagattggaaggaggtttgtatgagtaatgaatttgcaattgggtggtcttggtattaaaatctagtttttttaatgtaacccttttgggggaaatagaggtggaatctcttccacaattcaaatagtttatgggggtgaagtacttctttcaaaatatgatgtgtggaaggggcttatgagggatggtgagctttcaagggatcctttgtggtggagagatttgaagaaagtttgtgggggatggtgtatcaagaaatggtttaaggagagaactaagtggaaaattggtgtacgtgacaaaattaaat

SEQ ID NO: 169158 - DNA, 299 bp, Glycine max
taaaagcgcaaccttcaatgggaaatgtaacaacaacggtatctctataacaattgatggcactttggtggctcctctacattatagggtcaccgaaaactccggttactggttggaattcgagcgtgtcaacggagtttcgattcacggcggtgcgcttgacggccaacgcactgccttgtgggattgcaagaactccggcaaatgaaactgccccagcggagccacggtatgttaaattaattaatttaactctcatggattgaacattattcgctgacatgcacaatttcttgctc

SEQ ID NO: 169159 - DNA, 333 bp, Glycine max
tccacggagacttatcgtgcgaagccattggaggagaagaaaatgaaagcaccacaaatgttaagagctacgaaaagaacctagctttcgagacctaggtgtctccagaaacaaggtaagaagggaaaattcgtattatttgcttgcttccattagttacattgctaccctttgtatagagtttttctctgattctaacaatcctaatggtgcttttggcaatttgccttggaggaaaaagacaaacaaaaggaattatgcattttaacggatacgtgccacctcagcggacaaacagattctgaggaattgaggatcatgctgcgtgtcact

SEQ ID NO: 169160 - DNA, 470 bp, Glycine max
  unsure (1)..(470): unsure at all n locations
tgtagctgaagttcttgagaggtgctgttattgtttatgctatatcaaaagacatattcncctgctttcatttactggaagttcaaaggtacttcatctctctcttattttgattaaacattgtaatctttatttttatgtgtttacaacgtacattacattttcatgatagtatttttatgttacgacctctactagttagctaacaagtgtaatttattataattttttgtaattcattttttttgttgattccattggtttttattctaaatacctattcttattttataacatatatggtagtagctataacataaaaattggtattgaatattaagttatgcttcttcccccaccaattattctgtttagttagaataatgattatagttgttctctctaatctatattataattctcgtggggacttacttttttgtaatacaaattatactatgctatattat

SEQ ID NO: 169161 - DNA, 360 bp, Glycine max
ttctccctttgccaaaaagaattcgccaaggactaaccgcctgaattctttttgtgtctctcttttcccttttccataagaacaaaggactaaccacctgaattcttttgtgtctcccttctcccttgtcaaagaattcaaaacgacacagtctgagaattcttttgattcttccctttccctaatacaaaagtgttcaaaggactaaccgcctgagaattcttttatatccccattcacaaagtatcaaaggtttaacagcctgagatctttgtcttaacacattggagggtacatcctttgtggacaagtagagggtacatctactcgggtttgactaagaacaagagagggtacatc

SEQ ID NO: 169162 - DNA, 485 bp, Glycine max
  unsure (1)..(485): unsure at all n locations
tactaagcttcctttncatatactntcttttctttcctaacttatattcttacttgagcgtcagagtcttttattgtgcaagtcctcccttctatcaaatgcacctctcaaagccgacgtgtgaagtttgagactccactcaaccacatctaccctgacatgtgatggttccaaattttggtaagaacatttggcacccactgtagggccgcggtaaaacatatcatgtgacctctcgtcaatcctttgacattaacccatggttaacactcggtctggcatcagacgtgaaacccccctcacagacttccatcctcgtctagtagttatgacagacacaaacactctacagtaactctaataccgcatcacggagatggaacgaccccacaaggaagaagtgacaaagctaaaagctgactatgaccaactagaggctcatgtcagacgtccctatggagacgagcaatccacccacaccatgc

SEQ ID NO: 169163 - DNA, 167 bp, Glycine max
gtaaaataatacaccccacatacactgatccacatcccgacccttcaaggcgggaacaaaacagtttcgtgagaataaagccatgaaatcattcgcacccatagattgtccaatcaagtaatatcccgtcagagaaaaacatcagctttccaaaggttacataatac

SEQ ID NO: 169164 - DNA, 417 bp, Glycine max
  unsure (1)..(417): unsure at all n locations
taaaactaagcttgtaattgataactgaagctctgagcanattcaaacgacgtgttcttttactcggatggccgattgagccctttaatatatcgagacgctcgaaattgaaaacgcaagctctaagataagtcaaacgacaataactttaaactcggatgtccgattgagccctataatatatcgagacgcccaacaaatgaaaacggaagctctaagaaaagtcaaacgacaataacttttgactcggatgttcgatagtgtcccgtatgatatcgagacactcgtaattgaagacggaagctcttataaaaatctaacaacaataacttttaactcggtggtctgatcgagccgtgtaatatatcaagacgctcaaaattgaatacggaagctttaatataagtctaacgacaa

SEQ ID NO: 169165 - DNA, 286 bp, Glycine max
  unsure (1)..(286): unsure at all n locations
gactcctanaatgtgtggagcattctagagaattaatctccaccctaggacaagtaatctccaccattcattgtggaggtggagtagtataaataagggtaggagccttcattcctaaccatccaagtagagagcctctctgagagagaagataaatagcttgggaagtctctatcctcaagcttgagtaagcttctttgagagagaagataaataggttgggaagtctatatcctcaagcttgagtgagccaccatanggtgagtcaatccaagtagagagcctc

SEQ ID NO: 169166 - DNA, 471 bp, Glycine max
gtcatctagccaagattatacaaaggtgttacaaaagaacctatctattcctaattatatgggtcatcaaatctatcatgtgctgatagtaattgattagcccatggatctcctcgggggcagtacacacttcggccatggcttttgctttggctaacagacgcgggaggtcttgacttccattcaaagtcaaggcgaacctatccatccacatagccgcttcttgatgcaacgcatcaatcaccctccctcttgcttctttttcggcatacacttgtgcaaaatcctccactagcttttgttcatgggccatggactggttcaattcttccttgtatcgccctatgatagctagcatgctctgctccgtggcttccaagtgttgagccaaactccttttggacctcgcgcaagcaactaactcttcttttatgatcatgccatgcacccgtgaccgatctctctcctctc

SEQ ID NO: 169167 - DNA, 341 bp, Glycine max
  unsure (1)..(341): unsure at all n locations
aattgttatctttcnnnggtgctgcccccaaatttgaattcaaattttaaagcctgttatccattacaacttgtgtataatcgattaccacaaatgaaaattctaatttcaattctgaagagccacaactcttcagaatctaactgtgttatccattacaacagttatgtaattgattaccagaaggaattttcaaaataactccacagtcaaactgttaacaagttttgaatgaccctcaaggccttacattgtacttgtgttacaaatacttaaagtttctgacaaatgtttatctctcatacaaaaagtttatactctcaaatattcttgccaacact

SEQ ID NO: 169168 - DNA, 389 bp, Glycine max
tgtcttgaattctatatgatataaactctcttcttgatattctttctagtctaccaattcttcgatcataatggggataaaataatatatcttattgataatcatcttcttcataaggaaacaacaacaaatattgtaggggaataaaaacaatgagtttcatgaattctttgaaattaaccattgtgacgagaaacaatgtctcttccacaatcagaggtatcaaaatcaccaactatcaaaacactactgcaaaaacaatttattacgacgcgctaataaagacggtccacataaaccatttttgaaaataatgcaacgatacaattcattatcaacgaaaatgggttttaaaaaatgccttaaaatgatatatttaacgacgatca

SEQ ID NO: 169169 - DNA, 324 bp, Glycine max
catgtgacaccattgttatggaagggaactgtattgtggtgatcaacgcatccttccaccccaagcataaagattcaagaagtgtcactattccttgctcgatcggtgcagtttcagttggtagggctcttattgacttaagagccagcactaatctgatgccactctccatatgtcggaggataggagagctggagataatgccaacacgaatgactctgcaattagttgaccgctccatcaccaggccgtatggagtgatagaagatgttttggttcgagttaagcacttcactttcctagcagacttccttgtcatggaca

SEQ ID NO: 169170 - DNA, 415 bp, Glycine max
  unsure (1)..(415): unsure at all n locations
atcaacttatactgggatcgacnacgtcgtctgttttcgattaccaaaaactgatactctggtgacttataaaattctgacaaaactcttctgataaacaaaacagtgccatgtctggcttctgaaaaatccttttcaatacttgccttgcaaagccttcttgatttcttctctcgaatcttgaattcatcttctattgaatcttgaaatcaacttctactgaatcttgaatctccttgatttcctctaatgaatcttgaaatcaatcttgatcctgaacttgtcgactcaatcttgaaatcattctttcgggcttcttgtcatgatcaaaactacttgatctcatacttgaatcatcaccatgacactggcttctacatatcgcctgataaaatgcttcgctcactcctcaatg

SEQ ID NO: 169171 - DNA, 302 bp, Glycine max
  unsure (1)..(302): unsure at all n locations
tggtcgcgggcttancgcctgtgctttctggcccgcttagcgcgtattggactgggcctgcttcaaaatttctttttttcttcaatttttctggcctttttgcttgttacacctccagtttttatatctgcagccaaaattcaacaaaacatcaattctttaatatttaagcacaaataactgctaaataattatttttaaagacaattttgccttattttctattatcaaaatacaattatttaacagttatcaaaatcccccaaattaaaactttgtttgtcccaagcaatcaaataaaa

SEQ ID NO: 169172 - DNA, 473 bp, Glycine max
  unsure (1)..(473): unsure at all n locations
tcattcctttntcactcatgtgtccaagtctttgatgctcttatggttgaattatngacagcctcagtaactgctaccatatcctcatctgcaatcatgtaaagagatcatcgcttctttccatgagctacaacaagattgccttttgttaccttccaagctccatctccaaaagtggtgtgatgcccctcatcatccaattgccctatggatattaagtttctctttaaggcaggaatatgtctgacattgtgcaatgtccctagggatccactggaggtcttgatgttgatatcacctctttcaacaatgtcaagagattttccatctgcaaggtaaactctcctaaatcttccaaaaatatagttagacaataaatctttagagggagtagtgtggaacgacgcacctgagtccatgatccatgaatcaacaggactgatcaaactgcaanataatgcatcatcaagttc

SEQ ID NO: 169173 - DNA, 346 bp, Glycine max
tttttaaaaactatagtgggtcttgtaaaaaagacattaagacggttatttaccttgttaaggtattgggtcacttgttcaatggttaaatcagcgagtcacttattagaccacatgacctgatcttcaataaaaaaaattcatatcatgtcttaaaaaaaagcacaccacaagttactactaatataatttcacaaattgtgagtttccataaggatcaaagctaggcagattacaataactcacacccatggtaaataaacgatgtacatttgtaatgacaatttttgctgatgagatttatgacccctctcccctcacattatttaataaggataaaattcaa

SEQ ID NO: 169174 - DNA, 450 bp, Glycine max
aagcttcgtcctcatatacctcttgttggactaggcccgtttttatagccctcttaggtgtaaactaacgtaaattgagtttcgtccacggatccctcatttaagactagcctcagctgaagtagcttatgaaagtttagcctaatttagcctaaccttcgtgcgcagatccctcatttaagaccaggcctaaacattattgtgacaacataattaaaaccaaaacttaatccgttgatccctcatttaagactaagtttcgatcctacttcaatcaagttctaaggcaatagtacatttcctaatgctaaagtcacctaactatgcacacaattgggtgatcaaaccataagcataccaacattaagcattgaatgaagcattatcgaacacaacatataaacacaatcaactagatattacgtttttacatcagctattcatagaaat

SEQ ID NO: 169175 - DNA, 195 bp, Glycine max
gtgctaacaatgtaacatatgaattgcatgtatgaaaacattgttgacttttataataattattttaaaagtctaggatgatttcttattagttgagagtatacactacaaaaaaagcatggtttagcgaccgaccaattcagtcggtaaatcgttaaattcggtcgctaaaagtgttagtaaccaaaagagcga

SEQ ID NO: 169176 - DNA, 403 bp, Glycine max
  unsure (1)..(403): unsure at all n locations
taataaatctatatatggcttaaaacaagcctcctgtctttggttccttaagtttcatgggataatttcttcatttgattctgatgaaaaccccatggattaatgcatataccacaacgtaagtgggagtaaaatatgttttcttgttttatatgttgatgatattttacttgacaccaatgatcgaggtttgctacatgaagtgaaacaatttcaatctaagaatcttgacatgaaagatatggatgatgcatcttatgtcatcgacattaagattaatagagataaacctcgaggtattttgggtctatcacaggaaacctatattaacaaaactctagagagatttcggatgatagattgttcacgaatggttgctcacattgtgaanggtgatacgttt

SEQ ID NO: 169177 - DNA, 351 bp, Glycine max
  unsure (1)..(351): unsure at all n locations
atcttctatatattttgaatttgatttatgttgntaattatatttatagttttatggtataaaatttaatttaataaatattcaaaacatataagactctacaaattgagaagtntacaatttcttcattttttttaatcctcccgacctcaaactactcattgatctaatgaatatttttttcttggtattcatgttaggatatttggctcttcctcatgatcacattttaaattattgatatttcaattctattaagtacatttatttttgttgttgtaaaatntgttcatacattgctatcattgtttattattcttaattcttgtagttaacgaaacaaatattgca

SEQ ID NO: 169178 - DNA, 445 bp, Glycine max
  unsure (1)..(445): unsure at all n locations
ctgcctattcgatgcagcacgaatgatgttctcttttatgttgtggaacggctacgaacccggaatgggtttangcaaagacaacggtggcataactagcctgataaatgccaaaggaaatcgtgggaagtatgggttacgctataagcccactcacgcagatataaagagaagcatcgcgggaaggaagagcggtagtcaaagctcgcggttgagacaagaaggtgaaggaagcccaccctgccacataagtaggagctctataagcgcgggtctgggggacgaatgtcaagtggtcgcgatatacgaagatgatgttccgggtacattggatctggtacgaccatgccctcctgatttccactgggatattggcgagtggaagaacgccccggcatttacgcaacgagcataatggtaacctctaccgctttaaaagctctat

SEQ ID NO: 169179 - DNA, 230 bp, Glycine max
taaggtatgaagtgggcaagatcaaatttagacataaccaaccataatcataaataagtcataaccaaaatataatccaaatagttcaaaattcaaaaccacatagaatcaaaacataaaagactaaagtccaaatactaaaaaaataaataaagtgctgaaaacaataatctaaataacatagccaaaatacacggcttataagaaacatagaattataaacccaattc

SEQ ID NO: 169180 - DNA, 391 bp, Glycine max
  unsure (1)..(391): unsure at all n locations
tatatcgctgctagcaagtagtatatcttcatttatatatctccaagaangaagattgacttgcactaaacttgtggtatacacaatcatcaactgcatttgcctcataaccatatgaggtaatgacttgatggaacttgtaataccattgacgggaagcttatttcaaaccatagatggatttatttagtttgcaaaccatagactttgagtcacctgatacaaagttttctggttgcatcgtataaattgtttctccaatgtcaccatttagaaacacagtcttaacatccatctgatgtagctctaaatcataatgagctaccagtgccattattgctttaaaagaatcctttgaagatactggagaaaaaggttctgtataatcaat

SEQ ID NO: 169181 - DNA, 462 bp, Glycine max
cgcacattataagatcgacagatatatttctgttgcctaatataacccatccacgcttgcctatttgtgatgaatgtagaaagaaaggatccaaactatacttcagtgaagagatgcccaacaaaagacaaaaggtgtagatcactaactattcaaggtactggaggaccttattcagcaacaacaagttggtgaaggagttggacaatcatgatgcttacacttcatggaattagactgtatggtttgatataatgaatgtgtccacttccaactatgtagattggcccattgaggatgatcacaaggactcaatatagttgttgcatccaatgaacgtataccactttgatgatgtctctgcttgctttatgaagaatccaaaagatggattcatcaagcatctgctcaaccttccattatctctaaccacatcatcttcgatttgaactagatggatga

SEQ ID NO: 169182 - DNA, 249 bp, Glycine max
  unsure (1)..(249): unsure at all n locations
agcttacccctttcattcttaatcactgtgaggtcngncttttatgaaccacttggactgggctcacccactggctgtcagagatggggtagatgatttgagcttgtaagagcttggtcacttcctttttcaccacatctagaatgacggggctgtcgccccactcccacatttccacccgtccagcacctcgctctcaaataccctatttgcccctacacatgccctctttccccctcaacaattgct

SEQ ID NO: 169183 - DNA, 480 bp, Glycine max
agtcacctgcggctgcagcttcttgaaagcagagctagctactactttttctataactaagctcacgtccttgataagagaatctagagcttaactacacacccctataatagctaagctcacccccatgacaaaatacatgaaaatacaaaaaaaaagtccctactacaaagactactcaaaatgccctgaaatacaaggctaaaaccctatactactagaacggccaaaatacaaggcctataagaagaaaaaaaaaacctattctaatatttacaaagaagagtggacccaaccttgacccatgggctcaaaaatgtaccctaaggtttatgagaatcctaaggccttctttatcagctctagcccaatcctcttggagcctcttgcttatggctctggtaactggtcctttcctgaggaggattagatcaggctggcctctcgcttttgactcaattcttcaaggatgacccactc

SEQ ID NO: 169184 - DNA, 410 bp, Glycine max
  unsure (1)..(410): unsure at all n locations
aggttgaaagtgaaattagaatgagataaatttgagcaaactctcacctcacaccaaatcataacatcaatctaaacttgcccaaactggatttacacctaanattccaccgaaccaagaattgactcttcaacacccaattttgccctagaaatggctctttattcactttgatcatttgttnttctctctagcacagnccaagctttctcccaagtcctaaatgacatttcaagctagtattaactcactttaacctccatttaccacagaattcagacttagccttccaactcttaaagcctcactctttttccactcataacatcacattctcactttctaacccctaagtaactctacccttcacctctaacagttttccataagaaatatcagcatataaacat

SEQ ID NO: 169185 - DNA, 226 bp, Glycine max
  unsure (1)..(226): unsure at all n locations
aaaaacaagagcaagtctttgctttgctcaaagaaaagcttactaaggcacctggtctaactcttcctaacttttctaaaacctttgagctagaatgtgatgcctctggaataggagttggagcttgattgttacaaagtgggcaccctattgcttattttagtgaanaacttcatattgccaccctaactaccccacctatgataaagagccttatgccttaata

SEQ ID NO: 169186 - DNA, 125 bp, Glycine max
  unsure (1)..(125): unsure at all n locations
agctaacaaactnttttataggggttcnggtccnttttttaaagaaggtttttaaaaaagctggacctgtgccttaatggaaaacaagccaagccgagccgagccttacttaggccgagccaaag

SEQ ID NO: 169187 - DNA, 279 bp, Glycine max
actttcatttgtgttcttttgggcttcacccttgaccctacgtacctttggcttgacccaaaccgctttttaattctgttagaattactttgatggctactttgacttggccatttgtttgtgggtgttcctcaaatgtgacccgatgcttaatgtcaagtcctatcatgaactcattcgacttcttatctataaattgaatccattgccagccataatgacacattgaatgccgaaacaggtgattatgttgtttaaaagatacttctggacattctg

SEQ ID NO: 169188 - DNA, 345 bp, Glycine max
  unsure (1)..(345): unsure at all n locations
agctngccacccagctcgcccaggcgagcttggttgtttcctccagaagcaacaaccttctggatggcccaagtgggcctggttgctatttgcacccccatttttactaagtacaccccttgcctnttttgggtgattcttttttcgtaaagttacggaaacttgctaatttcgtaacgatacttgttttctttccgtaatgttacggaaccttgcggattacataatcatcccctttttgacttacggaatgttacggaacctcactaattgtgcaatgatgcttccatttgatttccagagtgtccctgaagttacggnatgtgcatcattatttttttttgt

SEQ ID NO: 169189 - DNA, 367 bp, Glycine max
ttttatactccctcttaacgtgcttaagccattgtacttaagtcatttctcgcttaacttaaaaataaaataaattgccaccgaacggttgaattgtattatccgttatcttcggttaaaataaattccgaccgttcggtcgtgccgtaaccacgttggaaatcaaaaagagggtaaaaaatgatataataatcaaaaaaacatctgttagcaaaataaagcggaaaatcaatcggacgttttctctctgggatctctcattcttaatcgaatcgattaatactaagagaaactaaggctaaacaactcgctagtcaagcttgtcataaatataggttttaagttggctttcattctactaataaat

SEQ ID NO: 169190 - DNA, 411 bp, Glycine max
  unsure (1)..(411): unsure at all n locations
agctngagacacctgattaagaggatttcnatgggtgtcttcactngatgncataatncttgagttttgtgacagcattaattccatcttgttgatgcaacaactactcatatgggcagtacttgctggcattggaggaaacaacataggagtaggtatttgagaaagctagaagcatagaaaaccatattgagattgataagtaaagacaaaataaaaaaaaaattgaaatcagtgaaacatagaaacttcctgctataggacccttctgatcgaaaatataaaaatgtgttgcatcaattttctcctgtttataaaagatctgatatctggtttcctctgctccatttntactttctataatttataaatttggttcctcagcttttaaatggcataaaacatctagca

SEQ ID NO: 169191 - DNA, 268 bp, Glycine max
  unsure (1)..(268): unsure at all n locations
agctngctctgagatgccccatttgttcnaatccaattgaaccngcgacccacccatggngcttccacaacctccaattcatctatccaatcattgaatttcttgatgctattaaacccctgactctctttggcatgtacccaaatcttccgctggatccctgatgttattaaagtcacctaagatgcaccatatatctccattctgtgttatnttcagctgttngatctgctnccacagtgccactttattttgatatcgcaatgtg

SEQ ID NO: 169192 - DNA, 290 bp, Glycine max
  unsure (1)..(290): unsure at all n locations
tggaangngtctactatcattatcattttttctccgtcattgaggtgccacttgagctgccaggtctctccacctttgggcgtattctttgaaagatctgtgcccctttttgcacatgttatgttgttgcatcctatccggaaccatatcaaaattgtactgatactgcctaatgaaggcaaccattaggtccttccaagagtggactcgagaaggttcgaggttagtgtaccaggtaacagctaccccagtaagattttcttggaaggagttgatcagctatgtcctca

SEQ ID NO: 169193 - DNA, 421 bp, Glycine max
  unsure (1)..(421): unsure at all n locations
agtcacctgccgcatgcaagcttaagctccttcaactgcacaaggctcnaatangngtttatttcatnggggaaccttcacccgacgaagacactaacaaaaacttttcttctccttcttggacaaagtatggcaggctgggggtaagtaaattttcttcccatcagaccttggatacaactgtgatcatatacccatatcaactagatcttgacgggtattcaagtcatccttcgtcttgccttgaatgttaaggagcgtctcaatcacactgtcacaaacattttttcttcttttagttactttgtgtttaaggaaattagatgggttgctgaatttgttgcattaccaaactgctcagacctttaattggtataaaagaagtggaccaaggggcagttttacatacactattttattt

SEQ ID NO: 169194 - DNA, 360 bp, Glycine max
acatcagcaccttctctcgtaatcccaggtcgattattgcagcctggaccaagtatagtttcttcagctcagccttcacaagcacctcataaggatgttgaagtggttcatgtatcttcgacatcatcatctgaaccatctgtgccagttcttgctgaaactcaaccaccaatattgccattgccagtaacttcacgacccagttacagggtatccttcttctcttgatctatcaagttcttgcatgcagacacacccttgttatagttttgcttgtgattttatgattctatacaatacagtaacatggtagagagatcaaattctcatagaattactggatcaatctcattatccgaa

SEQ ID NO: 169195 - DNA, 426 bp, Glycine max
  unsure (1)..(426): unsure at all n locations
agtaacctgcggctgcagcttgaattattctattgagatctcncctttctttttaaacgagntataaccgatcgtttatgtctgtaacctcactcaatgaatgataaaatgaaattcaaccgatcgtttgtgttgtaatctcgcttaatcattgttaaaataaaattcaaccggtcgttcacattgtaacctcgtttaatcaaaaaataagtatgttctaatcggacattttactttgaaagttctcttttaaatgagttgataattatctaagtgaatctacagcttatatcctctcactatccctactttattccctaattacgcttcgtactgttgattatcacccttcttcttcaacttggtctgttacatattatccttccttttatatgacgctcttcttcattttttatatcagtttta

SEQ ID NO: 169196 - DNA, 348 bp, Glycine max
tcatatgtttagtgtgactatgtttcttttttaaaaaataaccatatacatgttgtttttatatagtagacaataaaaagctaagtacaagtgttttccttcctgtttgtggaggtcttcttcaagcttaaggtcaatatcctgtggaaatgagattcagtttttcatgcaagcactactataaaaaagcatttccacgacatcagaataacatcggtgctatgccaacgttgttgaatatgtaccggtggcgattttgtaataccctgaattaacgacaacgtttggtgctgccgatgtcgtttgacaatttaatgacacctttgagtagtgaaaacggtttgattt

SEQ ID NO: 169197 - DNA, 414 bp, Glycine max
ataatgcttagttgttcaacatttaaagttgtcgaagttagttctctgaaaaattggctaagttcaacaagtggcttccaaataggttttggtaatgagtcaaatgcaattggaagcaaccgttgcatgaaaacatgacaatcatgacttttcattccatgaattttttccttgttaagatccatacaccgacctaaattggaggcatagccatctggtaactttagttctttgacccatttaagaacaacgagtctctcggatttggtcattgcataagctgcctttggtttaaagaacttgccacgaccaacatctatcagctcaagctcctttccgatacatacttctgctaaatccattcgagcagtgggtgtatccttactttcgccattgatgtccatcaaattggta

SEQ ID NO: 169198 - DNA, 322 bp, Glycine max
  unsure (1)..(322): unsure at all n locations
tcaagaatgcacttgatcgattaatgaccgggacttaccaaatgtcacttgattcaagggacccataatcgaatcccacccaaccttgcgataggtgaaagagggaaatgtgaccatcgagtaaacacttgaaagaaaaagtgttattatttcattaatcaaaataaggatacattattccctgtgtcggatggatgtgaccctcgagtatcctaaaaacatcttaacaagaaaagacctaatcattatgctttgtatgacanacatttaatgtgtcttaacanagtaacatagagtgttaaagctcgaccaaatggatttg

SEQ ID NO: 169199 - DNA, 392 bp, Glycine max
  unsure (1)..(392): unsure at all n locations
ctcatcagtcttattctacataccaacacaaaaaccaaaaacaaacttacaaggcacaattgctcggaccatgaaaaaggaagcccacaatgataagactacacataaaatttcaagtcaattttaattggtaccttgtctcatttgaaaaataacctacaatatataaatatataatctttttaagcattttttaaaatgaaaaaaggaatatattcctcaactctctaacttatgcatgccagaagaataatttaagtgtattgttatagacaagttagcaaaattngtttcgtgtatgcatggccttcatgtctatctaatacaatataacagtaacaattaataaattataaaatgaagcacaatanggaatggatgttgaatgatat

SEQ ID NO: 169200 - DNA, 366 bp, Glycine max
  unsure (1)..(366): unsure at all n locations
aacctgagcaaaagccacttacaaatggagttcatcacacgacatctcgcatctattagactatattaatcacaatcctttgtgattcaccatccaatctcacttgtcaatggaagagagattttattggtgtgcttgagcacaaattttcatttacttgttgagcttccatactccactttcaccttcgttcaccatgtagaactaatcattgaaaaaggtgaattctaatgatgaggtccttactgttgctgctaatatggccatggaagtctacaacgacctttctccatcctaagagtatgtaaaatttattgagacanatctactcagaacacgggaggcacttgctgaagctctttaatg

SEQ ID NO: 169201 - DNA, 433 bp, Glycine max
  unsure (1)..(433): unsure at all n locations
agacacctgcggcactgcaagctaacattactactcatgctnctcacttgntctantaggnncaannncttngngctgccgcaccattctgatccggagaacaagcatagtgtactgggcaacaatcccatgttcttgaagaaattttgcaaatggacctggtgcttttccatcctctgtgtatctaccatagtactccccacctctatctgatctcacgatcttaatttgttttccacattgtttctcaacttcagccttaaaaactttaaaggcatctaaagcttcattcttagaatgaagtaagtagagatacatatatcgtgaatgatcgtctataaaggttacgaagtatttcggactatttgcatccatgtctggacaacatatgtctgtatgtatgatttctaatcaattagaactcctctctgca

SEQ ID NO: 169202 - DNA, 348 bp, Glycine max
  unsure (1)..(348): unsure at all n locations
gttttaagcaccgcggctgcagctgaacctatatacttgattattttttctaccanggcatgatttttcttacttcaggtgctttacttagcctggcaaagatgagatatatttatagttgaaataaaaaaattttattttttcttgaacatgtaagacacactacatagttaaaagattattcagtgattggtgatatagatatatagttttatttacggtaaaaaaaagaactacacactttatttgcatataatgaacgacatatgatctttcttattgttttagaaacatatatgactgatatgggctcagataattatccaaaaacacttgggatactagaga

SEQ ID NO: 169203 - DNA, 366 bp, Glycine max
  unsure (1)..(366): unsure at all n locations
ctctcaacctaataaagcctcatgcagttccttctcacttttgggatgtaaatttgaaccctggacnagtgtttttttgtgtgtgtgtaattgtgaaagaagaaagatgataatatgtatcatagcctacctagtttttgcttaatgatatttatatctgtgtggttgtgcaagaagaaaaaatgagaatagattgagctctctatcatgaaatagtaaccgtttgtattgagacaaatattggaatggcatcaattccgtagcctgaaagactgcatttatcttccccggaacataatacatttggagacataaactatccaagctcaatcactcacttttatgtgcattgcattgaatgacata

SEQ ID NO: 169204 - DNA, 360 bp, Glycine max
taagtcccctgcagctgcagcttctccttgatctgcatattcttaatttgtgatccataggactatcaacaggtctacaattctgcatacctgtctcctccaaaatatcaagagcatacttcctctgtgagatcacgacatcatcttctgattgagcaacctcaataccaagaaaatacttcagatatcccaaatctttggtctggaagtgactaaacaagtgttctttaagttgggcaatcttagtagtatcatttcctgttatcactatatcatcaacatatacaattagataaacatacttctcaagagatgtttgacaataaaaaacagaatgatcagcttccctccttttcaacc

SEQ ID NO: 169205 - DNA, 296 bp, Glycine max
  unsure (1)..(296): unsure at all n locations
ggagatgaggaagtgttgaagggtgaaactttctgctnctagtgttgaccacagagtggtacctggagatatgtcgcggtggtcaggagaccttggggacgtcaggtggggtgctattacccaaaaccaagcttgaccaatcccgacccaacccgggcatagtcggtcagtgagaacctgtgatgtacctaaacaggcgaactcctggcagtcaacaaataaaaggaacaaagaccacatagcaaggaggctggtggtggctggccaactgtgaatcttgtgtaatatgaggattg

SEQ ID NO: 169206 - DNA, 350 bp, Glycine max
  unsure (1)..(350): unsure at all n locations
caataggactctgtctgcttagancacgctgctcttagtcacctgcggcatgcaagctngagggatctatgaccgctaggtgaatgatgtttgtgtncatatccttctcattgcagtgaaccttcaaactgcatataaaagagttgaacatgattagacataataaacaaagcaagaagaatttaacattggtggcagaggcttccatgatcacgcaagaagatttgttgatgatgggaagacatccatacatttatatgcttggttgaagtaactgttccaaatatggacgttgtggaaaggaaaataactattcatcaattcatctgtacacattaattccatctttc

SEQ ID NO: 169207 - DNA, 484 bp, Glycine max
  unsure (1)..(484): unsure at all n locations
agtcacctgcggcatgcaagcttctcaaggaagctacctaggctntaaatgatgtttgtgtaacactgggtgtaactntgatgaatgagagtcttgtgagacatacttcaaagttccacttctctccctcttttattccttcaatttcgtgctccccccttctctctttcttttcctccattaaagcatcctcttcaagcttcttatccaaggcaattcttggtggtgaagctccttcttccttggcttattccctagtggatggtgcctcccctctcctcttctcctttgccttccgctgcatctctatggtgaaaaatcaccattgaaggacctcattgaagctcaaagatccagcttccatagaagctccacaagcaagcttccatcaagtggtaatcagagcacaagagctncaagtaggtgctccttaaacctccattaatgtgtttgctttaccttctcttccatggggggttcttca

SEQ ID NO: 169208 - DNA, 346 bp, Glycine max
cttgtaaggtaatggttgttatcactgctaaatgtcttgctgactatcttggttaatgtaaaaaataaaggtcttcaaagtcaatacatagtaactagtgaacctaattaaggtgttgtacatcattcaagattgagtatcccagagatacaaatttatgggaaaatgactactcatttctaagaatttacgttaataagtttaatggttgaagagttgtacattgttcaagatgaatattatatatgggaataccgactcaggacaaaatgacaactcacttattatcatgtatgccattaagttcaatgcttgaggtgctgtcatggtccatgatgagtatccc

SEQ ID NO: 169209 - DNA, 275 bp, Glycine max
  unsure (1)..(275): unsure at all n locations
gcccctagcaggcccatacacagagaaagaggagcaccagcactctcacatggcgtgactaacgtgtgcccccctgacccacccagcctttctattttattntattttttgctctggttcatgccacacccaataattgtttaaggataaatagtcaaaaaaaaaattagagaatatgaggttgataaactcttcctaaaattattttttaatacgtaaaaagtgcacataaaaaatgtctctaaatttataccttatattataagtcgctcatc

SEQ ID NO: 169210 - DNA, 274 bp, Glycine max
  unsure (1)..(274): unsure at all n locations
aaagtagaatctagatgacattgttttcatccctctctaatttgttcaagtactttattcaaatgcttaaaacaaatttagaaagaaaagaaaaatggagtgaatatttacgttatatatagaacttatctataaaattttcacaccgtttttaggggacaccaaacttgcacttatatattaacaccatcccgataaagtatgtatatacaaatgctatgtcattacatgtaaaagatngttctatgcaatcgtaaattcacctaaatataat

SEQ ID NO: 169211 - DNA, 372 bp, Glycine max
  unsure (1)..(372): unsure at all n locations
agctttganagcataatacataagagtggtactntctcagnagagggngaagataaaacacatatttctcactaagagatctagcacaatgtattacagatttgcaatgtttcaacttacttttcatagccttcgaaattgcctcataatgcactcaagcactactaaaaaaatgcaatttagcaaccaaaattagtgaccaaaaattttcggtctctgttagcgaccgaattcgcgactacacagttaatgttgcaattcgcgactgaatttgcgaccgaaattactcatgatgtttaacttggatcaacgactaaattagcgaccgaaatgaaaggtcgctgaaagcttcggtggctatttcagttgctg

SEQ ID NO: 169212 - DNA, 275 bp, Glycine max
ttcgctccatgcctcctctggtgtcatatttttcaaagcaaatgtatgacttctatttataatgtcacgctccaattattagctttaggccaaaattcttttgaaatgccactcttattcaaaggccccggcccatgttgagaatggctctatttttcctctctgagacaccattttgttgtggcgaatatgttgtggtcaactccttccatattccatgatttacacaaaaagtataaattcatctgagcaatactctccaccacggtttgttc

SEQ ID NO: 169213 - DNA, 391 bp, Glycine max
  unsure (1)..(391): unsure at all n locations
ataacatagcgagacgctcgaaagngaacaaccaaagctctcgagaaattcaaatggtcatgacttttcactcaggtatccgattcaggcgcataatatatcaagacactcgaaattgaacaacagaagctctcgagaaattcatattgtcctgacttttcactcggatgtccgatttaggcgcataatatatcgggacgctcgacattgaacaatggaagctctcaagaaattgaaatggtcataacgtttcacacggatgtcagattccgggaaataatatatcgagatgctcgaaattgaaaacggaagctctcgagaacatcaaatggtcgataactttcactcagatgtccgattcaggcgcataatatatcgagacgctcaaaat

SEQ ID NO: 169214 - DNA, 384 bp, Glycine max
  unsure (1)..(384): unsure at all n locations
gcttntctctgctcggcgtacagggtttttcttgaccccaancgaagcagattctncaaagggtaccaaagttgcaaacttttcatcagaagaatcacgaacttttggtacccttatcttcctaaacgattctttgaccatgtctaatgcaagaacaatatcttgtgttgcgccagaatcttccacaaagccccaccagtggcatcgattgttggcattagtgaaaaccctagaagaccccctgatgtccattggaatacggagatagatggatcatgtttcttccaagcttgattgtggctttgcactcacacttcaatctcaatttcttttcttctgtttcttcatcccaagtttttaactccactacattgttgtatcgtt

SEQ ID NO: 169215 - DNA, 432 bp, Glycine max
  unsure (1)..(432): unsure at all n locations
agatccatgtttttgaaacataagntctttcttcatcttcaaaggctgcgttatccaatggtaatagcaccttatcttatacaattccaatgcccttgaaaaagtttacttgtaaaatttcaattattgatgttgattctttctcaaatattccgattaaacttatatttcttgttggtgcgtagaatgagaggagacggatgacttctatgagtttactgctgaagattattacagacttgtggctactaaaaaagaaggtaatgatgattctaatcattccttgagcgaagaagtaaaactttattatgcacattgtcgcctatnttcatgcccggtttcatctgatgaatatgccatactttctaatttgacaattacctaaataagattacatgtcatatatacctatgcatctgcattgatgtacac

SEQ ID NO: 169216 - DNA, 436 bp, Glycine max
  unsure (1)..(436): unsure at all n locations
agctttgcattacaactgacattacgctgatgtcattataatctngaggttgcatatggagagatgcttaattttgatatggcatgtctaggataagcatgcctatattttacccacactttgcatgtattttattatgataatcacacgtgcatattagtctgtactaattatattggttgtcattcaatatactgtttaggccattgtattctatgaatttgcctttcacttctatccacattgtgcggaagcctgtaacaatctcggagttatatataaagatcgtgaacaccttgaaaaagctgtagattgctactaggtaacagtgatgatcatatcattctgtttcactattgttggattgcatagatttataatcacaatctattattttggttatgcaacttgctttgtcaatcaaacctattttttc

SEQ ID NO: 169217 - DNA, 337 bp, Glycine max
aacaatttgaggtatttgaacatgtctaatactaacctcgaggggcatattccacaaaagatttctcacctcacaaagttaattactcctgatttgtcttgcacatatacctcacctcactgccttgaactggcaaagccaaacataacaatgtttcataaccttacagatatcacagaattgcatctagatggcgtatcaatatctgcaaaaggacatgaatggaaccatgctttatcttcattgcacaaactccgtgttcctgagcatatcatcatgcaatctctctggacctattgattcttcactgagatatcatatcttactcactagctct

SEQ ID NO: 169218 - DNA, 327 bp, Glycine max
acacacacccccgaggacgaagcgcacccccttgagaagccctccttgaaaagaatcccaaaaaagccagagcgttaccacacacacctcccgaaggagcaagcgcaccaccccgagaagagaagcgagagctcagcgccacacaccgcccgaaagaggcaagctcacccccgggacaaacccacgagaacacaaaaaagagccacacgacaaagactactcaaaatgccggcgaaaacagagcgaaaacgctatactactagaatggccgaaaaacaagacctaaacgaagggaaaacctgatctaatatttacaaagataagcgg

SEQ ID NO: 169219 - DNA, 339 bp, Glycine max
  unsure (1)..(339): unsure at all n locations
agcttaccggaatctaaaggagagttcctccattcattgaaaaaggnggaactgctgangttcaatggagaagatccagttggttggatttctcaagcagaagtttacttctgaaatccacttctttaactctctggtagcaaacaagcctaattttacttgggaacgactcanaggtgaattgcttgacagataaggatggatgagtgatggcatcatttttgagcaacttacggctcttcagcaagtagggagtgtagatgagatgagtaaatacaggaatttgaaaaggtaccatcccaagtgatgcgctggcccgatgaccaatttgttgagcat

SEQ ID NO: 169220 - DNA, 240 bp, Glycine max
tcaacaaaacaatttcaaactctaagactaattagccaaggcaacattctctctatttttgccttcattcaaactcgattgctccatcttcatggttgcttccatctcattcatacttatcatgagctcatgttttaagcaatccaagaataactctcttctcatgaatatgcattgcagatcttaccaatgaaaaaaaagttcatcctctcgttccgtacatgtaaacaacaaaaatga

SEQ ID NO: 169221 - DNA, 366 bp, Glycine max
  unsure (1)..(366): unsure at all n locations
tatctctagctcaacctacaggttctctatagctggntgcagaacctagcgccataattttttggtggtgggggggtcggaacccctctcccctctcccccccccccctccccccccctctccctctctccccccctccctcccccctctctctctccccgccccccccccccctcccccgccttctccccccccctccgccccttctcctctccccacccctccccctccccctncccccccccccccactctcacccccttctccccatctccactcccatcccctcaccccacaaacccccccacccccacccccacccacacacccccaccctccccctcgacacccacacaacaccccccc

SEQ ID NO: 169222 - DNA, 376 bp, Glycine max
  unsure (1)..(376): unsure at all n locations
tggagataactccanaatcttgtatcatgtttgtactttcattgttncttcaacccagatacacctatattcttgcacgaacttgactatgggctggtgatgcttattataataatttcctgttaagctcgatgtttccaagttcttctgtcctggatttatctggccgactcttgtgatggcatattgacatctcacatcggtagggtgtatgtttaaagtatccctgtaatgatctgggcaatcatatcctcttcaactagtttcttaaatcgaatgttgaccaaattcgttctcaatgtactattacatgtgtgatataaaaaattcgtatattggaaagaaaacaatagttttttatacacggaacttgttg

SEQ ID NO: 169223 - DNA, 182 bp, Glycine max
agaaaagagaaaaaagaagaaaaaaaaaaaaaaaaaggaaaaaggaaggagaaggaggaagaagaagaaaacaggggagaagagggaaaaaaaaaaagaaagagaggagaagaaagaacggaaaaagagaaaaaagaacggcggaagcaaggagaaaaaaagagaagaaaaacaaaaaaaaa

SEQ ID NO: 169224 - DNA, 428 bp, Glycine max
  unsure (1)..(428): unsure at all n locations
actaacaaaacgacccagcatatctcccaaaaccccatacccacgagatgtaagagagaaagaagtccacccaaacctgaagtttcgaagtcccactcgtagccacgcacttcacgactccgaaaatgctctcctttcgcgatttggagcagaaatgagcaccaaaggttggagctgtgttggggtttcaatggagaatggaggagaaggaaaaagcaacgtgaggaagagggagagcttgtgaattttctgttttggctgagtgaggagagagaaaagcttttcgggtttaaataaaaggttttcctctttttctattatgttattcacgctctgccacatgtccctatttgattggagcaaaagggcccactttctctttntgactgtgacccatactcagtcacaaaagtgagaaaaatctgacc

SEQ ID NO: 169225 - DNA, 226 bp, Glycine max
aaatctgcactaatcatattcttttatcacaaaccaggttgatttatctgctttgaaaacatatttacaaaacgaactatgcgacttcacaaaattatgttattttttagctcataaagatactcttattaaaaagttaattatcaaacaattacccttttggaattcttgattggtaacttactaacgtaacccgtagtaagaaaaccatgaaacacaaacacat

SEQ ID NO: 169226 - DNA, 460 bp, Glycine max
  unsure (1)..(460): unsure at all n locations
agcttctaaactntatacaagagtgaagctctgttacttctttgttagacaagtggcctcagatatcttaagatggggggttgaattaagatattccgaactacttccccaattaaaaatctatttcactttttattcaagatatgaattcccttaatgacaatcttcttaaatattaattcaaataaaacaatttgaatatgaatatgaagcagtaataagtaaaggagatcacgggaagagaaagtgcaaactcagatttatactggttcggccacacctttgtgcctacgtccagtccccaagcaacccgcttgagagttccactatcttgtaaattccttctacaagttctaaacacacaaggacaatgcttcctttgtgtntagaatccctttacaacaagagactcacggtctcttaatcccttagagaacgagaagaagaagaagaatatatc

SEQ ID NO: 169227 - DNA, 419 bp, Glycine max
  unsure (1)..(419): unsure at all n locations
agtcaccgcggctgcagctttagcagtcagagtgtgatggnctttaatcgtgttagaatatccaataaactaattttatgtaaatgttcagagttttattttccgttgagaaattggttgagttaaagcaattttagataaattgtttgtgttaaataaataaaaatattgaattttactatttctggaatgaaaattaaatataaatcacatcattttaaaattaattttaaccaaaattaatttataatgattttttaactgctgagtctgtgtttgcattctcattaaatgttctagaatcacgttaaaatacaagttaatgtgattttagattgatatttacaaatttggttttgtattgaaaaatattttctaatttaaaattaatttcgagttaaaacaatgttatgctgctt

SEQ ID NO: 169228 - DNA, 267 bp, Glycine max
acatcctatgaagcaccaacaccgacacggacaccggacacgacacggacacggacacgtgaatacctcgaatgtccacaatataaaacgtagtacgggtggcgtgtccgcacaaggaaagtcaaccatacatgcgaagagaaaggaaaacacacgggaaagagaagaagaatatgaacagcgagaaaaaaaaataaattatacgaagcgtgccaacttgaacaacccagtactacaaaaaacaaccaaccacaacactactaatga

SEQ ID NO: 169229 - DNA, 307 bp, Glycine max
  unsure (1)..(307): unsure at all n locations
gaaagaatgaaagttctaagataaatcaatgttgtatcaattaacttcaatattattattgtcctgttaaaatgtgattgaagttttgatctccatatatccatgcaaattttaaattaatccaaacaaagacatgcatgttgccttgtgggttttctaggattaccaattttgtttttactttttttaaaaaacaaattgtgacagagagacagagggaaaagggacagagcgtaattttatttttggaattttgttgtgtgggatgcttgttgngttgagcttcacatatttttggacagggcgt

SEQ ID NO: 169230 - DNA, 356 bp, Glycine max
attaccatccttaacacttttggtactgcatatgagaaggtcctcctcctgacgagtaaacccttgatcaccgctctcaaaaatcctagcagagctcaccatatatatttttcttgtggttgactgcgttgatttcaatcctagtaaatatgtttctggctctctcttagtttcgtattcttctaaaacactttgtaaagctattgtttcttcaattaatatgataaacagaattaaacatatataatcataaaaagtttccggccatttatgtcccccgggtcaagaggaatttttgtttgaaggtaaagacgtcgcaataaaatagaaagtgttgttcagaaatatcgagcata

SEQ ID NO: 169231 - DNA, 466 bp, Glycine max
  unsure (1)..(466): unsure at all n locations
agcttcttgtacacttctccatgtactgtttttttgaagaagtcgngcacttctccagaggttgattgtggggcgttggatttggagtggacggtggagattgggtgtggaatatgcatctttgtttgttggtgaggaattggtggcttcagtgggatatcgctntgtgattgatgtttgagatgtcgataacttcagccatggctaaggtaataggctaatagcaacactaaagttatcaatatatttttgggtagtaatacaatttgtagatgctcaactattttattgttgtgaatggattaagaatattttaaacctacaaattctgaaaccaataatatcattaatatgatttggattatctcatattctattaatagttttagatggggctaaaaaatactactacatatttaataagatcattcttgtttaagtgctattgactggacccatggatcta

SEQ ID NO: 169232 - DNA, 353 bp, Glycine max
  unsure (1)..(353): unsure at all n locations
attccctagtggatggcgcctcctctcacctcttctactttgtcttccgctacatctccatggtgtaaaatcaccattgaaggacctcattgaagctcaaagatccagcctccatagaagctccacaagcaagctttcatcaatttagcctttcatggttatccccaatggaaaagccataaattgttttgcaagaaaatggaagaacagaagtgaaaagaggaagaagaatgaagaacaattgagagaaaaaaaaaagagtttaatcctaaagcttgcacaacaagtaactaagtctantttttacaaaataaactaactaactaactaacactaatatatatagtgactac

SEQ ID NO: 169233 - DNA, 462 bp, Glycine max
  unsure (1)..(462): unsure at all n locations
agcttcttagtttcagatgatgcagattgttttgttctacctcatgcactcctctaatgattatggcatcatttctggcgctaaactgctgggagttggaggccatcttctcaattaaatttctggcttcagcaggagtcatgtctccaagggctccaccactggcagcatctatcatacttctctccatattactgagtccttcataaaaatattggagaagaagctgttctgaaatctgatggtgggggcaactggcacatagtttcttcaatctctcccagtactcatacaggctctctccactgagttgtctaatacctgagatatccttcctgatggctgtggtcctggaagcagggaaaantttttctaagaatactctcttaaggtcattccacctcgtgatggaccttggagcaagggtaatacaccagtcctttgccacctcctctaatgaat

SEQ ID NO: 169234 - DNA, 417 bp, Glycine max
  unsure (1)..(417): unsure at all n locations
tcttctctctctagtttctctctaactntctagctttctcactctaagaagtggattcactcttgtcttggatggttaaagaatgaaggcctcctacccttatttatactactccacctccacaatgaatggtggagattaattctctagaatgctccacacattctatgagtctctacactcttctactcccttccatatcctttcatactcttccagaaagttcaagaaggcttcacatatctctagaatattctagaggtttccacagtctttcacaagcttctagagagttctaccctactctagagttctacaggacgttctagataattctacactgttctaganagctctatgaatttctagaacctctgcaataaggagggatctcaacaaatctttccctcctgacta

SEQ ID NO: 169235 - DNA, 238 bp, Glycine max
  unsure (1)..(238): unsure at all n locations
agctngcatgatttacatgaccctctttgttaagcatattcttctnganaccatgaaaatctttatgatttacattctccccctttttgatgatgacaaccacctgtaggttaggagcaccaacaaagaaaatatctatttgcatatagtttgactccccttggctttacaatgagtgcttatatgagacaatcgaagtattcatatctttcatatatagtaagcatgtcatcactcc

SEQ ID NO: 169236 - DNA, 294 bp, Glycine max
ctgatgttatgagatatcaaaggaattcgggcaacaatggcgacagatgttggttggaaaaggtcagcattgaatgttgcagccacagtgttgtatacaagcttcaatgttaatgtcacatcaaataatgtcaaaaatcgtatcaaattatggagatcgtgatatggtattgtaagtgacatccttggccaaagtgagtgtaattgggatggcactaatcacatgatcacaagtgataatgaacatgcctggaatgaatattgcactgctaacattctttaatatatgctatct

SEQ ID NO: 169237 - DNA, 458 bp, Glycine max
  unsure (1)..(458): unsure at all n locations
agcttaacanaaggcatgcgaagtgtgtggtantttatagcaattcccttatgttatcaaacataaaaagggaaaaggtaatattgtagccgatgctctttctcggcgtcatgcattactttctatgcttgaaacaaaattgattggtcttgaatgtttgaaaagcatgtatgaaaatgatgaaacttttggagaaatttttaaaaattgtgaaaatttttcagaaaatggtttctttagacatgaaggctttcttttcaaagaaaacaaattgtgtgtgcctaaatgttctactagaaatttgcttgtttgtgaagcacatgaaggaggtttaatggggcattntggggtccaaaagactctagaaacattacaagaacatttttattggcctcatatganaaaggatgtgcagaaattttgtgaacattgcattgtatgtaaaaaggcgaagtcta

SEQ ID NO: 169238 - DNA, 274 bp, Glycine max
ttaatcacaaaatcatattctataccttcacattaatcacatggtcataacaaaacatcttaagtacaacacaacaatctctcacacacaattcattacccaccatcacgtagcaagtcacaatgatcattacacagacgttatgcaacatatatactaagactcaatcctatattgaatgtggtatcttgtcagggaaaaataacactatggcacctatgagttcataatataatacaccacacaatgggtaagcaggtcactcttattaaaa

SEQ ID NO: 169239 - DNA, 463 bp, Glycine max
  unsure (1)..(463): unsure at all n locations
caagcttgtgtcacaattcattgtgtctgtctatttgccattcacttagcaaatcaccaaatgtaccatgagaggacaaagcacataaatgtgaaactacacttcatcagagatgtgattgaatctaagaaggtgaaggtggagaaggtttcaatataagaaaacccagctgatatgttcacaaagtccatctctagtgtcaagttcaagcactgctnggactctcataaatttgaagatgcctaaagcatattggtagaagtgcagccctgaatcacaagggagacacttgctaatttagagtcaaggtggagatttgtggtgtgtgactcanaatcacaaatggcacaagtgagaagactctaaagtagtgttgtcataactgtgtttagttattataacttaattagttntggcactaaagcatagctagagtgtacatatatattcttgatcatgtaat

SEQ ID NO: 169240 - DNA, 411 bp, Glycine max
  unsure (1)..(411): unsure at all n locations
tcttttggaccttgaacaagcaattaactcctctttctttctatgctatgngcccgcgactggtctctttcttcccttcgcaacttgagttcactattgctaccccatagagctccgcgaaatttgttccggccatactcttccttgcgagccctcttggtttcttgttcaagggctcttgcggtaattgcattctcttcccgtaacccggcacactccttccgaacgtgtgtagcggccaacttgaacttctccttggcaaagtttgcctttcctaactcgcttttgagagtttggacttcttcgtcctcttccgatgcttcaaaactctcttcgctgacgactgttaacttggcgagccaatctaaacctcgtatatgagctgtcatccattcgtggtacccaccaatg

SEQ ID NO: 169241 - DNA, 248 bp, Glycine max
gctaggcccagttgaatataaaaaaaatgttaatataatctcgttttacatatatatttaataaaaaaaaaattcattatgggatctcctcatcctttaattagtacaatgtaaccggaagataaactcttagatgccgcataataattatactgaaaatatataaataataaactgaacccatttttatcgatcaataacttattggtccaaataaaattagactatatcatgttaaataaaatctc

SEQ ID NO: 169242 - DNA, 235 bp, Glycine max
ttttctccgactataaaaagcaactaagtattttgcaaacaattagattgacaatggaactatggaccccttctggatcctgtaggtatctgctgcccgagaagaagaacccagctacacaacgacccccacgatgttaagtacatcatccttggtacctcctttcaccctaacactgatcttagttcggaacgctccccaacgacaaaagcatcctatcttacctcacgatagg

SEQ ID NO: 169243 - DNA, 469 bp, Glycine max
  unsure (1)..(469): unsure at all n locations
agtcacctgcggcatgcaagcntgnaccttaagagaagaaacttgaattcatttaagagnggnnnggatnccaagattcccacaattggaaccaacccagagcttccccattcatcgtgaccattacaacctccaacttgtcctcttcccttacagtgcgcaaccggaaatatctttcgatctttgtcaaccagctcataggatcatcagcaccgaatatgggtatttccaaattcctccaccgattgtcctcatgtgtcgtagtgccctcatctcctccgctcgactcagctgtgtgaatgttcgtagagggagattttttctcccatgccaccgccaacctttgtatcatcctgataacactagtaaatcactgataaagaaaatagaagaaaacagagccaaacaccaagaacagagagtaaatcactaagaatctctattgcttatagaagaactcagaacagag

SEQ ID NO: 169244 - DNA, 365 bp, Glycine max
  unsure (1)..(365): unsure at all n locations
actaagctcgctgcannaatcataaaaaggatgtaagggtctttctgctatatttctcaccaagtaaaaatggatcatttttaggtccaacgccttataatgaccaccttccaagtaagaagaatcgcttgattcgcccttttgaaagaactacgtaggtctgatttcctctttgatggagggtacgtagcagcaagagccccgcttttgtcgacctcaaaaattaaaaagaaataaaatttaaatacataacttcacacaattctaatttaaggttattatcctttgggataaacgtgagaggttctaataccttcctcaaacataaatacaactcccgaatctggaatattcttcatgattcg

SEQ ID NO: 169245 - DNA, 449 bp, Glycine max
  unsure (1)..(449): unsure at all n locations
agctttggaaacctacacagagatccagtgggtctatcacanagannatgaaatcgnnngatttgatgttatcaacggctcacaataatntataccgtaatccgtttcttttcgagctagccaacgaaatgtcattatacgtatagtacccactttntattcgatgtatgttctttcaattntatattgggttgagatctggataacaacaacaactttactcacccatgtaatgcactccttttatttagtatgtgtttaaattattagttcttcttaatttgagataaaatgttctatttatcaagtttctaaaagtatattgtatttgttaattaaataaaaaggcataaatatatttttgatacctaataaatatctaatctttttgggttgctcctaaataaacttttattttgcattgagtccctaattaaaacaaaaattta

SEQ ID NO: 169246 - DNA, 343 bp, Glycine max
caaagtgtgctacaaatccaagctgaaattgcttgcatcaatgccaaatggaatcaaaagtatatgctaattccaatgggagttacttgacattcaattttagaagtggatctggcactactaatctgaataaatcagtgtatctaagcaatttcaattgtcacaaacgaagccttcagttatgcaaaatgtatctaagcaaatcagtgtcgtgcctttgatggatcccaaatatgtggatactgttccaccagacccaatcagtgtctttataagtctggatatattacatctattaaatccaacattttttgcctataaataacagtgccacaacattggt

SEQ ID NO: 169247 - DNA, 448 bp, Glycine max
  unsure (1)..(448): unsure at all n locations
agctncttggtgcaaaaaatttattcttaattattcaattctcaaacaaaactttgtgcttcctatgtctttcatctcaaattatttcttcaaccaatctgtagtttttggaagctcttcaagagttccaacaatatttacatcatctacataaacaataattatgaaaatttattttcaaattttcatgaaaaatgcatgggcaaataggatcaattttatatcctttctttagcaagtactcactaagtcgattatgccacatgcaacttgattgctttagtccataaagaatattctttttcaagaatatccttcagagagtttcatgcaaatatcattatcaatagagtcatataagtaagttataacaacatccattagatgtaaactaagtcattcatgtgctactatagtaactaagtatcanaagtactcacatccacta

SEQ ID NO: 169248 - DNA, 337 bp, Glycine max
  unsure (1)..(337): unsure at all n locations
ttgtcttggtttcataatctaacaaaactaaaattattgtttgaaaaaacatgcatacaaactccggaaggcatttcctataagattatatacaatcaaaatcaatataatgagatgaataattgatttatttcaaaacaatagaaaagttgccaaatgatagtcattgatatcagtaacaattaaaggctcgatcaaaacatgataaaagtgattgtcactggtgcttccattggcaagttggcatgacaacttgtttcaagagcaaagataacacatttttctagtaggaatatgtatctcatctnctaaacgaatgttaacacgtatgacaaac

SEQ ID NO: 169249 - DNA, 232 bp, Glycine max
accccttctttacaagaatgatttgcttggcttaacaacagttgaacggaatacggaatttttaacaagtgctttaattgcacccataaatgcagatgtttgggtcagaattccagctggaggcatactaattgcaaagtactttatcaatatgtttcatgacaagcatcaacaggtgtcatattgttgcaaaaggtatgtattcttctacttattatgggcatcttcctcc

SEQ ID NO: 169250 - DNA, 482 bp, Glycine max
  unsure (1)..(482): unsure at all n locations
cgatccttaagcaccgcagctgcagcttagtgattgtggcaccacatanttacattaagtgtcctcattaatatgttctacaattggttttgcattaatttctaattgtcagaaaatatgattcatggatatgatccaggcattctttctttcattacattntaagccactgaccaaacaactatctcaatgtaaagtattttatcatttgcaactcctttgatccaaacactgatattttattggaacgctaacctaggataaaagcttcctatcttaccttaggttaggagatcaagggtgttttcgatagggatttctatcatttggtgaataatgggatgtgaatactctatttttatgggtattaaagtaaattaaatatttatcagaaaagaaaagaacaaaaagagtaaagaaaaagaggaaggaanaacaagttctttgtggataaataaatggttgaatcatgtacaaaagta

SEQ ID NO: 169251 - DNA, 308 bp, Glycine max
  unsure (1)..(308): unsure at all n locations
atagggaaatctgagcaatggcatgttgaggcggcacgatatctgaattgtaaaatattgtcctttcctttcctttatttgggtatccccattgtggataatccaatgcgtattgagctttgggatcctatagttagaaaatatgagagaaaactagccacttggaagcacagacacatatccattatggggagagtgacactcataaatgcaaccctaactgctattcctatttattnttttctcctttntcaaggtaccttcaagaatatcagccagacttgaagcaattcagagacaattcttat

SEQ ID NO: 169252 - DNA, 367 bp, Glycine max
  unsure (1)..(367): unsure at all n locations
gcatattnttttcagcgtcgcaacacgcaacaaaataaatcttacgtgtttaacgatttcttcgactaatgtgaaggtgtatacaccatcatcactagcataaatttgcttttactcacaaagtgctctgtttcgtaacgatgcaaaagatagagtttctagttntgaacgttagtagcgaatattttataaacacttgagaaaatttgtgaacaagttgataagcgagcgacaccttctttgtcgtcatattgcggaccagataagcattggtacatttctcatgagtcatgattgtacaaggacgtaataattatgcaacataatttaatattatcagtggtctaatgacggagtgtagcaatgc

SEQ ID NO: 169253 - DNA, 328 bp, Glycine max
  unsure (1)..(328): unsure at all n locations
tttctctatcctcatgggtagatagtttgacttcttcaataactttagcaaagatagtttgatttcttcaatagctttatcatactgttggattcattttcaagcttcataagcattgttgaagatttcaacaaaggcattaatttcttcatgcagctcttcaataacaagaccttcaaatttctccactacatctactgctttcttgatttctgctntataatcagatttggataaagaaaattcaaagcttcattcaaaagccaacctcttgaatgtctcaacagccttttcgaaatcaaaattggtaaacaaacaaacacaagat

SEQ ID NO: 169254 - DNA, 395 bp, Glycine max
  unsure (1)..(395): unsure at all n locations
tacatccaaaaaaatggattgtgttcaaattttatatatgcgctatgaatttcatcttgttgattaacaggataatttcaaattggtgagcgttttccagaatcacgtatcaaattattaatatcaattatttcttgcttaatcttggaagctttataactaggtggttgctctttggttgacactaagttgtttatctttagctatactttgaacattagaattcaaaatttaaataaacacattagacttagacacaggctgtacttcttcattatctctgtcttttctcttagaaaatgagatcatagtgttcttcttagatatctntcaacctaaatgagggaataatgaatattgaataccaatataccattataatcaaaacatattac

SEQ ID NO: 169255 - DNA, 339 bp, Glycine max
  unsure (1)..(339): unsure at all n locations
ttttttttttacaagctctcaatccttctttggtggtttctttgaggtaaccatgattcttttgtctccttctagttgagttgatcttctcttagtatctcttgcaatttaagtgccatgataggatgttttttcacttcctttgaaaaacccttgaaaatgagatgttgtaaaagttagcttttcataaaattgatgttgtttttgtgaccttcactaaaccctgatcacattggcatgatcaaaattttaaaatgtcatctcattgatgtataccccgaaacacctcttatccacttttaatgtcataggggtattngaccctgaatgttaatatta

SEQ ID NO: 169256 - DNA, 465 bp, Glycine max
  unsure (1)..(465): unsure at all n locations
agcttagcagatatccccaacaagagtaatttgcctttcattgcaagttagcacctttcagcaccaagatgaggttnttgagggaaaattaagattacaaagtggtggggatgtctcattcacctccaaaaccctaacaatcactcctaaacctaaaatcctcttgaaagctgaggccttccgttcaagttttcctctcttgctctgttacgtctttcttccaaagaactctctctattttcttttttttttttgtcaactttagtcttttaagggttttttgatcctgaaggctcgcttagcgtcatttttcagctaagcgcgagttagtggattttcgcttagggagttgtacgcgctgagcgcgagaaggacaaatgactctctaagcgaagtgatggcatgctgtgcgcgtgcatgaatgacaaaatatcttctagattctccccactcgctaagcgagct

SEQ ID NO: 169257 - DNA, 385 bp, Glycine max
  unsure (1)..(385): unsure at all n locations
actaagcttcaagaagtccttattattctcatatcttgtcattctcttctctaganaagnacagaacatgaccactggatcccaactaaggtttggtgtacattggaacacatctcgcactactacatgatggccttttccccaatgtttccgaaagtgttcaaaatgattgcaactgatgtccaaaattgtaggataaaataagtaattatcattggaatcttctctttgagctgcttccggtaactgcttgtatctgctagttntatgatacttgtcaacacacagtgagcagctcgaactttatccgaagtttaggaaagcatagctgaaactatttttctgccttacttcattttttgatcaacttatggaagacatattc

SEQ ID NO: 169258 - DNA, 351 bp, Glycine max
  unsure (1)..(351): unsure at all n locations
tctaagtcacctgcggcatgcaagcttgcccagagaaggagtgcacggaggtttgtcnatctacctanaagactggaaaaaggtctctaatgactcctctacggcttcgacataaggcatagaggatgggcagctcaccaagatgtcctcctcgcctgatacgataaccagatgcccttccactacgaatttcaacttttggtggagtgttgagggaacaactcctactgagtggatccacgggcgccccaacagacagctgtaggggggttaatatccattatttggaaagtaacttgacaggtgtgagggcctatctgtattgggagatcgatcacttccttacctctc

SEQ ID NO: 169259 - DNA, 262 bp, Glycine max
tgtaagtcgctcaactgttttacgaccaaaactcttccggatcaaaaattgacttcttcaccacccatttaccctagaaatggctcttgccttcactttggtcactcattttcctcatttgctcaacccaagctttcccatatgtcctaaatgacatttcatacttggtttaactcactcttatctccaattaccactaaatccagatttagcttttaaaccctcatagcatacacttttccactcatatcaatacattctc

SEQ ID NO: 169260 - DNA, 124 bp, Glycine max
  unsure (1)..(124): unsure at all n locations
gaatggcactgccactaccagaagtaacaacagctccatcaccgacagggagcangactacatgcagnactacccaggacccaggcgagagacgcaccccgccaaccacaggcaacacacagaa

SEQ ID NO: 169261 - DNA, 241 bp, Glycine max
tctttgagaagctttctcaagaggctcttttgagaagctagatccttatctatccacacccctttattaactaaattaacttccttaaaaataattacggatgaaaataacgcaacaaatattcaaacatcaaacataattactaatagtatatagatatatatatatcagggtgttacaactctcccacccttttagaaatttcgttctcgaaatctaccttactcaaacaaggatgggt

SEQ ID NO: 169262 - DNA, 345 bp, Glycine max
  unsure (1)..(345): unsure at all n locations
cttacctcacacaagttcataacatcaatctaaacttgctcaaactggatttacacctaaaattccaccgaatcaaaatttgactcctcaacacccaattttgccctaaaaatggctcttggttcactttggtcatttgtttttctctctagcacagtccaagctttctcataagtnctaaatgacatttcaagctaggattaactcactttaacctccatttaccacagaatccagagtaaccttgcaactctcaaagcctcactctgtttcacttataacaccacattctcactttctaaccctaggtttactctacccttcatctcttacagtttccgtgag

SEQ ID NO: 169263 - DNA, 418 bp, Glycine max
  unsure (1)..(418): unsure at all n locations
ctaacaccgccgacaatagcgtcaaggaatngnnacaccccggatacaaaggcttctttgagtcaccctgcaatctttcatacacaggggcatgtgcttgctagaaagactcttgtccaaggtcacgaatcatatcctccaagtgatctcccatttctacatcaaatggttcggattgttgcccactctgcatgtctgtcatttcaccatgccatatccacgtcgtataatttctcttaattccatcacacaacagatgctctcgtatgtcatccagtatttgtcgtcttccattcaaacaattgatgcaaggacaataatattttccatcttcatccggttgacctctttgtgaagcaaatngtaagaatngctcgaccctttctcatattctgggctgatgcgactttcattcatc

SEQ ID NO: 169264 - DNA, 301 bp, Glycine max
gtaaaaatatactaatagtattgttatcttgtcgtgtattgttgatgacatgttgattgcacgatctagtatggcaaaaattaacaggttgaagcagcagttggcagaaaactttgaaatgaaagatcttggtccatctaaacaaatccttggtatgagaattcttagaaacagatcagaaggaatattgaagatgtctcaggagaaatatatacacaagttgcttgacatgtgttacctagaagattctatgaccaggaatacccctttggaatctcatttgaagtttcaaagaacaatc

SEQ ID NO: 169265 - DNA, 330 bp, Glycine max
  unsure (1)..(330): unsure at all n locations
agctntaacctcatcatctctcatagtcnnttgatttgggagccaanccaatccttgcgtccagactctcagccacttatgatagccgccgatgctcccattactggcttccctaagctctatgtcctttcttcacgccgcatcccatgccttgcgaactccttggagtaccctcgcgttgtggtcactgaaaccccgtgcgatgaaaggcgtgatgctttcgtctgatggcactcctctcatggggtagccaagctgtcttatggcgaggacgggattataactaatacaacctcttgctccatcaaaggaacattcggacatctttcg

SEQ ID NO: 169266 - DNA, 351 bp, Glycine max
  unsure (1)..(351): unsure at all n locations
atatcaccttcttaattgtacacatggggcactgcgcccccaaatgcgcgagntagaagagataattttccgggctctcgtgtccgttaaatgcattcatatcatgcatcgcataagcatctcttcataacatcataatggacatatcctgcatttgtccgttatcatattccagcctcacattttgcatgagtcatggcatcatcatgcatatgcgttcaacaaactttttgatcttgcaaatcgcataccatttgttttcatgtttgctcattcttgcgttttcctttacaatacaataaacaaaaatggggaagcgtgatacttcaaccacattcttaagttatgtgt

SEQ ID NO: 169267 - DNA, 408 bp, Glycine max
atgggtgaatgtagtggaagagaataaaggacaatggagaggaaaagaaatgaaaagctccaaatgagtaggtctctctctaatggacatgccataacctttgatgctctatggaatgaatgataagtctgttcccccctccttttcccttaaaatgcaacacaatcatgttttttcaatattgaatgtgcattgagtgagactgcacgctaagtgcagcacaaaaagttcagttggacaagtggccacgcaccaagcgtgcactatacgctaagcacacatgcacgtgacatctggcttcccatgtgatttctcatgataagcgcgggtggcacgctaagcgaggatggtgcactatgcgagggtggcacgctaagcgagactttcagttcttaactctcttcatgt

SEQ ID NO: 169268 - DNA, 321 bp, Glycine max
  unsure (1)..(321): unsure at all n locations
aacagtttttctttcatcttctttttaccttctcttttccatgcatatatcctttcttcgtggtgaaagccggcctagtagtgcttctcctcctctnttttgaaaccttgtgtgactagtccttcttcatagtctcttgtcattgctctttctttaagtttttcactattgctccatcttcgaagaaggtgttattttttttttggtaaaaacaactatcaaaggaatactaggtttaatgtgaagaaaacttttaaaaaggttatcagatcagactatgcttttataaaggttagaccgagggaaaataaagttttgata

SEQ ID NO: 169269 - DNA, 314 bp, Glycine max
ttttgataacaacaaagatgacgacagaatgctcaaaagtcaagatcacttcatgatcacaaagatgatgacattcaagaatgagttcaagattgagttcaggaatgagccaagaacacttcaaggatcaagaggaaatttgatttcaggaatcaagaatcaagattcaagaataatcatgatcaagattcaagactcaaagatccaagactcaagagacgacttactcacgatacgtttaaaatgttcttaaaacattgagtcgccaagaagttctccaaaatcattatccagagttctactctctgataatc

SEQ ID NO: 169270 - DNA, 260 bp, Glycine max
aggaggctctactttaatcaatatcgactgctcctctttctataagtgtttaagaagtatacaagaagactttaatcgattactttgaggatctaattgactacattgttcttgagttgtttccaatttttgggaagaattctttaatcatttgaaaagataatctaattgattagttcattgaaatattaattacattgatatgtaaccgaaacaggctgttatactactttttttttactagttccctttgtctttca

SEQ ID NO: 169271 - DNA, 406 bp, Glycine max
  unsure (1)..(406): unsure at all n locations
ttgggaagtgaaattgagaatcaggtaaatttggagcaaactctcacctcacacaagtctataacatcaatttaaacttgctcaaactggatttacacctaaaattccaccgaatcaaaatttgacttctcaacacccaattttaccctagaaatggctctttgttcactttggtcatttggttttctctcttgcacagcccaaactttctcataagtcctaaatgacatttcaagctaggattaactcactttaacctccaaatgccactaaatctagatttggccttccaactctcaaaactcacttcttttccactcataacaccatattctcactttctaaccctagggtaactctacccttcatctctaacagntttccataagcaatttcagcacataaa

SEQ ID NO: 169272 - DNA, 78 bp, Glycine max
  unsure (1)..(78): unsure at all n locations
agggagagaaggtaaactttgaagnttgtctcacaagactctctcattcatgaaaggtatgacaagtgttacacatgt

SEQ ID NO: 169273 - DNA, 382 bp, Glycine max
  unsure (1)..(382): unsure at all n locations
agctttagatgatatatgacgaaccactatttgtcttttganggnnatagcaaacattaaaaactcttatgtacaaattttggcatttattttacaataaatatttatatttgggtatttcattttgtctgcaccaaatccattgaaaaaatcattgtatttgcaataggaagttgtgtggacaggataactgttttttgtgcgttcaatgtgccaagtatacaggtcattatgatcactttgttattttgatagccctgatgatatgtgacaattgatctgaagcatgtttacttatcatacccatgtaagttgatgttaagggtttaatatttgtaaattttcgttcgccataatccaattaaaccctaacttacaattt

SEQ ID NO: 169274 - DNA, 301 bp, Glycine max
tcgttccgcgagagatgcgcaaggacatggaacacacacagcctcaactgcaactggtaacatggtgagcaatgccagccttttctgcttggcacgccgttctgccagtggaatgaggtacacctcaagaatagctgcttataaagtatgctggcgtttatgctgtgctaactctgacatattggcagctattgatcaagactgtgctgatggtgttgatgtgttgtcactctctctaggtgggcattgctaaccttactacaatgacagcattgccatagcctcatttggagcaacacaa

SEQ ID NO: 169275 - DNA, 432 bp, Glycine max
  unsure (1)..(432): unsure at all n locations
agctncagntacggaggctctacttttcatttcttattcccatanctcagggatcactgggttctcacttgaattatgggcgttctcagcatcatcagaattatgatactcatgcaattcctttagagctgtcaccacagcaacgtatggcctcctctccaaatcattttttaaagataataatttaggatcattttcatcaatttcttcctgaanaaataaaatgcgagagacatcaaattttgctcatttaattgtccatgctagtgtacatttgtgacacataattgaatcccctaccctgctgataacatgccatggtttacagattatgccagtttggttggaaccaaactctaaatggagatatacataanaatttcttacatgatcatgtgtttatgggatctataataaaggaacanttataca

SEQ ID NO: 169276 - DNA, 349 bp, Glycine max
  unsure (1)..(349): unsure at all n locations
cttctacactaccactctgnttcttcgngttgttattcctcaaaaggattttccagacgtcttcctccatattgcgcaatcagtccctgtttcaacttttcccatgatagattgtcctcagtttccatcataaggttaaaccagtgtatggtagaaccttccatactgatacgtgccaacttcactcgcatctcatcagtcgtattctgcacatcaaaatagatttcagctcgtgtgatccatgcaacaggatcgtctccttcgaatagtggcaatttcactttcttccatgacaaacgtgattcctcatgcgacgtggaacactcactctcttgattcgtactcttct

SEQ ID NO: 169277 - DNA, 300 bp, Glycine max
tatccttctacgtagaagggatcattaatcctttgtgtggtactatatatagttttgcccatcttgtggcatgatggcttcccacttttaacatgtctaatgccaatacatgattcaccagatatttacaacaataagtcactgtatgtgtccaatgtcgcgttttaagtcaaacactaagaatttgcttccatgtaccaaatcacctctttatgatggggctctatgaattttaaattccccttctcatatcacttcttctttttcgtttctctctcctcatcttgtaatttctaactc

SEQ ID NO: 169278 - DNA, 323 bp, Glycine max
tattaggcagaccaatacaacacggatatggctcctgatcggaaccaacttcagagcatgaccaagcgagaacatgagtccattaaagaatatgcccaaaggtggagagacctcgcggcctaagtcgtcccgcccatgactgagagggagatgatcacaattatggtagatacgttgcctacgttctactatgagaagctgataggatacatgccagctaatcttgtagacctcgtcttcgccggagatagaatcaagttcagattgagaataaggcaaggttgaatatgccttcaacgttgccccctacattcaatataata

SEQ ID NO: 169279 - DNA, 176 bp, Glycine max
aacccaacaacggcaggacacagccaaaaaccaaccctcgcccaacccagcccccagcgagccacaaaagccagcgggaaaacaaccacaaagaccgccgcaccggcaacgacgaacagcacccggagcacaaacaaagagcaccaaccaagaaacgaaccgcgcagcgagaaagc

SEQ ID NO: 169280 - DNA, 388 bp, Glycine max
agcttgcacctgtaattgtgttggattacttgattataaccagatttcaccgggtagaagccatcatttgtgtgtttccaggtgagttggtccacagatgagttgatcctaagaggaatatccagaatattagcagcaatattttgtgggaacaacctccgaatcttttgttcatcccatgttctagtttaattaagaatgagttcaaaaaactctgagatctgtgtccgcttcctcaggtatcagaattccaactctattatgatcccaagttcctagaatccatttgtcagtccacaccttgatctgaaacccatctcccaccttccaataagtaccttcctctaggatatcctagactaaatgaatacttgcccatgtaaaactc

SEQ ID NO: 169281 - DNA, 450 bp, Glycine max
  unsure (1)..(450): unsure at all n locations
agcttatccttatggctagcctccggtcnttcctnctgtgccaccccggaagatntaagccaagcccctacttttgaggggcaactcccgccttatgacgactatcccgagcaagacgatgaggaaggagatacccatcttggccccctgctccacctcaaagatccgtccccacatgaactaccccaaccgaacatagtctgccatatcccggcctcacccacacccgtaaaagaatctgttcactttgcggaagataagggaaagattgaggcgcttgaagagaggttaagagcagtcgagggccttggcaattacccattctcggatttggcggatttgtgtctcgtgcccaacatcgtcatccctcccaagttcatagtaccagactctgataagtacacagggacgacatgttcaaaaaggcatctccggatgcattgcgaaaga

SEQ ID NO: 169282 - DNA, 315 bp, Glycine max
  unsure (1)..(315): unsure at all n locations
acaacaccaaccttattgctntgctactcttttcagcacctttattttctttgatgatggtttaccccagcttttattctttataataacataactttcttctttttttcttttgcaaatgtaaaaacattcatattggactggagtaataccatattttgtaactcaatttaacttgtgttggatatttattttcttgcaatagaaaatcacccaaaatcattcccccaaatctgggacaaatttgtttggatccatgagtactctcctacaacctaagataagggtagttagtaaatatcacattctgggctt

SEQ ID NO: 169283 - DNA, 445 bp, Glycine max
  unsure (1)..(445): unsure at all n locations
agcttctttagtcagatcctgagcctgcattgattatcaagctntatgaatccagntgtgccaacacgattggcgaggacaagatcttcctcactgttgcagaggttgttgcatattgttctccaaagctggttgaggacccttgaaaaatataaatgaattttgttgttggtctacaaaaaaaaatggggacccatatatagatgaaatgttgtggggaatagaaatagagactagaagttttcagtttacttgagttagctagtgaacgatatatgaagaagaaggtgtgaaggatgagaattcagatgacattggtcactacaaaaagctatagtagaagaaaggggcctatccgattctgctactgtctgttagtgctactactacctccaccattcttatcttaaaagtgtgaaattaacatcaccatactatagcagag

SEQ ID NO: 169284 - DNA, 312 bp, Glycine max
  unsure (1)..(312): unsure at all n locations
tgcagctgtccgcagaaaagcagttttggattattgttcgaacctcagtttttctcaccaagtaaaaatggtcatttaaggccancgccttanaagaccctcttcaagaaaaaaatcgctgattcgcattaaaagactacgtagtctgatttttatccaatgacgaatactggagcatggaatcccctttctccacaaatttaatacgtatcaggattcaattttttgactcttacctaactacgttgttgctcctatgcccattcttcctctctacttattcccactctctatctcccttttactttcttc

SEQ ID NO: 169285 - DNA, 328 bp, Glycine max
acctaaaacgggaagacattaaatatatgagtattcgctactcgcatgttacttaacatattcaattctatccaacgtgaaatttcttgtttgcacgtgtatcccaacaatttcactatcgacacgacacatcgtgggttgtcattatcccaacaattttttgcctttttgatcctgatcgttaagtgttaactaacaatgtttaaaagaattcatttaattcatgttaatctcaattgtaactatagatatcaaaatgagatgttttaaactaaagattaaaagagaaaattggtgtaattataagaaccaaatgagtaaataaaca

SEQ ID NO: 169286 - DNA, 66 bp, Glycine max
  unsure (1)..(66): unsure at all n locations
aaaaggaaaacaaaaagggaaagaaaaaattgacaccgaaaaatacngatgaagaactaagaggaa

SEQ ID NO: 169287 - DNA, 369 bp, Glycine max
agcttaaaccttacgtattcaactcaagtcgaattcaatcctattaaagcttggcttgactcggctcatttccacccctagtggtaaggcaatcttggtggtgggaggaccaaatgcacggcgtggtggttagcacgtgccccattaagagaatcaccatatgtttctttaatgtgattcgattcttatattttctaacatctctatattcatttcatattaatatgctctactatttccgtcaacatttgcttatcgctattttatcttattatcttttacttatacctaactctaccgctctctttatttctctcattaaatatatctttttcttctcccaacttttgatcttatctctttttaatt

SEQ ID NO: 169288 - DNA, 341 bp, Glycine max
acaaaaacattttcctctaatggacgatccacaaaggctgattccacatccatgtgaaacaatggccatatgtggttgctagttattgctactaccaggctaacaacctagattcttgctactggagcatttaccccaaaaagtccatgccaagtctatggaagaaaccttttgcaacaaggcacgtgtttgctttacttcacgcccgaagcgttcaatattcctaaatgccattcagctagataactctcttatcctccaatgccccaaatcaaatttgcctcccaactaactcattcttccactattaccctttctacttctacctagagtacccctca

SEQ ID NO: 169289 - DNA, 256 bp, Glycine max
aaaaaaaaaagagggggggaggggaggagaagaaaggagggaaggggagggaaagaaggaggagaaatggggggggggaggagggggaggaagggagaagggagggggggaaggggggaggaggagaagggggagggggaagagaggagggggaaagaaaggggagagaaaggagggggaagagaggggaggaaggaaggggaggaagggggggggaggatggaggaaggggggggggaggaagtagggaggaggg

SEQ ID NO: 169290 - DNA, 358 bp, Glycine max
  unsure (1)..(358): unsure at all n locations
acaacgctttttcccatagatcatccaattatatacataattcccattcacgtgtcaaaagctttcatgccaaacatactcaaatgattccacacttcaaccatgtctttctcttaagttggagagtcttagcttagaatatcaccgtgtttgccaaccaaagttttgaagtaacacataaaggtgttgcaatatagcattatggcatataaaagaaaatttgtggtacatgaagcttcatctagtttcaattcanatcataaaagatttcataccacacatgcttcaaatgatctcaaacttcatttatgtttttcttttaatttggagtgcttaatattcccacactttaaccatg

SEQ ID NO: 169291 - DNA, 357 bp, Glycine max
  unsure (1)..(357): unsure at all n locations
ttaagtcacctgcggcatgcaagctntctcggtgccatctcctgcgatgacatannngtaaagtcagnntacaaggaaataccattttaaagcacaatcaagcaaaaatggcatatagttccttccgacaaaacacaaatatcaatatgaatntagagaaaacttacacgtcgacgtgtgtgctctcctaggatgtacatatacttacacacacttttcttaagcaaatacatttacgaatgcacatacatgcaaagtattttgccacctatattaacatacatgcatattcaaggtatttttctacctacattaacataaaaattaacaaggtgtgtggctaccttcattaacata

SEQ ID NO: 169292 - DNA, 378 bp, Glycine max
  unsure (1)..(378): unsure at all n locations
agcttagtttcttctgaggctctttctccctaatttgtaaannncgctgncactcaaaccataagctaattcctttatttgctcttcgttgagtattgccatagacccaaaagatacataaacaacagactgttttggtttatcatctaaccatttcatgcattcttcactcttaaattgtgtaacgccatcatcttcatcatctgtaagtcccttgtttaaaatcatagaggttatgcatggtcctatggccctaaatttgggccaaatcatctccgtccaatcagttacctaaaagcaatttgtataagtaatcacaaactattacgtttcaaaagaatatatatatatatacatatatatatatatacttatata

SEQ ID NO: 169293 - DNA, 461 bp, Glycine max
  unsure (1)..(461): unsure at all n locations
taagtcaccgcagctgcgctataacaattaaacacattgnttaatctcagggaggactaaaacctcgcctatcttttcctctntttaaaagaacaagaaaaatacagaggaagggaatccctggaggaaaccaggaagaacaaaaaactcagaattgaaagaacatgcaatggtcctcttgattgccccatatttcaagcgtaatatcgtttaactacatcggagttcacgggcgagggcaattcctcgccatccatgtgggtgagtatcaaagcacccccagaaaaggctcttttcaccatgaaaggtccttcataatttggggcccacttgcctcgtttatctntaacagcgtgggacatcttcttcaacacgaggtccccctcgttgaacttgcgcgggcgtaccttcttgccgaatgcgttctttattctttgttgatacatacgcccatggctcat

SEQ ID NO: 169294 - DNA, 275 bp, Glycine max
  unsure (1)..(275): unsure at all n locations
atcaattgtacctttcaagtaacgaagaattctttttgcggctnttagatgaggagaggtaggagcctccataaagcgacacacaactcccaccgcatatagaatatcgggccttgtattggttagataccttaaactccccacaagactcttgaagatcgtggagtctaccttctctccttcatcaaactttgataacttcaagccaccttccataggtgtgttcacgggattgcaatcaagcatattaaatttcttcaacactctttttgtgt

SEQ ID NO: 169295 - DNA, 437 bp, Glycine max
  unsure (1)..(437): unsure at all n locations
tagagagtctagtctagntcggggctaacttatgaataaataaatccaagatatacatcgtacacatttaatgaagacttcagtgaccaacttatcaataaagaaattcaagaaacctaacatcatatatatataaaagcaatgacggtgtgttacttatataaccatgaaaacaataatttaaaatgtatgtgtaaaaataaaaacttaaatagctcaacagagaatagaaaactctgatcaaactaattaaataacttaaatatacaccacaccattaagtttatatattaggggtggctagattcaatgcaaggttaatgtactgatgaattaagtaataagcaacttttatgaatgaatgtacaatcttcctacatactgacatataaaacagctgttatttcatgaatgaagaatactgttctgtcctgact

SEQ ID NO: 169296 - DNA, 409 bp, Glycine max
  unsure (1)..(409): unsure at all n locations
actattccacgcttattcgactctttataatctagagataaacctaggatctctatcacacactatgctatatggcacaccatgtaatctgnacaatctcataatatatagggaggtcaacttctccaaggaaaatcttatattaatgggaatattgtgagcaaacttggtcagtccatcaataataacctagataaaatctaaacctctgggggtcctaggtagtcctaccacaaaatccatggaaatactatcccacttccactggggtatctctgagggttgaacttacctgaaggnctctgatgttctatcttatctatctgacatactaaacatgcatacacaaagtcattaacctctctctttatgttgggccaccaaaacattacctttatatcctgataca

SEQ ID NO: 169297 - DNA, 444 bp, Glycine max
  unsure (1)..(444): unsure at all n locations
attctaagatcatgagcaactatgtgtgttctactatgacttgagaaacaaaggtgatcaaataacaagcagagatntaaaaggtactaggttgcctcctagtaacgcttctttagcgtcgcgagctggacgcgtgatgacttgtcggtcacggacctactactttgcttacctttggctatggacttgatcgcctgctggtcgaccacgggtcgtatgcaacgctccaacttttgtagatgagctgaacggctttggagatggcggcggtgcgtctgtttgccgctaccggccatnctcaagctcgtgtggagtctcgccctgcgcctgcatggggcacaatacttcttgttgaaagctangttagtacggggcctgatgaccttgctcggggcgacaggcactctgtataactgacagaggcccataatcagagctggaaac

SEQ ID NO: 169298 - DNA, 433 bp, Glycine max
  unsure (1)..(433): unsure at all n locations
actaactgattgtgagtgattaccctagttcactctggctttagtcattcattcagggaacttgccaagaaaaacgtccgattaatatttcttgattattttattcaaagatattccgaatattttattattatttttttccggatactttgatcactttattattaattttccttttttttatttaaccgatgttatagcgtgaacgatcagttggattttattttaacggtgattaaacgagattacaacacacatgatcgactgaaattcattttaccatttattacgcaagataacgactcacatgatccgttaaagctcgtcaaaagggtgcgaaatataaacgcaatgaaagtaaaagtactcaaaacaagtatggaccactatgggtgcatacaatgaatngaaagattcgatttcnggaacttac

SEQ ID NO: 169299 - DNA, 440 bp, Glycine max
  unsure (1)..(440): unsure at all n locations
agctntctttcgacgacgaatgttgcactatttatgtatgtcttgtgtgtttgcctttgtttgttcaacactctatacttgtggtagtttgaataggttgtcttaatgataagtatggaatctttgatagcgcatgaagtaagaccttgtcgaagtagaggtagaactgtggtggtcttgtaaaaagaggatgacataaagtcatctcatgtttgatttcaacctgattaaaagtcttgtcacccatctggtagggcttctttttgctttgcgaagcttctgtaacatcctttttttttgtaaaataaactaaaaggattttatttaaaaataaatagagttttaaaaaataataaaaattttgtaattaattaaataaagagaaatagtttaagggtaataagataatatatgttatagaaaaaatgtttatttattca

SEQ ID NO: 169300 - DNA, 468 bp, Glycine max
  unsure (1)..(468): unsure at all n locations
aagcctgtntacgtgattnggtgtattgttgaacagaggttgcgggtttgatataacgttcttttagtgctgatgtttaacaatgcttgttgcagggaagacgcaaatcatcaatcagttgttggtgaacaacaactgctaccttgtttgacttggctgcaaacgggtcagtgggtattttttaattttgtgtggttcatgtctttatgttagtttgcttttttatttgacaatgatatgtagtttagcaaactttatacgttataattgttcatttttttttctatttgattgctgtataaatgcattgaacacctctatttcctcttatcttttgtttgagattgcccatttcctttcatgaagacctattattgagtcaaaatcccctgctatgctatacgtgtacaccacgacatccctctgtgggatttcataatgattatgatctcattccagtgatccttc

SEQ ID NO: 169301 - DNA, 254 bp, Glycine max
agcttcatgatgaatcaagatagattcaatgagttttgatgataacaaagatgatgacaaaaacctcataagtcaagaacacttcatggtaacaaagatgatgccttcaagaatcaaagaatgagtttcagaattgaatcagaaacacttcagggttcaaaggaaatttgatttcagaattcaaaaatcaggtttcagaattcaggttcctagaatcagaaccatttttcaggactcaggattcaggattcaga

SEQ ID NO: 169302 - DNA, 475 bp, Glycine max
  unsure (1)..(475): unsure at all n locations
ttagcacgtgaagactgagcgcttagcggatagactattgcaaaaaaatatccgagtctttttttgtctatctcttcacacaagcttaaaaccccttgttcattacaaaaaaagctgaaattaatcacaatcacaagtaagatatcctaactacatgaaagatataagaatgaaaaatagaaaggggaaagaaaagctgggttgcctcccagtaagcgttcttttaacgtcactagcttgacgcatcatcctgttatccaagatccaacagagttcctacttcaaggaccttcttctcaggtctcttttcctccatcacatgcactttaagacagacattttggctaggtggatctttgtcctcatggaacaaatcaaagctaatcttctgatcttctaggcccatctgcagtatcttctttcccatgtccaccatgcagctngcaatagacatgaatgggcggccaagaatgag

SEQ ID NO: 169303 - DNA, 362 bp, Glycine max
gcttgtgctattccaagttcattattcttactctttaagccagaatgcttcctttactccttcagctagggccatgtattctgcttcagttgttgaaagagcaacaactgattattgatttgctttccaactgattgttgtaccaaacaaagtaaacatatatccagttaaggactttcttgtatctacatttcctgcaaaatctgcatctacatagcctatgattgctgcctcatgtgctgtcttcttgtaccttaatccagctttcaaagatccatttagataccttagtgtccactttacagcttccagtgtgcactggcaggatcttccatgaatctgcttataatacttacagcata

SEQ ID NO: 169304 - DNA, 395 bp, Glycine max
caaacaaaattaccttctatgaagatggcattcgatcaggttcatttcaccaattagagtcacgaaagaaatgtacacacgcacatttaaaaactatttagcagtaatagttgtagcagtagtgagtagtctactattactacctgatcataaatcgtgttgatctcggatccccctatcttcctactttgccacgtagctagagaaaagattattacaagttgagtaacaaaatgagagaaaaaatgtactagggataataataaaataataatagtaataataataatatatttttaataaaaatgtaccagggataataataaattaataataatatatattgttttatatattattattaataataaataaaactattccttgcatatgga

SEQ ID NO: 169305 - DNA, 416 bp, Glycine max
  unsure (1)..(416): unsure at all n locations
gatcttaagtcacctgcngcatcaagcttctcgggccaatcctgcgattgtaattatttgaaagttagttttaccagngggacactactcttaaaacaaaaatggcgtacaacctgctcccataaatacaaacatcaatgtaaatttagagcaagcttatgcgcatatttcctcacgaacgttcacttgcacaagacatgtctataactaggaaaaatgcacccatatacaatcaagggagcttcattacctagattatgtacttccaaggtgtatttgttatttacatcacacacgcctccttggctgaatttacatacatgcatactcaaagcattttggggtccaaaaactgacatgcgctcatcttggtattttaaaaccctacatatacaacttccgagaatcttgctcct

SEQ ID NO: 169306 - DNA, 451 bp, Glycine max
  unsure (1)..(451): unsure at all n locations
tgccacccagcttgctcaggcgagctaggttgcttcctccagaatgcaccgccttctggtggaacttcctggaaggcccaagtgggcctgattgctatttgtacccccctgtttactaaatacatccccttgcctttttttgttgattctttttccataacgttacagaactttacgaattacgtaatgatacttgttttctttccgtaatgtcacgaaaccttacagattacgtaatcatcccttctttggctttcgggatgttacggaacttcacggattgtgcaacaatgcttcctttntacttccggcatgtcacagaacttcacggattgtgcaacaatgcttcattttgacttccggtatctcacggaacttcacggattggctaacgatgggtgccaagtacctcaaagtggtcaaacgagggtcgcatcccaacaaacggatg

SEQ ID NO: 169307 - DNA, 429 bp, Glycine max
agctttagccttggattgttccatgttgttgcccccctatctctaacagcattgttaagtcttatgtgaagcataagtgttgtgctcttgcataaatggaactcaccatgtgtggcatgtactagagacgtaatggtgtactcttgcatacgtgcctcttacaaagtggcttgtattggagacatagtgatatgctcttgcgtatatgtcactcgctgtgagtggcatatactagagtcatggtggtatacttttgcatatgtgcctcttacaaagtgacacgtattggagacatggtagtgtgctcatgtgcacatgtcatttgccatgggtgacacatataggagacgtagtggtgtgctcttgcatacatctcactcgttgtgggtgacacgtactggagacgtagtggcgtgttgttgatacatg

SEQ ID NO: 169308 - DNA, 474 bp, Glycine max
  unsure (1)..(474): unsure at all n locations
aggaccttgaaactcagctngtatgaaggtctttattataatgagaaggaacaaatcttcttctcattaatcttttcatgtcctcctaagtattcaccaaaggttctccaaatcttcttgttgttagtcccaccaaataagagcatagtcagtgaactccatggatgccaccttcatcatttgatttggcttcttctggaggatcttcattgcttcctttccctttccctttagaatcttgtccatgaatatgcatttgttctaaagattctgcaacatcatctaaaatatcctttcttggagaaatagcattagattcatcaaaggaaacatgaatagattcttcaatagtcatagttcttttattatatattctataagctttactatgcaaggaataaccaagaaaaattccttcatctgacttagcatcaaatnttcctaagttntcctttccattatntaatacaaagc

SEQ ID NO: 169309 - DNA, 439 bp, Glycine max
  unsure (1)..(439): unsure at all n locations
agcttcaccaaccagtcactgtgatttattattctgtgctggataatggaaactcattnttaactgaaactcattgcagagatgctagcagtgagaggaaacccctacgcataggtcaatctgccatgaaggaacctctccagtccttaagactgaaaccacctcaaccgaatatttctccagctatgagcattttacagaaattctatggcctcaaatcttcaaattcaagagatacgttgaatggaacagaaatggcagtttattcatcctcaacttctgatcattctaatggggaatggcttcccaaagccttgccaatttctgacctgccatcagcatcaaatgattaccccaggtcaacaaatttagtgtatgatctactgaccggggatgatgaatatgtgcctcttgctgaaattggggatgcatgagctga

SEQ ID NO: 169310 - DNA, 458 bp, Glycine max
  unsure (1)..(458): unsure at all n locations
gaaactaagctcgaagcncaagattcttacaaaaaaagaaaaaattgttttttggcaaaaaaaaatgccataagtgctaaagttaaaaaaaattgaaataagggcagaaaaagagaggtgtcataaatgccaaaaagaaaagtgttgtaagaggaataaaggctgaaaaacaaataagcctaggcaggaaataagtgaaaatttttctaaggatgcatgctctcttataatcctaagtttttgaaatcccagaaaaaccatgatttcttgttcagcctggccccgttacaagccaataaaagtccttagtgatccaccaagtgtaagtaaaaataactttaactaagaagaagtgcaaaatttgggaatcttaattgcaggtcatagaatttcaaacactcaccccagacacttgtgcgcagagagaaacactaaccttgtgaggaaagtgaggcaag

SEQ ID NO: 169311 - DNA, 168 bp, Glycine max
ctgcagcttgcatgcacggtagttattttttttttaaagagaaacaaatgtatataaaatgattatagtcctttcaggatagccctaaattttgtttggaaatacaaagataacaaggtatgcttgctttaaaatttccaaatacgttaaaaacaagctttttatggt

SEQ ID NO: 169312 - DNA, 474 bp, Glycine max
  unsure (1)..(474): unsure at all n locations
tgtccctcaacaagtgtacttgagcaacataaggttttttgttttgcaatagctgtngggctaacacctgcattttcgattcaaattaacaaggaaaatcttgcatcagcaaacacaaatggcaaataagttgcatcacaagatttcaaaacgtcgaaagacagaacttattttgcaaaagtatgataacaaaaaaatgatatgcagtaatatcttttttcttttttcttggattgataatactatactcaaatatatattaaggagattgcactataatagcatatggtgaggtgaacgcccacatttcagattcaaattaattaaccagaaatcttacatcagcaaacacaaagcaaggtgacaagactttgaaagactgagaacttgcattgcacaaatatgataacaaaattaatagtaatgattcatcatgctntcaattgcttaaatgtataagatgcgagaatctca

SEQ ID NO: 169313 - DNA, 375 bp, Glycine max
tttatagcactaaaaaactgtcaactttctacctatcaattataacagaaaactattaaagagaaataacaattaactaaaataaatgttttgcaaagtataagaaaaagtaaattattgttgactgagccaattcttgacaaaacatttatacaatcagtttcaacacatgtgtgtaacagggtttggggattggtgaaggtgctaaaaattatatataggcgtgcatggctctccttcaatgcatgcgccatcatcctcgtgaagtaactgaaatctcaagttgtaattatcataaaaaatcaattagactaatctaactatacatggatcattttatctggaaatgaaatgatgactaaattacttaaatat

SEQ ID NO: 169314 - DNA, 449 bp, Glycine max
  unsure (1)..(449): unsure at all n locations
ctagctgtaacanaggagatgaanataacaaagattcgactattgtgcggngcgacatcaatggtggtgggagggagtgacgttgatgacaattcatagagtgagggctaagaactttaaggtttttcaaaggagtgaaacatccaaatataacactttgtttccttgtttgtttagtcattaaaggtgaaacaacatcattttgaataatttgaggaaaaaaaactgtgatccaattttagtcaattaattatggattcaatcacattgagttataaacagtttgattgcatgtcaagttcgataatcatttcaacttagtcagataatcaatttgcagtttgcggtttaactagtcagaccgaccgagttaatccaaattttaaaactatgatttcactcttttaatttttctattttggatattctggaattattcattcaatgtt
